United States Patent Application Publication US 2025/0313840 A1 - sequence listing, part 2

SEQ ID NO: 22363 - RNA, 19 nt, synthetic construct
  source 1..19: mol_type = other RNA
ccaggtctcattcacctgc

SEQ ID NO: 22364 - RNA, 19 nt, synthetic construct
  source 1..19: mol_type = other RNA
ggcccggggcctggtcacg

SEQ ID NO: 22365 - RNA, 19 nt, synthetic construct
  source 1..19: mol_type = other RNA
tcctcctcacaggagtagc

SEQ ID NO: 22366 - RNA, 19 nt, synthetic construct
  source 1..19: mol_type = other RNA
gcagggcactgtcctctcc

SEQ ID NO: 22367 - RNA, 19 nt, synthetic construct
  source 1..19: mol_type = other RNA
gtgcctggggggcagaagc

SEQ ID NO: 22368 - RNA, 19 nt, synthetic construct
  source 1..19: mol_type = other RNA
gggcactgcccgaggggca

SEQ ID NO: 22369 - RNA, 19 nt, synthetic construct
  source 1..19: mol_type = other RNA
gagcaggtgccagggcacg

SEQ ID NO: 22370 - RNA, 19 nt, synthetic construct
  source 1..19: mol_type = other RNA
cacaggcgtgcacatagga

SEQ ID NO: 22371 - RNA, 19 nt, synthetic construct
  source 1..19: mol_type = other RNA
gcacaggcgtgcacatagg

SEQ ID NO: 22372 - RNA, 19 nt, synthetic construct
  source 1..19: mol_type = other RNA
ggttgtagaagtcacagaa

SEQ ID NO: 22373 - RNA, 19 nt, synthetic construct
  source 1..19: mol_type = other RNA
ctggtagtgccactcacag

SEQ ID NO: 22374 - RNA, 19 nt, synthetic construct
  source 1..19: mol_type = other RNA
gggaggggccacagggcac

SEQ ID NO: 22375 - RNA, 19 nt, synthetic construct
  source 1..19: mol_type = other RNA
accaggcacactggggctc

SEQ ID NO: 22376 - RNA, 19 nt, synthetic construct
  source 1..19: mol_type = other RNA
actcccgcagggggacacc

SEQ ID NO: 22377 - RNA, 19 nt, synthetic construct
  source 1..19: mol_type = other RNA
accaggcacactggggctc

SEQ ID NO: 22378 - RNA, 19 nt, synthetic construct
  source 1..19: mol_type = other RNA
actcccgcagggggacacc

SEQ ID NO: 22379 - RNA, 19 nt, synthetic construct
  source 1..19: mol_type = other RNA
accaggcacactggggctc

SEQ ID NO: 22380 - RNA, 19 nt, synthetic construct
  source 1..19: mol_type = other RNA
actcccgcagggggacacc

SEQ ID NO: 22381 - RNA, 19 nt, synthetic construct
  source 1..19: mol_type = other RNA
accaggcacactggggctc

SEQ ID NO: 22382 - RNA, 19 nt, synthetic construct
  source 1..19: mol_type = other RNA
ggcagaagcagccctccgc

SEQ ID NO: 22383 - RNA, 19 nt, synthetic construct
  source 1..19: mol_type = other RNA
caggagtagcagcagccgg

SEQ ID NO: 22384 - RNA, 19 nt, synthetic construct
  source 1..19: mol_type = other RNA
caccgtctcctcgtggacc

SEQ ID NO: 22385 - RNA, 19 nt, synthetic construct
  source 1..19: mol_type = other RNA
gcaccgtctcctcgtggac

SEQ ID NO: 22386 - RNA, 19 nt, synthetic construct
  source 1..19: mol_type = other RNA
gggatggctgtaaagctgg

SEQ ID NO: 22387 - RNA, 19 nt, synthetic construct
  source 1..19: mol_type = other RNA
gggatggctgtaaagctgg

SEQ ID NO: 22388 - RNA, 19 nt, synthetic construct
  source 1..19: mol_type = other RNA
gggatggctgtaaagctgg

SEQ ID NO: 22389 - RNA, 19 nt, synthetic construct
  source 1..19: mol_type = other RNA
tggggtgtgggaagtcacc

SEQ ID NO: 22390 - RNA, 19 nt, synthetic construct
  source 1..19: mol_type = other RNA
gcacatttcttggacagaa

SEQ ID NO: 22391 - RNA, 19 nt, synthetic construct
  source 1..19: mol_type = other RNA
caggggcagctgcgtgtag

SEQ ID NO: 22392 - RNA, 19 nt, synthetic construct
  source 1..19: mol_type = other RNA
ttctgcatgtacttggtgc

SEQ ID NO: 22393 - RNA, 19 nt, synthetic construct
  source 1..19: mol_type = other RNA
ggcccaactcccgcagggg

SEQ ID NO: 22394 - RNA, 19 nt, synthetic construct
  source 1..19: mol_type = other RNA
ggcccaactcccgcagggg

SEQ ID NO: 22395 - RNA, 19 nt, synthetic construct
  source 1..19: mol_type = other RNA
ggcccaactcccgcagggg

SEQ ID NO: 22396 - RNA, 19 nt, synthetic construct
  source 1..19: mol_type = other RNA
ggtgcaggggcactgcccg

SEQ ID NO: 22397 - RNA, 19 nt, synthetic construct
  source 1..19: mol_type = other RNA
gtgtagatggagttgagga

SEQ ID NO: 22398 - RNA, 19 nt, synthetic construct
  source 1..19: mol_type = other RNA
cctgtcctcataggtgcag

SEQ ID NO: 22399 - RNA, 19 nt, synthetic construct
  source 1..19: mol_type = other RNA
ggctggggaagacagtgac

SEQ ID NO: 22400 - RNA, 19 nt, synthetic construct
  source 1..19: mol_type = other RNA
tggagtcaacctgggagcg

SEQ ID NO: 22401 - RNA, 19 nt, synthetic construct
  source 1..19: mol_type = other RNA
gccacactgggccacgcac

SEQ ID NO: 22402 - RNA, 19 nt, synthetic construct
  source 1..19: mol_type = other RNA
cagggagtagagaagtggg

SEQ ID NO: 22403 - RNA, 19 nt, synthetic construct
  source 1..19: mol_type = other RNA
tggtgcagacgccgtccct

SEQ ID NO: 22404 - RNA, 19 nt, synthetic construct
  source 1..19: mol_type = other RNA
gtcagcactgtgggggtgt

SEQ ID NO: 22405 - RNA, 19 nt, synthetic construct
  source 1..19: mol_type = other RNA
gtcagcactgtgggggtgt

SEQ ID NO: 22406 - RNA, 19 nt, synthetic construct
  source 1..19: mol_type = other RNA
gcacctggccaccgtgcag

SEQ ID NO: 22407 - RNA, 19 nt, synthetic construct
  source 1..19: mol_type = other RNA
gcaccgttgggtcctgggt

SEQ ID NO: 22408 - RNA, 19 nt, synthetic construct
  source 1..19: mol_type = other RNA
gcgtgagtattccacaaag

SEQ ID NO: 22409 - RNA, 19 nt, synthetic construct
  source 1..19: mol_type = other RNA
gggggccgatgtggggctg

SEQ ID NO: 22410 - RNA, 19 nt, synthetic construct
  source 1..19: mol_type = other RNA
gggggccgatgtggggctg

SEQ ID NO: 22411 - RNA, 19 nt, synthetic construct
  source 1..19: mol_type = other RNA
gggggccgatgtggggctg

SEQ ID NO: 22412 - RNA, 19 nt, synthetic construct
  source 1..19: mol_type = other RNA
gggccgggcttgtcgtgga

SEQ ID NO: 22413 - RNA, 19 nt, synthetic construct
  source 1..19: mol_type = other RNA
gctctcggcctggcactct

SEQ ID NO: 22414 - RNA, 19 nt, synthetic construct
  source 1..19: mol_type = other RNA
ccaggaagatccccatgta

SEQ ID NO: 22415 - RNA, 19 nt, synthetic construct
  source 1..19: mol_type = other RNA
ctctgtccactgacaccgg

SEQ ID NO: 22416 - RNA, 19 nt, synthetic construct
  source 1..19: mol_type = other RNA
gcaggttcccaaactggag

SEQ ID NO: 22417 - RNA, 19 nt, synthetic construct
  source 1..19: mol_type = other RNA
gcaggtgccagggcacggc

SEQ ID NO: 22418 - RNA, 19 nt, synthetic construct
  source 1..19: mol_type = other RNA
acttggggcagttctgcat

SEQ ID NO: 22419 - RNA, 19 nt, synthetic construct
  source 1..19: mol_type = other RNA
gagccggtggctgcactcc

SEQ ID NO: 22420 - RNA, 19 nt, synthetic construct
  source 1..19: mol_type = other RNA
tccctagggcagaggaggg

SEQ ID NO: 22421 - RNA, 19 nt, synthetic construct
  source 1..19: mol_type = other RNA
tccctagggcagaggaggg

SEQ ID NO: 22422 - RNA, 19 nt, synthetic construct
  source 1..19: mol_type = other RNA
tccctagggcagaggaggg

SEQ ID NO: 22423 - RNA, 19 nt, synthetic construct
  source 1..19: mol_type = other RNA
tccctagggcagaggaggg

SEQ ID NO: 22424 - RNA, 19 nt, synthetic construct
  source 1..19: mol_type = other RNA
gcagggagtagagaagtgg

SEQ ID NO: 22425 - RNA, 19 nt, synthetic construct
  source 1..19: mol_type = other RNA
gacaggagtcctcctcaca

SEQ ID NO: 22426 - RNA, 19 nt, synthetic construct
  source 1..19: mol_type = other RNA
gtgcaggggcactgcccga

SEQ ID NO: 22427 - RNA, 19 nt, synthetic construct
  source 1..19: mol_type = other RNA
aggccacaggtctggttgg

SEQ ID NO: 22428 - RNA, 19 nt, synthetic construct
  source 1..19: mol_type = other RNA
ggccacccctgggacagtg

SEQ ID NO: 22429 - RNA, 19 nt, synthetic construct
  source 1..19: mol_type = other RNA
ggcagttctgcatgtactt

SEQ ID NO: 22430 - RNA, 19 nt, synthetic construct
  source 1..19: mol_type = other RNA
aaacagcccacgtccagcg

SEQ ID NO: 22431 - RNA, 19 nt, synthetic construct
  source 1..19: mol_type = other RNA
ggggtaggcacagcaggct

SEQ ID NO: 22432 - RNA, 19 nt, synthetic construct
  source 1..19: mol_type = other RNA
agcactgtgggggtgtggg

SEQ ID NO: 22433 - RNA, 19 nt, synthetic construct
  source 1..19: mol_type = other RNA
agcactgtgggggtgtggg

SEQ ID NO: 22434 - RNA, 19 nt, synthetic construct
  source 1..19: mol_type = other RNA
attccacgacctggcccaa

SEQ ID NO: 22435 - RNA, 19 nt, synthetic construct
  source 1..19: mol_type = other RNA
attccacgacctggcccaa

SEQ ID NO: 22436 - RNA, 19 nt, synthetic construct
  source 1..19: mol_type = other RNA
attccacgacctggcccaa

SEQ ID NO: 22437 - RNA, 19 nt, synthetic construct
  source 1..19: mol_type = other RNA
attccacgacctggcccaa

SEQ ID NO: 22438 - RNA, 19 nt, synthetic construct
  source 1..19: mol_type = other RNA
ctgcagatgcactcgcact

SEQ ID NO: 22439 - RNA, 19 nt, synthetic construct
  source 1..19: mol_type = other RNA
acacaggcgcccgcgtcat

SEQ ID NO: 22440 - RNA, 19 nt, synthetic construct
  source 1..19: mol_type = other RNA
tggccccccgcgtgggcgc

SEQ ID NO: 22441 - RNA, 19 nt, synthetic construct
  source 1..19: mol_type = other RNA
gcagttcgagtggaagggc

SEQ ID NO: 22442 - RNA, 19 nt, synthetic construct
  source 1..19: mol_type = other RNA
gcaggtgcagccgtccaca

SEQ ID NO: 22443 - RNA, 19 nt, synthetic construct
  source 1..19: mol_type = other RNA
cgtcaaaggtggaatagtg

SEQ ID NO: 22444 - RNA, 19 nt, synthetic construct
  source 1..19: mol_type = other RNA
gggttcagggggctcaggc

SEQ ID NO: 22445 - RNA, 19 nt, synthetic construct
  source 1..19: mol_type = other RNA
ggcaggtgcagccgtccac

SEQ ID NO: 22446 - RNA, 19 nt, synthetic construct
  source 1..19: mol_type = other RNA
cggtggtcccacaggggat

SEQ ID NO: 22447 - RNA, 19 nt, synthetic construct
  source 1..19: mol_type = other RNA
ctcatgaggacataggtgc

SEQ ID NO: 22448 - RNA, 19 nt, synthetic construct
  source 1..19: mol_type = other RNA
tcttgctgaaaccgctgct

SEQ ID NO: 22449 - RNA, 19 nt, synthetic construct
  source 1..19: mol_type = other RNA
gaagaggctgtagggcagc

SEQ ID NO: 22450 - RNA, 19 nt, synthetic construct
  source 1..19: mol_type = other RNA
tcatgaggacataggtgca

SEQ ID NO: 22451 - RNA, 19 nt, synthetic construct
  source 1..19: mol_type = other RNA
ggggcagaagcagccgtcc

SEQ ID NO: 22452 - RNA, 19 nt, synthetic construct
  source 1..19: mol_type = other RNA
cactgcccgaggggcaggc

SEQ ID NO: 22453 - RNA, 19 nt, synthetic construct
  source 1..19: mol_type = other RNA
cgcacatctggccctggtg

SEQ ID NO: 22454 - RNA, 19 nt, synthetic construct
  source 1..19: mol_type = other RNA
gaaacagcccacgtccagc

SEQ ID NO: 22455 - RNA, 19 nt, synthetic construct
  source 1..19: mol_type = other RNA
caaaggtgatgaagtggcc

SEQ ID NO: 22456 - RNA, 19 nt, synthetic construct
  source 1..19: mol_type = other RNA
agcaggtggtgccggtggt

SEQ ID NO: 22457 - RNA, 19 nt, synthetic construct
  source 1..19: mol_type = other RNA
ccttccaggccaggcaggt

SEQ ID NO: 22458 - RNA, 19 nt, synthetic construct
  source 1..19: mol_type = other RNA
ggcctcaaggctgtgagcg

SEQ ID NO: 22459 - RNA, 19 nt, synthetic construct
  source 1..19: mol_type = other RNA
aggtgcaggcctcaaggct

SEQ ID NO: 22460 - RNA, 19 nt, synthetic construct
  source 1..19: mol_type = other RNA
ccagctggaccagcggcag

SEQ ID NO: 22461 - RNA, 19 nt, synthetic construct
  source 1..19: mol_type = other RNA
ggcacagcaggctccgtgc

SEQ ID NO: 22462 - RNA, 19 nt, synthetic construct
  source 1..19: mol_type = other RNA
agctctcggcctggcactc

SEQ ID NO: 22463 - RNA, 19 nt, synthetic construct
  source 1..19: mol_type = other RNA
gctgctgggcagcagggtc

SEQ ID NO: 22464 - RNA, 19 nt, synthetic construct
  source 1..19: mol_type = other RNA
gaccaggcacactggggct

SEQ ID NO: 22465 - RNA, 19 nt, synthetic construct
  source 1..19: mol_type = other RNA
cccggagtggaggagggca

SEQ ID NO: 22466 - RNA, 19 nt, synthetic construct
  source 1..19: mol_type = other RNA
gctgctgggcagcagggtc

SEQ ID NO: 22467 - RNA, 19 nt, synthetic construct
  source 1..19: mol_type = other RNA
gaccaggcacactggggct

SEQ ID NO: 22468 - RNA, 19 nt, synthetic construct
  source 1..19: mol_type = other RNA
gctgctgggcagcagggtc

SEQ ID NO: 22469 - RNA, 19 nt, synthetic construct
  source 1..19: mol_type = other RNA
gaccaggcacactggggct

SEQ ID NO: 22470 - RNA, 19 nt, synthetic construct
  source 1..19: mol_type = other RNA
gctgctgggcagcagggtc

SEQ ID NO: 22471 - RNA, 19 nt, synthetic construct
  source 1..19: mol_type = other RNA
gaccaggcacactggggct

SEQ ID NO: 22472 - RNA, 19 nt, synthetic construct
  source 1..19: mol_type = other RNA
cccggagtggaggagggca

SEQ ID NO: 22473 - RNA, 19 nt, synthetic construct
  source 1..19: mol_type = other RNA
tccaaatgccctgcagaag

SEQ ID NO: 22474 - RNA, 19 nt, synthetic construct
  source 1..19: mol_type = other RNA
ccagtcactgcacactccc

SEQ ID NO: 22475 - RNA, 19 nt, synthetic construct
  source 1..19: mol_type = other RNA
caggatgcaggctgtgggg

SEQ ID NO: 22476 - RNA, 19 nt, synthetic construct
  source 1..19: mol_type = other RNA
cgcacaggccgcagaccct

SEQ ID NO: 22477 - RNA, 19 nt, synthetic construct
  source 1..19: mol_type = other RNA
gaagttcccgcacaggccg

SEQ ID NO: 22478 - RNA, 19 nt, synthetic construct
  source 1..19: mol_type = other RNA
cccaactcccgcaggggga

SEQ ID NO: 22479 - RNA, 19 nt, synthetic construct
  source 1..19: mol_type = other RNA
gcccaactcccgcaggggg

SEQ ID NO: 22480 - RNA, 19 nt, synthetic construct
  source 1..19: mol_type = other RNA
cccaactcccgcaggggga

SEQ ID NO: 22481 - RNA, 19 nt, synthetic construct
  source 1..19: mol_type = other RNA
gcccaactcccgcaggggg

SEQ ID NO: 22482 - RNA, 19 nt, synthetic construct
  source 1..19: mol_type = other RNA
cccaactcccgcaggggga

SEQ ID NO: 22483 - RNA, 19 nt, synthetic construct
  source 1..19: mol_type = other RNA
gcccaactcccgcaggggg

SEQ ID NO: 22484 - RNA, 19 nt, synthetic construct
  source 1..19: mol_type = other RNA
tggtgcaggtgccgcactg

SEQ ID NO: 22485 - RNA, 19 nt, synthetic construct
  source 1..19: mol_type = other RNA
tcccacacaggccgcacat

SEQ ID NO: 22486 - RNA, 19 nt, synthetic construct
  source 1..19: mol_type = other RNA
gttggtgcaggtgccgcac

SEQ ID NO: 22487 - RNA, 19 nt, synthetic construct
  source 1..19: mol_type = other RNA
gcttttctgcagagaggct

SEQ ID NO: 22488 - RNA, 19 nt, synthetic construct
  source 1..19: mol_type = other RNA
gacctggctcagcatcaga

SEQ ID NO: 22489 - RNA, 19 nt, synthetic construct
  source 1..19: mol_type = other RNA
gttgaagcacatcttgaac

SEQ ID NO: 22490 - RNA, 19 nt, synthetic construct
  source 1..19: mol_type = other RNA
gttgaagcacatcttgaac

SEQ ID NO: 22491 - RNA, 19 nt, synthetic construct
  source 1..19: mol_type = other RNA
gttgaagcacatcttgaac

SEQ ID NO: 22492 - RNA, 19 nt, synthetic construct
  source 1..19: mol_type = other RNA
gttgaagcacatcttgaac

SEQ ID NO: 22493 - RNA, 19 nt, synthetic construct
  source 1..19: mol_type = other RNA
ggaccggctacgcgtggca

SEQ ID NO: 22494 - RNA, 19 nt, synthetic construct
  source 1..19: mol_type = other RNA
ttcacgcaggtgacgttgg

SEQ ID NO: 22495 - RNA, 19 nt, synthetic construct
  source 1..19: mol_type = other RNA
ttgttcacgcaggtgacgt

SEQ ID NO: 22496 - RNA, 19 nt, synthetic construct
  source 1..19: mol_type = other RNA
cccccaccacggaccggct

SEQ ID NO: 22497 - RNA, 19 nt, synthetic construct
  source 1..19: mol_type = other RNA
cagaacacacggatttcat

SEQ ID NO: 22498 - RNA, 19 nt, synthetic construct
  source 1..19: mol_type = other RNA
cagaacacacggatttcat

SEQ ID NO: 22499 - RNA, 19 nt, synthetic construct
  source 1..19: mol_type = other RNA
cagaacacacggatttcat

SEQ ID NO: 22500 - RNA, 19 nt, synthetic construct
  source 1..19: mol_type = other RNA
cagaacacacggatttcat

SEQ ID NO: 22501 - RNA, 19 nt, synthetic construct
  source 1..19: mol_type = other RNA
aacacacggatttcatagt

SEQ ID NO: 22502 - RNA, 19 nt, synthetic construct
  source 1..19: mol_type = other RNA
aacacacggatttcatagt

SEQ ID NO: 22503 - RNA, 19 nt, synthetic construct
  source 1..19: mol_type = other RNA
aacacacggatttcatagt

SEQ ID NO: 22504 - RNA, 19 nt, synthetic construct
  source 1..19: mol_type = other RNA
aacacacggatttcatagt

SEQ ID NO: 22505 - RNA, 19 nt, synthetic construct
  source 1..19: mol_type = other RNA
cgggtccgacactttgatg

SEQ ID NO: 22506 - RNA, 19 nt, synthetic construct
  source 1..19: mol_type = other RNA
ggcaggctgtatggggccg

SEQ ID NO: 22507 - RNA, 19 nt, synthetic construct
  source 1..19: mol_type = other RNA
tcacgcaggtgacgttggc

SEQ ID NO: 22508 - RNA, 19 nt, synthetic construct
  source 1..19: mol_type = other RNA
gtacactttggtgggtggg

SEQ ID NO: 22509 - RNA, 19 nt, synthetic construct
  source 1..19: mol_type = other RNA
tgcacactccccgggcgcg

SEQ ID NO: 22510 - RNA, 19 nt, synthetic construct
  source 1..19: mol_type = other RNA
agggacacagaagggcgtg

SEQ ID NO: 22511 - RNA, 19 nt, synthetic construct
  source 1..19: mol_type = other RNA
tcccccaccacggaccggc

SEQ ID NO: 22512 - RNA, 19 nt, synthetic construct
  source 1..19: mol_type = other RNA
gtcccccaccacggaccgg

SEQ ID NO: 22513 - RNA, 19 nt, synthetic construct
  source 1..19: mol_type = other RNA
aaggtgggccacaggctct

SEQ ID NO: 22514 - RNA, 19 nt, synthetic construct
  source 1..19: mol_type = other RNA
gcagaacacacggatttca

SEQ ID NO: 22515 - RNA, 19 nt, synthetic construct
  source 1..19: mol_type = other RNA
gcagaacacacggatttca

SEQ ID NO: 22516 - RNA, 19 nt, synthetic construct
  source 1..19: mol_type = other RNA
gcagaacacacggatttca

SEQ ID NO: 22517 - RNA, 19 nt, synthetic construct
  source 1..19: mol_type = other RNA
gcagaacacacggatttca

SEQ ID NO: 22518 - RNA, 19 nt, synthetic construct
  source 1..19: mol_type = other RNA
actgcacactccccgggcg

SEQ ID NO: 22519 - RNA, 19 nt, synthetic construct
  source 1..19: mol_type = other RNA
gcttgtacactttggtggg

SEQ ID NO: 22520 - RNA, 19 nt, synthetic construct
  source 1..19: mol_type = other RNA
gttgtgggcatagaactcg

SEQ ID NO: 22521 - RNA, 19 nt, synthetic construct
  source 1..19: mol_type = other RNA
cggttgtcacccacgcacc

SEQ ID NO: 22522 - RNA, 19 nt, synthetic construct
  source 1..19: mol_type = other RNA
cgccagagccaacaccagc

SEQ ID NO: 22523 - RNA, 19 nt, synthetic construct
  source 1..19: mol_type = other RNA
cacgcaggtgacgttggcc

SEQ ID NO: 22524 - RNA, 19 nt, synthetic construct
  source 1..19: mol_type = other RNA
tccagcgtgtggcagctcc

SEQ ID NO: 22525 - RNA, 19 nt, synthetic construct
  source 1..19: mol_type = other RNA
tgcggtcacagtccacctg

SEQ ID NO: 22526 - RNA, 19 nt, synthetic construct
  source 1..19: mol_type = other RNA
ccgtcccgctggagacagt

SEQ ID NO: 22527 - RNA, 19 nt, synthetic construct
  source 1..19: mol_type = other RNA
caggggcttgcactgcacc

SEQ ID NO: 22528 - RNA, 19 nt, synthetic construct
  source 1..19: mol_type = other RNA
atgggcgcagggacacaga

SEQ ID NO: 22529 - RNA, 19 nt, synthetic construct
  source 1..19: mol_type = other RNA
agtcgtccctctggttgtt

SEQ ID NO: 22530 - RNA, 19 nt, synthetic construct
  source 1..19: mol_type = other RNA
ggcagctccggaggcactc

SEQ ID NO: 22531 - RNA, 19 nt, synthetic construct
  source 1..19: mol_type = other RNA
gacacagtggacacgctga

SEQ ID NO: 22532 - RNA, 19 nt, synthetic construct
  source 1..19: mol_type = other RNA
ccacggaccggctacgcgt

SEQ ID NO: 22533 - RNA, 19 nt, synthetic construct
  source 1..19: mol_type = other RNA
gcgtcccccaccacggacc

SEQ ID NO: 22534 - RNA, 19 nt, synthetic construct
  source 1..19: mol_type = other RNA
tggcagctccggaggcact

SEQ ID NO: 22535 - RNA, 19 nt, synthetic construct
  source 1..19: mol_type = other RNA
gccagagccaacaccagcg

SEQ ID NO: 22536 - RNA, 19 nt, synthetic construct
  source 1..19: mol_type = other RNA
cgcacggatgttggagtag

SEQ ID NO: 22537 - RNA, 19 nt, synthetic construct
  source 1..19: mol_type = other RNA
cgcacggatgttggagtag

SEQ ID NO: 22538 - RNA, 19 nt, synthetic construct
  source 1..19: mol_type = other RNA
cgcacggatgttggagtag

SEQ ID NO: 22539 - RNA, 19 nt, synthetic construct
  source 1..19: mol_type = other RNA
cgcacggatgttggagtag

SEQ ID NO: 22540 - RNA, 19 nt, synthetic construct
  source 1..19: mol_type = other RNA
gggtccgacactttgatgg

SEQ ID NO: 22541 - RNA, 19 nt, synthetic construct
  source 1..19: mol_type = other RNA
ggagacagtcgtccctctg

SEQ ID NO: 22542 - RNA, 19 nt, synthetic construct
  source 1..19: mol_type = other RNA
cactgcacactccccgggc

SEQ ID NO: 22543 - RNA, 19 nt, synthetic construct
  source 1..19: mol_type = other RNA
cttgtacactttggtgggt

SEQ ID NO: 22544 - RNA, 19 nt, synthetic construct
  source 1..19: mol_type = other RNA
cctgctggcccctcaccct

SEQ ID NO: 22545 - RNA, 19 nt, synthetic construct
  source 1..19: mol_type = other RNA
ctgggctgggttgagcaga

SEQ ID NO: 22546 - RNA, 19 nt, synthetic construct
  source 1..19: mol_type = other RNA
tgtacactttggtgggtgg

SEQ ID NO: 22547 - RNA, 19 nt, synthetic construct
  source 1..19: mol_type = other RNA
gcagctccggaggcactcg

SEQ ID NO: 22548 - RNA, 19 nt, synthetic construct
  source 1..19: mol_type = other RNA
cgtcccgctggagacagtc

SEQ ID NO: 22549 - RNA, 19 nt, synthetic construct
  source 1..19: mol_type = other RNA
tccagggcgtcccagtgac

SEQ ID NO: 22550 - RNA, 19 nt, synthetic construct
  source 1..19: mol_type = other RNA
cgtcccccaccacggaccg

SEQ ID NO: 22551 - RNA, 19 nt, synthetic construct
  source 1..19: mol_type = other RNA
ccagggcgtcccagtgaca

SEQ ID NO: 22552 - RNA, 19 nt, synthetic construct
  source 1..19: mol_type = other RNA
gaacacacggatttcatag

SEQ ID NO: 22553 - RNA, 19 nt, synthetic construct
  source 1..19: mol_type = other RNA
gaacacacggatttcatag

SEQ ID NO: 22554 - RNA, 19 nt, synthetic construct
  source 1..19: mol_type = other RNA
gaacacacggatttcatag

SEQ ID NO: 22555 - RNA, 19 nt, synthetic construct
  source 1..19: mol_type = other RNA
gaacacacggatttcatag

SEQ ID NO: 22556 - RNA, 19 nt, synthetic construct
  source 1..19: mol_type = other RNA
cagggacacagaagggcgt

SEQ ID NO: 22557 - RNA, 19 nt, synthetic construct
  source 1..19: mol_type = other RNA
gccttgcctggaccagcct

SEQ ID NO: 22558 - RNA, 19 nt, synthetic construct
  source 1..19: mol_type = other RNA
gcaggggcttgcactgcac

SEQ ID NO: 22559 - RNA, 19 nt, synthetic construct
  source 1..19: mol_type = other RNA
tgtggcagctccggaggca

SEQ ID NO: 22560 - RNA, 19 nt, synthetic construct
  source 1..19: mol_type = other RNA
gaggatccaggtggtccct

SEQ ID NO: 22561 - RNA, 19 nt, synthetic construct
  source 1..19: mol_type = other RNA
tgaggatccaggtggtccc

SEQ ID NO: 22562 - RNA, 19 nt, synthetic construct
  source 1..19: mol_type = other RNA
gaggatccaggtggtccct

SEQ ID NO: 22563 - RNA, 19 nt, synthetic construct
  source 1..19: mol_type = other RNA
tgaggatccaggtggtccc

SEQ ID NO: 22564 - RNA, 19 nt, synthetic construct
  source 1..19: mol_type = other RNA
gaggatccaggtggtccct

SEQ ID NO: 22565 - RNA, 19 nt, synthetic construct
  source 1..19: mol_type = other RNA
tgaggatccaggtggtccc

SEQ ID NO: 22566 - RNA, 19 nt, synthetic construct
  source 1..19: mol_type = other RNA
gaggatccaggtggtccct

SEQ ID NO: 22567 - RNA, 19 nt, synthetic construct
  source 1..19: mol_type = other RNA
tgaggatccaggtggtccc

SEQ ID NO: 22568 - RNA, 19 nt, synthetic construct
  source 1..19: mol_type = other RNA
gaggatccaggtggtccct

SEQ ID NO: 22569 - RNA, 19 nt, synthetic construct
  source 1..19: mol_type = other RNA
tgaggatccaggtggtccc

SEQ ID NO: 22570 - RNA, 19 nt, synthetic construct
  source 1..19: mol_type = other RNA
gaggatccaggtggtccct

SEQ ID NO: 22571 - RNA, 19 nt, synthetic construct
  source 1..19: mol_type = other RNA
tgaggatccaggtggtccc

SEQ ID NO: 22572 - RNA, 19 nt, synthetic construct
  source 1..19: mol_type = other RNA
ggcaggggcttgcactgca

SEQ ID NO: 22573 - RNA, 19 nt, synthetic construct
  source 1..19: mol_type = other RNA
tgggcgcagggacacagaa

SEQ ID NO: 22574 - RNA, 19 nt, synthetic construct
  source 1..19: mol_type = other RNA
gtggcagctccggaggcac

SEQ ID NO: 22575 - RNA, 19 nt, synthetic construct
  source 1..19: mol_type = other RNA
gtccagcgtgtggcagctc

SEQ ID NO: 22576 - RNA, 19 nt, synthetic construct
  source 1..19: mol_type = other RNA
agggcaggggcttgcactg

SEQ ID NO: 22577 - RNA, 19 nt, synthetic construct
  source 1..19: mol_type = other RNA
ggccaaggtgggccacagg

SEQ ID NO: 22578 - RNA, 19 nt, synthetic construct
  source 1..19: mol_type = other RNA
gggcaaggccaaggtgggc

SEQ ID NO: 22579 - RNA, 19 nt, synthetic construct
  source 1..19: mol_type = other RNA
aatttggtcaaacaggatc

SEQ ID NO: 22580 - RNA, 19 nt, synthetic construct
  source 1..19: mol_type = other RNA
tgggccacaggctctccca

SEQ ID NO: 22581 - RNA, 19 nt, synthetic construct
  source 1..19: mol_type = other RNA
ccttgatgacaacacgggt

SEQ ID NO: 22582 - RNA, 19 nt, synthetic construct
  source 1..19: mol_type = other RNA
tggggcagtggccgtagtt

SEQ ID NO: 22583 - RNA, 19 nt, synthetic construct
  source 1..19: mol_type = other RNA
tggggcagtggccgtagtt

SEQ ID NO: 22584 - RNA, 19 nt, synthetic construct
  source 1..19: mol_type = other RNA
tggggcagtggccgtagtt

SEQ ID NO: 22585 - RNA, 19 nt, synthetic construct
  source 1..19: mol_type = other RNA
tggggcagtggccgtagtt

SEQ ID NO: 22586 - RNA, 19 nt, synthetic construct
  source 1..19: mol_type = other RNA
gccccagttgtggtggccg

SEQ ID NO: 22587 - RNA, 19 nt, synthetic construct
  source 1..19: mol_type = other RNA
gtacacggtgcagttgtcc

SEQ ID NO: 22588 - RNA, 19 nt, synthetic construct
  source 1..19: mol_type = other RNA
caggtccgggggcagagct

SEQ ID NO: 22589 - RNA, 19 nt, synthetic construct
  source 1..19: mol_type = other RNA
gaaacgctgcaggtgacgt

SEQ ID NO: 22590 - RNA, 19 nt, synthetic construct
  source 1..19: mol_type = other RNA
ttttctgcagagaggctcc

SEQ ID NO: 22591 - RNA, 19 nt, synthetic construct
  source 1..19: mol_type = other RNA
ccccagttgtggtggccgt

SEQ ID NO: 22592 - RNA, 19 nt, synthetic construct
  source 1..19: mol_type = other RNA
ttgtggtagtcagcacttt

SEQ ID NO: 22593 - RNA, 19 nt, synthetic construct
  source 1..19: mol_type = other RNA
ggtggacgagctgggaacc

SEQ ID NO: 22594 - RNA, 19 nt, synthetic construct
  source 1..19: mol_type = other RNA
aggaaacgctgcaggtgac

SEQ ID NO: 22595 - RNA, 19 nt, synthetic construct
  source 1..19: mol_type = other RNA
cccaaactccagtgcgtcc

SEQ ID NO: 22596 - RNA, 19 nt, synthetic construct
  source 1..19: mol_type = other RNA
ttgatgacaacacgggtga

SEQ ID NO: 22597 - RNA, 19 nt, synthetic construct
  source 1..19: mol_type = other RNA
aggtccgggggcagagctc

SEQ ID NO: 22598 - RNA, 19 nt, synthetic construct
  source 1..19: mol_type = other RNA
gggctgtaggtgcggccgc

SEQ ID NO: 22599 - RNA, 19 nt, synthetic construct
  source 1..19: mol_type = other RNA
gtggccgtggtggtaagca

SEQ ID NO: 22600 - RNA, 19 nt, synthetic construct
  source 1..19: mol_type = other RNA
tggtagtcagcactttggt

SEQ ID NO: 22601 - RNA, 19 nt, synthetic construct
  source 1..19: mol_type = other RNA
gtggccgtggtggtaagca

SEQ ID NO: 22602 - RNA, 19 nt, synthetic construct
  source 1..19: mol_type = other RNA
cagcggaaggtgggacagc

SEQ ID NO: 22603 - RNA, 19 nt, synthetic construct
  source 1..19: mol_type = other RNA
ggtgctggggcagtggccg

SEQ ID NO: 22604 - RNA, 19 nt, synthetic construct
  source 1..19: mol_type = other RNA
ggtgctggggcagtggccg

SEQ ID NO: 22605 - RNA, 19 nt, synthetic construct
  source 1..19: mol_type = other RNA
ggtgctggggcagtggccg

SEQ ID NO: 22606 - RNA, 19 nt, synthetic construct
  source 1..19: mol_type = other RNA
ggtgctggggcagtggccg

SEQ ID NO: 22607 - RNA, 19 nt, synthetic construct
  source 1..19: mol_type = other RNA
cgggctgtaggtgcggccg

SEQ ID NO: 22608 - RNA, 19 nt, synthetic construct
  source 1..19: mol_type = other RNA
ggccccagttgtggtggcc

SEQ ID NO: 22609 - RNA, 19 nt, synthetic construct
  source 1..19: mol_type = other RNA
gttcccaaactccagtgcg

SEQ ID NO: 22610 - RNA, 19 nt, synthetic construct
  source 1..19: mol_type = other RNA
ctggggcagtggccgtagt

SEQ ID NO: 22611 - RNA, 19 nt, synthetic construct
  source 1..19: mol_type = other RNA
ctggggcagtggccgtagt

SEQ ID NO: 22612 - RNA, 19 nt, synthetic construct
  source 1..19: mol_type = other RNA
ctggggcagtggccgtagt

SEQ ID NO: 22613 - RNA, 19 nt, synthetic construct
  source 1..19: mol_type = other RNA
ctggggcagtggccgtagt

SEQ ID NO: 22614 - RNA, 19 nt, synthetic construct
  source 1..19: mol_type = other RNA
tgggacagcagtcgccctc

SEQ ID NO: 22615 - RNA, 19 nt, synthetic construct
  source 1..19: mol_type = other RNA
acacgggtgaccacaggcc

SEQ ID NO: 22616 - RNA, 19 nt, synthetic construct
  source 1..19: mol_type = other RNA
gtgcggccgccgtgggtgc

SEQ ID NO: 22617 - RNA, 19 nt, synthetic construct
  source 1..19: mol_type = other RNA
ctgtaggtgcggccgccgt

SEQ ID NO: 22618 - RNA, 19 nt, synthetic construct
  source 1..19: mol_type = other RNA
gctgtaggtgcggccgccg

SEQ ID NO: 22619 - RNA, 19 nt, synthetic construct
  source 1..19: mol_type = other RNA
cagctctggcagttctccg

SEQ ID NO: 22620 - RNA, 19 nt, synthetic construct
  source 1..19: mol_type = other RNA
acagctctggcagttctcc

SEQ ID NO: 22621 - RNA, 19 nt, synthetic construct
  source 1..19: mol_type = other RNA
tgggcagtctctggagtgg

SEQ ID NO: 22622 - RNA, 19 nt, synthetic construct
  source 1..19: mol_type = other RNA
tgggcagtctctggagtgg

SEQ ID NO: 22623 - RNA, 19 nt, synthetic construct
  source 1..19: mol_type = other RNA
gaagtcacagggctggctc

SEQ ID NO: 22624 - RNA, 19 nt, synthetic construct
  source 1..19: mol_type = other RNA
gcaggtccgggggcagagc

SEQ ID NO: 22625 - RNA, 19 nt, synthetic construct
  source 1..19: mol_type = other RNA
ctcattctccacactgagg

SEQ ID NO: 22626 - RNA, 19 nt, synthetic construct
  source 1..19: mol_type = other RNA
ttctcattctccacactga

SEQ ID NO: 22627 - RNA, 19 nt, synthetic construct
  source 1..19: mol_type = other RNA
gtgggacagcagtcgccct

SEQ ID NO: 22628 - RNA, 19 nt, synthetic construct
  source 1..19: mol_type = other RNA
cactcatagtggaagtcac

SEQ ID NO: 22629 - RNA, 19 nt, synthetic construct
  source 1..19: mol_type = other RNA
ggcactcgaggcccagggg

SEQ ID NO: 22630 - RNA, 19 nt, synthetic construct
  source 1..19: mol_type = other RNA
ggcactcgaggcccagggg

SEQ ID NO: 22631 - RNA, 19 nt, synthetic construct
  source 1..19: mol_type = other RNA
ggcactcgaggcccagggg

SEQ ID NO: 22632 - RNA, 19 nt, synthetic construct
  source 1..19: mol_type = other RNA
ggcactcgaggcccagggg

SEQ ID NO: 22633 - RNA, 19 nt, synthetic construct
  source 1..19: mol_type = other RNA
taggtgcggccgccgtggg

SEQ ID NO: 22634 - RNA, 19 nt, synthetic construct
  source 1..19: mol_type = other RNA
caacacgggtgaccacagg

SEQ ID NO: 22635 - RNA, 19 nt, synthetic construct
  source 1..19: mol_type = other RNA
actccagtgcgtcccccac

SEQ ID NO: 22636 - RNA, 19 nt, synthetic construct
  source 1..19: mol_type = other RNA
cgccgtgggtgcaggggca

SEQ ID NO: 22637 - RNA, 19 nt, synthetic construct
  source 1..19: mol_type = other RNA
tgtaggtgcggccgccgtg

SEQ ID NO: 22638 - RNA, 19 nt, synthetic construct
  source 1..19: mol_type = other RNA
tggtggccgtggtggtaag

SEQ ID NO: 22639 - RNA, 19 nt, synthetic construct
  source 1..19: mol_type = other RNA
tggtggccgtggtggtaag

SEQ ID NO: 22640 - RNA, 19 nt, synthetic construct
  source 1..19: mol_type = other RNA
aagtcacagggctggctcg

SEQ ID NO: 22641 - RNA, 19 nt, synthetic construct
  source 1..19: mol_type = other RNA
tgtgggggtgtgggtggtc

SEQ ID NO: 22642 - RNA, 19 nt, synthetic construct
  source 1..19: mol_type = other RNA
tgtgggggtgtgggtggtc

SEQ ID NO: 22643 - RNA, 19 nt, synthetic construct
  source 1..19: mol_type = other RNA
ccgcccattgtgcgccggg

SEQ ID NO: 22644 - RNA, 19 nt, synthetic construct
  source 1..19: mol_type = other RNA
tgtcggcacatttcttgga

SEQ ID NO: 22645 - RNA, 19 nt, synthetic construct
  source 1..19: mol_type = other RNA
ctgtacgcccttggcggca

SEQ ID NO: 22646 - RNA, 19 nt, synthetic construct
  source 1..19: mol_type = other RNA
ccgacgtcatagtagtttc

SEQ ID NO: 22647 - RNA, 19 nt, synthetic construct
  source 1..19: mol_type = other RNA
accgacgtcatagtagttt

SEQ ID NO: 22648 - RNA, 19 nt, synthetic construct
  source 1..19: mol_type = other RNA
gtggctatagtgctcggct

SEQ ID NO: 22649 - RNA, 19 nt, synthetic construct
  source 1..19: mol_type = other RNA
tacgaagccgggacggttg

SEQ ID NO: 22650 - RNA, 19 nt, synthetic construct
  source 1..19: mol_type = other RNA
tggctatagtgctcggctc

SEQ ID NO: 22651 - RNA, 19 nt, synthetic construct
  source 1..19: mol_type = other RNA
gctgtacgcccttggcggc

SEQ ID NO: 22652 - RNA, 19 nt, synthetic construct
  source 1..19: mol_type = other RNA
gcccattgtgcgccgggtt

SEQ ID NO: 22653 - RNA, 19 nt, synthetic construct
  source 1..19: mol_type = other RNA
cagggctggctcgggtccg

SEQ ID NO: 22654 - RNA, 19 nt, synthetic construct
  source 1..19: mol_type = other RNA
ggggatggaggcagaacgt

SEQ ID NO: 22655 - RNA, 19 nt, synthetic construct
  source 1..19: mol_type = other RNA
aggatggtcgtgttgatgc

SEQ ID NO: 22656 - RNA, 19 nt, synthetic construct
  source 1..19: mol_type = other RNA
actcaatgctcagggttta

SEQ ID NO: 22657 - RNA, 19 nt, synthetic construct
  source 1..19: mol_type = other RNA
gcactttggtagtgtgagc

SEQ ID NO: 22658 - RNA, 19 nt, synthetic construct
  source 1..19: mol_type = other RNA
gcactttggtagtgtgagc

SEQ ID NO: 22659 - RNA, 19 nt, synthetic construct
  source 1..19: mol_type = other RNA
gcactttggtagtgtgagc

SEQ ID NO: 22660 - RNA, 19 nt, synthetic construct
  source 1..19: mol_type = other RNA
gcactttggtagtgtgagc

SEQ ID NO: 22661 - RNA, 19 nt, synthetic construct
  source 1..19: mol_type = other RNA
gcactttggtagtgtgagc

SEQ ID NO: 22662 - RNA, 19 nt, synthetic construct
  source 1..19: mol_type = other RNA
cattgatggcattgtcgtc

SEQ ID NO: 22663 - RNA, 19 nt, synthetic construct
  source 1..19: mol_type = other RNA
aggacgtcggggcaccgcc

SEQ ID NO: 22664 - RNA, 19 nt, synthetic construct
  source 1..19: mol_type = other RNA
cttcaaagctgtagcgatc

SEQ ID NO: 22665 - RNA, 19 nt, synthetic construct
  source 1..19: mol_type = other RNA
attgatggcattgtcgtcg

SEQ ID NO: 22666 - RNA, 19 nt, synthetic construct
  source 1..19: mol_type = other RNA
ggggatggctgtaacgctg

SEQ ID NO: 22667 - RNA, 19 nt, synthetic construct
  source 1..19: mol_type = other RNA
agggctggctcgggtccga

SEQ ID NO: 22668 - RNA, 19 nt, synthetic construct
  source 1..19: mol_type = other RNA
accaagggtgcttgtgtat

SEQ ID NO: 22669 - RNA, 19 nt, synthetic construct
  source 1..19: mol_type = other RNA
gggcctgggcacggcactc

SEQ ID NO: 22670 - RNA, 19 nt, synthetic construct
  source 1..19: mol_type = other RNA
aggagggcatggccgtaga

SEQ ID NO: 22671 - RNA, 19 nt, synthetic construct
  source 1..19: mol_type = other RNA
gggcctgggcacggcactc

SEQ ID NO: 22672 - RNA, 19 nt, synthetic construct
  source 1..19: mol_type = other RNA
gggcctgggcacggcactc

SEQ ID NO: 22673 - RNA, 19 nt, synthetic construct
  source 1..19: mol_type = other RNA
gggcctgggcacggcactc

SEQ ID NO: 22674 - RNA, 19 nt, synthetic construct
  source 1..19: mol_type = other RNA
aggagggcatggccgtaga

SEQ ID NO: 22675 - RNA, 19 nt, synthetic construct
  source 1..19: mol_type = other RNA
acgtcccctgcagtggtcg

SEQ ID NO: 22676 - RNA, 19 nt, synthetic construct
  source 1..19: mol_type = other RNA
cagccggctcggtcggtct

SEQ ID NO: 22677 - RNA, 19 nt, synthetic construct
  source 1..19: mol_type = other RNA
cccatagggtggtcttttc

SEQ ID NO: 22678 - RNA, 19 nt, synthetic construct
  source 1..19: mol_type = other RNA
gccgccgtcgaccggatgc

SEQ ID NO: 22679 - RNA, 19 nt, synthetic construct
  source 1..19: mol_type = other RNA
acacgtagttgcaaaggcc

SEQ ID NO: 22680 - RNA, 19 nt, synthetic construct
  source 1..19: mol_type = other RNA
gcagggacacataggcccg

SEQ ID NO: 22681 - RNA, 19 nt, synthetic construct
  source 1..19: mol_type = other RNA
aaacgtctcaaagtctccg

SEQ ID NO: 22682 - RNA, 19 nt, synthetic construct
  source 1..19: mol_type = other RNA
aggccgttgaagtccccac

SEQ ID NO: 22683 - RNA, 19 nt, synthetic construct
  source 1..19: mol_type = other RNA
cgtgagcgtagcaggggca

SEQ ID NO: 22684 - RNA, 19 nt, synthetic construct
  source 1..19: mol_type = other RNA
gggccaagatgtactcgca

SEQ ID NO: 22685 - RNA, 19 nt, synthetic construct
  source 1..19: mol_type = other RNA
ggccgtggaattggtggcc

SEQ ID NO: 22686 - RNA, 19 nt, synthetic construct
  source 1..19: mol_type = other RNA
ggcagccggctcggtcggt

SEQ ID NO: 22687 - RNA, 19 nt, synthetic construct
  source 1..19: mol_type = other RNA
tagagtttctcatcatagg

SEQ ID NO: 22688 - RNA, 19 nt, synthetic construct
  source 1..19: mol_type = other RNA
actgttgggatcggtcagg

SEQ ID NO: 22689 - RNA, 19 nt, synthetic construct
  source 1..19: mol_type = other RNA
ggctgtgatcgtagtggcc

SEQ ID NO: 22690 - RNA, 19 nt, synthetic construct
  source 1..19: mol_type = other RNA
tagaaatggcagccggctc

SEQ ID NO: 22691 - RNA, 19 nt, synthetic construct
  source 1..19: mol_type = other RNA
aggtgatgttgacctcggt

SEQ ID NO: 22692 - RNA, 19 nt, synthetic construct
  source 1..19: mol_type = other RNA
tgcagtcaccatgcaggtc

SEQ ID NO: 22693 - RNA, 19 nt, synthetic construct
  source 1..19: mol_type = other RNA
tcagcggctctttggaagc

SEQ ID NO: 22694 - RNA, 19 nt, synthetic construct
  source 1..19: mol_type = other RNA
gtggtccccacggtggacg

SEQ ID NO: 22695 - RNA, 19 nt, synthetic construct
  source 1..19: mol_type = other RNA
cggcccctgcagtggtcgc

SEQ ID NO: 22696 - RNA, 19 nt, synthetic construct
  source 1..19: mol_type = other RNA
gacctggccgttgcgacct

SEQ ID NO: 22697 - RNA, 19 nt, synthetic construct
  source 1..19: mol_type = other RNA
gagtcgcaggcacacgcgt

SEQ ID NO: 22698 - RNA, 19 nt, synthetic construct
  source 1..19: mol_type = other RNA
ggctgagattcccaaagcg

SEQ ID NO: 22699 - RNA, 19 nt, synthetic construct
  source 1..19: mol_type = other RNA
atggggccgcatggcttgt

SEQ ID NO: 22700 - RNA, 19 nt, synthetic construct
  source 1..19: mol_type = other RNA
agaaggtgatgttgacctc

SEQ ID NO: 22701 - RNA, 19 nt, synthetic construct
  source 1..19: mol_type = other RNA
aggatggctgagccgttag

SEQ ID NO: 22702 - RNA, 19 nt, synthetic construct
  source 1..19: mol_type = other RNA
gtgcaggatggctgagccg

SEQ ID NO: 22703 - RNA, 19 nt, synthetic construct
  source 1..19: mol_type = other RNA
cgttgaagtcctcgtaggc

SEQ ID NO: 22704 - RNA, 19 nt, synthetic construct
  source 1..19: mol_type = other RNA
ttgaagtcctcgtaggcgg

SEQ ID NO: 22705 - RNA, 19 nt, synthetic construct
  source 1..19: mol_type = other RNA
ttgtcgtcgaagttcccgc

SEQ ID NO: 22706 - RNA, 19 nt, synthetic construct
  source 1..19: mol_type = other RNA
tgcagaaacactcgcagtc

SEQ ID NO: 22707 - RNA, 19 nt, synthetic construct
  source 1..19: mol_type = other RNA
caccggttgcacctcgcca

SEQ ID NO: 22708 - RNA, 19 nt, synthetic construct
  source 1..19: mol_type = other RNA
gtacgcccttggcggcaca

SEQ ID NO: 22709 - RNA, 19 nt, synthetic construct
  source 1..19: mol_type = other RNA
agctgtacgcccttggcgg

SEQ ID NO: 22710 - RNA, 19 nt, synthetic construct
  source 1..19: mol_type = other RNA
gcttccgcagatggcgatc

SEQ ID NO: 22711 - RNA, 19 nt, synthetic construct
  source 1..19: mol_type = other RNA
ggcgttgtggctggagttc

SEQ ID NO: 22712 - RNA, 19 nt, synthetic construct
  source 1..19: mol_type = other RNA
aaccggtgggcaccatcac

SEQ ID NO: 22713 - RNA, 19 nt, synthetic construct
  source 1..19: mol_type = other RNA
ctgcgtagaaatggcagcc

SEQ ID NO: 22714 - RNA, 19 nt, synthetic construct
  source 1..19: mol_type = other RNA
tctgcgtaagcctccaggc

SEQ ID NO: 22715 - RNA, 19 nt, synthetic construct
  source 1..19: mol_type = other RNA
agggcgtcccagtgacatc

SEQ ID NO: 22716 - RNA, 19 nt, synthetic construct
  source 1..19: mol_type = other RNA
agcgcggggtgccacacac

SEQ ID NO: 22717 - RNA, 19 nt, synthetic construct
  source 1..19: mol_type = other RNA
tggaaccggtgggcaccat

SEQ ID NO: 22718 - RNA, 19 nt, synthetic construct
  source 1..19: mol_type = other RNA
gcggtcaatgtcacagtgc

SEQ ID NO: 22719 - RNA, 19 nt, synthetic construct
  source 1..19: mol_type = other RNA
tccgcagatggcgatcaag

SEQ ID NO: 22720 - RNA, 19 nt, synthetic construct
  source 1..19: mol_type = other RNA
cactgcgtagaaatggcag

SEQ ID NO: 22721 - RNA, 19 nt, synthetic construct
  source 1..19: mol_type = other RNA
ccttgcaactggcggcagt

SEQ ID NO: 22722 - RNA, 19 nt, synthetic construct
  source 1..19: mol_type = other RNA
gggcgaggacgtcggggca

SEQ ID NO: 22723 - RNA, 19 nt, synthetic construct
  source 1..19: mol_type = other RNA
gaggtgcccgggctgtagg

SEQ ID NO: 22724 - RNA, 19 nt, synthetic construct
  source 1..19: mol_type = other RNA
gggcgtcccagtgacatca

SEQ ID NO: 22725 - RNA, 19 nt, synthetic construct
  source 1..19: mol_type = other RNA
ggctgtgaagcccgtggtt

SEQ ID NO: 22726 - RNA, 19 nt, synthetic construct
  source 1..19: mol_type = other RNA
ggctgtgaagcccgtggtt

SEQ ID NO: 22727 - RNA, 19 nt, synthetic construct
  source 1..19: mol_type = other RNA
ggctgtgaagcccgtggtt

SEQ ID NO: 22728 - RNA, 19 nt, synthetic construct
  source 1..19: mol_type = other RNA
ggctgtgaagcccgtggtt

SEQ ID NO: 22729 - RNA, 19 nt, synthetic construct
  source 1..19: mol_type = other RNA
gcagaggacccggatcctg

SEQ ID NO: 22730 - RNA, 19 nt, synthetic construct
  source 1..19: mol_type = other RNA
cgcccattgtgcgccgggt

SEQ ID NO: 22731 - RNA, 19 nt, synthetic construct
  source 1..19: mol_type = other RNA
tagtcctgggccaagatgt

SEQ ID NO: 22732 - RNA, 19 nt, synthetic construct
  source 1..19: mol_type = other RNA
ggagggcatggccgtagag

SEQ ID NO: 22733 - RNA, 19 nt, synthetic construct
  source 1..19: mol_type = other RNA
ggagggcatggccgtagag

SEQ ID NO: 22734 - RNA, 19 nt, synthetic construct
  source 1..19: mol_type = other RNA
acttccccgggcgagaaaa

SEQ ID NO: 22735 - RNA, 19 nt, synthetic construct
  source 1..19: mol_type = other RNA
caggtggcaggctgtatgg

SEQ ID NO: 22736 - RNA, 19 nt, synthetic construct
  source 1..19: mol_type = other RNA
actaggcctcggcgtagct

SEQ ID NO: 22737 - RNA, 19 nt, synthetic construct
  source 1..19: mol_type = other RNA
cattgtgcgccgggttcag

SEQ ID NO: 22738 - RNA, 19 nt, synthetic construct
  source 1..19: mol_type = other RNA
ggcatagtggccatggtgg

SEQ ID NO: 22739 - RNA, 19 nt, synthetic construct
  source 1..19: mol_type = other RNA
ccgctttcaggcagttctc

SEQ ID NO: 22740 - RNA, 19 nt, synthetic construct
  source 1..19: mol_type = other RNA
gtctggttggcgtatttgg

SEQ ID NO: 22741 - RNA, 19 nt, synthetic construct
  source 1..19: mol_type = other RNA
tcgcagtcgccacccgagt

SEQ ID NO: 22742 - RNA, 19 nt, synthetic construct
  source 1..19: mol_type = other RNA
tggcgttgtggctggagtt

SEQ ID NO: 22743 - RNA, 19 nt, synthetic construct
  source 1..19: mol_type = other RNA
cctgacattgcaccgttgg

SEQ ID NO: 22744 - RNA, 19 nt, synthetic construct
  source 1..19: mol_type = other RNA
gccatcgggcgtgaggcag

SEQ ID NO: 22745 - RNA, 19 nt, synthetic construct
  source 1..19: mol_type = other RNA
gcgccaagcccatcggtgg

SEQ ID NO: 22746 - RNA, 19 nt, synthetic construct
  source 1..19: mol_type = other RNA
tactcgtaggctgcggcgt

SEQ ID NO: 22747 - RNA, 19 nt, synthetic construct
  source 1..19: mol_type = other RNA
cgcccgtgtgtggtggcca

SEQ ID NO: 22748 - RNA, 19 nt, synthetic construct
  source 1..19: mol_type = other RNA
atcccgtgggtctcgatga

SEQ ID NO: 22749 - RNA, 19 nt, synthetic construct
  source 1..19: mol_type = other RNA
ccgtggcagggacacatag

SEQ ID NO: 22750 - RNA, 19 nt, synthetic construct
  source 1..19: mol_type = other RNA
ctcgtaggctgcggcgttg

SEQ ID NO: 22751 - RNA, 19 nt, synthetic construct
  source 1..19: mol_type = other RNA
tcctcctgacattgcaccg

SEQ ID NO: 22752 - RNA, 19 nt, synthetic construct
  source 1..19: mol_type = other RNA
gagctgtacgcccttggcg

SEQ ID NO: 22753 - RNA, 19 nt, synthetic construct
  source 1..19: mol_type = other RNA
ctccagcggccctgatctt

SEQ ID NO: 22754 - RNA, 19 nt, synthetic construct
  source 1..19: mol_type = other RNA
tggtcgtggtggtaagcac

SEQ ID NO: 22755 - RNA, 19 nt, synthetic construct
  source 1..19: mol_type = other RNA
gttgcaccaaccccgtaga

SEQ ID NO: 22756 - RNA, 19 nt, synthetic construct
  source 1..19: mol_type = other RNA
ccgagtcgcaggcacacgc

SEQ ID NO: 22757 - RNA, 19 nt, synthetic construct
  source 1..19: mol_type = other RNA
cccattgtgcgccgggttc

SEQ ID NO: 22758 - RNA, 19 nt, synthetic construct
  source 1..19: mol_type = other RNA
ggcctcggcgtagctggac

SEQ ID NO: 22759 - RNA, 19 nt, synthetic construct
  source 1..19: mol_type = other RNA
ttccgcagatggcgatcaa

SEQ ID NO: 22760 - RNA, 19 nt, synthetic construct
  source 1..19: mol_type = other RNA
attcgcagcagagaacccg

SEQ ID NO: 22761 - RNA, 19 nt, synthetic construct
  source 1..19: mol_type = other RNA
ccaccgctccccgggaaat

SEQ ID NO: 22762 - RNA, 19 nt, synthetic construct
  source 1..19: mol_type = other RNA
cggagcgcggggtgccaca

SEQ ID NO: 22763 - RNA, 19 nt, synthetic construct
  source 1..19: mol_type = other RNA
catggccgccagagccaac

SEQ ID NO: 22764 - RNA, 19 nt, synthetic construct
  source 1..19: mol_type = other RNA
accacgagcatggccgcca

SEQ ID NO: 22765 - RNA, 19 nt, synthetic construct
  source 1..19: mol_type = other RNA
ctgggtctctgcctgcggc

SEQ ID NO: 22766 - RNA, 19 nt, synthetic construct
  source 1..19: mol_type = other RNA
gcgcggcagtgctcagaga

SEQ ID NO: 22767 - RNA, 19 nt, synthetic construct
  source 1..19: mol_type = other RNA
cctctccgttccacaggaa

SEQ ID NO: 22768 - RNA, 19 nt, synthetic construct
  source 1..19: mol_type = other RNA
tctggttggcgtatttggg

SEQ ID NO: 22769 - RNA, 19 nt, synthetic construct
  source 1..19: mol_type = other RNA
gcctggcgttgtgggcata

SEQ ID NO: 22770 - RNA, 19 nt, synthetic construct
  source 1..19: mol_type = other RNA
gtgctgcatgttgaggggg

SEQ ID NO: 22771 - RNA, 19 nt, synthetic construct
  source 1..19: mol_type = other RNA
ggtgaagctgctgtcggca

SEQ ID NO: 22772 - RNA, 19 nt, synthetic construct
  source 1..19: mol_type = other RNA
accacgatgaagaagctcg

SEQ ID NO: 22773 - RNA, 19 nt, synthetic construct
  source 1..19: mol_type = other RNA
ctcaaagctgttcctggca

SEQ ID NO: 22774 - RNA, 19 nt, synthetic construct
  source 1..19: mol_type = other RNA
ttgatgatggagtggcagc

SEQ ID NO: 22775 - RNA, 19 nt, synthetic construct
  source 1..19: mol_type = other RNA
tgtacgcccttggcggcac

SEQ ID NO: 22776 - RNA, 19 nt, synthetic construct
  source 1..19: mol_type = other RNA
ggtggtgttgtccccacag

SEQ ID NO: 22777 - RNA, 19 nt, synthetic construct
  source 1..19: mol_type = other RNA
ttgtagggtgggtccccac

SEQ ID NO: 22778 - RNA, 19 nt, synthetic construct
  source 1..19: mol_type = other RNA
cttgtagggtgggtcccca

SEQ ID NO: 22779 - RNA, 19 nt, synthetic construct
  source 1..19: mol_type = other RNA
aatggcgttgtggctggag

SEQ ID NO: 22780 - RNA, 19 nt, synthetic construct
  source 1..19: mol_type = other RNA
agcggcatgtcgggaagct

SEQ ID NO: 22781 - RNA, 19 nt, synthetic construct
  source 1..19: mol_type = other RNA
gagggggtgaccgtcacgg

SEQ ID NO: 22782 - RNA, 19 nt, synthetic construct
  source 1..19: mol_type = other RNA
tggtggtacctggggccga

SEQ ID NO: 22783 - RNA, 19 nt, synthetic construct
  source 1..19: mol_type = other RNA
ttgtagcacatcttgaaga

SEQ ID NO: 22784 - RNA, 19 nt, synthetic construct
  source 1..19: mol_type = other RNA
ctggtcagccccgggctac

SEQ ID NO: 22785 - RNA, 19 nt, synthetic construct
  source 1..19: mol_type = other RNA
tgggggatgtcagtccttc

SEQ ID NO: 22786 - RNA, 19 nt, synthetic construct
  source 1..19: mol_type = other RNA
tgtaccaagggtgcttgtg

SEQ ID NO: 22787 - RNA, 19 nt, synthetic construct
  source 1..19: mol_type = other RNA
cgtgttggaagggtggatg

SEQ ID NO: 22788 - RNA, 19 nt, synthetic construct
  source 1..19: mol_type = other RNA
gggcgccatgtgcccaagc

SEQ ID NO: 22789 - RNA, 19 nt, synthetic construct
  source 1..19: mol_type = other RNA
aggggcgccatgtgcccaa

SEQ ID NO: 22790 - RNA, 19 nt, synthetic construct
  source 1..19: mol_type = other RNA
gttgccattgttgttgggg

SEQ ID NO: 22791 - RNA, 19 nt, synthetic construct
  source 1..19: mol_type = other RNA
gtctcggcctgagaggtgg

SEQ ID NO: 22792 - RNA, 19 nt, synthetic construct
  source 1..19: mol_type = other RNA
gctgtgaagcccgtggttg

SEQ ID NO: 22793 - RNA, 19 nt, synthetic construct
  source 1..19: mol_type = other RNA
gtggttgtgctgatccaca

SEQ ID NO: 22794 - RNA, 19 nt, synthetic construct
  source 1..19: mol_type = other RNA
ttgccatagaaccagtggc

SEQ ID NO: 22795 - RNA, 19 nt, synthetic construct
  source 1..19: mol_type = other RNA
gttgccatagaaccagtgg

SEQ ID NO: 22796 - RNA, 19 nt, synthetic construct
  source 1..19: mol_type = other RNA
gatgggagttgtcccagga

SEQ ID NO: 22797 - RNA, 19 nt, synthetic construct
  source 1..19: mol_type = other RNA
tggcggtggtggtcagcac

SEQ ID NO: 22798 - RNA, 19 nt, synthetic construct
  source 1..19: mol_type = other RNA
cgaagtccaggctgtgcgc

SEQ ID NO: 22799 - RNA, 19 nt, synthetic construct
  source 1..19: mol_type = other RNA
tcggtggttctgctgctag

SEQ ID NO: 22800 - RNA, 19 nt, synthetic construct
  source 1..19: mol_type = other RNA
tcaaagtccccgccagagg

SEQ ID NO: 22801 - RNA, 19 nt, synthetic construct
  source 1..19: mol_type = other RNA
cggatgttggagtaggtgt

SEQ ID NO: 22802 - RNA, 19 nt, synthetic construct
  source 1..19: mol_type = other RNA
aggaggggatggctgtaaa

SEQ ID NO: 22803 - RNA, 19 nt, synthetic construct
  source 1..19: mol_type = other RNA
gctgtgaagcccgtggttg

SEQ ID NO: 22804 - RNA, 19 nt, synthetic construct
  source 1..19: mol_type = other RNA
gctgatccacactggaagc

SEQ ID NO: 22805 - RNA, 19 nt, synthetic construct
  source 1..19: mol_type = other RNA
gtggttgtgctgatccaca

SEQ ID NO: 22806 - RNA, 19 nt, synthetic construct
  source 1..19: mol_type = other RNA
ttgccatagaaccagtggc

SEQ ID NO: 22807 - RNA, 19 nt, synthetic construct
  source 1..19: mol_type = other RNA
gttgccatagaaccagtgg

SEQ ID NO: 22808 - RNA, 19 nt, synthetic construct
  source 1..19: mol_type = other RNA
tggcggtggtggtcagcac

SEQ ID NO: 22809 - RNA, 19 nt, synthetic construct
  source 1..19: mol_type = other RNA
cgaagtccaggctgtgcgc

SEQ ID NO: 22810 - RNA, 19 nt, synthetic construct
  source 1..19: mol_type = other RNA
ggaagtccccgtggaaggc

SEQ ID NO: 22811 - RNA, 19 nt, synthetic construct
  source 1..19: mol_type = other RNA
actcggtggtcctgctgct

SEQ ID NO: 22812 - RNA, 19 nt, synthetic construct
  source 1..19: mol_type = other RNA
tcaaagtccccgccagagg

SEQ ID NO: 22813 - RNA, 19 nt, synthetic construct
  source 1..19: mol_type = other RNA
cggatgttggagtaggtgt

SEQ ID NO: 22814 - RNA, 19 nt, synthetic construct
  source 1..19: mol_type = other RNA
ggtcccggtggtcccaagg

SEQ ID NO: 22815 - RNA, 19 nt, synthetic construct
  source 1..19: mol_type = other RNA
gaactggtggcccttgtcg

SEQ ID NO: 22816 - RNA, 19 nt, synthetic construct
  source 1..19: mol_type = other RNA
aggcgggtccaggcggtgc

SEQ ID NO: 22817 - RNA, 19 nt, synthetic construct
  source 1..19: mol_type = other RNA
gctgtgaagcccgtggttg

SEQ ID NO: 22818 - RNA, 19 nt, synthetic construct
  source 1..19: mol_type = other RNA
gtggttgtgctgatccaca

SEQ ID NO: 22819 - RNA, 19 nt, synthetic construct
  source 1..19: mol_type = other RNA
ttgccatagaaccagtggc

SEQ ID NO: 22820 - RNA, 19 nt, synthetic construct
  source 1..19: mol_type = other RNA
gttgccatagaaccagtgg

SEQ ID NO: 22821 - RNA, 19 nt, synthetic construct
  source 1..19: mol_type = other RNA
ggagttgtccctggagttg

SEQ ID NO: 22822 - RNA, 19 nt, synthetic construct
  source 1..19: mol_type = other RNA
tggcggtggtggtcagcac

SEQ ID NO: 22823 - RNA, 19 nt, synthetic construct
  source 1..19: mol_type = other RNA
cgaagtccaggctgtgcgc

SEQ ID NO: 22824 - RNA, 19 nt, synthetic construct
  source 1..19: mol_type = other RNA
actcggtggtcctgctgct

SEQ ID NO: 22825 - RNA, 19 nt, synthetic construct
  source 1..19: mol_type = other RNA
tcaaagtccccgccagagg

SEQ ID NO: 22826 - RNA, 19 nt, synthetic construct
  source 1..19: mol_type = other RNA
cggatgttggagtaggtgt

SEQ ID NO: 22827 - RNA, 19 nt, synthetic construct
  source 1..19: mol_type = other RNA
aggaggggatggctgtaaa

SEQ ID NO: 22828 - RNA, 19 nt, synthetic construct
  source 1..19: mol_type = other RNA
actgtgaagcccgtggttg

SEQ ID NO: 22829 - RNA, 19 nt, synthetic construct
  source 1..19: mol_type = other RNA
gtggttgtgctgatccaca

SEQ ID NO: 22830 - RNA, 19 nt, synthetic construct
  source 1..19: mol_type = other RNA
ttgccatagaaccagtggc

SEQ ID NO: 22831 - RNA, 19 nt, synthetic construct
  source 1..19: mol_type = other RNA
gttgccatagaaccagtgg

SEQ ID NO: 22832 - RNA, 19 nt, synthetic construct
  source 1..19: mol_type = other RNA
tggcggtggtggtcagcac

SEQ ID NO: 22833 - RNA, 19 nt, synthetic construct
  source 1..19: mol_type = other RNA
cgaagtccaggctgtgcgc

SEQ ID NO: 22834 - RNA, 19 nt, synthetic construct
  source 1..19: mol_type = other RNA
ggaagtccccgtggaaggc

SEQ ID NO: 22835 - RNA, 19 nt, synthetic construct
  source 1..19: mol_type = other RNA
actcggtggtcctgctgct

SEQ ID NO: 22836 - RNA, 19 nt, synthetic construct
  source 1..19: mol_type = other RNA
tcaaagtccccgccagagg

SEQ ID NO: 22837 - RNA, 19 nt, synthetic construct
  source 1..19: mol_type = other RNA
cggatgttggagtaggtgt

SEQ ID NO: 22838 - RNA, 19 nt, synthetic construct
  source 1..19: mol_type = other RNA
ggtcccggtggtcccaagg

SEQ ID NO: 22839 - RNA, 19 nt, synthetic construct
  source 1..19: mol_type = other RNA
gaactggtggcccttgtcg

SEQ ID NO: 22840 - RNA, 19 nt, synthetic construct
  source 1..19: mol_type = other RNA
aggaggggatggctgtaaa

SEQ ID NO: 22841 - RNA, 19 nt, synthetic construct
  source 1..19: mol_type = other RNA
gctgtgaagcccgtggttg

SEQ ID NO: 22842 - RNA, 19 nt, synthetic construct
  source 1..19: mol_type = other RNA
gtggttgtgctgatccaca

SEQ ID NO: 22843 - RNA, 19 nt, synthetic construct
  source 1..19: mol_type = other RNA
ttgccatagaaccagtggc

SEQ ID NO: 22844 - RNA, 19 nt, synthetic construct
  source 1..19: mol_type = other RNA
gttgccatagaaccagtgg

SEQ ID NO: 22845 - RNA, 19 nt, synthetic construct
  source 1..19: mol_type = other RNA
gctggtagctgtggatttt

SEQ ID NO: 22846 - RNA, 19 nt, synthetic construct
  source 1..19: mol_type = other RNA
aggaggtgtggattgtgga

SEQ ID NO: 22847 - RNA, 19 nt, synthetic construct
  source 1..19: mol_type = other RNA
gaggaggtgtggattgtgg

SEQ ID NO: 22848 - RNA, 19 nt, synthetic construct
  source 1..19: mol_type = other RNA
cgggtcgtccccagagtgg

SEQ ID NO: 22849 - RNA, 19 nt, synthetic construct
  source 1..19: mol_type = other RNA
tttgggggtgtgagctgtt

SEQ ID NO: 22850 - RNA, 19 nt, synthetic construct
  source 1..19: mol_type = other RNA
aaactgtccaaatgccctg

SEQ ID NO: 22851 - RNA, 19 nt, synthetic construct
  source 1..19: mol_type = other RNA
tattgtagatgacttcccc

SEQ ID NO: 22852 - RNA, 19 nt, synthetic construct
  source 1..19: mol_type = other RNA
actgcgtagaaatggcagc

SEQ ID NO: 22853 - RNA, 19 nt, synthetic construct
  source 1..19: mol_type = other RNA
tttgggtccagcaggacga

SEQ ID NO: 22854 - RNA, 19 nt, synthetic construct
  source 1..19: mol_type = other RNA
gtgacgttggccacaggct

SEQ ID NO: 22855 - RNA, 19 nt, synthetic construct
  source 1..19: mol_type = other RNA
tgcatggatctctctcatg

SEQ ID NO: 22856 - RNA, 19 nt, synthetic construct
  source 1..19: mol_type = other RNA
gcgtgcatggatctctctc

SEQ ID NO: 22857 - RNA, 19 nt, synthetic construct
  source 1..19: mol_type = other RNA
aaacaggatcaggccctcc

SEQ ID NO: 22858 - RNA, 19 nt, synthetic construct
  source 1..19: mol_type = other RNA
caaacaggatcaggccctc

SEQ ID NO: 22859 - RNA, 19 nt, synthetic construct
  source 1..19: mol_type = other RNA
acacgcatggtggtggtcc

SEQ ID NO: 22860 - RNA, 19 nt, synthetic construct
  source 1..19: mol_type = other RNA
gtgctagacaccggggctg

SEQ ID NO: 22861 - RNA, 19 nt, synthetic construct
  source 1..19: mol_type = other RNA
tgcaggcgttgaagaatgg

SEQ ID NO: 22862 - RNA, 19 nt, synthetic construct
  source 1..19: mol_type = other RNA
cgcagatgcccatgtgtgc

SEQ ID NO: 22863 - RNA, 19 nt, synthetic construct
  source 1..19: mol_type = other RNA
gggaaggttgcaccaaccc

SEQ ID NO: 22864 - RNA, 19 nt, synthetic construct
  source 1..19: mol_type = other RNA
ggctggccatcgggcgtga

SEQ ID NO: 22865 - RNA, 19 nt, synthetic construct
  source 1..19: mol_type = other RNA
ctggtggcccttgtcgtgg

SEQ ID NO: 22866 - RNA, 19 nt, synthetic construct
  source 1..19: mol_type = other RNA
ctggtggcccttgtcgtgg

SEQ ID NO: 22867 - RNA, 19 nt, synthetic construct
  source 1..19: mol_type = other RNA
ccaggccgaagtggacgtc

SEQ ID NO: 22868 - RNA, 19 nt, synthetic construct
  source 1..19: mol_type = other RNA
gggcaggaatgtccacacg

SEQ ID NO: 22869 - RNA, 19 nt, synthetic construct
  source 1..19: mol_type = other RNA
agtggggggtgtgccagtc

SEQ ID NO: 22870 - RNA, 19 nt, synthetic construct
  source 1..19: mol_type = other RNA
ccagctcggctccacaggg

SEQ ID NO: 22871 - RNA, 19 nt, synthetic construct
  source 1..19: mol_type = other RNA
cccgcccattgtgcgccgg

SEQ ID NO: 22872 - RNA, 19 nt, synthetic construct
  source 1..19: mol_type = other RNA
aggtcccctcttggaggat

SEQ ID NO: 22873 - RNA, 19 nt, synthetic construct
  source 1..19: mol_type = other RNA
atcttgtagggtgggtccc

SEQ ID NO: 22874 - RNA, 19 nt, synthetic construct
  source 1..19: mol_type = other RNA
acagagcgggggactctgt

SEQ ID NO: 22875 - RNA, 19 nt, synthetic construct
  source 1..19: mol_type = other RNA
cggtggcggggttgtggca

SEQ ID NO: 22876 - RNA, 19 nt, synthetic construct
  source 1..19: mol_type = other RNA
ctgggggatgtcagtcctt

SEQ ID NO: 22877 - RNA, 19 nt, synthetic construct
  source 1..19: mol_type = other RNA
gtggccgaagtccaggctg

SEQ ID NO: 22878 - RNA, 19 nt, synthetic construct
  source 1..19: mol_type = other RNA
gctcacggttcctgcagac

SEQ ID NO: 22879 - RNA, 19 nt, synthetic construct
  source 1..19: mol_type = other RNA
gtggccgaagtccaggctg

SEQ ID NO: 22880 - RNA, 19 nt, synthetic construct
  source 1..19: mol_type = other RNA
gggaagtccccgtggaagg

SEQ ID NO: 22881 - RNA, 19 nt, synthetic construct
  source 1..19: mol_type = other RNA
gctcacggttcctgcagac

SEQ ID NO: 22882 - RNA, 19 nt, synthetic construct
  source 1..19: mol_type = other RNA
gtggccgaagtccaggctg

SEQ ID NO: 22883 - RNA, 19 nt, synthetic construct
  source 1..19: mol_type = other RNA
gctcacggttcctgcagac

SEQ ID NO: 22884 - RNA, 19 nt, synthetic construct
  source 1..19: mol_type = other RNA
gtggccgaagtccaggctg

SEQ ID NO: 22885 - RNA, 19 nt, synthetic construct
  source 1..19: mol_type = other RNA
gggaagtccccgtggaagg

SEQ ID NO: 22886 - RNA, 19 nt, synthetic construct
  source 1..19: mol_type = other RNA
gctcacggttcctgcagac

SEQ ID NO: 22887 - RNA, 19 nt, synthetic construct
  source 1..19: mol_type = other RNA
tgggaaggttgcaccaacc

SEQ ID NO: 22888 - RNA, 19 nt, synthetic construct
  source 1..19: mol_type = other RNA
ctgttgacccaggtttcat

SEQ ID NO: 22889 - RNA, 19 nt, synthetic construct
  source 1..19: mol_type = other RNA
ttgcgacctcagccctgag

SEQ ID NO: 22890 - RNA, 19 nt, synthetic construct
  source 1..19: mol_type = other RNA
ctcaatgctcagggtttat

SEQ ID NO: 22891 - RNA, 19 nt, synthetic construct
  source 1..19: mol_type = other RNA
agggtgtgggaagtcaccg

SEQ ID NO: 22892 - RNA, 19 nt, synthetic construct
  source 1..19: mol_type = other RNA
tgtccgtcaggccgcactt

SEQ ID NO: 22893 - RNA, 19 nt, synthetic construct
  source 1..19: mol_type = other RNA
gaaggaaacgctgcaggtg

SEQ ID NO: 22894 - RNA, 19 nt, synthetic construct
  source 1..19: mol_type = other RNA
ctcccatccgacaccagcc

SEQ ID NO: 22895 - RNA, 19 nt, synthetic construct
  source 1..19: mol_type = other RNA
ctctccaggcttgtaggtg

SEQ ID NO: 22896 - RNA, 19 nt, synthetic construct
  source 1..19: mol_type = other RNA
agcagagaacccgcagctc

SEQ ID NO: 22897 - RNA, 19 nt, synthetic construct
  source 1..19: mol_type = other RNA
gagggccccggcatggggt

SEQ ID NO: 22898 - RNA, 19 nt, synthetic construct
  source 1..19: mol_type = other RNA
gagggccccggcatggggt

SEQ ID NO: 22899 - RNA, 19 nt, synthetic construct
  source 1..19: mol_type = other RNA
gagggccccggcatggggt

SEQ ID NO: 22900 - RNA, 19 nt, synthetic construct
  source 1..19: mol_type = other RNA
gagggccccggcatggggt

SEQ ID NO: 22901 - RNA, 19 nt, synthetic construct
  source 1..19: mol_type = other RNA
ggtggtcagcactctggcg

SEQ ID NO: 22902 - RNA, 19 nt, synthetic construct
  source 1..19: mol_type = other RNA
gtggggggtgtgccagtcg

SEQ ID NO: 22903 - RNA, 19 nt, synthetic construct
  source 1..19: mol_type = other RNA
atgcaggcgttgaagaatg

SEQ ID NO: 22904 - RNA, 19 nt, synthetic construct
  source 1..19: mol_type = other RNA
ctctgcgtaagcctccagg

SEQ ID NO: 22905 - RNA, 19 nt, synthetic construct
  source 1..19: mol_type = other RNA
actggcagttgctgaccca

SEQ ID NO: 22906 - RNA, 19 nt, synthetic construct
  source 1..19: mol_type = other RNA
ggtacacatgtggcaggga

SEQ ID NO: 22907 - RNA, 19 nt, synthetic construct
  source 1..19: mol_type = other RNA
gacctcggtctcgcagccc

SEQ ID NO: 22908 - RNA, 19 nt, synthetic construct
  source 1..19: mol_type = other RNA
acacacggcgccctcgtcg

SEQ ID NO: 22909 - RNA, 19 nt, synthetic construct
  source 1..19: mol_type = other RNA
actgccatagccccccgga

SEQ ID NO: 22910 - RNA, 19 nt, synthetic construct
  source 1..19: mol_type = other RNA
cgccctcgtcgtgcaccac

SEQ ID NO: 22911 - RNA, 19 nt, synthetic construct
  source 1..19: mol_type = other RNA
ttcccacccgtacatgaac

SEQ ID NO: 22912 - RNA, 19 nt, synthetic construct
  source 1..19: mol_type = other RNA
ccgccgtcgaccggatgct

SEQ ID NO: 22913 - RNA, 19 nt, synthetic construct
  source 1..19: mol_type = other RNA
ggcactttggtagtgtgag

SEQ ID NO: 22914 - RNA, 19 nt, synthetic construct
  source 1..19: mol_type = other RNA
cggcatggggtagctgtag

SEQ ID NO: 22915 - RNA, 19 nt, synthetic construct
  source 1..19: mol_type = other RNA
agcactttggtagtgtgag

SEQ ID NO: 22916 - RNA, 19 nt, synthetic construct
  source 1..19: mol_type = other RNA
cggcatggggtagctgtag

SEQ ID NO: 22917 - RNA, 19 nt, synthetic construct
  source 1..19: mol_type = other RNA
ggcactttggtagtgtgag

SEQ ID NO: 22918 - RNA, 19 nt, synthetic construct
  source 1..19: mol_type = other RNA
cggcatggggtagctgtag

SEQ ID NO: 22919 - RNA, 19 nt, synthetic construct
  source 1..19: mol_type = other RNA
ggcactttggtagtgtgag

SEQ ID NO: 22920 - RNA, 19 nt, synthetic construct
  source 1..19: mol_type = other RNA
cggcatggggtagctgtag

SEQ ID NO: 22921 - RNA, 19 nt, synthetic construct
  source 1..19: mol_type = other RNA
ggcactttggtagtgtgag

SEQ ID NO: 22922 - RNA, 19 nt, synthetic construct
  source 1..19: mol_type = other RNA
gctgggacggtccacgtgg

SEQ ID NO: 22923 - RNA, 19 nt, synthetic construct
  source 1..19: mol_type = other RNA
gcctgcggcaccacgagca

SEQ ID NO: 22924 - RNA, 19 nt, synthetic construct
  source 1..19: mol_type = other RNA
accgccatccatggtgtgc

SEQ ID NO: 22925 - RNA, 19 nt, synthetic construct
  source 1..19: mol_type = other RNA
gctgctgtcggcacatttc

SEQ ID NO: 22926 - RNA, 19 nt, synthetic construct
  source 1..19: mol_type = other RNA
ccgcggcaagtgggctggc

SEQ ID NO: 22927 - RNA, 19 nt, synthetic construct
  source 1..19: mol_type = other RNA
cacaggcacgaaggaaacg

SEQ ID NO: 22928 - RNA, 19 nt, synthetic construct
  source 1..19: mol_type = other RNA
actcctgggcgggcacaca

SEQ ID NO: 22929 - RNA, 19 nt, synthetic construct
  source 1..19: mol_type = other RNA
gcgtagcaggggcactcct

SEQ ID NO: 22930 - RNA, 19 nt, synthetic construct
  source 1..19: mol_type = other RNA
tgaatggcgttgtggctgg

SEQ ID NO: 22931 - RNA, 19 nt, synthetic construct
  source 1..19: mol_type = other RNA
accgtcacggggcctgagc

SEQ ID NO: 22932 - RNA, 19 nt, synthetic construct
  source 1..19: mol_type = other RNA
caccaggccgaagtggacg

SEQ ID NO: 22933 - RNA, 19 nt, synthetic construct
  source 1..19: mol_type = other RNA
cagaggacccggatcctgt

SEQ ID NO: 22934 - RNA, 19 nt, synthetic construct
  source 1..19: mol_type = other RNA
tgctagggtgagggctgga

SEQ ID NO: 22935 - RNA, 19 nt, synthetic construct
  source 1..19: mol_type = other RNA
gtcagcactgtggaggtgt

SEQ ID NO: 22936 - RNA, 19 nt, synthetic construct
  source 1..19: mol_type = other RNA
cgtgctggtcagcactttg

SEQ ID NO: 22937 - RNA, 19 nt, synthetic construct
  source 1..19: mol_type = other RNA
ggcagggaccgcccgtgtg

SEQ ID NO: 22938 - RNA, 19 nt, synthetic construct
  source 1..19: mol_type = other RNA
tgctagggtgagggctgga

SEQ ID NO: 22939 - RNA, 19 nt, synthetic construct
  source 1..19: mol_type = other RNA
tgctagggtgagggctgga

SEQ ID NO: 22940 - RNA, 19 nt, synthetic construct
  source 1..19: mol_type = other RNA
gtcagcactgtggaggtgt

SEQ ID NO: 22941 - RNA, 19 nt, synthetic construct
  source 1..19: mol_type = other RNA
gtcagcactgtggaggtgt

SEQ ID NO: 22942 - RNA, 19 nt, synthetic construct
  source 1..19: mol_type = other RNA
tgcacactgcgtagaaatg

SEQ ID NO: 22943 - RNA, 19 nt, synthetic construct
  source 1..19: mol_type = other RNA
cagtgaggacgatatccat

SEQ ID NO: 22944 - RNA, 19 nt, synthetic construct
  source 1..19: mol_type = other RNA
gatcacagagcggctgtgg

SEQ ID NO: 22945 - RNA, 19 nt, synthetic construct
  source 1..19: mol_type = other RNA
gggcccgggggcacaaggt

SEQ ID NO: 22946 - RNA, 19 nt, synthetic construct
  source 1..19: mol_type = other RNA
gctctgcgtaagcctccag

SEQ ID NO: 22947 - RNA, 19 nt, synthetic construct
  source 1..19: mol_type = other RNA
caggtgaggtcgcacaggc

SEQ ID NO: 22948 - RNA, 19 nt, synthetic construct
  source 1..19: mol_type = other RNA
gaaatttaggaaacccatc

SEQ ID NO: 22949 - RNA, 19 nt, synthetic construct
  source 1..19: mol_type = other RNA
ccatcgggcgtgaggcagg

SEQ ID NO: 22950 - RNA, 19 nt, synthetic construct
  source 1..19: mol_type = other RNA
acttggacgctccggggca

SEQ ID NO: 22951 - RNA, 19 nt, synthetic construct
  source 1..19: mol_type = other RNA
gccacactcatccacgtgg

SEQ ID NO: 22952 - RNA, 19 nt, synthetic construct
  source 1..19: mol_type = other RNA
gaggaggcccaaggttttc

SEQ ID NO: 22953 - RNA, 19 nt, synthetic construct
  source 1..19: mol_type = other RNA
gcggccggacgtggccagc

SEQ ID NO: 22954 - RNA, 19 nt, synthetic construct
  source 1..19: mol_type = other RNA
gttctcagggtggaggtcg

SEQ ID NO: 22955 - RNA, 19 nt, synthetic construct
  source 1..19: mol_type = other RNA
accagcgtccggcacgcgc

SEQ ID NO: 22956 - RNA, 19 nt, synthetic construct
  source 1..19: mol_type = other RNA
ttgtccgtcaggccgcact

SEQ ID NO: 22957 - RNA, 19 nt, synthetic construct
  source 1..19: mol_type = other RNA
tatcttgtagggtgggtcc

SEQ ID NO: 22958 - RNA, 19 nt, synthetic construct
  source 1..19: mol_type = other RNA
ggccgagggggtgaccgtc

SEQ ID NO: 22959 - RNA, 19 nt, synthetic construct
  source 1..19: mol_type = other RNA
ggagcctgcaggcgtcgtg

SEQ ID NO: 22960 - RNA, 19 nt, synthetic construct
  source 1..19: mol_type = other RNA
gtggccgtggcggtaagca

SEQ ID NO: 22961 - RNA, 19 nt, synthetic construct
  source 1..19: mol_type = other RNA
gtggccgtggcggtaagca

SEQ ID NO: 22962 - RNA, 19 nt, synthetic construct
  source 1..19: mol_type = other RNA
cagcactggggggataggt

SEQ ID NO: 22963 - RNA, 19 nt, synthetic construct
  source 1..19: mol_type = other RNA
cagcactggggggataggt

SEQ ID NO: 22964 - RNA, 19 nt, synthetic construct
  source 1..19: mol_type = other RNA
gcggcagtggttccgtccc

SEQ ID NO: 22965 - RNA, 19 nt, synthetic construct
  source 1..19: mol_type = other RNA
tattcgcagcagagaaccc

SEQ ID NO: 22966 - RNA, 19 nt, synthetic construct
  source 1..19: mol_type = other RNA
gagcctgcaggcgtcgtgg

SEQ ID NO: 22967 - RNA, 19 nt, synthetic construct
  source 1..19: mol_type = other RNA
atggatctctctcatgagg

SEQ ID NO: 22968 - RNA, 19 nt, synthetic construct
  source 1..19: mol_type = other RNA
ctggagcccactaggcctc

SEQ ID NO: 22969 - RNA, 19 nt, synthetic construct
  source 1..19: mol_type = other RNA
caggctgagcgtcaccgct

SEQ ID NO: 22970 - RNA, 19 nt, synthetic construct
  source 1..19: mol_type = other RNA
tcgctgagctgtacgccct

SEQ ID NO: 22971 - RNA, 19 nt, synthetic construct
  source 1..19: mol_type = other RNA
ctcaggttttcaaacgtct

SEQ ID NO: 22972 - RNA, 19 nt, synthetic construct
  source 1..19: mol_type = other RNA
gggccgagggggtgaccgt

SEQ ID NO: 22973 - RNA, 19 nt, synthetic construct
  source 1..19: mol_type = other RNA
gcacatcttgaagacgccc

SEQ ID NO: 22974 - RNA, 19 nt, synthetic construct
  source 1..19: mol_type = other RNA
tggagcctgcaggcgtcgt

SEQ ID NO: 22975 - RNA, 19 nt, synthetic construct
  source 1..19: mol_type = other RNA
ttgacagcgggtcgtgccc

SEQ ID NO: 22976 - RNA, 19 nt, synthetic construct
  source 1..19: mol_type = other RNA
gtggttgtggtagttggca

SEQ ID NO: 22977 - RNA, 19 nt, synthetic construct
  source 1..19: mol_type = other RNA
gtcagcactgtggcggtgt

SEQ ID NO: 22978 - RNA, 19 nt, synthetic construct
  source 1..19: mol_type = other RNA
actgtgggtgtcgtggccg

SEQ ID NO: 22979 - RNA, 19 nt, synthetic construct
  source 1..19: mol_type = other RNA
gactgtgggtgtcgtggcc

SEQ ID NO: 22980 - RNA, 19 nt, synthetic construct
  source 1..19: mol_type = other RNA
gtcagcactgtggcggtgt

SEQ ID NO: 22981 - RNA, 19 nt, synthetic construct
  source 1..19: mol_type = other RNA
actgtgggtgtcgtggccg

SEQ ID NO: 22982 - RNA, 19 nt, synthetic construct
  source 1..19: mol_type = other RNA
gactgtgggtgtcgtggcc

SEQ ID NO: 22983 - RNA, 19 nt, synthetic construct
  source 1..19: mol_type = other RNA
actgtgggtgtcgtggccg

SEQ ID NO: 22984 - RNA, 19 nt, synthetic construct
  source 1..19: mol_type = other RNA
gactgtgggtgtcgtggcc

SEQ ID NO: 22985 - RNA, 19 nt, synthetic construct
  source 1..19: mol_type = other RNA
gcaccatcacggtggctat

SEQ ID NO: 22986 - RNA, 19 nt, synthetic construct
  source 1..19: mol_type = other RNA
cagaggtacacggtgcagt

SEQ ID NO: 22987 - RNA, 19 nt, synthetic construct
  source 1..19: mol_type = other RNA
cgcacatgcttagtttgtt

SEQ ID NO: 22988 - RNA, 19 nt, synthetic construct
  source 1..19: mol_type = other RNA
cctgcggcaccacgagcat

SEQ ID NO: 22989 - RNA, 19 nt, synthetic construct
  source 1..19: mol_type = other RNA
ggacgtcggggcaccgcca

SEQ ID NO: 22990 - RNA, 19 nt, synthetic construct
  source 1..19: mol_type = other RNA
gaggacgtcggggcaccgc

SEQ ID NO: 22991 - RNA, 19 nt, synthetic construct
  source 1..19: mol_type = other RNA
aggcggcgcggcagtgctc

SEQ ID NO: 22992 - RNA, 19 nt, synthetic construct
  source 1..19: mol_type = other RNA
gtcagcaccagccggatgc

SEQ ID NO: 22993 - RNA, 19 nt, synthetic construct
  source 1..19: mol_type = other RNA
ggccggcaagggcagcggg

SEQ ID NO: 22994 - RNA, 19 nt, synthetic construct
  source 1..19: mol_type = other RNA
caccagtgcgtggcactcc

SEQ ID NO: 22995 - RNA, 19 nt, synthetic construct
  source 1..19: mol_type = other RNA
tccaccagtgcgtggcact

SEQ ID NO: 22996 - RNA, 19 nt, synthetic construct
  source 1..19: mol_type = other RNA
gtgcgtgatgtcatccagc

SEQ ID NO: 22997 - RNA, 19 nt, synthetic construct
  source 1..19: mol_type = other RNA
gagtggcagcgcgagaagg

SEQ ID NO: 22998 - RNA, 19 nt, synthetic construct
  source 1..19: mol_type = other RNA
cgctgagctgtacgccctt

SEQ ID NO: 22999 - RNA, 19 nt, synthetic construct
  source 1..19: mol_type = other RNA
ctcaggccgcggcaagtgg

SEQ ID NO: 23000 - RNA, 19 nt, synthetic construct
  source 1..19: mol_type = other RNA
acgtcggcctcactcaggc

SEQ ID NO: 23001 - RNA, 19 nt, synthetic construct
  source 1..19: mol_type = other RNA
ccacaggcacgaaggaaac

SEQ ID NO: 23002 - RNA, 19 nt, synthetic construct
  source 1..19: mol_type = other RNA
tgcagtccaggtacaccat

SEQ ID NO: 23003 - RNA, 19 nt, synthetic construct
  source 1..19: mol_type = other RNA
ttgcagtcgaccctgatgg

SEQ ID NO: 23004 - RNA, 19 nt, synthetic construct
  source 1..19: mol_type = other RNA
gctggtcttccggtcccag

SEQ ID NO: 23005 - RNA, 19 nt, synthetic construct
  source 1..19: mol_type = other RNA
gccacccgagtcgcaggca

SEQ ID NO: 23006 - RNA, 19 nt, synthetic construct
  source 1..19: mol_type = other RNA
ctcgcagtcgccacccgag

SEQ ID NO: 23007 - RNA, 19 nt, synthetic construct
  source 1..19: mol_type = other RNA
gccgttgcttccgcagatg

SEQ ID NO: 23008 - RNA, 19 nt, synthetic construct
  source 1..19: mol_type = other RNA
tgccgttgcttccgcagat

SEQ ID NO: 23009 - RNA, 19 nt, synthetic construct
  source 1..19: mol_type = other RNA
ggtgccgttgcttccgcag

SEQ ID NO: 23010 - RNA, 19 nt, synthetic construct
  source 1..19: mol_type = other RNA
ggacacacacggtggagac

SEQ ID NO: 23011 - RNA, 19 nt, synthetic construct
  source 1..19: mol_type = other RNA
cggacacacacggtggaga

SEQ ID NO: 23012 - RNA, 19 nt, synthetic construct
  source 1..19: mol_type = other RNA
actcgtaggctgcggcgtt

SEQ ID NO: 23013 - RNA, 19 nt, synthetic construct
  source 1..19: mol_type = other RNA
tcgtggggcctcccgtggt

SEQ ID NO: 23014 - RNA, 19 nt, synthetic construct
  source 1..19: mol_type = other RNA
agcctgcaggcgtcgtggg

SEQ ID NO: 23015 - RNA, 19 nt, synthetic construct
  source 1..19: mol_type = other RNA
gggctgagcgtgttggaag

SEQ ID NO: 23016 - RNA, 19 nt, synthetic construct
  source 1..19: mol_type = other RNA
cgggcgagctctggaggtt

SEQ ID NO: 23017 - RNA, 19 nt, synthetic construct
  source 1..19: mol_type = other RNA
cctgtcgggcgagctctgg

SEQ ID NO: 23018 - RNA, 19 nt, synthetic construct
  source 1..19: mol_type = other RNA
ggaagaggggatgggtgta

SEQ ID NO: 23019 - RNA, 19 nt, synthetic construct
  source 1..19: mol_type = other RNA
agagccggtggccccagtt

SEQ ID NO: 23020 - RNA, 19 nt, synthetic construct
  source 1..19: mol_type = other RNA
tgaagcccgtggttgtggt

SEQ ID NO: 23021 - RNA, 19 nt, synthetic construct
  source 1..19: mol_type = other RNA
tcaccgtggagcctctggt

SEQ ID NO: 23022 - RNA, 19 nt, synthetic construct
  source 1..19: mol_type = other RNA
atagaaccagtggccacag

SEQ ID NO: 23023 - RNA, 19 nt, synthetic construct
  source 1..19: mol_type = other RNA
ccatagaaccagtggccac

SEQ ID NO: 23024 - RNA, 19 nt, synthetic construct
  source 1..19: mol_type = other RNA
gccatagaaccagtggcca

SEQ ID NO: 23025 - RNA, 19 nt, synthetic construct
  source 1..19: mol_type = other RNA
ctgctagggtgtgggaagt

SEQ ID NO: 23026 - RNA, 19 nt, synthetic construct
  source 1..19: mol_type = other RNA
gggcagcagggtcgaggtg

SEQ ID NO: 23027 - RNA, 19 nt, synthetic construct
  source 1..19: mol_type = other RNA
gccgtagagctggtggccg

SEQ ID NO: 23028 - RNA, 19 nt, synthetic construct
  source 1..19: mol_type = other RNA
ggccgtagagctggtggcc

SEQ ID NO: 23029 - RNA, 19 nt, synthetic construct
  source 1..19: mol_type = other RNA
gctgtagtgctcggctctg

SEQ ID NO: 23030 - RNA, 19 nt, synthetic construct
  source 1..19: mol_type = other RNA
tccggtgggcaccgtcacg

SEQ ID NO: 23031 - RNA, 19 nt, synthetic construct
  source 1..19: mol_type = other RNA
gaggcggtggccgtggatc

SEQ ID NO: 23032 - RNA, 19 nt, synthetic construct
  source 1..19: mol_type = other RNA
ggggtgccagcagttgcct

SEQ ID NO: 23033 - RNA, 19 nt, synthetic construct
  source 1..19: mol_type = other RNA
acatgtggggtgccagcag

SEQ ID NO: 23034 - RNA, 19 nt, synthetic construct
  source 1..19: mol_type = other RNA
gctggtgactgtgggtgtc

SEQ ID NO: 23035 - RNA, 19 nt, synthetic construct
  source 1..19: mol_type = other RNA
tgaagcccgtggttgtggt

SEQ ID NO: 23036 - RNA, 19 nt, synthetic construct
  source 1..19: mol_type = other RNA
atagaaccagtggccacag

SEQ ID NO: 23037 - RNA, 19 nt, synthetic construct
  source 1..19: mol_type = other RNA
ccatagaaccagtggccac

SEQ ID NO: 23038 - RNA, 19 nt, synthetic construct
  source 1..19: mol_type = other RNA
gccatagaaccagtggcca

SEQ ID NO: 23039 - RNA, 19 nt, synthetic construct
  source 1..19: mol_type = other RNA
gtgcctgaggtggccgaag

SEQ ID NO: 23040 - RNA, 19 nt, synthetic construct
  source 1..19: mol_type = other RNA
tcggtggtcctgctgctag

SEQ ID NO: 23041 - RNA, 19 nt, synthetic construct
  source 1..19: mol_type = other RNA
gggcagcagggtcgaggtg

SEQ ID NO: 23042 - RNA, 19 nt, synthetic construct
  source 1..19: mol_type = other RNA
gccgtagagctggtggccg

SEQ ID NO: 23043 - RNA, 19 nt, synthetic construct
  source 1..19: mol_type = other RNA
ggccgtagagctggtggcc

SEQ ID NO: 23044 - RNA, 19 nt, synthetic construct
  source 1..19: mol_type = other RNA
ggtggtctgttctgggagg

SEQ ID NO: 23045 - RNA, 19 nt, synthetic construct
  source 1..19: mol_type = other RNA
gggtggattgtggacatgg

SEQ ID NO: 23046 - RNA, 19 nt, synthetic construct
  source 1..19: mol_type = other RNA
ccttgtcgtggtggccttc

SEQ ID NO: 23047 - RNA, 19 nt, synthetic construct
  source 1..19: mol_type = other RNA
tccggtgggcaccgtcacg

SEQ ID NO: 23048 - RNA, 19 nt, synthetic construct
  source 1..19: mol_type = other RNA
gaggcggtggccgtggatc

SEQ ID NO: 23049 - RNA, 19 nt, synthetic construct
  source 1..19: mol_type = other RNA
agggtgccagcagttgccc

SEQ ID NO: 23050 - RNA, 19 nt, synthetic construct
  source 1..19: mol_type = other RNA
aggggatggctgtaacgct

SEQ ID NO: 23051 - RNA, 19 nt, synthetic construct
  source 1..19: mol_type = other RNA
ttgtggtagtcggcacttt

SEQ ID NO: 23052 - RNA, 19 nt, synthetic construct
  source 1..19: mol_type = other RNA
tgaagcccgtggttgtggt

SEQ ID NO: 23053 - RNA, 19 nt, synthetic construct
  source 1..19: mol_type = other RNA
tcaccgtggagcctctggt

SEQ ID NO: 23054 - RNA, 19 nt, synthetic construct
  source 1..19: mol_type = other RNA
atagaaccagtggccacag

SEQ ID NO: 23055 - RNA, 19 nt, synthetic construct
  source 1..19: mol_type = other RNA
ccatagaaccagtggccac

SEQ ID NO: 23056 - RNA, 19 nt, synthetic construct
  source 1..19: mol_type = other RNA
gccatagaaccagtggcca

SEQ ID NO: 23057 - RNA, 19 nt, synthetic construct
  source 1..19: mol_type = other RNA
tcggtggtcctgctgctag

SEQ ID NO: 23058 - RNA, 19 nt, synthetic construct
  source 1..19: mol_type = other RNA
gggcagcagggtcgaggtg

SEQ ID NO: 23059 - RNA, 19 nt, synthetic construct
  source 1..19: mol_type = other RNA
gccgtagagctggtggccg

SEQ ID NO: 23060 - RNA, 19 nt, synthetic construct
  source 1..19: mol_type = other RNA
ggccgtagagctggtggcc

SEQ ID NO: 23061 - RNA, 19 nt, synthetic construct
  source 1..19: mol_type = other RNA
gctgtagtgctcggctctg

SEQ ID NO: 23062 - RNA, 19 nt, synthetic construct
  source 1..19: mol_type = other RNA
tccggtgggcaccgtcacg

SEQ ID NO: 23063 - RNA, 19 nt, synthetic construct
  source 1..19: mol_type = other RNA
gaggcggtggccgtggatc

SEQ ID NO: 23064 - RNA, 19 nt, synthetic construct
  source 1..19: mol_type = other RNA
ggggtgccagcagttgcct

SEQ ID NO: 23065 - RNA, 19 nt, synthetic construct
  source 1..19: mol_type = other RNA
acatgtggggtgccagcag

SEQ ID NO: 23066 - RNA, 19 nt, synthetic construct
  source 1..19: mol_type = other RNA
gctggtgactgtgggtgtc

SEQ ID NO: 23067 - RNA, 19 nt, synthetic construct
  source 1..19: mol_type = other RNA
ttgtggtagtcggcacttt

SEQ ID NO: 23068 - RNA, 19 nt, synthetic construct
  source 1..19: mol_type = other RNA
tgaagcccgtggttgtggt

SEQ ID NO: 23069 - RNA, 19 nt, synthetic construct
  source 1..19: mol_type = other RNA
gccactggttgtgggtgtg

SEQ ID NO: 23070 - RNA, 19 nt, synthetic construct
  source 1..19: mol_type = other RNA
atagaaccagtggccacag

SEQ ID NO: 23071 - RNA, 19 nt, synthetic construct
  source 1..19: mol_type = other RNA
ccatagaaccagtggccac

SEQ ID NO: 23072 - RNA, 19 nt, synthetic construct
  source 1..19: mol_type = other RNA
gccatagaaccagtggcca

SEQ ID NO: 23073 - RNA, 19 nt, synthetic construct
  source 1..19: mol_type = other RNA
gtgcctgaggtggccgaag

SEQ ID NO: 23074 - RNA, 19 nt, synthetic construct
  source 1..19: mol_type = other RNA
tcggtggtcctgctgctag

SEQ ID NO: 23075 - RNA, 19 nt, synthetic construct
  source 1..19: mol_type = other RNA
gggcagcagggtcgaggtg

SEQ ID NO: 23076 - RNA, 19 nt, synthetic construct
  source 1..19: mol_type = other RNA
gccgtagagctggtggccg

SEQ ID NO: 23077 - RNA, 19 nt, synthetic construct
  source 1..19: mol_type = other RNA
ggccgtagagctggtggcc

SEQ ID NO: 23078 - RNA, 19 nt, synthetic construct
  source 1..19: mol_type = other RNA
ggtggtctgttctgggagg

SEQ ID NO: 23079 - RNA, 19 nt, synthetic construct
  source 1..19: mol_type = other RNA
gggtggattgtggacatgg

SEQ ID NO: 23080 - RNA, 19 nt, synthetic construct
  source 1..19: mol_type = other RNA
ccttgtcgtggtggccttc

SEQ ID NO: 23081 - RNA, 19 nt, synthetic construct
  source 1..19: mol_type = other RNA
gctgtagtgctcggctctg

SEQ ID NO: 23082 - RNA, 19 nt, synthetic construct
  source 1..19: mol_type = other RNA
tccggtgggcaccgtcacg

SEQ ID NO: 23083 - RNA, 19 nt, synthetic construct
  source 1..19: mol_type = other RNA
gaggcggtggccgtggatc

SEQ ID NO: 23084 - RNA, 19 nt, synthetic construct
  source 1..19: mol_type = other RNA
ggggtgccagcagttgcct

SEQ ID NO: 23085 - RNA, 19 nt, synthetic construct
  source 1..19: mol_type = other RNA
acatgtggggtgccagcag

SEQ ID NO: 23086 - RNA, 19 nt, synthetic construct
  source 1..19: mol_type = other RNA
gctggtgactgtgggtgtc

SEQ ID NO: 23087 - RNA, 19 nt, synthetic construct
  source 1..19: mol_type = other RNA
ttgtggtagtcggcacttt

SEQ ID NO: 23088 - RNA, 19 nt, synthetic construct
  source 1..19: mol_type = other RNA
tgaagcccgtggttgtggt

SEQ ID NO: 23089 - RNA, 19 nt, synthetic construct
  source 1..19: mol_type = other RNA
gccactggttgtgggtgtg

SEQ ID NO: 23090 - RNA, 19 nt, synthetic construct
  source 1..19: mol_type = other RNA
gtcagcactctggcggtgt

SEQ ID NO: 23091 - RNA, 19 nt, synthetic construct
  source 1..19: mol_type = other RNA
atagaaccagtggccacag

SEQ ID NO: 23092 - RNA, 19 nt, synthetic construct
  source 1..19: mol_type = other RNA
ccatagaaccagtggccac

SEQ ID NO: 23093 - RNA, 19 nt, synthetic construct
  source 1..19: mol_type = other RNA
gccatagaaccagtggcca

SEQ ID NO: 23094 - RNA, 19 nt, synthetic construct
  source 1..19: mol_type = other RNA
actggggtgatgggtgttg

SEQ ID NO: 23095 - RNA, 19 nt, synthetic construct
  source 1..19: mol_type = other RNA
ggcaccatcacggtggcta

SEQ ID NO: 23096 - RNA, 19 nt, synthetic construct
  source 1..19: mol_type = other RNA
cgtggaaccggtgggcacc

SEQ ID NO: 23097 - RNA, 19 nt, synthetic construct
  source 1..19: mol_type = other RNA
ccgtggaaccggtgggcac

SEQ ID NO: 23098 - RNA, 19 nt, synthetic construct
  source 1..19: mol_type = other RNA
gccgtggaaccggtgggca

SEQ ID NO: 23099 - RNA, 19 nt, synthetic construct
  source 1..19: mol_type = other RNA
catggtggtcaccactttg

SEQ ID NO: 23100 - RNA, 19 nt, synthetic construct
  source 1..19: mol_type = other RNA
agatgacttccccgggcga

SEQ ID NO: 23101 - RNA, 19 nt, synthetic construct
  source 1..19: mol_type = other RNA
gacgttggccacaggcttt

SEQ ID NO: 23102 - RNA, 19 nt, synthetic construct
  source 1..19: mol_type = other RNA
acagggctggctcgggtcc

SEQ ID NO: 23103 - RNA, 19 nt, synthetic construct
  source 1..19: mol_type = other RNA
acatgctgcagatgcactc

SEQ ID NO: 23104 - RNA, 19 nt, synthetic construct
  source 1..19: mol_type = other RNA
gctgtcggggaccagccac

SEQ ID NO: 23105 - RNA, 19 nt, synthetic construct
  source 1..19: mol_type = other RNA
tgggcccgggggcacaagg

SEQ ID NO: 23106 - RNA, 19 nt, synthetic construct
  source 1..19: mol_type = other RNA
ctctggcagggcacctcaa

SEQ ID NO: 23107 - RNA, 19 nt, synthetic construct
  source 1..19: mol_type = other RNA
gtgaggtcgcacaggccac

SEQ ID NO: 23108 - RNA, 19 nt, synthetic construct
  source 1..19: mol_type = other RNA
ggtggcaggctgtatgggg

SEQ ID NO: 23109 - RNA, 19 nt, synthetic construct
  source 1..19: mol_type = other RNA
cgcctgggaaggttgcacc

SEQ ID NO: 23110 - RNA, 19 nt, synthetic construct
  source 1..19: mol_type = other RNA
cctcctgacattgcaccgt

SEQ ID NO: 23111 - RNA, 19 nt, synthetic construct
  source 1..19: mol_type = other RNA
gcaggcggtctggacgcac

SEQ ID NO: 23112 - RNA, 19 nt, synthetic construct
  source 1..19: mol_type = other RNA
cagttgtccacatggctgt

SEQ ID NO: 23113 - RNA, 19 nt, synthetic construct
  source 1..19: mol_type = other RNA
tgcagctggacacatctgg

SEQ ID NO: 23114 - RNA, 19 nt, synthetic construct
  source 1..19: mol_type = other RNA
gccctcgcagaaggtgatg

SEQ ID NO: 23115 - RNA, 19 nt, synthetic construct
  source 1..19: mol_type = other RNA
gcagaggaggcccaaggtt

SEQ ID NO: 23116 - RNA, 19 nt, synthetic construct
  source 1..19: mol_type = other RNA
ggtttcacccacggggtgg

SEQ ID NO: 23117 - RNA, 19 nt, synthetic construct
  source 1..19: mol_type = other RNA
cttctggggccggtttcac

SEQ ID NO: 23118 - RNA, 19 nt, synthetic construct
  source 1..19: mol_type = other RNA
tcctgagtggcgccctccc

SEQ ID NO: 23119 - RNA, 19 nt, synthetic construct
  source 1..19: mol_type = other RNA
ctcctgagtggcgccctcc

SEQ ID NO: 23120 - RNA, 19 nt, synthetic construct
  source 1..19: mol_type = other RNA
agcaggcatggacaggcgg

SEQ ID NO: 23121 - RNA, 19 nt, synthetic construct
  source 1..19: mol_type = other RNA
tgtgggtggtctctggagt

SEQ ID NO: 23122 - RNA, 19 nt, synthetic construct
  source 1..19: mol_type = other RNA
gtggcggtgtgggtggtcc

SEQ ID NO: 23123 - RNA, 19 nt, synthetic construct
  source 1..19: mol_type = other RNA
gtggcggtgtgggtggtcc

SEQ ID NO: 23124 - RNA, 19 nt, synthetic construct
  source 1..19: mol_type = other RNA
ctggcggtgtgggtggtcc

SEQ ID NO: 23125 - RNA, 19 nt, synthetic construct
  source 1..19: mol_type = other RNA
ggccgggaggccgttgaag

SEQ ID NO: 23126 - RNA, 19 nt, synthetic construct
  source 1..19: mol_type = other RNA
cggtgcagttgtccacatg

SEQ ID NO: 23127 - RNA, 19 nt, synthetic construct
  source 1..19: mol_type = other RNA
aggcagccagagtgcgtga

SEQ ID NO: 23128 - RNA, 19 nt, synthetic construct
  source 1..19: mol_type = other RNA
aggccgggaggccgttgaa

SEQ ID NO: 23129 - RNA, 19 nt, synthetic construct
  source 1..19: mol_type = other RNA
gctttcaggcagttctcgt

SEQ ID NO: 23130 - RNA, 19 nt, synthetic construct
  source 1..19: mol_type = other RNA
gcctgtctgcaccacgatg

SEQ ID NO: 23131 - RNA, 19 nt, synthetic construct
  source 1..19: mol_type = other RNA
accttgatgtagtccccgc

SEQ ID NO: 23132 - RNA, 19 nt, synthetic construct
  source 1..19: mol_type = other RNA
ggtgtggccgtggaattgg

SEQ ID NO: 23133 - RNA, 19 nt, synthetic construct
  source 1..19: mol_type = other RNA
cagttgccccggaaggtgt

SEQ ID NO: 23134 - RNA, 19 nt, synthetic construct
  source 1..19: mol_type = other RNA
tgacctggccgttgcgacc

SEQ ID NO: 23135 - RNA, 19 nt, synthetic construct
  source 1..19: mol_type = other RNA
ccctcagcctcacagaggt

SEQ ID NO: 23136 - RNA, 19 nt, synthetic construct
  source 1..19: mol_type = other RNA
agtcgcaggcacacgcgtc

SEQ ID NO: 23137 - RNA, 19 nt, synthetic construct
  source 1..19: mol_type = other RNA
agtcctgggccaagatgta

SEQ ID NO: 23138 - RNA, 19 nt, synthetic construct
  source 1..19: mol_type = other RNA
gtgctgcacacccgcccat

SEQ ID NO: 23139 - RNA, 19 nt, synthetic construct
  source 1..19: mol_type = other RNA
tcctcgtccgtgcagttgc

SEQ ID NO: 23140 - RNA, 19 nt, synthetic construct
  source 1..19: mol_type = other RNA
ggggccgagggggtgaccg

SEQ ID NO: 23141 - RNA, 19 nt, synthetic construct
  source 1..19: mol_type = other RNA
tgcctgtcgggcgagctct

SEQ ID NO: 23142 - RNA, 19 nt, synthetic construct
  source 1..19: mol_type = other RNA
ccggcacgcgctcggggca

SEQ ID NO: 23143 - RNA, 19 nt, synthetic construct
  source 1..19: mol_type = other RNA
gtgggctggcaggcatcca

SEQ ID NO: 23144 - RNA, 19 nt, synthetic construct
  source 1..19: mol_type = other RNA
gctgttctcagggtggagg

SEQ ID NO: 23145 - RNA, 19 nt, synthetic construct
  source 1..19: mol_type = other RNA
tgtgggaagtccccgtgga

SEQ ID NO: 23146 - RNA, 19 nt, synthetic construct
  source 1..19: mol_type = other RNA
gtggtcgtggtggtaagca

SEQ ID NO: 23147 - RNA, 19 nt, synthetic construct
  source 1..19: mol_type = other RNA
acagactgcccctccggcc

SEQ ID NO: 23148 - RNA, 19 nt, synthetic construct
  source 1..19: mol_type = other RNA
tgtgggaagtccccgtgga

SEQ ID NO: 23149 - RNA, 19 nt, synthetic construct
  source 1..19: mol_type = other RNA
tggacatgggtgtggtggt

SEQ ID NO: 23150 - RNA, 19 nt, synthetic construct
  source 1..19: mol_type = other RNA
ggccgtggatccagtggct

SEQ ID NO: 23151 - RNA, 19 nt, synthetic construct
  source 1..19: mol_type = other RNA
atggtgacagtgaggacga

SEQ ID NO: 23152 - RNA, 19 nt, synthetic construct
  source 1..19: mol_type = other RNA
cgctcacgcccagggcagg

SEQ ID NO: 23153 - RNA, 19 nt, synthetic construct
  source 1..19: mol_type = other RNA
tgcactgcaccgacactga

SEQ ID NO: 23154 - RNA, 19 nt, synthetic construct
  source 1..19: mol_type = other RNA
ctcccgaaaggggtcctgc

SEQ ID NO: 23155 - RNA, 19 nt, synthetic construct
  source 1..19: mol_type = other RNA
gtgcagttgccggccggca

SEQ ID NO: 23156 - RNA, 19 nt, synthetic construct
  source 1..19: mol_type = other RNA
ctggcacgggtggggggac

SEQ ID NO: 23157 - RNA, 19 nt, synthetic construct
  source 1..19: mol_type = other RNA
cctgggcgtgctggtctcg

SEQ ID NO: 23158 - RNA, 19 nt, synthetic construct
  source 1..19: mol_type = other RNA
gggctggagtcgagtgctg

SEQ ID NO: 23159 - RNA, 19 nt, synthetic construct
  source 1..19: mol_type = other RNA
gggctggagtcgagtgctg

SEQ ID NO: 23160 - RNA, 19 nt, synthetic construct
  source 1..19: mol_type = other RNA
gggctggagtcgagtgctg

SEQ ID NO: 23161 - RNA, 19 nt, synthetic construct
  source 1..19: mol_type = other RNA
gggctggagtcgagtgctg

SEQ ID NO: 23162 - RNA, 19 nt, synthetic construct
  source 1..19: mol_type = other RNA
tgttcctggcattggcaca

SEQ ID NO: 23163 - RNA, 19 nt, synthetic construct
  source 1..19: mol_type = other RNA
tggagtaggtgtcaaagtc

SEQ ID NO: 23164 - RNA, 19 nt, synthetic construct
  source 1..19: mol_type = other RNA
tggagtaggtgtcaaagtc

SEQ ID NO: 23165 - RNA, 19 nt, synthetic construct
  source 1..19: mol_type = other RNA
tggagtaggtgtcaaagtc

SEQ ID NO: 23166 - RNA, 19 nt, synthetic construct
  source 1..19: mol_type = other RNA
tggagtaggtgtcaaagtc

SEQ ID NO: 23167 - RNA, 19 nt, synthetic construct
  source 1..19: mol_type = other RNA
tggtggccacgggtgtggt

SEQ ID NO: 23168 - RNA, 19 nt, synthetic construct
  source 1..19: mol_type = other RNA
gtggaaccggtgggcacca

SEQ ID NO: 23169 - RNA, 19 nt, synthetic construct
  source 1..19: mol_type = other RNA
ggtgcagttgtccacatgg

SEQ ID NO: 23170 - RNA, 19 nt, synthetic construct
  source 1..19: mol_type = other RNA
gctccggccgtggcaggga

SEQ ID NO: 23171 - RNA, 19 nt, synthetic construct
  source 1..19: mol_type = other RNA
acggcgccctcgtcgtgca

SEQ ID NO: 23172 - RNA, 19 nt, synthetic construct
  source 1..19: mol_type = other RNA
gggaagggggtgactcggt

SEQ ID NO: 23173 - RNA, 19 nt, synthetic construct
  source 1..19: mol_type = other RNA
cccctgcagtggtcgctga

SEQ ID NO: 23174 - RNA, 19 nt, synthetic construct
  source 1..19: mol_type = other RNA
cgttccacaggaatgtcag

SEQ ID NO: 23175 - RNA, 19 nt, synthetic construct
  source 1..19: mol_type = other RNA
ccaggctgagcgtcaccgc

SEQ ID NO: 23176 - RNA, 19 nt, synthetic construct
  source 1..19: mol_type = other RNA
gctgttcctggcattggca

SEQ ID NO: 23177 - RNA, 19 nt, synthetic construct
  source 1..19: mol_type = other RNA
tcaccgtggaacctctggt

SEQ ID NO: 23178 - RNA, 19 nt, synthetic construct
  source 1..19: mol_type = other RNA
gccgtggatccagtggttg

SEQ ID NO: 23179 - RNA, 19 nt, synthetic construct
  source 1..19: mol_type = other RNA
gcaggtgaggtcgcacagg

SEQ ID NO: 23180 - RNA, 19 nt, synthetic construct
  source 1..19: mol_type = other RNA
ggcacgggtggggggacgg

SEQ ID NO: 23181 - RNA, 19 nt, synthetic construct
  source 1..19: mol_type = other RNA
ggcagccagagtgcgtgat

SEQ ID NO: 23182 - RNA, 19 nt, synthetic construct
  source 1..19: mol_type = other RNA
gaagctgctgtcggcacat

SEQ ID NO: 23183 - RNA, 19 nt, synthetic construct
  source 1..19: mol_type = other RNA
gatggagttgaggaacacg

SEQ ID NO: 23184 - RNA, 19 nt, synthetic construct
  source 1..19: mol_type = other RNA
gctgcgcccgtggcctcca

SEQ ID NO: 23185 - RNA, 19 nt, synthetic construct
  source 1..19: mol_type = other RNA
ccgcatgcggtcacagtcc

SEQ ID NO: 23186 - RNA, 19 nt, synthetic construct
  source 1..19: mol_type = other RNA
tggggccgagggggtgacc

SEQ ID NO: 23187 - RNA, 19 nt, synthetic construct
  source 1..19: mol_type = other RNA
gtgctagaggagggtgttg

SEQ ID NO: 23188 - RNA, 19 nt, synthetic construct
  source 1..19: mol_type = other RNA
ctgtgtgctagaggagggt

SEQ ID NO: 23189 - RNA, 19 nt, synthetic construct
  source 1..19: mol_type = other RNA
agggccccggcatggggta

SEQ ID NO: 23190 - RNA, 19 nt, synthetic construct
  source 1..19: mol_type = other RNA
ctcacggttcctgcagacc

SEQ ID NO: 23191 - RNA, 19 nt, synthetic construct
  source 1..19: mol_type = other RNA
gtgctagaggagggtgttg

SEQ ID NO: 23192 - RNA, 19 nt, synthetic construct
  source 1..19: mol_type = other RNA
ctgtgtgctagaggagggt

SEQ ID NO: 23193 - RNA, 19 nt, synthetic construct
  source 1..19: mol_type = other RNA
agggccccggcatggggta

SEQ ID NO: 23194 - RNA, 19 nt, synthetic construct
  source 1..19: mol_type = other RNA
ctcacggttcctgcagacc

SEQ ID NO: 23195 - RNA, 19 nt, synthetic construct
  source 1..19: mol_type = other RNA
tggatttggtggctgtgct

SEQ ID NO: 23196 - RNA, 19 nt, synthetic construct
  source 1..19: mol_type = other RNA
aggtgtgggtggtctccgg

SEQ ID NO: 23197 - RNA, 19 nt, synthetic construct
  source 1..19: mol_type = other RNA
gaagaggggatggctgtaa

SEQ ID NO: 23198 - RNA, 19 nt, synthetic construct
  source 1..19: mol_type = other RNA
gtgctagaggagggtgttg

SEQ ID NO: 23199 - RNA, 19 nt, synthetic construct
  source 1..19: mol_type = other RNA
ctgtgtgctagaggagggt

SEQ ID NO: 23200 - RNA, 19 nt, synthetic construct
  source 1..19: mol_type = other RNA
agggccccggcatggggta

SEQ ID NO: 23201 - RNA, 19 nt, synthetic construct
  source 1..19: mol_type = other RNA
ctcacggttcctgcagacc

SEQ ID NO: 23202 - RNA, 19 nt, synthetic construct
  source 1..19: mol_type = other RNA
gtgctagaggagggtgttg

SEQ ID NO: 23203 - RNA, 19 nt, synthetic construct
  source 1..19: mol_type = other RNA
ctgtgtgctagaggagggt

SEQ ID NO: 23204 - RNA, 19 nt, synthetic construct
  source 1..19: mol_type = other RNA
agggccccggcatggggta

SEQ ID NO: 23205 - RNA, 19 nt, synthetic construct
  source 1..19: mol_type = other RNA
ctcacggttcctgcagacc

SEQ ID NO: 23206 - RNA, 19 nt, synthetic construct
  source 1..19: mol_type = other RNA
tggatttggtggctgtgct

SEQ ID NO: 23207 - RNA, 19 nt, synthetic construct
  source 1..19: mol_type = other RNA
aggtgtgggtggtctccgg

SEQ ID NO: 23208 - RNA, 19 nt, synthetic construct
  source 1..19: mol_type = other RNA
gtgctagaggagggtgttg

SEQ ID NO: 23209 - RNA, 19 nt, synthetic construct
  source 1..19: mol_type = other RNA
ctgtgtgctagaggagggt

SEQ ID NO: 23210 - RNA, 19 nt, synthetic construct
  source 1..19: mol_type = other RNA
ctggggtgatgggtgttgt

SEQ ID NO: 23211 - RNA, 19 nt, synthetic construct
  source 1..19: mol_type = other RNA
gccatcctttctgctgtcg

SEQ ID NO: 23212 - RNA, 19 nt, synthetic construct
  source 1..19: mol_type = other RNA
cccagagaggcaggtacac

SEQ ID NO: 23213 - RNA, 19 nt, synthetic construct
  source 1..19: mol_type = other RNA
aggctctcccagggtagga

SEQ ID NO: 23214 - RNA, 19 nt, synthetic construct
  source 1..19: mol_type = other RNA
aacacgtagttgcaaaggc

SEQ ID NO: 23215 - RNA, 19 nt, synthetic construct
  source 1..19: mol_type = other RNA
tgctgggacggtccacgtg

SEQ ID NO: 23216 - RNA, 19 nt, synthetic construct
  source 1..19: mol_type = other RNA
tgttgggatcggtcaggcg

SEQ ID NO: 23217 - RNA, 19 nt, synthetic construct
  source 1..19: mol_type = other RNA
tgagcgtagcaggggcact

SEQ ID NO: 23218 - RNA, 19 nt, synthetic construct
  source 1..19: mol_type = other RNA
ggtggtcgtggtggtaagc

SEQ ID NO: 23219 - RNA, 19 nt, synthetic construct
  source 1..19: mol_type = other RNA
gggtgcgggtggtccccac

SEQ ID NO: 23220 - RNA, 19 nt, synthetic construct
  source 1..19: mol_type = other RNA
gtccttaggctgctggcat

SEQ ID NO: 23221 - RNA, 19 nt, synthetic construct
  source 1..19: mol_type = other RNA
tagcgatcgccatcaaagg

SEQ ID NO: 23222 - RNA, 19 nt, synthetic construct
  source 1..19: mol_type = other RNA
gatgttgacctcggtctcg

SEQ ID NO: 23223 - RNA, 19 nt, synthetic construct
  source 1..19: mol_type = other RNA
gcccccactcccatccgac

SEQ ID NO: 23224 - RNA, 19 nt, synthetic construct
  source 1..19: mol_type = other RNA
gtgccgttgcttccgcaga

SEQ ID NO: 23225 - RNA, 19 nt, synthetic construct
  source 1..19: mol_type = other RNA
tgttgcacacgcacaccgt

SEQ ID NO: 23226 - RNA, 19 nt, synthetic construct
  source 1..19: mol_type = other RNA
ccctgcattctcccagctc

SEQ ID NO: 23227 - RNA, 19 nt, synthetic construct
  source 1..19: mol_type = other RNA
gctgcacacccgcccattg

SEQ ID NO: 23228 - RNA, 19 nt, synthetic construct
  source 1..19: mol_type = other RNA
gtctctccaggcttgtagg

SEQ ID NO: 23229 - RNA, 19 nt, synthetic construct
  source 1..19: mol_type = other RNA
tggtggtctgtgataggcg

SEQ ID NO: 23230 - RNA, 19 nt, synthetic construct
  source 1..19: mol_type = other RNA
ggcctgggcacggcactcg

SEQ ID NO: 23231 - RNA, 19 nt, synthetic construct
  source 1..19: mol_type = other RNA
tggtggtctgtgataggcg

SEQ ID NO: 23232 - RNA, 19 nt, synthetic construct
  source 1..19: mol_type = other RNA
ggcctgggcacggcactcg

SEQ ID NO: 23233 - RNA, 19 nt, synthetic construct
  source 1..19: mol_type = other RNA
tggtggtctgtgataggcg

SEQ ID NO: 23234 - RNA, 19 nt, synthetic construct
  source 1..19: mol_type = other RNA
ggcctgggcacggcactcg

SEQ ID NO: 23235 - RNA, 19 nt, synthetic construct
  source 1..19: mol_type = other RNA
tggtggtctgtgataggcg

SEQ ID NO: 23236 - RNA, 19 nt, synthetic construct
  source 1..19: mol_type = other RNA
ggcctgggcacggcactcg

SEQ ID NO: 23237 - RNA, 19 nt, synthetic construct
  source 1..19: mol_type = other RNA
tggtggtctgtgataggcg

SEQ ID NO: 23238 - RNA, 19 nt, synthetic construct
  source 1..19: mol_type = other RNA
gggtgggcaggtgaggtcg

SEQ ID NO: 23239 - RNA, 19 nt, synthetic construct
  source 1..19: mol_type = other RNA
ccacccgtacatgaacaca

SEQ ID NO: 23240 - RNA, 19 nt, synthetic construct
  source 1..19: mol_type = other RNA
tgtacgaacacagctgagg

SEQ ID NO: 23241 - RNA, 19 nt, synthetic construct
  source 1..19: mol_type = other RNA
tggggacccttgcaccgac

SEQ ID NO: 23242 - RNA, 19 nt, synthetic construct
  source 1..19: mol_type = other RNA
tggggggcagggatcgccc

SEQ ID NO: 23243 - RNA, 19 nt, synthetic construct
  source 1..19: mol_type = other RNA
tccatggtgtgccctgcat

SEQ ID NO: 23244 - RNA, 19 nt, synthetic construct
  source 1..19: mol_type = other RNA
gtgcagccgtccacaggca

SEQ ID NO: 23245 - RNA, 19 nt, synthetic construct
  source 1..19: mol_type = other RNA
ctcggcaatgcagccccca

SEQ ID NO: 23246 - RNA, 19 nt, synthetic construct
  source 1..19: mol_type = other RNA
tcgggcgagctctggaggt

SEQ ID NO: 23247 - RNA, 19 nt, synthetic construct
  source 1..19: mol_type = other RNA
tcacatgtggggtgccagc

SEQ ID NO: 23248 - RNA, 19 nt, synthetic construct
  source 1..19: mol_type = other RNA
gtcagcactggaagggtgg

SEQ ID NO: 23249 - RNA, 19 nt, synthetic construct
  source 1..19: mol_type = other RNA
agcagttgcccgggtggag

SEQ ID NO: 23250 - RNA, 19 nt, synthetic construct
  source 1..19: mol_type = other RNA
tcacatgtggggtgccagc

SEQ ID NO: 23251 - RNA, 19 nt, synthetic construct
  source 1..19: mol_type = other RNA
gtcagcactggaagggtgg

SEQ ID NO: 23252 - RNA, 19 nt, synthetic construct
  source 1..19: mol_type = other RNA
tcacatgtggggtgccagc

SEQ ID NO: 23253 - RNA, 19 nt, synthetic construct
  source 1..19: mol_type = other RNA
gtcagcactggaagggtgg

SEQ ID NO: 23254 - RNA, 19 nt, synthetic construct
  source 1..19: mol_type = other RNA
ggggtgtgccagtcggggc

SEQ ID NO: 23255 - RNA, 19 nt, synthetic construct
  source 1..19: mol_type = other RNA
gggggtgtgccagtcgggg

SEQ ID NO: 23256 - RNA, 19 nt, synthetic construct
  source 1..19: mol_type = other RNA
tcacccttctggggccggt

SEQ ID NO: 23257 - RNA, 19 nt, synthetic construct
  source 1..19: mol_type = other RNA
gtacgaacacagctgaggt

SEQ ID NO: 23258 - RNA, 19 nt, synthetic construct
  source 1..19: mol_type = other RNA
cacggagcgcggggtgcca

SEQ ID NO: 23259 - RNA, 19 nt, synthetic construct
  source 1..19: mol_type = other RNA
agttgccccggaaggtgta

SEQ ID NO: 23260 - RNA, 19 nt, synthetic construct
  source 1..19: mol_type = other RNA
ggtggtgttagtcaagggg

SEQ ID NO: 23261 - RNA, 19 nt, synthetic construct
  source 1..19: mol_type = other RNA
gtcaccaccgtggttatgg

SEQ ID NO: 23262 - RNA, 19 nt, synthetic construct
  source 1..19: mol_type = other RNA
gtcaccaccgtggttatgg

SEQ ID NO: 23263 - RNA, 19 nt, synthetic construct
  source 1..19: mol_type = other RNA
gtcaccaccgtggttatgg

SEQ ID NO: 23264 - RNA, 19 nt, synthetic construct
  source 1..19: mol_type = other RNA
ctgtcgggcgagctctgga

SEQ ID NO: 23265 - RNA, 19 nt, synthetic construct
  source 1..19: mol_type = other RNA
gctggggtgtgggaagtca

SEQ ID NO: 23266 - RNA, 19 nt, synthetic construct
  source 1..19: mol_type = other RNA
cgggaaatttaggaaaccc

SEQ ID NO: 23267 - RNA, 19 nt, synthetic construct
  source 1..19: mol_type = other RNA
ctgggccaagatgtactcg

SEQ ID NO: 23268 - RNA, 19 nt, synthetic construct
  source 1..19: mol_type = other RNA
ttgggtccagcaggacgac

SEQ ID NO: 23269 - RNA, 19 nt, synthetic construct
  source 1..19: mol_type = other RNA
cacgtagttgcaaaggcca

SEQ ID NO: 23270 - RNA, 19 nt, synthetic construct
  source 1..19: mol_type = other RNA
gaacacgtagttgcaaagg

SEQ ID NO: 23271 - RNA, 19 nt, synthetic construct
  source 1..19: mol_type = other RNA
agaacacgtagttgcaaag

SEQ ID NO: 23272 - RNA, 19 nt, synthetic construct
  source 1..19: mol_type = other RNA
gagaacacgtagttgcaaa

SEQ ID NO: 23273 - RNA, 19 nt, synthetic construct
  source 1..19: mol_type = other RNA
ctgcccattgatgaggacg

SEQ ID NO: 23274 - RNA, 19 nt, synthetic construct
  source 1..19: mol_type = other RNA
ctcctcccgctgcccattg

SEQ ID NO: 23275 - RNA, 19 nt, synthetic construct
  source 1..19: mol_type = other RNA
tgcgcgcgctgggggttgg

SEQ ID NO: 23276 - RNA, 19 nt, synthetic construct
  source 1..19: mol_type = other RNA
cagttctccgctgtgggga

SEQ ID NO: 23277 - RNA, 19 nt, synthetic construct
  source 1..19: mol_type = other RNA
ggagggtgttgccatagaa

SEQ ID NO: 23278 - RNA, 19 nt, synthetic construct
  source 1..19: mol_type = other RNA
gctgtagtccagccactct

SEQ ID NO: 23279 - RNA, 19 nt, synthetic construct
  source 1..19: mol_type = other RNA
catgtggggtgccagcagt

SEQ ID NO: 23280 - RNA, 19 nt, synthetic construct
  source 1..19: mol_type = other RNA
ggagggtgttgccatagaa

SEQ ID NO: 23281 - RNA, 19 nt, synthetic construct
  source 1..19: mol_type = other RNA
gctgtagtccagccactct

SEQ ID NO: 23282 - RNA, 19 nt, synthetic construct
  source 1..19: mol_type = other RNA
gggtggttgcagtccttgg

SEQ ID NO: 23283 - RNA, 19 nt, synthetic construct
  source 1..19: mol_type = other RNA
gggatgggtgtaaagctgg

SEQ ID NO: 23284 - RNA, 19 nt, synthetic construct
  source 1..19: mol_type = other RNA
ggagggtgttgccatagaa

SEQ ID NO: 23285 - RNA, 19 nt, synthetic construct
  source 1..19: mol_type = other RNA
gctgtagtccagccactct

SEQ ID NO: 23286 - RNA, 19 nt, synthetic construct
  source 1..19: mol_type = other RNA
catgtggggtgccagcagt

SEQ ID NO: 23287 - RNA, 19 nt, synthetic construct
  source 1..19: mol_type = other RNA
ggagggtgttgccatagaa

SEQ ID NO: 23288 - RNA, 19 nt, synthetic construct
  source 1..19: mol_type = other RNA
gctgtagtccagccactct

SEQ ID NO: 23289 - RNA, 19 nt, synthetic construct
  source 1..19: mol_type = other RNA
gggtggttgcagtccttgg

SEQ ID NO: 23290 - RNA, 19 nt, synthetic construct
  source 1..19: mol_type = other RNA
catgtggggtgccagcagt

SEQ ID NO: 23291 - RNA, 19 nt, synthetic construct
  source 1..19: mol_type = other RNA
ggagggtgttgccatagaa

SEQ ID NO: 23292 - RNA, 19 nt, synthetic construct
  source 1..19: mol_type = other RNA
gggtggttgcagtccttgg

SEQ ID NO: 23293 - RNA, 19 nt, synthetic construct
  source 1..19: mol_type = other RNA
gggatgggtgtaaagctgg

SEQ ID NO: 23294 - RNA, 19 nt, synthetic construct
  source 1..19: mol_type = other RNA
ggaagcggtcaatgtcaca

SEQ ID NO: 23295 - RNA, 19 nt, synthetic construct
  source 1..19: mol_type = other RNA
ccccgggcgcggcagagct

SEQ ID NO: 23296 - RNA, 19 nt, synthetic construct
  source 1..19: mol_type = other RNA
tgggctctggttcctagag

SEQ ID NO: 23297 - RNA, 19 nt, synthetic construct
  source 1..19: mol_type = other RNA
ggtgatgttgacctcggtc

SEQ ID NO: 23298 - RNA, 19 nt, synthetic construct
  source 1..19: mol_type = other RNA
gcaggcacacgcgtcgttc

SEQ ID NO: 23299 - RNA, 19 nt, synthetic construct
  source 1..19: mol_type = other RNA
gtcattgatggcattgtcg

SEQ ID NO: 23300 - RNA, 19 nt, synthetic construct
  source 1..19: mol_type = other RNA
gcagatgccctcctcgtcc

SEQ ID NO: 23301 - RNA, 19 nt, synthetic construct
  source 1..19: mol_type = other RNA
gatgtcatccagcaccgtg

SEQ ID NO: 23302 - RNA, 19 nt, synthetic construct
  source 1..19: mol_type = other RNA
tgagcgtcaccgctttcag

SEQ ID NO: 23303 - RNA, 19 nt, synthetic construct
  source 1..19: mol_type = other RNA
ctgagcgtcaccgctttca

SEQ ID NO: 23304 - RNA, 19 nt, synthetic construct
  source 1..19: mol_type = other RNA
ccgcagatggcgatcaagc

SEQ ID NO: 23305 - RNA, 19 nt, synthetic construct
  source 1..19: mol_type = other RNA
gagccggtggccgtgatcg

SEQ ID NO: 23306 - RNA, 19 nt, synthetic construct
  source 1..19: mol_type = other RNA
tggagaagggggtgactcg

SEQ ID NO: 23307 - RNA, 19 nt, synthetic construct
  source 1..19: mol_type = other RNA
gagccggtggccgtgatcg

SEQ ID NO: 23308 - RNA, 19 nt, synthetic construct
  source 1..19: mol_type = other RNA
tggagaagggggtgactcg

SEQ ID NO: 23309 - RNA, 19 nt, synthetic construct
  source 1..19: mol_type = other RNA
gatgggtgtaaagctggta

SEQ ID NO: 23310 - RNA, 19 nt, synthetic construct
  source 1..19: mol_type = other RNA
tggagaagggggtgactcg

SEQ ID NO: 23311 - RNA, 19 nt, synthetic construct
  source 1..19: mol_type = other RNA
ccgtggtgatcagtgatgg

SEQ ID NO: 23312 - RNA, 19 nt, synthetic construct
  source 1..19: mol_type = other RNA
gagccggtggccgtgatcg

SEQ ID NO: 23313 - RNA, 19 nt, synthetic construct
  source 1..19: mol_type = other RNA
ccgggctggtcagcacttt

SEQ ID NO: 23314 - RNA, 19 nt, synthetic construct
  source 1..19: mol_type = other RNA
gagccggtggccgtgatcg

SEQ ID NO: 23315 - RNA, 19 nt, synthetic construct
  source 1..19: mol_type = other RNA
gatgggtgtaaagctggta

SEQ ID NO: 23316 - RNA, 19 nt, synthetic construct
  source 1..19: mol_type = other RNA
agctcagtgaggatccggg

SEQ ID NO: 23317 - RNA, 19 nt, synthetic construct
  source 1..19: mol_type = other RNA
cgcacaggccaccggttgc

SEQ ID NO: 23318 - RNA, 19 nt, synthetic construct
  source 1..19: mol_type = other RNA
attgtacgaacacagctga

SEQ ID NO: 23319 - RNA, 19 nt, synthetic construct
  source 1..19: mol_type = other RNA
acacataggcccgcacatg

SEQ ID NO: 23320 - RNA, 19 nt, synthetic construct
  source 1..19: mol_type = other RNA
tctctgacctggccgttgc

SEQ ID NO: 23321 - RNA, 19 nt, synthetic construct
  source 1..19: mol_type = other RNA
gtggaagtcaccccaggtg

SEQ ID NO: 23322 - RNA, 19 nt, synthetic construct
  source 1..19: mol_type = other RNA
cagggaagcggaagacgtc

SEQ ID NO: 23323 - RNA, 19 nt, synthetic construct
  source 1..19: mol_type = other RNA
ccagggaagcggaagacgt

SEQ ID NO: 23324 - RNA, 19 nt, synthetic construct
  source 1..19: mol_type = other RNA
ctcgtaggcggcgcggcag

SEQ ID NO: 23325 - RNA, 19 nt, synthetic construct
  source 1..19: mol_type = other RNA
gcccattgatgaggacgga

SEQ ID NO: 23326 - RNA, 19 nt, synthetic construct
  source 1..19: mol_type = other RNA
tccgttccacaggaatgtc

SEQ ID NO: 23327 - RNA, 19 nt, synthetic construct
  source 1..19: mol_type = other RNA
tgaagtccccacacaggcc

SEQ ID NO: 23328 - RNA, 19 nt, synthetic construct
  source 1..19: mol_type = other RNA
ttgaagtccccacacaggc

SEQ ID NO: 23329 - RNA, 19 nt, synthetic construct
  source 1..19: mol_type = other RNA
ggccgttgaagtccccaca

SEQ ID NO: 23330 - RNA, 19 nt, synthetic construct
  source 1..19: mol_type = other RNA
ccgcggctggccccccgcg

SEQ ID NO: 23331 - RNA, 19 nt, synthetic construct
  source 1..19: mol_type = other RNA
gccacactcctggtgctgc

SEQ ID NO: 23332 - RNA, 19 nt, synthetic construct
  source 1..19: mol_type = other RNA
gcgcgcgctgggggttgga

SEQ ID NO: 23333 - RNA, 19 nt, synthetic construct
  source 1..19: mol_type = other RNA
gtcggcacatttcttggac

SEQ ID NO: 23334 - RNA, 19 nt, synthetic construct
  source 1..19: mol_type = other RNA
tgcaccacgatgaagaagc

SEQ ID NO: 23335 - RNA, 19 nt, synthetic construct
  source 1..19: mol_type = other RNA
accaccccgctgagggccg

SEQ ID NO: 23336 - RNA, 19 nt, synthetic construct
  source 1..19: mol_type = other RNA
ccctccagtcgctgagctg

SEQ ID NO: 23337 - RNA, 19 nt, synthetic construct
  source 1..19: mol_type = other RNA
gcgctgggacttggggcag

SEQ ID NO: 23338 - RNA, 19 nt, synthetic construct
  source 1..19: mol_type = other RNA
gtgcccgccgagctgttgc

SEQ ID NO: 23339 - RNA, 19 nt, synthetic construct
  source 1..19: mol_type = other RNA
ggggtgcccgccgagctgt

SEQ ID NO: 23340 - RNA, 19 nt, synthetic construct
  source 1..19: mol_type = other RNA
atcgccatcaaaggtgatg

SEQ ID NO: 23341 - RNA, 19 nt, synthetic construct
  source 1..19: mol_type = other RNA
gtcccgtgggtggtgttgt

SEQ ID NO: 23342 - RNA, 19 nt, synthetic construct
  source 1..19: mol_type = other RNA
attgtcgtcgaagttcccg

SEQ ID NO: 23343 - RNA, 19 nt, synthetic construct
  source 1..19: mol_type = other RNA
agtcattgatggcattgtc

SEQ ID NO: 23344 - RNA, 19 nt, synthetic construct
  source 1..19: mol_type = other RNA
caaagtcattgatggcatt

SEQ ID NO: 23345 - RNA, 19 nt, synthetic construct
  source 1..19: mol_type = other RNA
agaaacactcgcagtcgcc

SEQ ID NO: 23346 - RNA, 19 nt, synthetic construct
  source 1..19: mol_type = other RNA
gagtgggggacccaggcgg

SEQ ID NO: 23347 - RNA, 19 nt, synthetic construct
  source 1..19: mol_type = other RNA
gtggacgtcacagtgcacc

SEQ ID NO: 23348 - RNA, 19 nt, synthetic construct
  source 1..19: mol_type = other RNA
catcttgaagacgccctcc

SEQ ID NO: 23349 - RNA, 19 nt, synthetic construct
  source 1..19: mol_type = other RNA
agtggtcgtcactgcagca

SEQ ID NO: 23350 - RNA, 19 nt, synthetic construct
  source 1..19: mol_type = other RNA
gcagtggtcgtcactgcag

SEQ ID NO: 23351 - RNA, 19 nt, synthetic construct
  source 1..19: mol_type = other RNA
cgtcgtggggcctcccgtg

SEQ ID NO: 23352 - RNA, 19 nt, synthetic construct
  source 1..19: mol_type = other RNA
ccccgtcgtccctggaagg

SEQ ID NO: 23353 - RNA, 19 nt, synthetic construct
  source 1..19: mol_type = other RNA
attgttgttggggccagcg

SEQ ID NO: 23354 - RNA, 19 nt, synthetic construct
  source 1..19: mol_type = other RNA
ggcctgagaggtggacagc

SEQ ID NO: 23355 - RNA, 19 nt, synthetic construct
  source 1..19: mol_type = other RNA
gtgttagtcaaggggctca

SEQ ID NO: 23356 - RNA, 19 nt, synthetic construct
  source 1..19: mol_type = other RNA
cgggtcgtgccctggctgg

SEQ ID NO: 23357 - RNA, 19 nt, synthetic construct
  source 1..19: mol_type = other RNA
ccggtggccccagttgtgg

SEQ ID NO: 23358 - RNA, 19 nt, synthetic construct
  source 1..19: mol_type = other RNA
ttggtagtgtgagctgttc

SEQ ID NO: 23359 - RNA, 19 nt, synthetic construct
  source 1..19: mol_type = other RNA
gctgatccacactggaggc

SEQ ID NO: 23360 - RNA, 19 nt, synthetic construct
  source 1..19: mol_type = other RNA
tgtgggtgtggtggttgtg

SEQ ID NO: 23361 - RNA, 19 nt, synthetic construct
  source 1..19: mol_type = other RNA
tgttgccatagaaccagtg

SEQ ID NO: 23362 - RNA, 19 nt, synthetic construct
  source 1..19: mol_type = other RNA
atgggagttgtcccaggag

SEQ ID NO: 23363 - RNA, 19 nt, synthetic construct
  source 1..19: mol_type = other RNA
cccaagatgcccgaggtgg

SEQ ID NO: 23364 - RNA, 19 nt, synthetic construct
  source 1..19: mol_type = other RNA
ggtggtaccggtggttgct

SEQ ID NO: 23365 - RNA, 19 nt, synthetic construct
  source 1..19: mol_type = other RNA
cggccgcacggatgttgga

SEQ ID NO: 23366 - RNA, 19 nt, synthetic construct
  source 1..19: mol_type = other RNA
tggccgtagagctggtggc

SEQ ID NO: 23367 - RNA, 19 nt, synthetic construct
  source 1..19: mol_type = other RNA
gaggacggggtggccgtgg

SEQ ID NO: 23368 - RNA, 19 nt, synthetic construct
  source 1..19: mol_type = other RNA
cgtggtgctcacatgtggg

SEQ ID NO: 23369 - RNA, 19 nt, synthetic construct
  source 1..19: mol_type = other RNA
tgtggacagtctctggagt

SEQ ID NO: 23370 - RNA, 19 nt, synthetic construct
  source 1..19: mol_type = other RNA
gtgtggacagtctctggag

SEQ ID NO: 23371 - RNA, 19 nt, synthetic construct
  source 1..19: mol_type = other RNA
ttggtagtgtgagctgttc

SEQ ID NO: 23372 - RNA, 19 nt, synthetic construct
  source 1..19: mol_type = other RNA
tgtgggtgtggtggttgtg

SEQ ID NO: 23373 - RNA, 19 nt, synthetic construct
  source 1..19: mol_type = other RNA
tgttgccatagaaccagtg

SEQ ID NO: 23374 - RNA, 19 nt, synthetic construct
  source 1..19: mol_type = other RNA
ggtggtaccggtggttgct

SEQ ID NO: 23375 - RNA, 19 nt, synthetic construct
  source 1..19: mol_type = other RNA
cggccgcacggatgttgga

SEQ ID NO: 23376 - RNA, 19 nt, synthetic construct
  source 1..19: mol_type = other RNA
tggccgtagagctggtggc

SEQ ID NO: 23377 - RNA, 19 nt, synthetic construct
  source 1..19: mol_type = other RNA
gctgctgtggtctgctctg

SEQ ID NO: 23378 - RNA, 19 nt, synthetic construct
  source 1..19: mol_type = other RNA
ttgcagtccttggactgga

SEQ ID NO: 23379 - RNA, 19 nt, synthetic construct
  source 1..19: mol_type = other RNA
gcagttgcccgggtggagg

SEQ ID NO: 23380 - RNA, 19 nt, synthetic construct
  source 1..19: mol_type = other RNA
tttgagggtgccagcagtt

SEQ ID NO: 23381 - RNA, 19 nt, synthetic construct
  source 1..19: mol_type = other RNA
actttgagggtgccagcag

SEQ ID NO: 23382 - RNA, 19 nt, synthetic construct
  source 1..19: mol_type = other RNA
gctgtaacgctggtagctg

SEQ ID NO: 23383 - RNA, 19 nt, synthetic construct
  source 1..19: mol_type = other RNA
gtgtggacagtctctggag

SEQ ID NO: 23384 - RNA, 19 nt, synthetic construct
  source 1..19: mol_type = other RNA
ttggtagtgtgagctgttc

SEQ ID NO: 23385 - RNA, 19 nt, synthetic construct
  source 1..19: mol_type = other RNA
gctgatccacactggaggc

SEQ ID NO: 23386 - RNA, 19 nt, synthetic construct
  source 1..19: mol_type = other RNA
tgtgggtgtggtggttgtg

SEQ ID NO: 23387 - RNA, 19 nt, synthetic construct
  source 1..19: mol_type = other RNA
tgttgccatagaaccagtg

SEQ ID NO: 23388 - RNA, 19 nt, synthetic construct
  source 1..19: mol_type = other RNA
cccaagatgcccgaggtgg

SEQ ID NO: 23389 - RNA, 19 nt, synthetic construct
  source 1..19: mol_type = other RNA
cggccgcacggatgttgga

SEQ ID NO: 23390 - RNA, 19 nt, synthetic construct
  source 1..19: mol_type = other RNA
tggccgtagagctggtggc

SEQ ID NO: 23391 - RNA, 19 nt, synthetic construct
  source 1..19: mol_type = other RNA
gaggacggggtggccgtgg

SEQ ID NO: 23392 - RNA, 19 nt, synthetic construct
  source 1..19: mol_type = other RNA
cgtggtgctcacatgtggg

SEQ ID NO: 23393 - RNA, 19 nt, synthetic construct
  source 1..19: mol_type = other RNA
ttggtagtgtgagctgttc

SEQ ID NO: 23394 - RNA, 19 nt, synthetic construct
  source 1..19: mol_type = other RNA
gctgatccacactggaggc

SEQ ID NO: 23395 - RNA, 19 nt, synthetic construct
  source 1..19: mol_type = other RNA
tgtgggtgtggtggttgtg

SEQ ID NO: 23396 - RNA, 19 nt, synthetic construct
  source 1..19: mol_type = other RNA
tgttgccatagaaccagtg

SEQ ID NO: 23397 - RNA, 19 nt, synthetic construct
  source 1..19: mol_type = other RNA
gtagtggccgtggtgatca

SEQ ID NO: 23398 - RNA, 19 nt, synthetic construct
  source 1..19: mol_type = other RNA
ggtggtaccggtggttgct

SEQ ID NO: 23399 - RNA, 19 nt, synthetic construct
  source 1..19: mol_type = other RNA
cggccgcacggatgttgga

SEQ ID NO: 23400 - RNA, 19 nt, synthetic construct
  source 1..19: mol_type = other RNA
tggccgtagagctggtggc

SEQ ID NO: 23401 - RNA, 19 nt, synthetic construct
  source 1..19: mol_type = other RNA
gaggacggggtggccgtgg

SEQ ID NO: 23402 - RNA, 19 nt, synthetic construct
  source 1..19: mol_type = other RNA
ttgcagtccttggactgga

SEQ ID NO: 23403 - RNA, 19 nt, synthetic construct
  source 1..19: mol_type = other RNA
tggccacgggtgtggtggt

SEQ ID NO: 23404 - RNA, 19 nt, synthetic construct
  source 1..19: mol_type = other RNA
gaggacggggtggccgtgg

SEQ ID NO: 23405 - RNA, 19 nt, synthetic construct
  source 1..19: mol_type = other RNA
cgtggtgctcacatgtggg

SEQ ID NO: 23406 - RNA, 19 nt, synthetic construct
  source 1..19: mol_type = other RNA
tgtggacagtctctggagt

SEQ ID NO: 23407 - RNA, 19 nt, synthetic construct
  source 1..19: mol_type = other RNA
gtgtggacagtctctggag

SEQ ID NO: 23408 - RNA, 19 nt, synthetic construct
  source 1..19: mol_type = other RNA
ttggtagtgtgagctgttc

SEQ ID NO: 23409 - RNA, 19 nt, synthetic construct
  source 1..19: mol_type = other RNA
gctgatccacactggaggc

SEQ ID NO: 23410 - RNA, 19 nt, synthetic construct
  source 1..19: mol_type = other RNA
tgtgggtgtggtggttgtg

SEQ ID NO: 23411 - RNA, 19 nt, synthetic construct
  source 1..19: mol_type = other RNA
tgttgccatagaaccagtg

SEQ ID NO: 23412 - RNA, 19 nt, synthetic construct
  source 1..19: mol_type = other RNA
ttgcagtccttggactgga

SEQ ID NO: 23413 - RNA, 19 nt, synthetic construct
  source 1..19: mol_type = other RNA
gtggccgtggaattggtgg

SEQ ID NO: 23414 - RNA, 19 nt, synthetic construct
  source 1..19: mol_type = other RNA
gcagtggctgtgggcatag

SEQ ID NO: 23415 - RNA, 19 nt, synthetic construct
  source 1..19: mol_type = other RNA
aggggtgcgggtggtcccc

SEQ ID NO: 23416 - RNA, 19 nt, synthetic construct
  source 1..19: mol_type = other RNA
ggggagcactgcaggggtg

SEQ ID NO: 23417 - RNA, 19 nt, synthetic construct
  source 1..19: mol_type = other RNA
ccctggaagcggtcaatgt

SEQ ID NO: 23418 - RNA, 19 nt, synthetic construct
  source 1..19: mol_type = other RNA
aggcgccctggaagcggtc

SEQ ID NO: 23419 - RNA, 19 nt, synthetic construct
  source 1..19: mol_type = other RNA
ggtggaatagtgggagccg

SEQ ID NO: 23420 - RNA, 19 nt, synthetic construct
  source 1..19: mol_type = other RNA
ggtgcagttgccccggaag

SEQ ID NO: 23421 - RNA, 19 nt, synthetic construct
  source 1..19: mol_type = other RNA
aggtgcagttgccccggaa

SEQ ID NO: 23422 - RNA, 19 nt, synthetic construct
  source 1..19: mol_type = other RNA
cgtgcagtagtggttgtcc

SEQ ID NO: 23423 - RNA, 19 nt, synthetic construct
  source 1..19: mol_type = other RNA
agtggatgctgagggcgcg

SEQ ID NO: 23424 - RNA, 19 nt, synthetic construct
  source 1..19: mol_type = other RNA
ccacacgcatggtggtggt

SEQ ID NO: 23425 - RNA, 19 nt, synthetic construct
  source 1..19: mol_type = other RNA
ccagccacgtcttggccat

SEQ ID NO: 23426 - RNA, 19 nt, synthetic construct
  source 1..19: mol_type = other RNA
gcccgggggcacaaggttg

SEQ ID NO: 23427 - RNA, 19 nt, synthetic construct
  source 1..19: mol_type = other RNA
ccgggcgcggcagagctct

SEQ ID NO: 23428 - RNA, 19 nt, synthetic construct
  source 1..19: mol_type = other RNA
tggcttgtacactttggtg

SEQ ID NO: 23429 - RNA, 19 nt, synthetic construct
  source 1..19: mol_type = other RNA
gttcctagagttgcaggtg

SEQ ID NO: 23430 - RNA, 19 nt, synthetic construct
  source 1..19: mol_type = other RNA
ggttcctagagttgcaggt

SEQ ID NO: 23431 - RNA, 19 nt, synthetic construct
  source 1..19: mol_type = other RNA
ctggttcctagagttgcag

SEQ ID NO: 23432 - RNA, 19 nt, synthetic construct
  source 1..19: mol_type = other RNA
aagaggatctggtcctcag

SEQ ID NO: 23433 - RNA, 19 nt, synthetic construct
  source 1..19: mol_type = other RNA
tccccgggaaatttaggaa

SEQ ID NO: 23434 - RNA, 19 nt, synthetic construct
  source 1..19: mol_type = other RNA
accctcgtcacacacgcag

SEQ ID NO: 23435 - RNA, 19 nt, synthetic construct
  source 1..19: mol_type = other RNA
gaggcaggtacacatgtgg

SEQ ID NO: 23436 - RNA, 19 nt, synthetic construct
  source 1..19: mol_type = other RNA
gacaggtagtattgttgca

SEQ ID NO: 23437 - RNA, 19 nt, synthetic construct
  source 1..19: mol_type = other RNA
gagccctcgcagaaggtga

SEQ ID NO: 23438 - RNA, 19 nt, synthetic construct
  source 1..19: mol_type = other RNA
aggagccctcgcagaaggt

SEQ ID NO: 23439 - RNA, 19 nt, synthetic construct
  source 1..19: mol_type = other RNA
ggacagtgcaagggcaccg

SEQ ID NO: 23440 - RNA, 19 nt, synthetic construct
  source 1..19: mol_type = other RNA
gggaagccacgggtgtgtg

SEQ ID NO: 23441 - RNA, 19 nt, synthetic construct
  source 1..19: mol_type = other RNA
acaatgcacatcctggctc

SEQ ID NO: 23442 - RNA, 19 nt, synthetic construct
  source 1..19: mol_type = other RNA
gacaatgcacatcctggct

SEQ ID NO: 23443 - RNA, 19 nt, synthetic construct
  source 1..19: mol_type = other RNA
gcatggacaggcggccgcc

SEQ ID NO: 23444 - RNA, 19 nt, synthetic construct
  source 1..19: mol_type = other RNA
aggacagtgcaagggcacc

SEQ ID NO: 23445 - RNA, 19 nt, synthetic construct
  source 1..19: mol_type = other RNA
gctgcgcgcgctgggggtt

SEQ ID NO: 23446 - RNA, 19 nt, synthetic construct
  source 1..19: mol_type = other RNA
tcctgggcgggcacacagg

SEQ ID NO: 23447 - RNA, 19 nt, synthetic construct
  source 1..19: mol_type = other RNA
ggcacttcgggtagcagcc

SEQ ID NO: 23448 - RNA, 19 nt, synthetic construct
  source 1..19: mol_type = other RNA
gtccttgtcgtagcagcca

SEQ ID NO: 23449 - RNA, 19 nt, synthetic construct
  source 1..19: mol_type = other RNA
agctgcgccgcccggcact

SEQ ID NO: 23450 - RNA, 19 nt, synthetic construct
  source 1..19: mol_type = other RNA
agtctgcgaggtgagggcc

SEQ ID NO: 23451 - RNA, 19 nt, synthetic construct
  source 1..19: mol_type = other RNA
gtggtggtacctggggccg

SEQ ID NO: 23452 - RNA, 19 nt, synthetic construct
  source 1..19: mol_type = other RNA
agtggacgtcacagtgcac

SEQ ID NO: 23453 - RNA, 19 nt, synthetic construct
  source 1..19: mol_type = other RNA
agctccccgtcgtccctgg

SEQ ID NO: 23454 - RNA, 19 nt, synthetic construct
  source 1..19: mol_type = other RNA
cgtggttatgggggccgat

SEQ ID NO: 23455 - RNA, 19 nt, synthetic construct
  source 1..19: mol_type = other RNA
gggtgtgggaagtccccgt

SEQ ID NO: 23456 - RNA, 19 nt, synthetic construct
  source 1..19: mol_type = other RNA
attggggccgatgtggggc

SEQ ID NO: 23457 - RNA, 19 nt, synthetic construct
  source 1..19: mol_type = other RNA
agggtcccggtggtcccaa

SEQ ID NO: 23458 - RNA, 19 nt, synthetic construct
  source 1..19: mol_type = other RNA
cgtggttatgggggccgat

SEQ ID NO: 23459 - RNA, 19 nt, synthetic construct
  source 1..19: mol_type = other RNA
gggtgtgggaagtccccgt

SEQ ID NO: 23460 - RNA, 19 nt, synthetic construct
  source 1..19: mol_type = other RNA
cgtggttatgggggccgat

SEQ ID NO: 23461 - RNA, 19 nt, synthetic construct
  source 1..19: mol_type = other RNA
agggtcccggtggtcccaa

SEQ ID NO: 23462 - RNA, 19 nt, synthetic construct
  source 1..19: mol_type = other RNA
cgggaagccacgggtgtgt

SEQ ID NO: 23463 - RNA, 19 nt, synthetic construct
  source 1..19: mol_type = other RNA
atagaactcgttgaaggcc

SEQ ID NO: 23464 - RNA, 19 nt, synthetic construct
  source 1..19: mol_type = other RNA
ctgttgggatcggtcaggc

SEQ ID NO: 23465 - RNA, 19 nt, synthetic construct
  source 1..19: mol_type = other RNA
gtggaggacgggatggccg

SEQ ID NO: 23466 - RNA, 19 nt, synthetic construct
  source 1..19: mol_type = other RNA
gaaggaggggatgggtgta

SEQ ID NO: 23467 - RNA, 19 nt, synthetic construct
  source 1..19: mol_type = other RNA
cgttaggacagtgcaaggg

SEQ ID NO: 23468 - RNA, 19 nt, synthetic construct
  source 1..19: mol_type = other RNA
cctcggcaatgcagccccc

SEQ ID NO: 23469 - RNA, 19 nt, synthetic construct
  source 1..19: mol_type = other RNA
ttgtgcacacaggggcagt

SEQ ID NO: 23470 - RNA, 19 nt, synthetic construct
  source 1..19: mol_type = other RNA
gggcacttcgggtagcagc

SEQ ID NO: 23471 - RNA, 19 nt, synthetic construct
  source 1..19: mol_type = other RNA
cgtccttgtcgtagcagcc

SEQ ID NO: 23472 - RNA, 19 nt, synthetic construct
  source 1..19: mol_type = other RNA
acccatagggtggtctttt

SEQ ID NO: 23473 - RNA, 19 nt, synthetic construct
  source 1..19: mol_type = other RNA
cagtctgcgaggtgagggc

SEQ ID NO: 23474 - RNA, 19 nt, synthetic construct
  source 1..19: mol_type = other RNA
cagtggtcgtcactgcagc

SEQ ID NO: 23475 - RNA, 19 nt, synthetic construct
  source 1..19: mol_type = other RNA
tgctgatccacactggagg

SEQ ID NO: 23476 - RNA, 19 nt, synthetic construct
  source 1..19: mol_type = other RNA
tctgtgtgctagaggaggg

SEQ ID NO: 23477 - RNA, 19 nt, synthetic construct
  source 1..19: mol_type = other RNA
gtgggtggtccctagggca

SEQ ID NO: 23478 - RNA, 19 nt, synthetic construct
  source 1..19: mol_type = other RNA
aagatgcccgaggtggccg

SEQ ID NO: 23479 - RNA, 19 nt, synthetic construct
  source 1..19: mol_type = other RNA
agctgtagtccagccactc

SEQ ID NO: 23480 - RNA, 19 nt, synthetic construct
  source 1..19: mol_type = other RNA
tctgtgtgctagaggaggg

SEQ ID NO: 23481 - RNA, 19 nt, synthetic construct
  source 1..19: mol_type = other RNA
gtgggtggtccctagggca

SEQ ID NO: 23482 - RNA, 19 nt, synthetic construct
  source 1..19: mol_type = other RNA
agctgtagtccagccactc

SEQ ID NO: 23483 - RNA, 19 nt, synthetic construct
  source 1..19: mol_type = other RNA
cagcactggaagggtggtt

SEQ ID NO: 23484 - RNA, 19 nt, synthetic construct
  source 1..19: mol_type = other RNA
tgataggcgggtccaggcg

SEQ ID NO: 23485 - RNA, 19 nt, synthetic construct
  source 1..19: mol_type = other RNA
tgctgatccacactggagg

SEQ ID NO: 23486 - RNA, 19 nt, synthetic construct
  source 1..19: mol_type = other RNA
tctgtgtgctagaggaggg

SEQ ID NO: 23487 - RNA, 19 nt, synthetic construct
  source 1..19: mol_type = other RNA
gtggagccggtggctgtga

SEQ ID NO: 23488 - RNA, 19 nt, synthetic construct
  source 1..19: mol_type = other RNA
gtgggtggtccctagggca

SEQ ID NO: 23489 - RNA, 19 nt, synthetic construct
  source 1..19: mol_type = other RNA
aagatgcccgaggtggccg

SEQ ID NO: 23490 - RNA, 19 nt, synthetic construct
  source 1..19: mol_type = other RNA
agctgtagtccagccactc

SEQ ID NO: 23491 - RNA, 19 nt, synthetic construct
  source 1..19: mol_type = other RNA
tgctgatccacactggagg

SEQ ID NO: 23492 - RNA, 19 nt, synthetic construct
  source 1..19: mol_type = other RNA
tctgtgtgctagaggaggg

SEQ ID NO: 23493 - RNA, 19 nt, synthetic construct
  source 1..19: mol_type = other RNA
gtgggtggtccctagggca

SEQ ID NO: 23494 - RNA, 19 nt, synthetic construct
  source 1..19: mol_type = other RNA
agctgtagtccagccactc

SEQ ID NO: 23495 - RNA, 19 nt, synthetic construct
  source 1..19: mol_type = other RNA
cagcactggaagggtggtt

SEQ ID NO: 23496 - RNA, 19 nt, synthetic construct
  source 1..19: mol_type = other RNA
tgctgatccacactggagg

SEQ ID NO: 23497 - RNA, 19 nt, synthetic construct
  source 1..19: mol_type = other RNA
tctgtgtgctagaggaggg

SEQ ID NO: 23498 - RNA, 19 nt, synthetic construct
  source 1..19: mol_type = other RNA
cagcactggaagggtggtt

SEQ ID NO: 23499 - RNA, 19 nt, synthetic construct
  source 1..19: mol_type = other RNA
aggtgtgggtggtctctgg

SEQ ID NO: 23500 - RNA, 19 nt, synthetic construct
  source 1..19: mol_type = other RNA
tggaggtgtgggtggtctc

SEQ ID NO: 23501 - RNA, 19 nt, synthetic construct
  source 1..19: mol_type = other RNA
ggtgaggtcgcacaggcca

SEQ ID NO: 23502 - RNA, 19 nt, synthetic construct
  source 1..19: mol_type = other RNA
aaggttttcatgatcagac

SEQ ID NO: 23503 - RNA, 19 nt, synthetic construct
  source 1..19: mol_type = other RNA
gggtgcccgccgagctgtt

SEQ ID NO: 23504 - RNA, 19 nt, synthetic construct
  source 1..19: mol_type = other RNA
ttctcatcataggtggaga

SEQ ID NO: 23505 - RNA, 19 nt, synthetic construct
  source 1..19: mol_type = other RNA
tgatgttgacctcggtctc

SEQ ID NO: 23506 - RNA, 19 nt, synthetic construct
  source 1..19: mol_type = other RNA
gtgctgtccaccagtgcgt

SEQ ID NO: 23507 - RNA, 19 nt, synthetic construct
  source 1..19: mol_type = other RNA
gtgggcacttcgggtagca

SEQ ID NO: 23508 - RNA, 19 nt, synthetic construct
  source 1..19: mol_type = other RNA
ggcatgtcgggaagctgcg

SEQ ID NO: 23509 - RNA, 19 nt, synthetic construct
  source 1..19: mol_type = other RNA
tggccgtggtggtcagtga

SEQ ID NO: 23510 - RNA, 19 nt, synthetic construct
  source 1..19: mol_type = other RNA
tggccgtggtgtggcccgg

SEQ ID NO: 23511 - RNA, 19 nt, synthetic construct
  source 1..19: mol_type = other RNA
agggtcgaggtgcgggtct

SEQ ID NO: 23512 - RNA, 19 nt, synthetic construct
  source 1..19: mol_type = other RNA
tggccgtggtggtcagtga

SEQ ID NO: 23513 - RNA, 19 nt, synthetic construct
  source 1..19: mol_type = other RNA
agggtcgaggtgcgggtct

SEQ ID NO: 23514 - RNA, 19 nt, synthetic construct
  source 1..19: mol_type = other RNA
tgtgggtggtctccggagt

SEQ ID NO: 23515 - RNA, 19 nt, synthetic construct
  source 1..19: mol_type = other RNA
tggccgtggtggtcagtga

SEQ ID NO: 23516 - RNA, 19 nt, synthetic construct
  source 1..19: mol_type = other RNA
agggtcgaggtgcgggtct

SEQ ID NO: 23517 - RNA, 19 nt, synthetic construct
  source 1..19: mol_type = other RNA
tggccgtggtgtggcccgg

SEQ ID NO: 23518 - RNA, 19 nt, synthetic construct
  source 1..19: mol_type = other RNA
agggtcgaggtgcgggtct

SEQ ID NO: 23519 - RNA, 19 nt, synthetic construct
  source 1..19: mol_type = other RNA
ggaggaggggatgggtgta

SEQ ID NO: 23520 - RNA, 19 nt, synthetic construct
  source 1..19: mol_type = other RNA
tgtgggtggtctccggagt

SEQ ID NO: 23521 - RNA, 19 nt, synthetic construct
  source 1..19: mol_type = other RNA
tggccgtggtggtcagtga

SEQ ID NO: 23522 - RNA, 19 nt, synthetic construct
  source 1..19: mol_type = other RNA
ggaggaggggatgggtgta

SEQ ID NO: 23523 - RNA, 19 nt, synthetic construct
  source 1..19: mol_type = other RNA
gaggcagaacgttctcaga

SEQ ID NO: 23524 - RNA, 19 nt, synthetic construct
  source 1..19: mol_type = other RNA
tgatgaggacggagccgtt

SEQ ID NO: 23525 - RNA, 19 nt, synthetic construct
  source 1..19: mol_type = other RNA
cccgctgcccattgatgag

SEQ ID NO: 23526 - RNA, 19 nt, synthetic construct
  source 1..19: mol_type = other RNA
ggaatgtcagcaccagccg

SEQ ID NO: 23527 - RNA, 19 nt, synthetic construct
  source 1..19: mol_type = other RNA
ccacactcctggtgctgca

SEQ ID NO: 23528 - RNA, 19 nt, synthetic construct
  source 1..19: mol_type = other RNA
gtccacacagtggtcctcg

SEQ ID NO: 23529 - RNA, 19 nt, synthetic construct
  source 1..19: mol_type = other RNA
cgtgatgtcatccagcacc

SEQ ID NO: 23530 - RNA, 19 nt, synthetic construct
  source 1..19: mol_type = other RNA
tttctcatcataggtggag

SEQ ID NO: 23531 - RNA, 19 nt, synthetic construct
  source 1..19: mol_type = other RNA
cagttctcgttgtccgtca

SEQ ID NO: 23532 - RNA, 19 nt, synthetic construct
  source 1..19: mol_type = other RNA
agcgtcaccgctttcaggc

SEQ ID NO: 23533 - RNA, 19 nt, synthetic construct
  source 1..19: mol_type = other RNA
acgccgccgtccgcttgga

SEQ ID NO: 23534 - RNA, 19 nt, synthetic construct
  source 1..19: mol_type = other RNA
aggcctgtctgcaccacga

SEQ ID NO: 23535 - RNA, 19 nt, synthetic construct
  source 1..19: mol_type = other RNA
cctccagtcgctgagctgt

SEQ ID NO: 23536 - RNA, 19 nt, synthetic construct
  source 1..19: mol_type = other RNA
ccctcgtcgtgcaccacct

SEQ ID NO: 23537 - RNA, 19 nt, synthetic construct
  source 1..19: mol_type = other RNA
cgatcgccatcaaaggtga

SEQ ID NO: 23538 - RNA, 19 nt, synthetic construct
  source 1..19: mol_type = other RNA
cctgggccaagatgtactc

SEQ ID NO: 23539 - RNA, 19 nt, synthetic construct
  source 1..19: mol_type = other RNA
gcccgcgtcgtggcaggcc

SEQ ID NO: 23540 - RNA, 19 nt, synthetic construct
  source 1..19: mol_type = other RNA
tagctgtaggtcctgtcct

SEQ ID NO: 23541 - RNA, 19 nt, synthetic construct
  source 1..19: mol_type = other RNA
cgcatgcggtcacagtcca

SEQ ID NO: 23542 - RNA, 19 nt, synthetic construct
  source 1..19: mol_type = other RNA
ggtggtggtacctggggcc

SEQ ID NO: 23543 - RNA, 19 nt, synthetic construct
  source 1..19: mol_type = other RNA
acaccaggccgaagtggac

SEQ ID NO: 23544 - RNA, 19 nt, synthetic construct
  source 1..19: mol_type = other RNA
tggtcagccccgggctact

SEQ ID NO: 23545 - RNA, 19 nt, synthetic construct
  source 1..19: mol_type = other RNA
ttgtgtatctgggggatgt

SEQ ID NO: 23546 - RNA, 19 nt, synthetic construct
  source 1..19: mol_type = other RNA
ctggaagggctgagcgtgt

SEQ ID NO: 23547 - RNA, 19 nt, synthetic construct
  source 1..19: mol_type = other RNA
caagatgcccgaggtggcc

SEQ ID NO: 23548 - RNA, 19 nt, synthetic construct
  source 1..19: mol_type = other RNA
ggagaagggggtgactcgg

SEQ ID NO: 23549 - RNA, 19 nt, synthetic construct
  source 1..19: mol_type = other RNA
ggagaagggggtgactcgg

SEQ ID NO: 23550 - RNA, 19 nt, synthetic construct
  source 1..19: mol_type = other RNA
tgtggaggtgtgggtggtc

SEQ ID NO: 23551 - RNA, 19 nt, synthetic construct
  source 1..19: mol_type = other RNA
cgggtccaggcggtgccca

SEQ ID NO: 23552 - RNA, 19 nt, synthetic construct
  source 1..19: mol_type = other RNA
caagatgcccgaggtggcc

SEQ ID NO: 23553 - RNA, 19 nt, synthetic construct
  source 1..19: mol_type = other RNA
ggagaagggggtgactcgg

SEQ ID NO: 23554 - RNA, 19 nt, synthetic construct
  source 1..19: mol_type = other RNA
cccaactcccccaggggga

SEQ ID NO: 23555 - RNA, 19 nt, synthetic construct
  source 1..19: mol_type = other RNA
tgtggaggtgtgggtggtc

SEQ ID NO: 23556 - RNA, 19 nt, synthetic construct
  source 1..19: mol_type = other RNA
tgtggaggtgtgggtggtc

SEQ ID NO: 23557 - RNA, 19 nt, synthetic construct
  source 1..19: mol_type = other RNA
gaggcggtggccgtggaac

SEQ ID NO: 23558 - RNA, 19 nt, synthetic construct
  source 1..19: mol_type = other RNA
cctggaagcggtcaatgtc

SEQ ID NO: 23559 - RNA, 19 nt, synthetic construct
  source 1..19: mol_type = other RNA
gtgggacaggcgccctgga

SEQ ID NO: 23560 - RNA, 19 nt, synthetic construct
  source 1..19: mol_type = other RNA
acagcggggcggaggacac

SEQ ID NO: 23561 - RNA, 19 nt, synthetic construct
  source 1..19: mol_type = other RNA
gcaggtgacgttggccaca

SEQ ID NO: 23562 - RNA, 19 nt, synthetic construct
  source 1..19: mol_type = other RNA
tcccaaagcgtgcatggat

SEQ ID NO: 23563 - RNA, 19 nt, synthetic construct
  source 1..19: mol_type = other RNA
accagccacgtcttggcca

SEQ ID NO: 23564 - RNA, 19 nt, synthetic construct
  source 1..19: mol_type = other RNA
aggtgaggtcgcacaggcc

SEQ ID NO: 23565 - RNA, 19 nt, synthetic construct
  source 1..19: mol_type = other RNA
tctggttcctagagttgca

SEQ ID NO: 23566 - RNA, 19 nt, synthetic construct
  source 1..19: mol_type = other RNA
acaccgtctcggggcagca

SEQ ID NO: 23567 - RNA, 19 nt, synthetic construct
  source 1..19: mol_type = other RNA
gggacagcagtcgccctcc

SEQ ID NO: 23568 - RNA, 19 nt, synthetic construct
  source 1..19: mol_type = other RNA
tcagcctcacagaggtaca

SEQ ID NO: 23569 - RNA, 19 nt, synthetic construct
  source 1..19: mol_type = other RNA
gtgggggagccatgggcgc

SEQ ID NO: 23570 - RNA, 19 nt, synthetic construct
  source 1..19: mol_type = other RNA
acccttctggggccggttt

SEQ ID NO: 23571 - RNA, 19 nt, synthetic construct
  source 1..19: mol_type = other RNA
cgggcgctccggccgtggc

SEQ ID NO: 23572 - RNA, 19 nt, synthetic construct
  source 1..19: mol_type = other RNA
ccgtgctgcgcgggcgctc

SEQ ID NO: 23573 - RNA, 19 nt, synthetic construct
  source 1..19: mol_type = other RNA
cagcctgtctgccccagcg

SEQ ID NO: 23574 - RNA, 19 nt, synthetic construct
  source 1..19: mol_type = other RNA
cagcaggcatggacaggcg

SEQ ID NO: 23575 - RNA, 19 nt, synthetic construct
  source 1..19: mol_type = other RNA
ttctcgttgtccgtcaggc

SEQ ID NO: 23576 - RNA, 19 nt, synthetic construct
  source 1..19: mol_type = other RNA
tcaaagctgtagcgatcgc

SEQ ID NO: 23577 - RNA, 19 nt, synthetic construct
  source 1..19: mol_type = other RNA
ctctgggcggtgcccattg

SEQ ID NO: 23578 - RNA, 19 nt, synthetic construct
  source 1..19: mol_type = other RNA
taggtgtcaaagtccccgc

SEQ ID NO: 23579 - RNA, 19 nt, synthetic construct
  source 1..19: mol_type = other RNA
taggtgtcaaagtccccgc

SEQ ID NO: 23580 - RNA, 19 nt, synthetic construct
  source 1..19: mol_type = other RNA
taggtgtcaaagtccccgc

SEQ ID NO: 23581 - RNA, 19 nt, synthetic construct
  source 1..19: mol_type = other RNA
taggtgtcaaagtccccgc

SEQ ID NO: 23582 - RNA, 19 nt, synthetic construct
  source 1..19: mol_type = other RNA
gctgaccttgatgtagtcc

SEQ ID NO: 23583 - RNA, 19 nt, synthetic construct
  source 1..19: mol_type = other RNA
ggcgcaggcggccaggtac

SEQ ID NO: 23584 - RNA, 19 nt, synthetic construct
  source 1..19: mol_type = other RNA
gttgggatcggtcaggcgc

SEQ ID NO: 23585 - RNA, 19 nt, synthetic construct
  source 1..19: mol_type = other RNA
gccctggggacaggtagta

SEQ ID NO: 23586 - RNA, 19 nt, synthetic construct
  source 1..19: mol_type = other RNA
aaggtgatgttgacctcgg

SEQ ID NO: 23587 - RNA, 19 nt, synthetic construct
  source 1..19: mol_type = other RNA
tctgacctggccgttgcga

SEQ ID NO: 23588 - RNA, 19 nt, synthetic construct
  source 1..19: mol_type = other RNA
cccactcccatccgacacc

SEQ ID NO: 23589 - RNA, 19 nt, synthetic construct
  source 1..19: mol_type = other RNA
gcaggctgtatggggccgc

SEQ ID NO: 23590 - RNA, 19 nt, synthetic construct
  source 1..19: mol_type = other RNA
gaggccgttgaagtcccca

SEQ ID NO: 23591 - RNA, 19 nt, synthetic construct
  source 1..19: mol_type = other RNA
cagatgccctcctcgtccg

SEQ ID NO: 23592 - RNA, 19 nt, synthetic construct
  source 1..19: mol_type = other RNA
cacagtggtcctcgcagag

SEQ ID NO: 23593 - RNA, 19 nt, synthetic construct
  source 1..19: mol_type = other RNA
aaggtcccgtgggtggtgt

SEQ ID NO: 23594 - RNA, 19 nt, synthetic construct
  source 1..19: mol_type = other RNA
ggtgggcacttcgggtagc

SEQ ID NO: 23595 - RNA, 19 nt, synthetic construct
  source 1..19: mol_type = other RNA
gggtgggcacttcgggtag

SEQ ID NO: 23596 - RNA, 19 nt, synthetic construct
  source 1..19: mol_type = other RNA
ttgcttccgcagatggcga

SEQ ID NO: 23597 - RNA, 19 nt, synthetic construct
  source 1..19: mol_type = other RNA
tggctgtgcctgtcgggcg

SEQ ID NO: 23598 - RNA, 19 nt, synthetic construct
  source 1..19: mol_type = other RNA
ctggagaagggggtgactc

SEQ ID NO: 23599 - RNA, 19 nt, synthetic construct
  source 1..19: mol_type = other RNA
gcccctccggccgcacgga

SEQ ID NO: 23600 - RNA, 19 nt, synthetic construct
  source 1..19: mol_type = other RNA
ctggagaagggggtgactc

SEQ ID NO: 23601 - RNA, 19 nt, synthetic construct
  source 1..19: mol_type = other RNA
gcccctccggccgcacgga

SEQ ID NO: 23602 - RNA, 19 nt, synthetic construct
  source 1..19: mol_type = other RNA
ctggagaagggggtgactc

SEQ ID NO: 23603 - RNA, 19 nt, synthetic construct
  source 1..19: mol_type = other RNA
gcccctccggccgcacgga

SEQ ID NO: 23604 - RNA, 19 nt, synthetic construct
  source 1..19: mol_type = other RNA
gcccctccggccgcacgga

SEQ ID NO: 23605 - RNA, 19 nt, synthetic construct
  source 1..19: mol_type = other RNA
aggaggggatgggtgtaac

SEQ ID NO: 23606 - RNA, 19 nt, synthetic construct
  source 1..19: mol_type = other RNA
gcaggtggttgtgttgcac

SEQ ID NO: 23607 - RNA, 19 nt, synthetic construct
  source 1..19: mol_type = other RNA
tgcacacccgcccattgtg

SEQ ID NO: 23608 - RNA, 19 nt, synthetic construct
  source 1..19: mol_type = other RNA
gccagggaagcggaagacg

SEQ ID NO: 23609 - RNA, 19 nt, synthetic construct
  source 1..19: mol_type = other RNA
aggcctcggcgtagctgga

SEQ ID NO: 23610 - RNA, 19 nt, synthetic construct
  source 1..19: mol_type = other RNA
ggaggccagtgcggctgta

SEQ ID NO: 23611 - RNA, 19 nt, synthetic construct
  source 1..19: mol_type = other RNA
gaccttgatgtagtccccg

SEQ ID NO: 23612 - RNA, 19 nt, synthetic construct
  source 1..19: mol_type = other RNA
cgcaggcggccaggtacgc

SEQ ID NO: 23613 - RNA, 19 nt, synthetic construct
  source 1..19: mol_type = other RNA
gcgcaggcggccaggtacg

SEQ ID NO: 23614 - RNA, 19 nt, synthetic construct
  source 1..19: mol_type = other RNA
aaggaggtgcccgggctgt

SEQ ID NO: 23615 - RNA, 19 nt, synthetic construct
  source 1..19: mol_type = other RNA
gtgaagctgctgtcggcac

SEQ ID NO: 23616 - RNA, 19 nt, synthetic construct
  source 1..19: mol_type = other RNA
gtccctccagtcgctgagc

SEQ ID NO: 23617 - RNA, 19 nt, synthetic construct
  source 1..19: mol_type = other RNA
tggcaggcatccaccacgt

SEQ ID NO: 23618 - RNA, 19 nt, synthetic construct
  source 1..19: mol_type = other RNA
gctggcaggcatccaccac

SEQ ID NO: 23619 - RNA, 19 nt, synthetic construct
  source 1..19: mol_type = other RNA
ctcccaggcagcttagctt

SEQ ID NO: 23620 - RNA, 19 nt, synthetic construct
  source 1..19: mol_type = other RNA
ccccactcccatccgacac

SEQ ID NO: 23621 - RNA, 19 nt, synthetic construct
  source 1..19: mol_type = other RNA
tgccactgggtgtgcagtt

SEQ ID NO: 23622 - RNA, 19 nt, synthetic construct
  source 1..19: mol_type = other RNA
cgggagggccgggcttgtc

SEQ ID NO: 23623 - RNA, 19 nt, synthetic construct
  source 1..19: mol_type = other RNA
tcaggttttcaaacgtctc

SEQ ID NO: 23624 - RNA, 19 nt, synthetic construct
  source 1..19: mol_type = other RNA
agcccccgcatgcggtcac

SEQ ID NO: 23625 - RNA, 19 nt, synthetic construct
  source 1..19: mol_type = other RNA
ggctgtaccaagggtgctt

SEQ ID NO: 23626 - RNA, 19 nt, synthetic construct
  source 1..19: mol_type = other RNA
gtggtggtgttagtcaagg

SEQ ID NO: 23627 - RNA, 19 nt, synthetic construct
  source 1..19: mol_type = other RNA
ctcagggtggaggtcgggg

SEQ ID NO: 23628 - RNA, 19 nt, synthetic construct
  source 1..19: mol_type = other RNA
aagggctggagtcgagtgc

SEQ ID NO: 23629 - RNA, 19 nt, synthetic construct
  source 1..19: mol_type = other RNA
cccctccggccgcacggat

SEQ ID NO: 23630 - RNA, 19 nt, synthetic construct
  source 1..19: mol_type = other RNA
cagggctggagtcgagtgc

SEQ ID NO: 23631 - RNA, 19 nt, synthetic construct
  source 1..19: mol_type = other RNA
cccctccggccgcacggat

SEQ ID NO: 23632 - RNA, 19 nt, synthetic construct
  source 1..19: mol_type = other RNA
cagggctggagtcgagtgc

SEQ ID NO: 23633 - RNA, 19 nt, synthetic construct
  source 1..19: mol_type = other RNA
cccctccggccgcacggat

SEQ ID NO: 23634 - RNA, 19 nt, synthetic construct
  source 1..19: mol_type = other RNA
tagtggccgtggtgatcag

SEQ ID NO: 23635 - RNA, 19 nt, synthetic construct
  source 1..19: mol_type = other RNA
cagggctggagtcgagtgc

SEQ ID NO: 23636 - RNA, 19 nt, synthetic construct
  source 1..19: mol_type = other RNA
cccctccggccgcacggat

SEQ ID NO: 23637 - RNA, 19 nt, synthetic construct
  source 1..19: mol_type = other RNA
tggtggtcaccactttggg

SEQ ID NO: 23638 - RNA, 19 nt, synthetic construct
  source 1..19: mol_type = other RNA
agctgggaaccgtggaggc

SEQ ID NO: 23639 - RNA, 19 nt, synthetic construct
  source 1..19: mol_type = other RNA
ggtgacgttggccacaggc

SEQ ID NO: 23640 - RNA, 19 nt, synthetic construct
  source 1..19: mol_type = other RNA
ataggtgcagttgccccgg

SEQ ID NO: 23641 - RNA, 19 nt, synthetic construct
  source 1..19: mol_type = other RNA
gcggcccctgcagtggtcg

SEQ ID NO: 23642 - RNA, 19 nt, synthetic construct
  source 1..19: mol_type = other RNA
gagctctgcgtaagcctcc

SEQ ID NO: 23643 - RNA, 19 nt, synthetic construct
  source 1..19: mol_type = other RNA
agagctctgcgtaagcctc

SEQ ID NO: 23644 - RNA, 19 nt, synthetic construct
  source 1..19: mol_type = other RNA
gttgcacacgcacaccgtc

SEQ ID NO: 23645 - RNA, 19 nt, synthetic construct
  source 1..19: mol_type = other RNA
acaggatggtcgtgttgat

SEQ ID NO: 23646 - RNA, 19 nt, synthetic construct
  source 1..19: mol_type = other RNA
cagaaggtgatgttgacct

SEQ ID NO: 23647 - RNA, 19 nt, synthetic construct
  source 1..19: mol_type = other RNA
tggcacgggtggggggacg

SEQ ID NO: 23648 - RNA, 19 nt, synthetic construct
  source 1..19: mol_type = other RNA
cccatcctgggggctggca

SEQ ID NO: 23649 - RNA, 19 nt, synthetic construct
  source 1..19: mol_type = other RNA
ggcaccacgagcatggccg

SEQ ID NO: 23650 - RNA, 19 nt, synthetic construct
  source 1..19: mol_type = other RNA
cctgcattctcccagctcg

SEQ ID NO: 23651 - RNA, 19 nt, synthetic construct
  source 1..19: mol_type = other RNA
ccatggtgtgccctgcatt

SEQ ID NO: 23652 - RNA, 19 nt, synthetic construct
  source 1..19: mol_type = other RNA
tgggcgaggacgtcggggc

SEQ ID NO: 23653 - RNA, 19 nt, synthetic construct
  source 1..19: mol_type = other RNA
tgcgccgggttcagggggc

SEQ ID NO: 23654 - RNA, 19 nt, synthetic construct
  source 1..19: mol_type = other RNA
gcacacccgcccattgtgc

SEQ ID NO: 23655 - RNA, 19 nt, synthetic construct
  source 1..19: mol_type = other RNA
ctgcacacccgcccattgt

SEQ ID NO: 23656 - RNA, 19 nt, synthetic construct
  source 1..19: mol_type = other RNA
ggccagggaagcggaagac

SEQ ID NO: 23657 - RNA, 19 nt, synthetic construct
  source 1..19: mol_type = other RNA
aggccagggaagcggaaga

SEQ ID NO: 23658 - RNA, 19 nt, synthetic construct
  source 1..19: mol_type = other RNA
ggcagtgctcagagaacac

SEQ ID NO: 23659 - RNA, 19 nt, synthetic construct
  source 1..19: mol_type = other RNA
taggcggcgcggcagtgct

SEQ ID NO: 23660 - RNA, 19 nt, synthetic construct
  source 1..19: mol_type = other RNA
tcgtaggcggcgcggcagt

SEQ ID NO: 23661 - RNA, 19 nt, synthetic construct
  source 1..19: mol_type = other RNA
attgatgaggacggagccg

SEQ ID NO: 23662 - RNA, 19 nt, synthetic construct
  source 1..19: mol_type = other RNA
tgcccattgatgaggacgg

SEQ ID NO: 23663 - RNA, 19 nt, synthetic construct
  source 1..19: mol_type = other RNA
ctcccgctgcccattgatg

SEQ ID NO: 23664 - RNA, 19 nt, synthetic construct
  source 1..19: mol_type = other RNA
ttccacaggaatgtcagca

SEQ ID NO: 23665 - RNA, 19 nt, synthetic construct
  source 1..19: mol_type = other RNA
tcctctccgttccacagga

SEQ ID NO: 23666 - RNA, 19 nt, synthetic construct
  source 1..19: mol_type = other RNA
cggcaagggcagcgggtcc

SEQ ID NO: 23667 - RNA, 19 nt, synthetic construct
  source 1..19: mol_type = other RNA
agcagggtgcggtggcaga

SEQ ID NO: 23668 - RNA, 19 nt, synthetic construct
  source 1..19: mol_type = other RNA
tcctgggcgcaggcggcca

SEQ ID NO: 23669 - RNA, 19 nt, synthetic construct
  source 1..19: mol_type = other RNA
gcacctccagttccgcggc

SEQ ID NO: 23670 - RNA, 19 nt, synthetic construct
  source 1..19: mol_type = other RNA
tggagcaggtgtccgtgca

SEQ ID NO: 23671 - RNA, 19 nt, synthetic construct
  source 1..19: mol_type = other RNA
agctgcgcgcgctgggggt

SEQ ID NO: 23672 - RNA, 19 nt, synthetic construct
  source 1..19: mol_type = other RNA
gcagaagcagccgtccaca

SEQ ID NO: 23673 - RNA, 19 nt, synthetic construct
  source 1..19: mol_type = other RNA
gtgatgtcatccagcaccg

SEQ ID NO: 23674 - RNA, 19 nt, synthetic construct
  source 1..19: mol_type = other RNA
tgcgtgatgtcatccagca

SEQ ID NO: 23675 - RNA, 19 nt, synthetic construct
  source 1..19: mol_type = other RNA
ggtgttgaaggaggtgccc

SEQ ID NO: 23676 - RNA, 19 nt, synthetic construct
  source 1..19: mol_type = other RNA
tgtgggccccgccctgcac

SEQ ID NO: 23677 - RNA, 19 nt, synthetic construct
  source 1..19: mol_type = other RNA
ctcatcataggtggagatg

SEQ ID NO: 23678 - RNA, 19 nt, synthetic construct
  source 1..19: mol_type = other RNA
agcacggtgaagctgctgt

SEQ ID NO: 23679 - RNA, 19 nt, synthetic construct
  source 1..19: mol_type = other RNA
gttctcgttgtccgtcagg

SEQ ID NO: 23680 - RNA, 19 nt, synthetic construct
  source 1..19: mol_type = other RNA
tttcaggcagttctcgttg

SEQ ID NO: 23681 - RNA, 19 nt, synthetic construct
  source 1..19: mol_type = other RNA
caccacgatgaagaagctc

SEQ ID NO: 23682 - RNA, 19 nt, synthetic construct
  source 1..19: mol_type = other RNA
cacctgcatgagtggcacc

SEQ ID NO: 23683 - RNA, 19 nt, synthetic construct
  source 1..19: mol_type = other RNA
tccaccaccccgctgaggg

SEQ ID NO: 23684 - RNA, 19 nt, synthetic construct
  source 1..19: mol_type = other RNA
ttggcgaaggctgcgcccg

SEQ ID NO: 23685 - RNA, 19 nt, synthetic construct
  source 1..19: mol_type = other RNA
tggcagcgcgagaaggcac

SEQ ID NO: 23686 - RNA, 19 nt, synthetic construct
  source 1..19: mol_type = other RNA
gtggcagcgcgagaaggca

SEQ ID NO: 23687 - RNA, 19 nt, synthetic construct
  source 1..19: mol_type = other RNA
tggggttgatgatggagtg

SEQ ID NO: 23688 - RNA, 19 nt, synthetic construct
  source 1..19: mol_type = other RNA
ttggggttgatgatggagt

SEQ ID NO: 23689 - RNA, 19 nt, synthetic construct
  source 1..19: mol_type = other RNA
ctggcaggcatccaccacg

SEQ ID NO: 23690 - RNA, 19 nt, synthetic construct
  source 1..19: mol_type = other RNA
ggctggcaggcatccacca

SEQ ID NO: 23691 - RNA, 19 nt, synthetic construct
  source 1..19: mol_type = other RNA
gggctggcaggcatccacc

SEQ ID NO: 23692 - RNA, 19 nt, synthetic construct
  source 1..19: mol_type = other RNA
aggtgcccgcggggcaggt

SEQ ID NO: 23693 - RNA, 19 nt, synthetic construct
  source 1..19: mol_type = other RNA
aaggtgcccgcggggcagg

SEQ ID NO: 23694 - RNA, 19 nt, synthetic construct
  source 1..19: mol_type = other RNA
tcattgaggaaggtgcccg

SEQ ID NO: 23695 - RNA, 19 nt, synthetic construct
  source 1..19: mol_type = other RNA
tcccaggcagcttagcttc

SEQ ID NO: 23696 - RNA, 19 nt, synthetic construct
  source 1..19: mol_type = other RNA
agtccaggtacaccatggg

SEQ ID NO: 23697 - RNA, 19 nt, synthetic construct
  source 1..19: mol_type = other RNA
gcagtccaggtacaccatg

SEQ ID NO: 23698 - RNA, 19 nt, synthetic construct
  source 1..19: mol_type = other RNA
ctgcagtccaggtacacca

SEQ ID NO: 23699 - RNA, 19 nt, synthetic construct
  source 1..19: mol_type = other RNA
aggggtgcccgccgagctg

SEQ ID NO: 23700 - RNA, 19 nt, synthetic construct
  source 1..19: mol_type = other RNA
cggccccaggggtgcccgc

SEQ ID NO: 23701 - RNA, 19 nt, synthetic construct
  source 1..19: mol_type = other RNA
ggggcagtcctcctcggca

SEQ ID NO: 23702 - RNA, 19 nt, synthetic construct
  source 1..19: mol_type = other RNA
caggggcagtcctcctcgg

SEQ ID NO: 23703 - RNA, 19 nt, synthetic construct
  source 1..19: mol_type = other RNA
ggtctctccaggcttgtag

SEQ ID NO: 23704 - RNA, 19 nt, synthetic construct
  source 1..19: mol_type = other RNA
gatcgccatcaaaggtgat

SEQ ID NO: 23705 - RNA, 19 nt, synthetic construct
  source 1..19: mol_type = other RNA
tgtactcgcagctgccttc

SEQ ID NO: 23706 - RNA, 19 nt, synthetic construct
  source 1..19: mol_type = other RNA
gatgtactcgcagctgcct

SEQ ID NO: 23707 - RNA, 19 nt, synthetic construct
  source 1..19: mol_type = other RNA
tgtccccacagtagtcctg

SEQ ID NO: 23708 - RNA, 19 nt, synthetic construct
  source 1..19: mol_type = other RNA
tgggtggtgttgtccccac

SEQ ID NO: 23709 - RNA, 19 nt, synthetic construct
  source 1..19: mol_type = other RNA
gtgggtggtgttgtcccca

SEQ ID NO: 23710 - RNA, 19 nt, synthetic construct
  source 1..19: mol_type = other RNA
ccgtgggtggtgttgtccc

SEQ ID NO: 23711 - RNA, 19 nt, synthetic construct
  source 1..19: mol_type = other RNA
agggtgggtccccacccgg

SEQ ID NO: 23712 - RNA, 19 nt, synthetic construct
  source 1..19: mol_type = other RNA
acacggccatcccgtgggt

SEQ ID NO: 23713 - RNA, 19 nt, synthetic construct
  source 1..19: mol_type = other RNA
cggatgaacacgctggtct

SEQ ID NO: 23714 - RNA, 19 nt, synthetic construct
  source 1..19: mol_type = other RNA
tccagtgcgtcccccacca

SEQ ID NO: 23715 - RNA, 19 nt, synthetic construct
  source 1..19: mol_type = other RNA
ggggtccttgggtgccagg

SEQ ID NO: 23716 - RNA, 19 nt, synthetic construct
  source 1..19: mol_type = other RNA
gtcgcaggcacacgcgtcg

SEQ ID NO: 23717 - RNA, 19 nt, synthetic construct
  source 1..19: mol_type = other RNA
ggcctgggcgtaggcagcc

SEQ ID NO: 23718 - RNA, 19 nt, synthetic construct
  source 1..19: mol_type = other RNA
ggcccgcgtcgtggcaggc

SEQ ID NO: 23719 - RNA, 19 nt, synthetic construct
  source 1..19: mol_type = other RNA
aggcccgcgtcgtggcagg

SEQ ID NO: 23720 - RNA, 19 nt, synthetic construct
  source 1..19: mol_type = other RNA
agaagtcacagaacaaggg

SEQ ID NO: 23721 - RNA, 19 nt, synthetic construct
  source 1..19: mol_type = other RNA
gatgccactgggtgtgcag

SEQ ID NO: 23722 - RNA, 19 nt, synthetic construct
  source 1..19: mol_type = other RNA
cgcagatggcgatcaagca

SEQ ID NO: 23723 - RNA, 19 nt, synthetic construct
  source 1..19: mol_type = other RNA
tgatgatggtgccgttgct

SEQ ID NO: 23724 - RNA, 19 nt, synthetic construct
  source 1..19: mol_type = other RNA
ctggagttccaggacatgc

SEQ ID NO: 23725 - RNA, 19 nt, synthetic construct
  source 1..19: mol_type = other RNA
acccaggcggtggtgaagg

SEQ ID NO: 23726 - RNA, 19 nt, synthetic construct
  source 1..19: mol_type = other RNA
gacacacacggtggagacc

SEQ ID NO: 23727 - RNA, 19 nt, synthetic construct
  source 1..19: mol_type = other RNA
agctcctccagcggcatgt

SEQ ID NO: 23728 - RNA, 19 nt, synthetic construct
  source 1..19: mol_type = other RNA
cagctcctccagcggcatg

SEQ ID NO: 23729 - RNA, 19 nt, synthetic construct
  source 1..19: mol_type = other RNA
gcacatcagcccccgcatg

SEQ ID NO: 23730 - RNA, 19 nt, synthetic construct
  source 1..19: mol_type = other RNA
gcagagaacccgcagctcg

SEQ ID NO: 23731 - RNA, 19 nt, synthetic construct
  source 1..19: mol_type = other RNA
gctgtggtctgggttgggg

SEQ ID NO: 23732 - RNA, 19 nt, synthetic construct
  source 1..19: mol_type = other RNA
gaggtgagggccgccgtcg

SEQ ID NO: 23733 - RNA, 19 nt, synthetic construct
  source 1..19: mol_type = other RNA
ctggggccgagggggtgac

SEQ ID NO: 23734 - RNA, 19 nt, synthetic construct
  source 1..19: mol_type = other RNA
cctggggccgagggggtga

SEQ ID NO: 23735 - RNA, 19 nt, synthetic construct
  source 1..19: mol_type = other RNA
tccagttggggaagctctc

SEQ ID NO: 23736 - RNA, 19 nt, synthetic construct
  source 1..19: mol_type = other RNA
gggtccagttggggaagct

SEQ ID NO: 23737 - RNA, 19 nt, synthetic construct
  source 1..19: mol_type = other RNA
cacctgtgccagggtccag

SEQ ID NO: 23738 - RNA, 19 nt, synthetic construct
  source 1..19: mol_type = other RNA
caccttctgccccacctgt

SEQ ID NO: 23739 - RNA, 19 nt, synthetic construct
  source 1..19: mol_type = other RNA
gcaccttctgccccacctg

SEQ ID NO: 23740 - RNA, 19 nt, synthetic construct
  source 1..19: mol_type = other RNA
tcctgcacaccaggccgaa

SEQ ID NO: 23741 - RNA, 19 nt, synthetic construct
  source 1..19: mol_type = other RNA
ttgaagacgccctcctgct

SEQ ID NO: 23742 - RNA, 19 nt, synthetic construct
  source 1..19: mol_type = other RNA
cctggtcagccccgggcta

SEQ ID NO: 23743 - RNA, 19 nt, synthetic construct
  source 1..19: mol_type = other RNA
gctgtaccaagggtgcttg

SEQ ID NO: 23744 - RNA, 19 nt, synthetic construct
  source 1..19: mol_type = other RNA
tggctgtaccaagggtgct

SEQ ID NO: 23745 - RNA, 19 nt, synthetic construct
  source 1..19: mol_type = other RNA
tgcaggcgtcgtggggcct

SEQ ID NO: 23746 - RNA, 19 nt, synthetic construct
  source 1..19: mol_type = other RNA
gtggctgtgaggggcgcca

SEQ ID NO: 23747 - RNA, 19 nt, synthetic construct
  source 1..19: mol_type = other RNA
ggccagcgtgggtggctgt

SEQ ID NO: 23748 - RNA, 19 nt, synthetic construct
  source 1..19: mol_type = other RNA
ttgccattgttgttggggc

SEQ ID NO: 23749 - RNA, 19 nt, synthetic construct
  source 1..19: mol_type = other RNA
tctggaggttgccattgtt

SEQ ID NO: 23750 - RNA, 19 nt, synthetic construct
  source 1..19: mol_type = other RNA
gtcagcggctctttggaag

SEQ ID NO: 23751 - RNA, 19 nt, synthetic construct
  source 1..19: mol_type = other RNA
ttggcgccaggctcgtggt

SEQ ID NO: 23752 - RNA, 19 nt, synthetic construct
  source 1..19: mol_type = other RNA
gaggtggacagctcgctcg

SEQ ID NO: 23753 - RNA, 19 nt, synthetic construct
  source 1..19: mol_type = other RNA
gcctgagaggtggacagct

SEQ ID NO: 23754 - RNA, 19 nt, synthetic construct
  source 1..19: mol_type = other RNA
tcctgggcgtgctggtctc

SEQ ID NO: 23755 - RNA, 19 nt, synthetic construct
  source 1..19: mol_type = other RNA
gtctctgtcctgggcgtgc

SEQ ID NO: 23756 - RNA, 19 nt, synthetic construct
  source 1..19: mol_type = other RNA
cgtctctgtcctgggcgtg

SEQ ID NO: 23757 - RNA, 19 nt, synthetic construct
  source 1..19: mol_type = other RNA
ggccgtggatccagtggac

SEQ ID NO: 23758 - RNA, 19 nt, synthetic construct
  source 1..19: mol_type = other RNA
gtaacgctggtagctgtgg

SEQ ID NO: 23759 - RNA, 19 nt, synthetic construct
  source 1..19: mol_type = other RNA
tgtaacgctggtagctgtg

SEQ ID NO: 23760 - RNA, 19 nt, synthetic construct
  source 1..19: mol_type = other RNA
cggtggccccagttgtggt

SEQ ID NO: 23761 - RNA, 19 nt, synthetic construct
  source 1..19: mol_type = other RNA
cgtggttgtggtagttggc

SEQ ID NO: 23762 - RNA, 19 nt, synthetic construct
  source 1..19: mol_type = other RNA
gagggggtggctgtgaagc

SEQ ID NO: 23763 - RNA, 19 nt, synthetic construct
  source 1..19: mol_type = other RNA
ccacactggaggcgtgagt

SEQ ID NO: 23764 - RNA, 19 nt, synthetic construct
  source 1..19: mol_type = other RNA
tccacactggaggcgtgag

SEQ ID NO: 23765 - RNA, 19 nt, synthetic construct
  source 1..19: mol_type = other RNA
tggtggtggtggtcagcac

SEQ ID NO: 23766 - RNA, 19 nt, synthetic construct
  source 1..19: mol_type = other RNA
gagggtgttgccatagaac

SEQ ID NO: 23767 - RNA, 19 nt, synthetic construct
  source 1..19: mol_type = other RNA
tggagccggtggccgtgat

SEQ ID NO: 23768 - RNA, 19 nt, synthetic construct
  source 1..19: mol_type = other RNA
gtggcggtggtggtcagca

SEQ ID NO: 23769 - RNA, 19 nt, synthetic construct
  source 1..19: mol_type = other RNA
gaggagggagtcactgtgt

SEQ ID NO: 23770 - RNA, 19 nt, synthetic construct
  source 1..19: mol_type = other RNA
ctgggggtgtgtgggtggt

SEQ ID NO: 23771 - RNA, 19 nt, synthetic construct
  source 1..19: mol_type = other RNA
tggccatggtgttcggcac

SEQ ID NO: 23772 - RNA, 19 nt, synthetic construct
  source 1..19: mol_type = other RNA
cgcaccgtgtggggactgc

SEQ ID NO: 23773 - RNA, 19 nt, synthetic construct
  source 1..19: mol_type = other RNA
gtccaggctgtgcgcaccg

SEQ ID NO: 23774 - RNA, 19 nt, synthetic construct
  source 1..19: mol_type = other RNA
tggccgaagtccaggctgt

SEQ ID NO: 23775 - RNA, 19 nt, synthetic construct
  source 1..19: mol_type = other RNA
ccaagatgcccgaggtggc

SEQ ID NO: 23776 - RNA, 19 nt, synthetic construct
  source 1..19: mol_type = other RNA
atgtgggtggtgcccaaga

SEQ ID NO: 23777 - RNA, 19 nt, synthetic construct
  source 1..19: mol_type = other RNA
tgatgtgggtggtgcccaa

SEQ ID NO: 23778 - RNA, 19 nt, synthetic construct
  source 1..19: mol_type = other RNA
ggaagtcaccgtggaaggc

SEQ ID NO: 23779 - RNA, 19 nt, synthetic construct
  source 1..19: mol_type = other RNA
gtggttctgctgctagggt

SEQ ID NO: 23780 - RNA, 19 nt, synthetic construct
  source 1..19: mol_type = other RNA
cctggagaagggggtgact

SEQ ID NO: 23781 - RNA, 19 nt, synthetic construct
  source 1..19: mol_type = other RNA
ttggagtaggtgtcaaagt

SEQ ID NO: 23782 - RNA, 19 nt, synthetic construct
  source 1..19: mol_type = other RNA
gttggagtaggtgtcaaag

SEQ ID NO: 23783 - RNA, 19 nt, synthetic construct
  source 1..19: mol_type = other RNA
tgttggagtaggtgtcaaa

SEQ ID NO: 23784 - RNA, 19 nt, synthetic construct
  source 1..19: mol_type = other RNA
gatgttggagtaggtgtca

SEQ ID NO: 23785 - RNA, 19 nt, synthetic construct
  source 1..19: mol_type = other RNA
acggcccctccggccgcac

SEQ ID NO: 23786 - RNA, 19 nt, synthetic construct
  source 1..19: mol_type = other RNA
tggaggagggcatggccgt

SEQ ID NO: 23787 - RNA, 19 nt, synthetic construct
  source 1..19: mol_type = other RNA
ggccgtggatccagtggac

SEQ ID NO: 23788 - RNA, 19 nt, synthetic construct
  source 1..19: mol_type = other RNA
tgggcaccgtcacggtggc

SEQ ID NO: 23789 - RNA, 19 nt, synthetic construct
  source 1..19: mol_type = other RNA
gtgggcaccgtcacggtgg

SEQ ID NO: 23790 - RNA, 19 nt, synthetic construct
  source 1..19: mol_type = other RNA
gtggacagtctctggagtg

SEQ ID NO: 23791 - RNA, 19 nt, synthetic construct
  source 1..19: mol_type = other RNA
cagagccggtggccccggt

SEQ ID NO: 23792 - RNA, 19 nt, synthetic construct
  source 1..19: mol_type = other RNA
gtggttgtggtagtcagca

SEQ ID NO: 23793 - RNA, 19 nt, synthetic construct
  source 1..19: mol_type = other RNA
gagggggtggctgtgaagc

SEQ ID NO: 23794 - RNA, 19 nt, synthetic construct
  source 1..19: mol_type = other RNA
aggagggggtcaccgtgga

SEQ ID NO: 23795 - RNA, 19 nt, synthetic construct
  source 1..19: mol_type = other RNA
tggtggtggtggtcagcac

SEQ ID NO: 23796 - RNA, 19 nt, synthetic construct
  source 1..19: mol_type = other RNA
gagggtgttgccatagaac

SEQ ID NO: 23797 - RNA, 19 nt, synthetic construct
  source 1..19: mol_type = other RNA
tggagccggtggccgtgat

SEQ ID NO: 23798 - RNA, 19 nt, synthetic construct
  source 1..19: mol_type = other RNA
gtggcggtggtggtcagca

SEQ ID NO: 23799 - RNA, 19 nt, synthetic construct
  source 1..19: mol_type = other RNA
ctgggggtgtgtgggtggt

SEQ ID NO: 23800 - RNA, 19 nt, synthetic construct
  source 1..19: mol_type = other RNA
cgcaccgtgtggggactgc

SEQ ID NO: 23801 - RNA, 19 nt, synthetic construct
  source 1..19: mol_type = other RNA
gtccaggctgtgcgcaccg

SEQ ID NO: 23802 - RNA, 19 nt, synthetic construct
  source 1..19: mol_type = other RNA
tggccgaagtccaggctgt

SEQ ID NO: 23803 - RNA, 19 nt, synthetic construct
  source 1..19: mol_type = other RNA
aggtgcctgaggtggccga

SEQ ID NO: 23804 - RNA, 19 nt, synthetic construct
  source 1..19: mol_type = other RNA
tgatgtgggtggtgcccaa

SEQ ID NO: 23805 - RNA, 19 nt, synthetic construct
  source 1..19: mol_type = other RNA
cctggagaagggggtgact

SEQ ID NO: 23806 - RNA, 19 nt, synthetic construct
  source 1..19: mol_type = other RNA
ccctggtgtggcccggggt

SEQ ID NO: 23807 - RNA, 19 nt, synthetic construct
  source 1..19: mol_type = other RNA
gccctggtgtggcccgggg

SEQ ID NO: 23808 - RNA, 19 nt, synthetic construct
  source 1..19: mol_type = other RNA
ttggagtaggtgtcaaagt

SEQ ID NO: 23809 - RNA, 19 nt, synthetic construct
  source 1..19: mol_type = other RNA
gttggagtaggtgtcaaag

SEQ ID NO: 23810 - RNA, 19 nt, synthetic construct
  source 1..19: mol_type = other RNA
tgttggagtaggtgtcaaa

SEQ ID NO: 23811 - RNA, 19 nt, synthetic construct
  source 1..19: mol_type = other RNA
gatgttggagtaggtgtca

SEQ ID NO: 23812 - RNA, 19 nt, synthetic construct
  source 1..19: mol_type = other RNA
acggcccctccggccgcac

SEQ ID NO: 23813 - RNA, 19 nt, synthetic construct
  source 1..19: mol_type = other RNA
tccaggtcgtccctggagt

SEQ ID NO: 23814 - RNA, 19 nt, synthetic construct
  source 1..19: mol_type = other RNA
ggccgtggatccagtggtt

SEQ ID NO: 23815 - RNA, 19 nt, synthetic construct
  source 1..19: mol_type = other RNA
tggccgtggatccagtggt

SEQ ID NO: 23816 - RNA, 19 nt, synthetic construct
  source 1..19: mol_type = other RNA
tgtcagcactggaagggtg

SEQ ID NO: 23817 - RNA, 19 nt, synthetic construct
  source 1..19: mol_type = other RNA
tgaaggaggggatgggtgt

SEQ ID NO: 23818 - RNA, 19 nt, synthetic construct
  source 1..19: mol_type = other RNA
tgggagggtcccggtggtc

SEQ ID NO: 23819 - RNA, 19 nt, synthetic construct
  source 1..19: mol_type = other RNA
gaggaggggtggattgtgg

SEQ ID NO: 23820 - RNA, 19 nt, synthetic construct
  source 1..19: mol_type = other RNA
gtgtgggtggtctccggag

SEQ ID NO: 23821 - RNA, 19 nt, synthetic construct
  source 1..19: mol_type = other RNA
gtggaggtgtgggtggtct

SEQ ID NO: 23822 - RNA, 19 nt, synthetic construct
  source 1..19: mol_type = other RNA
ggaactggtggcccttgtc

SEQ ID NO: 23823 - RNA, 19 nt, synthetic construct
  source 1..19: mol_type = other RNA
tggaactggtggcccttgt

SEQ ID NO: 23824 - RNA, 19 nt, synthetic construct
  source 1..19: mol_type = other RNA
tggccgtggggccagtggc

SEQ ID NO: 23825 - RNA, 19 nt, synthetic construct
  source 1..19: mol_type = other RNA
gctgggctctgtgaggatc

SEQ ID NO: 23826 - RNA, 19 nt, synthetic construct
  source 1..19: mol_type = other RNA
gtggctgtagtgctgggct

SEQ ID NO: 23827 - RNA, 19 nt, synthetic construct
  source 1..19: mol_type = other RNA
tgggcaccgtcacggtggc

SEQ ID NO: 23828 - RNA, 19 nt, synthetic construct
  source 1..19: mol_type = other RNA
gtgggcaccgtcacggtgg

SEQ ID NO: 23829 - RNA, 19 nt, synthetic construct
  source 1..19: mol_type = other RNA
gccagcagttgcccgggtg

SEQ ID NO: 23830 - RNA, 19 nt, synthetic construct
  source 1..19: mol_type = other RNA
agcactttgagggtgccag

SEQ ID NO: 23831 - RNA, 19 nt, synthetic construct
  source 1..19: mol_type = other RNA
gtaacgctggtagctgtgg

SEQ ID NO: 23832 - RNA, 19 nt, synthetic construct
  source 1..19: mol_type = other RNA
tgtaacgctggtagctgtg

SEQ ID NO: 23833 - RNA, 19 nt, synthetic construct
  source 1..19: mol_type = other RNA
gtggacagtctctggagta

SEQ ID NO: 23834 - RNA, 19 nt, synthetic construct
  source 1..19: mol_type = other RNA
gtggtggtcgtggtggtaa

SEQ ID NO: 23835 - RNA, 19 nt, synthetic construct
  source 1..19: mol_type = other RNA
cgtggttgtggtagtcggc

SEQ ID NO: 23836 - RNA, 19 nt, synthetic construct
  source 1..19: mol_type = other RNA
gagggggtggctgtgaagc

SEQ ID NO: 23837 - RNA, 19 nt, synthetic construct
  source 1..19: mol_type = other RNA
ccacactggaggcgtgagt

SEQ ID NO: 23838 - RNA, 19 nt, synthetic construct
  source 1..19: mol_type = other RNA
tccacactggaggcgtgag

SEQ ID NO: 23839 - RNA, 19 nt, synthetic construct
  source 1..19: mol_type = other RNA
tggtggtggtggtcagcac

SEQ ID NO: 23840 - RNA, 19 nt, synthetic construct
  source 1..19: mol_type = other RNA
gagggtgttgccatagaac

SEQ ID NO: 23841 - RNA, 19 nt, synthetic construct
  source 1..19: mol_type = other RNA
gtggcggtggtggtcagca

SEQ ID NO: 23842 - RNA, 19 nt, synthetic construct
  source 1..19: mol_type = other RNA
ctgggggtgtgtgggtggt

SEQ ID NO: 23843 - RNA, 19 nt, synthetic construct
  source 1..19: mol_type = other RNA
cgcaccgtgtggggactgc

SEQ ID NO: 23844 - RNA, 19 nt, synthetic construct
  source 1..19: mol_type = other RNA
gtccaggctgtgcgcaccg

SEQ ID NO: 23845 - RNA, 19 nt, synthetic construct
  source 1..19: mol_type = other RNA
tggccgaagtccaggctgt

SEQ ID NO: 23846 - RNA, 19 nt, synthetic construct
  source 1..19: mol_type = other RNA
ccaagatgcccgaggtggc

SEQ ID NO: 23847 - RNA, 19 nt, synthetic construct
  source 1..19: mol_type = other RNA
atgtgggtggtgcccaaga

SEQ ID NO: 23848 - RNA, 19 nt, synthetic construct
  source 1..19: mol_type = other RNA
tgatgtgggtggtgcccaa

SEQ ID NO: 23849 - RNA, 19 nt, synthetic construct
  source 1..19: mol_type = other RNA
ggaagtcaccgtggaaggc

SEQ ID NO: 23850 - RNA, 19 nt, synthetic construct
  source 1..19: mol_type = other RNA
tgggtggtactggtggttg

SEQ ID NO: 23851 - RNA, 19 nt, synthetic construct
  source 1..19: mol_type = other RNA
cctggagaagggggtgact

SEQ ID NO: 23852 - RNA, 19 nt, synthetic construct
  source 1..19: mol_type = other RNA
ccctggtgtggcccggggt

SEQ ID NO: 23853 - RNA, 19 nt, synthetic construct
  source 1..19: mol_type = other RNA
cccctggtgtggcccgggg

SEQ ID NO: 23854 - RNA, 19 nt, synthetic construct
  source 1..19: mol_type = other RNA
ttggagtaggtgtcaaagt

SEQ ID NO: 23855 - RNA, 19 nt, synthetic construct
  source 1..19: mol_type = other RNA
gttggagtaggtgtcaaag

SEQ ID NO: 23856 - RNA, 19 nt, synthetic construct
  source 1..19: mol_type = other RNA
tgttggagtaggtgtcaaa

SEQ ID NO: 23857 - RNA, 19 nt, synthetic construct
  source 1..19: mol_type = other RNA
gatgttggagtaggtgtca

SEQ ID NO: 23858 - RNA, 19 nt, synthetic construct
  source 1..19: mol_type = other RNA
ggctgctcacagactgccc

SEQ ID NO: 23859 - RNA, 19 nt, synthetic construct
  source 1..19: mol_type = other RNA
gggctgctcacagactgcc

SEQ ID NO: 23860 - RNA, 19 nt, synthetic construct
  source 1..19: mol_type = other RNA
ggccgtggatccagtggac

SEQ ID NO: 23861 - RNA, 19 nt, synthetic construct
  source 1..19: mol_type = other RNA
tgggcaccgtcacggtggc

SEQ ID NO: 23862 - RNA, 19 nt, synthetic construct
  source 1..19: mol_type = other RNA
gtgggcaccgtcacggtgg

SEQ ID NO: 23863 - RNA, 19 nt, synthetic construct
  source 1..19: mol_type = other RNA
cgtggttgtggtagtcggc

SEQ ID NO: 23864 - RNA, 19 nt, synthetic construct
  source 1..19: mol_type = other RNA
ggggtgactgtgaagcccg

SEQ ID NO: 23865 - RNA, 19 nt, synthetic construct
  source 1..19: mol_type = other RNA
agggggtgactgtgaagcc

SEQ ID NO: 23866 - RNA, 19 nt, synthetic construct
  source 1..19: mol_type = other RNA
tggtccccgggacggagga

SEQ ID NO: 23867 - RNA, 19 nt, synthetic construct
  source 1..19: mol_type = other RNA
gtggtccccgggacggagg

SEQ ID NO: 23868 - RNA, 19 nt, synthetic construct
  source 1..19: mol_type = other RNA
gggtggtccccgggacgga

SEQ ID NO: 23869 - RNA, 19 nt, synthetic construct
  source 1..19: mol_type = other RNA
tggtggtggtggtcagcac

SEQ ID NO: 23870 - RNA, 19 nt, synthetic construct
  source 1..19: mol_type = other RNA
gagggtgttgccatagaac

SEQ ID NO: 23871 - RNA, 19 nt, synthetic construct
  source 1..19: mol_type = other RNA
agtggccgtggtgatcagt

SEQ ID NO: 23872 - RNA, 19 nt, synthetic construct
  source 1..19: mol_type = other RNA
tggagccggtggccgtgat

SEQ ID NO: 23873 - RNA, 19 nt, synthetic construct
  source 1..19: mol_type = other RNA
gtggcggtggtggtcagca

SEQ ID NO: 23874 - RNA, 19 nt, synthetic construct
  source 1..19: mol_type = other RNA
ctgggggtgtgtgggtggt

SEQ ID NO: 23875 - RNA, 19 nt, synthetic construct
  source 1..19: mol_type = other RNA
cgcaccgtgtggggactgc

SEQ ID NO: 23876 - RNA, 19 nt, synthetic construct
  source 1..19: mol_type = other RNA
gtccaggctgtgcgcaccg

SEQ ID NO: 23877 - RNA, 19 nt, synthetic construct
  source 1..19: mol_type = other RNA
tggccgaagtccaggctgt

SEQ ID NO: 23878 - RNA, 19 nt, synthetic construct
  source 1..19: mol_type = other RNA
aggtgcctgaggtggccga

SEQ ID NO: 23879 - RNA, 19 nt, synthetic construct
  source 1..19: mol_type = other RNA
tgatgtgggtggtgcccaa

SEQ ID NO: 23880 - RNA, 19 nt, synthetic construct
  source 1..19: mol_type = other RNA
tggggaagggggtgactcg

SEQ ID NO: 23881 - RNA, 19 nt, synthetic construct
  source 1..19: mol_type = other RNA
ttggagtaggtgtcaaagt

SEQ ID NO: 23882 - RNA, 19 nt, synthetic construct
  source 1..19: mol_type = other RNA
gttggagtaggtgtcaaag

SEQ ID NO: 23883 - RNA, 19 nt, synthetic construct
  source 1..19: mol_type = other RNA
tgttggagtaggtgtcaaa

SEQ ID NO: 23884 - RNA, 19 nt, synthetic construct
  source 1..19: mol_type = other RNA
gatgttggagtaggtgtca

SEQ ID NO: 23885 - RNA, 19 nt, synthetic construct
  source 1..19: mol_type = other RNA
acggcccctccggccgcac

SEQ ID NO: 23886 - RNA, 19 nt, synthetic construct
  source 1..19: mol_type = other RNA
cccagggggacaccaggct

SEQ ID NO: 23887 - RNA, 19 nt, synthetic construct
  source 1..19: mol_type = other RNA
tggaggagggcatggccgt

SEQ ID NO: 23888 - RNA, 19 nt, synthetic construct
  source 1..19: mol_type = other RNA
tgtcagcactggaagggtg

SEQ ID NO: 23889 - RNA, 19 nt, synthetic construct
  source 1..19: mol_type = other RNA
tgtaacgctggtagctgtg

SEQ ID NO: 23890 - RNA, 19 nt, synthetic construct
  source 1..19: mol_type = other RNA
tggaggaggggatgggtgt

SEQ ID NO: 23891 - RNA, 19 nt, synthetic construct
  source 1..19: mol_type = other RNA
tgggagggtcccggtggtc

SEQ ID NO: 23892 - RNA, 19 nt, synthetic construct
  source 1..19: mol_type = other RNA
gaggaggggtggattgtgg

SEQ ID NO: 23893 - RNA, 19 nt, synthetic construct
  source 1..19: mol_type = other RNA
gtgtgggtggtctccggag

SEQ ID NO: 23894 - RNA, 19 nt, synthetic construct
  source 1..19: mol_type = other RNA
gtggaggtgtgggtggtct

SEQ ID NO: 23895 - RNA, 19 nt, synthetic construct
  source 1..19: mol_type = other RNA
ggaactggtggcccttgtc

SEQ ID NO: 23896 - RNA, 19 nt, synthetic construct
  source 1..19: mol_type = other RNA
tggaactggtggcccttgt

SEQ ID NO: 23897 - RNA, 19 nt, synthetic construct
  source 1..19: mol_type = other RNA
tggccgtggggccagtggc

SEQ ID NO: 23898 - RNA, 19 nt, synthetic construct
  source 1..19: mol_type = other RNA
ggccgtggatccagtggac

SEQ ID NO: 23899 - RNA, 19 nt, synthetic construct
  source 1..19: mol_type = other RNA
tgggcaccgtcacggtggc

SEQ ID NO: 23900 - RNA, 19 nt, synthetic construct
  source 1..19: mol_type = other RNA
gtgggcaccgtcacggtgg

SEQ ID NO: 23901 - RNA, 19 nt, synthetic construct
  source 1..19: mol_type = other RNA
ctggaagggcagttgcagt

SEQ ID NO: 23902 - RNA, 19 nt, synthetic construct
  source 1..19: mol_type = other RNA
gtggacagtctctggagtg

SEQ ID NO: 23903 - RNA, 19 nt, synthetic construct
  source 1..19: mol_type = other RNA
cagagccggtggccccggt

SEQ ID NO: 23904 - RNA, 19 nt, synthetic construct
  source 1..19: mol_type = other RNA
cgtggttgtggtagtcggc

SEQ ID NO: 23905 - RNA, 19 nt, synthetic construct
  source 1..19: mol_type = other RNA
gagggggtggctgtgaagc

SEQ ID NO: 23906 - RNA, 19 nt, synthetic construct
  source 1..19: mol_type = other RNA
ccacactggaggcgtgagt

SEQ ID NO: 23907 - RNA, 19 nt, synthetic construct
  source 1..19: mol_type = other RNA
tccacactggaggcgtgag

SEQ ID NO: 23908 - RNA, 19 nt, synthetic construct
  source 1..19: mol_type = other RNA
tggtggtggtggtcagcac

SEQ ID NO: 23909 - RNA, 19 nt, synthetic construct
  source 1..19: mol_type = other RNA
gagggtgttgccatagaac

SEQ ID NO: 23910 - RNA, 19 nt, synthetic construct
  source 1..19: mol_type = other RNA
tggagccggtggccgtgat

SEQ ID NO: 23911 - RNA, 19 nt, synthetic construct
  source 1..19: mol_type = other RNA
tgtcagcactggaagggtg

SEQ ID NO: 23912 - RNA, 19 nt, synthetic construct
  source 1..19: mol_type = other RNA
tggaggaggggatgggtgt

SEQ ID NO: 23913 - RNA, 19 nt, synthetic construct
  source 1..19: mol_type = other RNA
tccacgtggtccacagggt

SEQ ID NO: 23914 - RNA, 19 nt, synthetic construct
  source 1..19: mol_type = other RNA
acggtccacgtggtccaca

SEQ ID NO: 23915 - RNA, 19 nt, synthetic construct
  source 1..19: mol_type = other RNA
gacatggtggacatgggtg

SEQ ID NO: 23916 - RNA, 19 nt, synthetic construct
  source 1..19: mol_type = other RNA
gtgtggattgtggacatgg

SEQ ID NO: 23917 - RNA, 19 nt, synthetic construct
  source 1..19: mol_type = other RNA
gtggaggtgtgggtggtct

SEQ ID NO: 23918 - RNA, 19 nt, synthetic construct
  source 1..19: mol_type = other RNA
tggtggcccttgtcatggt

SEQ ID NO: 23919 - RNA, 19 nt, synthetic construct
  source 1..19: mol_type = other RNA
tggccgtggatccagtggc

SEQ ID NO: 23920 - RNA, 19 nt, synthetic construct
  source 1..19: mol_type = other RNA
gtgggcaccatcacggtgg

SEQ ID NO: 23921 - RNA, 19 nt, synthetic construct
  source 1..19: mol_type = other RNA
tggtcaccactttgggggt

SEQ ID NO: 23922 - RNA, 19 nt, synthetic construct
  source 1..19: mol_type = other RNA
gtggtcaccactttggggg

SEQ ID NO: 23923 - RNA, 19 nt, synthetic construct
  source 1..19: mol_type = other RNA
atggtggtcaccactttgg

SEQ ID NO: 23924 - RNA, 19 nt, synthetic construct
  source 1..19: mol_type = other RNA
gtggccatggtggtcacca

SEQ ID NO: 23925 - RNA, 19 nt, synthetic construct
  source 1..19: mol_type = other RNA
tgggcatagtggccatggt

SEQ ID NO: 23926 - RNA, 19 nt, synthetic construct
  source 1..19: mol_type = other RNA
gtgggcatagtggccatgg

SEQ ID NO: 23927 - RNA, 19 nt, synthetic construct
  source 1..19: mol_type = other RNA
tggtccccacggtggacga

SEQ ID NO: 23928 - RNA, 19 nt, synthetic construct
  source 1..19: mol_type = other RNA
ggggtgcgggtggtcccca

SEQ ID NO: 23929 - RNA, 19 nt, synthetic construct
  source 1..19: mol_type = other RNA
aaaactgtccaaatgccct

SEQ ID NO: 23930 - RNA, 19 nt, synthetic construct
  source 1..19: mol_type = other RNA
ggtcaatgtcacagtgctg

SEQ ID NO: 23931 - RNA, 19 nt, synthetic construct
  source 1..19: mol_type = other RNA
tggaagcggtcaatgtcac

SEQ ID NO: 23932 - RNA, 19 nt, synthetic construct
  source 1..19: mol_type = other RNA
ctgccggagagggatggca

SEQ ID NO: 23933 - RNA, 19 nt, synthetic construct
  source 1..19: mol_type = other RNA
tctcattcacctgccggag

SEQ ID NO: 23934 - RNA, 19 nt, synthetic construct
  source 1..19: mol_type = other RNA
gtccagcaggacgacacgg

SEQ ID NO: 23935 - RNA, 19 nt, synthetic construct
  source 1..19: mol_type = other RNA
ttggccacaggctttgggt

SEQ ID NO: 23936 - RNA, 19 nt, synthetic construct
  source 1..19: mol_type = other RNA
caggtgacgttggccacag

SEQ ID NO: 23937 - RNA, 19 nt, synthetic construct
  source 1..19: mol_type = other RNA
cgcaggtgacgttggccac

SEQ ID NO: 23938 - RNA, 19 nt, synthetic construct
  source 1..19: mol_type = other RNA
cacatgctgcagatgcact

SEQ ID NO: 23939 - RNA, 19 nt, synthetic construct
  source 1..19: mol_type = other RNA
gtggaatagtgggagccgc

SEQ ID NO: 23940 - RNA, 19 nt, synthetic construct
  source 1..19: mol_type = other RNA
aggtggaatagtgggagcc

SEQ ID NO: 23941 - RNA, 19 nt, synthetic construct
  source 1..19: mol_type = other RNA
taggtgcagttgccccgga

SEQ ID NO: 23942 - RNA, 19 nt, synthetic construct
  source 1..19: mol_type = other RNA
acataggtgcagttgcccc

SEQ ID NO: 23943 - RNA, 19 nt, synthetic construct
  source 1..19: mol_type = other RNA
gacataggtgcagttgccc

SEQ ID NO: 23944 - RNA, 19 nt, synthetic construct
  source 1..19: mol_type = other RNA
ggacataggtgcagttgcc

SEQ ID NO: 23945 - RNA, 19 nt, synthetic construct
  source 1..19: mol_type = other RNA
aggctgagattcccaaagc

SEQ ID NO: 23946 - RNA, 19 nt, synthetic construct
  source 1..19: mol_type = other RNA
gttgtccaggtagaggctg

SEQ ID NO: 23947 - RNA, 19 nt, synthetic construct
  source 1..19: mol_type = other RNA
gtggttgtccaggtagagg

SEQ ID NO: 23948 - RNA, 19 nt, synthetic construct
  source 1..19: mol_type = other RNA
tggcagaggccgtgcagta

SEQ ID NO: 23949 - RNA, 19 nt, synthetic construct
  source 1..19: mol_type = other RNA
ttggtcaaacaggatcagg

SEQ ID NO: 23950 - RNA, 19 nt, synthetic construct
  source 1..19: mol_type = other RNA
cacacgcatggtggtggtc

SEQ ID NO: 23951 - RNA, 19 nt, synthetic construct
  source 1..19: mol_type = other RNA
cagggcaggaatgtccaca

SEQ ID NO: 23952 - RNA, 19 nt, synthetic construct
  source 1..19: mol_type = other RNA
ccagggcaggaatgtccac

SEQ ID NO: 23953 - RNA, 19 nt, synthetic construct
  source 1..19: mol_type = other RNA
cccagggcaggaatgtcca

SEQ ID NO: 23954 - RNA, 19 nt, synthetic construct
  source 1..19: mol_type = other RNA
ttggccattgaaggtgacg

SEQ ID NO: 23955 - RNA, 19 nt, synthetic construct
  source 1..19: mol_type = other RNA
cgtcttggccatgtccttg

SEQ ID NO: 23956 - RNA, 19 nt, synthetic construct
  source 1..19: mol_type = other RNA
atcctttctgctgtcgggg

SEQ ID NO: 23957 - RNA, 19 nt, synthetic construct
  source 1..19: mol_type = other RNA
ttgtggcactcagcaaaga

SEQ ID NO: 23958 - RNA, 19 nt, synthetic construct
  source 1..19: mol_type = other RNA
cacaaggttgtggcactca

SEQ ID NO: 23959 - RNA, 19 nt, synthetic construct
  source 1..19: mol_type = other RNA
tgatgcaggcgttgaagaa

SEQ ID NO: 23960 - RNA, 19 nt, synthetic construct
  source 1..19: mol_type = other RNA
cgctgatgcaggcgttgaa

SEQ ID NO: 23961 - RNA, 19 nt, synthetic construct
  source 1..19: mol_type = other RNA
aggcggcccctgcagtggt

SEQ ID NO: 23962 - RNA, 19 nt, synthetic construct
  source 1..19: mol_type = other RNA
acaggccaccggttgcacc

SEQ ID NO: 23963 - RNA, 19 nt, synthetic construct
  source 1..19: mol_type = other RNA
gtgggctctggttcctaga

SEQ ID NO: 23964 - RNA, 19 nt, synthetic construct
  source 1..19: mol_type = other RNA
gggcaggcctgcacgcaga

SEQ ID NO: 23965 - RNA, 19 nt, synthetic construct
  source 1..19: mol_type = other RNA
ggggcaggcctgcacgcag

SEQ ID NO: 23966 - RNA, 19 nt, synthetic construct
  source 1..19: mol_type = other RNA
cgcaggggcaggcctgcac

SEQ ID NO: 23967 - RNA, 19 nt, synthetic construct
  source 1..19: mol_type = other RNA
acgcaggggcaggcctgca

SEQ ID NO: 23968 - RNA, 19 nt, synthetic construct
  source 1..19: mol_type = other RNA
cgggtcccacgcaggggca

SEQ ID NO: 23969 - RNA, 19 nt, synthetic construct
  source 1..19: mol_type = other RNA
gttgcacggcgggggctga

SEQ ID NO: 23970 - RNA, 19 nt, synthetic construct
  source 1..19: mol_type = other RNA
gggcagcaggggttctcgg

SEQ ID NO: 23971 - RNA, 19 nt, synthetic construct
  source 1..19: mol_type = other RNA
cacaccgtctcggggcagc

SEQ ID NO: 23972 - RNA, 19 nt, synthetic construct
  source 1..19: mol_type = other RNA
caggtggttgtgttgcaca

SEQ ID NO: 23973 - RNA, 19 nt, synthetic construct
  source 1..19: mol_type = other RNA
ctgggtgcagatggactcc

SEQ ID NO: 23974 - RNA, 19 nt, synthetic construct
  source 1..19: mol_type = other RNA
tcctgggtgcagatggact

SEQ ID NO: 23975 - RNA, 19 nt, synthetic construct
  source 1..19: mol_type = other RNA
ccctcctcctgggtgcaga

SEQ ID NO: 23976 - RNA, 19 nt, synthetic construct
  source 1..19: mol_type = other RNA
accccgtagaaggtgccat

SEQ ID NO: 23977 - RNA, 19 nt, synthetic construct
  source 1..19: mol_type = other RNA
tgcaggcatcctcctgaca

SEQ ID NO: 23978 - RNA, 19 nt, synthetic construct
  source 1..19: mol_type = other RNA
cgggcgtgaggcaggcggt

SEQ ID NO: 23979 - RNA, 19 nt, synthetic construct
  source 1..19: mol_type = other RNA
gactggctggccatcgggc

SEQ ID NO: 23980 - RNA, 19 nt, synthetic construct
  source 1..19: mol_type = other RNA
caggtttcattcagctgga

SEQ ID NO: 23981 - RNA, 19 nt, synthetic construct
  source 1..19: mol_type = other RNA
gttgacccaggtttcattc

SEQ ID NO: 23982 - RNA, 19 nt, synthetic construct
  source 1..19: mol_type = other RNA
acatggctgttgacccagg

SEQ ID NO: 23983 - RNA, 19 nt, synthetic construct
  source 1..19: mol_type = other RNA
cctcagcctcacagaggta

SEQ ID NO: 23984 - RNA, 19 nt, synthetic construct
  source 1..19: mol_type = other RNA
caggatggtcgtgttgatg

SEQ ID NO: 23985 - RNA, 19 nt, synthetic construct
  source 1..19: mol_type = other RNA
cctctgctgagtacttgga

SEQ ID NO: 23986 - RNA, 19 nt, synthetic construct
  source 1..19: mol_type = other RNA
cgcctctcctggcagcagg

SEQ ID NO: 23987 - RNA, 19 nt, synthetic construct
  source 1..19: mol_type = other RNA
tcctcgtggacccgcctct

SEQ ID NO: 23988 - RNA, 19 nt, synthetic construct
  source 1..19: mol_type = other RNA
ctcctcgtggacccgcctc

SEQ ID NO: 23989 - RNA, 19 nt, synthetic construct
  source 1..19: mol_type = other RNA
gagccgttaggacagtgca

SEQ ID NO: 23990 - RNA, 19 nt, synthetic construct
  source 1..19: mol_type = other RNA
gtgtaggtgtgcaggatgg

SEQ ID NO: 23991 - RNA, 19 nt, synthetic construct
  source 1..19: mol_type = other RNA
ggtgtaggtgtgcaggatg

SEQ ID NO: 23992 - RNA, 19 nt, synthetic construct
  source 1..19: mol_type = other RNA
atggaggcagaacgttctc

SEQ ID NO: 23993 - RNA, 19 nt, synthetic construct
  source 1..19: mol_type = other RNA
agacaatgcacatcctggc

SEQ ID NO: 23994 - RNA, 19 nt, synthetic construct
  source 1..19: mol_type = other RNA
ttttcatgatcagacaatg

SEQ ID NO: 23995 - RNA, 19 nt, synthetic construct
  source 1..19: mol_type = other RNA
agaggaggcccaaggtttt

SEQ ID NO: 23996 - RNA, 19 nt, synthetic construct
  source 1..19: mol_type = other RNA
gggtgccacacacaggccg

SEQ ID NO: 23997 - RNA, 19 nt, synthetic construct
  source 1..19: mol_type = other RNA
ggggtgccacacacaggcc

SEQ ID NO: 23998 - RNA, 19 nt, synthetic construct
  source 1..19: mol_type = other RNA
acggagcgcggggtgccac

SEQ ID NO: 23999 - RNA, 19 nt, synthetic construct
  source 1..19: mol_type = other RNA
cgcgggcgctccggccgtg

SEQ ID NO: 24000 - RNA, 19 nt, synthetic construct
  source 1..19: mol_type = other RNA
gcctggaccagcctgtctg

SEQ ID NO: 24001 - RNA, 19 nt, synthetic construct
  source 1..19: mol_type = other RNA
ccctgcagcaggcatggac

SEQ ID NO: 24002 - RNA, 19 nt, synthetic construct
  source 1..19: mol_type = other RNA
accctgcagcaggcatgga

SEQ ID NO: 24003 - RNA, 19 nt, synthetic construct
  source 1..19: mol_type = other RNA
cagccctgagttaccctgc

SEQ ID NO: 24004 - RNA, 19 nt, synthetic construct
  source 1..19: mol_type = other RNA
gctcagagaacacgtagtt

SEQ ID NO: 24005 - RNA, 19 nt, synthetic construct
  source 1..19: mol_type = other RNA
tcggcgtagctggacgttg

SEQ ID NO: 24006 - RNA, 19 nt, synthetic construct
  source 1..19: mol_type = other RNA
caggcagcttagcttccca

SEQ ID NO: 24007 - RNA, 19 nt, synthetic construct
  source 1..19: mol_type = other RNA
ccaggcagcttagcttccc

SEQ ID NO: 24008 - RNA, 19 nt, synthetic construct
  source 1..19: mol_type = other RNA
aagtggctttggaactggt

SEQ ID NO: 24009 - RNA, 19 nt, synthetic construct
  source 1..19: mol_type = other RNA
aagtggctttggaactggt

SEQ ID NO: 24010 - RNA, 19 nt, synthetic construct
  source 1..19: mol_type = other RNA
tcttggccatgtccttgca

SEQ ID NO: 24011 - RNA, 19 nt, synthetic construct
  source 1..19: mol_type = other RNA
tgctcagagaacacgtagt

SEQ ID NO: 24012 - RNA, 19 nt, synthetic construct
  source 1..19: mol_type = other RNA
agttctccgctgtggggac

SEQ ID NO: 24013 - RNA, 19 nt, synthetic construct
  source 1..19: mol_type = other RNA
gaagtcctcgtaggcggcg

SEQ ID NO: 24014 - RNA, 19 nt, synthetic construct
  source 1..19: mol_type = other RNA
tggtggtggtgttagtcaa

SEQ ID NO: 24015 - RNA, 19 nt, synthetic construct
  source 1..19: mol_type = other RNA
cgggcgcggcagagctctg

SEQ ID NO: 24016 - RNA, 19 nt, synthetic construct
  source 1..19: mol_type = other RNA
cacggtgcagttgtccaca

SEQ ID NO: 24017 - RNA, 19 nt, synthetic construct
  source 1..19: mol_type = other RNA
cgtctccagctctgtggtc

SEQ ID NO: 24018 - RNA, 19 nt, synthetic construct
  source 1..19: mol_type = other RNA
agtcctcgtaggcggcgcg

SEQ ID NO: 24019 - RNA, 19 nt, synthetic construct
  source 1..19: mol_type = other RNA
cacacagtggtcctcgcag

SEQ ID NO: 24020 - RNA, 19 nt, synthetic construct
  source 1..19: mol_type = other RNA
tgaagtcctcgtaggcggc

SEQ ID NO: 24021 - RNA, 19 nt, synthetic construct
  source 1..19: mol_type = other RNA
tccacacagtggtcctcgc

SEQ ID NO: 24022 - RNA, 19 nt, synthetic construct
  source 1..19: mol_type = other RNA
gctgggacttggggcagtt

SEQ ID NO: 24023 - RNA, 19 nt, synthetic construct
  source 1..19: mol_type = other RNA
gcagaaacactcgcagtcg

SEQ ID NO: 24024 - RNA, 19 nt, synthetic construct
  source 1..19: mol_type = other RNA
accaggccaaagtccaggc

SEQ ID NO: 24025 - RNA, 19 nt, synthetic construct
  source 1..19: mol_type = other RNA
accaggccaaagtccaggc

SEQ ID NO: 24026 - RNA, 19 nt, synthetic construct
  source 1..19: mol_type = other RNA
ccagtggctgcagttgtag

SEQ ID NO: 24027 - RNA, 19 nt, synthetic construct
  source 1..19: mol_type = other RNA
accaggccaaagtccaggc

SEQ ID NO: 24028 - RNA, 19 nt, synthetic construct
  source 1..19: mol_type = other RNA
accaggccaaagtccaggc

SEQ ID NO: 24029 - RNA, 19 nt, synthetic construct
  source 1..19: mol_type = other RNA
ccagtggctgcagttgtag

SEQ ID NO: 24030 - RNA, 19 nt, synthetic construct
  source 1..19: mol_type = other RNA
ccagtggctgcagttgtag

SEQ ID NO: 24031 - RNA, 19 nt, synthetic construct
  source 1..19: mol_type = other RNA
atggactcctgccctggcg

SEQ ID NO: 24032 - RNA, 19 nt, synthetic construct
  source 1..19: mol_type = other RNA
gggcgctccggccgtggca

SEQ ID NO: 24033 - RNA, 19 nt, synthetic construct
  source 1..19: mol_type = other RNA
gttgcgacctcagccctga

SEQ ID NO: 24034 - RNA, 19 nt, synthetic construct
  source 1..19: mol_type = other RNA
cgcccgtgtgtggtggccg

SEQ ID NO: 24035 - RNA, 19 nt, synthetic construct
  source 1..19: mol_type = other RNA
cgcccgtgtgtggtggccg

SEQ ID NO: 24036 - RNA, 19 nt, synthetic construct
  source 1..19: mol_type = other RNA
cgcccgtgtgtggtggccg

SEQ ID NO: 24037 - RNA, 19 nt, synthetic construct
  source 1..19: mol_type = other RNA
cagctctgtggtcggtggc

SEQ ID NO: 24038 - RNA, 19 nt, synthetic construct
  source 1..19: mol_type = other RNA
ccacaaaggtggcacacgg

SEQ ID NO: 24039 - RNA, 19 nt, synthetic construct
  source 1..19: mol_type = other RNA
ttgaaggccgggaggccgt

SEQ ID NO: 24040 - RNA, 19 nt, synthetic construct
  source 1..19: mol_type = other RNA
tcctggtgctgcatgttga

SEQ ID NO: 24041 - RNA, 19 nt, synthetic construct
  source 1..19: mol_type = other RNA
gctgtgcgcaccgtgtggg

SEQ ID NO: 24042 - RNA, 19 nt, synthetic construct
  source 1..19: mol_type = other RNA
gctgtgcgcaccgtgtggg

SEQ ID NO: 24043 - RNA, 19 nt, synthetic construct
  source 1..19: mol_type = other RNA
gctgtgcgcaccgtgtggg

SEQ ID NO: 24044 - RNA, 19 nt, synthetic construct
  source 1..19: mol_type = other RNA
gagggggtgactgtgaagc

SEQ ID NO: 24045 - RNA, 19 nt, synthetic construct
  source 1..19: mol_type = other RNA
gctgtgcgcaccgtgtggg

SEQ ID NO: 24046 - RNA, 19 nt, synthetic construct
  source 1..19: mol_type = other RNA
gtgagctgttcccagagtg

SEQ ID NO: 24047 - RNA, 19 nt, synthetic construct
  source 1..19: mol_type = other RNA
gggcaggtgaggtcgcaca

SEQ ID NO: 24048 - RNA, 19 nt, synthetic construct
  source 1..19: mol_type = other RNA
tgcacggcgggggctgacc

SEQ ID NO: 24049 - RNA, 19 nt, synthetic construct
  source 1..19: mol_type = other RNA
tgtggatttggtggctgtg

SEQ ID NO: 24050 - RNA, 19 nt, synthetic construct
  source 1..19: mol_type = other RNA
tgtggatttggtggctgtg

SEQ ID NO: 24051 - RNA, 19 nt, synthetic construct
  source 1..19: mol_type = other RNA
ccctgggcgtcacagggca

SEQ ID NO: 24052 - RNA, 19 nt, synthetic construct
  source 1..19: mol_type = other RNA
acgaagccgggacggttgc

SEQ ID NO: 24053 - RNA, 19 nt, synthetic construct
  source 1..19: mol_type = other RNA
aggagcacggagcgcgggg

SEQ ID NO: 24054 - RNA, 19 nt, synthetic construct
  source 1..19: mol_type = other RNA
gccctcgtcgtgcaccacc

SEQ ID NO: 24055 - RNA, 19 nt, synthetic construct
  source 1..19: mol_type = other RNA
gtagttgcaaaggccaggg

SEQ ID NO: 24056 - RNA, 19 nt, synthetic construct
  source 1..19: mol_type = other RNA
gttgaaggccgggaggccg

SEQ ID NO: 24057 - RNA, 19 nt, synthetic construct
  source 1..19: mol_type = other RNA
caggcctgtctgcaccacg

SEQ ID NO: 24058 - RNA, 19 nt, synthetic construct
  source 1..19: mol_type = other RNA
taggcctcggcgtagctgg

SEQ ID NO: 24059 - RNA, 19 nt, synthetic construct
  source 1..19: mol_type = other RNA
gaatgtccacacgcatggt

SEQ ID NO: 24060 - RNA, 19 nt, synthetic construct
  source 1..19: mol_type = other RNA
ccaggcctgtctgcaccac

SEQ ID NO: 24061 - RNA, 19 nt, synthetic construct
  source 1..19: mol_type = other RNA
tctgttggctgttggcgca

SEQ ID NO: 24062 - RNA, 19 nt, synthetic construct
  source 1..19: mol_type = other RNA
gtgttgccatagaaccagt

SEQ ID NO: 24063 - RNA, 19 nt, synthetic construct
  source 1..19: mol_type = other RNA
gctgctagggtgtgggaag

SEQ ID NO: 24064 - RNA, 19 nt, synthetic construct
  source 1..19: mol_type = other RNA
gtgttgccatagaaccagt

SEQ ID NO: 24065 - RNA, 19 nt, synthetic construct
  source 1..19: mol_type = other RNA
gtgttgccatagaaccagt

SEQ ID NO: 24066 - RNA, 19 nt, synthetic construct
  source 1..19: mol_type = other RNA
gtgttgccatagaaccagt

SEQ ID NO: 24067 - RNA, 19 nt, synthetic construct
  source 1..19: mol_type = other RNA
gtgttgccatagaaccagt

SEQ ID NO: 24068 - RNA, 19 nt, synthetic construct
  source 1..19: mol_type = other RNA
gacactggcggtggggagg

SEQ ID NO: 24069 - RNA, 19 nt, synthetic construct
  source 1..19: mol_type = other RNA
gtgcatggatctctctcat

SEQ ID NO: 24070 - RNA, 19 nt, synthetic construct
  source 1..19: mol_type = other RNA
ctcggggcagcaggggttc

SEQ ID NO: 24071 - RNA, 19 nt, synthetic construct
  source 1..19: mol_type = other RNA
ggacgctccggggcaggag

SEQ ID NO: 24072 - RNA, 19 nt, synthetic construct
  source 1..19: mol_type = other RNA
agcacggagcgcggggtgc

SEQ ID NO: 24073 - RNA, 19 nt, synthetic construct
  source 1..19: mol_type = other RNA
gtgctcggctctgtgagga

SEQ ID NO: 24074 - RNA, 19 nt, synthetic construct
  source 1..19: mol_type = other RNA
gtgctcggctctgtgagga

SEQ ID NO: 24075 - RNA, 19 nt, synthetic construct
  source 1..19: mol_type = other RNA
gtgctcggctctgtgagga

SEQ ID NO: 24076 - RNA, 19 nt, synthetic construct
  source 1..19: mol_type = other RNA
gtgctcggctctgtgagga

SEQ ID NO: 24077 - RNA, 19 nt, synthetic construct
  source 1..19: mol_type = other RNA
gtggcactccgcaaaggcc

SEQ ID NO: 24078 - RNA, 19 nt, synthetic construct
  source 1..19: mol_type = other RNA
gtcagcactttggtagtgt

SEQ ID NO: 24079 - RNA, 19 nt, synthetic construct
  source 1..19: mol_type = other RNA
gtgtgtgggtggtccctag

SEQ ID NO: 24080 - RNA, 19 nt, synthetic construct
  source 1..19: mol_type = other RNA
gtgtgtgggtggtccctag

SEQ ID NO: 24081 - RNA, 19 nt, synthetic construct
  source 1..19: mol_type = other RNA
gtgtgtgggtggtccctag

SEQ ID NO: 24082 - RNA, 19 nt, synthetic construct
  source 1..19: mol_type = other RNA
gtgtgtgggtggtccctag

SEQ ID NO: 24083 - RNA, 19 nt, synthetic construct
  source 1..19: mol_type = other RNA
ctgatgatggtgccgttgc

SEQ ID NO: 24084 - RNA, 19 nt, synthetic construct
  source 1..19: mol_type = other RNA
accggatgctcggggtcac

SEQ ID NO: 24085 - RNA, 19 nt, synthetic construct
  source 1..19: mol_type = other RNA
gtattgttgcaggcatcct

SEQ ID NO: 24086 - RNA, 19 nt, synthetic construct
  source 1..19: mol_type = other RNA
tggacaggcggccgccttg

SEQ ID NO: 24087 - RNA, 19 nt, synthetic construct
  source 1..19: mol_type = other RNA
cacagtgcaccttctgccc

SEQ ID NO: 24088 - RNA, 19 nt, synthetic construct
  source 1..19: mol_type = other RNA
ctctggagtagaggaggtg

SEQ ID NO: 24089 - RNA, 19 nt, synthetic construct
  source 1..19: mol_type = other RNA
agtgccgtccctgggctgg

SEQ ID NO: 24090 - RNA, 19 nt, synthetic construct
  source 1..19: mol_type = other RNA
cgtgccgtccctgggctgg

SEQ ID NO: 24091 - RNA, 19 nt, synthetic construct
  source 1..19: mol_type = other RNA
agtgccgtccctgggctgg

SEQ ID NO: 24092 - RNA, 19 nt, synthetic construct
  source 1..19: mol_type = other RNA
gagccggtggctgtgatcg

SEQ ID NO: 24093 - RNA, 19 nt, synthetic construct
  source 1..19: mol_type = other RNA
cgtgccgtccctgggctgg

SEQ ID NO: 24094 - RNA, 19 nt, synthetic construct
  source 1..19: mol_type = other RNA
agtgccgtccctgggctgg

SEQ ID NO: 24095 - RNA, 19 nt, synthetic construct
  source 1..19: mol_type = other RNA
acacacggtggagaccggg

SEQ ID NO: 24096 - RNA, 19 nt, synthetic construct
  source 1..19: mol_type = other RNA
ggtcagcctggcgttgtgg

SEQ ID NO: 24097 - RNA, 19 nt, synthetic construct
  source 1..19: mol_type = other RNA
cactgccatagccccccgg

SEQ ID NO: 24098 - RNA, 19 nt, synthetic construct
  source 1..19: mol_type = other RNA
tcagcactttggtagtgtg

SEQ ID NO: 24099 - RNA, 19 nt, synthetic construct
  source 1..19: mol_type = other RNA
tggttgcagtccttggact

SEQ ID NO: 24100 - RNA, 19 nt, synthetic construct
  source 1..19: mol_type = other RNA
gccacagagccggtggccc

SEQ ID NO: 24101 - RNA, 19 nt, synthetic construct
  source 1..19: mol_type = other RNA
gccacagagccggtggccc

SEQ ID NO: 24102 - RNA, 19 nt, synthetic construct
  source 1..19: mol_type = other RNA
tggttgcagtccttggact

SEQ ID NO: 24103 - RNA, 19 nt, synthetic construct
  source 1..19: mol_type = other RNA
tggttgcagtccttggact

SEQ ID NO: 24104 - RNA, 19 nt, synthetic construct
  source 1..19: mol_type = other RNA
tggtggtctgtgctgggac

SEQ ID NO: 24105 - RNA, 19 nt, synthetic construct
  source 1..19: mol_type = other RNA
cagtggacacgctgaaggt

SEQ ID NO: 24106 - RNA, 19 nt, synthetic construct
  source 1..19: mol_type = other RNA
cttgtagtggatgctgagg

SEQ ID NO: 24107 - RNA, 19 nt, synthetic construct
  source 1..19: mol_type = other RNA
cagcatcagatcacagagc

SEQ ID NO: 24108 - RNA, 19 nt, synthetic construct
  source 1..19: mol_type = other RNA
tgtgggctctggttcctag

SEQ ID NO: 24109 - RNA, 19 nt, synthetic construct
  source 1..19: mol_type = other RNA
gctccgcagaggaggccca

SEQ ID NO: 24110 - RNA, 19 nt, synthetic construct
  source 1..19: mol_type = other RNA
gacctcagccctgagttac

SEQ ID NO: 24111 - RNA, 19 nt, synthetic construct
  source 1..19: mol_type = other RNA
acacggcgccctcgtcgtg

SEQ ID NO: 24112 - RNA, 19 nt, synthetic construct
  source 1..19: mol_type = other RNA
gtcagcactggggggatag

SEQ ID NO: 24113 - RNA, 19 nt, synthetic construct
  source 1..19: mol_type = other RNA
gtcagcactggggggatag

SEQ ID NO: 24114 - RNA, 19 nt, synthetic construct
  source 1..19: mol_type = other RNA
ccgttggacgcctccagca

SEQ ID NO: 24115 - RNA, 19 nt, synthetic construct
  source 1..19: mol_type = other RNA
tcccgtgggtctcgatgac

SEQ ID NO: 24116 - RNA, 19 nt, synthetic construct
  source 1..19: mol_type = other RNA
aagacgccctcctgctccc

SEQ ID NO: 24117 - RNA, 19 nt, synthetic construct
  source 1..19: mol_type = other RNA
tagcacatcttgaagacgc

SEQ ID NO: 24118 - RNA, 19 nt, synthetic construct
  source 1..19: mol_type = other RNA
tggtcgtcactgcagcaga

SEQ ID NO: 24119 - RNA, 19 nt, synthetic construct
  source 1..19: mol_type = other RNA
gtggggcctcccgtggtgg

SEQ ID NO: 24120 - RNA, 19 nt, synthetic construct
  source 1..19: mol_type = other RNA
gagctggtgactgtgggtg

SEQ ID NO: 24121 - RNA, 19 nt, synthetic construct
  source 1..19: mol_type = other RNA
ggaggtgtgggcagtctct

SEQ ID NO: 24122 - RNA, 19 nt, synthetic construct
  source 1..19: mol_type = other RNA
tggtggtcagtgatggggg

SEQ ID NO: 24123 - RNA, 19 nt, synthetic construct
  source 1..19: mol_type = other RNA
gcccgtgtgtggtggccat

SEQ ID NO: 24124 - RNA, 19 nt, synthetic construct
  source 1..19: mol_type = other RNA
gagctggtgactgtgggtg

SEQ ID NO: 24125 - RNA, 19 nt, synthetic construct
  source 1..19: mol_type = other RNA
tggtggtcagtgatggggg

SEQ ID NO: 24126 - RNA, 19 nt, synthetic construct
  source 1..19: mol_type = other RNA
tggtggtcagtgatggggg

SEQ ID NO: 24127 - RNA, 19 nt, synthetic construct
  source 1..19: mol_type = other RNA
gagctggtgactgtgggtg

SEQ ID NO: 24128 - RNA, 19 nt, synthetic construct
  source 1..19: mol_type = other RNA
ggaggtgtgggcagtctct

SEQ ID NO: 24129 - RNA, 19 nt, synthetic construct
  source 1..19: mol_type = other RNA
gagctggtgactgtgggtg

SEQ ID NO: 24130 - RNA, 19 nt, synthetic construct
  source 1..19: mol_type = other RNA
agggcagttgcagtccctg

SEQ ID NO: 24131 - RNA, 19 nt, synthetic construct
  source 1..19: mol_type = other RNA
tggtggtcagtgatggggg

SEQ ID NO: 24132 - RNA, 19 nt, synthetic construct
  source 1..19: mol_type = other RNA
agccctcgcagaaggtgat

SEQ ID NO: 24133 - RNA, 19 nt, synthetic construct
  source 1..19: mol_type = other RNA
ctccggccgtggcagggac

SEQ ID NO: 24134 - RNA, 19 nt, synthetic construct
  source 1..19: mol_type = other RNA
cttgcctgtcgcagcttcc

SEQ ID NO: 24135 - RNA, 19 nt, synthetic construct
  source 1..19: mol_type = other RNA
ggcggcgcggcagtgctca

SEQ ID NO: 24136 - RNA, 19 nt, synthetic construct
  source 1..19: mol_type = other RNA
ggtacgcagtgctgtccac

SEQ ID NO: 24137 - RNA, 19 nt, synthetic construct
  source 1..19: mol_type = other RNA
gaggaggggatggctgtaa

SEQ ID NO: 24138 - RNA, 19 nt, synthetic construct
  source 1..19: mol_type = other RNA
gaggaggggatggctgtaa

SEQ ID NO: 24139 - RNA, 19 nt, synthetic construct
  source 1..19: mol_type = other RNA
gaggaggggatggctgtaa

SEQ ID NO: 24140 - RNA, 19 nt, synthetic construct
  source 1..19: mol_type = other RNA
cattgtacgaacacagctg

SEQ ID NO: 24141 - RNA, 19 nt, synthetic construct
  source 1..19: mol_type = other RNA
caggctcgtggtcagcggc

SEQ ID NO: 24142 - RNA, 19 nt, synthetic construct
  source 1..19: mol_type = other RNA
ctgggaaccgtggaggcag

SEQ ID NO: 24143 - RNA, 19 nt, synthetic construct
  source 1..19: mol_type = other RNA
ggtcgctgatgcaggcgtt

SEQ ID NO: 24144 - RNA, 19 nt, synthetic construct
  source 1..19: mol_type = other RNA
ggaacctctggttgtgggt

SEQ ID NO: 24145 - RNA, 19 nt, synthetic construct
  source 1..19: mol_type = other RNA
agctgctgtcggcacattt

SEQ ID NO: 24146 - RNA, 19 nt, synthetic construct
  source 1..19: mol_type = other RNA
atgaacacgctggtcttcc

SEQ ID NO: 24147 - RNA, 19 nt, synthetic construct
  source 1..19: mol_type = other RNA
ctggatgccactgggtgtg

SEQ ID NO: 24148 - RNA, 19 nt, synthetic construct
  source 1..19: mol_type = other RNA
gaatggcgttgtggctgga

SEQ ID NO: 24149 - RNA, 19 nt, synthetic construct
  source 1..19: mol_type = other RNA
tcgggaagctgcgccgccc

SEQ ID NO: 24150 - RNA, 19 nt, synthetic construct
  source 1..19: mol_type = other RNA
tgctagggtgagggctgga

SEQ ID NO: 24151 - RNA, 19 nt, synthetic construct
  source 1..19: mol_type = other RNA
gtggatttggtggctgtgc

SEQ ID NO: 24152 - RNA, 19 nt, synthetic construct
  source 1..19: mol_type = other RNA
ctggtcagcactttgaggg

SEQ ID NO: 24153 - RNA, 19 nt, synthetic construct
  source 1..19: mol_type = other RNA
gtggatttggtggctgtgc

SEQ ID NO: 24154 - RNA, 19 nt, synthetic construct
  source 1..19: mol_type = other RNA
caggggcaggcctgcacgc

SEQ ID NO: 24155 - RNA, 19 nt, synthetic construct
  source 1..19: mol_type = other RNA
catcgggcgtgaggcaggc

SEQ ID NO: 24156 - RNA, 19 nt, synthetic construct
  source 1..19: mol_type = other RNA
gcaaaggccagggaagcgg

SEQ ID NO: 24157 - RNA, 19 nt, synthetic construct
  source 1..19: mol_type = other RNA
tgtggtggtctgttctggg

SEQ ID NO: 24158 - RNA, 19 nt, synthetic construct
  source 1..19: mol_type = other RNA
tgtggtggtctgttctggg

SEQ ID NO: 24159 - RNA, 19 nt, synthetic construct
  source 1..19: mol_type = other RNA
cggggcctggtcacggtta

SEQ ID NO: 24160 - RNA, 19 nt, synthetic construct
  source 1..19: mol_type = other RNA
gccgtggcagggacacata

SEQ ID NO: 24161 - RNA, 19 nt, synthetic construct
  source 1..19: mol_type = other RNA
tagttgcaaaggccaggga

SEQ ID NO: 24162 - RNA, 19 nt, synthetic construct
  source 1..19: mol_type = other RNA
cattgatgaggacggagcc

SEQ ID NO: 24163 - RNA, 19 nt, synthetic construct
  source 1..19: mol_type = other RNA
gtcatccagcaccgtgcct

SEQ ID NO: 24164 - RNA, 19 nt, synthetic construct
  source 1..19: mol_type = other RNA
ctgttcctggcattggcac

SEQ ID NO: 24165 - RNA, 19 nt, synthetic construct
  source 1..19: mol_type = other RNA
ccactcccatccgacacca

SEQ ID NO: 24166 - RNA, 19 nt, synthetic construct
  source 1..19: mol_type = other RNA
tagggtgggtccccacccg

SEQ ID NO: 24167 - RNA, 19 nt, synthetic construct
  source 1..19: mol_type = other RNA
acacggtggagaccgggag

SEQ ID NO: 24168 - RNA, 19 nt, synthetic construct
  source 1..19: mol_type = other RNA
gtcagtccttctgagaggg

SEQ ID NO: 24169 - RNA, 19 nt, synthetic construct
  source 1..19: mol_type = other RNA
gtcgtggggcctcccgtgg

SEQ ID NO: 24170 - RNA, 19 nt, synthetic construct
  source 1..19: mol_type = other RNA
gtcgtccctggaagggctg

SEQ ID NO: 24171 - RNA, 19 nt, synthetic construct
  source 1..19: mol_type = other RNA
acagcgggtcgtgccctgg

SEQ ID NO: 24172 - RNA, 19 nt, synthetic construct
  source 1..19: mol_type = other RNA
gtggaggtgtgggcagtct

SEQ ID NO: 24173 - RNA, 19 nt, synthetic construct
  source 1..19: mol_type = other RNA
agagggccccggcatgggg

SEQ ID NO: 24174 - RNA, 19 nt, synthetic construct
  source 1..19: mol_type = other RNA
cttccccacctgctcacgg

SEQ ID NO: 24175 - RNA, 19 nt, synthetic construct
  source 1..19: mol_type = other RNA
gtggtgctcacatgtgggg

SEQ ID NO: 24176 - RNA, 19 nt, synthetic construct
  source 1..19: mol_type = other RNA
agagggccccggcatgggg

SEQ ID NO: 24177 - RNA, 19 nt, synthetic construct
  source 1..19: mol_type = other RNA
cttccccacctgctcacgg

SEQ ID NO: 24178 - RNA, 19 nt, synthetic construct
  source 1..19: mol_type = other RNA
agagggccccggcatgggg

SEQ ID NO: 24179 - RNA, 19 nt, synthetic construct
  source 1..19: mol_type = other RNA
cttccccacctgctcacgg

SEQ ID NO: 24180 - RNA, 19 nt, synthetic construct
  source 1..19: mol_type = other RNA
gtggtgctcacatgtgggg

SEQ ID NO: 24181 - RNA, 19 nt, synthetic construct
  source 1..19: mol_type = other RNA
gtggaggtgtgggcagtct

SEQ ID NO: 24182 - RNA, 19 nt, synthetic construct
  source 1..19: mol_type = other RNA
agagggccccggcatgggg

SEQ ID NO: 24183 - RNA, 19 nt, synthetic construct
  source 1..19: mol_type = other RNA
cttccccacctgctcacgg

SEQ ID NO: 24184 - RNA, 19 nt, synthetic construct
  source 1..19: mol_type = other RNA
gtggtgctcacatgtgggg

SEQ ID NO: 24185 - RNA, 19 nt, synthetic construct
  source 1..19: mol_type = other RNA
gtggtggtctgtgctggga

SEQ ID NO: 24186 - RNA, 19 nt, synthetic construct
  source 1..19: mol_type = other RNA
tgagctgttcccagagtgg

SEQ ID NO: 24187 - RNA, 19 nt, synthetic construct
  source 1..19: mol_type = other RNA
ccctgcagtggtcgctgat

SEQ ID NO: 24188 - RNA, 19 nt, synthetic construct
  source 1..19: mol_type = other RNA
gcacctcaaggcggcccct

SEQ ID NO: 24189 - RNA, 19 nt, synthetic construct
  source 1..19: mol_type = other RNA
ggccaccggttgcacctcg

SEQ ID NO: 24190 - RNA, 19 nt, synthetic construct
  source 1..19: mol_type = other RNA
aggtggcaggctgtatggg

SEQ ID NO: 24191 - RNA, 19 nt, synthetic construct
  source 1..19: mol_type = other RNA
gctgaccctgggcgtcaca

SEQ ID NO: 24192 - RNA, 19 nt, synthetic construct
  source 1..19: mol_type = other RNA
tagaaggtgccattgtacg

SEQ ID NO: 24193 - RNA, 19 nt, synthetic construct
  source 1..19: mol_type = other RNA
tggggatggaggcagaacg

SEQ ID NO: 24194 - RNA, 19 nt, synthetic construct
  source 1..19: mol_type = other RNA
tcagccctgagttaccctg

SEQ ID NO: 24195 - RNA, 19 nt, synthetic construct
  source 1..19: mol_type = other RNA
gactctgttggctgttggc

SEQ ID NO: 24196 - RNA, 19 nt, synthetic construct
  source 1..19: mol_type = other RNA
acgggatggccgtggatcc

SEQ ID NO: 24197 - RNA, 19 nt, synthetic construct
  source 1..19: mol_type = other RNA
ctgggcgtcacagggcagg

SEQ ID NO: 24198 - RNA, 19 nt, synthetic construct
  source 1..19: mol_type = other RNA
cctgggcgtcacagggcag

SEQ ID NO: 24199 - RNA, 19 nt, synthetic construct
  source 1..19: mol_type = other RNA
ctcggcccggggcctggtc

SEQ ID NO: 24200 - RNA, 19 nt, synthetic construct
  source 1..19: mol_type = other RNA
tggtctgtgctgggacggt

SEQ ID NO: 24201 - RNA, 19 nt, synthetic construct
  source 1..19: mol_type = other RNA
ccactttgggggtgtgagc

SEQ ID NO: 24202 - RNA, 19 nt, synthetic construct
  source 1..19: mol_type = other RNA
cctggagcccactaggcct

SEQ ID NO: 24203 - RNA, 19 nt, synthetic construct
  source 1..19: mol_type = other RNA
tgggggacccaggcggtgg

SEQ ID NO: 24204 - RNA, 19 nt, synthetic construct
  source 1..19: mol_type = other RNA
gaagcagccctccgccatc

SEQ ID NO: 24205 - RNA, 19 nt, synthetic construct
  source 1..19: mol_type = other RNA
cagctcggctccacagggc

SEQ ID NO: 24206 - RNA, 19 nt, synthetic construct
  source 1..19: mol_type = other RNA
tgttgctgcagtccaggta

SEQ ID NO: 24207 - RNA, 19 nt, synthetic construct
  source 1..19: mol_type = other RNA
gctgtggacatggtggccg

SEQ ID NO: 24208 - RNA, 19 nt, synthetic construct
  source 1..19: mol_type = other RNA
gctgtggacatggtggccg

SEQ ID NO: 24209 - RNA, 19 nt, synthetic construct
  source 1..19: mol_type = other RNA
gctgtggacatggtggccg

SEQ ID NO: 24210 - RNA, 19 nt, synthetic construct
  source 1..19: mol_type = other RNA
gctgtggacatggtggccg

SEQ ID NO: 24211 - RNA, 19 nt, synthetic construct
  source 1..19: mol_type = other RNA
gctgtggacatggtggccg

SEQ ID NO: 24212 - RNA, 19 nt, synthetic construct
  source 1..19: mol_type = other RNA
atggctgttgacccaggtt

SEQ ID NO: 24213 - RNA, 19 nt, synthetic construct
  source 1..19: mol_type = other RNA
tcctcgtaggcggcgcggc

SEQ ID NO: 24214 - RNA, 19 nt, synthetic construct
  source 1..19: mol_type = other RNA
caggcccgcgtcgtggcag

SEQ ID NO: 24215 - RNA, 19 nt, synthetic construct
  source 1..19: mol_type = other RNA
cctcgtaggcggcgcggca

SEQ ID NO: 24216 - RNA, 19 nt, synthetic construct
  source 1..19: mol_type = other RNA
cgtagagtttctcatcata

SEQ ID NO: 24217 - RNA, 19 nt, synthetic construct
  source 1..19: mol_type = other RNA
ctgggcgggcacacaggcg

SEQ ID NO: 24218 - RNA, 19 nt, synthetic construct
  source 1..19: mol_type = other RNA
ggtgttgccatagaaccag

SEQ ID NO: 24219 - RNA, 19 nt, synthetic construct
  source 1..19: mol_type = other RNA
ggtgttgccatagaaccag

SEQ ID NO: 24220 - RNA, 19 nt, synthetic construct
  source 1..19: mol_type = other RNA
ggtgttgccatagaaccag

SEQ ID NO: 24221 - RNA, 19 nt, synthetic construct
  source 1..19: mol_type = other RNA
ggtgttgccatagaaccag

SEQ ID NO: 24222 - RNA, 19 nt, synthetic construct
  source 1..19: mol_type = other RNA
ggtgttgccatagaaccag

SEQ ID NO: 24223 - RNA, 19 nt, synthetic construct
  source 1..19: mol_type = other RNA
ggagcactgcaggggtgcg

SEQ ID NO: 24224 - RNA, 19 nt, synthetic construct
  source 1..19: mol_type = other RNA
tcttattgtagatgacttc

SEQ ID NO: 24225 - RNA, 19 nt, synthetic construct
  source 1..19: mol_type = other RNA
gtcttattgtagatgactt

SEQ ID NO: 24226 - RNA, 19 nt, synthetic construct
  source 1..19: mol_type = other RNA
tgaagaggatctggtcctc

SEQ ID NO: 24227 - RNA, 19 nt, synthetic construct
  source 1..19: mol_type = other RNA
aggggttctcggcccgggg

SEQ ID NO: 24228 - RNA, 19 nt, synthetic construct
  source 1..19: mol_type = other RNA
gcagccgtccacacagtgg

SEQ ID NO: 24229 - RNA, 19 nt, synthetic construct
  source 1..19: mol_type = other RNA
gaagggcttggggttgatg

SEQ ID NO: 24230 - RNA, 19 nt, synthetic construct
  source 1..19: mol_type = other RNA
tgtgcacacaggggcagtc

SEQ ID NO: 24231 - RNA, 19 nt, synthetic construct
  source 1..19: mol_type = other RNA
agctgtaggtcctgtcctc

SEQ ID NO: 24232 - RNA, 19 nt, synthetic construct
  source 1..19: mol_type = other RNA
ggggcccagcagccatcct

SEQ ID NO: 24233 - RNA, 19 nt, synthetic construct
  source 1..19: mol_type = other RNA
aggtttcattcagctggac

SEQ ID NO: 24234 - RNA, 19 nt, synthetic construct
  source 1..19: mol_type = other RNA
tgtgcaggatggctgagcc

SEQ ID NO: 24235 - RNA, 19 nt, synthetic construct
  source 1..19: mol_type = other RNA
ctctccgttccacaggaat

SEQ ID NO: 24236 - RNA, 19 nt, synthetic construct
  source 1..19: mol_type = other RNA
gtagagtttctcatcatag

SEQ ID NO: 24237 - RNA, 19 nt, synthetic construct
  source 1..19: mol_type = other RNA
ggcagcttagcttcccacc

SEQ ID NO: 24238 - RNA, 19 nt, synthetic construct
  source 1..19: mol_type = other RNA
gtggccacgggtgtggtgg

SEQ ID NO: 24239 - RNA, 19 nt, synthetic construct
  source 1..19: mol_type = other RNA
gaagcagccgtccacacag

SEQ ID NO: 24240 - RNA, 19 nt, synthetic construct
  source 1..19: mol_type = other RNA
acgtagctgcagtcaccat

SEQ ID NO: 24241 - RNA, 19 nt, synthetic construct
  source 1..19: mol_type = other RNA
tgggggtgtgtgggtggtc

SEQ ID NO: 24242 - RNA, 19 nt, synthetic construct
  source 1..19: mol_type = other RNA
tgggggtgtgtgggtggtc

SEQ ID NO: 24243 - RNA, 19 nt, synthetic construct
  source 1..19: mol_type = other RNA
gctgttcccggggtggagg

SEQ ID NO: 24244 - RNA, 19 nt, synthetic construct
  source 1..19: mol_type = other RNA
tctgggagggtcccggtgg

SEQ ID NO: 24245 - RNA, 19 nt, synthetic construct
  source 1..19: mol_type = other RNA
tgggggtgtgtgggtggtc

SEQ ID NO: 24246 - RNA, 19 nt, synthetic construct
  source 1..19: mol_type = other RNA
tgggggtgtgtgggtggtc

SEQ ID NO: 24247 - RNA, 19 nt, synthetic construct
  source 1..19: mol_type = other RNA
gctgttcccggggtggagg

SEQ ID NO: 24248 - RNA, 19 nt, synthetic construct
  source 1..19: mol_type = other RNA
tctgggagggtcccggtgg

SEQ ID NO: 24249 - RNA, 19 nt, synthetic construct
  source 1..19: mol_type = other RNA
tctggcggtgtgggtggtc

SEQ ID NO: 24250 - RNA, 19 nt, synthetic construct
  source 1..19: mol_type = other RNA
tcctttctgctgtcgggga

SEQ ID NO: 24251 - RNA, 19 nt, synthetic construct
  source 1..19: mol_type = other RNA
cgcagaggaggcccaaggt

SEQ ID NO: 24252 - RNA, 19 nt, synthetic construct
  source 1..19: mol_type = other RNA
cagcccccgcatgcggtca

SEQ ID NO: 24253 - RNA, 19 nt, synthetic construct
  source 1..19: mol_type = other RNA
attgaggaaggtgcccgcg

SEQ ID NO: 24254 - RNA, 19 nt, synthetic construct
  source 1..19: mol_type = other RNA
ccgtccttgtcgtagcagc

SEQ ID NO: 24255 - RNA, 19 nt, synthetic construct
  source 1..19: mol_type = other RNA
cttcctgatgatggtgccg

SEQ ID NO: 24256 - RNA, 19 nt, synthetic construct
  source 1..19: mol_type = other RNA
agctctgtggtcggtggcg

SEQ ID NO: 24257 - RNA, 19 nt, synthetic construct
  source 1..19: mol_type = other RNA
ctctgctccaccaggaggc

SEQ ID NO: 24258 - RNA, 19 nt, synthetic construct
  source 1..19: mol_type = other RNA
agcagccgtccacacagtg

SEQ ID NO: 24259 - RNA, 19 nt, synthetic construct
  source 1..19: mol_type = other RNA
cagaagcagccgtccacac

SEQ ID NO: 24260 - RNA, 19 nt, synthetic construct
  source 1..19: mol_type = other RNA
ttgaggaaggtgcccgcgg

SEQ ID NO: 24261 - RNA, 19 nt, synthetic construct
  source 1..19: mol_type = other RNA
accatgggggctgcacacc

SEQ ID NO: 24262 - RNA, 19 nt, synthetic construct
  source 1..19: mol_type = other RNA
tgcacacaggggcagtcct

SEQ ID NO: 24263 - RNA, 19 nt, synthetic construct
  source 1..19: mol_type = other RNA
gttgtccccacagtagtcc

SEQ ID NO: 24264 - RNA, 19 nt, synthetic construct
  source 1..19: mol_type = other RNA
aggggtccttgggtgccag

SEQ ID NO: 24265 - RNA, 19 nt, synthetic construct
  source 1..19: mol_type = other RNA
gggctctgggcggtgccca

SEQ ID NO: 24266 - RNA, 19 nt, synthetic construct
  source 1..19: mol_type = other RNA
ccagggtccagttggggaa

SEQ ID NO: 24267 - RNA, 19 nt, synthetic construct
  source 1..19: mol_type = other RNA
tcactgcagcagaggaccc

SEQ ID NO: 24268 - RNA, 19 nt, synthetic construct
  source 1..19: mol_type = other RNA
tggaggtcggggtggccgt

SEQ ID NO: 24269 - RNA, 19 nt, synthetic construct
  source 1..19: mol_type = other RNA
gtggacatggtggccgtgg

SEQ ID NO: 24270 - RNA, 19 nt, synthetic construct
  source 1..19: mol_type = other RNA
agccggtggccccagttgt

SEQ ID NO: 24271 - RNA, 19 nt, synthetic construct
  source 1..19: mol_type = other RNA
tttggtagtgtgagctgtt

SEQ ID NO: 24272 - RNA, 19 nt, synthetic construct
  source 1..19: mol_type = other RNA
tggttgtggtagttggcac

SEQ ID NO: 24273 - RNA, 19 nt, synthetic construct
  source 1..19: mol_type = other RNA
tgtggcggtgtgggtggtc

SEQ ID NO: 24274 - RNA, 19 nt, synthetic construct
  source 1..19: mol_type = other RNA
tggtggcggtggtggtcag

SEQ ID NO: 24275 - RNA, 19 nt, synthetic construct
  source 1..19: mol_type = other RNA
ggtggttctgctgctaggg

SEQ ID NO: 24276 - RNA, 19 nt, synthetic construct
  source 1..19: mol_type = other RNA
cggtggttctgctgctagg

SEQ ID NO: 24277 - RNA, 19 nt, synthetic construct
  source 1..19: mol_type = other RNA
actcggtggttctgctgct

SEQ ID NO: 24278 - RNA, 19 nt, synthetic construct
  source 1..19: mol_type = other RNA
ggtagctgtagtccagcca

SEQ ID NO: 24279 - RNA, 19 nt, synthetic construct
  source 1..19: mol_type = other RNA
cagagggccccggcatggg

SEQ ID NO: 24280 - RNA, 19 nt, synthetic construct
  source 1..19: mol_type = other RNA
gtggacatggtggccgtgg

SEQ ID NO: 24281 - RNA, 19 nt, synthetic construct
  source 1..19: mol_type = other RNA
ggacagtctctggagtgga

SEQ ID NO: 24282 - RNA, 19 nt, synthetic construct
  source 1..19: mol_type = other RNA
tttggtagtgtgagctgtt

SEQ ID NO: 24283 - RNA, 19 nt, synthetic construct
  source 1..19: mol_type = other RNA
tgtgctgatccacactgga

SEQ ID NO: 24284 - RNA, 19 nt, synthetic construct
  source 1..19: mol_type = other RNA
tggtggcggtggtggtcag

SEQ ID NO: 24285 - RNA, 19 nt, synthetic construct
  source 1..19: mol_type = other RNA
cggtggttgctgctggggt

SEQ ID NO: 24286 - RNA, 19 nt, synthetic construct
  source 1..19: mol_type = other RNA
ggtagctgtagtccagcca

SEQ ID NO: 24287 - RNA, 19 nt, synthetic construct
  source 1..19: mol_type = other RNA
cagagggccccggcatggg

SEQ ID NO: 24288 - RNA, 19 nt, synthetic construct
  source 1..19: mol_type = other RNA
ctgttcccggggtggagga

SEQ ID NO: 24289 - RNA, 19 nt, synthetic construct
  source 1..19: mol_type = other RNA
gtggacatggtggccgtgg

SEQ ID NO: 24290 - RNA, 19 nt, synthetic construct
  source 1..19: mol_type = other RNA
tttggtagtgtgagctgtt

SEQ ID NO: 24291 - RNA, 19 nt, synthetic construct
  source 1..19: mol_type = other RNA
tgtggcggtgtgggtggtc

SEQ ID NO: 24292 - RNA, 19 nt, synthetic construct
  source 1..19: mol_type = other RNA
gtggtggagccggtggctg

SEQ ID NO: 24293 - RNA, 19 nt, synthetic construct
  source 1..19: mol_type = other RNA
tggtggcggtggtggtcag

SEQ ID NO: 24294 - RNA, 19 nt, synthetic construct
  source 1..19: mol_type = other RNA
tggtggttgctgctggggt

SEQ ID NO: 24295 - RNA, 19 nt, synthetic construct
  source 1..19: mol_type = other RNA
ggtagctgtagtccagcca

SEQ ID NO: 24296 - RNA, 19 nt, synthetic construct
  source 1..19: mol_type = other RNA
cagagggccccggcatggg

SEQ ID NO: 24297 - RNA, 19 nt, synthetic construct
  source 1..19: mol_type = other RNA
gtggacatggtggccgtgg

SEQ ID NO: 24298 - RNA, 19 nt, synthetic construct
  source 1..19: mol_type = other RNA
tttggtagtgtgagctgtt

SEQ ID NO: 24299 - RNA, 19 nt, synthetic construct
  source 1..19: mol_type = other RNA
tggtggcggtggtggtcag

SEQ ID NO: 24300 - RNA, 19 nt, synthetic construct
  source 1..19: mol_type = other RNA
cggtggttgctgctggggt

SEQ ID NO: 24301 - RNA, 19 nt, synthetic construct
  source 1..19: mol_type = other RNA
ggtagctgtagtccagcca

SEQ ID NO: 24302 - RNA, 19 nt, synthetic construct
  source 1..19: mol_type = other RNA
cagagggccccggcatggg

SEQ ID NO: 24303 - RNA, 19 nt, synthetic construct
  source 1..19: mol_type = other RNA
ctgttcccggggtggagga

SEQ ID NO: 24304 - RNA, 19 nt, synthetic construct
  source 1..19: mol_type = other RNA
gtggacatggtggccgtgg

SEQ ID NO: 24305 - RNA, 19 nt, synthetic construct
  source 1..19: mol_type = other RNA
ggacagtctctggagtgga

SEQ ID NO: 24306 - RNA, 19 nt, synthetic construct
  source 1..19: mol_type = other RNA
tttggtagtgtgagctgtt

SEQ ID NO: 24307 - RNA, 19 nt, synthetic construct
  source 1..19: mol_type = other RNA
cttattgtagatgacttcc

SEQ ID NO: 24308 - RNA, 19 nt, synthetic construct
  source 1..19: mol_type = other RNA
ctggcgggcacacaggcag

SEQ ID NO: 24309 - RNA, 19 nt, synthetic construct
  source 1..19: mol_type = other RNA
ctgcagcggaaggtgggac

SEQ ID NO: 24310 - RNA, 19 nt, synthetic construct
  source 1..19: mol_type = other RNA
gaggtgtgggtggtctccg

SEQ ID NO: 24311 - RNA, 19 nt, synthetic construct
  source 1..19: mol_type = other RNA
gaggtgtgggtggtctccg

SEQ ID NO: 24312 - RNA, 19 nt, synthetic construct
  source 1..19: mol_type = other RNA
gtcagcctggcgttgtggg

SEQ ID NO: 24313 - RNA, 19 nt, synthetic construct
  source 1..19: mol_type = other RNA
gtggaggaggggtggattg

SEQ ID NO: 24314 - RNA, 19 nt, synthetic construct
  source 1..19: mol_type = other RNA
gtggaggaggggtggattg

SEQ ID NO: 24315 - RNA, 19 nt, synthetic construct
  source 1..19: mol_type = other RNA
ggcaggtgaggtcgcacag

SEQ ID NO: 24316 - RNA, 19 nt, synthetic construct
  source 1..19: mol_type = other RNA
tctgccccagcggccggac

SEQ ID NO: 24317 - RNA, 19 nt, synthetic construct
  source 1..19: mol_type = other RNA
gcgccgggtgggcgaggac

SEQ ID NO: 24318 - RNA, 19 nt, synthetic construct
  source 1..19: mol_type = other RNA
ggcctgtctgcaccacgat

SEQ ID NO: 24319 - RNA, 19 nt, synthetic construct
  source 1..19: mol_type = other RNA
tgggaaccgtggaggcagt

SEQ ID NO: 24320 - RNA, 19 nt, synthetic construct
  source 1..19: mol_type = other RNA
gggtctctgcctgcggcac

SEQ ID NO: 24321 - RNA, 19 nt, synthetic construct
  source 1..19: mol_type = other RNA
ccctcacccttctggggcc

SEQ ID NO: 24322 - RNA, 19 nt, synthetic construct
  source 1..19: mol_type = other RNA
gcagccagagtgcgtgatg

SEQ ID NO: 24323 - RNA, 19 nt, synthetic construct
  source 1..19: mol_type = other RNA
gtcgtgcaccacctctcca

SEQ ID NO: 24324 - RNA, 19 nt, synthetic construct
  source 1..19: mol_type = other RNA
gtgaagcccgtggttgtgg

SEQ ID NO: 24325 - RNA, 19 nt, synthetic construct
  source 1..19: mol_type = other RNA
gtgaagcccgtggttgtgg

SEQ ID NO: 24326 - RNA, 19 nt, synthetic construct
  source 1..19: mol_type = other RNA
gtgaagcccgtggttgtgg

SEQ ID NO: 24327 - RNA, 19 nt, synthetic construct
  source 1..19: mol_type = other RNA
gtgaagcccgtggttgtgg

SEQ ID NO: 24328 - RNA, 19 nt, synthetic construct
  source 1..19: mol_type = other RNA
gtgaagcccgtggttgtgg

SEQ ID NO: 24329 - RNA, 19 nt, synthetic construct
  source 1..19: mol_type = other RNA
gggaaccgtggaggcagtg

SEQ ID NO: 24330 - RNA, 19 nt, synthetic construct
  source 1..19: mol_type = other RNA
tctgggcggtgcccattgt

SEQ ID NO: 24331 - RNA, 19 nt, synthetic construct
  source 1..19: mol_type = other RNA
acacgctggtcttccggtc

SEQ ID NO: 24332 - RNA, 19 nt, synthetic construct
  source 1..19: mol_type = other RNA
gccgggggagccctggtca

SEQ ID NO: 24333 - RNA, 19 nt, synthetic construct
  source 1..19: mol_type = other RNA
tggccacaggctttgggtc

SEQ ID NO: 24334 - RNA, 19 nt, synthetic construct
  source 1..19: mol_type = other RNA
tcgatgtcagccagcacag

SEQ ID NO: 24335 - RNA, 19 nt, synthetic construct
  source 1..19: mol_type = other RNA
tgctgtggtctgggttggg

SEQ ID NO: 24336 - RNA, 19 nt, synthetic construct
  source 1..19: mol_type = other RNA
gtctgcgaggtgagggccg

SEQ ID NO: 24337 - RNA, 19 nt, synthetic construct
  source 1..19: mol_type = other RNA
cactgcagcagaggacccg

SEQ ID NO: 24338 - RNA, 19 nt, synthetic construct
  source 1..19: mol_type = other RNA
ggagggtcccggtggtccc

SEQ ID NO: 24339 - RNA, 19 nt, synthetic construct
  source 1..19: mol_type = other RNA
ggagggtcccggtggtccc

SEQ ID NO: 24340 - RNA, 19 nt, synthetic construct
  source 1..19: mol_type = other RNA
gcgtcacagggcaggggct

SEQ ID NO: 24341 - RNA, 19 nt, synthetic construct
  source 1..19: mol_type = other RNA
atggacaggcggccgcctt

SEQ ID NO: 24342 - RNA, 19 nt, synthetic construct
  source 1..19: mol_type = other RNA
tggggccgatgtggggctg

SEQ ID NO: 24343 - RNA, 19 nt, synthetic construct
  source 1..19: mol_type = other RNA
ctgggagggtcccggtggt

SEQ ID NO: 24344 - RNA, 19 nt, synthetic construct
  source 1..19: mol_type = other RNA
ctgggagggtcccggtggt

SEQ ID NO: 24345 - RNA, 19 nt, synthetic construct
  source 1..19: mol_type = other RNA
cctccagcggcatgtcggg

SEQ ID NO: 24346 - RNA, 19 nt, synthetic construct
  source 1..19: mol_type = other RNA
tagggtgtgggaagtcacc

SEQ ID NO: 24347 - RNA, 19 nt, synthetic construct
  source 1..19: mol_type = other RNA
aggtcggggtggccgtgga

SEQ ID NO: 24348 - RNA, 19 nt, synthetic construct
  source 1..19: mol_type = other RNA
ccatggtgttcggcactgg

SEQ ID NO: 24349 - RNA, 19 nt, synthetic construct
  source 1..19: mol_type = other RNA
gtgtgggaagtcaccgtgg

SEQ ID NO: 24350 - RNA, 19 nt, synthetic construct
  source 1..19: mol_type = other RNA
gtcttgctgggtgtggccg

SEQ ID NO: 24351 - RNA, 19 nt, synthetic construct
  source 1..19: mol_type = other RNA
gtcttgctgggtgtggccg

SEQ ID NO: 24352 - RNA, 19 nt, synthetic construct
  source 1..19: mol_type = other RNA
gtgtgggaagtcaccgtgg

SEQ ID NO: 24353 - RNA, 19 nt, synthetic construct
  source 1..19: mol_type = other RNA
gtcttgctgggtgtggccg

SEQ ID NO: 24354 - RNA, 19 nt, synthetic construct
  source 1..19: mol_type = other RNA
ggtcaccactttgggggtg

SEQ ID NO: 24355 - RNA, 19 nt, synthetic construct
  source 1..19: mol_type = other RNA
ggctccgcagaggaggccc

SEQ ID NO: 24356 - RNA, 19 nt, synthetic construct
  source 1..19: mol_type = other RNA
tgggcagcagggtcgaggt

SEQ ID NO: 24357 - RNA, 19 nt, synthetic construct
  source 1..19: mol_type = other RNA
tgggcagcagggtcgaggt

SEQ ID NO: 24358 - RNA, 19 nt, synthetic construct
  source 1..19: mol_type = other RNA
tgggcagcagggtcgaggt

SEQ ID NO: 24359 - RNA, 19 nt, synthetic construct
  source 1..19: mol_type = other RNA
tgggcagcagggtcgaggt

SEQ ID NO: 24360 - RNA, 19 nt, synthetic construct
  source 1..19: mol_type = other RNA
cccccactcccatccgaca

SEQ ID NO: 24361 - RNA, 19 nt, synthetic construct
  source 1..19: mol_type = other RNA
tggtgctgcatgttgaggg

SEQ ID NO: 24362 - RNA, 19 nt, synthetic construct
  source 1..19: mol_type = other RNA
tggcactgccatagccccc

SEQ ID NO: 24363 - RNA, 19 nt, synthetic construct
  source 1..19: mol_type = other RNA
ggagccactggttgtgggt

SEQ ID NO: 24364 - RNA, 19 nt, synthetic construct
  source 1..19: mol_type = other RNA
ggagccactggttgtgggt

SEQ ID NO: 24365 - RNA, 19 nt, synthetic construct
  source 1..19: mol_type = other RNA
cgggtggggggacggggac

SEQ ID NO: 24366 - RNA, 19 nt, synthetic construct
  source 1..19: mol_type = other RNA
gagcaggtgtccgtgcagg

SEQ ID NO: 24367 - RNA, 19 nt, synthetic construct
  source 1..19: mol_type = other RNA
ggggttggagcaggtgtcc

SEQ ID NO: 24368 - RNA, 19 nt, synthetic construct
  source 1..19: mol_type = other RNA
ctgcagtcaccatgcaggt

SEQ ID NO: 24369 - RNA, 19 nt, synthetic construct
  source 1..19: mol_type = other RNA
cgctttcaggcagttctcg

SEQ ID NO: 24370 - RNA, 19 nt, synthetic construct
  source 1..19: mol_type = other RNA
tggcctccaccaccccgct

SEQ ID NO: 24371 - RNA, 19 nt, synthetic construct
  source 1..19: mol_type = other RNA
acagcccccatgtgggttg

SEQ ID NO: 24372 - RNA, 19 nt, synthetic construct
  source 1..19: mol_type = other RNA
agccttcctgatgatggtg

SEQ ID NO: 24373 - RNA, 19 nt, synthetic construct
  source 1..19: mol_type = other RNA
tggcactgagggagggctg

SEQ ID NO: 24374 - RNA, 19 nt, synthetic construct
  source 1..19: mol_type = other RNA
gtctgggttggggtaggca

SEQ ID NO: 24375 - RNA, 19 nt, synthetic construct
  source 1..19: mol_type = other RNA
ggttgccattgttgttggg

SEQ ID NO: 24376 - RNA, 19 nt, synthetic construct
  source 1..19: mol_type = other RNA
aggttgccattgttgttgg

SEQ ID NO: 24377 - RNA, 19 nt, synthetic construct
  source 1..19: mol_type = other RNA
ctctggaggttgccattgt

SEQ ID NO: 24378 - RNA, 19 nt, synthetic construct
  source 1..19: mol_type = other RNA
ggaggtcggggtggccgtg

SEQ ID NO: 24379 - RNA, 19 nt, synthetic construct
  source 1..19: mol_type = other RNA
gtgggtgtggtggttgtgc

SEQ ID NO: 24380 - RNA, 19 nt, synthetic construct
  source 1..19: mol_type = other RNA
agtggccacagttgtggtg

SEQ ID NO: 24381 - RNA, 19 nt, synthetic construct
  source 1..19: mol_type = other RNA
gggggatgggagttgtccc

SEQ ID NO: 24382 - RNA, 19 nt, synthetic construct
  source 1..19: mol_type = other RNA
tgtgggaagtcaccgtgga

SEQ ID NO: 24383 - RNA, 19 nt, synthetic construct
  source 1..19: mol_type = other RNA
cggcccctccggccgcacg

SEQ ID NO: 24384 - RNA, 19 nt, synthetic construct
  source 1..19: mol_type = other RNA
gtgggtgtggtggttgtgc

SEQ ID NO: 24385 - RNA, 19 nt, synthetic construct
  source 1..19: mol_type = other RNA
agtggccacagttgtggtg

SEQ ID NO: 24386 - RNA, 19 nt, synthetic construct
  source 1..19: mol_type = other RNA
cggcccctccggccgcacg

SEQ ID NO: 24387 - RNA, 19 nt, synthetic construct
  source 1..19: mol_type = other RNA
gggagggggagctgttccc

SEQ ID NO: 24388 - RNA, 19 nt, synthetic construct
  source 1..19: mol_type = other RNA
gtgggtgtggtggttgtgc

SEQ ID NO: 24389 - RNA, 19 nt, synthetic construct
  source 1..19: mol_type = other RNA
agtggccacagttgtggtg

SEQ ID NO: 24390 - RNA, 19 nt, synthetic construct
  source 1..19: mol_type = other RNA
tgtgggaagtcaccgtgga

SEQ ID NO: 24391 - RNA, 19 nt, synthetic construct
  source 1..19: mol_type = other RNA
gtgggtgtggtggttgtgc

SEQ ID NO: 24392 - RNA, 19 nt, synthetic construct
  source 1..19: mol_type = other RNA
gtggagccactggttgtgg

SEQ ID NO: 24393 - RNA, 19 nt, synthetic construct
  source 1..19: mol_type = other RNA
agtggccacagttgtggtg

SEQ ID NO: 24394 - RNA, 19 nt, synthetic construct
  source 1..19: mol_type = other RNA
gtggtgatcagtgatgggg

SEQ ID NO: 24395 - RNA, 19 nt, synthetic construct
  source 1..19: mol_type = other RNA
cggcccctccggccgcacg

SEQ ID NO: 24396 - RNA, 19 nt, synthetic construct
  source 1..19: mol_type = other RNA
gggagggggagctgttccc

SEQ ID NO: 24397 - RNA, 19 nt, synthetic construct
  source 1..19: mol_type = other RNA
tggacgtggaactggtggc

SEQ ID NO: 24398 - RNA, 19 nt, synthetic construct
  source 1..19: mol_type = other RNA
gctggaagggcagttgcag

SEQ ID NO: 24399 - RNA, 19 nt, synthetic construct
  source 1..19: mol_type = other RNA
gtgggtgtggtggttgtgc

SEQ ID NO: 24400 - RNA, 19 nt, synthetic construct
  source 1..19: mol_type = other RNA
gtggagccactggttgtgg

SEQ ID NO: 24401 - RNA, 19 nt, synthetic construct
  source 1..19: mol_type = other RNA
agtggccacagttgtggtg

SEQ ID NO: 24402 - RNA, 19 nt, synthetic construct
  source 1..19: mol_type = other RNA
tcacagggctggctcgggt

SEQ ID NO: 24403 - RNA, 19 nt, synthetic construct
  source 1..19: mol_type = other RNA
tggatgctgagggcgcggg

SEQ ID NO: 24404 - RNA, 19 nt, synthetic construct
  source 1..19: mol_type = other RNA
gtcggggaccagccacgtc

SEQ ID NO: 24405 - RNA, 19 nt, synthetic construct
  source 1..19: mol_type = other RNA
cccgggcgcggcagagctc

SEQ ID NO: 24406 - RNA, 19 nt, synthetic construct
  source 1..19: mol_type = other RNA
gccatcccctccagctgtg

SEQ ID NO: 24407 - RNA, 19 nt, synthetic construct
  source 1..19: mol_type = other RNA
gggtcccacgcaggggcag

SEQ ID NO: 24408 - RNA, 19 nt, synthetic construct
  source 1..19: mol_type = other RNA
cctgggtgcagatggactc

SEQ ID NO: 24409 - RNA, 19 nt, synthetic construct
  source 1..19: mol_type = other RNA
tctcctcgtggacccgcct

SEQ ID NO: 24410 - RNA, 19 nt, synthetic construct
  source 1..19: mol_type = other RNA
gggtgggcagcaggagcac

SEQ ID NO: 24411 - RNA, 19 nt, synthetic construct
  source 1..19: mol_type = other RNA
aggcggccgccttgcctgt

SEQ ID NO: 24412 - RNA, 19 nt, synthetic construct
  source 1..19: mol_type = other RNA
gacaggcggccgccttgcc

SEQ ID NO: 24413 - RNA, 19 nt, synthetic construct
  source 1..19: mol_type = other RNA
ggcatggacaggcggccgc

SEQ ID NO: 24414 - RNA, 19 nt, synthetic construct
  source 1..19: mol_type = other RNA
cgtggtcaccaccgtggtt

SEQ ID NO: 24415 - RNA, 19 nt, synthetic construct
  source 1..19: mol_type = other RNA
cgtggtcaccaccgtggtt

SEQ ID NO: 24416 - RNA, 19 nt, synthetic construct
  source 1..19: mol_type = other RNA
gtcctgggcgcaggcggcc

SEQ ID NO: 24417 - RNA, 19 nt, synthetic construct
  source 1..19: mol_type = other RNA
agtgctcggctctgtgagg

SEQ ID NO: 24418 - RNA, 19 nt, synthetic construct
  source 1..19: mol_type = other RNA
agtgctcggctctgtgagg

SEQ ID NO: 24419 - RNA, 19 nt, synthetic construct
  source 1..19: mol_type = other RNA
agtgctcggctctgtgagg

SEQ ID NO: 24420 - RNA, 19 nt, synthetic construct
  source 1..19: mol_type = other RNA
tggacatggtggacatggg

SEQ ID NO: 24421 - RNA, 19 nt, synthetic construct
  source 1..19: mol_type = other RNA
agtgctcggctctgtgagg

SEQ ID NO: 24422 - RNA, 19 nt, synthetic construct
  source 1..19: mol_type = other RNA
gctgggaaccgtggaggca

SEQ ID NO: 24423 - RNA, 19 nt, synthetic construct
  source 1..19: mol_type = other RNA
gtggtctccggagtggagg

SEQ ID NO: 24424 - RNA, 19 nt, synthetic construct
  source 1..19: mol_type = other RNA
ccccagggggacaccaggc

SEQ ID NO: 24425 - RNA, 19 nt, synthetic construct
  source 1..19: mol_type = other RNA
gtggtctccggagtggagg

SEQ ID NO: 24426 - RNA, 19 nt, synthetic construct
  source 1..19: mol_type = other RNA
tggctgtgaagcccgtggt

SEQ ID NO: 24427 - RNA, 19 nt, synthetic construct
  source 1..19: mol_type = other RNA
tggctgtgaagcccgtggt

SEQ ID NO: 24428 - RNA, 19 nt, synthetic construct
  source 1..19: mol_type = other RNA
tggctgtgaagcccgtggt

SEQ ID NO: 24429 - RNA, 19 nt, synthetic construct
  source 1..19: mol_type = other RNA
tggctgtgaagcccgtggt

SEQ ID NO: 24430 - RNA, 19 nt, synthetic construct
  source 1..19: mol_type = other RNA
aaggctgcgcccgtggcct

SEQ ID NO: 24431 - RNA, 19 nt, synthetic construct
  source 1..19: mol_type = other RNA
tggctttggagctggtggc

SEQ ID NO: 24432 - RNA, 19 nt, synthetic construct
  source 1..19: mol_type = other RNA
caggacacggccatcccgt

SEQ ID NO: 24433 - RNA, 19 nt, synthetic construct
  source 1..19: mol_type = other RNA
ggtcagcactggggggata

SEQ ID NO: 24434 - RNA, 19 nt, synthetic construct
  source 1..19: mol_type = other RNA
ggtcagcactggggggata

SEQ ID NO: 24435 - RNA, 19 nt, synthetic construct
  source 1..19: mol_type = other RNA
gctcgtggtcagcggctct

SEQ ID NO: 24436 - RNA, 19 nt, synthetic construct
  source 1..19: mol_type = other RNA
gtcaccgtggagcctctgg

SEQ ID NO: 24437 - RNA, 19 nt, synthetic construct
  source 1..19: mol_type = other RNA
gtcaccgtggagcctctgg

SEQ ID NO: 24438 - RNA, 19 nt, synthetic construct
  source 1..19: mol_type = other RNA
gtccccgggacggaggagg

SEQ ID NO: 24439 - RNA, 19 nt, synthetic construct
  source 1..19: mol_type = other RNA
gtgggtggtctctggagta

SEQ ID NO: 24440 - RNA, 19 nt, synthetic construct
  source 1..19: mol_type = other RNA
gtgtgagctgttcccagag

SEQ ID NO: 24441 - RNA, 19 nt, synthetic construct
  source 1..19: mol_type = other RNA
ggaagccagtgggtctcag

SEQ ID NO: 24442 - RNA, 19 nt, synthetic construct
  source 1..19: mol_type = other RNA
tgcaccatggtgacagtga

SEQ ID NO: 24443 - RNA, 19 nt, synthetic construct
  source 1..19: mol_type = other RNA
tggctgttgacccaggttt

SEQ ID NO: 24444 - RNA, 19 nt, synthetic construct
  source 1..19: mol_type = other RNA
cttagtttgttccagggcg

SEQ ID NO: 24445 - RNA, 19 nt, synthetic construct
  source 1..19: mol_type = other RNA
cagcctcacagaggtacac

SEQ ID NO: 24446 - RNA, 19 nt, synthetic construct
  source 1..19: mol_type = other RNA
ggatgggtgtaaagctggt

SEQ ID NO: 24447 - RNA, 19 nt, synthetic construct
  source 1..19: mol_type = other RNA
ggatgggtgtaaagctggt

SEQ ID NO: 24448 - RNA, 19 nt, synthetic construct
  source 1..19: mol_type = other RNA
tccggcacgcgctcggggc

SEQ ID NO: 24449 - RNA, 19 nt, synthetic construct
  source 1..19: mol_type = other RNA
cggggtcagcctggcgttg

SEQ ID NO: 24450 - RNA, 19 nt, synthetic construct
  source 1..19: mol_type = other RNA
gcggggtcagcctggcgtt

SEQ ID NO: 24451 - RNA, 19 nt, synthetic construct
  source 1..19: mol_type = other RNA
aaagctgttcctggcattg

SEQ ID NO: 24452 - RNA, 19 nt, synthetic construct
  source 1..19: mol_type = other RNA
tacaccatgggggctgcac

SEQ ID NO: 24453 - RNA, 19 nt, synthetic construct
  source 1..19: mol_type = other RNA
acacaggggcagtcctcct

SEQ ID NO: 24454 - RNA, 19 nt, synthetic construct
  source 1..19: mol_type = other RNA
cacacaggggcagtcctcc

SEQ ID NO: 24455 - RNA, 19 nt, synthetic construct
  source 1..19: mol_type = other RNA
tggctgggtgggcacttcg

SEQ ID NO: 24456 - RNA, 19 nt, synthetic construct
  source 1..19: mol_type = other RNA
tggatgccactgggtgtgc

SEQ ID NO: 24457 - RNA, 19 nt, synthetic construct
  source 1..19: mol_type = other RNA
ccctggtcagccccgggct

SEQ ID NO: 24458 - RNA, 19 nt, synthetic construct
  source 1..19: mol_type = other RNA
tcgtccctggaagggctga

SEQ ID NO: 24459 - RNA, 19 nt, synthetic construct
  source 1..19: mol_type = other RNA
tggtggctgtgcttctcag

SEQ ID NO: 24460 - RNA, 19 nt, synthetic construct
  source 1..19: mol_type = other RNA
ggccgtggtggtcagtgat

SEQ ID NO: 24461 - RNA, 19 nt, synthetic construct
  source 1..19: mol_type = other RNA
gtggccgtggtggtcagtg

SEQ ID NO: 24462 - RNA, 19 nt, synthetic construct
  source 1..19: mol_type = other RNA
ggtggagccggtggccgtg

SEQ ID NO: 24463 - RNA, 19 nt, synthetic construct
  source 1..19: mol_type = other RNA
tgtcgtggccgtggtgctc

SEQ ID NO: 24464 - RNA, 19 nt, synthetic construct
  source 1..19: mol_type = other RNA
tggtggctgtgcttctcag

SEQ ID NO: 24465 - RNA, 19 nt, synthetic construct
  source 1..19: mol_type = other RNA
ggccgtggtggtcagtgat

SEQ ID NO: 24466 - RNA, 19 nt, synthetic construct
  source 1..19: mol_type = other RNA
gtggccgtggtggtcagtg

SEQ ID NO: 24467 - RNA, 19 nt, synthetic construct
  source 1..19: mol_type = other RNA
ggtggagccggtggccgtg

SEQ ID NO: 24468 - RNA, 19 nt, synthetic construct
  source 1..19: mol_type = other RNA
tggtggctgtgcttctcag

SEQ ID NO: 24469 - RNA, 19 nt, synthetic construct
  source 1..19: mol_type = other RNA
ggccgtggtggtcagtgat

SEQ ID NO: 24470 - RNA, 19 nt, synthetic construct
  source 1..19: mol_type = other RNA
gtggccgtggtggtcagtg

SEQ ID NO: 24471 - RNA, 19 nt, synthetic construct
  source 1..19: mol_type = other RNA
ctgggtggtactggtggtt

SEQ ID NO: 24472 - RNA, 19 nt, synthetic construct
  source 1..19: mol_type = other RNA
tgtcgtggccgtggtgctc

SEQ ID NO: 24473 - RNA, 19 nt, synthetic construct
  source 1..19: mol_type = other RNA
tggtggctgtgcttctcag

SEQ ID NO: 24474 - RNA, 19 nt, synthetic construct
  source 1..19: mol_type = other RNA
ggtggagccggtggccgtg

SEQ ID NO: 24475 - RNA, 19 nt, synthetic construct
  source 1..19: mol_type = other RNA
tgtcgtggccgtggtgctc

SEQ ID NO: 24476 - RNA, 19 nt, synthetic construct
  source 1..19: mol_type = other RNA
ctcagtgctggaagggcag

SEQ ID NO: 24477 - RNA, 19 nt, synthetic construct
  source 1..19: mol_type = other RNA
tggtggctgtgcttctcag

SEQ ID NO: 24478 - RNA, 19 nt, synthetic construct
  source 1..19: mol_type = other RNA
ggccgtggtggtcagtgat

SEQ ID NO: 24479 - RNA, 19 nt, synthetic construct
  source 1..19: mol_type = other RNA
gtggccgtggtggtcagtg

SEQ ID NO: 24480 - RNA, 19 nt, synthetic construct
  source 1..19: mol_type = other RNA
ggtggagccggtggccgtg

SEQ ID NO: 24481 - RNA, 19 nt, synthetic construct
  source 1..19: mol_type = other RNA
tgtggattttgtggctgtg

SEQ ID NO: 24482 - RNA, 19 nt, synthetic construct
  source 1..19: mol_type = other RNA
ggaggtgggacaggcgccc

SEQ ID NO: 24483 - RNA, 19 nt, synthetic construct
  source 1..19: mol_type = other RNA
agtgggagccgccccacat

SEQ ID NO: 24484 - RNA, 19 nt, synthetic construct
  source 1..19: mol_type = other RNA
agaagcagccctccgccat

SEQ ID NO: 24485 - RNA, 19 nt, synthetic construct
  source 1..19: mol_type = other RNA
tcctgggccgggaagccac

SEQ ID NO: 24486 - RNA, 19 nt, synthetic construct
  source 1..19: mol_type = other RNA
ttgctgcagtccaggtaca

SEQ ID NO: 24487 - RNA, 19 nt, synthetic construct
  source 1..19: mol_type = other RNA
aacactcgcagtcgccacc

SEQ ID NO: 24488 - RNA, 19 nt, synthetic construct
  source 1..19: mol_type = other RNA
tttcaaacgtctcaaagtc

SEQ ID NO: 24489 - RNA, 19 nt, synthetic construct
  source 1..19: mol_type = other RNA
caagggtgcttgtgtatct

SEQ ID NO: 24490 - RNA, 19 nt, synthetic construct
  source 1..19: mol_type = other RNA
gtccccgtggaaggctctg

SEQ ID NO: 24491 - RNA, 19 nt, synthetic construct
  source 1..19: mol_type = other RNA
gtccccgtggaaggctctg

SEQ ID NO: 24492 - RNA, 19 nt, synthetic construct
  source 1..19: mol_type = other RNA
cctgcacgcagatgcccat

SEQ ID NO: 24493 - RNA, 19 nt, synthetic construct
  source 1..19: mol_type = other RNA
ctctggcggtgtgggtggt

SEQ ID NO: 24494 - RNA, 19 nt, synthetic construct
  source 1..19: mol_type = other RNA
catggtcaccaccgtggtt

SEQ ID NO: 24495 - RNA, 19 nt, synthetic construct
  source 1..19: mol_type = other RNA
catggtcaccaccgtggtt

SEQ ID NO: 24496 - RNA, 19 nt, synthetic construct
  source 1..19: mol_type = other RNA
tccgcggctggccccccgc

SEQ ID NO: 24497 - RNA, 19 nt, synthetic construct
  source 1..19: mol_type = other RNA
tgggttggggtaggcacag

SEQ ID NO: 24498 - RNA, 19 nt, synthetic construct
  source 1..19: mol_type = other RNA
ctggccgggggagccctgg

SEQ ID NO: 24499 - RNA, 19 nt, synthetic construct
  source 1..19: mol_type = other RNA
ggagagggatggcattgtc

SEQ ID NO: 24500 - RNA, 19 nt, synthetic construct
  source 1..19: mol_type = other RNA
ggcacctcaaggcggcccc

SEQ ID NO: 24501 - RNA, 19 nt, synthetic construct
  source 1..19: mol_type = other RNA
atccacgtgggtgtaggtg

SEQ ID NO: 24502 - RNA, 19 nt, synthetic construct
  source 1..19: mol_type = other RNA
gagggtgtggccgtggaat

SEQ ID NO: 24503 - RNA, 19 nt, synthetic construct
  source 1..19: mol_type = other RNA
gtcttgtagtggaagtcac

SEQ ID NO: 24504 - RNA, 19 nt, synthetic construct
  source 1..19: mol_type = other RNA
agccgttggacgcctccag

SEQ ID NO: 24505 - RNA, 19 nt, synthetic construct
  source 1..19: mol_type = other RNA
gcaggtgtccgtgcagggt

SEQ ID NO: 24506 - RNA, 19 nt, synthetic construct
  source 1..19: mol_type = other RNA
gtggtgttgaaggaggtgc

SEQ ID NO: 24507 - RNA, 19 nt, synthetic construct
  source 1..19: mol_type = other RNA
agcaggggcactcctgggc

SEQ ID NO: 24508 - RNA, 19 nt, synthetic construct
  source 1..19: mol_type = other RNA
gcacacaggggcagtcctc

SEQ ID NO: 24509 - RNA, 19 nt, synthetic construct
  source 1..19: mol_type = other RNA
cacagcccccatgtgggtt

SEQ ID NO: 24510 - RNA, 19 nt, synthetic construct
  source 1..19: mol_type = other RNA
tgggcacttcgggtagcag

SEQ ID NO: 24511 - RNA, 19 nt, synthetic construct
  source 1..19: mol_type = other RNA
gcactggatgccactgggt

SEQ ID NO: 24512 - RNA, 19 nt, synthetic construct
  source 1..19: mol_type = other RNA
ggagttgaggaggggttgg

SEQ ID NO: 24513 - RNA, 19 nt, synthetic construct
  source 1..19: mol_type = other RNA
tggtggccatggtgttcgg

SEQ ID NO: 24514 - RNA, 19 nt, synthetic construct
  source 1..19: mol_type = other RNA
ggagttgaggaggggttgg

SEQ ID NO: 24515 - RNA, 19 nt, synthetic construct
  source 1..19: mol_type = other RNA
ggacggggtggccgtgggg

SEQ ID NO: 24516 - RNA, 19 nt, synthetic construct
  source 1..19: mol_type = other RNA
ggagttgaggaggggttgg

SEQ ID NO: 24517 - RNA, 19 nt, synthetic construct
  source 1..19: mol_type = other RNA
cgagtgctgggtggtactg

SEQ ID NO: 24518 - RNA, 19 nt, synthetic construct
  source 1..19: mol_type = other RNA
tggccctggttgtggtggc

SEQ ID NO: 24519 - RNA, 19 nt, synthetic construct
  source 1..19: mol_type = other RNA
cgtagtggccgtggtgatc

SEQ ID NO: 24520 - RNA, 19 nt, synthetic construct
  source 1..19: mol_type = other RNA
ggagttgaggaggggttgg

SEQ ID NO: 24521 - RNA, 19 nt, synthetic construct
  source 1..19: mol_type = other RNA
ggacggggtggccgtgggg

SEQ ID NO: 24522 - RNA, 19 nt, synthetic construct
  source 1..19: mol_type = other RNA
ggagttgaggaggggttgg

SEQ ID NO: 24523 - RNA, 19 nt, synthetic construct
  source 1..19: mol_type = other RNA
gggcgaggacagcggggcg

SEQ ID NO: 24524 - RNA, 19 nt, synthetic construct
  source 1..19: mol_type = other RNA
gcaggggttctcggcccgg

SEQ ID NO: 24525 - RNA, 19 nt, synthetic construct
  source 1..19: mol_type = other RNA
ctggggccggtttcaccca

SEQ ID NO: 24526 - RNA, 19 nt, synthetic construct
  source 1..19: mol_type = other RNA
ccgtccaggctgagcgtca

SEQ ID NO: 24527 - RNA, 19 nt, synthetic construct
  source 1..19: mol_type = other RNA
ctgtggcggtgtgggtggt

SEQ ID NO: 24528 - RNA, 19 nt, synthetic construct
  source 1..19: mol_type = other RNA
ctgtggcggtgtgggtggt

SEQ ID NO: 24529 - RNA, 19 nt, synthetic construct
  source 1..19: mol_type = other RNA
ggtggtccccgggacggag

SEQ ID NO: 24530 - RNA, 19 nt, synthetic construct
  source 1..19: mol_type = other RNA
tgttgtccccacagtagtc

SEQ ID NO: 24531 - RNA, 19 nt, synthetic construct
  source 1..19: mol_type = other RNA
ctcttggaggatcagctcg

SEQ ID NO: 24532 - RNA, 19 nt, synthetic construct
  source 1..19: mol_type = other RNA
gtgtgggtggtccccggga

SEQ ID NO: 24533 - RNA, 19 nt, synthetic construct
  source 1..19: mol_type = other RNA
tggtggtcagcactgtggc

SEQ ID NO: 24534 - RNA, 19 nt, synthetic construct
  source 1..19: mol_type = other RNA
gtgtgggtggtccccggga

SEQ ID NO: 24535 - RNA, 19 nt, synthetic construct
  source 1..19: mol_type = other RNA
ctgtggaggtgtgggtggt

SEQ ID NO: 24536 - RNA, 19 nt, synthetic construct
  source 1..19: mol_type = other RNA
gtgtgggtggtccccggga

SEQ ID NO: 24537 - RNA, 19 nt, synthetic construct
  source 1..19: mol_type = other RNA
tggtggtcagcactgtggc

SEQ ID NO: 24538 - RNA, 19 nt, synthetic construct
  source 1..19: mol_type = other RNA
ctgtggaggtgtgggtggt

SEQ ID NO: 24539 - RNA, 19 nt, synthetic construct
  source 1..19: mol_type = other RNA
gtgtgggtggtccccggga

SEQ ID NO: 24540 - RNA, 19 nt, synthetic construct
  source 1..19: mol_type = other RNA
ctgtggaggtgtgggtggt

SEQ ID NO: 24541 - RNA, 19 nt, synthetic construct
  source 1..19: mol_type = other RNA
gggggctggcacgggtggg

SEQ ID NO: 24542 - RNA, 19 nt, synthetic construct
  source 1..19: mol_type = other RNA
cgctcggggcacccatcct

SEQ ID NO: 24543 - RNA, 19 nt, synthetic construct
  source 1..19: mol_type = other RNA
gagcatggccgccagagcc

SEQ ID NO: 24544 - RNA, 19 nt, synthetic construct
  source 1..19: mol_type = other RNA
ttgcaaaggccagggaagc

SEQ ID NO: 24545 - RNA, 19 nt, synthetic construct
  source 1..19: mol_type = other RNA
gctgcccattgatgaggac

SEQ ID NO: 24546 - RNA, 19 nt, synthetic construct
  source 1..19: mol_type = other RNA
cccacacaggccacaggtc

SEQ ID NO: 24547 - RNA, 19 nt, synthetic construct
  source 1..19: mol_type = other RNA
ccccacacaggccacaggt

SEQ ID NO: 24548 - RNA, 19 nt, synthetic construct
  source 1..19: mol_type = other RNA
ccgttgaagtccccacaca

SEQ ID NO: 24549 - RNA, 19 nt, synthetic construct
  source 1..19: mol_type = other RNA
ccggcaagggcagcgggtc

SEQ ID NO: 24550 - RNA, 19 nt, synthetic construct
  source 1..19: mol_type = other RNA
gtgcggtggcagatgccct

SEQ ID NO: 24551 - RNA, 19 nt, synthetic construct
  source 1..19: mol_type = other RNA
tggcacacgggcaggtggg

SEQ ID NO: 24552 - RNA, 19 nt, synthetic construct
  source 1..19: mol_type = other RNA
gagccacactcctggtgct

SEQ ID NO: 24553 - RNA, 19 nt, synthetic construct
  source 1..19: mol_type = other RNA
tcctcgcagagctgcgcgc

SEQ ID NO: 24554 - RNA, 19 nt, synthetic construct
  source 1..19: mol_type = other RNA
gaaggctgcgcccgtggcc

SEQ ID NO: 24555 - RNA, 19 nt, synthetic construct
  source 1..19: mol_type = other RNA
aacatgcagttcgagtgga

SEQ ID NO: 24556 - RNA, 19 nt, synthetic construct
  source 1..19: mol_type = other RNA
tgcccgcggggcaggtgca

SEQ ID NO: 24557 - RNA, 19 nt, synthetic construct
  source 1..19: mol_type = other RNA
gcgtccgggcaggaggggg

SEQ ID NO: 24558 - RNA, 19 nt, synthetic construct
  source 1..19: mol_type = other RNA
gctgggtgggcacttcggg

SEQ ID NO: 24559 - RNA, 19 nt, synthetic construct
  source 1..19: mol_type = other RNA
ctggctgggtgggcacttc

SEQ ID NO: 24560 - RNA, 19 nt, synthetic construct
  source 1..19: mol_type = other RNA
tggagttccaggacatgcc

SEQ ID NO: 24561 - RNA, 19 nt, synthetic construct
  source 1..19: mol_type = other RNA
gggacccaggcggtggtga

SEQ ID NO: 24562 - RNA, 19 nt, synthetic construct
  source 1..19: mol_type = other RNA
caggccgggctctgggcgg

SEQ ID NO: 24563 - RNA, 19 nt, synthetic construct
  source 1..19: mol_type = other RNA
cgcacatcagcccccgcat

SEQ ID NO: 24564 - RNA, 19 nt, synthetic construct
  source 1..19: mol_type = other RNA
actctgttggctgttggcg

SEQ ID NO: 24565 - RNA, 19 nt, synthetic construct
  source 1..19: mol_type = other RNA
ttggggtaggcacagcagg

SEQ ID NO: 24566 - RNA, 19 nt, synthetic construct
  source 1..19: mol_type = other RNA
atcttgaagacgccctcct

SEQ ID NO: 24567 - RNA, 19 nt, synthetic construct
  source 1..19: mol_type = other RNA
tctccagctctgtggtcgg

SEQ ID NO: 24568 - RNA, 19 nt, synthetic construct
  source 1..19: mol_type = other RNA
gccgtctccagctctgtgg

SEQ ID NO: 24569 - RNA, 19 nt, synthetic construct
  source 1..19: mol_type = other RNA
agtccttctgagagggtgg

SEQ ID NO: 24570 - RNA, 19 nt, synthetic construct
  source 1..19: mol_type = other RNA
tggaagggtggatgtggcc

SEQ ID NO: 24571 - RNA, 19 nt, synthetic construct
  source 1..19: mol_type = other RNA
tccctggactggaggaggg

SEQ ID NO: 24572 - RNA, 19 nt, synthetic construct
  source 1..19: mol_type = other RNA
ggtgtggtggctgtgcttc

SEQ ID NO: 24573 - RNA, 19 nt, synthetic construct
  source 1..19: mol_type = other RNA
tgggtgtggtggctgtgct

SEQ ID NO: 24574 - RNA, 19 nt, synthetic construct
  source 1..19: mol_type = other RNA
gagggtgtggctgtggaca

SEQ ID NO: 24575 - RNA, 19 nt, synthetic construct
  source 1..19: mol_type = other RNA
gtgggcagtctctggagtg

SEQ ID NO: 24576 - RNA, 19 nt, synthetic construct
  source 1..19: mol_type = other RNA
tgtggaggtgtgggcagtc

SEQ ID NO: 24577 - RNA, 19 nt, synthetic construct
  source 1..19: mol_type = other RNA
gtggtcagcactgtggcgg

SEQ ID NO: 24578 - RNA, 19 nt, synthetic construct
  source 1..19: mol_type = other RNA
gtggtggtcagcactgtgg

SEQ ID NO: 24579 - RNA, 19 nt, synthetic construct
  source 1..19: mol_type = other RNA
gtggtggtggtggtcagca

SEQ ID NO: 24580 - RNA, 19 nt, synthetic construct
  source 1..19: mol_type = other RNA
ggggggatgggagttgtcc

SEQ ID NO: 24581 - RNA, 19 nt, synthetic construct
  source 1..19: mol_type = other RNA
tggggggatgggagttgtc

SEQ ID NO: 24582 - RNA, 19 nt, synthetic construct
  source 1..19: mol_type = other RNA
tgctggggggcagggatcg

SEQ ID NO: 24583 - RNA, 19 nt, synthetic construct
  source 1..19: mol_type = other RNA
aaggctctgtgatgtgggt

SEQ ID NO: 24584 - RNA, 19 nt, synthetic construct
  source 1..19: mol_type = other RNA
gctggaaagggctggagtc

SEQ ID NO: 24585 - RNA, 19 nt, synthetic construct
  source 1..19: mol_type = other RNA
ggtgcgggtcttgctgggt

SEQ ID NO: 24586 - RNA, 19 nt, synthetic construct
  source 1..19: mol_type = other RNA
agcccatggtcaccaccgt

SEQ ID NO: 24587 - RNA, 19 nt, synthetic construct
  source 1..19: mol_type = other RNA
actggggctcacagcccat

SEQ ID NO: 24588 - RNA, 19 nt, synthetic construct
  source 1..19: mol_type = other RNA
ggtgtcaaagtccccgcca

SEQ ID NO: 24589 - RNA, 19 nt, synthetic construct
  source 1..19: mol_type = other RNA
cggtgggcaccgtcacggt

SEQ ID NO: 24590 - RNA, 19 nt, synthetic construct
  source 1..19: mol_type = other RNA
ggtgtggtggctgtgcttc

SEQ ID NO: 24591 - RNA, 19 nt, synthetic construct
  source 1..19: mol_type = other RNA
tgggtgtggtggctgtgct

SEQ ID NO: 24592 - RNA, 19 nt, synthetic construct
  source 1..19: mol_type = other RNA
ggaggaggggatggctgta

SEQ ID NO: 24593 - RNA, 19 nt, synthetic construct
  source 1..19: mol_type = other RNA
gagggtgtggctgtggaca

SEQ ID NO: 24594 - RNA, 19 nt, synthetic construct
  source 1..19: mol_type = other RNA
acagagccggtggccccgg

SEQ ID NO: 24595 - RNA, 19 nt, synthetic construct
  source 1..19: mol_type = other RNA
gtggtggtggtggtcagca

SEQ ID NO: 24596 - RNA, 19 nt, synthetic construct
  source 1..19: mol_type = other RNA
aaggctctgtgatgtgggt

SEQ ID NO: 24597 - RNA, 19 nt, synthetic construct
  source 1..19: mol_type = other RNA
tggttgctgctggggtgtg

SEQ ID NO: 24598 - RNA, 19 nt, synthetic construct
  source 1..19: mol_type = other RNA
ggtgcgggtcttgctgggt

SEQ ID NO: 24599 - RNA, 19 nt, synthetic construct
  source 1..19: mol_type = other RNA
agcccatggtcaccaccgt

SEQ ID NO: 24600 - RNA, 19 nt, synthetic construct
  source 1..19: mol_type = other RNA
actggggctcacagcccat

SEQ ID NO: 24601 - RNA, 19 nt, synthetic construct
  source 1..19: mol_type = other RNA
ggtgtcaaagtccccgcca

SEQ ID NO: 24602 - RNA, 19 nt, synthetic construct
  source 1..19: mol_type = other RNA
tgttcccggggtggaggac

SEQ ID NO: 24603 - RNA, 19 nt, synthetic construct
  source 1..19: mol_type = other RNA
tgggagggggagctgttcc

SEQ ID NO: 24604 - RNA, 19 nt, synthetic construct
  source 1..19: mol_type = other RNA
catgggtgtggtggtctgt

SEQ ID NO: 24605 - RNA, 19 nt, synthetic construct
  source 1..19: mol_type = other RNA
agcactgtggaggtgtggg

SEQ ID NO: 24606 - RNA, 19 nt, synthetic construct
  source 1..19: mol_type = other RNA
cagtggctgcagttgtagt

SEQ ID NO: 24607 - RNA, 19 nt, synthetic construct
  source 1..19: mol_type = other RNA
ggtggctgtagtgctgggc

SEQ ID NO: 24608 - RNA, 19 nt, synthetic construct
  source 1..19: mol_type = other RNA
cggtgggcaccgtcacggt

SEQ ID NO: 24609 - RNA, 19 nt, synthetic construct
  source 1..19: mol_type = other RNA
ctgatgactgtgggtgtgg

SEQ ID NO: 24610 - RNA, 19 nt, synthetic construct
  source 1..19: mol_type = other RNA
tccctggactggaggaggg

SEQ ID NO: 24611 - RNA, 19 nt, synthetic construct
  source 1..19: mol_type = other RNA
ggtgtggtggctgtgcttc

SEQ ID NO: 24612 - RNA, 19 nt, synthetic construct
  source 1..19: mol_type = other RNA
tgggtgtggtggctgtgct

SEQ ID NO: 24613 - RNA, 19 nt, synthetic construct
  source 1..19: mol_type = other RNA
gagggtgtggctgtggaca

SEQ ID NO: 24614 - RNA, 19 nt, synthetic construct
  source 1..19: mol_type = other RNA
ctctggagtagaggagggt

SEQ ID NO: 24615 - RNA, 19 nt, synthetic construct
  source 1..19: mol_type = other RNA
tggtggtcgtggtggtaag

SEQ ID NO: 24616 - RNA, 19 nt, synthetic construct
  source 1..19: mol_type = other RNA
gtggtcagcactgtggcgg

SEQ ID NO: 24617 - RNA, 19 nt, synthetic construct
  source 1..19: mol_type = other RNA
gtggtggtcagcactgtgg

SEQ ID NO: 24618 - RNA, 19 nt, synthetic construct
  source 1..19: mol_type = other RNA
gtggtggtggtggtcagca

SEQ ID NO: 24619 - RNA, 19 nt, synthetic construct
  source 1..19: mol_type = other RNA
gggggatgggagttgtccc

SEQ ID NO: 24620 - RNA, 19 nt, synthetic construct
  source 1..19: mol_type = other RNA
ggggggatgggagttgtcc

SEQ ID NO: 24621 - RNA, 19 nt, synthetic construct
  source 1..19: mol_type = other RNA
tggggggatgggagttgtc

SEQ ID NO: 24622 - RNA, 19 nt, synthetic construct
  source 1..19: mol_type = other RNA
aaggctctgtgatgtgggt

SEQ ID NO: 24623 - RNA, 19 nt, synthetic construct
  source 1..19: mol_type = other RNA
tggttgctgctggggtgtg

SEQ ID NO: 24624 - RNA, 19 nt, synthetic construct
  source 1..19: mol_type = other RNA
gggtggtactggtggttgc

SEQ ID NO: 24625 - RNA, 19 nt, synthetic construct
  source 1..19: mol_type = other RNA
ggtgcgggtcttgctgggt

SEQ ID NO: 24626 - RNA, 19 nt, synthetic construct
  source 1..19: mol_type = other RNA
ggtgtcaaagtccccgcca

SEQ ID NO: 24627 - RNA, 19 nt, synthetic construct
  source 1..19: mol_type = other RNA
cggtgggcaccgtcacggt

SEQ ID NO: 24628 - RNA, 19 nt, synthetic construct
  source 1..19: mol_type = other RNA
ggtgtggtggctgtgcttc

SEQ ID NO: 24629 - RNA, 19 nt, synthetic construct
  source 1..19: mol_type = other RNA
tgggtgtggtggctgtgct

SEQ ID NO: 24630 - RNA, 19 nt, synthetic construct
  source 1..19: mol_type = other RNA
ggaggaggggatggctgta

SEQ ID NO: 24631 - RNA, 19 nt, synthetic construct
  source 1..19: mol_type = other RNA
gagggtgtggctgtggaca

SEQ ID NO: 24632 - RNA, 19 nt, synthetic construct
  source 1..19: mol_type = other RNA
gtgggcagtctctggagtg

SEQ ID NO: 24633 - RNA, 19 nt, synthetic construct
  source 1..19: mol_type = other RNA
tgtggaggtgtgggcagtc

SEQ ID NO: 24634 - RNA, 19 nt, synthetic construct
  source 1..19: mol_type = other RNA
cgggacggaggagggggtc

SEQ ID NO: 24635 - RNA, 19 nt, synthetic construct
  source 1..19: mol_type = other RNA
ggtccccgggacggaggag

SEQ ID NO: 24636 - RNA, 19 nt, synthetic construct
  source 1..19: mol_type = other RNA
gtggtggtggtggtcagca

SEQ ID NO: 24637 - RNA, 19 nt, synthetic construct
  source 1..19: mol_type = other RNA
aaggctctgtgatgtgggt

SEQ ID NO: 24638 - RNA, 19 nt, synthetic construct
  source 1..19: mol_type = other RNA
tggttgctgctggggtgtg

SEQ ID NO: 24639 - RNA, 19 nt, synthetic construct
  source 1..19: mol_type = other RNA
ctggggaagggggtgactc

SEQ ID NO: 24640 - RNA, 19 nt, synthetic construct
  source 1..19: mol_type = other RNA
ggtgcgggtcttgctgggt

SEQ ID NO: 24641 - RNA, 19 nt, synthetic construct
  source 1..19: mol_type = other RNA
ggtgtcaaagtccccgcca

SEQ ID NO: 24642 - RNA, 19 nt, synthetic construct
  source 1..19: mol_type = other RNA
ggccgtggatccagtggat

SEQ ID NO: 24643 - RNA, 19 nt, synthetic construct
  source 1..19: mol_type = other RNA
tggccgtggatccagtgga

SEQ ID NO: 24644 - RNA, 19 nt, synthetic construct
  source 1..19: mol_type = other RNA
tgttcccggggtggaggac

SEQ ID NO: 24645 - RNA, 19 nt, synthetic construct
  source 1..19: mol_type = other RNA
tgggagggggagctgttcc

SEQ ID NO: 24646 - RNA, 19 nt, synthetic construct
  source 1..19: mol_type = other RNA
agcactgtggaggtgtggg

SEQ ID NO: 24647 - RNA, 19 nt, synthetic construct
  source 1..19: mol_type = other RNA
cagtggctgcagttgtagt

SEQ ID NO: 24648 - RNA, 19 nt, synthetic construct
  source 1..19: mol_type = other RNA
cggtgggcaccgtcacggt

SEQ ID NO: 24649 - RNA, 19 nt, synthetic construct
  source 1..19: mol_type = other RNA
tccctggactggaggaggg

SEQ ID NO: 24650 - RNA, 19 nt, synthetic construct
  source 1..19: mol_type = other RNA
ggtgtggtggctgtgcttc

SEQ ID NO: 24651 - RNA, 19 nt, synthetic construct
  source 1..19: mol_type = other RNA
tgggtgtggtggctgtgct

SEQ ID NO: 24652 - RNA, 19 nt, synthetic construct
  source 1..19: mol_type = other RNA
ggaggaggggatggctgta

SEQ ID NO: 24653 - RNA, 19 nt, synthetic construct
  source 1..19: mol_type = other RNA
gagggtgtggctgtggaca

SEQ ID NO: 24654 - RNA, 19 nt, synthetic construct
  source 1..19: mol_type = other RNA
acagagccggtggccccgg

SEQ ID NO: 24655 - RNA, 19 nt, synthetic construct
  source 1..19: mol_type = other RNA
gtggtggtggtggtcagca

SEQ ID NO: 24656 - RNA, 19 nt, synthetic construct
  source 1..19: mol_type = other RNA
agcactgtggaggtgtggg

SEQ ID NO: 24657 - RNA, 19 nt, synthetic construct
  source 1..19: mol_type = other RNA
cagtggctgcagttgtagt

SEQ ID NO: 24658 - RNA, 19 nt, synthetic construct
  source 1..19: mol_type = other RNA
gggtgtgagctgttcccag

SEQ ID NO: 24659 - RNA, 19 nt, synthetic construct
  source 1..19: mol_type = other RNA
gaaggttggcaggctgctg

SEQ ID NO: 24660 - RNA, 19 nt, synthetic construct
  source 1..19: mol_type = other RNA
ggtccagcaggacgacacg

SEQ ID NO: 24661 - RNA, 19 nt, synthetic construct
  source 1..19: mol_type = other RNA
tggtccccagcacagacac

SEQ ID NO: 24662 - RNA, 19 nt, synthetic construct
  source 1..19: mol_type = other RNA
cggggctggcagtgggggg

SEQ ID NO: 24663 - RNA, 19 nt, synthetic construct
  source 1..19: mol_type = other RNA
gtgggggtgggtgtgctag

SEQ ID NO: 24664 - RNA, 19 nt, synthetic construct
  source 1..19: mol_type = other RNA
acaaggttgtggcactcag

SEQ ID NO: 24665 - RNA, 19 nt, synthetic construct
  source 1..19: mol_type = other RNA
ggcggcccctgcagtggtc

SEQ ID NO: 24666 - RNA, 19 nt, synthetic construct
  source 1..19: mol_type = other RNA
tatggggccgcatggcttg

SEQ ID NO: 24667 - RNA, 19 nt, synthetic construct
  source 1..19: mol_type = other RNA
agagttgcaggtggcaggc

SEQ ID NO: 24668 - RNA, 19 nt, synthetic construct
  source 1..19: mol_type = other RNA
ttgaagaggatctggtcct

SEQ ID NO: 24669 - RNA, 19 nt, synthetic construct
  source 1..19: mol_type = other RNA
gcaggggcaggcctgcacg

SEQ ID NO: 24670 - RNA, 19 nt, synthetic construct
  source 1..19: mol_type = other RNA
atcgggtcccacgcagggg

SEQ ID NO: 24671 - RNA, 19 nt, synthetic construct
  source 1..19: mol_type = other RNA
cagtcgccctcctcctggg

SEQ ID NO: 24672 - RNA, 19 nt, synthetic construct
  source 1..19: mol_type = other RNA
cagctgaggtctgcagcgg

SEQ ID NO: 24673 - RNA, 19 nt, synthetic construct
  source 1..19: mol_type = other RNA
gcaggtacacatgtggcag

SEQ ID NO: 24674 - RNA, 19 nt, synthetic construct
  source 1..19: mol_type = other RNA
tcgggcgtgaggcaggcgg

SEQ ID NO: 24675 - RNA, 19 nt, synthetic construct
  source 1..19: mol_type = other RNA
ggggcaggagccctcgcag

SEQ ID NO: 24676 - RNA, 19 nt, synthetic construct
  source 1..19: mol_type = other RNA
gctccggggcaggagccct

SEQ ID NO: 24677 - RNA, 19 nt, synthetic construct
  source 1..19: mol_type = other RNA
cctgggcctctgctgagta

SEQ ID NO: 24678 - RNA, 19 nt, synthetic construct
  source 1..19: mol_type = other RNA
gcctgggcctctgctgagt

SEQ ID NO: 24679 - RNA, 19 nt, synthetic construct
  source 1..19: mol_type = other RNA
gcctctcctggcagcaggt

SEQ ID NO: 24680 - RNA, 19 nt, synthetic construct
  source 1..19: mol_type = other RNA
cggggtgccacacacaggc

SEQ ID NO: 24681 - RNA, 19 nt, synthetic construct
  source 1..19: mol_type = other RNA
cagcaggagcacggagcgc

SEQ ID NO: 24682 - RNA, 19 nt, synthetic construct
  source 1..19: mol_type = other RNA
ctcagagaacacgtagttg

SEQ ID NO: 24683 - RNA, 19 nt, synthetic construct
  source 1..19: mol_type = other RNA
cagagaacacgtagttgca

SEQ ID NO: 24684 - RNA, 19 nt, synthetic construct
  source 1..19: mol_type = other RNA
gtgctcagagaacacgtag

SEQ ID NO: 24685 - RNA, 19 nt, synthetic construct
  source 1..19: mol_type = other RNA
aggcagcttagcttcccac

SEQ ID NO: 24686 - RNA, 19 nt, synthetic construct
  source 1..19: mol_type = other RNA
tcagagaacacgtagttgc

SEQ ID NO: 24687 - RNA, 19 nt, synthetic construct
  source 1..19: mol_type = other RNA
tggtcctcgcagagctgcg

SEQ ID NO: 24688 - RNA, 19 nt, synthetic construct
  source 1..19: mol_type = other RNA
acctgtgccagggtccagt

SEQ ID NO: 24689 - RNA, 19 nt, synthetic construct
  source 1..19: mol_type = other RNA
caggaggccagtgcggctg

SEQ ID NO: 24690 - RNA, 19 nt, synthetic construct
  source 1..19: mol_type = other RNA
ctggtcagcactggggtga

SEQ ID NO: 24691 - RNA, 19 nt, synthetic construct
  source 1..19: mol_type = other RNA
ggcacacgggcaggtgggg

SEQ ID NO: 24692 - RNA, 19 nt, synthetic construct
  source 1..19: mol_type = other RNA
gggcgcctgggaaggttgc

SEQ ID NO: 24693 - RNA, 19 nt, synthetic construct
  source 1..19: mol_type = other RNA
ctggaaagggctggagtcg

SEQ ID NO: 24694 - RNA, 19 nt, synthetic construct
  source 1..19: mol_type = other RNA
tggtggagccggtggctgt

SEQ ID NO: 24695 - RNA, 19 nt, synthetic construct
  source 1..19: mol_type = other RNA
gtctccagctctgtggtcg

SEQ ID NO: 24696 - RNA, 19 nt, synthetic construct
  source 1..19: mol_type = other RNA
ctgctggggggcagggatc

SEQ ID NO: 24697 - RNA, 19 nt, synthetic construct
  source 1..19: mol_type = other RNA
tgtggtggccgtggtgttc

SEQ ID NO: 24698 - RNA, 19 nt, synthetic construct
  source 1..19: mol_type = other RNA
tggagccggtggctgtgat

SEQ ID NO: 24699 - RNA, 19 nt, synthetic construct
  source 1..19: mol_type = other RNA
tgtggtggccgtggtgttc

SEQ ID NO: 24700 - RNA, 19 nt, synthetic construct
  source 1..19: mol_type = other RNA
tgtggtggccgtggtgttc

SEQ ID NO: 24701 - RNA, 19 nt, synthetic construct
  source 1..19: mol_type = other RNA
aggacagggtggccgtgga

SEQ ID NO: 24702 - RNA, 19 nt, synthetic construct
  source 1..19: mol_type = other RNA
cactggggctcacagccca

SEQ ID NO: 24703 - RNA, 19 nt, synthetic construct
  source 1..19: mol_type = other RNA
cactggggctcacagccca

SEQ ID NO: 24704 - RNA, 19 nt, synthetic construct
  source 1..19: mol_type = other RNA
catggtgttcggcactggg

SEQ ID NO: 24705 - RNA, 19 nt, synthetic construct
  source 1..19: mol_type = other RNA
gaagggcgcctgggaaggt

SEQ ID NO: 24706 - RNA, 19 nt, synthetic construct
  source 1..19: mol_type = other RNA
tgatgtagtccccgctctg

SEQ ID NO: 24707 - RNA, 19 nt, synthetic construct
  source 1..19: mol_type = other RNA
cagtcggggcccagcagcc

SEQ ID NO: 24708 - RNA, 19 nt, synthetic construct
  source 1..19: mol_type = other RNA
cgggcacacaggcaggctc

SEQ ID NO: 24709 - RNA, 19 nt, synthetic construct
  source 1..19: mol_type = other RNA
tggcctcgttgtgcacaca

SEQ ID NO: 24710 - RNA, 19 nt, synthetic construct
  source 1..19: mol_type = other RNA
gtggcctcgttgtgcacac

SEQ ID NO: 24711 - RNA, 19 nt, synthetic construct
  source 1..19: mol_type = other RNA
ctgcacgcagatgcccatg

SEQ ID NO: 24712 - RNA, 19 nt, synthetic construct
  source 1..19: mol_type = other RNA
agcactgtggcggtgtggg

SEQ ID NO: 24713 - RNA, 19 nt, synthetic construct
  source 1..19: mol_type = other RNA
agcactgtggcggtgtggg

SEQ ID NO: 24714 - RNA, 19 nt, synthetic construct
  source 1..19: mol_type = other RNA
gcactgtggcggtgtgggt

SEQ ID NO: 24715 - RNA, 19 nt, synthetic construct
  source 1..19: mol_type = other RNA
gttgaggaggggttggtgg

SEQ ID NO: 24716 - RNA, 19 nt, synthetic construct
  source 1..19: mol_type = other RNA
gttgaggaggggttggtgg

SEQ ID NO: 24717 - RNA, 19 nt, synthetic construct
  source 1..19: mol_type = other RNA
gcactgtggcggtgtgggt

SEQ ID NO: 24718 - RNA, 19 nt, synthetic construct
  source 1..19: mol_type = other RNA
gttgaggaggggttggtgg

SEQ ID NO: 24719 - RNA, 19 nt, synthetic construct
  source 1..19: mol_type = other RNA
gttgaggaggggttggtgg

SEQ ID NO: 24720 - RNA, 19 nt, synthetic construct
  source 1..19: mol_type = other RNA
gttgaggaggggttggtgg

SEQ ID NO: 24721 - RNA, 19 nt, synthetic construct
  source 1..19: mol_type = other RNA
cacgcgtcgttcacgcagg

SEQ ID NO: 24722 - RNA, 19 nt, synthetic construct
  source 1..19: mol_type = other RNA
cgttcacgcaggcctcgta

SEQ ID NO: 24723 - RNA, 19 nt, synthetic construct
  source 1..19: mol_type = other RNA
tggaggtgtggacagtctc

SEQ ID NO: 24724 - RNA, 19 nt, synthetic construct
  source 1..19: mol_type = other RNA
tggaggtgtggacagtctc

SEQ ID NO: 24725 - RNA, 19 nt, synthetic construct
  source 1..19: mol_type = other RNA
acacgcgtcgttcacgcag

SEQ ID NO: 24726 - RNA, 19 nt, synthetic construct
  source 1..19: mol_type = other RNA
acgcgtcgttcacgcaggc

SEQ ID NO: 24727 - RNA, 19 nt, synthetic construct
  source 1..19: mol_type = other RNA
gtggccatccccgtaggcc

SEQ ID NO: 24728 - RNA, 19 nt, synthetic construct
  source 1..19: mol_type = other RNA
gctccgtgggcccatccaa

SEQ ID NO: 24729 - RNA, 19 nt, synthetic construct
  source 1..19: mol_type = other RNA
ctggttctggttgaagttc

SEQ ID NO: 24730 - RNA, 19 nt, synthetic construct
  source 1..19: mol_type = other RNA
aggacagcgcggcgcacag

SEQ ID NO: 24731 - RNA, 19 nt, synthetic construct
  source 1..19: mol_type = other RNA
acgcaggcctcgtagtact

SEQ ID NO: 24732 - RNA, 19 nt, synthetic construct
  source 1..19: mol_type = other RNA
gttcacgcaggcctcgtag

SEQ ID NO: 24733 - RNA, 19 nt, synthetic construct
  source 1..19: mol_type = other RNA
gtccaggctgcattccacg

SEQ ID NO: 24734 - RNA, 19 nt, synthetic construct
  source 1..19: mol_type = other RNA
gtccaggctgcattccacg

SEQ ID NO: 24735 - RNA, 19 nt, synthetic construct
  source 1..19: mol_type = other RNA
gtccaggctgcattccacg

SEQ ID NO: 24736 - RNA, 19 nt, synthetic construct
  source 1..19: mol_type = other RNA
gtccaggctgcattccacg

SEQ ID NO: 24737 - RNA, 19 nt, synthetic construct
  source 1..19: mol_type = other RNA
tgctccgtgggcccatcca

SEQ ID NO: 24738 - RNA, 19 nt, synthetic construct
  source 1..19: mol_type = other RNA
acagggtgatgttggctgc

SEQ ID NO: 24739 - RNA, 19 nt, synthetic construct
  source 1..19: mol_type = other RNA
gaagttcccacacaggccg

SEQ ID NO: 24740 - RNA, 19 nt, synthetic construct
  source 1..19: mol_type = other RNA
tgaagttcccacacaggcc

SEQ ID NO: 24741 - RNA, 19 nt, synthetic construct
  source 1..19: mol_type = other RNA
cagcgcggcgcacaggcag

SEQ ID NO: 24742 - RNA, 19 nt, synthetic construct
  source 1..19: mol_type = other RNA
acagcgcggcgcacaggca

SEQ ID NO: 24743 - RNA, 19 nt, synthetic construct
  source 1..19: mol_type = other RNA
gacagcgcggcgcacaggc

SEQ ID NO: 24744 - RNA, 19 nt, synthetic construct
  source 1..19: mol_type = other RNA
gaggacagcgcggcgcaca

SEQ ID NO: 24745 - RNA, 19 nt, synthetic construct
  source 1..19: mol_type = other RNA
aggaggacagcgcggcgca

SEQ ID NO: 24746 - RNA, 19 nt, synthetic construct
  source 1..19: mol_type = other RNA
ttggcggcacaggcgtgca

SEQ ID NO: 24747 - RNA, 19 nt, synthetic construct
  source 1..19: mol_type = other RNA
cttggcggcacaggcgtgc

SEQ ID NO: 24748 - RNA, 19 nt, synthetic construct
  source 1..19: mol_type = other RNA
cgcccttggcggcacaggc

SEQ ID NO: 24749 - RNA, 19 nt, synthetic construct
  source 1..19: mol_type = other RNA
ctccaggcttgtaggtggc

SEQ ID NO: 24750 - RNA, 19 nt, synthetic construct
  source 1..19: mol_type = other RNA
tcgttcacgcaggcctcgt

SEQ ID NO: 24751 - RNA, 19 nt, synthetic construct
  source 1..19: mol_type = other RNA
gtcgttcacgcaggcctcg

SEQ ID NO: 24752 - RNA, 19 nt, synthetic construct
  source 1..19: mol_type = other RNA
cgcgtcgttcacgcaggcc

SEQ ID NO: 24753 - RNA, 19 nt, synthetic construct
  source 1..19: mol_type = other RNA
agtccacgtcaaaccactc

SEQ ID NO: 24754 - RNA, 19 nt, synthetic construct
  source 1..19: mol_type = other RNA
aagtccacgtcaaaccact

SEQ ID NO: 24755 - RNA, 19 nt, synthetic construct
  source 1..19: mol_type = other RNA
gaagtccacgtcaaaccac

SEQ ID NO: 24756 - RNA, 19 nt, synthetic construct
  source 1..19: mol_type = other RNA
tgctgaaaccgctgctcac

SEQ ID NO: 24757 - RNA, 19 nt, synthetic construct
  source 1..19: mol_type = other RNA
ccagtgccgggcgtagttc

SEQ ID NO: 24758 - RNA, 19 nt, synthetic construct
  source 1..19: mol_type = other RNA
ttgcggaaggggttggccg

SEQ ID NO: 24759 - RNA, 19 nt, synthetic construct
  source 1..19: mol_type = other RNA
gagcaccagtgccgggcgt

SEQ ID NO: 24760 - RNA, 19 nt, synthetic construct
  source 1..19: mol_type = other RNA
gcagtcctcgctccgctca

SEQ ID NO: 24761 - RNA, 19 nt, synthetic construct
  source 1..19: mol_type = other RNA
cgcggcgcacaggcagtcc

SEQ ID NO: 24762 - RNA, 19 nt, synthetic construct
  source 1..19: mol_type = other RNA
gaggatgctgcactgcttc

SEQ ID NO: 24763 - RNA, 19 nt, synthetic construct
  source 1..19: mol_type = other RNA
actcacacttcggttgaca

SEQ ID NO: 24764 - RNA, 19 nt, synthetic construct
  source 1..19: mol_type = other RNA
cacctccggttcctgcagg

SEQ ID NO: 24765 - RNA, 19 nt, synthetic construct
  source 1..19: mol_type = other RNA
cactgttgggatcggtcag

SEQ ID NO: 24766 - RNA, 19 nt, synthetic construct
  source 1..19: mol_type = other RNA
ccagtgcggctgtaaggca

SEQ ID NO: 24767 - RNA, 19 nt, synthetic construct
  source 1..19: mol_type = other RNA
ccgtgtccccgccgtccag

SEQ ID NO: 24768 - RNA, 19 nt, synthetic construct
  source 1..19: mol_type = other RNA
tcctgtagttgtagcacat

SEQ ID NO: 24769 - RNA, 19 nt, synthetic construct
  source 1..19: mol_type = other RNA
gtgtgctgaaacagcccac

SEQ ID NO: 24770 - RNA, 19 nt, synthetic construct
  source 1..19: mol_type = other RNA
ttgctgaaaccgctgctca

SEQ ID NO: 24771 - RNA, 19 nt, synthetic construct
  source 1..19: mol_type = other RNA
cagctgcgtgtagatggag

SEQ ID NO: 24772 - RNA, 19 nt, synthetic construct
  source 1..19: mol_type = other RNA
cctctggttgttggtgcag

SEQ ID NO: 24773 - RNA, 19 nt, synthetic construct
  source 1..19: mol_type = other RNA
ctgcccttgtagtcctggt

SEQ ID NO: 24774 - RNA, 19 nt, synthetic construct
  source 1..19: mol_type = other RNA
tgctggtctcggcctgaga

SEQ ID NO: 24775 - RNA, 19 nt, synthetic construct
  source 1..19: mol_type = other RNA
gcagcagaacacacggatt

SEQ ID NO: 24776 - RNA, 19 nt, synthetic construct
  source 1..19: mol_type = other RNA
gcagcagaacacacggatt

SEQ ID NO: 24777 - RNA, 19 nt, synthetic construct
  source 1..19: mol_type = other RNA
gcagcagaacacacggatt

SEQ ID NO: 24778 - RNA, 19 nt, synthetic construct
  source 1..19: mol_type = other RNA
gcagcagaacacacggatt

SEQ ID NO: 24779 - RNA, 19 nt, synthetic construct
  source 1..19: mol_type = other RNA
gccctgatcttatcgtagg

SEQ ID NO: 24780 - RNA, 19 nt, synthetic construct
  source 1..19: mol_type = other RNA
gggctcaggctggggaaga

SEQ ID NO: 24781 - RNA, 19 nt, synthetic construct
  source 1..19: mol_type = other RNA
ggctggtagtgccactcac

SEQ ID NO: 24782 - RNA, 19 nt, synthetic construct
  source 1..19: mol_type = other RNA
gcagtgcccactggggttc

SEQ ID NO: 24783 - RNA, 19 nt, synthetic construct
  source 1..19: mol_type = other RNA
gatggctgtaaagctggta

SEQ ID NO: 24784 - RNA, 19 nt, synthetic construct
  source 1..19: mol_type = other RNA
gatggctgtaaagctggta

SEQ ID NO: 24785 - RNA, 19 nt, synthetic construct
  source 1..19: mol_type = other RNA
gatggctgtaaagctggta

SEQ ID NO: 24786 - RNA, 19 nt, synthetic construct
  source 1..19: mol_type = other RNA
gcccttggcggcacaggcg

SEQ ID NO: 24787 - RNA, 19 nt, synthetic construct
  source 1..19: mol_type = other RNA
cactggccctcggtgttgt

SEQ ID NO: 24788 - RNA, 19 nt, synthetic construct
  source 1..19: mol_type = other RNA
cacgcaggcctcgtagtac

SEQ ID NO: 24789 - RNA, 19 nt, synthetic construct
  source 1..19: mol_type = other RNA
actggccctcggtgttgtt

SEQ ID NO: 24790 - RNA, 19 nt, synthetic construct
  source 1..19: mol_type = other RNA
aagttcccacacaggccgc

SEQ ID NO: 24791 - RNA, 19 nt, synthetic construct
  source 1..19: mol_type = other RNA
gtcctcgctccgctcacag

SEQ ID NO: 24792 - RNA, 19 nt, synthetic construct
  source 1..19: mol_type = other RNA
cccttggcggcacaggcgt

SEQ ID NO: 24793 - RNA, 19 nt, synthetic construct
  source 1..19: mol_type = other RNA
ccacgaagagcttgatggc

SEQ ID NO: 24794 - RNA, 19 nt, synthetic construct
  source 1..19: mol_type = other RNA
cagggctggtagtgccact

SEQ ID NO: 24795 - RNA, 19 nt, synthetic construct
  source 1..19: mol_type = other RNA
gcactggccctcggtgttg

SEQ ID NO: 24796 - RNA, 19 nt, synthetic construct
  source 1..19: mol_type = other RNA
agttcccacacaggccgca

SEQ ID NO: 24797 - RNA, 19 nt, synthetic construct
  source 1..19: mol_type = other RNA
ggccttccaggtgttggcg

SEQ ID NO: 24798 - RNA, 19 nt, synthetic construct
  source 1..19: mol_type = other RNA
cgctccgctcacagttgca

SEQ ID NO: 24799 - RNA, 19 nt, synthetic construct
  source 1..19: mol_type = other RNA
tcgctccgctcacagttgc

SEQ ID NO: 24800 - RNA, 19 nt, synthetic construct
  source 1..19: mol_type = other RNA
ctcgctccgctcacagttg

SEQ ID NO: 24801 - RNA, 19 nt, synthetic construct
  source 1..19: mol_type = other RNA
cctcgctccgctcacagtt

SEQ ID NO: 24802 - RNA, 19 nt, synthetic construct
  source 1..19: mol_type = other RNA
tcctcgctccgctcacagt

SEQ ID NO: 24803 - RNA, 19 nt, synthetic construct
  source 1..19: mol_type = other RNA
cagtcctcgctccgctcac

SEQ ID NO: 24804 - RNA, 19 nt, synthetic construct
  source 1..19: mol_type = other RNA
ggcagtcctcgctccgctc

SEQ ID NO: 24805 - RNA, 19 nt, synthetic construct
  source 1..19: mol_type = other RNA
gcggcgcacaggcagtcct

SEQ ID NO: 24806 - RNA, 19 nt, synthetic construct
  source 1..19: mol_type = other RNA
acgcccttggcggcacagg

SEQ ID NO: 24807 - RNA, 19 nt, synthetic construct
  source 1..19: mol_type = other RNA
tccacgaagagcttgatgg

SEQ ID NO: 24808 - RNA, 19 nt, synthetic construct
  source 1..19: mol_type = other RNA
gtggcaaagtcattgatgg

SEQ ID NO: 24809 - RNA, 19 nt, synthetic construct
  source 1..19: mol_type = other RNA
ggttggccgtgcaggggtc

SEQ ID NO: 24810 - RNA, 19 nt, synthetic construct
  source 1..19: mol_type = other RNA
ggggttggccgtgcagggg

SEQ ID NO: 24811 - RNA, 19 nt, synthetic construct
  source 1..19: mol_type = other RNA
cttgcggaaggggttggcc

SEQ ID NO: 24812 - RNA, 19 nt, synthetic construct
  source 1..19: mol_type = other RNA
gacttgcggaaggggttgg

SEQ ID NO: 24813 - RNA, 19 nt, synthetic construct
  source 1..19: mol_type = other RNA
caggacttgcggaaggggt

SEQ ID NO: 24814 - RNA, 19 nt, synthetic construct
  source 1..19: mol_type = other RNA
ttctgggcccaggacttgc

SEQ ID NO: 24815 - RNA, 19 nt, synthetic construct
  source 1..19: mol_type = other RNA
agccacagccgtgcagaaa

SEQ ID NO: 24816 - RNA, 19 nt, synthetic construct
  source 1..19: mol_type = other RNA
gcagggctggtagtgccac

SEQ ID NO: 24817 - RNA, 19 nt, synthetic construct
  source 1..19: mol_type = other RNA
gccccgcagggctggtagt

SEQ ID NO: 24818 - RNA, 19 nt, synthetic construct
  source 1..19: mol_type = other RNA
gtgcagttctccagggtcc

SEQ ID NO: 24819 - RNA, 19 nt, synthetic construct
  source 1..19: mol_type = other RNA
ccaccgtgcagttctccag

SEQ ID NO: 24820 - RNA, 19 nt, synthetic construct
  source 1..19: mol_type = other RNA
tggccctcggtgttgttgt

SEQ ID NO: 24821 - RNA, 19 nt, synthetic construct
  source 1..19: mol_type = other RNA
ctggccctcggtgttgttg

SEQ ID NO: 24822 - RNA, 19 nt, synthetic construct
  source 1..19: mol_type = other RNA
cgcactggccctcggtgtt

SEQ ID NO: 24823 - RNA, 19 nt, synthetic construct
  source 1..19: mol_type = other RNA
ccgcactggccctcggtgt

SEQ ID NO: 24824 - RNA, 19 nt, synthetic construct
  source 1..19: mol_type = other RNA
gccgcactggccctcggtg

SEQ ID NO: 24825 - RNA, 19 nt, synthetic construct
  source 1..19: mol_type = other RNA
ggtgccgcactggccctcg

SEQ ID NO: 24826 - RNA, 19 nt, synthetic construct
  source 1..19: mol_type = other RNA
cctggctcagcatcagatc

SEQ ID NO: 24827 - RNA, 19 nt, synthetic construct
  source 1..19: mol_type = other RNA
tcttgtactcaaagccctg

SEQ ID NO: 24828 - RNA, 19 nt, synthetic construct
  source 1..19: mol_type = other RNA
cgtcagcctggttctggtt

SEQ ID NO: 24829 - RNA, 19 nt, synthetic construct
  source 1..19: mol_type = other RNA
tgtcctctccgttccacag

SEQ ID NO: 24830 - RNA, 19 nt, synthetic construct
  source 1..19: mol_type = other RNA
agcgcggcgcacaggcagt

SEQ ID NO: 24831 - RNA, 19 nt, synthetic construct
  source 1..19: mol_type = other RNA
gccagtcactgcacactcc

SEQ ID NO: 24832 - RNA, 19 nt, synthetic construct
  source 1..19: mol_type = other RNA
ggtgcagacgccgtccctc

SEQ ID NO: 24833 - RNA, 19 nt, synthetic construct
  source 1..19: mol_type = other RNA
ctgggcaggatgcaggctg

SEQ ID NO: 24834 - RNA, 19 nt, synthetic construct
  source 1..19: mol_type = other RNA
ataggaggacagcgcggcg

SEQ ID NO: 24835 - RNA, 19 nt, synthetic construct
  source 1..19: mol_type = other RNA
gaccaggaagatccccatg

SEQ ID NO: 24836 - RNA, 19 nt, synthetic construct
  source 1..19: mol_type = other RNA
tgaccaggaagatccccat

SEQ ID NO: 24837 - RNA, 19 nt, synthetic construct
  source 1..19: mol_type = other RNA
agcagccacactgggccac

SEQ ID NO: 24838 - RNA, 19 nt, synthetic construct
  source 1..19: mol_type = other RNA
gcagcagccggttttcctg

SEQ ID NO: 24839 - RNA, 19 nt, synthetic construct
  source 1..19: mol_type = other RNA
tggaagaggctgtagggca

SEQ ID NO: 24840 - RNA, 19 nt, synthetic construct
  source 1..19: mol_type = other RNA
tggctcagcatcagatcac

SEQ ID NO: 24841 - RNA, 19 nt, synthetic construct
  source 1..19: mol_type = other RNA
agaccctgcccttgtagtc

SEQ ID NO: 24842 - RNA, 19 nt, synthetic construct
  source 1..19: mol_type = other RNA
tctgcaggttcccaaactg

SEQ ID NO: 24843 - RNA, 19 nt, synthetic construct
  source 1..19: mol_type = other RNA
gctccgctcacagttgcag

SEQ ID NO: 24844 - RNA, 19 nt, synthetic construct
  source 1..19: mol_type = other RNA
ctgggcgtaggcagccaca

SEQ ID NO: 24845 - RNA, 19 nt, synthetic construct
  source 1..19: mol_type = other RNA
cactctgtccactgacacc

SEQ ID NO: 24846 - RNA, 19 nt, synthetic construct
  source 1..19: mol_type = other RNA
caggagccagcacggtgcc

SEQ ID NO: 24847 - RNA, 19 nt, synthetic construct
  source 1..19: mol_type = other RNA
gctggaccagcggcagacc

SEQ ID NO: 24848 - RNA, 19 nt, synthetic construct
  source 1..19: mol_type = other RNA
ctggcccaactcccgcagg

SEQ ID NO: 24849 - RNA, 19 nt, synthetic construct
  source 1..19: mol_type = other RNA
ctggcccaactcccgcagg

SEQ ID NO: 24850 - RNA, 19 nt, synthetic construct
  source 1..19: mol_type = other RNA
ctggcccaactcccgcagg

SEQ ID NO: 24851 - RNA, 19 nt, synthetic construct
  source 1..19: mol_type = other RNA
gaaggtgaatggcgttgtg

SEQ ID NO: 24852 - RNA, 19 nt, synthetic construct
  source 1..19: mol_type = other RNA
cagcaccgtgcctgggggg

SEQ ID NO: 24853 - RNA, 19 nt, synthetic construct
  source 1..19: mol_type = other RNA
tcacgcaggcctcgtagta

SEQ ID NO: 24854 - RNA, 19 nt, synthetic construct
  source 1..19: mol_type = other RNA
tgggcccaggacttgcgga

SEQ ID NO: 24855 - RNA, 19 nt, synthetic construct
  source 1..19: mol_type = other RNA
gggctggtagtgccactca

SEQ ID NO: 24856 - RNA, 19 nt, synthetic construct
  source 1..19: mol_type = other RNA
agggctggtagtgccactc

SEQ ID NO: 24857 - RNA, 19 nt, synthetic construct
  source 1..19: mol_type = other RNA
tgccgcactggccctcggt

SEQ ID NO: 24858 - RNA, 19 nt, synthetic construct
  source 1..19: mol_type = other RNA
gtgccgcactggccctcgg

SEQ ID NO: 24859 - RNA, 19 nt, synthetic construct
  source 1..19: mol_type = other RNA
gggcagaagcagccctccg

SEQ ID NO: 24860 - RNA, 19 nt, synthetic construct
  source 1..19: mol_type = other RNA
cttgtactcaaagccctgg

SEQ ID NO: 24861 - RNA, 19 nt, synthetic construct
  source 1..19: mol_type = other RNA
gggagtagagaagtgggag

SEQ ID NO: 24862 - RNA, 19 nt, synthetic construct
  source 1..19: mol_type = other RNA
atttggtcaaacaggatca

SEQ ID NO: 24863 - RNA, 19 nt, synthetic construct
  source 1..19: mol_type = other RNA
ttcatagttgaagcacatc

SEQ ID NO: 24864 - RNA, 19 nt, synthetic construct
  source 1..19: mol_type = other RNA
ttcatagttgaagcacatc

SEQ ID NO: 24865 - RNA, 19 nt, synthetic construct
  source 1..19: mol_type = other RNA
ttcatagttgaagcacatc

SEQ ID NO: 24866 - RNA, 19 nt, synthetic construct
  source 1..19: mol_type = other RNA
ttcatagttgaagcacatc

SEQ ID NO: 24867 - RNA, 19 nt, synthetic construct
  source 1..19: mol_type = other RNA
ctccggaggcactcggccc

SEQ ID NO: 24868 - RNA, 19 nt, synthetic construct
  source 1..19: mol_type = other RNA
tgcacgcagatgcccatgt

SEQ ID NO: 24869 - RNA, 19 nt, synthetic construct
  source 1..19: mol_type = other RNA
tggagacagtcgtccctct

SEQ ID NO: 24870 - RNA, 19 nt, synthetic construct
  source 1..19: mol_type = other RNA
caaggtgggccacaggctc

SEQ ID NO: 24871 - RNA, 19 nt, synthetic construct
  source 1..19: mol_type = other RNA
ctccagtgcgtcccccacc

SEQ ID NO: 24872 - RNA, 19 nt, synthetic construct
  source 1..19: mol_type = other RNA
gtcacagggctggctcggg

SEQ ID NO: 24873 - RNA, 19 nt, synthetic construct
  source 1..19: mol_type = other RNA
gaaggtgggacagcagtcg

SEQ ID NO: 24874 - RNA, 19 nt, synthetic construct
  source 1..19: mol_type = other RNA
gggcagtggccgtagttgc

SEQ ID NO: 24875 - RNA, 19 nt, synthetic construct
  source 1..19: mol_type = other RNA
gggcagtggccgtagttgc

SEQ ID NO: 24876 - RNA, 19 nt, synthetic construct
  source 1..19: mol_type = other RNA
gggcagtggccgtagttgc

SEQ ID NO: 24877 - RNA, 19 nt, synthetic construct
  source 1..19: mol_type = other RNA
gggcagtggccgtagttgc

SEQ ID NO: 24878 - RNA, 19 nt, synthetic construct
  source 1..19: mol_type = other RNA
ctcatagtggaagtcacag

SEQ ID NO: 24879 - RNA, 19 nt, synthetic construct
  source 1..19: mol_type = other RNA
gaaggtcttgtagtggaag

SEQ ID NO: 24880 - RNA, 19 nt, synthetic construct
  source 1..19: mol_type = other RNA
tcgaaggtcttgtagtgga

SEQ ID NO: 24881 - RNA, 19 nt, synthetic construct
  source 1..19: mol_type = other RNA
gtcgaaggtcttgtagtgg

SEQ ID NO: 24882 - RNA, 19 nt, synthetic construct
  source 1..19: mol_type = other RNA
tctcattctccacactgag

SEQ ID NO: 24883 - RNA, 19 nt, synthetic construct
  source 1..19: mol_type = other RNA
gggcagtctctggagtgga

SEQ ID NO: 24884 - RNA, 19 nt, synthetic construct
  source 1..19: mol_type = other RNA
gggcagtctctggagtgga

SEQ ID NO: 24885 - RNA, 19 nt, synthetic construct
  source 1..19: mol_type = other RNA
gatgacaacacgggtgacc

SEQ ID NO: 24886 - RNA, 19 nt, synthetic construct
  source 1..19: mol_type = other RNA
gtagatgacttccccgggc

SEQ ID NO: 24887 - RNA, 19 nt, synthetic construct
  source 1..19: mol_type = other RNA
caggtagtattgttgcagg

SEQ ID NO: 24888 - RNA, 19 nt, synthetic construct
  source 1..19: mol_type = other RNA
gaacaaagctcacgcgccg

SEQ ID NO: 24889 - RNA, 19 nt, synthetic construct
  source 1..19: mol_type = other RNA
agagaacccgcagctcgta

SEQ ID NO: 24890 - RNA, 19 nt, synthetic construct
  source 1..19: mol_type = other RNA
ggcatccaccacgtaggcg

SEQ ID NO: 24891 - RNA, 19 nt, synthetic construct
  source 1..19: mol_type = other RNA
actggctggccatcgggcg

SEQ ID NO: 24892 - RNA, 19 nt, synthetic construct
  source 1..19: mol_type = other RNA
acgtcgccgtcgaaggtct

SEQ ID NO: 24893 - RNA, 19 nt, synthetic construct
  source 1..19: mol_type = other RNA
tcgccgtcgaaggtcttgt

SEQ ID NO: 24894 - RNA, 19 nt, synthetic construct
  source 1..19: mol_type = other RNA
agacgtcgccgtcgaaggt

SEQ ID NO: 24895 - RNA, 19 nt, synthetic construct
  source 1..19: mol_type = other RNA
gggaagcggaagacgtcgc

SEQ ID NO: 24896 - RNA, 19 nt, synthetic construct
  source 1..19: mol_type = other RNA
tgacgttggccacaggctt

SEQ ID NO: 24897 - RNA, 19 nt, synthetic construct
  source 1..19: mol_type = other RNA
agccatcctttctgctgtc

SEQ ID NO: 24898 - RNA, 19 nt, synthetic construct
  source 1..19: mol_type = other RNA
cttggccatgtccttgcaa

SEQ ID NO: 24899 - RNA, 19 nt, synthetic construct
  source 1..19: mol_type = other RNA
tagatgacttccccgggcg

SEQ ID NO: 24900 - RNA, 19 nt, synthetic construct
  source 1..19: mol_type = other RNA
ggggcagcaggggttctcg

SEQ ID NO: 24901 - RNA, 19 nt, synthetic construct
  source 1..19: mol_type = other RNA
cggggcagcaggggttctc

SEQ ID NO: 24902 - RNA, 19 nt, synthetic construct
  source 1..19: mol_type = other RNA
gggcgcaggcggccaggta

SEQ ID NO: 24903 - RNA, 19 nt, synthetic construct
  source 1..19: mol_type = other RNA
aggggcagtcctcctcggc

SEQ ID NO: 24904 - RNA, 19 nt, synthetic construct
  source 1..19: mol_type = other RNA
cccgtgggtggtgttgtcc

SEQ ID NO: 24905 - RNA, 19 nt, synthetic construct
  source 1..19: mol_type = other RNA
gcggcgaaggtggggccgt

SEQ ID NO: 24906 - RNA, 19 nt, synthetic construct
  source 1..19: mol_type = other RNA
acttccccacctgctcacg

SEQ ID NO: 24907 - RNA, 19 nt, synthetic construct
  source 1..19: mol_type = other RNA
acttccccacctgctcacg

SEQ ID NO: 24908 - RNA, 19 nt, synthetic construct
  source 1..19: mol_type = other RNA
acttccccacctgctcacg

SEQ ID NO: 24909 - RNA, 19 nt, synthetic construct
  source 1..19: mol_type = other RNA
acttccccacctgctcacg

SEQ ID NO: 24910 - RNA, 19 nt, synthetic construct
  source 1..19: mol_type = other RNA
ggtccacgtggtccacagg

SEQ ID NO: 24911 - RNA, 19 nt, synthetic construct
  source 1..19: mol_type = other RNA
gtcaccactttgggggtgt

SEQ ID NO: 24912 - RNA, 19 nt, synthetic construct
  source 1..19: mol_type = other RNA
gcatagtggccatggtggt

SEQ ID NO: 24913 - RNA, 19 nt, synthetic construct
  source 1..19: mol_type = other RNA
ctgcaggggtgcgggtggt

SEQ ID NO: 24914 - RNA, 19 nt, synthetic construct
  source 1..19: mol_type = other RNA
tgtagatgacttccccggg

SEQ ID NO: 24915 - RNA, 19 nt, synthetic construct
  source 1..19: mol_type = other RNA
ttgtagatgacttccccgg

SEQ ID NO: 24916 - RNA, 19 nt, synthetic construct
  source 1..19: mol_type = other RNA
attgtagatgacttccccg

SEQ ID NO: 24917 - RNA, 19 nt, synthetic construct
  source 1..19: mol_type = other RNA
tggacacatctgggcagga

SEQ ID NO: 24918 - RNA, 19 nt, synthetic construct
  source 1..19: mol_type = other RNA
cggggcaggagccctcgca

SEQ ID NO: 24919 - RNA, 19 nt, synthetic construct
  source 1..19: mol_type = other RNA
gttgttcagacttggggta

SEQ ID NO: 24920 - RNA, 19 nt, synthetic construct
  source 1..19: mol_type = other RNA
aggcagttctcgttgtccg

SEQ ID NO: 24921 - RNA, 19 nt, synthetic construct
  source 1..19: mol_type = other RNA
ctgctgagtacttggacgc

SEQ ID NO: 24922 - RNA, 19 nt, synthetic construct
  source 1..19: mol_type = other RNA
ctgacctggccgttgcgac

SEQ ID NO: 24923 - RNA, 19 nt, synthetic construct
  source 1..19: mol_type = other RNA
aggggcactcctgggcggg

SEQ ID NO: 24924 - RNA, 19 nt, synthetic construct
  source 1..19: mol_type = other RNA
tggcaggcctgggcgtagg

SEQ ID NO: 24925 - RNA, 19 nt, synthetic construct
  source 1..19: mol_type = other RNA
gccttcaaagctgtagcga

SEQ ID NO: 24926 - RNA, 19 nt, synthetic construct
  source 1..19: mol_type = other RNA
ctgaccttgatgtagtccc

SEQ ID NO: 24927 - RNA, 19 nt, synthetic construct
  source 1..19: mol_type = other RNA
cattgcaccgttgggtcct

SEQ ID NO: 24928 - RNA, 19 nt, synthetic construct
  source 1..19: mol_type = other RNA
cagcagccggttttcctga

SEQ ID NO: 24929 - RNA, 19 nt, synthetic construct
  source 1..19: mol_type = other RNA
gctggctcgggtccgacac

SEQ ID NO: 24930 - RNA, 19 nt, synthetic construct
  source 1..19: mol_type = other RNA
atccagtggttgcggtcgt

SEQ ID NO: 24931 - RNA, 19 nt, synthetic construct
  source 1..19: mol_type = other RNA
aggaatgtccacacgcatg

SEQ ID NO: 24932 - RNA, 19 nt, synthetic construct
  source 1..19: mol_type = other RNA
gtgtgctagaggagggtgt

SEQ ID NO: 24933 - RNA, 19 nt, synthetic construct
  source 1..19: mol_type = other RNA
ctgtgctgggacggtccac

SEQ ID NO: 24934 - RNA, 19 nt, synthetic construct
  source 1..19: mol_type = other RNA
aatggcagccggctcggtc

SEQ ID NO: 24935 - RNA, 19 nt, synthetic construct
  source 1..19: mol_type = other RNA
gcccctgcagtggtcgctg

SEQ ID NO: 24936 - RNA, 19 nt, synthetic construct
  source 1..19: mol_type = other RNA
tcccctgcagtggtcgtca

SEQ ID NO: 24937 - RNA, 19 nt, synthetic construct
  source 1..19: mol_type = other RNA
gaaggtgtaagaggtgccg

SEQ ID NO: 24938 - RNA, 19 nt, synthetic construct
  source 1..19: mol_type = other RNA
aagctgctgtcggcacatt

SEQ ID NO: 24939 - RNA, 19 nt, synthetic construct
  source 1..19: mol_type = other RNA
gcgccctcgtcgtgcacca

SEQ ID NO: 24940 - RNA, 19 nt, synthetic construct
  source 1..19: mol_type = other RNA
ggacccttgcaccgacgtc

SEQ ID NO: 24941 - RNA, 19 nt, synthetic construct
  source 1..19: mol_type = other RNA
gggctcattgtcgtctctg

SEQ ID NO: 24942 - RNA, 19 nt, synthetic construct
  source 1..19: mol_type = other RNA
gggacggtccacgtggtcc

SEQ ID NO: 24943 - RNA, 19 nt, synthetic construct
  source 1..19: mol_type = other RNA
catcctttctgctgtcggg

SEQ ID NO: 24944 - RNA, 19 nt, synthetic construct
  source 1..19: mol_type = other RNA
catggcttgtacactttgg

SEQ ID NO: 24945 - RNA, 19 nt, synthetic construct
  source 1..19: mol_type = other RNA
agaggtacacggtgcagtt

SEQ ID NO: 24946 - RNA, 19 nt, synthetic construct
  source 1..19: mol_type = other RNA
ctgcattctcccagctcgg

SEQ ID NO: 24947 - RNA, 19 nt, synthetic construct
  source 1..19: mol_type = other RNA
aggacggagccgttggacg

SEQ ID NO: 24948 - RNA, 19 nt, synthetic construct
  source 1..19: mol_type = other RNA
gagctgcgcgcgctggggg

SEQ ID NO: 24949 - RNA, 19 nt, synthetic construct
  source 1..19: mol_type = other RNA
tgggtctcgatgaccagga

SEQ ID NO: 24950 - RNA, 19 nt, synthetic construct
  source 1..19: mol_type = other RNA
tctcaaagtctccgcctcc

SEQ ID NO: 24951 - RNA, 19 nt, synthetic construct
  source 1..19: mol_type = other RNA
cgtgacagagcgggggact

SEQ ID NO: 24952 - RNA, 19 nt, synthetic construct
  source 1..19: mol_type = other RNA
gctggacccagtctgcgag

SEQ ID NO: 24953 - RNA, 19 nt, synthetic construct
  source 1..19: mol_type = other RNA
cgagggggtgaccgtcacg

SEQ ID NO: 24954 - RNA, 19 nt, synthetic construct
  source 1..19: mol_type = other RNA
gcagcagaggacccggatc

SEQ ID NO: 24955 - RNA, 19 nt, synthetic construct
  source 1..19: mol_type = other RNA
tgtcagtccttctgagagg

SEQ ID NO: 24956 - RNA, 19 nt, synthetic construct
  source 1..19: mol_type = other RNA
gctcacatgtggggtgcca

SEQ ID NO: 24957 - RNA, 19 nt, synthetic construct
  source 1..19: mol_type = other RNA
ggaggggtggattgtggac

SEQ ID NO: 24958 - RNA, 19 nt, synthetic construct
  source 1..19: mol_type = other RNA
gtggcccttgtcgtggtgg

SEQ ID NO: 24959 - RNA, 19 nt, synthetic construct
  source 1..19: mol_type = other RNA
gctcacatgtggggtgcca

SEQ ID NO: 24960 - RNA, 19 nt, synthetic construct
  source 1..19: mol_type = other RNA
ggaggggtggattgtggac

SEQ ID NO: 24961 - RNA, 19 nt, synthetic construct
  source 1..19: mol_type = other RNA
gtggcccttgtcgtggtgg

SEQ ID NO: 24962 - RNA, 19 nt, synthetic construct
  source 1..19: mol_type = other RNA
gctcacatgtggggtgcca

SEQ ID NO: 24963 - RNA, 19 nt, synthetic construct
  source 1..19: mol_type = other RNA
ggaattggtggcccttgtc

SEQ ID NO: 24964 - RNA, 19 nt, synthetic construct
  source 1..19: mol_type = other RNA
acagtgctgattgcacact

SEQ ID NO: 24965 - RNA, 19 nt, synthetic construct
  source 1..19: mol_type = other RNA
tcacagtgctgattgcaca

SEQ ID NO: 24966 - RNA, 19 nt, synthetic construct
  source 1..19: mol_type = other RNA
ggaggggatggctgtaaag

SEQ ID NO: 24967 - RNA, 19 nt, synthetic construct
  source 1..19: mol_type = other RNA
ggaggggatggctgtaaag

SEQ ID NO: 24968 - RNA, 19 nt, synthetic construct
  source 1..19: mol_type = other RNA
ggaggggatggctgtaaag

SEQ ID NO: 24969 - RNA, 19 nt, synthetic construct
  source 1..19: mol_type = other RNA
ccagcaggacgacacggtt

SEQ ID NO: 24970 - RNA, 19 nt, synthetic construct
  source 1..19: mol_type = other RNA
ctttcaggcagttctcgtt

SEQ ID NO: 24971 - RNA, 19 nt, synthetic construct
  source 1..19: mol_type = other RNA
cacccgtacatgaacacac

SEQ ID NO: 24972 - RNA, 19 nt, synthetic construct
  source 1..19: mol_type = other RNA
ctgtgcgcaccgtgtgggg

SEQ ID NO: 24973 - RNA, 19 nt, synthetic construct
  source 1..19: mol_type = other RNA
ctcacatgtggggtgccag

SEQ ID NO: 24974 - RNA, 19 nt, synthetic construct
  source 1..19: mol_type = other RNA
ctgtgcgcaccgtgtgggg

SEQ ID NO: 24975 - RNA, 19 nt, synthetic construct
  source 1..19: mol_type = other RNA
ctgtgcgcaccgtgtgggg

SEQ ID NO: 24976 - RNA, 19 nt, synthetic construct
  source 1..19: mol_type = other RNA
ctcacatgtggggtgccag

SEQ ID NO: 24977 - RNA, 19 nt, synthetic construct
  source 1..19: mol_type = other RNA
ctgtgcgcaccgtgtgggg

SEQ ID NO: 24978 - RNA, 19 nt, synthetic construct
  source 1..19: mol_type = other RNA
ctcacatgtggggtgccag

SEQ ID NO: 24979 - RNA, 19 nt, synthetic construct
  source 1..19: mol_type = other RNA
cggagagggatggcattgt

SEQ ID NO: 24980 - RNA, 19 nt, synthetic construct
  source 1..19: mol_type = other RNA
gctttgggtccagcaggac

SEQ ID NO: 24981 - RNA, 19 nt, synthetic construct
  source 1..19: mol_type = other RNA
ggcatcctcctgacattgc

SEQ ID NO: 24982 - RNA, 19 nt, synthetic construct
  source 1..19: mol_type = other RNA
ctggcccaactcccccagg

SEQ ID NO: 24983 - RNA, 19 nt, synthetic construct
  source 1..19: mol_type = other RNA
aaaggtggaatagtgggag

SEQ ID NO: 24984 - RNA, 19 nt, synthetic construct
  source 1..19: mol_type = other RNA
caggagcacggagcgcggg

SEQ ID NO: 24985 - RNA, 19 nt, synthetic construct
  source 1..19: mol_type = other RNA
cggcagtgctcagagaaca

SEQ ID NO: 24986 - RNA, 19 nt, synthetic construct
  source 1..19: mol_type = other RNA
ctccagtcgctgagctgta

SEQ ID NO: 24987 - RNA, 19 nt, synthetic construct
  source 1..19: mol_type = other RNA
actcccatccgacaccagc

SEQ ID NO: 24988 - RNA, 19 nt, synthetic construct
  source 1..19: mol_type = other RNA
gcagcagggtcgaggtgcg

SEQ ID NO: 24989 - RNA, 19 nt, synthetic construct
  source 1..19: mol_type = other RNA
acctgctcacggttcctgc

SEQ ID NO: 24990 - RNA, 19 nt, synthetic construct
  source 1..19: mol_type = other RNA
gcagcagggtcgaggtgcg

SEQ ID NO: 24991 - RNA, 19 nt, synthetic construct
  source 1..19: mol_type = other RNA
acctgctcacggttcctgc

SEQ ID NO: 24992 - RNA, 19 nt, synthetic construct
  source 1..19: mol_type = other RNA
gcagcagggtcgaggtgcg

SEQ ID NO: 24993 - RNA, 19 nt, synthetic construct
  source 1..19: mol_type = other RNA
acctgctcacggttcctgc

SEQ ID NO: 24994 - RNA, 19 nt, synthetic construct
  source 1..19: mol_type = other RNA
gcagcagggtcgaggtgcg

SEQ ID NO: 24995 - RNA, 19 nt, synthetic construct
  source 1..19: mol_type = other RNA
acctgctcacggttcctgc

SEQ ID NO: 24996 - RNA, 19 nt, synthetic construct
  source 1..19: mol_type = other RNA
aggacgggatggccgtgga

SEQ ID NO: 24997 - RNA, 19 nt, synthetic construct
  source 1..19: mol_type = other RNA
ccagcagttgcccgggtgg

SEQ ID NO: 24998 - RNA, 19 nt, synthetic construct
  source 1..19: mol_type = other RNA
cggcagtggttccgtcccg

SEQ ID NO: 24999 - RNA, 19 nt, synthetic construct
  source 1..19: mol_type = other RNA
cctcacagaggtacacggt

SEQ ID NO: 25000 - RNA, 19 nt, synthetic construct
  source 1..19: mol_type = other RNA
gcagtgctcagagaacacg

SEQ ID NO: 25001 - RNA, 19 nt, synthetic construct
  source 1..19: mol_type = other RNA
cctcaaagctgttcctggc

SEQ ID NO: 25002 - RNA, 19 nt, synthetic construct
  source 1..19: mol_type = other RNA
gtccagttggggaagctct

SEQ ID NO: 25003 - RNA, 19 nt, synthetic construct
  source 1..19: mol_type = other RNA
cctggactggaggagggag

SEQ ID NO: 25004 - RNA, 19 nt, synthetic construct
  source 1..19: mol_type = other RNA
aggaagaggggatgggtgt

SEQ ID NO: 25005 - RNA, 19 nt, synthetic construct
  source 1..19: mol_type = other RNA
gctcacagacggcccctcc

SEQ ID NO: 25006 - RNA, 19 nt, synthetic construct
  source 1..19: mol_type = other RNA
gtggccccggttgtggtgg

SEQ ID NO: 25007 - RNA, 19 nt, synthetic construct
  source 1..19: mol_type = other RNA
gctcacagacggcccctcc

SEQ ID NO: 25008 - RNA, 19 nt, synthetic construct
  source 1..19: mol_type = other RNA
cctggactggaggagggag

SEQ ID NO: 25009 - RNA, 19 nt, synthetic construct
  source 1..19: mol_type = other RNA
gggctcacagcccgtggtc

SEQ ID NO: 25010 - RNA, 19 nt, synthetic construct
  source 1..19: mol_type = other RNA
ctcacagactgcccctccg

SEQ ID NO: 25011 - RNA, 19 nt, synthetic construct
  source 1..19: mol_type = other RNA
gggctcacagcccgtggtc

SEQ ID NO: 25012 - RNA, 19 nt, synthetic construct
  source 1..19: mol_type = other RNA
gctcacagacggcccctcc

SEQ ID NO: 25013 - RNA, 19 nt, synthetic construct
  source 1..19: mol_type = other RNA
cctggactggaggagggag

SEQ ID NO: 25014 - RNA, 19 nt, synthetic construct
  source 1..19: mol_type = other RNA
tcagtgctggaagggcagt

SEQ ID NO: 25015 - RNA, 19 nt, synthetic construct
  source 1..19: mol_type = other RNA
gtggccccggttgtggtgg

SEQ ID NO: 25016 - RNA, 19 nt, synthetic construct
  source 1..19: mol_type = other RNA
gctctggcagggcacctca

SEQ ID NO: 25017 - RNA, 19 nt, synthetic construct
  source 1..19: mol_type = other RNA
caggagccctcgcagaagg

SEQ ID NO: 25018 - RNA, 19 nt, synthetic construct
  source 1..19: mol_type = other RNA
gcaggtgtcaaacatgcag

SEQ ID NO: 25019 - RNA, 19 nt, synthetic construct
  source 1..19: mol_type = other RNA
tgtcaaacatgcagttcga

SEQ ID NO: 25020 - RNA, 19 nt, synthetic construct
  source 1..19: mol_type = other RNA
gtgtcaaacatgcagttcg

SEQ ID NO: 25021 - RNA, 19 nt, synthetic construct
  source 1..19: mol_type = other RNA
ggaagcggaagacgtcgcc

SEQ ID NO: 25022 - RNA, 19 nt, synthetic construct
  source 1..19: mol_type = other RNA
agagaacacgtagttgcaa

SEQ ID NO: 25023 - RNA, 19 nt, synthetic construct
  source 1..19: mol_type = other RNA
gtctgcaccacgatgaaga

SEQ ID NO: 25024 - RNA, 19 nt, synthetic construct
  source 1..19: mol_type = other RNA
gctctgggcggtgcccatt

SEQ ID NO: 25025 - RNA, 19 nt, synthetic construct
  source 1..19: mol_type = other RNA
aaggtcttgtagtggaagt

SEQ ID NO: 25026 - RNA, 19 nt, synthetic construct
  source 1..19: mol_type = other RNA
cgccgtcgaaggtcttgta

SEQ ID NO: 25027 - RNA, 19 nt, synthetic construct
  source 1..19: mol_type = other RNA
gtcgccgtcgaaggtcttg

SEQ ID NO: 25028 - RNA, 19 nt, synthetic construct
  source 1..19: mol_type = other RNA
gacgtcgccgtcgaaggtc

SEQ ID NO: 25029 - RNA, 19 nt, synthetic construct
  source 1..19: mol_type = other RNA
tgggcgcaggcggccaggt

SEQ ID NO: 25030 - RNA, 19 nt, synthetic construct
  source 1..19: mol_type = other RNA
ctggcactgccatagcccc

SEQ ID NO: 25031 - RNA, 19 nt, synthetic construct
  source 1..19: mol_type = other RNA
caaacatgcagttcgagtg

SEQ ID NO: 25032 - RNA, 19 nt, synthetic construct
  source 1..19: mol_type = other RNA
tcaaacatgcagttcgagt

SEQ ID NO: 25033 - RNA, 19 nt, synthetic construct
  source 1..19: mol_type = other RNA
caggtgtcaaacatgcagt

SEQ ID NO: 25034 - RNA, 19 nt, synthetic construct
  source 1..19: mol_type = other RNA
tgcaggtgtcaaacatgca

SEQ ID NO: 25035 - RNA, 19 nt, synthetic construct
  source 1..19: mol_type = other RNA
ttgcaggtgtcaaacatgc

SEQ ID NO: 25036 - RNA, 19 nt, synthetic construct
  source 1..19: mol_type = other RNA
ggccgtggaggatgctgca

SEQ ID NO: 25037 - RNA, 19 nt, synthetic construct
  source 1..19: mol_type = other RNA
aggcggtggtgaaggtgaa

SEQ ID NO: 25038 - RNA, 19 nt, synthetic construct
  source 1..19: mol_type = other RNA
ggctctgggcggtgcccat

SEQ ID NO: 25039 - RNA, 19 nt, synthetic construct
  source 1..19: mol_type = other RNA
ctgtggtctgggttggggt

SEQ ID NO: 25040 - RNA, 19 nt, synthetic construct
  source 1..19: mol_type = other RNA
ggggagccctggtcagccc

SEQ ID NO: 25041 - RNA, 19 nt, synthetic construct
  source 1..19: mol_type = other RNA
gggtggtcgtccctggaga

SEQ ID NO: 25042 - RNA, 19 nt, synthetic construct
  source 1..19: mol_type = other RNA
gggtggtcgtccctggaga

SEQ ID NO: 25043 - RNA, 19 nt, synthetic construct
  source 1..19: mol_type = other RNA
gggtggtcgtccctggaga

SEQ ID NO: 25044 - RNA, 19 nt, synthetic construct
  source 1..19: mol_type = other RNA
ggtggtggtggtcagcact

SEQ ID NO: 25045 - RNA, 19 nt, synthetic construct
  source 1..19: mol_type = other RNA
gccagtcggggcccagcag

SEQ ID NO: 25046 - RNA, 19 nt, synthetic construct
  source 1..19: mol_type = other RNA
aaggttgtggcactcagca

SEQ ID NO: 25047 - RNA, 19 nt, synthetic construct
  source 1..19: mol_type = other RNA
agcacatcttgaagacgcc

SEQ ID NO: 25048 - RNA, 19 nt, synthetic construct
  source 1..19: mol_type = other RNA
cgtcactgcagcagaggac

SEQ ID NO: 25049 - RNA, 19 nt, synthetic construct
  source 1..19: mol_type = other RNA
gggactgctgtggtgctgg

SEQ ID NO: 25050 - RNA, 19 nt, synthetic construct
  source 1..19: mol_type = other RNA
ctggtgccacaggatggtc

SEQ ID NO: 25051 - RNA, 19 nt, synthetic construct
  source 1..19: mol_type = other RNA
aggcggcgaaggtggggcc

SEQ ID NO: 25052 - RNA, 19 nt, synthetic construct
  source 1..19: mol_type = other RNA
ctgtgggctctggttccta

SEQ ID NO: 25053 - RNA, 19 nt, synthetic construct
  source 1..19: mol_type = other RNA
tacgcccttggcggcacag

SEQ ID NO: 25054 - RNA, 19 nt, synthetic construct
  source 1..19: mol_type = other RNA
gccgttgaagtccccacac

SEQ ID NO: 25055 - RNA, 19 nt, synthetic construct
  source 1..19: mol_type = other RNA
ggcggcgaaggtggggccg

SEQ ID NO: 25056 - RNA, 19 nt, synthetic construct
  source 1..19: mol_type = other RNA
ggcaggcggcgaaggtggg

SEQ ID NO: 25057 - RNA, 19 nt, synthetic construct
  source 1..19: mol_type = other RNA
tgtggtggtcgtggtggta

SEQ ID NO: 25058 - RNA, 19 nt, synthetic construct
  source 1..19: mol_type = other RNA
ttgtccacatggctgttga

SEQ ID NO: 25059 - RNA, 19 nt, synthetic construct
  source 1..19: mol_type = other RNA
atggggatggaggcagaac

SEQ ID NO: 25060 - RNA, 19 nt, synthetic construct
  source 1..19: mol_type = other RNA
gtgtgctagaggagggtgt

SEQ ID NO: 25061 - RNA, 19 nt, synthetic construct
  source 1..19: mol_type = other RNA
gttggcactttggtagtgt

SEQ ID NO: 25062 - RNA, 19 nt, synthetic construct
  source 1..19: mol_type = other RNA
gtgtgctagacaccggggc

SEQ ID NO: 25063 - RNA, 19 nt, synthetic construct
  source 1..19: mol_type = other RNA
ctgccctggcgggcacaca

SEQ ID NO: 25064 - RNA, 19 nt, synthetic construct
  source 1..19: mol_type = other RNA
gctcacagactgcccctcc

SEQ ID NO: 25065 - RNA, 19 nt, synthetic construct
  source 1..19: mol_type = other RNA
gggcagtcctcctcggcaa

SEQ ID NO: 25066 - RNA, 19 nt, synthetic construct
  source 1..19: mol_type = other RNA
gcagcaggcatggacaggc

SEQ ID NO: 25067 - RNA, 19 nt, synthetic construct
  source 1..19: mol_type = other RNA
gcagcaggggttctcggcc

SEQ ID NO: 25068 - RNA, 19 nt, synthetic construct
  source 1..19: mol_type = other RNA
ggcagcaggggttctcggc

SEQ ID NO: 25069 - RNA, 19 nt, synthetic construct
  source 1..19: mol_type = other RNA
atgtcatccagcaccgtgc

SEQ ID NO: 25070 - RNA, 19 nt, synthetic construct
  source 1..19: mol_type = other RNA
aagcagccgtccacacagt

SEQ ID NO: 25071 - RNA, 19 nt, synthetic construct
  source 1..19: mol_type = other RNA
agggcttggggttgatgat

SEQ ID NO: 25072 - RNA, 19 nt, synthetic construct
  source 1..19: mol_type = other RNA
aagggcttggggttgatga

SEQ ID NO: 25073 - RNA, 19 nt, synthetic construct
  source 1..19: mol_type = other RNA
gggtagctgtagtccagcc

SEQ ID NO: 25074 - RNA, 19 nt, synthetic construct
  source 1..19: mol_type = other RNA
gggtagctgtagtccagcc

SEQ ID NO: 25075 - RNA, 19 nt, synthetic construct
  source 1..19: mol_type = other RNA
gggtagctgtagtccagcc

SEQ ID NO: 25076 - RNA, 19 nt, synthetic construct
  source 1..19: mol_type = other RNA
gggtagctgtagtccagcc

SEQ ID NO: 25077 - RNA, 19 nt, synthetic construct
  source 1..19: mol_type = other RNA
tgccagtcggggcccagca

SEQ ID NO: 25078 - RNA, 19 nt, synthetic construct
  source 1..19: mol_type = other RNA
gtgccagtcggggcccagc

SEQ ID NO: 25079 - RNA, 19 nt, synthetic construct
  source 1..19: mol_type = other RNA
gccgtggatccagtggctg

SEQ ID NO: 25080 - RNA, 19 nt, synthetic construct
  source 1..19: mol_type = other RNA
gtggcaggcctgggcgtag

SEQ ID NO: 25081 - RNA, 19 nt, synthetic construct
  source 1..19: mol_type = other RNA
cgctggtcttccggtccca

SEQ ID NO: 25082 - RNA, 19 nt, synthetic construct
  source 1..19: mol_type = other RNA
cgcagcagagaacccgcag

SEQ ID NO: 25083 - RNA, 19 nt, synthetic construct
  source 1..19: mol_type = other RNA
ccgtccacaggcacgaagg

SEQ ID NO: 25084 - RNA, 19 nt, synthetic construct
  source 1..19: mol_type = other RNA
ccctggagaagggggtgac

SEQ ID NO: 25085 - RNA, 19 nt, synthetic construct
  source 1..19: mol_type = other RNA
ccctggagaagggggtgac

SEQ ID NO: 25086 - RNA, 19 nt, synthetic construct
  source 1..19: mol_type = other RNA
ccctggagaagggggtgac

SEQ ID NO: 25087 - RNA, 19 nt, synthetic construct
  source 1..19: mol_type = other RNA
gaggtgggacaggcgccct

SEQ ID NO: 25088 - RNA, 19 nt, synthetic construct
  source 1..19: mol_type = other RNA
ggcaggcctgggcgtaggc

SEQ ID NO: 25089 - RNA, 19 nt, synthetic construct
  source 1..19: mol_type = other RNA
tccggttcctgcaggtgca

SEQ ID NO: 25090 - RNA, 19 nt, synthetic construct
  source 1..19: mol_type = other RNA
cctgcaggcgtcgtggggc

SEQ ID NO: 25091 - RNA, 19 nt, synthetic construct
  source 1..19: mol_type = other RNA
gtgctgatccacactggag

SEQ ID NO: 25092 - RNA, 19 nt, synthetic construct
  source 1..19: mol_type = other RNA
gtggcccggggtggtcgtc

SEQ ID NO: 25093 - RNA, 19 nt, synthetic construct
  source 1..19: mol_type = other RNA
gtggcccggggtggtcgtc

SEQ ID NO: 25094 - RNA, 19 nt, synthetic construct
  source 1..19: mol_type = other RNA
gtgctgatccacactggag

SEQ ID NO: 25095 - RNA, 19 nt, synthetic construct
  source 1..19: mol_type = other RNA
gtggcccggggtggtcgtc

SEQ ID NO: 25096 - RNA, 19 nt, synthetic construct
  source 1..19: mol_type = other RNA
gtgctgatccacactggag

SEQ ID NO: 25097 - RNA, 19 nt, synthetic construct
  source 1..19: mol_type = other RNA
gtggcccggggtggtcgtc

SEQ ID NO: 25098 - RNA, 19 nt, synthetic construct
  source 1..19: mol_type = other RNA
gtgctgatccacactggag

SEQ ID NO: 25099 - RNA, 19 nt, synthetic construct
  source 1..19: mol_type = other RNA
tctcccagggtaggactcc

SEQ ID NO: 25100 - RNA, 19 nt, synthetic construct
  source 1..19: mol_type = other RNA
aggacggggtggccgtggg

SEQ ID NO: 25101 - RNA, 19 nt, synthetic construct
  source 1..19: mol_type = other RNA
aggacggggtggccgtggg

SEQ ID NO: 25102 - RNA, 19 nt, synthetic construct
  source 1..19: mol_type = other RNA
tgaggggcgccatgtgccc

SEQ ID NO: 25103 - RNA, 19 nt, synthetic construct
  source 1..19: mol_type = other RNA
ctccagttccgcggctggc

SEQ ID NO: 25104 - RNA, 19 nt, synthetic construct
  source 1..19: mol_type = other RNA
tgcagcaggcatggacagg

SEQ ID NO: 25105 - RNA, 19 nt, synthetic construct
  source 1..19: mol_type = other RNA
gctggctgggtgggcactt

SEQ ID NO: 25106 - RNA, 19 nt, synthetic construct
  source 1..19: mol_type = other RNA
gggacgggcagggagggag

SEQ ID NO: 25107 - RNA, 19 nt, synthetic construct
  source 1..19: mol_type = other RNA
aaaggtggcacacgggcag

SEQ ID NO: 25108 - RNA, 19 nt, synthetic construct
  source 1..19: mol_type = other RNA
tcacagtgcaccttctgcc

SEQ ID NO: 25109 - RNA, 19 nt, synthetic construct
  source 1..19: mol_type = other RNA
ggagggggtggacgtggaa

SEQ ID NO: 25110 - RNA, 19 nt, synthetic construct
  source 1..19: mol_type = other RNA
gctctggttcctagagttg

SEQ ID NO: 25111 - RNA, 19 nt, synthetic construct
  source 1..19: mol_type = other RNA
gcagcaggagcacggagcg

SEQ ID NO: 25112 - RNA, 19 nt, synthetic construct
  source 1..19: mol_type = other RNA
ctggcccctcacccttctg

SEQ ID NO: 25113 - RNA, 19 nt, synthetic construct
  source 1..19: mol_type = other RNA
agggaagcggaagacgtcg

SEQ ID NO: 25114 - RNA, 19 nt, synthetic construct
  source 1..19: mol_type = other RNA
aggggttggtggtggagcc

SEQ ID NO: 25115 - RNA, 19 nt, synthetic construct
  source 1..19: mol_type = other RNA
aggggttggtggtggagcc

SEQ ID NO: 25116 - RNA, 19 nt, synthetic construct
  source 1..19: mol_type = other RNA
aggggttggtggtggagcc

SEQ ID NO: 25117 - RNA, 19 nt, synthetic construct
  source 1..19: mol_type = other RNA
aggggttggtggtggagcc

SEQ ID NO: 25118 - RNA, 19 nt, synthetic construct
  source 1..19: mol_type = other RNA
aggggttggtggtggagcc

SEQ ID NO: 25119 - RNA, 19 nt, synthetic construct
  source 1..19: mol_type = other RNA
ccagtggccacagttgtgg

SEQ ID NO: 25120 - RNA, 19 nt, synthetic construct
  source 1..19: mol_type = other RNA
gtggtggccgtggtgttcg

SEQ ID NO: 25121 - RNA, 19 nt, synthetic construct
  source 1..19: mol_type = other RNA
tggaggtggccgtggtgtg

SEQ ID NO: 25122 - RNA, 19 nt, synthetic construct
  source 1..19: mol_type = other RNA
gacggcccctccggccgca

SEQ ID NO: 25123 - RNA, 19 nt, synthetic construct
  source 1..19: mol_type = other RNA
cacgggtgtggtggtctgt

SEQ ID NO: 25124 - RNA, 19 nt, synthetic construct
  source 1..19: mol_type = other RNA
ccagtggccacagttgtgg

SEQ ID NO: 25125 - RNA, 19 nt, synthetic construct
  source 1..19: mol_type = other RNA
tgtaaagctggtagctgtg

SEQ ID NO: 25126 - RNA, 19 nt, synthetic construct
  source 1..19: mol_type = other RNA
tggccgtggaaccggtggg

SEQ ID NO: 25127 - RNA, 19 nt, synthetic construct
  source 1..19: mol_type = other RNA
ccaggtagaggctgagatt

SEQ ID NO: 25128 - RNA, 19 nt, synthetic construct
  source 1..19: mol_type = other RNA
ggttgtccaggtagaggct

SEQ ID NO: 25129 - RNA, 19 nt, synthetic construct
  source 1..19: mol_type = other RNA
gggcacaaggttgtggcac

SEQ ID NO: 25130 - RNA, 19 nt, synthetic construct
  source 1..19: mol_type = other RNA
gcagccctccgccatcccc

SEQ ID NO: 25131 - RNA, 19 nt, synthetic construct
  source 1..19: mol_type = other RNA
ggcaggcctgcacgcagat

SEQ ID NO: 25132 - RNA, 19 nt, synthetic construct
  source 1..19: mol_type = other RNA
cccacgcaggggcaggcct

SEQ ID NO: 25133 - RNA, 19 nt, synthetic construct
  source 1..19: mol_type = other RNA
ttgcacacgcacaccgtct

SEQ ID NO: 25134 - RNA, 19 nt, synthetic construct
  source 1..19: mol_type = other RNA
cagagaggcaggtacacat

SEQ ID NO: 25135 - RNA, 19 nt, synthetic construct
  source 1..19: mol_type = other RNA
ggtcagcaaatggactcca

SEQ ID NO: 25136 - RNA, 19 nt, synthetic construct
  source 1..19: mol_type = other RNA
gggtcagcaaatggactcc

SEQ ID NO: 25137 - RNA, 19 nt, synthetic construct
  source 1..19: mol_type = other RNA
gtgccacacacaggccggg

SEQ ID NO: 25138 - RNA, 19 nt, synthetic construct
  source 1..19: mol_type = other RNA
tggggccggtttcacccac

SEQ ID NO: 25139 - RNA, 19 nt, synthetic construct
  source 1..19: mol_type = other RNA
gacatcagggaggggcaag

SEQ ID NO: 25140 - RNA, 19 nt, synthetic construct
  source 1..19: mol_type = other RNA
gcgggcgctccggccgtgg

SEQ ID NO: 25141 - RNA, 19 nt, synthetic construct
  source 1..19: mol_type = other RNA
cctctctgacctggccgtt

SEQ ID NO: 25142 - RNA, 19 nt, synthetic construct
  source 1..19: mol_type = other RNA
aagtcctcgtaggcggcgc

SEQ ID NO: 25143 - RNA, 19 nt, synthetic construct
  source 1..19: mol_type = other RNA
tggaagggtggttgcagtc

SEQ ID NO: 25144 - RNA, 19 nt, synthetic construct
  source 1..19: mol_type = other RNA
tggaagggtggttgcagtc

SEQ ID NO: 25145 - RNA, 19 nt, synthetic construct
  source 1..19: mol_type = other RNA
tggaagggtggttgcagtc

SEQ ID NO: 25146 - RNA, 19 nt, synthetic construct
  source 1..19: mol_type = other RNA
atgtagtccccgctctgct

SEQ ID NO: 25147 - RNA, 19 nt, synthetic construct
  source 1..19: mol_type = other RNA
cgtggtgatcagtgatggg

SEQ ID NO: 25148 - RNA, 19 nt, synthetic construct
  source 1..19: mol_type = other RNA
gggttgtggcacgtcccct

SEQ ID NO: 25149 - RNA, 19 nt, synthetic construct
  source 1..19: mol_type = other RNA
gtgtgctagaggagggtgt

SEQ ID NO: 25150 - RNA, 19 nt, synthetic construct
  source 1..19: mol_type = other RNA
gtgtgctagaggagggtgt

SEQ ID NO: 25151 - RNA, 19 nt, synthetic construct
  source 1..19: mol_type = other RNA
gtgtgctagaggagggtgt

SEQ ID NO: 25152 - RNA, 19 nt, synthetic construct
  source 1..19: mol_type = other RNA
ttgacctcggtctcgcagc

SEQ ID NO: 25153 - RNA, 19 nt, synthetic construct
  source 1..19: mol_type = other RNA
gcacacgggcaggtggggc

SEQ ID NO: 25154 - RNA, 19 nt, synthetic construct
  source 1..19: mol_type = other RNA
caccacggaccggctacgc

SEQ ID NO: 25155 - RNA, 19 nt, synthetic construct
  source 1..19: mol_type = other RNA
ccgcacggatgttggagta

SEQ ID NO: 25156 - RNA, 19 nt, synthetic construct
  source 1..19: mol_type = other RNA
ccgcacggatgttggagta

SEQ ID NO: 25157 - RNA, 19 nt, synthetic construct
  source 1..19: mol_type = other RNA
ccgcacggatgttggagta

SEQ ID NO: 25158 - RNA, 19 nt, synthetic construct
  source 1..19: mol_type = other RNA
ccgcacggatgttggagta

SEQ ID NO: 25159 - RNA, 19 nt, synthetic construct
  source 1..19: mol_type = other RNA
gccgcacggatgttggagt

SEQ ID NO: 25160 - RNA, 19 nt, synthetic construct
  source 1..19: mol_type = other RNA
gccgcacggatgttggagt

SEQ ID NO: 25161 - RNA, 19 nt, synthetic construct
  source 1..19: mol_type = other RNA
gccgcacggatgttggagt

SEQ ID NO: 25162 - RNA, 19 nt, synthetic construct
  source 1..19: mol_type = other RNA
gccgcacggatgttggagt

SEQ ID NO: 25163 - RNA, 19 nt, synthetic construct
  source 1..19: mol_type = other RNA
tcgagtgctgggtggtacc

SEQ ID NO: 25164 - RNA, 19 nt, synthetic construct
  source 1..19: mol_type = other RNA
tcgagtgctgggtggtacc

SEQ ID NO: 25165 - RNA, 19 nt, synthetic construct
  source 1..19: mol_type = other RNA
tcgagtgctgggtggtacc

SEQ ID NO: 25166 - RNA, 19 nt, synthetic construct
  source 1..19: mol_type = other RNA
gtgcgttgaagaggatctg

SEQ ID NO: 25167 - RNA, 19 nt, synthetic construct
  source 1..19: mol_type = other RNA
ggttattggggccgatgtg

SEQ ID NO: 25168 - RNA, 19 nt, synthetic construct
  source 1..19: mol_type = other RNA
gctatagtgctcggctctg

SEQ ID NO: 25169 - RNA, 19 nt, synthetic construct
  source 1..19: mol_type = other RNA
agcgtatcttgtagggtgg

SEQ ID NO: 25170 - RNA, 19 nt, synthetic construct
  source 1..19: mol_type = other RNA
gtattcgcagcagagaacc

SEQ ID NO: 25171 - RNA, 19 nt, synthetic construct
  source 1..19: mol_type = other RNA
ggccgaagtggacgtcaca

SEQ ID NO: 25172 - RNA, 19 nt, synthetic construct
  source 1..19: mol_type = other RNA
gccgttaggacagtgcaag

SEQ ID NO: 25173 - RNA, 19 nt, synthetic construct
  source 1..19: mol_type = other RNA
aacgtctcaaagtctccgc

SEQ ID NO: 25174 - RNA, 19 nt, synthetic construct
  source 1..19: mol_type = other RNA
gcggtctggacgcactccc

SEQ ID NO: 25175 - RNA, 19 nt, synthetic construct
  source 1..19: mol_type = other RNA
cgtgatcgtagtggccgtg

SEQ ID NO: 25176 - RNA, 19 nt, synthetic construct
  source 1..19: mol_type = other RNA
cgtgatcgtagtggccgtg

SEQ ID NO: 25177 - RNA, 19 nt, synthetic construct
  source 1..19: mol_type = other RNA
tgtgatcgtagtggccgtg

SEQ ID NO: 25178 - RNA, 19 nt, synthetic construct
  source 1..19: mol_type = other RNA
cgtgatcgtagtggccgtg

SEQ ID NO: 25179 - RNA, 19 nt, synthetic construct
  source 1..19: mol_type = other RNA
cgtgatcgtagtggccgtg

SEQ ID NO: 25180 - RNA, 19 nt, synthetic construct
  source 1..19: mol_type = other RNA
gccgggacggttgcacggc

SEQ ID NO: 25181 - RNA, 19 nt, synthetic construct
  source 1..19: mol_type = other RNA
gacagctcgctcgtgagtg

SEQ ID NO: 25182 - RNA, 19 nt, synthetic construct
  source 1..19: mol_type = other RNA
ctggttggcgtatttggga

SEQ ID NO: 25183 - RNA, 19 nt, synthetic construct
  source 1..19: mol_type = other RNA
ctgcgtaagcctccaggct

SEQ ID NO: 25184 - RNA, 19 nt, synthetic construct
  source 1..19: mol_type = other RNA
ggtcccctcttggaggatc

SEQ ID NO: 25185 - RNA, 19 nt, synthetic construct
  source 1..19: mol_type = other RNA
ggcgttgagaacagggcct

SEQ ID NO: 25186 - RNA, 19 nt, synthetic construct
  source 1..19: mol_type = other RNA
cggcgttgagaacagggcc

SEQ ID NO: 25187 - RNA, 19 nt, synthetic construct
  source 1..19: mol_type = other RNA
tcgagtgctgggtggtact

SEQ ID NO: 25188 - RNA, 19 nt, synthetic construct
  source 1..19: mol_type = other RNA
ttcccaaagcgtgcatgga

SEQ ID NO: 25189 - RNA, 19 nt, synthetic construct
  source 1..19: mol_type = other RNA
tgtgtgcgttgaagaggat

SEQ ID NO: 25190 - RNA, 19 nt, synthetic construct
  source 1..19: mol_type = other RNA
tgtatggggccgcatggct

SEQ ID NO: 25191 - RNA, 19 nt, synthetic construct
  source 1..19: mol_type = other RNA
ccgtgagcgtagcaggggc

SEQ ID NO: 25192 - RNA, 19 nt, synthetic construct
  source 1..19: mol_type = other RNA
tcgttgtgcacacaggggc

SEQ ID NO: 25193 - RNA, 19 nt, synthetic construct
  source 1..19: mol_type = other RNA
gggtcgtccccagagtgga

SEQ ID NO: 25194 - RNA, 19 nt, synthetic construct
  source 1..19: mol_type = other RNA
tgagcgtgttggaagggtg

SEQ ID NO: 25195 - RNA, 19 nt, synthetic construct
  source 1..19: mol_type = other RNA
ctcgctcgtgagtgttggc

SEQ ID NO: 25196 - RNA, 19 nt, synthetic construct
  source 1..19: mol_type = other RNA
tcgctcgtgagtgttggcg

SEQ ID NO: 25197 - RNA, 19 nt, synthetic construct
  source 1..19: mol_type = other RNA
tcgttgtccgtcaggccgc

SEQ ID NO: 25198 - RNA, 19 nt, synthetic construct
  source 1..19: mol_type = other RNA
gttatgggggccgatgtgg

SEQ ID NO: 25199 - RNA, 19 nt, synthetic construct
  source 1..19: mol_type = other RNA
gttatgggggccgatgtgg

SEQ ID NO: 25200 - RNA, 19 nt, synthetic construct
  source 1..19: mol_type = other RNA
gttatgggggccgatgtgg

SEQ ID NO: 25201 - RNA, 19 nt, synthetic construct
  source 1..19: mol_type = other RNA
ttgtcgtggtggccttcgt

SEQ ID NO: 25202 - RNA, 19 nt, synthetic construct
  source 1..19: mol_type = other RNA
ttgtcgtggtggccttcgt

SEQ ID NO: 25203 - RNA, 19 nt, synthetic construct
  source 1..19: mol_type = other RNA
cccacccgtacatgaacac

SEQ ID NO: 25204 - RNA, 19 nt, synthetic construct
  source 1..19: mol_type = other RNA
gcgttgagaacagggcctg

SEQ ID NO: 25205 - RNA, 19 nt, synthetic construct
  source 1..19: mol_type = other RNA
ccaccgtggttattggggc

SEQ ID NO: 25206 - RNA, 19 nt, synthetic construct
  source 1..19: mol_type = other RNA
tgcgtagaaatggcagccg

SEQ ID NO: 25207 - RNA, 19 nt, synthetic construct
  source 1..19: mol_type = other RNA
cacgtcttggccatgtcct

SEQ ID NO: 25208 - RNA, 19 nt, synthetic construct
  source 1..19: mol_type = other RNA
cacggcgggggctgaccct

SEQ ID NO: 25209 - RNA, 19 nt, synthetic construct
  source 1..19: mol_type = other RNA
tcaccaccgtggttattgg

SEQ ID NO: 25210 - RNA, 19 nt, synthetic construct
  source 1..19: mol_type = other RNA
agaacgtagctgcagtcac

SEQ ID NO: 25211 - RNA, 19 nt, synthetic construct
  source 1..19: mol_type = other RNA
agcgtgcatggatctctct

SEQ ID NO: 25212 - RNA, 19 nt, synthetic construct
  source 1..19: mol_type = other RNA
gcgtagcgctgggacttgg

SEQ ID NO: 25213 - RNA, 19 nt, synthetic construct
  source 1..19: mol_type = other RNA
ttgtcgtagcagccacact

SEQ ID NO: 25214 - RNA, 19 nt, synthetic construct
  source 1..19: mol_type = other RNA
gtagcgctgggacttgggg

SEQ ID NO: 25215 - RNA, 19 nt, synthetic construct
  source 1..19: mol_type = other RNA
ttggggtagtcctcatcaa

SEQ ID NO: 25216 - RNA, 19 nt, synthetic construct
  source 1..19: mol_type = other RNA
gggcaggtgcttgttcacg

SEQ ID NO: 25217 - RNA, 19 nt, synthetic construct
  source 1..19: mol_type = other RNA
gtcgtccccggagtggagg

SEQ ID NO: 25218 - RNA, 19 nt, synthetic construct
  source 1..19: mol_type = other RNA
tcagacttggggtagtcct

SEQ ID NO: 25219 - RNA, 19 nt, synthetic construct
  source 1..19: mol_type = other RNA
tgtccactcacacttcggt

SEQ ID NO: 25220 - RNA, 19 nt, synthetic construct
  source 1..19: mol_type = other RNA
gccggtttcacccacgggg

SEQ ID NO: 25221 - RNA, 19 nt, synthetic construct
  source 1..19: mol_type = other RNA
gcctcgttgtgcacacagg

SEQ ID NO: 25222 - RNA, 19 nt, synthetic construct
  source 1..19: mol_type = other RNA
gcccatccaacttctgcag

SEQ ID NO: 25223 - RNA, 19 nt, synthetic construct
  source 1..19: mol_type = other RNA
cgtggtgttcggcactggg

SEQ ID NO: 25224 - RNA, 19 nt, synthetic construct
  source 1..19: mol_type = other RNA
gcagcgggtccgggcactg

SEQ ID NO: 25225 - RNA, 19 nt, synthetic construct
  source 1..19: mol_type = other RNA
cgtggtgttcggcactggg

SEQ ID NO: 25226 - RNA, 19 nt, synthetic construct
  source 1..19: mol_type = other RNA
atggccgtgtccccgccgt

SEQ ID NO: 25227 - RNA, 19 nt, synthetic construct
  source 1..19: mol_type = other RNA
cgtggtgttcggcactggg

SEQ ID NO: 25228 - RNA, 19 nt, synthetic construct
  source 1..19: mol_type = other RNA
agcgcactggatgccactg

SEQ ID NO: 25229 - RNA, 19 nt, synthetic construct
  source 1..19: mol_type = other RNA
cgggcgtagttctcattct

SEQ ID NO: 25230 - RNA, 19 nt, synthetic construct
  source 1..19: mol_type = other RNA
gaatgggcccgggggcaca

SEQ ID NO: 25231 - RNA, 19 nt, synthetic construct
  source 1..19: mol_type = other RNA
tcttggacagaacgtagct

SEQ ID NO: 25232 - RNA, 19 nt, synthetic construct
  source 1..19: mol_type = other RNA
ggatggctgtaaagctggt

SEQ ID NO: 25233 - RNA, 19 nt, synthetic construct
  source 1..19: mol_type = other RNA
ggatggctgtaaagctggt

SEQ ID NO: 25234 - RNA, 19 nt, synthetic construct
  source 1..19: mol_type = other RNA
ggatggctgtaaagctggt

SEQ ID NO: 25235 - RNA, 19 nt, synthetic construct
  source 1..19: mol_type = other RNA
gggcccatccaacttctgc

SEQ ID NO: 25236 - RNA, 19 nt, synthetic construct
  source 1..19: mol_type = other RNA
tgtgaacagggtgatgttg

SEQ ID NO: 25237 - RNA, 19 nt, synthetic construct
  source 1..19: mol_type = other RNA
caggtgccagggcacggca

SEQ ID NO: 25238 - RNA, 19 nt, synthetic construct
  source 1..19: mol_type = other RNA
ccgaggggcaggcagccag

SEQ ID NO: 25239 - RNA, 19 nt, synthetic construct
  source 1..19: mol_type = other RNA
agtcgtcagcctggttctg

SEQ ID NO: 25240 - RNA, 19 nt, synthetic construct
  source 1..19: mol_type = other RNA
atctgggggatgtcagtcc

SEQ ID NO: 25241 - RNA, 19 nt, synthetic construct
  source 1..19: mol_type = other RNA
aggggctgctcacagacgg

SEQ ID NO: 25242 - RNA, 19 nt, synthetic construct
  source 1..19: mol_type = other RNA
aggctgcattccacgacct

SEQ ID NO: 25243 - RNA, 19 nt, synthetic construct
  source 1..19: mol_type = other RNA
tgtccactgacaccggggc

SEQ ID NO: 25244 - RNA, 19 nt, synthetic construct
  source 1..19: mol_type = other RNA
aggggctgctcacagacgg

SEQ ID NO: 25245 - RNA, 19 nt, synthetic construct
  source 1..19: mol_type = other RNA
aggctgcattccacgacct

SEQ ID NO: 25246 - RNA, 19 nt, synthetic construct
  source 1..19: mol_type = other RNA
cgtccctctggttgttggt

SEQ ID NO: 25247 - RNA, 19 nt, synthetic construct
  source 1..19: mol_type = other RNA
aggctgcattccacgacct

SEQ ID NO: 25248 - RNA, 19 nt, synthetic construct
  source 1..19: mol_type = other RNA
tggtgaaggtgaatggcgt

SEQ ID NO: 25249 - RNA, 19 nt, synthetic construct
  source 1..19: mol_type = other RNA
aggggctgctcacagacgg

SEQ ID NO: 25250 - RNA, 19 nt, synthetic construct
  source 1..19: mol_type = other RNA
aggctgcattccacgacct

SEQ ID NO: 25251 - RNA, 19 nt, synthetic construct
  source 1..19: mol_type = other RNA
tagttgcagcagaacacac

SEQ ID NO: 25252 - RNA, 19 nt, synthetic construct
  source 1..19: mol_type = other RNA
aaagacctggctcagcatc

SEQ ID NO: 25253 - RNA, 19 nt, synthetic construct
  source 1..19: mol_type = other RNA
atgggcccgggggcacaag

SEQ ID NO: 25254 - RNA, 19 nt, synthetic construct
  source 1..19: mol_type = other RNA
cagcgggtccgggcactgc

SEQ ID NO: 25255 - RNA, 19 nt, synthetic construct
  source 1..19: mol_type = other RNA
gctgcattccacgacctgg

SEQ ID NO: 25256 - RNA, 19 nt, synthetic construct
  source 1..19: mol_type = other RNA
gctgcattccacgacctgg

SEQ ID NO: 25257 - RNA, 19 nt, synthetic construct
  source 1..19: mol_type = other RNA
gctgcattccacgacctgg

SEQ ID NO: 25258 - RNA, 19 nt, synthetic construct
  source 1..19: mol_type = other RNA
gctgcattccacgacctgg

SEQ ID NO: 25259 - RNA, 19 nt, synthetic construct
  source 1..19: mol_type = other RNA
tagttgcagcagaacacac

SEQ ID NO: 25260 - RNA, 19 nt, synthetic construct
  source 1..19: mol_type = other RNA
ctcgccagtcactgcacac

SEQ ID NO: 25261 - RNA, 19 nt, synthetic construct
  source 1..19: mol_type = other RNA
ggttcccaaactggagcgg

SEQ ID NO: 25262 - RNA, 19 nt, synthetic construct
  source 1..19: mol_type = other RNA
tgggcccatccaacttctg

SEQ ID NO: 25263 - RNA, 19 nt, synthetic construct
  source 1..19: mol_type = other RNA
gggcagcggcacaggtcct

SEQ ID NO: 25264 - RNA, 19 nt, synthetic construct
  source 1..19: mol_type = other RNA
cggatggccgtgtccccgc

SEQ ID NO: 25265 - RNA, 19 nt, synthetic construct
  source 1..19: mol_type = other RNA
tagttgcagcagaacacac

SEQ ID NO: 25266 - RNA, 19 nt, synthetic construct
  source 1..19: mol_type = other RNA
tagttgcagcagaacacac

SEQ ID NO: 25267 - RNA, 19 nt, synthetic construct
  source 1..19: mol_type = other RNA
gtcgtccccggagtggagg

SEQ ID NO: 25268 - RNA, 19 nt, synthetic construct
  source 1..19: mol_type = other RNA
taggccacgcaggtgccca

SEQ ID NO: 25269 - RNA, 19 nt, synthetic construct
  source 1..19: mol_type = other RNA
atgaagtggccatccccgt

SEQ ID NO: 25270 - RNA, 19 nt, synthetic construct
  source 1..19: mol_type = other RNA
atgcggaaggtcccgtggg

SEQ ID NO: 25271 - RNA, 19 nt, synthetic construct
  source 1..19: mol_type = other RNA
agttccaggacatgccaca

SEQ ID NO: 25272 - RNA, 19 nt, synthetic construct
  source 1..19: mol_type = other RNA
gtcctggtgcagtcggatg

SEQ ID NO: 25273 - RNA, 19 nt, synthetic construct
  source 1..19: mol_type = other RNA
acgcacctggccaccgtgc

SEQ ID NO: 25274 - RNA, 19 nt, synthetic construct
  source 1..19: mol_type = other RNA
cggcaggtttttaggcagg

SEQ ID NO: 25275 - RNA, 19 nt, synthetic construct
  source 1..19: mol_type = other RNA
tgagcgcactggatgccac

SEQ ID NO: 25276 - RNA, 19 nt, synthetic construct
  source 1..19: mol_type = other RNA
tgttgtagatgacgtcctg

SEQ ID NO: 25277 - RNA, 19 nt, synthetic construct
  source 1..19: mol_type = other RNA
ggtccgggcactgctccgt

SEQ ID NO: 25278 - RNA, 19 nt, synthetic construct
  source 1..19: mol_type = other RNA
ccggcaggtttttaggcag

SEQ ID NO: 25279 - RNA, 19 nt, synthetic construct
  source 1..19: mol_type = other RNA
gctgttggcgcacatcagc

SEQ ID NO: 25280 - RNA, 19 nt, synthetic construct
  source 1..19: mol_type = other RNA
aggtgatgaagtggccatc

SEQ ID NO: 25281 - RNA, 19 nt, synthetic construct
  source 1..19: mol_type = other RNA
tccactgacaccggggctg

SEQ ID NO: 25282 - RNA, 19 nt, synthetic construct
  source 1..19: mol_type = other RNA
agcacatcttgaacttccc

SEQ ID NO: 25283 - RNA, 19 nt, synthetic construct
  source 1..19: mol_type = other RNA
agcacatcttgaacttccc

SEQ ID NO: 25284 - RNA, 19 nt, synthetic construct
  source 1..19: mol_type = other RNA
agcacatcttgaacttccc

SEQ ID NO: 25285 - RNA, 19 nt, synthetic construct
  source 1..19: mol_type = other RNA
agcacatcttgaacttccc

SEQ ID NO: 25286 - RNA, 19 nt, synthetic construct
  source 1..19: mol_type = other RNA
ctgtccaaatgccctgcag

SEQ ID NO: 25287 - RNA, 19 nt, synthetic construct
  source 1..19: mol_type = other RNA
gctgtagggcagccgggcc

SEQ ID NO: 25288 - RNA, 19 nt, synthetic construct
  source 1..19: mol_type = other RNA
gtgcccactggggttccgg

SEQ ID NO: 25289 - RNA, 19 nt, synthetic construct
  source 1..19: mol_type = other RNA
agtcctcctcacaggagta

SEQ ID NO: 25290 - RNA, 19 nt, synthetic construct
  source 1..19: mol_type = other RNA
ggacagacacagccggaca

SEQ ID NO: 25291 - RNA, 19 nt, synthetic construct
  source 1..19: mol_type = other RNA
ccccacagtagtcctgggc

SEQ ID NO: 25292 - RNA, 19 nt, synthetic construct
  source 1..19: mol_type = other RNA
caagggcaccgtctcctcg

SEQ ID NO: 25293 - RNA, 19 nt, synthetic construct
  source 1..19: mol_type = other RNA
ggggaagctctcggcctgg

SEQ ID NO: 25294 - RNA, 19 nt, synthetic construct
  source 1..19: mol_type = other RNA
ccagcggcagacctcgcgg

SEQ ID NO: 25295 - RNA, 19 nt, synthetic construct
  source 1..19: mol_type = other RNA
ggatggccgtgtccccgcc

SEQ ID NO: 25296 - RNA, 19 nt, synthetic construct
  source 1..19: mol_type = other RNA
taggcacagcaggctccgt

SEQ ID NO: 25297 - RNA, 19 nt, synthetic construct
  source 1..19: mol_type = other RNA
caaggctgtgagcgcactg

SEQ ID NO: 25298 - RNA, 19 nt, synthetic construct
  source 1..19: mol_type = other RNA
ggtgaaggtgaatggcgtt

SEQ ID NO: 25299 - RNA, 19 nt, synthetic construct
  source 1..19: mol_type = other RNA
cgggcactgctccgtgggc

SEQ ID NO: 25300 - RNA, 19 nt, synthetic construct
  source 1..19: mol_type = other RNA
actggggctcacagcccgt

SEQ ID NO: 25301 - RNA, 19 nt, synthetic construct
  source 1..19: mol_type = other RNA
actggggctcacagcccgt

SEQ ID NO: 25302 - RNA, 19 nt, synthetic construct
  source 1..19: mol_type = other RNA
tctggttgttggtgcaggt

SEQ ID NO: 25303 - RNA, 19 nt, synthetic construct
  source 1..19: mol_type = other RNA
gactcaacgtcccctccaa

SEQ ID NO: 25304 - RNA, 19 nt, synthetic construct
  source 1..19: mol_type = other RNA
gcaggtgtccggagtccgc

SEQ ID NO: 25305 - RNA, 19 nt, synthetic construct
  source 1..19: mol_type = other RNA
tcgcactcatagtggaagt

SEQ ID NO: 25306 - RNA, 19 nt, synthetic construct
  source 1..19: mol_type = other RNA
tggccaccgtgcagttctc

SEQ ID NO: 25307 - RNA, 19 nt, synthetic construct
  source 1..19: mol_type = other RNA
agccccgggggacagacac

SEQ ID NO: 25308 - RNA, 19 nt, synthetic construct
  source 1..19: mol_type = other RNA
ctggggttccggcaggttt

SEQ ID NO: 25309 - RNA, 19 nt, synthetic construct
  source 1..19: mol_type = other RNA
gtgggttctgtggagcctg

SEQ ID NO: 25310 - RNA, 19 nt, synthetic construct
  source 1..19: mol_type = other RNA
ttgatgggcaggtgcttgt

SEQ ID NO: 25311 - RNA, 19 nt, synthetic construct
  source 1..19: mol_type = other RNA
gtccctctggttgttggtg

SEQ ID NO: 25312 - RNA, 19 nt, synthetic construct
  source 1..19: mol_type = other RNA
gtccccacagtagtcctgg

SEQ ID NO: 25313 - RNA, 19 nt, synthetic construct
  source 1..19: mol_type = other RNA
ctggttgaagttcccacac

SEQ ID NO: 25314 - RNA, 19 nt, synthetic construct
  source 1..19: mol_type = other RNA
gctgcgtgtagatggagtt

SEQ ID NO: 25315 - RNA, 19 nt, synthetic construct
  source 1..19: mol_type = other RNA
aggtggtgccggtggtccc

SEQ ID NO: 25316 - RNA, 19 nt, synthetic construct
  source 1..19: mol_type = other RNA
agcggcagacctcgcggac

SEQ ID NO: 25317 - RNA, 19 nt, synthetic construct
  source 1..19: mol_type = other RNA
gaggggccacagggcacgt

SEQ ID NO: 25318 - RNA, 19 nt, synthetic construct
  source 1..19: mol_type = other RNA
agtgggttctgtggagcct

SEQ ID NO: 25319 - RNA, 19 nt, synthetic construct
  source 1..19: mol_type = other RNA
ggacagtgggttctgtgga

SEQ ID NO: 25320 - RNA, 19 nt, synthetic construct
  source 1..19: mol_type = other RNA
atctggtcctcattgaaga

SEQ ID NO: 25321 - RNA, 19 nt, synthetic construct
  source 1..19: mol_type = other RNA
cacgacctggcccaactcc

SEQ ID NO: 25322 - RNA, 19 nt, synthetic construct
  source 1..19: mol_type = other RNA
tcatcaaaccactctgtcc

SEQ ID NO: 25323 - RNA, 19 nt, synthetic construct
  source 1..19: mol_type = other RNA
ccggatggccgtgtccccg

SEQ ID NO: 25324 - RNA, 19 nt, synthetic construct
  source 1..19: mol_type = other RNA
cacgacctggcccaactcc

SEQ ID NO: 25325 - RNA, 19 nt, synthetic construct
  source 1..19: mol_type = other RNA
cacgacctggcccaactcc

SEQ ID NO: 25326 - RNA, 19 nt, synthetic construct
  source 1..19: mol_type = other RNA
ggtggtccctagggcagag

SEQ ID NO: 25327 - RNA, 19 nt, synthetic construct
  source 1..19: mol_type = other RNA
acgtcacagtgcaccttct

SEQ ID NO: 25328 - RNA, 19 nt, synthetic construct
  source 1..19: mol_type = other RNA
gggcactgctccgtgggcc

SEQ ID NO: 25329 - RNA, 19 nt, synthetic construct
  source 1..19: mol_type = other RNA
gtgagcgcactggatgcca

SEQ ID NO: 25330 - RNA, 19 nt, synthetic construct
  source 1..19: mol_type = other RNA
acctcgccagtcactgcac

SEQ ID NO: 25331 - RNA, 19 nt, synthetic construct
  source 1..19: mol_type = other RNA
ggacagaacgtagctgcag

SEQ ID NO: 25332 - RNA, 19 nt, synthetic construct
  source 1..19: mol_type = other RNA
ggtgcagccgtccacaggc

SEQ ID NO: 25333 - RNA, 19 nt, synthetic construct
  source 1..19: mol_type = other RNA
gctggcaggtggtggtacc

SEQ ID NO: 25334 - RNA, 19 nt, synthetic construct
  source 1..19: mol_type = other RNA
ttaggcagggtgccccgca

SEQ ID NO: 25335 - RNA, 19 nt, synthetic construct
  source 1..19: mol_type = other RNA
ggtggtccctagggcagag

SEQ ID NO: 25336 - RNA, 19 nt, synthetic construct
  source 1..19: mol_type = other RNA
ggtggtccctagggcagag

SEQ ID NO: 25337 - RNA, 19 nt, synthetic construct
  source 1..19: mol_type = other RNA
ggtggtccctagggcagag

SEQ ID NO: 25338 - RNA, 19 nt, synthetic construct
  source 1..19: mol_type = other RNA
gcgcactggcgtgagtatt

SEQ ID NO: 25339 - RNA, 19 nt, synthetic construct
  source 1..19: mol_type = other RNA
gccgtcaaaggtggaatag

SEQ ID NO: 25340 - RNA, 19 nt, synthetic construct
  source 1..19: mol_type = other RNA
atccccgtaggccacgcag

SEQ ID NO: 25341 - RNA, 19 nt, synthetic construct
  source 1..19: mol_type = other RNA
gtgggttgtagaagtcaca

SEQ ID NO: 25342 - RNA, 19 nt, synthetic construct
  source 1..19: mol_type = other RNA
ctggggtgtgggaagtcac

SEQ ID NO: 25343 - RNA, 19 nt, synthetic construct
  source 1..19: mol_type = other RNA
ggttgtcacccacgcacct

SEQ ID NO: 25344 - RNA, 19 nt, synthetic construct
  source 1..19: mol_type = other RNA
ctgcaggtgacgtcggcct

SEQ ID NO: 25345 - RNA, 19 nt, synthetic construct
  source 1..19: mol_type = other RNA
ggtggtcttttcggttgct

SEQ ID NO: 25346 - RNA, 19 nt, synthetic construct
  source 1..19: mol_type = other RNA
tcctcattgaagaagggct

SEQ ID NO: 25347 - RNA, 19 nt, synthetic construct
  source 1..19: mol_type = other RNA
cacgggtgaccacaggcct

SEQ ID NO: 25348 - RNA, 19 nt, synthetic construct
  source 1..19: mol_type = other RNA
cggtggctgcactcccacc

SEQ ID NO: 25349 - RNA, 19 nt, synthetic construct
  source 1..19: mol_type = other RNA
gtcgtagcagccacactgg

SEQ ID NO: 25350 - RNA, 19 nt, synthetic construct
  source 1..19: mol_type = other RNA
ttccggtcccaggacacgg

SEQ ID NO: 25351 - RNA, 19 nt, synthetic construct
  source 1..19: mol_type = other RNA
tgacgggtggaacaaagct

SEQ ID NO: 25352 - RNA, 19 nt, synthetic construct
  source 1..19: mol_type = other RNA
acaggagtcctcctcacag

SEQ ID NO: 25353 - RNA, 19 nt, synthetic construct
  source 1..19: mol_type = other RNA
gccgtagttgcagcagaac

SEQ ID NO: 25354 - RNA, 19 nt, synthetic construct
  source 1..19: mol_type = other RNA
gccgtagttgcagcagaac

SEQ ID NO: 25355 - RNA, 19 nt, synthetic construct
  source 1..19: mol_type = other RNA
gccgtagttgcagcagaac

SEQ ID NO: 25356 - RNA, 19 nt, synthetic construct
  source 1..19: mol_type = other RNA
gccgtagttgcagcagaac

SEQ ID NO: 25357 - RNA, 19 nt, synthetic construct
  source 1..19: mol_type = other RNA
aatgggcccgggggcacaa

SEQ ID NO: 25358 - RNA, 19 nt, synthetic construct
  source 1..19: mol_type = other RNA
agccatgggcgcagggaca

SEQ ID NO: 25359 - RNA, 19 nt, synthetic construct
  source 1..19: mol_type = other RNA
gtgacgggtggaacaaagc

SEQ ID NO: 25360 - RNA, 19 nt, synthetic construct
  source 1..19: mol_type = other RNA
cactcgcactcatagtgga

SEQ ID NO: 25361 - RNA, 19 nt, synthetic construct
  source 1..19: mol_type = other RNA
cacgcacctggccaccgtg

SEQ ID NO: 25362 - RNA, 19 nt, synthetic construct
  source 1..19: mol_type = other RNA
ctgacaccggggctggcag

SEQ ID NO: 25363 - RNA, 19 nt, synthetic construct
  source 1..19: mol_type = other RNA
tgcattccacgacctggcc

SEQ ID NO: 25364 - RNA, 19 nt, synthetic construct
  source 1..19: mol_type = other RNA
acgccgttcttgctgaaac

SEQ ID NO: 25365 - RNA, 19 nt, synthetic construct
  source 1..19: mol_type = other RNA
tgcattccacgacctggcc

SEQ ID NO: 25366 - RNA, 19 nt, synthetic construct
  source 1..19: mol_type = other RNA
gctggccccccgcgtgggc

SEQ ID NO: 25367 - RNA, 19 nt, synthetic construct
  source 1..19: mol_type = other RNA
tggacccggatggccgtgt

SEQ ID NO: 25368 - RNA, 19 nt, synthetic construct
  source 1..19: mol_type = other RNA
tgcattccacgacctggcc

SEQ ID NO: 25369 - RNA, 19 nt, synthetic construct
  source 1..19: mol_type = other RNA
agacacagccggacacgca

SEQ ID NO: 25370 - RNA, 19 nt, synthetic construct
  source 1..19: mol_type = other RNA
tgcattccacgacctggcc

SEQ ID NO: 25371 - RNA, 19 nt, synthetic construct
  source 1..19: mol_type = other RNA
cagttcgagtggaagggct

SEQ ID NO: 25372 - RNA, 19 nt, synthetic construct
  source 1..19: mol_type = other RNA
gccgatgtggggctgctgg

SEQ ID NO: 25373 - RNA, 19 nt, synthetic construct
  source 1..19: mol_type = other RNA
gccgatgtggggctgctgg

SEQ ID NO: 25374 - RNA, 19 nt, synthetic construct
  source 1..19: mol_type = other RNA
cagggcacggcaggtcctg

SEQ ID NO: 25375 - RNA, 19 nt, synthetic construct
  source 1..19: mol_type = other RNA
gccgatgtggggctgctgg

SEQ ID NO: 25376 - RNA, 19 nt, synthetic construct
  source 1..19: mol_type = other RNA
tctggttgaagttcccaca

SEQ ID NO: 25377 - RNA, 19 nt, synthetic construct
  source 1..19: mol_type = other RNA
ccctgcccttgtagtcctg

SEQ ID NO: 25378 - RNA, 19 nt, synthetic construct
  source 1..19: mol_type = other RNA
gccgatgtggggctgctgg

SEQ ID NO: 25379 - RNA, 19 nt, synthetic construct
  source 1..19: mol_type = other RNA
cagctcgtagctctccacg

SEQ ID NO: 25380 - RNA, 19 nt, synthetic construct
  source 1..19: mol_type = other RNA
aggctccgtgctggcactg

SEQ ID NO: 25381 - RNA, 19 nt, synthetic construct
  source 1..19: mol_type = other RNA
atcaaaccactctgtccac

SEQ ID NO: 25382 - RNA, 19 nt, synthetic construct
  source 1..19: mol_type = other RNA
tatctgggggatgtcagtc

SEQ ID NO: 25383 - RNA, 19 nt, synthetic construct
  source 1..19: mol_type = other RNA
gtcaaaccactctgtccac

SEQ ID NO: 25384 - RNA, 19 nt, synthetic construct
  source 1..19: mol_type = other RNA
cgtagttgcagcagaacac

SEQ ID NO: 25385 - RNA, 19 nt, synthetic construct
  source 1..19: mol_type = other RNA
gtaaagctggtagctgtgg

SEQ ID NO: 25386 - RNA, 19 nt, synthetic construct
  source 1..19: mol_type = other RNA
cgtagttgcagcagaacac

SEQ ID NO: 25387 - RNA, 19 nt, synthetic construct
  source 1..19: mol_type = other RNA
cgtagttgcagcagaacac

SEQ ID NO: 25388 - RNA, 19 nt, synthetic construct
  source 1..19: mol_type = other RNA
gtaaagctggtagctgtgg

SEQ ID NO: 25389 - RNA, 19 nt, synthetic construct
  source 1..19: mol_type = other RNA
cgtagttgcagcagaacac

SEQ ID NO: 25390 - RNA, 19 nt, synthetic construct
  source 1..19: mol_type = other RNA
gtaaagctggtagctgtgg

SEQ ID NO: 25391 - RNA, 19 nt, synthetic construct
  source 1..19: mol_type = other RNA
cgttgggtcctgggtgtcc

SEQ ID NO: 25392 - RNA, 19 nt, synthetic construct
  source 1..19: mol_type = other RNA
ccaagcccatcggtggtgt

SEQ ID NO: 25393 - RNA, 19 nt, synthetic construct
  source 1..19: mol_type = other RNA
tgaacagggtgatgttggc

SEQ ID NO: 25394 - RNA, 19 nt, synthetic construct
  source 1..19: mol_type = other RNA
gctgctcacagacggcccc

SEQ ID NO: 25395 - RNA, 19 nt, synthetic construct
  source 1..19: mol_type = other RNA
gacgtcggcctcactcagg

SEQ ID NO: 25396 - RNA, 19 nt, synthetic construct
  source 1..19: mol_type = other RNA
gctgctcacagacggcccc

SEQ ID NO: 25397 - RNA, 19 nt, synthetic construct
  source 1..19: mol_type = other RNA
gacacgcagtgtgtgctga

SEQ ID NO: 25398 - RNA, 19 nt, synthetic construct
  source 1..19: mol_type = other RNA
tggtcttccggtcccagga

SEQ ID NO: 25399 - RNA, 19 nt, synthetic construct
  source 1..19: mol_type = other RNA
gctgctcacagacggcccc

SEQ ID NO: 25400 - RNA, 19 nt, synthetic construct
  source 1..19: mol_type = other RNA
tggttgaagttcccacaca

SEQ ID NO: 25401 - RNA, 19 nt, synthetic construct
  source 1..19: mol_type = other RNA
gcctggcactctatgtcct

SEQ ID NO: 25402 - RNA, 19 nt, synthetic construct
  source 1..19: mol_type = other RNA
tgtccggagtccgccagga

SEQ ID NO: 25403 - RNA, 19 nt, synthetic construct
  source 1..19: mol_type = other RNA
gcggcagacctcgcggaca

SEQ ID NO: 25404 - RNA, 19 nt, synthetic construct
  source 1..19: mol_type = other RNA
cacagtccacctgctggcc

SEQ ID NO: 25405 - RNA, 19 nt, synthetic construct
  source 1..19: mol_type = other RNA
ccactgacaccggggctgg

SEQ ID NO: 25406 - RNA, 19 nt, synthetic construct
  source 1..19: mol_type = other RNA
gttcttgctgaaaccgctg

SEQ ID NO: 25407 - RNA, 19 nt, synthetic construct
  source 1..19: mol_type = other RNA
agtagcagcagccggtttt

SEQ ID NO: 25408 - RNA, 19 nt, synthetic construct
  source 1..19: mol_type = other RNA
ggtgtgaacagggtgatgt

SEQ ID NO: 25409 - RNA, 19 nt, synthetic construct
  source 1..19: mol_type = other RNA
gagtcaacctgggagcggc

SEQ ID NO: 25410 - RNA, 19 nt, synthetic construct
  source 1..19: mol_type = other RNA
agtcctcatcaaaccactc

SEQ ID NO: 25411 - RNA, 19 nt, synthetic construct
  source 1..19: mol_type = other RNA
ctgaggaggacacagtgga

SEQ ID NO: 25412 - RNA, 19 nt, synthetic construct
  source 1..19: mol_type = other RNA
aagcagggagtagagaagt

SEQ ID NO: 25413 - RNA, 19 nt, synthetic construct
  source 1..19: mol_type = other RNA
cctggccaccgtgcagttc

SEQ ID NO: 25414 - RNA, 19 nt, synthetic construct
  source 1..19: mol_type = other RNA
gacactttgatgggcaggt

SEQ ID NO: 25415 - RNA, 19 nt, synthetic construct
  source 1..19: mol_type = other RNA
cggcacaggtcctgggcgc

SEQ ID NO: 25416 - RNA, 19 nt, synthetic construct
  source 1..19: mol_type = other RNA
cacctcgccagtcactgca

SEQ ID NO: 25417 - RNA, 19 nt, synthetic construct
  source 1..19: mol_type = other RNA
cggctggccccccgcgtgg

SEQ ID NO: 25418 - RNA, 19 nt, synthetic construct
  source 1..19: mol_type = other RNA
gagtagcagcagccggttt

SEQ ID NO: 25419 - RNA, 19 nt, synthetic construct
  source 1..19: mol_type = other RNA
caggtgttggcgaaggctg

SEQ ID NO: 25420 - RNA, 19 nt, synthetic construct
  source 1..19: mol_type = other RNA
gggtgtgaacagggtgatg

SEQ ID NO: 25421 - RNA, 19 nt, synthetic construct
  source 1..19: mol_type = other RNA
gtccagcctgacaaacacc

SEQ ID NO: 25422 - RNA, 19 nt, synthetic construct
  source 1..19: mol_type = other RNA
cagcctggttctggttgaa

SEQ ID NO: 25423 - RNA, 19 nt, synthetic construct
  source 1..19: mol_type = other RNA
tggtcttttcggttgctgt

SEQ ID NO: 25424 - RNA, 19 nt, synthetic construct
  source 1..19: mol_type = other RNA
ggccaccgtgcagttctcc

SEQ ID NO: 25425 - RNA, 19 nt, synthetic construct
  source 1..19: mol_type = other RNA
ggtcccacaggggatgttc

SEQ ID NO: 25426 - RNA, 19 nt, synthetic construct
  source 1..19: mol_type = other RNA
cctcattgaagaagggctg

SEQ ID NO: 25427 - RNA, 19 nt, synthetic construct
  source 1..19: mol_type = other RNA
cgcactggcgtgagtattc

SEQ ID NO: 25428 - RNA, 19 nt, synthetic construct
  source 1..19: mol_type = other RNA
gagggccgggcttgtcgtg

SEQ ID NO: 25429 - RNA, 19 nt, synthetic construct
  source 1..19: mol_type = other RNA
cctcataggtgcaggtgca

SEQ ID NO: 25430 - RNA, 19 nt, synthetic construct
  source 1..19: mol_type = other RNA
gctccgtgctggcactgag

SEQ ID NO: 25431 - RNA, 19 nt, synthetic construct
  source 1..19: mol_type = other RNA
gcacatcttgaacttcccc

SEQ ID NO: 25432 - RNA, 19 nt, synthetic construct
  source 1..19: mol_type = other RNA
ggcctggcactctatgtcc

SEQ ID NO: 25433 - RNA, 19 nt, synthetic construct
  source 1..19: mol_type = other RNA
tggggaagctctcggcctg

SEQ ID NO: 25434 - RNA, 19 nt, synthetic construct
  source 1..19: mol_type = other RNA
gcacatcttgaacttcccc

SEQ ID NO: 25435 - RNA, 19 nt, synthetic construct
  source 1..19: mol_type = other RNA
ccaggctcgtggtcagcgg

SEQ ID NO: 25436 - RNA, 19 nt, synthetic construct
  source 1..19: mol_type = other RNA
gcacatcttgaacttcccc

SEQ ID NO: 25437 - RNA, 19 nt, synthetic construct
  source 1..19: mol_type = other RNA
gcacatcttgaacttcccc

SEQ ID NO: 25438 - RNA, 19 nt, synthetic construct
  source 1..19: mol_type = other RNA
aaagctggtagctgtgggt

SEQ ID NO: 25439 - RNA, 19 nt, synthetic construct
  source 1..19: mol_type = other RNA
cactgtgggggtgtgggtg

SEQ ID NO: 25440 - RNA, 19 nt, synthetic construct
  source 1..19: mol_type = other RNA
ccgtagttgcagcagaaca

SEQ ID NO: 25441 - RNA, 19 nt, synthetic construct
  source 1..19: mol_type = other RNA
ccgtagttgcagcagaaca

SEQ ID NO: 25442 - RNA, 19 nt, synthetic construct
  source 1..19: mol_type = other RNA
ccgtagttgcagcagaaca

SEQ ID NO: 25443 - RNA, 19 nt, synthetic construct
  source 1..19: mol_type = other RNA
ccgtagttgcagcagaaca

SEQ ID NO: 25444 - RNA, 19 nt, synthetic construct
  source 1..19: mol_type = other RNA
aaagctggtagctgtgggt

SEQ ID NO: 25445 - RNA, 19 nt, synthetic construct
  source 1..19: mol_type = other RNA
cactgtgggggtgtgggtg

SEQ ID NO: 25446 - RNA, 19 nt, synthetic construct
  source 1..19: mol_type = other RNA
gcaaaggccggccccagca

SEQ ID NO: 25447 - RNA, 19 nt, synthetic construct
  source 1..19: mol_type = other RNA
tccgcaaaggccggcccca

SEQ ID NO: 25448 - RNA, 19 nt, synthetic construct
  source 1..19: mol_type = other RNA
aaagctggtagctgtgggt

SEQ ID NO: 25449 - RNA, 19 nt, synthetic construct
  source 1..19: mol_type = other RNA
agtagagaagtgggagctg

SEQ ID NO: 25450 - RNA, 19 nt, synthetic construct
  source 1..19: mol_type = other RNA
actcgcactcatagtggaa

SEQ ID NO: 25451 - RNA, 19 nt, synthetic construct
  source 1..19: mol_type = other RNA
gcacaggtcctgggcgcag

SEQ ID NO: 25452 - RNA, 19 nt, synthetic construct
  source 1..19: mol_type = other RNA
gtagcagcagccggttttc

SEQ ID NO: 25453 - RNA, 19 nt, synthetic construct
  source 1..19: mol_type = other RNA
gcaccgtgcctggggggca

SEQ ID NO: 25454 - RNA, 19 nt, synthetic construct
  source 1..19: mol_type = other RNA
tgccgacaggggcagctgc

SEQ ID NO: 25455 - RNA, 19 nt, synthetic construct
  source 1..19: mol_type = other RNA
ggtggctgcactcccacct

SEQ ID NO: 25456 - RNA, 19 nt, synthetic construct
  source 1..19: mol_type = other RNA
aggtgttggcgaaggctgc

SEQ ID NO: 25457 - RNA, 19 nt, synthetic construct
  source 1..19: mol_type = other RNA
tggctgtaaagctggtagc

SEQ ID NO: 25458 - RNA, 19 nt, synthetic construct
  source 1..19: mol_type = other RNA
tggctgtaaagctggtagc

SEQ ID NO: 25459 - RNA, 19 nt, synthetic construct
  source 1..19: mol_type = other RNA
tggctgtaaagctggtagc

SEQ ID NO: 25460 - RNA, 19 nt, synthetic construct
  source 1..19: mol_type = other RNA
catccccgtaggccacgca

SEQ ID NO: 25461 - RNA, 19 nt, synthetic construct
  source 1..19: mol_type = other RNA
tccctctggttgttggtgc

SEQ ID NO: 25462 - RNA, 19 nt, synthetic construct
  source 1..19: mol_type = other RNA
gcagttacagctctggcag

SEQ ID NO: 25463 - RNA, 19 nt, synthetic construct
  source 1..19: mol_type = other RNA
tgcagttacagctctggca

SEQ ID NO: 25464 - RNA, 19 nt, synthetic construct
  source 1..19: mol_type = other RNA
tggtaccctctctgcctca

SEQ ID NO: 25465 - RNA, 19 nt, synthetic construct
  source 1..19: mol_type = other RNA
gtcctcatcaaaccactct

SEQ ID NO: 25466 - RNA, 19 nt, synthetic construct
  source 1..19: mol_type = other RNA
ccacccctgggacagtggg

SEQ ID NO: 25467 - RNA, 19 nt, synthetic construct
  source 1..19: mol_type = other RNA
tgtcgtagcagccacactg

SEQ ID NO: 25468 - RNA, 19 nt, synthetic construct
  source 1..19: mol_type = other RNA
gtgtgaacagggtgatgtt

SEQ ID NO: 25469 - RNA, 19 nt, synthetic construct
  source 1..19: mol_type = other RNA
tgaccaggcacactggggc

SEQ ID NO: 25470 - RNA, 19 nt, synthetic construct
  source 1..19: mol_type = other RNA
tcaacctgggagcggcagg

SEQ ID NO: 25471 - RNA, 19 nt, synthetic construct
  source 1..19: mol_type = other RNA
cgagggtgtgaacagggtg

SEQ ID NO: 25472 - RNA, 19 nt, synthetic construct
  source 1..19: mol_type = other RNA
cgtcacagtgcaccttctg

SEQ ID NO: 25473 - RNA, 19 nt, synthetic construct
  source 1..19: mol_type = other RNA
gcattccacgacctggccc

SEQ ID NO: 25474 - RNA, 19 nt, synthetic construct
  source 1..19: mol_type = other RNA
cgcagtgtgtgctgaaaca

SEQ ID NO: 25475 - RNA, 19 nt, synthetic construct
  source 1..19: mol_type = other RNA
tgaccaggcacactggggc

SEQ ID NO: 25476 - RNA, 19 nt, synthetic construct
  source 1..19: mol_type = other RNA
gcattccacgacctggccc

SEQ ID NO: 25477 - RNA, 19 nt, synthetic construct
  source 1..19: mol_type = other RNA
tgaccaggcacactggggc

SEQ ID NO: 25478 - RNA, 19 nt, synthetic construct
  source 1..19: mol_type = other RNA
gcattccacgacctggccc

SEQ ID NO: 25479 - RNA, 19 nt, synthetic construct
  source 1..19: mol_type = other RNA
tgaccaggcacactggggc

SEQ ID NO: 25480 - RNA, 19 nt, synthetic construct
  source 1..19: mol_type = other RNA
gcattccacgacctggccc

SEQ ID NO: 25481 - RNA, 19 nt, synthetic construct
  source 1..19: mol_type = other RNA
tgaagaatgggcccggggg

SEQ ID NO: 25482 - RNA, 19 nt, synthetic construct
  source 1..19: mol_type = other RNA
gtggctgcactcccacctc

SEQ ID NO: 25483 - RNA, 19 nt, synthetic construct
  source 1..19: mol_type = other RNA
acacgcaggactggcagtt

SEQ ID NO: 25484 - RNA, 19 nt, synthetic construct
  source 1..19: mol_type = other RNA
cactggtgctgcatggcct

SEQ ID NO: 25485 - RNA, 19 nt, synthetic construct
  source 1..19: mol_type = other RNA
ggcgtgcagccacactcat

SEQ ID NO: 25486 - RNA, 19 nt, synthetic construct
  source 1..19: mol_type = other RNA
ggacgtcacagtgcacctt

SEQ ID NO: 25487 - RNA, 19 nt, synthetic construct
  source 1..19: mol_type = other RNA
tgcggctgtaaggcagctc

SEQ ID NO: 25488 - RNA, 19 nt, synthetic construct
  source 1..19: mol_type = other RNA
cgtagcagccacactgggc

SEQ ID NO: 25489 - RNA, 19 nt, synthetic construct
  source 1..19: mol_type = other RNA
tcaggcagttctcgttgtc

SEQ ID NO: 25490 - RNA, 19 nt, synthetic construct
  source 1..19: mol_type = other RNA
gtaggccacgcaggtgccc

SEQ ID NO: 25491 - RNA, 19 nt, synthetic construct
  source 1..19: mol_type = other RNA
cgacctggcccaactcccg

SEQ ID NO: 25492 - RNA, 19 nt, synthetic construct
  source 1..19: mol_type = other RNA
cgacctggcccaactcccg

SEQ ID NO: 25493 - RNA, 19 nt, synthetic construct
  source 1..19: mol_type = other RNA
cgacctggcccaactcccg

SEQ ID NO: 25494 - RNA, 19 nt, synthetic construct
  source 1..19: mol_type = other RNA
ggtagtgccactcacagcc

SEQ ID NO: 25495 - RNA, 19 nt, synthetic construct
  source 1..19: mol_type = other RNA
acctggcccaactcccgca

SEQ ID NO: 25496 - RNA, 19 nt, synthetic construct
  source 1..19: mol_type = other RNA
gacctggcccaactcccgc

SEQ ID NO: 25497 - RNA, 19 nt, synthetic construct
  source 1..19: mol_type = other RNA
cctcaaggctgtgagcgca

SEQ ID NO: 25498 - RNA, 19 nt, synthetic construct
  source 1..19: mol_type = other RNA
acctggcccaactcccgca

SEQ ID NO: 25499 - RNA, 19 nt, synthetic construct
  source 1..19: mol_type = other RNA
gacctggcccaactcccgc

SEQ ID NO: 25500 - RNA, 19 nt, synthetic construct
  source 1..19: mol_type = other RNA
ctcccgcagggggacacca

SEQ ID NO: 25501 - RNA, 19 nt, synthetic construct
  source 1..19: mol_type = other RNA
acctggcccaactcccgca

SEQ ID NO: 25502 - RNA, 19 nt, synthetic construct
  source 1..19: mol_type = other RNA
gacctggcccaactcccgc

SEQ ID NO: 25503 - RNA, 19 nt, synthetic construct
  source 1..19: mol_type = other RNA
ctcccgcagggggacacca

SEQ ID NO: 25504 - RNA, 19 nt, synthetic construct
  source 1..19: mol_type = other RNA
cctggagtggaggagggcg

SEQ ID NO: 25505 - RNA, 19 nt, synthetic construct
  source 1..19: mol_type = other RNA
ctcccgcagggggacacca

SEQ ID NO: 25506 - RNA, 19 nt, synthetic construct
  source 1..19: mol_type = other RNA
gaagaatgggcccgggggc

SEQ ID NO: 25507 - RNA, 19 nt, synthetic construct
  source 1..19: mol_type = other RNA
ggccgcacatctggccctg

SEQ ID NO: 25508 - RNA, 19 nt, synthetic construct
  source 1..19: mol_type = other RNA
aggagtcctcctcacagga

SEQ ID NO: 25509 - RNA, 19 nt, synthetic construct
  source 1..19: mol_type = other RNA
gaagtggccatccccgtag

SEQ ID NO: 25510 - RNA, 19 nt, synthetic construct
  source 1..19: mol_type = other RNA
gtcgtggagtgggggaccc

SEQ ID NO: 25511 - RNA, 19 nt, synthetic construct
  source 1..19: mol_type = other RNA
tgtagatgacgtcctggta

SEQ ID NO: 25512 - RNA, 19 nt, synthetic construct
  source 1..19: mol_type = other RNA
tcgtccctctggttgttgg

SEQ ID NO: 25513 - RNA, 19 nt, synthetic construct
  source 1..19: mol_type = other RNA
tcgtccccggagtggagga

SEQ ID NO: 25514 - RNA, 19 nt, synthetic construct
  source 1..19: mol_type = other RNA
ccacactgggccacgcact

SEQ ID NO: 25515 - RNA, 19 nt, synthetic construct
  source 1..19: mol_type = other RNA
tcgtccccggagtggagga

SEQ ID NO: 25516 - RNA, 19 nt, synthetic construct
  source 1..19: mol_type = other RNA
cccctgggacagtgggttc

SEQ ID NO: 25517 - RNA, 19 nt, synthetic construct
  source 1..19: mol_type = other RNA
tcgtccccggagtggagga

SEQ ID NO: 25518 - RNA, 19 nt, synthetic construct
  source 1..19: mol_type = other RNA
tcgtccccggagtggagga

SEQ ID NO: 25519 - RNA, 19 nt, synthetic construct
  source 1..19: mol_type = other RNA
gtccaaatgccctgcagaa

SEQ ID NO: 25520 - RNA, 19 nt, synthetic construct
  source 1..19: mol_type = other RNA
caggctctggcagggcacc

SEQ ID NO: 25521 - RNA, 19 nt, synthetic construct
  source 1..19: mol_type = other RNA
caggtggtgccggtggtcc

SEQ ID NO: 25522 - RNA, 19 nt, synthetic construct
  source 1..19: mol_type = other RNA
taccagctggaccagcggc

SEQ ID NO: 25523 - RNA, 19 nt, synthetic construct
  source 1..19: mol_type = other RNA
ggcagcggcacaggtcctg

SEQ ID NO: 25524 - RNA, 19 nt, synthetic construct
  source 1..19: mol_type = other RNA
ggctggccccccgcgtggg

SEQ ID NO: 25525 - RNA, 19 nt, synthetic construct
  source 1..19: mol_type = other RNA
aggggcactgcccgagggg

SEQ ID NO: 25526 - RNA, 19 nt, synthetic construct
  source 1..19: mol_type = other RNA
aggtgccagggcacggcag

SEQ ID NO: 25527 - RNA, 19 nt, synthetic construct
  source 1..19: mol_type = other RNA
gggtccagcctgacaaaca

SEQ ID NO: 25528 - RNA, 19 nt, synthetic construct
  source 1..19: mol_type = other RNA
ggcggggtccagcctgaca

SEQ ID NO: 25529 - RNA, 19 nt, synthetic construct
  source 1..19: mol_type = other RNA
gccgcacatctggccctgg

SEQ ID NO: 25530 - RNA, 19 nt, synthetic construct
  source 1..19: mol_type = other RNA
ggaggcactcggccccagg

SEQ ID NO: 25531 - RNA, 19 nt, synthetic construct
  source 1..19: mol_type = other RNA
ccgggggacagacacagcc

SEQ ID NO: 25532 - RNA, 19 nt, synthetic construct
  source 1..19: mol_type = other RNA
ggagcaggtggtgccggtg

SEQ ID NO: 25533 - RNA, 19 nt, synthetic construct
  source 1..19: mol_type = other RNA
agggtgccccgcagggctg

SEQ ID NO: 25534 - RNA, 19 nt, synthetic construct
  source 1..19: mol_type = other RNA
aggtttttaggcagggtgc

SEQ ID NO: 25535 - RNA, 19 nt, synthetic construct
  source 1..19: mol_type = other RNA
ggacatgccacagccttcc

SEQ ID NO: 25536 - RNA, 19 nt, synthetic construct
  source 1..19: mol_type = other RNA
gtaccagctggaccagcgg

SEQ ID NO: 25537 - RNA, 19 nt, synthetic construct
  source 1..19: mol_type = other RNA
ggtaccctctctgcctcag

SEQ ID NO: 25538 - RNA, 19 nt, synthetic construct
  source 1..19: mol_type = other RNA
gggacagtgggttctgtgg

SEQ ID NO: 25539 - RNA, 19 nt, synthetic construct
  source 1..19: mol_type = other RNA
ctgtaaagctggtagctgt

SEQ ID NO: 25540 - RNA, 19 nt, synthetic construct
  source 1..19: mol_type = other RNA
ccgtggccgtggtcctgga

SEQ ID NO: 25541 - RNA, 19 nt, synthetic construct
  source 1..19: mol_type = other RNA
gccgtggccgtggtcctgg

SEQ ID NO: 25542 - RNA, 19 nt, synthetic construct
  source 1..19: mol_type = other RNA
ggccgtggccgtggtcctg

SEQ ID NO: 25543 - RNA, 19 nt, synthetic construct
  source 1..19: mol_type = other RNA
tggccgtggccgtggtcct

SEQ ID NO: 25544 - RNA, 19 nt, synthetic construct
  source 1..19: mol_type = other RNA
ctgtaaagctggtagctgt

SEQ ID NO: 25545 - RNA, 19 nt, synthetic construct
  source 1..19: mol_type = other RNA
ccgtggccgtggtcctgga

SEQ ID NO: 25546 - RNA, 19 nt, synthetic construct
  source 1..19: mol_type = other RNA
gccgtggccgtggtcctgg

SEQ ID NO: 25547 - RNA, 19 nt, synthetic construct
  source 1..19: mol_type = other RNA
ggccgtggccgtggtcctg

SEQ ID NO: 25548 - RNA, 19 nt, synthetic construct
  source 1..19: mol_type = other RNA
tggccgtggccgtggtcct

SEQ ID NO: 25549 - RNA, 19 nt, synthetic construct
  source 1..19: mol_type = other RNA
ctgtaaagctggtagctgt

SEQ ID NO: 25550 - RNA, 19 nt, synthetic construct
  source 1..19: mol_type = other RNA
tttgatgggcaggtgcttg

SEQ ID NO: 25551 - RNA, 19 nt, synthetic construct
  source 1..19: mol_type = other RNA
ccaggctctggcagggcac

SEQ ID NO: 25552 - RNA, 19 nt, synthetic construct
  source 1..19: mol_type = other RNA
gaggctccccctgcagctg

SEQ ID NO: 25553 - RNA, 19 nt, synthetic construct
  source 1..19: mol_type = other RNA
gcaggtggtggtacctggg

SEQ ID NO: 25554 - RNA, 19 nt, synthetic construct
  source 1..19: mol_type = other RNA
caggtgcccaggcagagcc

SEQ ID NO: 25555 - RNA, 19 nt, synthetic construct
  source 1..19: mol_type = other RNA
ttgtcacagccaggggcag

SEQ ID NO: 25556 - RNA, 19 nt, synthetic construct
  source 1..19: mol_type = other RNA
gggggacagacacagccgg

SEQ ID NO: 25557 - RNA, 19 nt, synthetic construct
  source 1..19: mol_type = other RNA
ccggacacgcagtgtgtgc

SEQ ID NO: 25558 - RNA, 19 nt, synthetic construct
  source 1..19: mol_type = other RNA
gacaccaggctgggcctgg

SEQ ID NO: 25559 - RNA, 19 nt, synthetic construct
  source 1..19: mol_type = other RNA
gacaccaggctgggcctgg

SEQ ID NO: 25560 - RNA, 19 nt, synthetic construct
  source 1..19: mol_type = other RNA
gacaccaggctgggcctgg

SEQ ID NO: 25561 - RNA, 19 nt, synthetic construct
  source 1..19: mol_type = other RNA
gacaccaggctgggcctgg

SEQ ID NO: 25562 - RNA, 19 nt, synthetic construct
  source 1..19: mol_type = other RNA
agacagtcgtccctctggt

SEQ ID NO: 25563 - RNA, 19 nt, synthetic construct
  source 1..19: mol_type = other RNA
acggaccggctacgcgtgg

SEQ ID NO: 25564 - RNA, 19 nt, synthetic construct
  source 1..19: mol_type = other RNA
tggcgttgtgggcatagaa

SEQ ID NO: 25565 - RNA, 19 nt, synthetic construct
  source 1..19: mol_type = other RNA
gtggttccgtcccgctgga

SEQ ID NO: 25566 - RNA, 19 nt, synthetic construct
  source 1..19: mol_type = other RNA
cagaagggcgtgcagccac

SEQ ID NO: 25567 - RNA, 19 nt, synthetic construct
  source 1..19: mol_type = other RNA
gagccaacaccagcgtccg

SEQ ID NO: 25568 - RNA, 19 nt, synthetic construct
  source 1..19: mol_type = other RNA
ccaccacggaccggctacg

SEQ ID NO: 25569 - RNA, 19 nt, synthetic construct
  source 1..19: mol_type = other RNA
acagtcgtccctctggttg

SEQ ID NO: 25570 - RNA, 19 nt, synthetic construct
  source 1..19: mol_type = other RNA
gaggacacagtggacacgc

SEQ ID NO: 25571 - RNA, 19 nt, synthetic construct
  source 1..19: mol_type = other RNA
ggttgagcagagggggctt

SEQ ID NO: 25572 - RNA, 19 nt, synthetic construct
  source 1..19: mol_type = other RNA
cggaccggctacgcgtggc

SEQ ID NO: 25573 - RNA, 19 nt, synthetic construct
  source 1..19: mol_type = other RNA
atgcggtcacagtccacct

SEQ ID NO: 25574 - RNA, 19 nt, synthetic construct
  source 1..19: mol_type = other RNA
gtccgacactttgatgggc

SEQ ID NO: 25575 - RNA, 19 nt, synthetic construct
  source 1..19: mol_type = other RNA
ggtccgacactttgatggg

SEQ ID NO: 25576 - RNA, 19 nt, synthetic construct
  source 1..19: mol_type = other RNA
gaagggcgtgcagccacac

SEQ ID NO: 25577 - RNA, 19 nt, synthetic construct
  source 1..19: mol_type = other RNA
ttgttccagggcgtcccag

SEQ ID NO: 25578 - RNA, 19 nt, synthetic construct
  source 1..19: mol_type = other RNA
ctgtgaggatccaggtggt

SEQ ID NO: 25579 - RNA, 19 nt, synthetic construct
  source 1..19: mol_type = other RNA
ctgtgaggatccaggtggt

SEQ ID NO: 25580 - RNA, 19 nt, synthetic construct
  source 1..19: mol_type = other RNA
ctgtgaggatccaggtggt

SEQ ID NO: 25581 - RNA, 19 nt, synthetic construct
  source 1..19: mol_type = other RNA
ctgtgaggatccaggtggt

SEQ ID NO: 25582 - RNA, 19 nt, synthetic construct
  source 1..19: mol_type = other RNA
ctgtgaggatccaggtggt

SEQ ID NO: 25583 - RNA, 19 nt, synthetic construct
  source 1..19: mol_type = other RNA
ctgtgaggatccaggtggt

SEQ ID NO: 25584 - RNA, 19 nt, synthetic construct
  source 1..19: mol_type = other RNA
tccaggtggacagagcatg

SEQ ID NO: 25585 - RNA, 19 nt, synthetic construct
  source 1..19: mol_type = other RNA
ggctcgggtccgacacttt

SEQ ID NO: 25586 - RNA, 19 nt, synthetic construct
  source 1..19: mol_type = other RNA
ctcgggtccgacactttga

SEQ ID NO: 25587 - RNA, 19 nt, synthetic construct
  source 1..19: mol_type = other RNA
ttccagggcgtcccagtga

SEQ ID NO: 25588 - RNA, 19 nt, synthetic construct
  source 1..19: mol_type = other RNA
gctccaggtggacagagca

SEQ ID NO: 25589 - RNA, 19 nt, synthetic construct
  source 1..19: mol_type = other RNA
cggatttcatagttgaagc

SEQ ID NO: 25590 - RNA, 19 nt, synthetic construct
  source 1..19: mol_type = other RNA
cggatttcatagttgaagc

SEQ ID NO: 25591 - RNA, 19 nt, synthetic construct
  source 1..19: mol_type = other RNA
cggatttcatagttgaagc

SEQ ID NO: 25592 - RNA, 19 nt, synthetic construct
  source 1..19: mol_type = other RNA
cggatttcatagttgaagc

SEQ ID NO: 25593 - RNA, 19 nt, synthetic construct
  source 1..19: mol_type = other RNA
ttgcctggaccagcctgtc

SEQ ID NO: 25594 - RNA, 19 nt, synthetic construct
  source 1..19: mol_type = other RNA
agaagggcgtgcagccaca

SEQ ID NO: 25595 - RNA, 19 nt, synthetic construct
  source 1..19: mol_type = other RNA
ccaacaccagcgtccggca

SEQ ID NO: 25596 - RNA, 19 nt, synthetic construct
  source 1..19: mol_type = other RNA
ggtcgtccctggagtggag

SEQ ID NO: 25597 - RNA, 19 nt, synthetic construct
  source 1..19: mol_type = other RNA
gcacactccccgggcgcgg

SEQ ID NO: 25598 - RNA, 19 nt, synthetic construct
  source 1..19: mol_type = other RNA
caggtggacagagcatggg

SEQ ID NO: 25599 - RNA, 19 nt, synthetic construct
  source 1..19: mol_type = other RNA
gaggaggacacagtggaca

SEQ ID NO: 25600 - RNA, 19 nt, synthetic construct
  source 1..19: mol_type = other RNA
agccaacaccagcgtccgg

SEQ ID NO: 25601 - RNA, 19 nt, synthetic construct
  source 1..19: mol_type = other RNA
agagccaacaccagcgtcc

SEQ ID NO: 25602 - RNA, 19 nt, synthetic construct
  source 1..19: mol_type = other RNA
cagagccaacaccagcgtc

SEQ ID NO: 25603 - RNA, 19 nt, synthetic construct
  source 1..19: mol_type = other RNA
cgtgtggcagctccggagg

SEQ ID NO: 25604 - RNA, 19 nt, synthetic construct
  source 1..19: mol_type = other RNA
aggtcgtccctggagtgga

SEQ ID NO: 25605 - RNA, 19 nt, synthetic construct
  source 1..19: mol_type = other RNA
cactttggtgggtgggcag

SEQ ID NO: 25606 - RNA, 19 nt, synthetic construct
  source 1..19: mol_type = other RNA
tggctccaggtggacagag

SEQ ID NO: 25607 - RNA, 19 nt, synthetic construct
  source 1..19: mol_type = other RNA
aggatccaggtggtccctg

SEQ ID NO: 25608 - RNA, 19 nt, synthetic construct
  source 1..19: mol_type = other RNA
aggatccaggtggtccctg

SEQ ID NO: 25609 - RNA, 19 nt, synthetic construct
  source 1..19: mol_type = other RNA
aggatccaggtggtccctg

SEQ ID NO: 25610 - RNA, 19 nt, synthetic construct
  source 1..19: mol_type = other RNA
aggatccaggtggtccctg

SEQ ID NO: 25611 - RNA, 19 nt, synthetic construct
  source 1..19: mol_type = other RNA
aggatccaggtggtccctg

SEQ ID NO: 25612 - RNA, 19 nt, synthetic construct
  source 1..19: mol_type = other RNA
aggatccaggtggtccctg

SEQ ID NO: 25613 - RNA, 19 nt, synthetic construct
  source 1..19: mol_type = other RNA
gcgtgtggcagctccggag

SEQ ID NO: 25614 - RNA, 19 nt, synthetic construct
  source 1..19: mol_type = other RNA
tgttccagggcgtcccagt

SEQ ID NO: 25615 - RNA, 19 nt, synthetic construct
  source 1..19: mol_type = other RNA
gtgtggcagctccggaggc

SEQ ID NO: 25616 - RNA, 19 nt, synthetic construct
  source 1..19: mol_type = other RNA
acacagaagggcgtgcagc

SEQ ID NO: 25617 - RNA, 19 nt, synthetic construct
  source 1..19: mol_type = other RNA
tttcatagttgaagcacat

SEQ ID NO: 25618 - RNA, 19 nt, synthetic construct
  source 1..19: mol_type = other RNA
tttcatagttgaagcacat

SEQ ID NO: 25619 - RNA, 19 nt, synthetic construct
  source 1..19: mol_type = other RNA
tttggaactggtggctgtg

SEQ ID NO: 25620 - RNA, 19 nt, synthetic construct
  source 1..19: mol_type = other RNA
tttcatagttgaagcacat

SEQ ID NO: 25621 - RNA, 19 nt, synthetic construct
  source 1..19: mol_type = other RNA
tttcatagttgaagcacat

SEQ ID NO: 25622 - RNA, 19 nt, synthetic construct
  source 1..19: mol_type = other RNA
tttggaactggtggctgtg

SEQ ID NO: 25623 - RNA, 19 nt, synthetic construct
  source 1..19: mol_type = other RNA
gtcgtccccagagtggagg

SEQ ID NO: 25624 - RNA, 19 nt, synthetic construct
  source 1..19: mol_type = other RNA
gagcatggggatggaggca

SEQ ID NO: 25625 - RNA, 19 nt, synthetic construct
  source 1..19: mol_type = other RNA
aaaggggtcctgctggccc

SEQ ID NO: 25626 - RNA, 19 nt, synthetic construct
  source 1..19: mol_type = other RNA
ggtggccgtggtggtaagc

SEQ ID NO: 25627 - RNA, 19 nt, synthetic construct
  source 1..19: mol_type = other RNA
ggtggccgtggtggtaagc

SEQ ID NO: 25628 - RNA, 19 nt, synthetic construct
  source 1..19: mol_type = other RNA
ctgggccttgatgacaaca

SEQ ID NO: 25629 - RNA, 19 nt, synthetic construct
  source 1..19: mol_type = other RNA
gcgtagttctcattctcca

SEQ ID NO: 25630 - RNA, 19 nt, synthetic construct
  source 1..19: mol_type = other RNA
cttgatgacaacacgggtg

SEQ ID NO: 25631 - RNA, 19 nt, synthetic construct
  source 1..19: mol_type = other RNA
ggacagggctggagtcgag

SEQ ID NO: 25632 - RNA, 19 nt, synthetic construct
  source 1..19: mol_type = other RNA
ggacagggctggagtcgag

SEQ ID NO: 25633 - RNA, 19 nt, synthetic construct
  source 1..19: mol_type = other RNA
ggacagggctggagtcgag

SEQ ID NO: 25634 - RNA, 19 nt, synthetic construct
  source 1..19: mol_type = other RNA
tggacgagctgggaaccgt

SEQ ID NO: 25635 - RNA, 19 nt, synthetic construct
  source 1..19: mol_type = other RNA
agttctcattctccacact

SEQ ID NO: 25636 - RNA, 19 nt, synthetic construct
  source 1..19: mol_type = other RNA
gccgtggtggtaagcactg

SEQ ID NO: 25637 - RNA, 19 nt, synthetic construct
  source 1..19: mol_type = other RNA
gccgtggtggtaagcactg

SEQ ID NO: 25638 - RNA, 19 nt, synthetic construct
  source 1..19: mol_type = other RNA
actcatagtggaagtcaca

SEQ ID NO: 25639 - RNA, 19 nt, synthetic construct
  source 1..19: mol_type = other RNA
ccgccgtgggtgcaggggc

SEQ ID NO: 25640 - RNA, 19 nt, synthetic construct
  source 1..19: mol_type = other RNA
gacgagctgggaaccgtgg

SEQ ID NO: 25641 - RNA, 19 nt, synthetic construct
  source 1..19: mol_type = other RNA
ggacgagctgggaaccgtg

SEQ ID NO: 25642 - RNA, 19 nt, synthetic construct
  source 1..19: mol_type = other RNA
gtggtagtcagcactttgg

SEQ ID NO: 25643 - RNA, 19 nt, synthetic construct
  source 1..19: mol_type = other RNA
ttcggttgctgtggtctgg

SEQ ID NO: 25644 - RNA, 19 nt, synthetic construct
  source 1..19: mol_type = other RNA
ccctgggccttgatgacaa

SEQ ID NO: 25645 - RNA, 19 nt, synthetic construct
  source 1..19: mol_type = other RNA
ggtgcggccgccgtgggtg

SEQ ID NO: 25646 - RNA, 19 nt, synthetic construct
  source 1..19: mol_type = other RNA
agtcacagggctggctcgg

SEQ ID NO: 25647 - RNA, 19 nt, synthetic construct
  source 1..19: mol_type = other RNA
gtgtgagctgttcctgggg

SEQ ID NO: 25648 - RNA, 19 nt, synthetic construct
  source 1..19: mol_type = other RNA
gtgtgagctgttcctgggg

SEQ ID NO: 25649 - RNA, 19 nt, synthetic construct
  source 1..19: mol_type = other RNA
gtgtgagctgttcctgggg

SEQ ID NO: 25650 - RNA, 19 nt, synthetic construct
  source 1..19: mol_type = other RNA
gtgtgagctgttcctgggg

SEQ ID NO: 25651 - RNA, 19 nt, synthetic construct
  source 1..19: mol_type = other RNA
gtgtgagctgttcctgggg

SEQ ID NO: 25652 - RNA, 19 nt, synthetic construct
  source 1..19: mol_type = other RNA
agtggccgtagttgcagca

SEQ ID NO: 25653 - RNA, 19 nt, synthetic construct
  source 1..19: mol_type = other RNA
agtggccgtagttgcagca

SEQ ID NO: 25654 - RNA, 19 nt, synthetic construct
  source 1..19: mol_type = other RNA
agtggccgtagttgcagca

SEQ ID NO: 25655 - RNA, 19 nt, synthetic construct
  source 1..19: mol_type = other RNA
agtggccgtagttgcagca

SEQ ID NO: 25656 - RNA, 19 nt, synthetic construct
  source 1..19: mol_type = other RNA
ggtcggtcttattgtagat

SEQ ID NO: 25657 - RNA, 19 nt, synthetic construct
  source 1..19: mol_type = other RNA
cgttgtccgtcaggccgca

SEQ ID NO: 25658 - RNA, 19 nt, synthetic construct
  source 1..19: mol_type = other RNA
ggtggccgtgatcgtagtg

SEQ ID NO: 25659 - RNA, 19 nt, synthetic construct
  source 1..19: mol_type = other RNA
ggtggccgtgatcgtagtg

SEQ ID NO: 25660 - RNA, 19 nt, synthetic construct
  source 1..19: mol_type = other RNA
ggtggccgtgatcgtagtg

SEQ ID NO: 25661 - RNA, 19 nt, synthetic construct
  source 1..19: mol_type = other RNA
ggtggccgtgatcgtagtg

SEQ ID NO: 25662 - RNA, 19 nt, synthetic construct
  source 1..19: mol_type = other RNA
tgcaccgacactgaaccct

SEQ ID NO: 25663 - RNA, 19 nt, synthetic construct
  source 1..19: mol_type = other RNA
gttgtccgtcaggccgcac

SEQ ID NO: 25664 - RNA, 19 nt, synthetic construct
  source 1..19: mol_type = other RNA
tcaaggggctcattgtcgt

SEQ ID NO: 25665 - RNA, 19 nt, synthetic construct
  source 1..19: mol_type = other RNA
gagtgttggcgccaggctc

SEQ ID NO: 25666 - RNA, 19 nt, synthetic construct
  source 1..19: mol_type = other RNA
accagtgcgtggcactccg

SEQ ID NO: 25667 - RNA, 19 nt, synthetic construct
  source 1..19: mol_type = other RNA
acatcagcccccgcatgcg

SEQ ID NO: 25668 - RNA, 19 nt, synthetic construct
  source 1..19: mol_type = other RNA
ggatccagtggactcagtc

SEQ ID NO: 25669 - RNA, 19 nt, synthetic construct
  source 1..19: mol_type = other RNA
ggatccagtggactcagtc

SEQ ID NO: 25670 - RNA, 19 nt, synthetic construct
  source 1..19: mol_type = other RNA
tgctcggggtcacccatag

SEQ ID NO: 25671 - RNA, 19 nt, synthetic construct
  source 1..19: mol_type = other RNA
ggaaagggctggagtcgag

SEQ ID NO: 25672 - RNA, 19 nt, synthetic construct
  source 1..19: mol_type = other RNA
gagccggtggccccggttg

SEQ ID NO: 25673 - RNA, 19 nt, synthetic construct
  source 1..19: mol_type = other RNA
ctgatccacactggaagcg

SEQ ID NO: 25674 - RNA, 19 nt, synthetic construct
  source 1..19: mol_type = other RNA
gagccggtggccccggttg

SEQ ID NO: 25675 - RNA, 19 nt, synthetic construct
  source 1..19: mol_type = other RNA
caggaatgtccacacgcat

SEQ ID NO: 25676 - RNA, 19 nt, synthetic construct
  source 1..19: mol_type = other RNA
gcccccatgtgggttgtag

SEQ ID NO: 25677 - RNA, 19 nt, synthetic construct
  source 1..19: mol_type = other RNA
ggaggagggcatggccgta

SEQ ID NO: 25678 - RNA, 19 nt, synthetic construct
  source 1..19: mol_type = other RNA
ggaggagggcatggccgta

SEQ ID NO: 25679 - RNA, 19 nt, synthetic construct
  source 1..19: mol_type = other RNA
ccagtggactcagtcgtag

SEQ ID NO: 25680 - RNA, 19 nt, synthetic construct
  source 1..19: mol_type = other RNA
ccagtggactcagtcgtag

SEQ ID NO: 25681 - RNA, 19 nt, synthetic construct
  source 1..19: mol_type = other RNA
gcatggggtagctgtagtc

SEQ ID NO: 25682 - RNA, 19 nt, synthetic construct
  source 1..19: mol_type = other RNA
gcatggggtagctgtagtc

SEQ ID NO: 25683 - RNA, 19 nt, synthetic construct
  source 1..19: mol_type = other RNA
gcatggggtagctgtagtc

SEQ ID NO: 25684 - RNA, 19 nt, synthetic construct
  source 1..19: mol_type = other RNA
gcatggggtagctgtagtc

SEQ ID NO: 25685 - RNA, 19 nt, synthetic construct
  source 1..19: mol_type = other RNA
tgaggacggagccgttgga

SEQ ID NO: 25686 - RNA, 19 nt, synthetic construct
  source 1..19: mol_type = other RNA
cacggcactcgaggcccag

SEQ ID NO: 25687 - RNA, 19 nt, synthetic construct
  source 1..19: mol_type = other RNA
cacggcactcgaggcccag

SEQ ID NO: 25688 - RNA, 19 nt, synthetic construct
  source 1..19: mol_type = other RNA
cacggcactcgaggcccag

SEQ ID NO: 25689 - RNA, 19 nt, synthetic construct
  source 1..19: mol_type = other RNA
cacggcactcgaggcccag

SEQ ID NO: 25690 - RNA, 19 nt, synthetic construct
  source 1..19: mol_type = other RNA
gcgtatcttgtagggtggg

SEQ ID NO: 25691 - RNA, 19 nt, synthetic construct
  source 1..19: mol_type = other RNA
gccgaagtggacgtcacag

SEQ ID NO: 25692 - RNA, 19 nt, synthetic construct
  source 1..19: mol_type = other RNA
gcgatcaagcaggcgccaa

SEQ ID NO: 25693 - RNA, 19 nt, synthetic construct
  source 1..19: mol_type = other RNA
cgtcggggcaccgccatcc

SEQ ID NO: 25694 - RNA, 19 nt, synthetic construct
  source 1..19: mol_type = other RNA
gcgtgcgtgccgtccctgg

SEQ ID NO: 25695 - RNA, 19 nt, synthetic construct
  source 1..19: mol_type = other RNA
gcgtgcgtgccgtccctgg

SEQ ID NO: 25696 - RNA, 19 nt, synthetic construct
  source 1..19: mol_type = other RNA
aatccgtgctgcgcgggcg

SEQ ID NO: 25697 - RNA, 19 nt, synthetic construct
  source 1..19: mol_type = other RNA
cgatcaagcaggcgccaag

SEQ ID NO: 25698 - RNA, 19 nt, synthetic construct
  source 1..19: mol_type = other RNA
tgatgcggacttgacagga

SEQ ID NO: 25699 - RNA, 19 nt, synthetic construct
  source 1..19: mol_type = other RNA
caccgccttaaaggtcccc

SEQ ID NO: 25700 - RNA, 19 nt, synthetic construct
  source 1..19: mol_type = other RNA
acgtcttggccatgtcctt

SEQ ID NO: 25701 - RNA, 19 nt, synthetic construct
  source 1..19: mol_type = other RNA
cccaagctccccgtcgtcc

SEQ ID NO: 25702 - RNA, 19 nt, synthetic construct
  source 1..19: mol_type = other RNA
taaaggtcccctcttggag

SEQ ID NO: 25703 - RNA, 19 nt, synthetic construct
  source 1..19: mol_type = other RNA
caggtcgtccccggagtgg

SEQ ID NO: 25704 - RNA, 19 nt, synthetic construct
  source 1..19: mol_type = other RNA
caggtcgtccccggagtgg

SEQ ID NO: 25705 - RNA, 19 nt, synthetic construct
  source 1..19: mol_type = other RNA
caggtcgtccccggagtgg

SEQ ID NO: 25706 - RNA, 19 nt, synthetic construct
  source 1..19: mol_type = other RNA
caggtcgtccccggagtgg

SEQ ID NO: 25707 - RNA, 19 nt, synthetic construct
  source 1..19: mol_type = other RNA
cttgcaactggcggcagtg

SEQ ID NO: 25708 - RNA, 19 nt, synthetic construct
  source 1..19: mol_type = other RNA
tgacattgcaccgttgggt

SEQ ID NO: 25709 - RNA, 19 nt, synthetic construct
  source 1..19: mol_type = other RNA
tgtaggtcctgtcctcata

SEQ ID NO: 25710 - RNA, 19 nt, synthetic construct
  source 1..19: mol_type = other RNA
aggaacacgccgccgtccg

SEQ ID NO: 25711 - RNA, 19 nt, synthetic construct
  source 1..19: mol_type = other RNA
ctcggggtcacccataggg

SEQ ID NO: 25712 - RNA, 19 nt, synthetic construct
  source 1..19: mol_type = other RNA
cagccgtccacaggcacga

SEQ ID NO: 25713 - RNA, 19 nt, synthetic construct
  source 1..19: mol_type = other RNA
cggctctttggaagcggtg

SEQ ID NO: 25714 - RNA, 19 nt, synthetic construct
  source 1..19: mol_type = other RNA
ctcagtgctggaagggcgg

SEQ ID NO: 25715 - RNA, 19 nt, synthetic construct
  source 1..19: mol_type = other RNA
ctcagtgctggaagggcgg

SEQ ID NO: 25716 - RNA, 19 nt, synthetic construct
  source 1..19: mol_type = other RNA
ggagggcgtggccgtagag

SEQ ID NO: 25717 - RNA, 19 nt, synthetic construct
  source 1..19: mol_type = other RNA
ctcagtgctggaagggcgg

SEQ ID NO: 25718 - RNA, 19 nt, synthetic construct
  source 1..19: mol_type = other RNA
ggagggcgtggccgtagag

SEQ ID NO: 25719 - RNA, 19 nt, synthetic construct
  source 1..19: mol_type = other RNA
ctcagtgctggaagggcgg

SEQ ID NO: 25720 - RNA, 19 nt, synthetic construct
  source 1..19: mol_type = other RNA
caccatcacggtggctata

SEQ ID NO: 25721 - RNA, 19 nt, synthetic construct
  source 1..19: mol_type = other RNA
cagatgcccatgtgtgcgt

SEQ ID NO: 25722 - RNA, 19 nt, synthetic construct
  source 1..19: mol_type = other RNA
cagtagtcctgggccaaga

SEQ ID NO: 25723 - RNA, 19 nt, synthetic construct
  source 1..19: mol_type = other RNA
gctcggggtcacccatagg

SEQ ID NO: 25724 - RNA, 19 nt, synthetic construct
  source 1..19: mol_type = other RNA
gatgctcggggtcacccat

SEQ ID NO: 25725 - RNA, 19 nt, synthetic construct
  source 1..19: mol_type = other RNA
gcctgggcacggcactcga

SEQ ID NO: 25726 - RNA, 19 nt, synthetic construct
  source 1..19: mol_type = other RNA
gcctgggcacggcactcga

SEQ ID NO: 25727 - RNA, 19 nt, synthetic construct
  source 1..19: mol_type = other RNA
gcctgggcacggcactcga

SEQ ID NO: 25728 - RNA, 19 nt, synthetic construct
  source 1..19: mol_type = other RNA
gcctgggcacggcactcga

SEQ ID NO: 25729 - RNA, 19 nt, synthetic construct
  source 1..19: mol_type = other RNA
tgagggccgccgtcgaccg

SEQ ID NO: 25730 - RNA, 19 nt, synthetic construct
  source 1..19: mol_type = other RNA
ctcggctctgtgaggatcc

SEQ ID NO: 25731 - RNA, 19 nt, synthetic construct
  source 1..19: mol_type = other RNA
ctcggctctgtgaggatcc

SEQ ID NO: 25732 - RNA, 19 nt, synthetic construct
  source 1..19: mol_type = other RNA
ctcggctctgtgaggatcc

SEQ ID NO: 25733 - RNA, 19 nt, synthetic construct
  source 1..19: mol_type = other RNA
ctcggctctgtgaggatcc

SEQ ID NO: 25734 - RNA, 19 nt, synthetic construct
  source 1..19: mol_type = other RNA
cagggcacgtattcgcagc

SEQ ID NO: 25735 - RNA, 19 nt, synthetic construct
  source 1..19: mol_type = other RNA
ccggtttcacccacggggt

SEQ ID NO: 25736 - RNA, 19 nt, synthetic construct
  source 1..19: mol_type = other RNA
cgtcgtccctggaagggct

SEQ ID NO: 25737 - RNA, 19 nt, synthetic construct
  source 1..19: mol_type = other RNA
ggttgcggtcgtagtggct

SEQ ID NO: 25738 - RNA, 19 nt, synthetic construct
  source 1..19: mol_type = other RNA
gacattgcaccgttgggtc

SEQ ID NO: 25739 - RNA, 19 nt, synthetic construct
  source 1..19: mol_type = other RNA
acgctggtcttccggtccc

SEQ ID NO: 25740 - RNA, 19 nt, synthetic construct
  source 1..19: mol_type = other RNA
gatccacactggaggcgtg

SEQ ID NO: 25741 - RNA, 19 nt, synthetic construct
  source 1..19: mol_type = other RNA
gatccacactggaggcgtg

SEQ ID NO: 25742 - RNA, 19 nt, synthetic construct
  source 1..19: mol_type = other RNA
gatccacactggaggcgtg

SEQ ID NO: 25743 - RNA, 19 nt, synthetic construct
  source 1..19: mol_type = other RNA
tgggtccagcaggacgaca

SEQ ID NO: 25744 - RNA, 19 nt, synthetic construct
  source 1..19: mol_type = other RNA
cgtcccctgcagtggtcgt

SEQ ID NO: 25745 - RNA, 19 nt, synthetic construct
  source 1..19: mol_type = other RNA
cactgcaccgacactgaac

SEQ ID NO: 25746 - RNA, 19 nt, synthetic construct
  source 1..19: mol_type = other RNA
agtggactcagtcgtagtg

SEQ ID NO: 25747 - RNA, 19 nt, synthetic construct
  source 1..19: mol_type = other RNA
agtggactcagtcgtagtg

SEQ ID NO: 25748 - RNA, 19 nt, synthetic construct
  source 1..19: mol_type = other RNA
acgaaggaaacgctgcagg

SEQ ID NO: 25749 - RNA, 19 nt, synthetic construct
  source 1..19: mol_type = other RNA
gagcgtgttggaagggtgg

SEQ ID NO: 25750 - RNA, 19 nt, synthetic construct
  source 1..19: mol_type = other RNA
agcgtgcgtgccgtccctg

SEQ ID NO: 25751 - RNA, 19 nt, synthetic construct
  source 1..19: mol_type = other RNA
ggcgtgcgtgccgtccctg

SEQ ID NO: 25752 - RNA, 19 nt, synthetic construct
  source 1..19: mol_type = other RNA
gtcaccgtggaacctctgg

SEQ ID NO: 25753 - RNA, 19 nt, synthetic construct
  source 1..19: mol_type = other RNA
cacctcaaggcggcccctg

SEQ ID NO: 25754 - RNA, 19 nt, synthetic construct
  source 1..19: mol_type = other RNA
taccaagggtgcttgtgta

SEQ ID NO: 25755 - RNA, 19 nt, synthetic construct
  source 1..19: mol_type = other RNA
cattcacctgccggagagg

SEQ ID NO: 25756 - RNA, 19 nt, synthetic construct
  source 1..19: mol_type = other RNA
cacatgcttagtttgttcc

SEQ ID NO: 25757 - RNA, 19 nt, synthetic construct
  source 1..19: mol_type = other RNA
gcgtatttgggatccagct

SEQ ID NO: 25758 - RNA, 19 nt, synthetic construct
  source 1..19: mol_type = other RNA
aggcgtgcgtgccgtccct

SEQ ID NO: 25759 - RNA, 19 nt, synthetic construct
  source 1..19: mol_type = other RNA
ctcgtccgtgcagttgccg

SEQ ID NO: 25760 - RNA, 19 nt, synthetic construct
  source 1..19: mol_type = other RNA
tagtttccgtccttgtcgt

SEQ ID NO: 25761 - RNA, 19 nt, synthetic construct
  source 1..19: mol_type = other RNA
gtgcgtcccccaccacgga

SEQ ID NO: 25762 - RNA, 19 nt, synthetic construct
  source 1..19: mol_type = other RNA
gtaggcgtagcgctgggac

SEQ ID NO: 25763 - RNA, 19 nt, synthetic construct
  source 1..19: mol_type = other RNA
gggggagtaccactggtct

SEQ ID NO: 25764 - RNA, 19 nt, synthetic construct
  source 1..19: mol_type = other RNA
gggggagtaccactggtct

SEQ ID NO: 25765 - RNA, 19 nt, synthetic construct
  source 1..19: mol_type = other RNA
gggggagtaccactggtct

SEQ ID NO: 25766 - RNA, 19 nt, synthetic construct
  source 1..19: mol_type = other RNA
gggggagtaccactggtct

SEQ ID NO: 25767 - RNA, 19 nt, synthetic construct
  source 1..19: mol_type = other RNA
gggggagtaccactggtct

SEQ ID NO: 25768 - RNA, 19 nt, synthetic construct
  source 1..19: mol_type = other RNA
gacctcgcggacacacacg

SEQ ID NO: 25769 - RNA, 19 nt, synthetic construct
  source 1..19: mol_type = other RNA
agcgggggactctgttggc

SEQ ID NO: 25770 - RNA, 19 nt, synthetic construct
  source 1..19: mol_type = other RNA
gtcgagtgctgggtggtac

SEQ ID NO: 25771 - RNA, 19 nt, synthetic construct
  source 1..19: mol_type = other RNA
gtcgagtgctgggtggtac

SEQ ID NO: 25772 - RNA, 19 nt, synthetic construct
  source 1..19: mol_type = other RNA
gtcgagtgctgggtggtac

SEQ ID NO: 25773 - RNA, 19 nt, synthetic construct
  source 1..19: mol_type = other RNA
tcggtcttattgtagatga

SEQ ID NO: 25774 - RNA, 19 nt, synthetic construct
  source 1..19: mol_type = other RNA
caggcgcgagcaccagtgc

SEQ ID NO: 25775 - RNA, 19 nt, synthetic construct
  source 1..19: mol_type = other RNA
agttgaggaacacgccgcc

SEQ ID NO: 25776 - RNA, 19 nt, synthetic construct
  source 1..19: mol_type = other RNA
gccgcggcaagtgggctgg

SEQ ID NO: 25777 - RNA, 19 nt, synthetic construct
  source 1..19: mol_type = other RNA
gcccaagctccccgtcgtc

SEQ ID NO: 25778 - RNA, 19 nt, synthetic construct
  source 1..19: mol_type = other RNA
caaccccgtagaaggtgcc

SEQ ID NO: 25779 - RNA, 19 nt, synthetic construct
  source 1..19: mol_type = other RNA
aagggcggttgcagtccct

SEQ ID NO: 25780 - RNA, 19 nt, synthetic construct
  source 1..19: mol_type = other RNA
gactcagtcgtagtggctg

SEQ ID NO: 25781 - RNA, 19 nt, synthetic construct
  source 1..19: mol_type = other RNA
aagggcggttgcagtccct

SEQ ID NO: 25782 - RNA, 19 nt, synthetic construct
  source 1..19: mol_type = other RNA
aagggcggttgcagtccct

SEQ ID NO: 25783 - RNA, 19 nt, synthetic construct
  source 1..19: mol_type = other RNA
gactcagtcgtagtggctg

SEQ ID NO: 25784 - RNA, 19 nt, synthetic construct
  source 1..19: mol_type = other RNA
aagggcggttgcagtccct

SEQ ID NO: 25785 - RNA, 19 nt, synthetic construct
  source 1..19: mol_type = other RNA
cgccctcccgaaaggggtc

SEQ ID NO: 25786 - RNA, 19 nt, synthetic construct
  source 1..19: mol_type = other RNA
cgaaggaaacgctgcaggt

SEQ ID NO: 25787 - RNA, 19 nt, synthetic construct
  source 1..19: mol_type = other RNA
gtgcctgtcgggcgagctc

SEQ ID NO: 25788 - RNA, 19 nt, synthetic construct
  source 1..19: mol_type = other RNA
aggtcgtccccggagtgga

SEQ ID NO: 25789 - RNA, 19 nt, synthetic construct
  source 1..19: mol_type = other RNA
atccccatgtagcgtatct

SEQ ID NO: 25790 - RNA, 19 nt, synthetic construct
  source 1..19: mol_type = other RNA
tggtgcagtcggatgaaca

SEQ ID NO: 25791 - RNA, 19 nt, synthetic construct
  source 1..19: mol_type = other RNA
ctcgccaccgccttaaagg

SEQ ID NO: 25792 - RNA, 19 nt, synthetic construct
  source 1..19: mol_type = other RNA
tgtggtcggtggcggggtt

SEQ ID NO: 25793 - RNA, 19 nt, synthetic construct
  source 1..19: mol_type = other RNA
gagtgcgtgatgtcatcca

SEQ ID NO: 25794 - RNA, 19 nt, synthetic construct
  source 1..19: mol_type = other RNA
cacgctggtcttccggtcc

SEQ ID NO: 25795 - RNA, 19 nt, synthetic construct
  source 1..19: mol_type = other RNA
gcggtgtgggtggtccccg

SEQ ID NO: 25796 - RNA, 19 nt, synthetic construct
  source 1..19: mol_type = other RNA
gcggtgtgggtggtccccg

SEQ ID NO: 25797 - RNA, 19 nt, synthetic construct
  source 1..19: mol_type = other RNA
gcggtgtgggtggtccccg

SEQ ID NO: 25798 - RNA, 19 nt, synthetic construct
  source 1..19: mol_type = other RNA
aaggtgacgctcacgccca

SEQ ID NO: 25799 - RNA, 19 nt, synthetic construct
  source 1..19: mol_type = other RNA
acggttgcacggcgggggc

SEQ ID NO: 25800 - RNA, 19 nt, synthetic construct
  source 1..19: mol_type = other RNA
atgcggacttgacaggagt

SEQ ID NO: 25801 - RNA, 19 nt, synthetic construct
  source 1..19: mol_type = other RNA
ggcgtcccagtgacatcag

SEQ ID NO: 25802 - RNA, 19 nt, synthetic construct
  source 1..19: mol_type = other RNA
gagccgttggacgcctcca

SEQ ID NO: 25803 - RNA, 19 nt, synthetic construct
  source 1..19: mol_type = other RNA
gcgtcaccgctttcaggca

SEQ ID NO: 25804 - RNA, 19 nt, synthetic construct
  source 1..19: mol_type = other RNA
ttgaggaacacgccgccgt

SEQ ID NO: 25805 - RNA, 19 nt, synthetic construct
  source 1..19: mol_type = other RNA
gtgaagtcgtcagcctggt

SEQ ID NO: 25806 - RNA, 19 nt, synthetic construct
  source 1..19: mol_type = other RNA
gtcaggcgcgagcaccagt

SEQ ID NO: 25807 - RNA, 19 nt, synthetic construct
  source 1..19: mol_type = other RNA
gccagcacggtgccgtgag

SEQ ID NO: 25808 - RNA, 19 nt, synthetic construct
  source 1..19: mol_type = other RNA
ttaaaggtcccctcttgga

SEQ ID NO: 25809 - RNA, 19 nt, synthetic construct
  source 1..19: mol_type = other RNA
tcttgtagggtgggtcccc

SEQ ID NO: 25810 - RNA, 19 nt, synthetic construct
  source 1..19: mol_type = other RNA
tcggggtcacccatagggt

SEQ ID NO: 25811 - RNA, 19 nt, synthetic construct
  source 1..19: mol_type = other RNA
tgcttgtgtatctggggga

SEQ ID NO: 25812 - RNA, 19 nt, synthetic construct
  source 1..19: mol_type = other RNA
ctgcaggcgtcgtggggcc

SEQ ID NO: 25813 - RNA, 19 nt, synthetic construct
  source 1..19: mol_type = other RNA
gaggggcgccatgtgccca

SEQ ID NO: 25814 - RNA, 19 nt, synthetic construct
  source 1..19: mol_type = other RNA
ggttgtgctgatccacact

SEQ ID NO: 25815 - RNA, 19 nt, synthetic construct
  source 1..19: mol_type = other RNA
tggttgtgctgatccacac

SEQ ID NO: 25816 - RNA, 19 nt, synthetic construct
  source 1..19: mol_type = other RNA
gccgtggatccggtgggca

SEQ ID NO: 25817 - RNA, 19 nt, synthetic construct
  source 1..19: mol_type = other RNA
aagcgtgcgtgccgtccct

SEQ ID NO: 25818 - RNA, 19 nt, synthetic construct
  source 1..19: mol_type = other RNA
ggttgtgctgatccacact

SEQ ID NO: 25819 - RNA, 19 nt, synthetic construct
  source 1..19: mol_type = other RNA
tggttgtgctgatccacac

SEQ ID NO: 25820 - RNA, 19 nt, synthetic construct
  source 1..19: mol_type = other RNA
gccgtggatccggtgggca

SEQ ID NO: 25821 - RNA, 19 nt, synthetic construct
  source 1..19: mol_type = other RNA
ggttgtgctgatccacact

SEQ ID NO: 25822 - RNA, 19 nt, synthetic construct
  source 1..19: mol_type = other RNA
tggttgtgctgatccacac

SEQ ID NO: 25823 - RNA, 19 nt, synthetic construct
  source 1..19: mol_type = other RNA
gccgtggatccggtgggca

SEQ ID NO: 25824 - RNA, 19 nt, synthetic construct
  source 1..19: mol_type = other RNA
ggttgtgctgatccacact

SEQ ID NO: 25825 - RNA, 19 nt, synthetic construct
  source 1..19: mol_type = other RNA
tggttgtgctgatccacac

SEQ ID NO: 25826 - RNA, 19 nt, synthetic construct
  source 1..19: mol_type = other RNA
ccggtggtcccaagggtgg

SEQ ID NO: 25827 - RNA, 19 nt, synthetic construct
  source 1..19: mol_type = other RNA
gccgtggatccggtgggca

SEQ ID NO: 25828 - RNA, 19 nt, synthetic construct
  source 1..19: mol_type = other RNA
ggttgtgctgatccacact

SEQ ID NO: 25829 - RNA, 19 nt, synthetic construct
  source 1..19: mol_type = other RNA
tggttgtgctgatccacac

SEQ ID NO: 25830 - RNA, 19 nt, synthetic construct
  source 1..19: mol_type = other RNA
cgaggacgtcggggcaccg

SEQ ID NO: 25831 - RNA, 19 nt, synthetic construct
  source 1..19: mol_type = other RNA
gggaggccgttgaagtccc

SEQ ID NO: 25832 - RNA, 19 nt, synthetic construct
  source 1..19: mol_type = other RNA
gtggcagatgccctcctcg

SEQ ID NO: 25833 - RNA, 19 nt, synthetic construct
  source 1..19: mol_type = other RNA
gtgttggcgaaggctgcgc

SEQ ID NO: 25834 - RNA, 19 nt, synthetic construct
  source 1..19: mol_type = other RNA
ctgagctgtacgcccttgg

SEQ ID NO: 25835 - RNA, 19 nt, synthetic construct
  source 1..19: mol_type = other RNA
agtcgctgagctgtacgcc

SEQ ID NO: 25836 - RNA, 19 nt, synthetic construct
  source 1..19: mol_type = other RNA
agccgtccacaggcacgaa

SEQ ID NO: 25837 - RNA, 19 nt, synthetic construct
  source 1..19: mol_type = other RNA
cccggccctctcgccaccg

SEQ ID NO: 25838 - RNA, 19 nt, synthetic construct
  source 1..19: mol_type = other RNA
cacccgagtcgcaggcaca

SEQ ID NO: 25839 - RNA, 19 nt, synthetic construct
  source 1..19: mol_type = other RNA
gcgttgtggctggagttcc

SEQ ID NO: 25840 - RNA, 19 nt, synthetic construct
  source 1..19: mol_type = other RNA
ggcatacctggtaccctct

SEQ ID NO: 25841 - RNA, 19 nt, synthetic construct
  source 1..19: mol_type = other RNA
gggcatacctggtaccctc

SEQ ID NO: 25842 - RNA, 19 nt, synthetic construct
  source 1..19: mol_type = other RNA
gccagcacagggcatacct

SEQ ID NO: 25843 - RNA, 19 nt, synthetic construct
  source 1..19: mol_type = other RNA
agccagcacagggcatacc

SEQ ID NO: 25844 - RNA, 19 nt, synthetic construct
  source 1..19: mol_type = other RNA
ggtggtacctggggccgag

SEQ ID NO: 25845 - RNA, 19 nt, synthetic construct
  source 1..19: mol_type = other RNA
cctccagcggccctgatct

SEQ ID NO: 25846 - RNA, 19 nt, synthetic construct
  source 1..19: mol_type = other RNA
gctgctggcataagtgccc

SEQ ID NO: 25847 - RNA, 19 nt, synthetic construct
  source 1..19: mol_type = other RNA
gtagcacatcttgaagacg

SEQ ID NO: 25848 - RNA, 19 nt, synthetic construct
  source 1..19: mol_type = other RNA
gcctcccgtggtggctgta

SEQ ID NO: 25849 - RNA, 19 nt, synthetic construct
  source 1..19: mol_type = other RNA
tgtggagcctgcaggcgtc

SEQ ID NO: 25850 - RNA, 19 nt, synthetic construct
  source 1..19: mol_type = other RNA
tgcccaagctccccgtcgt

SEQ ID NO: 25851 - RNA, 19 nt, synthetic construct
  source 1..19: mol_type = other RNA
aggtggacagctcgctcgt

SEQ ID NO: 25852 - RNA, 19 nt, synthetic construct
  source 1..19: mol_type = other RNA
cctgagaggtggacagctc

SEQ ID NO: 25853 - RNA, 19 nt, synthetic construct
  source 1..19: mol_type = other RNA
ggtggtctgtgataggcgg

SEQ ID NO: 25854 - RNA, 19 nt, synthetic construct
  source 1..19: mol_type = other RNA
tgtgaagcccgtggttgtg

SEQ ID NO: 25855 - RNA, 19 nt, synthetic construct
  source 1..19: mol_type = other RNA
actggaggcgtgagtgccg

SEQ ID NO: 25856 - RNA, 19 nt, synthetic construct
  source 1..19: mol_type = other RNA
acactggaggcgtgagtgc

SEQ ID NO: 25857 - RNA, 19 nt, synthetic construct
  source 1..19: mol_type = other RNA
gaggagggggtcaccgtgg

SEQ ID NO: 25858 - RNA, 19 nt, synthetic construct
  source 1..19: mol_type = other RNA
gtgtcaaagtccccgccag

SEQ ID NO: 25859 - RNA, 19 nt, synthetic construct
  source 1..19: mol_type = other RNA
gcacggcactcgaggccca

SEQ ID NO: 25860 - RNA, 19 nt, synthetic construct
  source 1..19: mol_type = other RNA
ggcacggcactcgaggccc

SEQ ID NO: 25861 - RNA, 19 nt, synthetic construct
  source 1..19: mol_type = other RNA
gggcacggcactcgaggcc

SEQ ID NO: 25862 - RNA, 19 nt, synthetic construct
  source 1..19: mol_type = other RNA
ccaggtcgtccccggagtg

SEQ ID NO: 25863 - RNA, 19 nt, synthetic construct
  source 1..19: mol_type = other RNA
cggtggctgtagtgctcgg

SEQ ID NO: 25864 - RNA, 19 nt, synthetic construct
  source 1..19: mol_type = other RNA
acggtggctgtagtgctcg

SEQ ID NO: 25865 - RNA, 19 nt, synthetic construct
  source 1..19: mol_type = other RNA
ggtggtctgtgataggcgg

SEQ ID NO: 25866 - RNA, 19 nt, synthetic construct
  source 1..19: mol_type = other RNA
ccggtggccccggttgtgg

SEQ ID NO: 25867 - RNA, 19 nt, synthetic construct
  source 1..19: mol_type = other RNA
gccggtggccccggttgtg

SEQ ID NO: 25868 - RNA, 19 nt, synthetic construct
  source 1..19: mol_type = other RNA
tgtgaagcccgtggttgtg

SEQ ID NO: 25869 - RNA, 19 nt, synthetic construct
  source 1..19: mol_type = other RNA
gaggagggggtcaccgtgg

SEQ ID NO: 25870 - RNA, 19 nt, synthetic construct
  source 1..19: mol_type = other RNA
tcgcccgtgtgtggtggcc

SEQ ID NO: 25871 - RNA, 19 nt, synthetic construct
  source 1..19: mol_type = other RNA
gtgtcaaagtccccgccag

SEQ ID NO: 25872 - RNA, 19 nt, synthetic construct
  source 1..19: mol_type = other RNA
gcacggcactcgaggccca

SEQ ID NO: 25873 - RNA, 19 nt, synthetic construct
  source 1..19: mol_type = other RNA
ggcacggcactcgaggccc

SEQ ID NO: 25874 - RNA, 19 nt, synthetic construct
  source 1..19: mol_type = other RNA
gggcacggcactcgaggcc

SEQ ID NO: 25875 - RNA, 19 nt, synthetic construct
  source 1..19: mol_type = other RNA
gagggcgtggccgtagagc

SEQ ID NO: 25876 - RNA, 19 nt, synthetic construct
  source 1..19: mol_type = other RNA
gaggagggcgtggccgtag

SEQ ID NO: 25877 - RNA, 19 nt, synthetic construct
  source 1..19: mol_type = other RNA
gcggtcgtagtggctgctg

SEQ ID NO: 25878 - RNA, 19 nt, synthetic construct
  source 1..19: mol_type = other RNA
ggacgggatggccgtggat

SEQ ID NO: 25879 - RNA, 19 nt, synthetic construct
  source 1..19: mol_type = other RNA
ccaggtcgtccccggagtg

SEQ ID NO: 25880 - RNA, 19 nt, synthetic construct
  source 1..19: mol_type = other RNA
gtgccagcagttgcccggg

SEQ ID NO: 25881 - RNA, 19 nt, synthetic construct
  source 1..19: mol_type = other RNA
ggtggtctgtgataggcgg

SEQ ID NO: 25882 - RNA, 19 nt, synthetic construct
  source 1..19: mol_type = other RNA
gagccggtggccctggttg

SEQ ID NO: 25883 - RNA, 19 nt, synthetic construct
  source 1..19: mol_type = other RNA
tgtgaagcccgtggttgtg

SEQ ID NO: 25884 - RNA, 19 nt, synthetic construct
  source 1..19: mol_type = other RNA
actggaggcgtgagtgccg

SEQ ID NO: 25885 - RNA, 19 nt, synthetic construct
  source 1..19: mol_type = other RNA
acactggaggcgtgagtgc

SEQ ID NO: 25886 - RNA, 19 nt, synthetic construct
  source 1..19: mol_type = other RNA
gaggagggggtcaccgtgg

SEQ ID NO: 25887 - RNA, 19 nt, synthetic construct
  source 1..19: mol_type = other RNA
gtggctgtgatcgtagtgg

SEQ ID NO: 25888 - RNA, 19 nt, synthetic construct
  source 1..19: mol_type = other RNA
ccgcccgtgtgtggtggcc

SEQ ID NO: 25889 - RNA, 19 nt, synthetic construct
  source 1..19: mol_type = other RNA
gtgtcaaagtccccgccag

SEQ ID NO: 25890 - RNA, 19 nt, synthetic construct
  source 1..19: mol_type = other RNA
gcacggcactcgaggccca

SEQ ID NO: 25891 - RNA, 19 nt, synthetic construct
  source 1..19: mol_type = other RNA
ggcacggcactcgaggccc

SEQ ID NO: 25892 - RNA, 19 nt, synthetic construct
  source 1..19: mol_type = other RNA
gggcacggcactcgaggcc

SEQ ID NO: 25893 - RNA, 19 nt, synthetic construct
  source 1..19: mol_type = other RNA
gagggcgtggccgtagagc

SEQ ID NO: 25894 - RNA, 19 nt, synthetic construct
  source 1..19: mol_type = other RNA
gaggagggcgtggccgtag

SEQ ID NO: 25895 - RNA, 19 nt, synthetic construct
  source 1..19: mol_type = other RNA
cggtggctgtagtgctcgg

SEQ ID NO: 25896 - RNA, 19 nt, synthetic construct
  source 1..19: mol_type = other RNA
acggtggctgtagtgctcg

SEQ ID NO: 25897 - RNA, 19 nt, synthetic construct
  source 1..19: mol_type = other RNA
ggtggtctgtgataggcgg

SEQ ID NO: 25898 - RNA, 19 nt, synthetic construct
  source 1..19: mol_type = other RNA
gagccggtggccctggttg

SEQ ID NO: 25899 - RNA, 19 nt, synthetic construct
  source 1..19: mol_type = other RNA
tgtgaagcccgtggttgtg

SEQ ID NO: 25900 - RNA, 19 nt, synthetic construct
  source 1..19: mol_type = other RNA
gaggagggggtcaccgtgg

SEQ ID NO: 25901 - RNA, 19 nt, synthetic construct
  source 1..19: mol_type = other RNA
tcgcccgtgtgtggtggcc

SEQ ID NO: 25902 - RNA, 19 nt, synthetic construct
  source 1..19: mol_type = other RNA
gtgtcaaagtccccgccag

SEQ ID NO: 25903 - RNA, 19 nt, synthetic construct
  source 1..19: mol_type = other RNA
gcacggcactcgaggccca

SEQ ID NO: 25904 - RNA, 19 nt, synthetic construct
  source 1..19: mol_type = other RNA
ggcacggcactcgaggccc

SEQ ID NO: 25905 - RNA, 19 nt, synthetic construct
  source 1..19: mol_type = other RNA
gggcacggcactcgaggcc

SEQ ID NO: 25906 - RNA, 19 nt, synthetic construct
  source 1..19: mol_type = other RNA
ccaggtcgtccccggagtg

SEQ ID NO: 25907 - RNA, 19 nt, synthetic construct
  source 1..19: mol_type = other RNA
ccaggtcgtccccggagtg

SEQ ID NO: 25908 - RNA, 19 nt, synthetic construct
  source 1..19: mol_type = other RNA
cggtggctgtagtgctcgg

SEQ ID NO: 25909 - RNA, 19 nt, synthetic construct
  source 1..19: mol_type = other RNA
acggtggctgtagtgctcg

SEQ ID NO: 25910 - RNA, 19 nt, synthetic construct
  source 1..19: mol_type = other RNA
ggtggtctgtgataggcgg

SEQ ID NO: 25911 - RNA, 19 nt, synthetic construct
  source 1..19: mol_type = other RNA
ccggtggccccggttgtgg

SEQ ID NO: 25912 - RNA, 19 nt, synthetic construct
  source 1..19: mol_type = other RNA
gccggtggccccggttgtg

SEQ ID NO: 25913 - RNA, 19 nt, synthetic construct
  source 1..19: mol_type = other RNA
tgtgaagcccgtggttgtg

SEQ ID NO: 25914 - RNA, 19 nt, synthetic construct
  source 1..19: mol_type = other RNA
actggaggcgtgagtgccg

SEQ ID NO: 25915 - RNA, 19 nt, synthetic construct
  source 1..19: mol_type = other RNA
acactggaggcgtgagtgc

SEQ ID NO: 25916 - RNA, 19 nt, synthetic construct
  source 1..19: mol_type = other RNA
gaggagggggtcaccgtgg

SEQ ID NO: 25917 - RNA, 19 nt, synthetic construct
  source 1..19: mol_type = other RNA
cagcactctggcggtgtgg

SEQ ID NO: 25918 - RNA, 19 nt, synthetic construct
  source 1..19: mol_type = other RNA
ggtcagcactctggcggtg

SEQ ID NO: 25919 - RNA, 19 nt, synthetic construct
  source 1..19: mol_type = other RNA
agtggacacgctgaaggtt

SEQ ID NO: 25920 - RNA, 19 nt, synthetic construct
  source 1..19: mol_type = other RNA
ggggaagccagtgggtctc

SEQ ID NO: 25921 - RNA, 19 nt, synthetic construct
  source 1..19: mol_type = other RNA
cggtcaatgtcacagtgct

SEQ ID NO: 25922 - RNA, 19 nt, synthetic construct
  source 1..19: mol_type = other RNA
ccggagagggatggcattg

SEQ ID NO: 25923 - RNA, 19 nt, synthetic construct
  source 1..19: mol_type = other RNA
tcattcacctgccggagag

SEQ ID NO: 25924 - RNA, 19 nt, synthetic construct
  source 1..19: mol_type = other RNA
gtcaaacaggatcaggccc

SEQ ID NO: 25925 - RNA, 19 nt, synthetic construct
  source 1..19: mol_type = other RNA
ggaatgtccacacgcatgg

SEQ ID NO: 25926 - RNA, 19 nt, synthetic construct
  source 1..19: mol_type = other RNA
gtggcactcagcaaagacc

SEQ ID NO: 25927 - RNA, 19 nt, synthetic construct
  source 1..19: mol_type = other RNA
tcgctgatgcaggcgttga

SEQ ID NO: 25928 - RNA, 19 nt, synthetic construct
  source 1..19: mol_type = other RNA
gtcgctgatgcaggcgttg

SEQ ID NO: 25929 - RNA, 19 nt, synthetic construct
  source 1..19: mol_type = other RNA
ggtgggcaggtgaggtcgc

SEQ ID NO: 25930 - RNA, 19 nt, synthetic construct
  source 1..19: mol_type = other RNA
gatgcccatgtgtgcgttg

SEQ ID NO: 25931 - RNA, 19 nt, synthetic construct
  source 1..19: mol_type = other RNA
aggcctgcacgcagatgcc

SEQ ID NO: 25932 - RNA, 19 nt, synthetic construct
  source 1..19: mol_type = other RNA
agcaggggttctcggcccg

SEQ ID NO: 25933 - RNA, 19 nt, synthetic construct
  source 1..19: mol_type = other RNA
gggcgtgaggcaggcggtc

SEQ ID NO: 25934 - RNA, 19 nt, synthetic construct
  source 1..19: mol_type = other RNA
ttaggacagtgcaagggca

SEQ ID NO: 25935 - RNA, 19 nt, synthetic construct
  source 1..19: mol_type = other RNA
tggaggcagaacgttctca

SEQ ID NO: 25936 - RNA, 19 nt, synthetic construct
  source 1..19: mol_type = other RNA
gcacatgcttagtttgttc

SEQ ID NO: 25937 - RNA, 19 nt, synthetic construct
  source 1..19: mol_type = other RNA
tccggccgtggcagggaca

SEQ ID NO: 25938 - RNA, 19 nt, synthetic construct
  source 1..19: mol_type = other RNA
gtggccagctggaatccgt

SEQ ID NO: 25939 - RNA, 19 nt, synthetic construct
  source 1..19: mol_type = other RNA
cgtggccagctggaatccg

SEQ ID NO: 25940 - RNA, 19 nt, synthetic construct
  source 1..19: mol_type = other RNA
ccctctctgacctggccgt

SEQ ID NO: 25941 - RNA, 19 nt, synthetic construct
  source 1..19: mol_type = other RNA
ccattgatgaggacggagc

SEQ ID NO: 25942 - RNA, 19 nt, synthetic construct
  source 1..19: mol_type = other RNA
gcagtcaccatgcaggtcg

SEQ ID NO: 25943 - RNA, 19 nt, synthetic construct
  source 1..19: mol_type = other RNA
ccttgggtgccagggcgtc

SEQ ID NO: 25944 - RNA, 19 nt, synthetic construct
  source 1..19: mol_type = other RNA
ctgtaggtcctgtcctcat

SEQ ID NO: 25945 - RNA, 19 nt, synthetic construct
  source 1..19: mol_type = other RNA
gccaagcccatcggtggtg

SEQ ID NO: 25946 - RNA, 19 nt, synthetic construct
  source 1..19: mol_type = other RNA
cagatggcgatcaagcagg

SEQ ID NO: 25947 - RNA, 19 nt, synthetic construct
  source 1..19: mol_type = other RNA
tggtcggtggcggggttgt

SEQ ID NO: 25948 - RNA, 19 nt, synthetic construct
  source 1..19: mol_type = other RNA
gtggctgtgaagcccgtgg

SEQ ID NO: 25949 - RNA, 19 nt, synthetic construct
  source 1..19: mol_type = other RNA
agaaccagtggccacagtt

SEQ ID NO: 25950 - RNA, 19 nt, synthetic construct
  source 1..19: mol_type = other RNA
gctgggtggtaccggtggt

SEQ ID NO: 25951 - RNA, 19 nt, synthetic construct
  source 1..19: mol_type = other RNA
tgctgggtggtaccggtgg

SEQ ID NO: 25952 - RNA, 19 nt, synthetic construct
  source 1..19: mol_type = other RNA
gtggctgtgaagcccgtgg

SEQ ID NO: 25953 - RNA, 19 nt, synthetic construct
  source 1..19: mol_type = other RNA
agaaccagtggccacagtt

SEQ ID NO: 25954 - RNA, 19 nt, synthetic construct
  source 1..19: mol_type = other RNA
ggggggataggtgttgtcc

SEQ ID NO: 25955 - RNA, 19 nt, synthetic construct
  source 1..19: mol_type = other RNA
gctgggtggtaccggtggt

SEQ ID NO: 25956 - RNA, 19 nt, synthetic construct
  source 1..19: mol_type = other RNA
tgctgggtggtaccggtgg

SEQ ID NO: 25957 - RNA, 19 nt, synthetic construct
  source 1..19: mol_type = other RNA
gtggctgtgaagcccgtgg

SEQ ID NO: 25958 - RNA, 19 nt, synthetic construct
  source 1..19: mol_type = other RNA
agaaccagtggccacagtt

SEQ ID NO: 25959 - RNA, 19 nt, synthetic construct
  source 1..19: mol_type = other RNA
agaaccagtggccacagtt

SEQ ID NO: 25960 - RNA, 19 nt, synthetic construct
  source 1..19: mol_type = other RNA
ggggggataggtgttgtcc

SEQ ID NO: 25961 - RNA, 19 nt, synthetic construct
  source 1..19: mol_type = other RNA
gctgggtggtaccggtggt

SEQ ID NO: 25962 - RNA, 19 nt, synthetic construct
  source 1..19: mol_type = other RNA
tgctgggtggtaccggtgg

SEQ ID NO: 25963 - RNA, 19 nt, synthetic construct
  source 1..19: mol_type = other RNA
gtggctgtgaagcccgtgg

SEQ ID NO: 25964 - RNA, 19 nt, synthetic construct
  source 1..19: mol_type = other RNA
agaaccagtggccacagtt

SEQ ID NO: 25965 - RNA, 19 nt, synthetic construct
  source 1..19: mol_type = other RNA
tcagtgaggatccgggtcg

SEQ ID NO: 25966 - RNA, 19 nt, synthetic construct
  source 1..19: mol_type = other RNA
gatgacttccccgggcgag

SEQ ID NO: 25967 - RNA, 19 nt, synthetic construct
  source 1..19: mol_type = other RNA
ttgtgttgcacacgcacac

SEQ ID NO: 25968 - RNA, 19 nt, synthetic construct
  source 1..19: mol_type = other RNA
ggtggttgtgttgcacacg

SEQ ID NO: 25969 - RNA, 19 nt, synthetic construct
  source 1..19: mol_type = other RNA
ggctgttgacccaggtttc

SEQ ID NO: 25970 - RNA, 19 nt, synthetic construct
  source 1..19: mol_type = other RNA
acgcagtgctgtccaccag

SEQ ID NO: 25971 - RNA, 19 nt, synthetic construct
  source 1..19: mol_type = other RNA
ggtgcccgccgagctgttg

SEQ ID NO: 25972 - RNA, 19 nt, synthetic construct
  source 1..19: mol_type = other RNA
gtcctcctcggcaatgcag

SEQ ID NO: 25973 - RNA, 19 nt, synthetic construct
  source 1..19: mol_type = other RNA
gcttgtgtatctgggggat

SEQ ID NO: 25974 - RNA, 19 nt, synthetic construct
  source 1..19: mol_type = other RNA
ctgggtggtaccggtggtt

SEQ ID NO: 25975 - RNA, 19 nt, synthetic construct
  source 1..19: mol_type = other RNA
gatccagtggactcagtcg

SEQ ID NO: 25976 - RNA, 19 nt, synthetic construct
  source 1..19: mol_type = other RNA
gtggccgtggatccggtgg

SEQ ID NO: 25977 - RNA, 19 nt, synthetic construct
  source 1..19: mol_type = other RNA
ctgggtggtaccggtggtt

SEQ ID NO: 25978 - RNA, 19 nt, synthetic construct
  source 1..19: mol_type = other RNA
ggtggcccttgtcgtggtg

SEQ ID NO: 25979 - RNA, 19 nt, synthetic construct
  source 1..19: mol_type = other RNA
gtggccgtggatccggtgg

SEQ ID NO: 25980 - RNA, 19 nt, synthetic construct
  source 1..19: mol_type = other RNA
ataggcgggtccaggcggt

SEQ ID NO: 25981 - RNA, 19 nt, synthetic construct
  source 1..19: mol_type = other RNA
gctgttgtggtcagctttg

SEQ ID NO: 25982 - RNA, 19 nt, synthetic construct
  source 1..19: mol_type = other RNA
gatccagtggactcagtcg

SEQ ID NO: 25983 - RNA, 19 nt, synthetic construct
  source 1..19: mol_type = other RNA
gtggccgtggatccggtgg

SEQ ID NO: 25984 - RNA, 19 nt, synthetic construct
  source 1..19: mol_type = other RNA
ctgggtggtaccggtggtt

SEQ ID NO: 25985 - RNA, 19 nt, synthetic construct
  source 1..19: mol_type = other RNA
ggtggcccttgtcgtggtg

SEQ ID NO: 25986 - RNA, 19 nt, synthetic construct
  source 1..19: mol_type = other RNA
gtggccgtggatccggtgg

SEQ ID NO: 25987 - RNA, 19 nt, synthetic construct
  source 1..19: mol_type = other RNA
cccggaaggtgtaagaggt

SEQ ID NO: 25988 - RNA, 19 nt, synthetic construct
  source 1..19: mol_type = other RNA
tgtccacacgcatggtggt

SEQ ID NO: 25989 - RNA, 19 nt, synthetic construct
  source 1..19: mol_type = other RNA
gatgcggacttgacaggag

SEQ ID NO: 25990 - RNA, 19 nt, synthetic construct
  source 1..19: mol_type = other RNA
cccgctgagggccgtgaag

SEQ ID NO: 25991 - RNA, 19 nt, synthetic construct
  source 1..19: mol_type = other RNA
ggtcaggcgcgagcaccag

SEQ ID NO: 25992 - RNA, 19 nt, synthetic construct
  source 1..19: mol_type = other RNA
gtcgaccctgatggtctct

SEQ ID NO: 25993 - RNA, 19 nt, synthetic construct
  source 1..19: mol_type = other RNA
gtcctgggccaagatgtac

SEQ ID NO: 25994 - RNA, 19 nt, synthetic construct
  source 1..19: mol_type = other RNA
tcagtccttctgagagggt

SEQ ID NO: 25995 - RNA, 19 nt, synthetic construct
  source 1..19: mol_type = other RNA
gcctgcaggcgtcgtgggg

SEQ ID NO: 25996 - RNA, 19 nt, synthetic construct
  source 1..19: mol_type = other RNA
gaagggcggttgcagtccc

SEQ ID NO: 25997 - RNA, 19 nt, synthetic construct
  source 1..19: mol_type = other RNA
ggaagggcggttgcagtcc

SEQ ID NO: 25998 - RNA, 19 nt, synthetic construct
  source 1..19: mol_type = other RNA
gctggaagggcggttgcag

SEQ ID NO: 25999 - RNA, 19 nt, synthetic construct
  source 1..19: mol_type = other RNA
gtgagtgccgtccctgggc

SEQ ID NO: 26000 - RNA, 19 nt, synthetic construct
  source 1..19: mol_type = other RNA
caggctgtgcgcaccgtgt

SEQ ID NO: 26001 - RNA, 19 nt, synthetic construct
  source 1..19: mol_type = other RNA
ccaggctgtgcgcaccgtg

SEQ ID NO: 26002 - RNA, 19 nt, synthetic construct
  source 1..19: mol_type = other RNA
gttctgctgctagggtgag

SEQ ID NO: 26003 - RNA, 19 nt, synthetic construct
  source 1..19: mol_type = other RNA
ccggggtggtcgtccctgg

SEQ ID NO: 26004 - RNA, 19 nt, synthetic construct
  source 1..19: mol_type = other RNA
cacagacggcccctccggc

SEQ ID NO: 26005 - RNA, 19 nt, synthetic construct
  source 1..19: mol_type = other RNA
tcacagacggcccctccgg

SEQ ID NO: 26006 - RNA, 19 nt, synthetic construct
  source 1..19: mol_type = other RNA
tccagtggactcagtcgta

SEQ ID NO: 26007 - RNA, 19 nt, synthetic construct
  source 1..19: mol_type = other RNA
gtgactgtgggtgtcgtgg

SEQ ID NO: 26008 - RNA, 19 nt, synthetic construct
  source 1..19: mol_type = other RNA
gaagggcggttgcagtccc

SEQ ID NO: 26009 - RNA, 19 nt, synthetic construct
  source 1..19: mol_type = other RNA
ggaagggcggttgcagtcc

SEQ ID NO: 26010 - RNA, 19 nt, synthetic construct
  source 1..19: mol_type = other RNA
gctggaagggcggttgcag

SEQ ID NO: 26011 - RNA, 19 nt, synthetic construct
  source 1..19: mol_type = other RNA
caggctgtgcgcaccgtgt

SEQ ID NO: 26012 - RNA, 19 nt, synthetic construct
  source 1..19: mol_type = other RNA
ccaggctgtgcgcaccgtg

SEQ ID NO: 26013 - RNA, 19 nt, synthetic construct
  source 1..19: mol_type = other RNA
tgggaagtccccgtggaag

SEQ ID NO: 26014 - RNA, 19 nt, synthetic construct
  source 1..19: mol_type = other RNA
gtcctgctgctagggtgag

SEQ ID NO: 26015 - RNA, 19 nt, synthetic construct
  source 1..19: mol_type = other RNA
ggtggtcctgctgctaggg

SEQ ID NO: 26016 - RNA, 19 nt, synthetic construct
  source 1..19: mol_type = other RNA
cggtggtcctgctgctagg

SEQ ID NO: 26017 - RNA, 19 nt, synthetic construct
  source 1..19: mol_type = other RNA
ccggggtggtcgtccctgg

SEQ ID NO: 26018 - RNA, 19 nt, synthetic construct
  source 1..19: mol_type = other RNA
cacagacggcccctccggc

SEQ ID NO: 26019 - RNA, 19 nt, synthetic construct
  source 1..19: mol_type = other RNA
tcacagacggcccctccgg

SEQ ID NO: 26020 - RNA, 19 nt, synthetic construct
  source 1..19: mol_type = other RNA
ggcgtggccgtagagctgg

SEQ ID NO: 26021 - RNA, 19 nt, synthetic construct
  source 1..19: mol_type = other RNA
gggggtggacatggaactg

SEQ ID NO: 26022 - RNA, 19 nt, synthetic construct
  source 1..19: mol_type = other RNA
gagggggtggacatggaac

SEQ ID NO: 26023 - RNA, 19 nt, synthetic construct
  source 1..19: mol_type = other RNA
cactttgagggtgccagca

SEQ ID NO: 26024 - RNA, 19 nt, synthetic construct
  source 1..19: mol_type = other RNA
gaagggcggttgcagtccc

SEQ ID NO: 26025 - RNA, 19 nt, synthetic construct
  source 1..19: mol_type = other RNA
ggaagggcggttgcagtcc

SEQ ID NO: 26026 - RNA, 19 nt, synthetic construct
  source 1..19: mol_type = other RNA
gctggaagggcggttgcag

SEQ ID NO: 26027 - RNA, 19 nt, synthetic construct
  source 1..19: mol_type = other RNA
gtgagtgccgtccctgggc

SEQ ID NO: 26028 - RNA, 19 nt, synthetic construct
  source 1..19: mol_type = other RNA
caggctgtgcgcaccgtgt

SEQ ID NO: 26029 - RNA, 19 nt, synthetic construct
  source 1..19: mol_type = other RNA
ccaggctgtgcgcaccgtg

SEQ ID NO: 26030 - RNA, 19 nt, synthetic construct
  source 1..19: mol_type = other RNA
gtcctgctgctagggtgag

SEQ ID NO: 26031 - RNA, 19 nt, synthetic construct
  source 1..19: mol_type = other RNA
ggtggtcctgctgctaggg

SEQ ID NO: 26032 - RNA, 19 nt, synthetic construct
  source 1..19: mol_type = other RNA
cggtggtcctgctgctagg

SEQ ID NO: 26033 - RNA, 19 nt, synthetic construct
  source 1..19: mol_type = other RNA
ccggggtggtcgtccctgg

SEQ ID NO: 26034 - RNA, 19 nt, synthetic construct
  source 1..19: mol_type = other RNA
ggcgtggccgtagagctgg

SEQ ID NO: 26035 - RNA, 19 nt, synthetic construct
  source 1..19: mol_type = other RNA
tccagtggactcagtcgta

SEQ ID NO: 26036 - RNA, 19 nt, synthetic construct
  source 1..19: mol_type = other RNA
gtgactgtgggtgtcgtgg

SEQ ID NO: 26037 - RNA, 19 nt, synthetic construct
  source 1..19: mol_type = other RNA
gaagggcggttgcagtccc

SEQ ID NO: 26038 - RNA, 19 nt, synthetic construct
  source 1..19: mol_type = other RNA
ggaagggcggttgcagtcc

SEQ ID NO: 26039 - RNA, 19 nt, synthetic construct
  source 1..19: mol_type = other RNA
gctggaagggcggttgcag

SEQ ID NO: 26040 - RNA, 19 nt, synthetic construct
  source 1..19: mol_type = other RNA
caggctgtgcgcaccgtgt

SEQ ID NO: 26041 - RNA, 19 nt, synthetic construct
  source 1..19: mol_type = other RNA
ccaggctgtgcgcaccgtg

SEQ ID NO: 26042 - RNA, 19 nt, synthetic construct
  source 1..19: mol_type = other RNA
tgggaagtccccgtggaag

SEQ ID NO: 26043 - RNA, 19 nt, synthetic construct
  source 1..19: mol_type = other RNA
gtcctgctgctagggtgag

SEQ ID NO: 26044 - RNA, 19 nt, synthetic construct
  source 1..19: mol_type = other RNA
ggtggtcctgctgctaggg

SEQ ID NO: 26045 - RNA, 19 nt, synthetic construct
  source 1..19: mol_type = other RNA
cggtggtcctgctgctagg

SEQ ID NO: 26046 - RNA, 19 nt, synthetic construct
  source 1..19: mol_type = other RNA
cacagacggcccctccggc

SEQ ID NO: 26047 - RNA, 19 nt, synthetic construct
  source 1..19: mol_type = other RNA
tcacagacggcccctccgg

SEQ ID NO: 26048 - RNA, 19 nt, synthetic construct
  source 1..19: mol_type = other RNA
gtgactgtgggtgtcgtgg

SEQ ID NO: 26049 - RNA, 19 nt, synthetic construct
  source 1..19: mol_type = other RNA
gtgagtgccgtccctgggc

SEQ ID NO: 26050 - RNA, 19 nt, synthetic construct
  source 1..19: mol_type = other RNA
agtgaggatccgggtcgtc

SEQ ID NO: 26051 - RNA, 19 nt, synthetic construct
  source 1..19: mol_type = other RNA
ggggaccagccacgtcttg

SEQ ID NO: 26052 - RNA, 19 nt, synthetic construct
  source 1..19: mol_type = other RNA
cactctcttgtactcaaag

SEQ ID NO: 26053 - RNA, 19 nt, synthetic construct
  source 1..19: mol_type = other RNA
ctggctggccatcgggcgt

SEQ ID NO: 26054 - RNA, 19 nt, synthetic construct
  source 1..19: mol_type = other RNA
ggagccctcgcagaaggtg

SEQ ID NO: 26055 - RNA, 19 nt, synthetic construct
  source 1..19: mol_type = other RNA
cagccacactcatccacgt

SEQ ID NO: 26056 - RNA, 19 nt, synthetic construct
  source 1..19: mol_type = other RNA
atgcttagtttgttccagg

SEQ ID NO: 26057 - RNA, 19 nt, synthetic construct
  source 1..19: mol_type = other RNA
ctgccccagcggccggacg

SEQ ID NO: 26058 - RNA, 19 nt, synthetic construct
  source 1..19: mol_type = other RNA
cgcgctcggggcacccatc

SEQ ID NO: 26059 - RNA, 19 nt, synthetic construct
  source 1..19: mol_type = other RNA
gtaggcggcgcggcagtgc

SEQ ID NO: 26060 - RNA, 19 nt, synthetic construct
  source 1..19: mol_type = other RNA
gtagtccccgctctgctcc

SEQ ID NO: 26061 - RNA, 19 nt, synthetic construct
  source 1..19: mol_type = other RNA
aaactggagcggggtcagc

SEQ ID NO: 26062 - RNA, 19 nt, synthetic construct
  source 1..19: mol_type = other RNA
gtggcacacgggcaggtgg

SEQ ID NO: 26063 - RNA, 19 nt, synthetic construct
  source 1..19: mol_type = other RNA
gaaggaggtgcccgggctg

SEQ ID NO: 26064 - RNA, 19 nt, synthetic construct
  source 1..19: mol_type = other RNA
atgcaggtcgtagagtttc

SEQ ID NO: 26065 - RNA, 19 nt, synthetic construct
  source 1..19: mol_type = other RNA
cggcacatttcttggacag

SEQ ID NO: 26066 - RNA, 19 nt, synthetic construct
  source 1..19: mol_type = other RNA
ctgacaaacacctgcatga

SEQ ID NO: 26067 - RNA, 19 nt, synthetic construct
  source 1..19: mol_type = other RNA
cgtgaagtcgtcagcctgg

SEQ ID NO: 26068 - RNA, 19 nt, synthetic construct
  source 1..19: mol_type = other RNA
tgttggcgaaggctgcgcc

SEQ ID NO: 26069 - RNA, 19 nt, synthetic construct
  source 1..19: mol_type = other RNA
tcaggcgcgagcaccagtg

SEQ ID NO: 26070 - RNA, 19 nt, synthetic construct
  source 1..19: mol_type = other RNA
gctgagctgtacgcccttg

SEQ ID NO: 26071 - RNA, 19 nt, synthetic construct
  source 1..19: mol_type = other RNA
cggcctcactcaggccgcg

SEQ ID NO: 26072 - RNA, 19 nt, synthetic construct
  source 1..19: mol_type = other RNA
tcggcctcactcaggccgc

SEQ ID NO: 26073 - RNA, 19 nt, synthetic construct
  source 1..19: mol_type = other RNA
agccagcacggtgccgtga

SEQ ID NO: 26074 - RNA, 19 nt, synthetic construct
  source 1..19: mol_type = other RNA
cccgtgggtctcgatgacc

SEQ ID NO: 26075 - RNA, 19 nt, synthetic construct
  source 1..19: mol_type = other RNA
ccacccgagtcgcaggcac

SEQ ID NO: 26076 - RNA, 19 nt, synthetic construct
  source 1..19: mol_type = other RNA
ccgctgtggggacccttgc

SEQ ID NO: 26077 - RNA, 19 nt, synthetic construct
  source 1..19: mol_type = other RNA
cctggtagctgtaggtcct

SEQ ID NO: 26078 - RNA, 19 nt, synthetic construct
  source 1..19: mol_type = other RNA
tgacgtcctggtagctgta

SEQ ID NO: 26079 - RNA, 19 nt, synthetic construct
  source 1..19: mol_type = other RNA
gtgaatggcgttgtggctg

SEQ ID NO: 26080 - RNA, 19 nt, synthetic construct
  source 1..19: mol_type = other RNA
ggcggtgcccattgtacca

SEQ ID NO: 26081 - RNA, 19 nt, synthetic construct
  source 1..19: mol_type = other RNA
cgtattcgcagcagagaac

SEQ ID NO: 26082 - RNA, 19 nt, synthetic construct
  source 1..19: mol_type = other RNA
tggcataagtgccctccag

SEQ ID NO: 26083 - RNA, 19 nt, synthetic construct
  source 1..19: mol_type = other RNA
tgctggcataagtgccctc

SEQ ID NO: 26084 - RNA, 19 nt, synthetic construct
  source 1..19: mol_type = other RNA
ggtccagttggggaagctc

SEQ ID NO: 26085 - RNA, 19 nt, synthetic construct
  source 1..19: mol_type = other RNA
gtgccagggtccagttggg

SEQ ID NO: 26086 - RNA, 19 nt, synthetic construct
  source 1..19: mol_type = other RNA
tctgagagggtggggactg

SEQ ID NO: 26087 - RNA, 19 nt, synthetic construct
  source 1..19: mol_type = other RNA
ggcgtcgtggggcctcccg

SEQ ID NO: 26088 - RNA, 19 nt, synthetic construct
  source 1..19: mol_type = other RNA
caggcgtcgtggggcctcc

SEQ ID NO: 26089 - RNA, 19 nt, synthetic construct
  source 1..19: mol_type = other RNA
gccatgtgcccaagctccc

SEQ ID NO: 26090 - RNA, 19 nt, synthetic construct
  source 1..19: mol_type = other RNA
gcgtgctggtctcggcctg

SEQ ID NO: 26091 - RNA, 19 nt, synthetic construct
  source 1..19: mol_type = other RNA
gtcgtctctgtcctgggcg

SEQ ID NO: 26092 - RNA, 19 nt, synthetic construct
  source 1..19: mol_type = other RNA
gagccggtggccccagttg

SEQ ID NO: 26093 - RNA, 19 nt, synthetic construct
  source 1..19: mol_type = other RNA
tggtagtgtgagctgttcc

SEQ ID NO: 26094 - RNA, 19 nt, synthetic construct
  source 1..19: mol_type = other RNA
cactggaggcgtgagtgcc

SEQ ID NO: 26095 - RNA, 19 nt, synthetic construct
  source 1..19: mol_type = other RNA
tcagtgatgggggagtacc

SEQ ID NO: 26096 - RNA, 19 nt, synthetic construct
  source 1..19: mol_type = other RNA
gtggtcagtgatgggggag

SEQ ID NO: 26097 - RNA, 19 nt, synthetic construct
  source 1..19: mol_type = other RNA
gttcggcactgggggtgtg

SEQ ID NO: 26098 - RNA, 19 nt, synthetic construct
  source 1..19: mol_type = other RNA
tgctagggtgtgggaagtc

SEQ ID NO: 26099 - RNA, 19 nt, synthetic construct
  source 1..19: mol_type = other RNA
gtcgaggtgcgggtcttgc

SEQ ID NO: 26100 - RNA, 19 nt, synthetic construct
  source 1..19: mol_type = other RNA
ctgtagtccagccactctg

SEQ ID NO: 26101 - RNA, 19 nt, synthetic construct
  source 1..19: mol_type = other RNA
gtggactcagtcgtagtgg

SEQ ID NO: 26102 - RNA, 19 nt, synthetic construct
  source 1..19: mol_type = other RNA
tgctcggctctgtgaggat

SEQ ID NO: 26103 - RNA, 19 nt, synthetic construct
  source 1..19: mol_type = other RNA
gcggtggccgtggatccgg

SEQ ID NO: 26104 - RNA, 19 nt, synthetic construct
  source 1..19: mol_type = other RNA
ggcggtggccgtggatccg

SEQ ID NO: 26105 - RNA, 19 nt, synthetic construct
  source 1..19: mol_type = other RNA
tgtggggtgccagcagttg

SEQ ID NO: 26106 - RNA, 19 nt, synthetic construct
  source 1..19: mol_type = other RNA
ggtgctcacatgtggggtg

SEQ ID NO: 26107 - RNA, 19 nt, synthetic construct
  source 1..19: mol_type = other RNA
tggtagtgtgagctgttcc

SEQ ID NO: 26108 - RNA, 19 nt, synthetic construct
  source 1..19: mol_type = other RNA
tcagtgatgggggagtacc

SEQ ID NO: 26109 - RNA, 19 nt, synthetic construct
  source 1..19: mol_type = other RNA
gtggtcagtgatgggggag

SEQ ID NO: 26110 - RNA, 19 nt, synthetic construct
  source 1..19: mol_type = other RNA
gttcggcactgggggtgtg

SEQ ID NO: 26111 - RNA, 19 nt, synthetic construct
  source 1..19: mol_type = other RNA
ggtgcctgaggtggccgaa

SEQ ID NO: 26112 - RNA, 19 nt, synthetic construct
  source 1..19: mol_type = other RNA
aagtccccgtggaaggctc

SEQ ID NO: 26113 - RNA, 19 nt, synthetic construct
  source 1..19: mol_type = other RNA
gtcgaggtgcgggtcttgc

SEQ ID NO: 26114 - RNA, 19 nt, synthetic construct
  source 1..19: mol_type = other RNA
ctgtagtccagccactctg

SEQ ID NO: 26115 - RNA, 19 nt, synthetic construct
  source 1..19: mol_type = other RNA
gggcgtggccgtagagctg

SEQ ID NO: 26116 - RNA, 19 nt, synthetic construct
  source 1..19: mol_type = other RNA
ggatggccgtggatccagt

SEQ ID NO: 26117 - RNA, 19 nt, synthetic construct
  source 1..19: mol_type = other RNA
cggggtggaggacgggatg

SEQ ID NO: 26118 - RNA, 19 nt, synthetic construct
  source 1..19: mol_type = other RNA
ccggggtggaggacgggat

SEQ ID NO: 26119 - RNA, 19 nt, synthetic construct
  source 1..19: mol_type = other RNA
gcggtggccgtggatccgg

SEQ ID NO: 26120 - RNA, 19 nt, synthetic construct
  source 1..19: mol_type = other RNA
ggcggtggccgtggatccg

SEQ ID NO: 26121 - RNA, 19 nt, synthetic construct
  source 1..19: mol_type = other RNA
tggtagtgtgagctgttcc

SEQ ID NO: 26122 - RNA, 19 nt, synthetic construct
  source 1..19: mol_type = other RNA
cactggaggcgtgagtgcc

SEQ ID NO: 26123 - RNA, 19 nt, synthetic construct
  source 1..19: mol_type = other RNA
tcagtgatgggggagtacc

SEQ ID NO: 26124 - RNA, 19 nt, synthetic construct
  source 1..19: mol_type = other RNA
gtggtcagtgatgggggag

SEQ ID NO: 26125 - RNA, 19 nt, synthetic construct
  source 1..19: mol_type = other RNA
gttcggcactgggggtgtg

SEQ ID NO: 26126 - RNA, 19 nt, synthetic construct
  source 1..19: mol_type = other RNA
gtcgaggtgcgggtcttgc

SEQ ID NO: 26127 - RNA, 19 nt, synthetic construct
  source 1..19: mol_type = other RNA
ctgtagtccagccactctg

SEQ ID NO: 26128 - RNA, 19 nt, synthetic construct
  source 1..19: mol_type = other RNA
tgctcacagactgcccctc

SEQ ID NO: 26129 - RNA, 19 nt, synthetic construct
  source 1..19: mol_type = other RNA
gggcgtggccgtagagctg

SEQ ID NO: 26130 - RNA, 19 nt, synthetic construct
  source 1..19: mol_type = other RNA
gtggactcagtcgtagtgg

SEQ ID NO: 26131 - RNA, 19 nt, synthetic construct
  source 1..19: mol_type = other RNA
tgctcggctctgtgaggat

SEQ ID NO: 26132 - RNA, 19 nt, synthetic construct
  source 1..19: mol_type = other RNA
gcggtggccgtggatccgg

SEQ ID NO: 26133 - RNA, 19 nt, synthetic construct
  source 1..19: mol_type = other RNA
ggcggtggccgtggatccg

SEQ ID NO: 26134 - RNA, 19 nt, synthetic construct
  source 1..19: mol_type = other RNA
tgtggggtgccagcagttg

SEQ ID NO: 26135 - RNA, 19 nt, synthetic construct
  source 1..19: mol_type = other RNA
ggtgctcacatgtggggtg

SEQ ID NO: 26136 - RNA, 19 nt, synthetic construct
  source 1..19: mol_type = other RNA
tggtagtgtgagctgttcc

SEQ ID NO: 26137 - RNA, 19 nt, synthetic construct
  source 1..19: mol_type = other RNA
tcagtgatgggggagtacc

SEQ ID NO: 26138 - RNA, 19 nt, synthetic construct
  source 1..19: mol_type = other RNA
gatcgtagtggccgtggtg

SEQ ID NO: 26139 - RNA, 19 nt, synthetic construct
  source 1..19: mol_type = other RNA
gttcggcactgggggtgtg

SEQ ID NO: 26140 - RNA, 19 nt, synthetic construct
  source 1..19: mol_type = other RNA
ggtgcctgaggtggccgaa

SEQ ID NO: 26141 - RNA, 19 nt, synthetic construct
  source 1..19: mol_type = other RNA
aagtccccgtggaaggctc

SEQ ID NO: 26142 - RNA, 19 nt, synthetic construct
  source 1..19: mol_type = other RNA
gtcgaggtgcgggtcttgc

SEQ ID NO: 26143 - RNA, 19 nt, synthetic construct
  source 1..19: mol_type = other RNA
ctgtagtccagccactctg

SEQ ID NO: 26144 - RNA, 19 nt, synthetic construct
  source 1..19: mol_type = other RNA
ggacgtggaactggtggcc

SEQ ID NO: 26145 - RNA, 19 nt, synthetic construct
  source 1..19: mol_type = other RNA
tgctcggctctgtgaggat

SEQ ID NO: 26146 - RNA, 19 nt, synthetic construct
  source 1..19: mol_type = other RNA
gcggtggccgtggatccgg

SEQ ID NO: 26147 - RNA, 19 nt, synthetic construct
  source 1..19: mol_type = other RNA
ggcggtggccgtggatccg

SEQ ID NO: 26148 - RNA, 19 nt, synthetic construct
  source 1..19: mol_type = other RNA
tgtggggtgccagcagttg

SEQ ID NO: 26149 - RNA, 19 nt, synthetic construct
  source 1..19: mol_type = other RNA
ggtgctcacatgtggggtg

SEQ ID NO: 26150 - RNA, 19 nt, synthetic construct
  source 1..19: mol_type = other RNA
ggaagggcagttgcagtcc

SEQ ID NO: 26151 - RNA, 19 nt, synthetic construct
  source 1..19: mol_type = other RNA
tggtagtgtgagctgttcc

SEQ ID NO: 26152 - RNA, 19 nt, synthetic construct
  source 1..19: mol_type = other RNA
cactggaggcgtgagtgcc

SEQ ID NO: 26153 - RNA, 19 nt, synthetic construct
  source 1..19: mol_type = other RNA
gtggtcagcactctggcgg

SEQ ID NO: 26154 - RNA, 19 nt, synthetic construct
  source 1..19: mol_type = other RNA
tcagtgatgggggagtacc

SEQ ID NO: 26155 - RNA, 19 nt, synthetic construct
  source 1..19: mol_type = other RNA
gtggtcagtgatgggggag

SEQ ID NO: 26156 - RNA, 19 nt, synthetic construct
  source 1..19: mol_type = other RNA
gtggtctgtgctgggacgg

SEQ ID NO: 26157 - RNA, 19 nt, synthetic construct
  source 1..19: mol_type = other RNA
tgcagttgtagtggctgtt

SEQ ID NO: 26158 - RNA, 19 nt, synthetic construct
  source 1..19: mol_type = other RNA
tgctcggctctgtgaggat

SEQ ID NO: 26159 - RNA, 19 nt, synthetic construct
  source 1..19: mol_type = other RNA
ccacggtggacgagctggg

SEQ ID NO: 26160 - RNA, 19 nt, synthetic construct
  source 1..19: mol_type = other RNA
cagtgctgattgcacactg

SEQ ID NO: 26161 - RNA, 19 nt, synthetic construct
  source 1..19: mol_type = other RNA
cagcggggcggaggacact

SEQ ID NO: 26162 - RNA, 19 nt, synthetic construct
  source 1..19: mol_type = other RNA
aaggtggaatagtgggagc

SEQ ID NO: 26163 - RNA, 19 nt, synthetic construct
  source 1..19: mol_type = other RNA
tgcagttgccccggaaggt

SEQ ID NO: 26164 - RNA, 19 nt, synthetic construct
  source 1..19: mol_type = other RNA
attcccaaagcgtgcatgg

SEQ ID NO: 26165 - RNA, 19 nt, synthetic construct
  source 1..19: mol_type = other RNA
tcccatgcaccatggtgac

SEQ ID NO: 26166 - RNA, 19 nt, synthetic construct
  source 1..19: mol_type = other RNA
gacttggccattgaaggtg

SEQ ID NO: 26167 - RNA, 19 nt, synthetic construct
  source 1..19: mol_type = other RNA
gggggcacaaggttgtggc

SEQ ID NO: 26168 - RNA, 19 nt, synthetic construct
  source 1..19: mol_type = other RNA
gctgtatggggccgcatgg

SEQ ID NO: 26169 - RNA, 19 nt, synthetic construct
  source 1..19: mol_type = other RNA
catgtgtgcgttgaagagg

SEQ ID NO: 26170 - RNA, 19 nt, synthetic construct
  source 1..19: mol_type = other RNA
aggcaggtacacatgtggc

SEQ ID NO: 26171 - RNA, 19 nt, synthetic construct
  source 1..19: mol_type = other RNA
ctgacattgcaccgttggg

SEQ ID NO: 26172 - RNA, 19 nt, synthetic construct
  source 1..19: mol_type = other RNA
cggccactctcttgtactc

SEQ ID NO: 26173 - RNA, 19 nt, synthetic construct
  source 1..19: mol_type = other RNA
gcccggccactctcttgta

SEQ ID NO: 26174 - RNA, 19 nt, synthetic construct
  source 1..19: mol_type = other RNA
cacagcactgcccggccac

SEQ ID NO: 26175 - RNA, 19 nt, synthetic construct
  source 1..19: mol_type = other RNA
ggtttcattcagctggact

SEQ ID NO: 26176 - RNA, 19 nt, synthetic construct
  source 1..19: mol_type = other RNA
aggttttcatgatcagaca

SEQ ID NO: 26177 - RNA, 19 nt, synthetic construct
  source 1..19: mol_type = other RNA
acatgcttagtttgttcca

SEQ ID NO: 26178 - RNA, 19 nt, synthetic construct
  source 1..19: mol_type = other RNA
cggacgtggccagctggaa

SEQ ID NO: 26179 - RNA, 19 nt, synthetic construct
  source 1..19: mol_type = other RNA
caggcatggacaggcggcc

SEQ ID NO: 26180 - RNA, 19 nt, synthetic construct
  source 1..19: mol_type = other RNA
gcaggaatgtccacacgca

SEQ ID NO: 26181 - RNA, 19 nt, synthetic construct
  source 1..19: mol_type = other RNA
tgggtgtgctagacaccgg

SEQ ID NO: 26182 - RNA, 19 nt, synthetic construct
  source 1..19: mol_type = other RNA
tggctgtagtgctcggctc

SEQ ID NO: 26183 - RNA, 19 nt, synthetic construct
  source 1..19: mol_type = other RNA
tggctgtagtgctcggctc

SEQ ID NO: 26184 - RNA, 19 nt, synthetic construct
  source 1..19: mol_type = other RNA
tggctgtagtgctcggctc

SEQ ID NO: 26185 - RNA, 19 nt, synthetic construct
  source 1..19: mol_type = other RNA
tgaggatccgggtcgtccc

SEQ ID NO: 26186 - RNA, 19 nt, synthetic construct
  source 1..19: mol_type = other RNA
ggtgcagtcggatgaacac

SEQ ID NO: 26187 - RNA, 19 nt, synthetic construct
  source 1..19: mol_type = other RNA
ttcacccacggggtgggca

SEQ ID NO: 26188 - RNA, 19 nt, synthetic construct
  source 1..19: mol_type = other RNA
gctcattgtcgtctctgtc

SEQ ID NO: 26189 - RNA, 19 nt, synthetic construct
  source 1..19: mol_type = other RNA
ctgtggtcggtggcggggt

SEQ ID NO: 26190 - RNA, 19 nt, synthetic construct
  source 1..19: mol_type = other RNA
ggggagtaccactggtctg

SEQ ID NO: 26191 - RNA, 19 nt, synthetic construct
  source 1..19: mol_type = other RNA
ggggagtaccactggtctg

SEQ ID NO: 26192 - RNA, 19 nt, synthetic construct
  source 1..19: mol_type = other RNA
ggggagtaccactggtctg

SEQ ID NO: 26193 - RNA, 19 nt, synthetic construct
  source 1..19: mol_type = other RNA
ggggagtaccactggtctg

SEQ ID NO: 26194 - RNA, 19 nt, synthetic construct
  source 1..19: mol_type = other RNA
ggggagtaccactggtctg

SEQ ID NO: 26195 - RNA, 19 nt, synthetic construct
  source 1..19: mol_type = other RNA
agctgcagtcaccatgcag

SEQ ID NO: 26196 - RNA, 19 nt, synthetic construct
  source 1..19: mol_type = other RNA
acctgcatgagtggcacca

SEQ ID NO: 26197 - RNA, 19 nt, synthetic construct
  source 1..19: mol_type = other RNA
agtgatgggggagtaccac

SEQ ID NO: 26198 - RNA, 19 nt, synthetic construct
  source 1..19: mol_type = other RNA
tcacggttcctgcagacca

SEQ ID NO: 26199 - RNA, 19 nt, synthetic construct
  source 1..19: mol_type = other RNA
ggtgtggacagtctctgga

SEQ ID NO: 26200 - RNA, 19 nt, synthetic construct
  source 1..19: mol_type = other RNA
agtgatgggggagtaccac

SEQ ID NO: 26201 - RNA, 19 nt, synthetic construct
  source 1..19: mol_type = other RNA
tcacggttcctgcagacca

SEQ ID NO: 26202 - RNA, 19 nt, synthetic construct
  source 1..19: mol_type = other RNA
ggtgtggacagtctctgga

SEQ ID NO: 26203 - RNA, 19 nt, synthetic construct
  source 1..19: mol_type = other RNA
agtgatgggggagtaccac

SEQ ID NO: 26204 - RNA, 19 nt, synthetic construct
  source 1..19: mol_type = other RNA
tcacggttcctgcagacca

SEQ ID NO: 26205 - RNA, 19 nt, synthetic construct
  source 1..19: mol_type = other RNA
agtgatgggggagtaccac

SEQ ID NO: 26206 - RNA, 19 nt, synthetic construct
  source 1..19: mol_type = other RNA
tcacggttcctgcagacca

SEQ ID NO: 26207 - RNA, 19 nt, synthetic construct
  source 1..19: mol_type = other RNA
ggtgtggacagtctctgga

SEQ ID NO: 26208 - RNA, 19 nt, synthetic construct
  source 1..19: mol_type = other RNA
agtgatgggggagtaccac

SEQ ID NO: 26209 - RNA, 19 nt, synthetic construct
  source 1..19: mol_type = other RNA
atggcattgtcgtcgaagt

SEQ ID NO: 26210 - RNA, 19 nt, synthetic construct
  source 1..19: mol_type = other RNA
gtttctcatcataggtgga

SEQ ID NO: 26211 - RNA, 19 nt, synthetic construct
  source 1..19: mol_type = other RNA
aaaggtcccctcttggagg

SEQ ID NO: 26212 - RNA, 19 nt, synthetic construct
  source 1..19: mol_type = other RNA
gaagtccccgtggaaggct

SEQ ID NO: 26213 - RNA, 19 nt, synthetic construct
  source 1..19: mol_type = other RNA
gaagtccccgtggaaggct

SEQ ID NO: 26214 - RNA, 19 nt, synthetic construct
  source 1..19: mol_type = other RNA
gagtagaggaggtgtggat

SEQ ID NO: 26215 - RNA, 19 nt, synthetic construct
  source 1..19: mol_type = other RNA
ccccacatgctgcagatgc

SEQ ID NO: 26216 - RNA, 19 nt, synthetic construct
  source 1..19: mol_type = other RNA
tgcccggccactctcttgt

SEQ ID NO: 26217 - RNA, 19 nt, synthetic construct
  source 1..19: mol_type = other RNA
ggcacgcgctcggggcacc

SEQ ID NO: 26218 - RNA, 19 nt, synthetic construct
  source 1..19: mol_type = other RNA
ggtggtgttgaaggaggtg

SEQ ID NO: 26219 - RNA, 19 nt, synthetic construct
  source 1..19: mol_type = other RNA
gtccaggctgagcgtcacc

SEQ ID NO: 26220 - RNA, 19 nt, synthetic construct
  source 1..19: mol_type = other RNA
ggtgtgcagttacagctct

SEQ ID NO: 26221 - RNA, 19 nt, synthetic construct
  source 1..19: mol_type = other RNA
gtgagggccgccgtcgacc

SEQ ID NO: 26222 - RNA, 19 nt, synthetic construct
  source 1..19: mol_type = other RNA
tggaagggctgagcgtgtt

SEQ ID NO: 26223 - RNA, 19 nt, synthetic construct
  source 1..19: mol_type = other RNA
ggagctgttctcagggtgg

SEQ ID NO: 26224 - RNA, 19 nt, synthetic construct
  source 1..19: mol_type = other RNA
tggacagtctctggagtgg

SEQ ID NO: 26225 - RNA, 19 nt, synthetic construct
  source 1..19: mol_type = other RNA
tggccgtgctggtcagcac

SEQ ID NO: 26226 - RNA, 19 nt, synthetic construct
  source 1..19: mol_type = other RNA
gctgtagtgctgggctctg

SEQ ID NO: 26227 - RNA, 19 nt, synthetic construct
  source 1..19: mol_type = other RNA
tggccgtgctggtcagcac

SEQ ID NO: 26228 - RNA, 19 nt, synthetic construct
  source 1..19: mol_type = other RNA
gtgatcagtgatgggggag

SEQ ID NO: 26229 - RNA, 19 nt, synthetic construct
  source 1..19: mol_type = other RNA
tggacagtctctggagtgg

SEQ ID NO: 26230 - RNA, 19 nt, synthetic construct
  source 1..19: mol_type = other RNA
tggccgtgctggtcagcac

SEQ ID NO: 26231 - RNA, 19 nt, synthetic construct
  source 1..19: mol_type = other RNA
gagctgggaaccgtggagg

SEQ ID NO: 26232 - RNA, 19 nt, synthetic construct
  source 1..19: mol_type = other RNA
ggtagaggctgagattccc

SEQ ID NO: 26233 - RNA, 19 nt, synthetic construct
  source 1..19: mol_type = other RNA
gctcacgcccagggcagga

SEQ ID NO: 26234 - RNA, 19 nt, synthetic construct
  source 1..19: mol_type = other RNA
ggacaggtagtattgttgc

SEQ ID NO: 26235 - RNA, 19 nt, synthetic construct
  source 1..19: mol_type = other RNA
actctcttgtactcaaagc

SEQ ID NO: 26236 - RNA, 19 nt, synthetic construct
  source 1..19: mol_type = other RNA
cagcaaatggactccaccc

SEQ ID NO: 26237 - RNA, 19 nt, synthetic construct
  source 1..19: mol_type = other RNA
cagtggactcagtcgtagt

SEQ ID NO: 26238 - RNA, 19 nt, synthetic construct
  source 1..19: mol_type = other RNA
cagtggactcagtcgtagt

SEQ ID NO: 26239 - RNA, 19 nt, synthetic construct
  source 1..19: mol_type = other RNA
gagggtgccagcagttgcc

SEQ ID NO: 26240 - RNA, 19 nt, synthetic construct
  source 1..19: mol_type = other RNA
gctagacaccggggctgcg

SEQ ID NO: 26241 - RNA, 19 nt, synthetic construct
  source 1..19: mol_type = other RNA
ccgtgggtctcgatgacca

SEQ ID NO: 26242 - RNA, 19 nt, synthetic construct
  source 1..19: mol_type = other RNA
atgtgtgcgttgaagagga

SEQ ID NO: 26243 - RNA, 19 nt, synthetic construct
  source 1..19: mol_type = other RNA
acaccagcgtccggcacgc

SEQ ID NO: 26244 - RNA, 19 nt, synthetic construct
  source 1..19: mol_type = other RNA
acacctgcatgagtggcac

SEQ ID NO: 26245 - RNA, 19 nt, synthetic construct
  source 1..19: mol_type = other RNA
tggccccggttgtggtggc

SEQ ID NO: 26246 - RNA, 19 nt, synthetic construct
  source 1..19: mol_type = other RNA
tggccccggttgtggtggc

SEQ ID NO: 26247 - RNA, 19 nt, synthetic construct
  source 1..19: mol_type = other RNA
gccgccttgcctgtcgcag

SEQ ID NO: 26248 - RNA, 19 nt, synthetic construct
  source 1..19: mol_type = other RNA
tgatgggggagtaccactg

SEQ ID NO: 26249 - RNA, 19 nt, synthetic construct
  source 1..19: mol_type = other RNA
tgatgggggagtaccactg

SEQ ID NO: 26250 - RNA, 19 nt, synthetic construct
  source 1..19: mol_type = other RNA
tgatgggggagtaccactg

SEQ ID NO: 26251 - RNA, 19 nt, synthetic construct
  source 1..19: mol_type = other RNA
tgatgggggagtaccactg

SEQ ID NO: 26252 - RNA, 19 nt, synthetic construct
  source 1..19: mol_type = other RNA
tgatgggggagtaccactg

SEQ ID NO: 26253 - RNA, 19 nt, synthetic construct
  source 1..19: mol_type = other RNA
cagtgaggatccgggtcgt

SEQ ID NO: 26254 - RNA, 19 nt, synthetic construct
  source 1..19: mol_type = other RNA
gaggtctgcagcggaaggt

SEQ ID NO: 26255 - RNA, 19 nt, synthetic construct
  source 1..19: mol_type = other RNA
gcatagaactcgttgaagg

SEQ ID NO: 26256 - RNA, 19 nt, synthetic construct
  source 1..19: mol_type = other RNA
cagcctggcgttgtgggca

SEQ ID NO: 26257 - RNA, 19 nt, synthetic construct
  source 1..19: mol_type = other RNA
actggaagggtggttgcag

SEQ ID NO: 26258 - RNA, 19 nt, synthetic construct
  source 1..19: mol_type = other RNA
atgggagttgtccctggag

SEQ ID NO: 26259 - RNA, 19 nt, synthetic construct
  source 1..19: mol_type = other RNA
actggaagggtggttgcag

SEQ ID NO: 26260 - RNA, 19 nt, synthetic construct
  source 1..19: mol_type = other RNA
actggaagggtggttgcag

SEQ ID NO: 26261 - RNA, 19 nt, synthetic construct
  source 1..19: mol_type = other RNA
acagaacgtagctgcagtc

SEQ ID NO: 26262 - RNA, 19 nt, synthetic construct
  source 1..19: mol_type = other RNA
tgacaaacacctgcatgag

SEQ ID NO: 26263 - RNA, 19 nt, synthetic construct
  source 1..19: mol_type = other RNA
tgcacaccctgtgcttttc

SEQ ID NO: 26264 - RNA, 19 nt, synthetic construct
  source 1..19: mol_type = other RNA
ctgcacaccctgtgctttt

SEQ ID NO: 26265 - RNA, 19 nt, synthetic construct
  source 1..19: mol_type = other RNA
ccccaggggtgcccgccga

SEQ ID NO: 26266 - RNA, 19 nt, synthetic construct
  source 1..19: mol_type = other RNA
ggatgctcggggtcaccca

SEQ ID NO: 26267 - RNA, 19 nt, synthetic construct
  source 1..19: mol_type = other RNA
ggccgtgggtgtggtggtc

SEQ ID NO: 26268 - RNA, 19 nt, synthetic construct
  source 1..19: mol_type = other RNA
gctggggggcagggatcgc

SEQ ID NO: 26269 - RNA, 19 nt, synthetic construct
  source 1..19: mol_type = other RNA
ggccgtgggtgtggtggtc

SEQ ID NO: 26270 - RNA, 19 nt, synthetic construct
  source 1..19: mol_type = other RNA
aggtgttgtccctggagtt

SEQ ID NO: 26271 - RNA, 19 nt, synthetic construct
  source 1..19: mol_type = other RNA
cagtccttggactggagga

SEQ ID NO: 26272 - RNA, 19 nt, synthetic construct
  source 1..19: mol_type = other RNA
ggccgtgggtgtggtggtc

SEQ ID NO: 26273 - RNA, 19 nt, synthetic construct
  source 1..19: mol_type = other RNA
ggccgtgggtgtggtggtc

SEQ ID NO: 26274 - RNA, 19 nt, synthetic construct
  source 1..19: mol_type = other RNA
aggtgttgtccctggagtt

SEQ ID NO: 26275 - RNA, 19 nt, synthetic construct
  source 1..19: mol_type = other RNA
cagtccttggactggagga

SEQ ID NO: 26276 - RNA, 19 nt, synthetic construct
  source 1..19: mol_type = other RNA
ggccgtgggtgtggtggtc

SEQ ID NO: 26277 - RNA, 19 nt, synthetic construct
  source 1..19: mol_type = other RNA
gggtgttgtccctggagtt

SEQ ID NO: 26278 - RNA, 19 nt, synthetic construct
  source 1..19: mol_type = other RNA
cagtccttggactggagga

SEQ ID NO: 26279 - RNA, 19 nt, synthetic construct
  source 1..19: mol_type = other RNA
caggggtgcgggtggtccc

SEQ ID NO: 26280 - RNA, 19 nt, synthetic construct
  source 1..19: mol_type = other RNA
gacccaccgctccccggga

SEQ ID NO: 26281 - RNA, 19 nt, synthetic construct
  source 1..19: mol_type = other RNA
ccgtagaaggtgccattgt

SEQ ID NO: 26282 - RNA, 19 nt, synthetic construct
  source 1..19: mol_type = other RNA
cccgtagaaggtgccattg

SEQ ID NO: 26283 - RNA, 19 nt, synthetic construct
  source 1..19: mol_type = other RNA
ccagcggccggacgtggcc

SEQ ID NO: 26284 - RNA, 19 nt, synthetic construct
  source 1..19: mol_type = other RNA
tggcattgtcgtcgaagtt

SEQ ID NO: 26285 - RNA, 19 nt, synthetic construct
  source 1..19: mol_type = other RNA
gccccggttgtggtggccg

SEQ ID NO: 26286 - RNA, 19 nt, synthetic construct
  source 1..19: mol_type = other RNA
gccccggttgtggtggccg

SEQ ID NO: 26287 - RNA, 19 nt, synthetic construct
  source 1..19: mol_type = other RNA
tcgtagagtttctcatcat

SEQ ID NO: 26288 - RNA, 19 nt, synthetic construct
  source 1..19: mol_type = other RNA
gtgggtgtcgtggccgtgg

SEQ ID NO: 26289 - RNA, 19 nt, synthetic construct
  source 1..19: mol_type = other RNA
gtgggtgtcgtggccgtgg

SEQ ID NO: 26290 - RNA, 19 nt, synthetic construct
  source 1..19: mol_type = other RNA
gtgggtgtcgtggccgtgg

SEQ ID NO: 26291 - RNA, 19 nt, synthetic construct
  source 1..19: mol_type = other RNA
ccgtgcagttgccggccgg

SEQ ID NO: 26292 - RNA, 19 nt, synthetic construct
  source 1..19: mol_type = other RNA
aagggtggttgcagtcctt

SEQ ID NO: 26293 - RNA, 19 nt, synthetic construct
  source 1..19: mol_type = other RNA
aagggtggttgcagtcctt

SEQ ID NO: 26294 - RNA, 19 nt, synthetic construct
  source 1..19: mol_type = other RNA
aagggtggttgcagtcctt

SEQ ID NO: 26295 - RNA, 19 nt, synthetic construct
  source 1..19: mol_type = other RNA
gtggccgtggatccagtgg

SEQ ID NO: 26296 - RNA, 19 nt, synthetic construct
  source 1..19: mol_type = other RNA
tacctggtaccctctctgc

SEQ ID NO: 26297 - RNA, 19 nt, synthetic construct
  source 1..19: mol_type = other RNA
ggtggaggacgggatggcc

SEQ ID NO: 26298 - RNA, 19 nt, synthetic construct
  source 1..19: mol_type = other RNA
gtcggggcaccgccatcca

SEQ ID NO: 26299 - RNA, 19 nt, synthetic construct
  source 1..19: mol_type = other RNA
gagtattccacaaaggtgg

SEQ ID NO: 26300 - RNA, 19 nt, synthetic construct
  source 1..19: mol_type = other RNA
cacggccatcccgtgggtc

SEQ ID NO: 26301 - RNA, 19 nt, synthetic construct
  source 1..19: mol_type = other RNA
gcgagctctggaggttgcc

SEQ ID NO: 26302 - RNA, 19 nt, synthetic construct
  source 1..19: mol_type = other RNA
tggtggccgtggcggtaag

SEQ ID NO: 26303 - RNA, 19 nt, synthetic construct
  source 1..19: mol_type = other RNA
aggagggtgttgccataga

SEQ ID NO: 26304 - RNA, 19 nt, synthetic construct
  source 1..19: mol_type = other RNA
ggagttgtcccaggagttg

SEQ ID NO: 26305 - RNA, 19 nt, synthetic construct
  source 1..19: mol_type = other RNA
ggggatgggagttgtccca

SEQ ID NO: 26306 - RNA, 19 nt, synthetic construct
  source 1..19: mol_type = other RNA
aggagggtgttgccataga

SEQ ID NO: 26307 - RNA, 19 nt, synthetic construct
  source 1..19: mol_type = other RNA
acagggctggagtcgagtg

SEQ ID NO: 26308 - RNA, 19 nt, synthetic construct
  source 1..19: mol_type = other RNA
aggagggcgtggccgtaga

SEQ ID NO: 26309 - RNA, 19 nt, synthetic construct
  source 1..19: mol_type = other RNA
ctttgagggtgccagcagt

SEQ ID NO: 26310 - RNA, 19 nt, synthetic construct
  source 1..19: mol_type = other RNA
aggagggtgttgccataga

SEQ ID NO: 26311 - RNA, 19 nt, synthetic construct
  source 1..19: mol_type = other RNA
acagggctggagtcgagtg

SEQ ID NO: 26312 - RNA, 19 nt, synthetic construct
  source 1..19: mol_type = other RNA
aggagggcgtggccgtaga

SEQ ID NO: 26313 - RNA, 19 nt, synthetic construct
  source 1..19: mol_type = other RNA
aggagggtgttgccataga

SEQ ID NO: 26314 - RNA, 19 nt, synthetic construct
  source 1..19: mol_type = other RNA
acagggctggagtcgagtg

SEQ ID NO: 26315 - RNA, 19 nt, synthetic construct
  source 1..19: mol_type = other RNA
tggtggccgtggcggtaag

SEQ ID NO: 26316 - RNA, 19 nt, synthetic construct
  source 1..19: mol_type = other RNA
aggagggtgttgccataga

SEQ ID NO: 26317 - RNA, 19 nt, synthetic construct
  source 1..19: mol_type = other RNA
cagctcagtgaggatccgg

SEQ ID NO: 26318 - RNA, 19 nt, synthetic construct
  source 1..19: mol_type = other RNA
agctgttcccagagtggag

SEQ ID NO: 26319 - RNA, 19 nt, synthetic construct
  source 1..19: mol_type = other RNA
gggctctggttcctagagt

SEQ ID NO: 26320 - RNA, 19 nt, synthetic construct
  source 1..19: mol_type = other RNA
cactgcccggccactctct

SEQ ID NO: 26321 - RNA, 19 nt, synthetic construct
  source 1..19: mol_type = other RNA
agcactgcccggccactct

SEQ ID NO: 26322 - RNA, 19 nt, synthetic construct
  source 1..19: mol_type = other RNA
cccaggtttcattcagctg

SEQ ID NO: 26323 - RNA, 19 nt, synthetic construct
  source 1..19: mol_type = other RNA
ctcagcctcacagaggtac

SEQ ID NO: 26324 - RNA, 19 nt, synthetic construct
  source 1..19: mol_type = other RNA
taggacagtgcaagggcac

SEQ ID NO: 26325 - RNA, 19 nt, synthetic construct
  source 1..19: mol_type = other RNA
ccgggaagccacgggtgtg

SEQ ID NO: 26326 - RNA, 19 nt, synthetic construct
  source 1..19: mol_type = other RNA
ggcgctccggccgtggcag

SEQ ID NO: 26327 - RNA, 19 nt, synthetic construct
  source 1..19: mol_type = other RNA
gtgtgccctgcattctccc

SEQ ID NO: 26328 - RNA, 19 nt, synthetic construct
  source 1..19: mol_type = other RNA
caggttttcaaacgtctca

SEQ ID NO: 26329 - RNA, 19 nt, synthetic construct
  source 1..19: mol_type = other RNA
acatcttgaagacgccctc

SEQ ID NO: 26330 - RNA, 19 nt, synthetic construct
  source 1..19: mol_type = other RNA
ggccgaagtccaggctgtg

SEQ ID NO: 26331 - RNA, 19 nt, synthetic construct
  source 1..19: mol_type = other RNA
ggccgaagtccaggctgtg

SEQ ID NO: 26332 - RNA, 19 nt, synthetic construct
  source 1..19: mol_type = other RNA
ggccgaagtccaggctgtg

SEQ ID NO: 26333 - RNA, 19 nt, synthetic construct
  source 1..19: mol_type = other RNA
ggccgaagtccaggctgtg

SEQ ID NO: 26334 - RNA, 19 nt, synthetic construct
  source 1..19: mol_type = other RNA
gacgtggaactggtggccc

SEQ ID NO: 26335 - RNA, 19 nt, synthetic construct
  source 1..19: mol_type = other RNA
ccgccatccatggtgtgcc

SEQ ID NO: 26336 - RNA, 19 nt, synthetic construct
  source 1..19: mol_type = other RNA
ggtggccccggttgtggtg

SEQ ID NO: 26337 - RNA, 19 nt, synthetic construct
  source 1..19: mol_type = other RNA
ggtggccccggttgtggtg

SEQ ID NO: 26338 - RNA, 19 nt, synthetic construct
  source 1..19: mol_type = other RNA
tgacccaggtttcattcag

SEQ ID NO: 26339 - RNA, 19 nt, synthetic construct
  source 1..19: mol_type = other RNA
aggttttcaaacgtctcaa

SEQ ID NO: 26340 - RNA, 19 nt, synthetic construct
  source 1..19: mol_type = other RNA
ggggggcagggatcgcccg

SEQ ID NO: 26341 - RNA, 19 nt, synthetic construct
  source 1..19: mol_type = other RNA
ggccgtggtgtggcccggg

SEQ ID NO: 26342 - RNA, 19 nt, synthetic construct
  source 1..19: mol_type = other RNA
ggccgtggtgtggcccggg

SEQ ID NO: 26343 - RNA, 19 nt, synthetic construct
  source 1..19: mol_type = other RNA
tagtggaagtcaccccagg

SEQ ID NO: 26344 - RNA, 19 nt, synthetic construct
  source 1..19: mol_type = other RNA
gtcgtagagtttctcatca

SEQ ID NO: 26345 - RNA, 19 nt, synthetic construct
  source 1..19: mol_type = other RNA
gtcggcctcactcaggccg

SEQ ID NO: 26346 - RNA, 19 nt, synthetic construct
  source 1..19: mol_type = other RNA
gcactcccacctccggttc

SEQ ID NO: 26347 - RNA, 19 nt, synthetic construct
  source 1..19: mol_type = other RNA
ggggcaggtgtccggagtc

SEQ ID NO: 26348 - RNA, 19 nt, synthetic construct
  source 1..19: mol_type = other RNA
gtagctgtaggtcctgtcc

SEQ ID NO: 26349 - RNA, 19 nt, synthetic construct
  source 1..19: mol_type = other RNA
gcatacctggtaccctctc

SEQ ID NO: 26350 - RNA, 19 nt, synthetic construct
  source 1..19: mol_type = other RNA
gcactcgatgtcagccagc

SEQ ID NO: 26351 - RNA, 19 nt, synthetic construct
  source 1..19: mol_type = other RNA
ccagtctgcgaggtgaggg

SEQ ID NO: 26352 - RNA, 19 nt, synthetic construct
  source 1..19: mol_type = other RNA
ccctccagcggccctgatc

SEQ ID NO: 26353 - RNA, 19 nt, synthetic construct
  source 1..19: mol_type = other RNA
ctgcagtggtcgtcactgc

SEQ ID NO: 26354 - RNA, 19 nt, synthetic construct
  source 1..19: mol_type = other RNA
ggcacgtcccctgcagtgg

SEQ ID NO: 26355 - RNA, 19 nt, synthetic construct
  source 1..19: mol_type = other RNA
tggaagcggtgctggctgt

SEQ ID NO: 26356 - RNA, 19 nt, synthetic construct
  source 1..19: mol_type = other RNA
gccgtggatccagtggacg

SEQ ID NO: 26357 - RNA, 19 nt, synthetic construct
  source 1..19: mol_type = other RNA
cacactggaggcgtgagtg

SEQ ID NO: 26358 - RNA, 19 nt, synthetic construct
  source 1..19: mol_type = other RNA
tgtgggtggtgcccaagat

SEQ ID NO: 26359 - RNA, 19 nt, synthetic construct
  source 1..19: mol_type = other RNA
cccggcatggggtagctgt

SEQ ID NO: 26360 - RNA, 19 nt, synthetic construct
  source 1..19: mol_type = other RNA
gtgctcacatgtggggtgc

SEQ ID NO: 26361 - RNA, 19 nt, synthetic construct
  source 1..19: mol_type = other RNA
ggccccggttgtggtggcc

SEQ ID NO: 26362 - RNA, 19 nt, synthetic construct
  source 1..19: mol_type = other RNA
taggtgttgtccctggagt

SEQ ID NO: 26363 - RNA, 19 nt, synthetic construct
  source 1..19: mol_type = other RNA
cccggcatggggtagctgt

SEQ ID NO: 26364 - RNA, 19 nt, synthetic construct
  source 1..19: mol_type = other RNA
ggaagggtggttgcagtcc

SEQ ID NO: 26365 - RNA, 19 nt, synthetic construct
  source 1..19: mol_type = other RNA
ctgtggatttggtggctgt

SEQ ID NO: 26366 - RNA, 19 nt, synthetic construct
  source 1..19: mol_type = other RNA
cccttgtcgtggtggcctt

SEQ ID NO: 26367 - RNA, 19 nt, synthetic construct
  source 1..19: mol_type = other RNA
cacactggaggcgtgagtg

SEQ ID NO: 26368 - RNA, 19 nt, synthetic construct
  source 1..19: mol_type = other RNA
tgtgggtggtgcccaagat

SEQ ID NO: 26369 - RNA, 19 nt, synthetic construct
  source 1..19: mol_type = other RNA
cccggcatggggtagctgt

SEQ ID NO: 26370 - RNA, 19 nt, synthetic construct
  source 1..19: mol_type = other RNA
gtgctcacatgtggggtgc

SEQ ID NO: 26371 - RNA, 19 nt, synthetic construct
  source 1..19: mol_type = other RNA
taggtgttgtccctggagt

SEQ ID NO: 26372 - RNA, 19 nt, synthetic construct
  source 1..19: mol_type = other RNA
cccggcatggggtagctgt

SEQ ID NO: 26373 - RNA, 19 nt, synthetic construct
  source 1..19: mol_type = other RNA
ggaagggtggttgcagtcc

SEQ ID NO: 26374 - RNA, 19 nt, synthetic construct
  source 1..19: mol_type = other RNA
ctgtggatttggtggctgt

SEQ ID NO: 26375 - RNA, 19 nt, synthetic construct
  source 1..19: mol_type = other RNA
cccttgtcgtggtggcctt

SEQ ID NO: 26376 - RNA, 19 nt, synthetic construct
  source 1..19: mol_type = other RNA
gccgtggatccagtggacg

SEQ ID NO: 26377 - RNA, 19 nt, synthetic construct
  source 1..19: mol_type = other RNA
gtgctcacatgtggggtgc

SEQ ID NO: 26378 - RNA, 19 nt, synthetic construct
  source 1..19: mol_type = other RNA
ggccccggttgtggtggcc

SEQ ID NO: 26379 - RNA, 19 nt, synthetic construct
  source 1..19: mol_type = other RNA
cacactggaggcgtgagtg

SEQ ID NO: 26380 - RNA, 19 nt, synthetic construct
  source 1..19: mol_type = other RNA
ggaagggtggttgcagtcc

SEQ ID NO: 26381 - RNA, 19 nt, synthetic construct
  source 1..19: mol_type = other RNA
ggaaggtgtaagaggtgcc

SEQ ID NO: 26382 - RNA, 19 nt, synthetic construct
  source 1..19: mol_type = other RNA
atggacttgtagtggatgc

SEQ ID NO: 26383 - RNA, 19 nt, synthetic construct
  source 1..19: mol_type = other RNA
ggttgcacggcgggggctg

SEQ ID NO: 26384 - RNA, 19 nt, synthetic construct
  source 1..19: mol_type = other RNA
gaggcaggcggtctggacg

SEQ ID NO: 26385 - RNA, 19 nt, synthetic construct
  source 1..19: mol_type = other RNA
gtaggtgtgcaggatggct

SEQ ID NO: 26386 - RNA, 19 nt, synthetic construct
  source 1..19: mol_type = other RNA
cacccttctggggccggtt

SEQ ID NO: 26387 - RNA, 19 nt, synthetic construct
  source 1..19: mol_type = other RNA
cctgtcgcagcttcctggc

SEQ ID NO: 26388 - RNA, 19 nt, synthetic construct
  source 1..19: mol_type = other RNA
gctgttcccagagtggagg

SEQ ID NO: 26389 - RNA, 19 nt, synthetic construct
  source 1..19: mol_type = other RNA
ggttgcaccaaccccgtag

SEQ ID NO: 26390 - RNA, 19 nt, synthetic construct
  source 1..19: mol_type = other RNA
ccgccttaaaggtcccctc

SEQ ID NO: 26391 - RNA, 19 nt, synthetic construct
  source 1..19: mol_type = other RNA
catgtcgggaagctgcgcc

SEQ ID NO: 26392 - RNA, 19 nt, synthetic construct
  source 1..19: mol_type = other RNA
gtcgtggtggtaagcactg

SEQ ID NO: 26393 - RNA, 19 nt, synthetic construct
  source 1..19: mol_type = other RNA
catggccgtagagctggtg

SEQ ID NO: 26394 - RNA, 19 nt, synthetic construct
  source 1..19: mol_type = other RNA
catggccgtagagctggtg

SEQ ID NO: 26395 - RNA, 19 nt, synthetic construct
  source 1..19: mol_type = other RNA
ccaaccccgtagaaggtgc

SEQ ID NO: 26396 - RNA, 19 nt, synthetic construct
  source 1..19: mol_type = other RNA
gtcgtcactgcagcagagg

SEQ ID NO: 26397 - RNA, 19 nt, synthetic construct
  source 1..19: mol_type = other RNA
cttgtcgtggtggccttcg

SEQ ID NO: 26398 - RNA, 19 nt, synthetic construct
  source 1..19: mol_type = other RNA
cttgtcgtggtggccttcg

SEQ ID NO: 26399 - RNA, 19 nt, synthetic construct
  source 1..19: mol_type = other RNA
cggttgacagcgggtcgtg

SEQ ID NO: 26400 - RNA, 19 nt, synthetic construct
  source 1..19: mol_type = other RNA
agagtgcgtgatgtcatcc

SEQ ID NO: 26401 - RNA, 19 nt, synthetic construct
  source 1..19: mol_type = other RNA
gtgtcgtggccgtggtgct

SEQ ID NO: 26402 - RNA, 19 nt, synthetic construct
  source 1..19: mol_type = other RNA
gtgtcgtggccgtggtgct

SEQ ID NO: 26403 - RNA, 19 nt, synthetic construct
  source 1..19: mol_type = other RNA
gtgtcgtggccgtggtgct

SEQ ID NO: 26404 - RNA, 19 nt, synthetic construct
  source 1..19: mol_type = other RNA
gtcgtggtggccttcgtgg

SEQ ID NO: 26405 - RNA, 19 nt, synthetic construct
  source 1..19: mol_type = other RNA
gtcgtggtggccttcgtgg

SEQ ID NO: 26406 - RNA, 19 nt, synthetic construct
  source 1..19: mol_type = other RNA
acgagctgggaaccgtgga

SEQ ID NO: 26407 - RNA, 19 nt, synthetic construct
  source 1..19: mol_type = other RNA
cacgcatggtggtggtccc

SEQ ID NO: 26408 - RNA, 19 nt, synthetic construct
  source 1..19: mol_type = other RNA
gtagtattgttgcaggcat

SEQ ID NO: 26409 - RNA, 19 nt, synthetic construct
  source 1..19: mol_type = other RNA
gtggttgtgttgcacacgc

SEQ ID NO: 26410 - RNA, 19 nt, synthetic construct
  source 1..19: mol_type = other RNA
tggcggtgtgggtggtccc

SEQ ID NO: 26411 - RNA, 19 nt, synthetic construct
  source 1..19: mol_type = other RNA
tggcggtgtgggtggtccc

SEQ ID NO: 26412 - RNA, 19 nt, synthetic construct
  source 1..19: mol_type = other RNA
tggcggtgtgggtggtccc

SEQ ID NO: 26413 - RNA, 19 nt, synthetic construct
  source 1..19: mol_type = other RNA
tgcgtaagcctccaggctc

SEQ ID NO: 26414 - RNA, 19 nt, synthetic construct
  source 1..19: mol_type = other RNA
gcgctcggggcacccatcc

SEQ ID NO: 26415 - RNA, 19 nt, synthetic construct
  source 1..19: mol_type = other RNA
gaagggtggttgcagtcct

SEQ ID NO: 26416 - RNA, 19 nt, synthetic construct
  source 1..19: mol_type = other RNA
gaagggtggttgcagtcct

SEQ ID NO: 26417 - RNA, 19 nt, synthetic construct
  source 1..19: mol_type = other RNA
gaagggtggttgcagtcct

SEQ ID NO: 26418 - RNA, 19 nt, synthetic construct
  source 1..19: mol_type = other RNA
gggggtgactcggtggttc

SEQ ID NO: 26419 - RNA, 19 nt, synthetic construct
  source 1..19: mol_type = other RNA
cagtgcgtcccccaccacg

SEQ ID NO: 26420 - RNA, 19 nt, synthetic construct
  source 1..19: mol_type = other RNA
cgccatgtgcccaagctcc

SEQ ID NO: 26421 - RNA, 19 nt, synthetic construct
  source 1..19: mol_type = other RNA
gttgctgctagggtgtggg

SEQ ID NO: 26422 - RNA, 19 nt, synthetic construct
  source 1..19: mol_type = other RNA
tggtcgtccctggggaagg

SEQ ID NO: 26423 - RNA, 19 nt, synthetic construct
  source 1..19: mol_type = other RNA
gtagctgcagtcaccatgc

SEQ ID NO: 26424 - RNA, 19 nt, synthetic construct
  source 1..19: mol_type = other RNA
cccatgtgggttgtagaag

SEQ ID NO: 26425 - RNA, 19 nt, synthetic construct
  source 1..19: mol_type = other RNA
agggtgttgccatagaacc

SEQ ID NO: 26426 - RNA, 19 nt, synthetic construct
  source 1..19: mol_type = other RNA
gaggagggtgttgccatag

SEQ ID NO: 26427 - RNA, 19 nt, synthetic construct
  source 1..19: mol_type = other RNA
gggtgtcgtggccgtggtg

SEQ ID NO: 26428 - RNA, 19 nt, synthetic construct
  source 1..19: mol_type = other RNA
agggtgttgccatagaacc

SEQ ID NO: 26429 - RNA, 19 nt, synthetic construct
  source 1..19: mol_type = other RNA
gaggagggtgttgccatag

SEQ ID NO: 26430 - RNA, 19 nt, synthetic construct
  source 1..19: mol_type = other RNA
agggtgttgccatagaacc

SEQ ID NO: 26431 - RNA, 19 nt, synthetic construct
  source 1..19: mol_type = other RNA
gaggagggtgttgccatag

SEQ ID NO: 26432 - RNA, 19 nt, synthetic construct
  source 1..19: mol_type = other RNA
gggtgtcgtggccgtggtg

SEQ ID NO: 26433 - RNA, 19 nt, synthetic construct
  source 1..19: mol_type = other RNA
agggtgttgccatagaacc

SEQ ID NO: 26434 - RNA, 19 nt, synthetic construct
  source 1..19: mol_type = other RNA
gaggagggtgttgccatag

SEQ ID NO: 26435 - RNA, 19 nt, synthetic construct
  source 1..19: mol_type = other RNA
gggtgtcgtggccgtggtg

SEQ ID NO: 26436 - RNA, 19 nt, synthetic construct
  source 1..19: mol_type = other RNA
agggtgttgccatagaacc

SEQ ID NO: 26437 - RNA, 19 nt, synthetic construct
  source 1..19: mol_type = other RNA
gaggagggtgttgccatag

SEQ ID NO: 26438 - RNA, 19 nt, synthetic construct
  source 1..19: mol_type = other RNA
agtgcgtcccccaccacgg

SEQ ID NO: 26439 - RNA, 19 nt, synthetic construct
  source 1..19: mol_type = other RNA
gtaccaagggtgcttgtgt

SEQ ID NO: 26440 - RNA, 19 nt, synthetic construct
  source 1..19: mol_type = other RNA
tagttggcactttggtagt

SEQ ID NO: 26441 - RNA, 19 nt, synthetic construct
  source 1..19: mol_type = other RNA
ggcgggtccaggcggtgcc

SEQ ID NO: 26442 - RNA, 19 nt, synthetic construct
  source 1..19: mol_type = other RNA
cttgggtgccagggcgtcc

SEQ ID NO: 26443 - RNA, 19 nt, synthetic construct
  source 1..19: mol_type = other RNA
ggggtgatgggtgttgtcc

SEQ ID NO: 26444 - RNA, 19 nt, synthetic construct
  source 1..19: mol_type = other RNA
cggtcttattgtagatgac

SEQ ID NO: 26445 - RNA, 19 nt, synthetic construct
  source 1..19: mol_type = other RNA
cccgtggtggctgtaccaa

SEQ ID NO: 26446 - RNA, 19 nt, synthetic construct
  source 1..19: mol_type = other RNA
cggttgcacggcgggggct

SEQ ID NO: 26447 - RNA, 19 nt, synthetic construct
  source 1..19: mol_type = other RNA
cctcgtccgtgcagttgcc

SEQ ID NO: 26448 - RNA, 19 nt, synthetic construct
  source 1..19: mol_type = other RNA
catagccccccggagcagg

SEQ ID NO: 26449 - RNA, 19 nt, synthetic construct
  source 1..19: mol_type = other RNA
cgtagctgcagtcaccatg

SEQ ID NO: 26450 - RNA, 19 nt, synthetic construct
  source 1..19: mol_type = other RNA
gcatgagtggcaccagctg

SEQ ID NO: 26451 - RNA, 19 nt, synthetic construct
  source 1..19: mol_type = other RNA
gagaaggcactgttgggat

SEQ ID NO: 26452 - RNA, 19 nt, synthetic construct
  source 1..19: mol_type = other RNA
ggagtggcagcgcgagaag

SEQ ID NO: 26453 - RNA, 19 nt, synthetic construct
  source 1..19: mol_type = other RNA
ccaggggtgcccgccgagc

SEQ ID NO: 26454 - RNA, 19 nt, synthetic construct
  source 1..19: mol_type = other RNA
cctcctcggcaatgcagcc

SEQ ID NO: 26455 - RNA, 19 nt, synthetic construct
  source 1..19: mol_type = other RNA
gtcctggtagctgtaggtc

SEQ ID NO: 26456 - RNA, 19 nt, synthetic construct
  source 1..19: mol_type = other RNA
tcaaagtctccgcctccca

SEQ ID NO: 26457 - RNA, 19 nt, synthetic construct
  source 1..19: mol_type = other RNA
gagtaccactggtctgtgt

SEQ ID NO: 26458 - RNA, 19 nt, synthetic construct
  source 1..19: mol_type = other RNA
gggatgggagttgtcccag

SEQ ID NO: 26459 - RNA, 19 nt, synthetic construct
  source 1..19: mol_type = other RNA
gcagggtcgaggtgcgggt

SEQ ID NO: 26460 - RNA, 19 nt, synthetic construct
  source 1..19: mol_type = other RNA
atgtggggtgccagcagtt

SEQ ID NO: 26461 - RNA, 19 nt, synthetic construct
  source 1..19: mol_type = other RNA
tggtgactgtgggtgtcgt

SEQ ID NO: 26462 - RNA, 19 nt, synthetic construct
  source 1..19: mol_type = other RNA
gtggtggtaagcactgtgg

SEQ ID NO: 26463 - RNA, 19 nt, synthetic construct
  source 1..19: mol_type = other RNA
acactggaagcgtgcgtgc

SEQ ID NO: 26464 - RNA, 19 nt, synthetic construct
  source 1..19: mol_type = other RNA
gagtaccactggtctgtgt

SEQ ID NO: 26465 - RNA, 19 nt, synthetic construct
  source 1..19: mol_type = other RNA
gcagggtcgaggtgcgggt

SEQ ID NO: 26466 - RNA, 19 nt, synthetic construct
  source 1..19: mol_type = other RNA
tggtctgctctgtgaggat

SEQ ID NO: 26467 - RNA, 19 nt, synthetic construct
  source 1..19: mol_type = other RNA
ggagctgttcccggggtgg

SEQ ID NO: 26468 - RNA, 19 nt, synthetic construct
  source 1..19: mol_type = other RNA
gtggtggtaagcactgtgg

SEQ ID NO: 26469 - RNA, 19 nt, synthetic construct
  source 1..19: mol_type = other RNA
gagtaccactggtctgtgt

SEQ ID NO: 26470 - RNA, 19 nt, synthetic construct
  source 1..19: mol_type = other RNA
gccggtggctgtgatcgta

SEQ ID NO: 26471 - RNA, 19 nt, synthetic construct
  source 1..19: mol_type = other RNA
gcagggtcgaggtgcgggt

SEQ ID NO: 26472 - RNA, 19 nt, synthetic construct
  source 1..19: mol_type = other RNA
atgtggggtgccagcagtt

SEQ ID NO: 26473 - RNA, 19 nt, synthetic construct
  source 1..19: mol_type = other RNA
tggtgactgtgggtgtcgt

SEQ ID NO: 26474 - RNA, 19 nt, synthetic construct
  source 1..19: mol_type = other RNA
gtggtggtaagcactgtgg

SEQ ID NO: 26475 - RNA, 19 nt, synthetic construct
  source 1..19: mol_type = other RNA
gagtaccactggtctgtgt

SEQ ID NO: 26476 - RNA, 19 nt, synthetic construct
  source 1..19: mol_type = other RNA
gcagggtcgaggtgcgggt

SEQ ID NO: 26477 - RNA, 19 nt, synthetic construct
  source 1..19: mol_type = other RNA
ggagctgttcccggggtgg

SEQ ID NO: 26478 - RNA, 19 nt, synthetic construct
  source 1..19: mol_type = other RNA
cccggtggtcccaagggtg

SEQ ID NO: 26479 - RNA, 19 nt, synthetic construct
  source 1..19: mol_type = other RNA
atgtggggtgccagcagtt

SEQ ID NO: 26480 - RNA, 19 nt, synthetic construct
  source 1..19: mol_type = other RNA
tggtgactgtgggtgtcgt

SEQ ID NO: 26481 - RNA, 19 nt, synthetic construct
  source 1..19: mol_type = other RNA
gagtaccactggtctgtgt

SEQ ID NO: 26482 - RNA, 19 nt, synthetic construct
  source 1..19: mol_type = other RNA
ggtggcccttgtcatggtg

SEQ ID NO: 26483 - RNA, 19 nt, synthetic construct
  source 1..19: mol_type = other RNA
gaggacactggcggtgggg

SEQ ID NO: 26484 - RNA, 19 nt, synthetic construct
  source 1..19: mol_type = other RNA
ccgtctcctcgtggacccg

SEQ ID NO: 26485 - RNA, 19 nt, synthetic construct
  source 1..19: mol_type = other RNA
cgtggcagggacacatagg

SEQ ID NO: 26486 - RNA, 19 nt, synthetic construct
  source 1..19: mol_type = other RNA
ggactcagtcgtagtggct

SEQ ID NO: 26487 - RNA, 19 nt, synthetic construct
  source 1..19: mol_type = other RNA
ggactcagtcgtagtggct

SEQ ID NO: 26488 - RNA, 19 nt, synthetic construct
  source 1..19: mol_type = other RNA
cctagagttgcaggtggca

SEQ ID NO: 26489 - RNA, 19 nt, synthetic construct
  source 1..19: mol_type = other RNA
acaggcacgaaggaaacgc

SEQ ID NO: 26490 - RNA, 19 nt, synthetic construct
  source 1..19: mol_type = other RNA
tgggggagtaccactggtc

SEQ ID NO: 26491 - RNA, 19 nt, synthetic construct
  source 1..19: mol_type = other RNA
tgggggagtaccactggtc

SEQ ID NO: 26492 - RNA, 19 nt, synthetic construct
  source 1..19: mol_type = other RNA
tgggggagtaccactggtc

SEQ ID NO: 26493 - RNA, 19 nt, synthetic construct
  source 1..19: mol_type = other RNA
tgggggagtaccactggtc

SEQ ID NO: 26494 - RNA, 19 nt, synthetic construct
  source 1..19: mol_type = other RNA
tgggggagtaccactggtc

SEQ ID NO: 26495 - RNA, 19 nt, synthetic construct
  source 1..19: mol_type = other RNA
gtgcgccgggttcaggggg

SEQ ID NO: 26496 - RNA, 19 nt, synthetic construct
  source 1..19: mol_type = other RNA
cacagggcatacctggtac

SEQ ID NO: 26497 - RNA, 19 nt, synthetic construct
  source 1..19: mol_type = other RNA
gacgtcggggcaccgccat

SEQ ID NO: 26498 - RNA, 19 nt, synthetic construct
  source 1..19: mol_type = other RNA
gcccttgtcgtggtggcct

SEQ ID NO: 26499 - RNA, 19 nt, synthetic construct
  source 1..19: mol_type = other RNA
gcccttgtcgtggtggcct

SEQ ID NO: 26500 - RNA, 19 nt, synthetic construct
  source 1..19: mol_type = other RNA
gcaactggcggcagtggtt

SEQ ID NO: 26501 - RNA, 19 nt, synthetic construct
  source 1..19: mol_type = other RNA
acgcagatgcccatgtgtg

SEQ ID NO: 26502 - RNA, 19 nt, synthetic construct
  source 1..19: mol_type = other RNA
cccgaaaggggtcctgctg

SEQ ID NO: 26503 - RNA, 19 nt, synthetic construct
  source 1..19: mol_type = other RNA
ctgcgccgcccggcactcg

SEQ ID NO: 26504 - RNA, 19 nt, synthetic construct
  source 1..19: mol_type = other RNA
tcggcctgagaggtggaca

SEQ ID NO: 26505 - RNA, 19 nt, synthetic construct
  source 1..19: mol_type = other RNA
cgtaggctgcggcgttgag

SEQ ID NO: 26506 - RNA, 19 nt, synthetic construct
  source 1..19: mol_type = other RNA
ggaggcgtgcgtgccgtcc

SEQ ID NO: 26507 - RNA, 19 nt, synthetic construct
  source 1..19: mol_type = other RNA
ggtctgcagcggaaggtgg

SEQ ID NO: 26508 - RNA, 19 nt, synthetic construct
  source 1..19: mol_type = other RNA
cttggggttgatgatggag

SEQ ID NO: 26509 - RNA, 19 nt, synthetic construct
  source 1..19: mol_type = other RNA
gtcccctgcagtggtcgtc

SEQ ID NO: 26510 - RNA, 19 nt, synthetic construct
  source 1..19: mol_type = other RNA
tctctgtcctgggcgtgct

SEQ ID NO: 26511 - RNA, 19 nt, synthetic construct
  source 1..19: mol_type = other RNA
taagcactgtggaggtgtg

SEQ ID NO: 26512 - RNA, 19 nt, synthetic construct
  source 1..19: mol_type = other RNA
cccagttgtggtggccgtg

SEQ ID NO: 26513 - RNA, 19 nt, synthetic construct
  source 1..19: mol_type = other RNA
taagcactgtggaggtgtg

SEQ ID NO: 26514 - RNA, 19 nt, synthetic construct
  source 1..19: mol_type = other RNA
taagcactgtggaggtgtg

SEQ ID NO: 26515 - RNA, 19 nt, synthetic construct
  source 1..19: mol_type = other RNA
taagcactgtggaggtgtg

SEQ ID NO: 26516 - RNA, 19 nt, synthetic construct
  source 1..19: mol_type = other RNA
taagcactgtggaggtgtg

SEQ ID NO: 26517 - RNA, 19 nt, synthetic construct
  source 1..19: mol_type = other RNA
tgctgcagatgcactcgca

SEQ ID NO: 26518 - RNA, 19 nt, synthetic construct
  source 1..19: mol_type = other RNA
tcagcatcagatcacagag

SEQ ID NO: 26519 - RNA, 19 nt, synthetic construct
  source 1..19: mol_type = other RNA
gccgggaagccacgggtgt

SEQ ID NO: 26520 - RNA, 19 nt, synthetic construct
  source 1..19: mol_type = other RNA
cacacggtggagaccggga

SEQ ID NO: 26521 - RNA, 19 nt, synthetic construct
  source 1..19: mol_type = other RNA
tggtctgggttggggtagg

SEQ ID NO: 26522 - RNA, 19 nt, synthetic construct
  source 1..19: mol_type = other RNA
gacccctctctgacctggc

SEQ ID NO: 26523 - RNA, 19 nt, synthetic construct
  source 1..19: mol_type = other RNA
gtccgtcaggccgcacttc

SEQ ID NO: 26524 - RNA, 19 nt, synthetic construct
  source 1..19: mol_type = other RNA
ggagcctctggttgtgggt

SEQ ID NO: 26525 - RNA, 19 nt, synthetic construct
  source 1..19: mol_type = other RNA
ccgtggatccagtggactc

SEQ ID NO: 26526 - RNA, 19 nt, synthetic construct
  source 1..19: mol_type = other RNA
ttctgggagggtcccggtg

SEQ ID NO: 26527 - RNA, 19 nt, synthetic construct
  source 1..19: mol_type = other RNA
ggagcctctggttgtgggt

SEQ ID NO: 26528 - RNA, 19 nt, synthetic construct
  source 1..19: mol_type = other RNA
tgttgtggtcagctttgtg

SEQ ID NO: 26529 - RNA, 19 nt, synthetic construct
  source 1..19: mol_type = other RNA
ccgtggatccagtggactc

SEQ ID NO: 26530 - RNA, 19 nt, synthetic construct
  source 1..19: mol_type = other RNA
ttctgggagggtcccggtg

SEQ ID NO: 26531 - RNA, 19 nt, synthetic construct
  source 1..19: mol_type = other RNA
cagggtaggactcctgagt

SEQ ID NO: 26532 - RNA, 19 nt, synthetic construct
  source 1..19: mol_type = other RNA
gggtcagcctggcgttgtg

SEQ ID NO: 26533 - RNA, 19 nt, synthetic construct
  source 1..19: mol_type = other RNA
ggtgcccgcggggcaggtg

SEQ ID NO: 26534 - RNA, 19 nt, synthetic construct
  source 1..19: mol_type = other RNA
ctcctcggcaatgcagccc

SEQ ID NO: 26535 - RNA, 19 nt, synthetic construct
  source 1..19: mol_type = other RNA
cactcacagcccccatgtg

SEQ ID NO: 26536 - RNA, 19 nt, synthetic construct
  source 1..19: mol_type = other RNA
gggcggtgcccattgtacc

SEQ ID NO: 26537 - RNA, 19 nt, synthetic construct
  source 1..19: mol_type = other RNA
gcaggcgtcgtggggcctc

SEQ ID NO: 26538 - RNA, 19 nt, synthetic construct
  source 1..19: mol_type = other RNA
ttggaagcggtgctggctg

SEQ ID NO: 26539 - RNA, 19 nt, synthetic construct
  source 1..19: mol_type = other RNA
gggcatggccgtagagctg

SEQ ID NO: 26540 - RNA, 19 nt, synthetic construct
  source 1..19: mol_type = other RNA
gggagggtcccggtggtcc

SEQ ID NO: 26541 - RNA, 19 nt, synthetic construct
  source 1..19: mol_type = other RNA
gggcatggccgtagagctg

SEQ ID NO: 26542 - RNA, 19 nt, synthetic construct
  source 1..19: mol_type = other RNA
gggagggtcccggtggtcc

SEQ ID NO: 26543 - RNA, 19 nt, synthetic construct
  source 1..19: mol_type = other RNA
gtggaattggtggcccttg

SEQ ID NO: 26544 - RNA, 19 nt, synthetic construct
  source 1..19: mol_type = other RNA
ctcagggtggtgaggactg

SEQ ID NO: 26545 - RNA, 19 nt, synthetic construct
  source 1..19: mol_type = other RNA
tgggagccgccccacatgc

SEQ ID NO: 26546 - RNA, 19 nt, synthetic construct
  source 1..19: mol_type = other RNA
tgtggggtcagcaaatgga

SEQ ID NO: 26547 - RNA, 19 nt, synthetic construct
  source 1..19: mol_type = other RNA
ctccgcagaggaggcccaa

SEQ ID NO: 26548 - RNA, 19 nt, synthetic construct
  source 1..19: mol_type = other RNA
gggcagcaggagcacggag

SEQ ID NO: 26549 - RNA, 19 nt, synthetic construct
  source 1..19: mol_type = other RNA
tgctggcccctcacccttc

SEQ ID NO: 26550 - RNA, 19 nt, synthetic construct
  source 1..19: mol_type = other RNA
tttgggatgctgacccctc

SEQ ID NO: 26551 - RNA, 19 nt, synthetic construct
  source 1..19: mol_type = other RNA
gacgtcctggtagctgtag

SEQ ID NO: 26552 - RNA, 19 nt, synthetic construct
  source 1..19: mol_type = other RNA
tggcgatcaagcaggcgcc

SEQ ID NO: 26553 - RNA, 19 nt, synthetic construct
  source 1..19: mol_type = other RNA
gcgcctgggaaggttgcac

SEQ ID NO: 26554 - RNA, 19 nt, synthetic construct
  source 1..19: mol_type = other RNA
agggcggttgcagtccctg

SEQ ID NO: 26555 - RNA, 19 nt, synthetic construct
  source 1..19: mol_type = other RNA
agggcggttgcagtccctg

SEQ ID NO: 26556 - RNA, 19 nt, synthetic construct
  source 1..19: mol_type = other RNA
agggcggttgcagtccctg

SEQ ID NO: 26557 - RNA, 19 nt, synthetic construct
  source 1..19: mol_type = other RNA
agggcggttgcagtccctg

SEQ ID NO: 26558 - RNA, 19 nt, synthetic construct
  source 1..19: mol_type = other RNA
cccgtacatgaacacacgg

SEQ ID NO: 26559 - RNA, 19 nt, synthetic construct
  source 1..19: mol_type = other RNA
cgctcgtgagtgttggcgc

SEQ ID NO: 26560 - RNA, 19 nt, synthetic construct
  source 1..19: mol_type = other RNA
gccggacgtggccagctgg

SEQ ID NO: 26561 - RNA, 19 nt, synthetic construct
  source 1..19: mol_type = other RNA
ggccggacgtggccagctg

SEQ ID NO: 26562 - RNA, 19 nt, synthetic construct
  source 1..19: mol_type = other RNA
tgagttaccctgcagcagg

SEQ ID NO: 26563 - RNA, 19 nt, synthetic construct
  source 1..19: mol_type = other RNA
ctgagcgtgttggaagggt

SEQ ID NO: 26564 - RNA, 19 nt, synthetic construct
  source 1..19: mol_type = other RNA
tggcggtaagcactgtgga

SEQ ID NO: 26565 - RNA, 19 nt, synthetic construct
  source 1..19: mol_type = other RNA
tggcggtaagcactgtgga

SEQ ID NO: 26566 - RNA, 19 nt, synthetic construct
  source 1..19: mol_type = other RNA
ggtctggacgcactcccca

SEQ ID NO: 26567 - RNA, 19 nt, synthetic construct
  source 1..19: mol_type = other RNA
gtggtcgtccctggggaag

SEQ ID NO: 26568 - RNA, 19 nt, synthetic construct
  source 1..19: mol_type = other RNA
gagcgggggactctgttgg

SEQ ID NO: 26569 - RNA, 19 nt, synthetic construct
  source 1..19: mol_type = other RNA
acggtggacgagctgggaa

SEQ ID NO: 26570 - RNA, 19 nt, synthetic construct
  source 1..19: mol_type = other RNA
actcgcagctgccttcaaa

SEQ ID NO: 26571 - RNA, 19 nt, synthetic construct
  source 1..19: mol_type = other RNA
tgataggcgggtccaggtg

SEQ ID NO: 26572 - RNA, 19 nt, synthetic construct
  source 1..19: mol_type = other RNA
tgataggcgggtccaggtg

SEQ ID NO: 26573 - RNA, 19 nt, synthetic construct
  source 1..19: mol_type = other RNA
tgataggcgggtccaggtg

SEQ ID NO: 26574 - RNA, 19 nt, synthetic construct
  source 1..19: mol_type = other RNA
tgataggcgggtccaggtg

SEQ ID NO: 26575 - RNA, 19 nt, synthetic construct
  source 1..19: mol_type = other RNA
gcggggcggaggacactgg

SEQ ID NO: 26576 - RNA, 19 nt, synthetic construct
  source 1..19: mol_type = other RNA
tcccatccgacaccagccc

SEQ ID NO: 26577 - RNA, 19 nt, synthetic construct
  source 1..19: mol_type = other RNA
gggtgtgcagttacagctc

SEQ ID NO: 26578 - RNA, 19 nt, synthetic construct
  source 1..19: mol_type = other RNA
cagggcatacctggtaccc

SEQ ID NO: 26579 - RNA, 19 nt, synthetic construct
  source 1..19: mol_type = other RNA
ataagtgccctccagcggc

SEQ ID NO: 26580 - RNA, 19 nt, synthetic construct
  source 1..19: mol_type = other RNA
cgggatggccgtggatcca

SEQ ID NO: 26581 - RNA, 19 nt, synthetic construct
  source 1..19: mol_type = other RNA
cacggtggacgagctggga

SEQ ID NO: 26582 - RNA, 19 nt, synthetic construct
  source 1..19: mol_type = other RNA
caaggcggcccctgcagtg

SEQ ID NO: 26583 - RNA, 19 nt, synthetic construct
  source 1..19: mol_type = other RNA
tcgcagaaggtgatgttga

SEQ ID NO: 26584 - RNA, 19 nt, synthetic construct
  source 1..19: mol_type = other RNA
gtcggtggcggggttgtgg

SEQ ID NO: 26585 - RNA, 19 nt, synthetic construct
  source 1..19: mol_type = other RNA
tcgtgagtgttggcgccag

SEQ ID NO: 26586 - RNA, 19 nt, synthetic construct
  source 1..19: mol_type = other RNA
gaagggggtgactcggtgg

SEQ ID NO: 26587 - RNA, 19 nt, synthetic construct
  source 1..19: mol_type = other RNA
gaagggggtgactcggtgg

SEQ ID NO: 26588 - RNA, 19 nt, synthetic construct
  source 1..19: mol_type = other RNA
gaagggggtgactcggtgg

SEQ ID NO: 26589 - RNA, 19 nt, synthetic construct
  source 1..19: mol_type = other RNA
gaagggggtgactcggtgg

SEQ ID NO: 26590 - RNA, 19 nt, synthetic construct
  source 1..19: mol_type = other RNA
cgtgagtgccgtccctggg

SEQ ID NO: 26591 - RNA, 19 nt, synthetic construct
  source 1..19: mol_type = other RNA
cgtgagtgccgtccctggg

SEQ ID NO: 26592 - RNA, 19 nt, synthetic construct
  source 1..19: mol_type = other RNA
cgtgagtgccgtccctggg

SEQ ID NO: 26593 - RNA, 19 nt, synthetic construct
  source 1..19: mol_type = other RNA
gaggaacacgccgccgtcc

SEQ ID NO: 26594 - RNA, 19 nt, synthetic construct
  source 1..19: mol_type = other RNA
gtggggacccttgcaccga

SEQ ID NO: 26595 - RNA, 19 nt, synthetic construct
  source 1..19: mol_type = other RNA
ccggatgctcggggtcacc

SEQ ID NO: 26596 - RNA, 19 nt, synthetic construct
  source 1..19: mol_type = other RNA
gctcgtgagtgttggcgcc

SEQ ID NO: 26597 - RNA, 19 nt, synthetic construct
  source 1..19: mol_type = other RNA
tggtcaccaccgtggttat

SEQ ID NO: 26598 - RNA, 19 nt, synthetic construct
  source 1..19: mol_type = other RNA
tggtcaccaccgtggttat

SEQ ID NO: 26599 - RNA, 19 nt, synthetic construct
  source 1..19: mol_type = other RNA
tggtcaccaccgtggttat

SEQ ID NO: 26600 - RNA, 19 nt, synthetic construct
  source 1..19: mol_type = other RNA
cggtctggacgcactcccc

SEQ ID NO: 26601 - RNA, 19 nt, synthetic construct
  source 1..19: mol_type = other RNA
ctgcctgcggcaccacgag

SEQ ID NO: 26602 - RNA, 19 nt, synthetic construct
  source 1..19: mol_type = other RNA
ttggacccggatggccgtg

SEQ ID NO: 26603 - RNA, 19 nt, synthetic construct
  source 1..19: mol_type = other RNA
cacgaaggaaacgctgcag

SEQ ID NO: 26604 - RNA, 19 nt, synthetic construct
  source 1..19: mol_type = other RNA
tactcgcagctgccttcaa

SEQ ID NO: 26605 - RNA, 19 nt, synthetic construct
  source 1..19: mol_type = other RNA
gtactcgcagctgccttca

SEQ ID NO: 26606 - RNA, 19 nt, synthetic construct
  source 1..19: mol_type = other RNA
ccttgtcgtagcagccaca

SEQ ID NO: 26607 - RNA, 19 nt, synthetic construct
  source 1..19: mol_type = other RNA
tgtgcctgtcgggcgagct

SEQ ID NO: 26608 - RNA, 19 nt, synthetic construct
  source 1..19: mol_type = other RNA
tgcgcaccgtgtggggact

SEQ ID NO: 26609 - RNA, 19 nt, synthetic construct
  source 1..19: mol_type = other RNA
gcatggccgtagagctggt

SEQ ID NO: 26610 - RNA, 19 nt, synthetic construct
  source 1..19: mol_type = other RNA
ggcatggccgtagagctgg

SEQ ID NO: 26611 - RNA, 19 nt, synthetic construct
  source 1..19: mol_type = other RNA
tgcgcaccgtgtggggact

SEQ ID NO: 26612 - RNA, 19 nt, synthetic construct
  source 1..19: mol_type = other RNA
ccggtggtcccaagggtga

SEQ ID NO: 26613 - RNA, 19 nt, synthetic construct
  source 1..19: mol_type = other RNA
tgcgcaccgtgtggggact

SEQ ID NO: 26614 - RNA, 19 nt, synthetic construct
  source 1..19: mol_type = other RNA
tgcgcaccgtgtggggact

SEQ ID NO: 26615 - RNA, 19 nt, synthetic construct
  source 1..19: mol_type = other RNA
gcatggccgtagagctggt

SEQ ID NO: 26616 - RNA, 19 nt, synthetic construct
  source 1..19: mol_type = other RNA
ggcatggccgtagagctgg

SEQ ID NO: 26617 - RNA, 19 nt, synthetic construct
  source 1..19: mol_type = other RNA
ggtggacgtggaactggtg

SEQ ID NO: 26618 - RNA, 19 nt, synthetic construct
  source 1..19: mol_type = other RNA
acctgccggagagggatgg

SEQ ID NO: 26619 - RNA, 19 nt, synthetic construct
  source 1..19: mol_type = other RNA
ccacgtcttggccatgtcc

SEQ ID NO: 26620 - RNA, 19 nt, synthetic construct
  source 1..19: mol_type = other RNA
cccgggaaatttaggaaac

SEQ ID NO: 26621 - RNA, 19 nt, synthetic construct
  source 1..19: mol_type = other RNA
gacgcactccccacagcac

SEQ ID NO: 26622 - RNA, 19 nt, synthetic construct
  source 1..19: mol_type = other RNA
atgatcagacaatgcacat

SEQ ID NO: 26623 - RNA, 19 nt, synthetic construct
  source 1..19: mol_type = other RNA
ccggacgtggccagctgga

SEQ ID NO: 26624 - RNA, 19 nt, synthetic construct
  source 1..19: mol_type = other RNA
ctcgcagagctgcgcgcgc

SEQ ID NO: 26625 - RNA, 19 nt, synthetic construct
  source 1..19: mol_type = other RNA
gtcaccatgcaggtcgtag

SEQ ID NO: 26626 - RNA, 19 nt, synthetic construct
  source 1..19: mol_type = other RNA
ccgcacttccgcagctcag

SEQ ID NO: 26627 - RNA, 19 nt, synthetic construct
  source 1..19: mol_type = other RNA
cgaaggctgcgcccgtggc

SEQ ID NO: 26628 - RNA, 19 nt, synthetic construct
  source 1..19: mol_type = other RNA
atgatggagtggcagcgcg

SEQ ID NO: 26629 - RNA, 19 nt, synthetic construct
  source 1..19: mol_type = other RNA
gtcgctgagctgtacgccc

SEQ ID NO: 26630 - RNA, 19 nt, synthetic construct
  source 1..19: mol_type = other RNA
tgaggaaggtgcccgcggg

SEQ ID NO: 26631 - RNA, 19 nt, synthetic construct
  source 1..19: mol_type = other RNA
ctgcactcccacctccggt

SEQ ID NO: 26632 - RNA, 19 nt, synthetic construct
  source 1..19: mol_type = other RNA
ggtgttgtccccacagtag

SEQ ID NO: 26633 - RNA, 19 nt, synthetic construct
  source 1..19: mol_type = other RNA
gtgccagggcgtccgggca

SEQ ID NO: 26634 - RNA, 19 nt, synthetic construct
  source 1..19: mol_type = other RNA
acagggcatacctggtacc

SEQ ID NO: 26635 - RNA, 19 nt, synthetic construct
  source 1..19: mol_type = other RNA
cgatgtcagccagcacagg

SEQ ID NO: 26636 - RNA, 19 nt, synthetic construct
  source 1..19: mol_type = other RNA
tggtacctggggccgaggg

SEQ ID NO: 26637 - RNA, 19 nt, synthetic construct
  source 1..19: mol_type = other RNA
tgtgccagggtccagttgg

SEQ ID NO: 26638 - RNA, 19 nt, synthetic construct
  source 1..19: mol_type = other RNA
cgttgagaacagggcctgg

SEQ ID NO: 26639 - RNA, 19 nt, synthetic construct
  source 1..19: mol_type = other RNA
cctcccgtggtggctgtac

SEQ ID NO: 26640 - RNA, 19 nt, synthetic construct
  source 1..19: mol_type = other RNA
gccattgttgttggggcca

SEQ ID NO: 26641 - RNA, 19 nt, synthetic construct
  source 1..19: mol_type = other RNA
cagtgctggaagggcggtt

SEQ ID NO: 26642 - RNA, 19 nt, synthetic construct
  source 1..19: mol_type = other RNA
gaagaggggatgggtgtaa

SEQ ID NO: 26643 - RNA, 19 nt, synthetic construct
  source 1..19: mol_type = other RNA
tgtggtggtctgtgatagg

SEQ ID NO: 26644 - RNA, 19 nt, synthetic construct
  source 1..19: mol_type = other RNA
ggtggccgtgggtgtggtg

SEQ ID NO: 26645 - RNA, 19 nt, synthetic construct
  source 1..19: mol_type = other RNA
tggaggtgtgggcagtctc

SEQ ID NO: 26646 - RNA, 19 nt, synthetic construct
  source 1..19: mol_type = other RNA
ggtctgtgtgctagaggag

SEQ ID NO: 26647 - RNA, 19 nt, synthetic construct
  source 1..19: mol_type = other RNA
gccggtggccgtgatcgta

SEQ ID NO: 26648 - RNA, 19 nt, synthetic construct
  source 1..19: mol_type = other RNA
gcactggggggatgggagt

SEQ ID NO: 26649 - RNA, 19 nt, synthetic construct
  source 1..19: mol_type = other RNA
gcccaagatgcccgaggtg

SEQ ID NO: 26650 - RNA, 19 nt, synthetic construct
  source 1..19: mol_type = other RNA
tgtggcccggggtggtcgt

SEQ ID NO: 26651 - RNA, 19 nt, synthetic construct
  source 1..19: mol_type = other RNA
tccccacctgctcacggtt

SEQ ID NO: 26652 - RNA, 19 nt, synthetic construct
  source 1..19: mol_type = other RNA
accgtcacggtggctgtag

SEQ ID NO: 26653 - RNA, 19 nt, synthetic construct
  source 1..19: mol_type = other RNA
cagtgctggaagggcggtt

SEQ ID NO: 26654 - RNA, 19 nt, synthetic construct
  source 1..19: mol_type = other RNA
tgtggtggtctgtgatagg

SEQ ID NO: 26655 - RNA, 19 nt, synthetic construct
  source 1..19: mol_type = other RNA
ggtggccgtgggtgtggtg

SEQ ID NO: 26656 - RNA, 19 nt, synthetic construct
  source 1..19: mol_type = other RNA
gatccacactggaagcgtg

SEQ ID NO: 26657 - RNA, 19 nt, synthetic construct
  source 1..19: mol_type = other RNA
ggtctgtgtgctagaggag

SEQ ID NO: 26658 - RNA, 19 nt, synthetic construct
  source 1..19: mol_type = other RNA
gccggtggccgtgatcgta

SEQ ID NO: 26659 - RNA, 19 nt, synthetic construct
  source 1..19: mol_type = other RNA
ggtggccgtggtgttcggc

SEQ ID NO: 26660 - RNA, 19 nt, synthetic construct
  source 1..19: mol_type = other RNA
cctgaggtggccgaagtcc

SEQ ID NO: 26661 - RNA, 19 nt, synthetic construct
  source 1..19: mol_type = other RNA
tgtggcccggggtggtcgt

SEQ ID NO: 26662 - RNA, 19 nt, synthetic construct
  source 1..19: mol_type = other RNA
tccccacctgctcacggtt

SEQ ID NO: 26663 - RNA, 19 nt, synthetic construct
  source 1..19: mol_type = other RNA
gtgctggtcagcactttgg

SEQ ID NO: 26664 - RNA, 19 nt, synthetic construct
  source 1..19: mol_type = other RNA
tgtgcttgtcagcactgga

SEQ ID NO: 26665 - RNA, 19 nt, synthetic construct
  source 1..19: mol_type = other RNA
cacggtggctgtagtgctg

SEQ ID NO: 26666 - RNA, 19 nt, synthetic construct
  source 1..19: mol_type = other RNA
accgtcacggtggctgtag

SEQ ID NO: 26667 - RNA, 19 nt, synthetic construct
  source 1..19: mol_type = other RNA
cagtgctggaagggcggtt

SEQ ID NO: 26668 - RNA, 19 nt, synthetic construct
  source 1..19: mol_type = other RNA
tgtggtggtctgtgatagg

SEQ ID NO: 26669 - RNA, 19 nt, synthetic construct
  source 1..19: mol_type = other RNA
ggtggccgtgggtgtggtg

SEQ ID NO: 26670 - RNA, 19 nt, synthetic construct
  source 1..19: mol_type = other RNA
ggtctgtgtgctagaggag

SEQ ID NO: 26671 - RNA, 19 nt, synthetic construct
  source 1..19: mol_type = other RNA
gcactggggggatgggagt

SEQ ID NO: 26672 - RNA, 19 nt, synthetic construct
  source 1..19: mol_type = other RNA
ggtggccgtggtgttcggc

SEQ ID NO: 26673 - RNA, 19 nt, synthetic construct
  source 1..19: mol_type = other RNA
ggggcagggaccgcccgtg

SEQ ID NO: 26674 - RNA, 19 nt, synthetic construct
  source 1..19: mol_type = other RNA
gcccaagatgcccgaggtg

SEQ ID NO: 26675 - RNA, 19 nt, synthetic construct
  source 1..19: mol_type = other RNA
tgtggcccggggtggtcgt

SEQ ID NO: 26676 - RNA, 19 nt, synthetic construct
  source 1..19: mol_type = other RNA
tccccacctgctcacggtt

SEQ ID NO: 26677 - RNA, 19 nt, synthetic construct
  source 1..19: mol_type = other RNA
accgtcacggtggctgtag

SEQ ID NO: 26678 - RNA, 19 nt, synthetic construct
  source 1..19: mol_type = other RNA
cagtgctggaagggcggtt

SEQ ID NO: 26679 - RNA, 19 nt, synthetic construct
  source 1..19: mol_type = other RNA
tgtggtggtctgtgatagg

SEQ ID NO: 26680 - RNA, 19 nt, synthetic construct
  source 1..19: mol_type = other RNA
ggtggccgtgggtgtggtg

SEQ ID NO: 26681 - RNA, 19 nt, synthetic construct
  source 1..19: mol_type = other RNA
tggaggtgtgggcagtctc

SEQ ID NO: 26682 - RNA, 19 nt, synthetic construct
  source 1..19: mol_type = other RNA
ggtcaccgtggagccactg

SEQ ID NO: 26683 - RNA, 19 nt, synthetic construct
  source 1..19: mol_type = other RNA
ggtctgtgtgctagaggag

SEQ ID NO: 26684 - RNA, 19 nt, synthetic construct
  source 1..19: mol_type = other RNA
gccggtggccgtgatcgta

SEQ ID NO: 26685 - RNA, 19 nt, synthetic construct
  source 1..19: mol_type = other RNA
ggtggccgtggtgttcggc

SEQ ID NO: 26686 - RNA, 19 nt, synthetic construct
  source 1..19: mol_type = other RNA
cctgaggtggccgaagtcc

SEQ ID NO: 26687 - RNA, 19 nt, synthetic construct
  source 1..19: mol_type = other RNA
tgtggcccggggtggtcgt

SEQ ID NO: 26688 - RNA, 19 nt, synthetic construct
  source 1..19: mol_type = other RNA
tccccacctgctcacggtt

SEQ ID NO: 26689 - RNA, 19 nt, synthetic construct
  source 1..19: mol_type = other RNA
tgtgcttgtcagcactgga

SEQ ID NO: 26690 - RNA, 19 nt, synthetic construct
  source 1..19: mol_type = other RNA
accgtcacggtggctgtag

SEQ ID NO: 26691 - RNA, 19 nt, synthetic construct
  source 1..19: mol_type = other RNA
tgtggtggtctgtgatagg

SEQ ID NO: 26692 - RNA, 19 nt, synthetic construct
  source 1..19: mol_type = other RNA
ggtggccgtgggtgtggtg

SEQ ID NO: 26693 - RNA, 19 nt, synthetic construct
  source 1..19: mol_type = other RNA
ggtcaccgtggagccactg

SEQ ID NO: 26694 - RNA, 19 nt, synthetic construct
  source 1..19: mol_type = other RNA
ggtctgtgtgctagaggag

SEQ ID NO: 26695 - RNA, 19 nt, synthetic construct
  source 1..19: mol_type = other RNA
gccggtggccgtgatcgta

SEQ ID NO: 26696 - RNA, 19 nt, synthetic construct
  source 1..19: mol_type = other RNA
tgtgcttgtcagcactgga

SEQ ID NO: 26697 - RNA, 19 nt, synthetic construct
  source 1..19: mol_type = other RNA
gattttgtggctgtgcttg

SEQ ID NO: 26698 - RNA, 19 nt, synthetic construct
  source 1..19: mol_type = other RNA
tctcagggtggtgaggact

SEQ ID NO: 26699 - RNA, 19 nt, synthetic construct
  source 1..19: mol_type = other RNA
atgtcacagtgctgattgc

SEQ ID NO: 26700 - RNA, 19 nt, synthetic construct
  source 1..19: mol_type = other RNA
ggcgccctggaagcggtca

SEQ ID NO: 26701 - RNA, 19 nt, synthetic construct
  source 1..19: mol_type = other RNA
accatggtgacagtgagga

SEQ ID NO: 26702 - RNA, 19 nt, synthetic construct
  source 1..19: mol_type = other RNA
ccttcccatgcaccatggt

SEQ ID NO: 26703 - RNA, 19 nt, synthetic construct
  source 1..19: mol_type = other RNA
ggtcaaacaggatcaggcc

SEQ ID NO: 26704 - RNA, 19 nt, synthetic construct
  source 1..19: mol_type = other RNA
cgcccagggcaggaatgtc

SEQ ID NO: 26705 - RNA, 19 nt, synthetic construct
  source 1..19: mol_type = other RNA
tggccatgtccttgcaact

SEQ ID NO: 26706 - RNA, 19 nt, synthetic construct
  source 1..19: mol_type = other RNA
atcagatcacagagcggct

SEQ ID NO: 26707 - RNA, 19 nt, synthetic construct
  source 1..19: mol_type = other RNA
ggctctggcagggcacctc

SEQ ID NO: 26708 - RNA, 19 nt, synthetic construct
  source 1..19: mol_type = other RNA
agttgctgacccaccgctc

SEQ ID NO: 26709 - RNA, 19 nt, synthetic construct
  source 1..19: mol_type = other RNA
gtggcagggaagggcgcct

SEQ ID NO: 26710 - RNA, 19 nt, synthetic construct
  source 1..19: mol_type = other RNA
agaggcaggtacacatgtg

SEQ ID NO: 26711 - RNA, 19 nt, synthetic construct
  source 1..19: mol_type = other RNA
agagaggcaggtacacatg

SEQ ID NO: 26712 - RNA, 19 nt, synthetic construct
  source 1..19: mol_type = other RNA
cgtgaggcaggcggtctgg

SEQ ID NO: 26713 - RNA, 19 nt, synthetic construct
  source 1..19: mol_type = other RNA
tgggcctctgctgagtact

SEQ ID NO: 26714 - RNA, 19 nt, synthetic construct
  source 1..19: mol_type = other RNA
ggccgggaagccacgggtg

SEQ ID NO: 26715 - RNA, 19 nt, synthetic construct
  source 1..19: mol_type = other RNA
acgttctcagacagcagtg

SEQ ID NO: 26716 - RNA, 19 nt, synthetic construct
  source 1..19: mol_type = other RNA
ggatggaggcagaacgttc

SEQ ID NO: 26717 - RNA, 19 nt, synthetic construct
  source 1..19: mol_type = other RNA
tagtttgttccagggcgtc

SEQ ID NO: 26718 - RNA, 19 nt, synthetic construct
  source 1..19: mol_type = other RNA
ctaggcctcggcgtagctg

SEQ ID NO: 26719 - RNA, 19 nt, synthetic construct
  source 1..19: mol_type = other RNA
tcaccatgcaggtcgtaga

SEQ ID NO: 26720 - RNA, 19 nt, synthetic construct
  source 1..19: mol_type = other RNA
gctcagccagcacggtgaa

SEQ ID NO: 26721 - RNA, 19 nt, synthetic construct
  source 1..19: mol_type = other RNA
gttggcgaaggctgcgccc

SEQ ID NO: 26722 - RNA, 19 nt, synthetic construct
  source 1..19: mol_type = other RNA
tgtagcacatcttgaagac

SEQ ID NO: 26723 - RNA, 19 nt, synthetic construct
  source 1..19: mol_type = other RNA
aggggctcattgtcgtctc

SEQ ID NO: 26724 - RNA, 19 nt, synthetic construct
  source 1..19: mol_type = other RNA
ggcggtgtgggtggtcccc

SEQ ID NO: 26725 - RNA, 19 nt, synthetic construct
  source 1..19: mol_type = other RNA
ccgtggtggtcagtgatgg

SEQ ID NO: 26726 - RNA, 19 nt, synthetic construct
  source 1..19: mol_type = other RNA
tgctgctagggtgtgggaa

SEQ ID NO: 26727 - RNA, 19 nt, synthetic construct
  source 1..19: mol_type = other RNA
acagacggcccctccggcc

SEQ ID NO: 26728 - RNA, 19 nt, synthetic construct
  source 1..19: mol_type = other RNA
ccgtggtggtcagtgatgg

SEQ ID NO: 26729 - RNA, 19 nt, synthetic construct
  source 1..19: mol_type = other RNA
acagacggcccctccggcc

SEQ ID NO: 26730 - RNA, 19 nt, synthetic construct
  source 1..19: mol_type = other RNA
agggcgtggccgtagagct

SEQ ID NO: 26731 - RNA, 19 nt, synthetic construct
  source 1..19: mol_type = other RNA
tagctgtggatttggtggc

SEQ ID NO: 26732 - RNA, 19 nt, synthetic construct
  source 1..19: mol_type = other RNA
cccggtggtcccaagggtg

SEQ ID NO: 26733 - RNA, 19 nt, synthetic construct
  source 1..19: mol_type = other RNA
ggcggtgtgggtggtcccc

SEQ ID NO: 26734 - RNA, 19 nt, synthetic construct
  source 1..19: mol_type = other RNA
ccgtggtggtcagtgatgg

SEQ ID NO: 26735 - RNA, 19 nt, synthetic construct
  source 1..19: mol_type = other RNA
agggcgtggccgtagagct

SEQ ID NO: 26736 - RNA, 19 nt, synthetic construct
  source 1..19: mol_type = other RNA
ggccgtggtgatcagtgat

SEQ ID NO: 26737 - RNA, 19 nt, synthetic construct
  source 1..19: mol_type = other RNA
acagacggcccctccggcc

SEQ ID NO: 26738 - RNA, 19 nt, synthetic construct
  source 1..19: mol_type = other RNA
cacgacctggcccaactcc

SEQ ID NO: 26739 - RNA, 19 nt, synthetic construct
  source 1..19: mol_type = other RNA
tagctgtggatttggtggc

SEQ ID NO: 26740 - RNA, 19 nt, synthetic construct
  source 1..19: mol_type = other RNA
ggcggtgtgggtggtcccc

SEQ ID NO: 26741 - RNA, 19 nt, synthetic construct
  source 1..19: mol_type = other RNA
ccgtggtggtcagtgatgg

SEQ ID NO: 26742 - RNA, 19 nt, synthetic construct
  source 1..19: mol_type = other RNA
gtgacagtgaggacgatat

SEQ ID NO: 26743 - RNA, 19 nt, synthetic construct
  source 1..19: mol_type = other RNA
ggctctggttcctagagtt

SEQ ID NO: 26744 - RNA, 19 nt, synthetic construct
  source 1..19: mol_type = other RNA
ggcgtgaggcaggcggtct

SEQ ID NO: 26745 - RNA, 19 nt, synthetic construct
  source 1..19: mol_type = other RNA
ctgtggggtcagcaaatgg

SEQ ID NO: 26746 - RNA, 19 nt, synthetic construct
  source 1..19: mol_type = other RNA
tttcacccacggggtgggc

SEQ ID NO: 26747 - RNA, 19 nt, synthetic construct
  source 1..19: mol_type = other RNA
tcgttgaaggccgggaggc

SEQ ID NO: 26748 - RNA, 19 nt, synthetic construct
  source 1..19: mol_type = other RNA
tgcagttcgagtggaaggg

SEQ ID NO: 26749 - RNA, 19 nt, synthetic construct
  source 1..19: mol_type = other RNA
aggcatccaccacgtaggc

SEQ ID NO: 26750 - RNA, 19 nt, synthetic construct
  source 1..19: mol_type = other RNA
cactcaggccgcggcaagt

SEQ ID NO: 26751 - RNA, 19 nt, synthetic construct
  source 1..19: mol_type = other RNA
cgtagcaggggcactcctg

SEQ ID NO: 26752 - RNA, 19 nt, synthetic construct
  source 1..19: mol_type = other RNA
ggcgccctcgtcgtgcacc

SEQ ID NO: 26753 - RNA, 19 nt, synthetic construct
  source 1..19: mol_type = other RNA
ctctttggaagcggtgctg

SEQ ID NO: 26754 - RNA, 19 nt, synthetic construct
  source 1..19: mol_type = other RNA
gggtgccagcagttgcctg

SEQ ID NO: 26755 - RNA, 19 nt, synthetic construct
  source 1..19: mol_type = other RNA
gtggccgtggtgttcggca

SEQ ID NO: 26756 - RNA, 19 nt, synthetic construct
  source 1..19: mol_type = other RNA
cctggtgtggcccggggtg

SEQ ID NO: 26757 - RNA, 19 nt, synthetic construct
  source 1..19: mol_type = other RNA
gcgggtccaggcggtgccc

SEQ ID NO: 26758 - RNA, 19 nt, synthetic construct
  source 1..19: mol_type = other RNA
gtggccgtggtgttcggca

SEQ ID NO: 26759 - RNA, 19 nt, synthetic construct
  source 1..19: mol_type = other RNA
cctggtgtggcccggggtg

SEQ ID NO: 26760 - RNA, 19 nt, synthetic construct
  source 1..19: mol_type = other RNA
gggtgccagcagttgcctg

SEQ ID NO: 26761 - RNA, 19 nt, synthetic construct
  source 1..19: mol_type = other RNA
gggtcaccgtggagccact

SEQ ID NO: 26762 - RNA, 19 nt, synthetic construct
  source 1..19: mol_type = other RNA
gtggccgtggtgttcggca

SEQ ID NO: 26763 - RNA, 19 nt, synthetic construct
  source 1..19: mol_type = other RNA
gggtgccagcagttgcctg

SEQ ID NO: 26764 - RNA, 19 nt, synthetic construct
  source 1..19: mol_type = other RNA
gggtcaccgtggagccact

SEQ ID NO: 26765 - RNA, 19 nt, synthetic construct
  source 1..19: mol_type = other RNA
tggctgtgggcatagtggc

SEQ ID NO: 26766 - RNA, 19 nt, synthetic construct
  source 1..19: mol_type = other RNA
gggtaggactcctgagtgg

SEQ ID NO: 26767 - RNA, 19 nt, synthetic construct
  source 1..19: mol_type = other RNA
caacaccagcgtccggcac

SEQ ID NO: 26768 - RNA, 19 nt, synthetic construct
  source 1..19: mol_type = other RNA
gcggcaccacgagcatggc

SEQ ID NO: 26769 - RNA, 19 nt, synthetic construct
  source 1..19: mol_type = other RNA
acgggtggaacaaagctca

SEQ ID NO: 26770 - RNA, 19 nt, synthetic construct
  source 1..19: mol_type = other RNA
agctgcaggtggtgttgaa

SEQ ID NO: 26771 - RNA, 19 nt, synthetic construct
  source 1..19: mol_type = other RNA
aagtgggctggcaggcatc

SEQ ID NO: 26772 - RNA, 19 nt, synthetic construct
  source 1..19: mol_type = other RNA
acaggcccgcgtcgtggca

SEQ ID NO: 26773 - RNA, 19 nt, synthetic construct
  source 1..19: mol_type = other RNA
tgtggggacccttgcaccg

SEQ ID NO: 26774 - RNA, 19 nt, synthetic construct
  source 1..19: mol_type = other RNA
aggcgccaagcccatcggt

SEQ ID NO: 26775 - RNA, 19 nt, synthetic construct
  source 1..19: mol_type = other RNA
gcatgtcgggaagctgcgc

SEQ ID NO: 26776 - RNA, 19 nt, synthetic construct
  source 1..19: mol_type = other RNA
ggggtgaccgtcacggggc

SEQ ID NO: 26777 - RNA, 19 nt, synthetic construct
  source 1..19: mol_type = other RNA
ctctgtggtcggtggcggg

SEQ ID NO: 26778 - RNA, 19 nt, synthetic construct
  source 1..19: mol_type = other RNA
gtggtggccgtctccagct

SEQ ID NO: 26779 - RNA, 19 nt, synthetic construct
  source 1..19: mol_type = other RNA
gttgacagcgggtcgtgcc

SEQ ID NO: 26780 - RNA, 19 nt, synthetic construct
  source 1..19: mol_type = other RNA
gacatggtggccgtgggtg

SEQ ID NO: 26781 - RNA, 19 nt, synthetic construct
  source 1..19: mol_type = other RNA
ggggtgtgtgggtggtccc

SEQ ID NO: 26782 - RNA, 19 nt, synthetic construct
  source 1..19: mol_type = other RNA
cccggggtggtcgtccctg

SEQ ID NO: 26783 - RNA, 19 nt, synthetic construct
  source 1..19: mol_type = other RNA
gcccggggtggtcgtccct

SEQ ID NO: 26784 - RNA, 19 nt, synthetic construct
  source 1..19: mol_type = other RNA
gacatggtggccgtgggtg

SEQ ID NO: 26785 - RNA, 19 nt, synthetic construct
  source 1..19: mol_type = other RNA
ggggtgtgtgggtggtccc

SEQ ID NO: 26786 - RNA, 19 nt, synthetic construct
  source 1..19: mol_type = other RNA
ccgtgtgtggtggccgtgg

SEQ ID NO: 26787 - RNA, 19 nt, synthetic construct
  source 1..19: mol_type = other RNA
ggtcctgctgctagggtga

SEQ ID NO: 26788 - RNA, 19 nt, synthetic construct
  source 1..19: mol_type = other RNA
cccggggtggtcgtccctg

SEQ ID NO: 26789 - RNA, 19 nt, synthetic construct
  source 1..19: mol_type = other RNA
gcccggggtggtcgtccct

SEQ ID NO: 26790 - RNA, 19 nt, synthetic construct
  source 1..19: mol_type = other RNA
ggcccttgtcgtggtggcc

SEQ ID NO: 26791 - RNA, 19 nt, synthetic construct
  source 1..19: mol_type = other RNA
tggcccttgtcgtggtggc

SEQ ID NO: 26792 - RNA, 19 nt, synthetic construct
  source 1..19: mol_type = other RNA
gacatggtggccgtgggtg

SEQ ID NO: 26793 - RNA, 19 nt, synthetic construct
  source 1..19: mol_type = other RNA
ggggtgtgtgggtggtccc

SEQ ID NO: 26794 - RNA, 19 nt, synthetic construct
  source 1..19: mol_type = other RNA
ccgtgtgtggtggccgtgg

SEQ ID NO: 26795 - RNA, 19 nt, synthetic construct
  source 1..19: mol_type = other RNA
ggtcctgctgctagggtga

SEQ ID NO: 26796 - RNA, 19 nt, synthetic construct
  source 1..19: mol_type = other RNA
cccggggtggtcgtccctg

SEQ ID NO: 26797 - RNA, 19 nt, synthetic construct
  source 1..19: mol_type = other RNA
gcccggggtggtcgtccct

SEQ ID NO: 26798 - RNA, 19 nt, synthetic construct
  source 1..19: mol_type = other RNA
gcccgtggtcaccaccgtg

SEQ ID NO: 26799 - RNA, 19 nt, synthetic construct
  source 1..19: mol_type = other RNA
gacatggtggccgtgggtg

SEQ ID NO: 26800 - RNA, 19 nt, synthetic construct
  source 1..19: mol_type = other RNA
ggggtgtgtgggtggtccc

SEQ ID NO: 26801 - RNA, 19 nt, synthetic construct
  source 1..19: mol_type = other RNA
ccgtgtgtggtggccgtgg

SEQ ID NO: 26802 - RNA, 19 nt, synthetic construct
  source 1..19: mol_type = other RNA
ggtcctgctgctagggtga

SEQ ID NO: 26803 - RNA, 19 nt, synthetic construct
  source 1..19: mol_type = other RNA
cccggggtggtcgtccctg

SEQ ID NO: 26804 - RNA, 19 nt, synthetic construct
  source 1..19: mol_type = other RNA
gcccggggtggtcgtccct

SEQ ID NO: 26805 - RNA, 19 nt, synthetic construct
  source 1..19: mol_type = other RNA
gcccgtggtcaccaccgtg

SEQ ID NO: 26806 - RNA, 19 nt, synthetic construct
  source 1..19: mol_type = other RNA
ggcccttgtcgtggtggcc

SEQ ID NO: 26807 - RNA, 19 nt, synthetic construct
  source 1..19: mol_type = other RNA
tggcccttgtcgtggtggc

SEQ ID NO: 26808 - RNA, 19 nt, synthetic construct
  source 1..19: mol_type = other RNA
gacatggtggccgtgggtg

SEQ ID NO: 26809 - RNA, 19 nt, synthetic construct
  source 1..19: mol_type = other RNA
tggtggtggtcagcactct

SEQ ID NO: 26810 - RNA, 19 nt, synthetic construct
  source 1..19: mol_type = other RNA
aggtgtggattgtggacat

SEQ ID NO: 26811 - RNA, 19 nt, synthetic construct
  source 1..19: mol_type = other RNA
gtgtggccgtggaattggt

SEQ ID NO: 26812 - RNA, 19 nt, synthetic construct
  source 1..19: mol_type = other RNA
agggtgtggccgtggaatt

SEQ ID NO: 26813 - RNA, 19 nt, synthetic construct
  source 1..19: mol_type = other RNA
gtgaggatccgggtcgtcc

SEQ ID NO: 26814 - RNA, 19 nt, synthetic construct
  source 1..19: mol_type = other RNA
gccctggaagcggtcaatg

SEQ ID NO: 26815 - RNA, 19 nt, synthetic construct
  source 1..19: mol_type = other RNA
gccggagagggatggcatt

SEQ ID NO: 26816 - RNA, 19 nt, synthetic construct
  source 1..19: mol_type = other RNA
attgaaggtgacgctcacg

SEQ ID NO: 26817 - RNA, 19 nt, synthetic construct
  source 1..19: mol_type = other RNA
gctgatgcaggcgttgaag

SEQ ID NO: 26818 - RNA, 19 nt, synthetic construct
  source 1..19: mol_type = other RNA
tgtgccctgcattctccca

SEQ ID NO: 26819 - RNA, 19 nt, synthetic construct
  source 1..19: mol_type = other RNA
cacgcgccgggtgggcgag

SEQ ID NO: 26820 - RNA, 19 nt, synthetic construct
  source 1..19: mol_type = other RNA
tcacgcgccgggtgggcga

SEQ ID NO: 26821 - RNA, 19 nt, synthetic construct
  source 1..19: mol_type = other RNA
tgtgcgccgggttcagggg

SEQ ID NO: 26822 - RNA, 19 nt, synthetic construct
  source 1..19: mol_type = other RNA
ccggatgctgaccttgatg

SEQ ID NO: 26823 - RNA, 19 nt, synthetic construct
  source 1..19: mol_type = other RNA
gccggatgctgaccttgat

SEQ ID NO: 26824 - RNA, 19 nt, synthetic construct
  source 1..19: mol_type = other RNA
caccagccggatgctgacc

SEQ ID NO: 26825 - RNA, 19 nt, synthetic construct
  source 1..19: mol_type = other RNA
gccccagcagggtgcggtg

SEQ ID NO: 26826 - RNA, 19 nt, synthetic construct
  source 1..19: mol_type = other RNA
atagccccccggagcaggt

SEQ ID NO: 26827 - RNA, 19 nt, synthetic construct
  source 1..19: mol_type = other RNA
tgggccccgccctgcacag

SEQ ID NO: 26828 - RNA, 19 nt, synthetic construct
  source 1..19: mol_type = other RNA
catcataggtggagatgtg

SEQ ID NO: 26829 - RNA, 19 nt, synthetic construct
  source 1..19: mol_type = other RNA
cagccagcacggtgaagct

SEQ ID NO: 26830 - RNA, 19 nt, synthetic construct
  source 1..19: mol_type = other RNA
ctgtctgcaccacgatgaa

SEQ ID NO: 26831 - RNA, 19 nt, synthetic construct
  source 1..19: mol_type = other RNA
tgcatgagtggcaccagct

SEQ ID NO: 26832 - RNA, 19 nt, synthetic construct
  source 1..19: mol_type = other RNA
gagggccgtgaagtcgtca

SEQ ID NO: 26833 - RNA, 19 nt, synthetic construct
  source 1..19: mol_type = other RNA
gcgagaaggcactgttggg

SEQ ID NO: 26834 - RNA, 19 nt, synthetic construct
  source 1..19: mol_type = other RNA
tcaggccgcggcaagtggg

SEQ ID NO: 26835 - RNA, 19 nt, synthetic construct
  source 1..19: mol_type = other RNA
gtagcaggggcactcctgg

SEQ ID NO: 26836 - RNA, 19 nt, synthetic construct
  source 1..19: mol_type = other RNA
atccgacaccagccccggg

SEQ ID NO: 26837 - RNA, 19 nt, synthetic construct
  source 1..19: mol_type = other RNA
catccgacaccagccccgg

SEQ ID NO: 26838 - RNA, 19 nt, synthetic construct
  source 1..19: mol_type = other RNA
tgcagtcgaccctgatggt

SEQ ID NO: 26839 - RNA, 19 nt, synthetic construct
  source 1..19: mol_type = other RNA
ctcgcagctgccttcaaag

SEQ ID NO: 26840 - RNA, 19 nt, synthetic construct
  source 1..19: mol_type = other RNA
tggtgttgtccccacagta

SEQ ID NO: 26841 - RNA, 19 nt, synthetic construct
  source 1..19: mol_type = other RNA
tcccctcttggaggatcag

SEQ ID NO: 26842 - RNA, 19 nt, synthetic construct
  source 1..19: mol_type = other RNA
aaagtcattgatggcattg

SEQ ID NO: 26843 - RNA, 19 nt, synthetic construct
  source 1..19: mol_type = other RNA
ggcaaagtcattgatggca

SEQ ID NO: 26844 - RNA, 19 nt, synthetic construct
  source 1..19: mol_type = other RNA
cgtcgtggcaggcctgggc

SEQ ID NO: 26845 - RNA, 19 nt, synthetic construct
  source 1..19: mol_type = other RNA
gcgtcgtggcaggcctggg

SEQ ID NO: 26846 - RNA, 19 nt, synthetic construct
  source 1..19: mol_type = other RNA
acaaggggcaggtgtccgg

SEQ ID NO: 26847 - RNA, 19 nt, synthetic construct
  source 1..19: mol_type = other RNA
tccttgtcgtagcagccac

SEQ ID NO: 26848 - RNA, 19 nt, synthetic construct
  source 1..19: mol_type = other RNA
gctgtggggacccttgcac

SEQ ID NO: 26849 - RNA, 19 nt, synthetic construct
  source 1..19: mol_type = other RNA
cactgggtgtgcagttaca

SEQ ID NO: 26850 - RNA, 19 nt, synthetic construct
  source 1..19: mol_type = other RNA
ggtgcccattgtaccagct

SEQ ID NO: 26851 - RNA, 19 nt, synthetic construct
  source 1..19: mol_type = other RNA
atgtcgggaagctgcgccg

SEQ ID NO: 26852 - RNA, 19 nt, synthetic construct
  source 1..19: mol_type = other RNA
gcgggggactctgttggct

SEQ ID NO: 26853 - RNA, 19 nt, synthetic construct
  source 1..19: mol_type = other RNA
ctgggttggggtaggcaca

SEQ ID NO: 26854 - RNA, 19 nt, synthetic construct
  source 1..19: mol_type = other RNA
ctggacccagtctgcgagg

SEQ ID NO: 26855 - RNA, 19 nt, synthetic construct
  source 1..19: mol_type = other RNA
ggctgctggcataagtgcc

SEQ ID NO: 26856 - RNA, 19 nt, synthetic construct
  source 1..19: mol_type = other RNA
cttaggctgctggcataag

SEQ ID NO: 26857 - RNA, 19 nt, synthetic construct
  source 1..19: mol_type = other RNA
ctatgtccttaggctgctg

SEQ ID NO: 26858 - RNA, 19 nt, synthetic construct
  source 1..19: mol_type = other RNA
gaagacgccctcctgctcc

SEQ ID NO: 26859 - RNA, 19 nt, synthetic construct
  source 1..19: mol_type = other RNA
cagtccttctgagagggtg

SEQ ID NO: 26860 - RNA, 19 nt, synthetic construct
  source 1..19: mol_type = other RNA
ggatgtcagtccttctgag

SEQ ID NO: 26861 - RNA, 19 nt, synthetic construct
  source 1..19: mol_type = other RNA
gggggatgtcagtccttct

SEQ ID NO: 26862 - RNA, 19 nt, synthetic construct
  source 1..19: mol_type = other RNA
ctgtaccaagggtgcttgt

SEQ ID NO: 26863 - RNA, 19 nt, synthetic construct
  source 1..19: mol_type = other RNA
ctgtggagcctgcaggcgt

SEQ ID NO: 26864 - RNA, 19 nt, synthetic construct
  source 1..19: mol_type = other RNA
ggaagggtggatgtggcca

SEQ ID NO: 26865 - RNA, 19 nt, synthetic construct
  source 1..19: mol_type = other RNA
tgttggaagggtggatgtg

SEQ ID NO: 26866 - RNA, 19 nt, synthetic construct
  source 1..19: mol_type = other RNA
ctccccgtcgtccctggaa

SEQ ID NO: 26867 - RNA, 19 nt, synthetic construct
  source 1..19: mol_type = other RNA
atgtgcccaagctccccgt

SEQ ID NO: 26868 - RNA, 19 nt, synthetic construct
  source 1..19: mol_type = other RNA
ggggcgccatgtgcccaag

SEQ ID NO: 26869 - RNA, 19 nt, synthetic construct
  source 1..19: mol_type = other RNA
ctgtgcctgtcgggcgagc

SEQ ID NO: 26870 - RNA, 19 nt, synthetic construct
  source 1..19: mol_type = other RNA
tgagtgttggcgccaggct

SEQ ID NO: 26871 - RNA, 19 nt, synthetic construct
  source 1..19: mol_type = other RNA
gtgagtgttggcgccaggc

SEQ ID NO: 26872 - RNA, 19 nt, synthetic construct
  source 1..19: mol_type = other RNA
tggtgttagtcaaggggct

SEQ ID NO: 26873 - RNA, 19 nt, synthetic construct
  source 1..19: mol_type = other RNA
cagcgggtcgtgccctggc

SEQ ID NO: 26874 - RNA, 19 nt, synthetic construct
  source 1..19: mol_type = other RNA
tggtggtcagcactttggg

SEQ ID NO: 26875 - RNA, 19 nt, synthetic construct
  source 1..19: mol_type = other RNA
gggcggttgcagtccctgg

SEQ ID NO: 26876 - RNA, 19 nt, synthetic construct
  source 1..19: mol_type = other RNA
ggcggtaagcactgtggag

SEQ ID NO: 26877 - RNA, 19 nt, synthetic construct
  source 1..19: mol_type = other RNA
ggtagtgtgagctgttcct

SEQ ID NO: 26878 - RNA, 19 nt, synthetic construct
  source 1..19: mol_type = other RNA
tgagtgccgtccctgggct

SEQ ID NO: 26879 - RNA, 19 nt, synthetic construct
  source 1..19: mol_type = other RNA
ggaggagggggtcaccgtg

SEQ ID NO: 26880 - RNA, 19 nt, synthetic construct
  source 1..19: mol_type = other RNA
cggtgtgggtggtccccgg

SEQ ID NO: 26881 - RNA, 19 nt, synthetic construct
  source 1..19: mol_type = other RNA
gtggtggagccggtggccg

SEQ ID NO: 26882 - RNA, 19 nt, synthetic construct
  source 1..19: mol_type = other RNA
gtcccaggagttgaggagg

SEQ ID NO: 26883 - RNA, 19 nt, synthetic construct
  source 1..19: mol_type = other RNA
cgtgtgtggtggccatggt

SEQ ID NO: 26884 - RNA, 19 nt, synthetic construct
  source 1..19: mol_type = other RNA
atcgcccgtgtgtggtggc

SEQ ID NO: 26885 - RNA, 19 nt, synthetic construct
  source 1..19: mol_type = other RNA
caccgtgtggggactgctg

SEQ ID NO: 26886 - RNA, 19 nt, synthetic construct
  source 1..19: mol_type = other RNA
gcgcaccgtgtggggactg

SEQ ID NO: 26887 - RNA, 19 nt, synthetic construct
  source 1..19: mol_type = other RNA
ccgaagtccaggctgtgcg

SEQ ID NO: 26888 - RNA, 19 nt, synthetic construct
  source 1..19: mol_type = other RNA
gcccgaggtggccgaagtc

SEQ ID NO: 26889 - RNA, 19 nt, synthetic construct
  source 1..19: mol_type = other RNA
tgcccgaggtggccgaagt

SEQ ID NO: 26890 - RNA, 19 nt, synthetic construct
  source 1..19: mol_type = other RNA
ggtgcccaagatgcccgag

SEQ ID NO: 26891 - RNA, 19 nt, synthetic construct
  source 1..19: mol_type = other RNA
cgtggaaggctctgtgatg

SEQ ID NO: 26892 - RNA, 19 nt, synthetic construct
  source 1..19: mol_type = other RNA
ccgtggaaggctctgtgat

SEQ ID NO: 26893 - RNA, 19 nt, synthetic construct
  source 1..19: mol_type = other RNA
ggtggttgctgctagggtg

SEQ ID NO: 26894 - RNA, 19 nt, synthetic construct
  source 1..19: mol_type = other RNA
ccagccactctgaccaggc

SEQ ID NO: 26895 - RNA, 19 nt, synthetic construct
  source 1..19: mol_type = other RNA
gccccggcatggggtagct

SEQ ID NO: 26896 - RNA, 19 nt, synthetic construct
  source 1..19: mol_type = other RNA
gtccccgccagagggcccc

SEQ ID NO: 26897 - RNA, 19 nt, synthetic construct
  source 1..19: mol_type = other RNA
cacggatgttggagtaggt

SEQ ID NO: 26898 - RNA, 19 nt, synthetic construct
  source 1..19: mol_type = other RNA
cacggttcctgcagaccag

SEQ ID NO: 26899 - RNA, 19 nt, synthetic construct
  source 1..19: mol_type = other RNA
cttgaacttccccacctgc

SEQ ID NO: 26900 - RNA, 19 nt, synthetic construct
  source 1..19: mol_type = other RNA
gaggagggcatggccgtag

SEQ ID NO: 26901 - RNA, 19 nt, synthetic construct
  source 1..19: mol_type = other RNA
gctcggctctgtgaggatc

SEQ ID NO: 26902 - RNA, 19 nt, synthetic construct
  source 1..19: mol_type = other RNA
ccggtgggcaccgtcacgg

SEQ ID NO: 26903 - RNA, 19 nt, synthetic construct
  source 1..19: mol_type = other RNA
ggtgccagcagttgcctgg

SEQ ID NO: 26904 - RNA, 19 nt, synthetic construct
  source 1..19: mol_type = other RNA
ggtgactgtgggtgtcgtg

SEQ ID NO: 26905 - RNA, 19 nt, synthetic construct
  source 1..19: mol_type = other RNA
gggcggttgcagtccctgg

SEQ ID NO: 26906 - RNA, 19 nt, synthetic construct
  source 1..19: mol_type = other RNA
ggtagtgtgagctgttcct

SEQ ID NO: 26907 - RNA, 19 nt, synthetic construct
  source 1..19: mol_type = other RNA
ggtcaccgtggaacctctg

SEQ ID NO: 26908 - RNA, 19 nt, synthetic construct
  source 1..19: mol_type = other RNA
ggaggagggggtcaccgtg

SEQ ID NO: 26909 - RNA, 19 nt, synthetic construct
  source 1..19: mol_type = other RNA
gggtgtgggtggtccccgg

SEQ ID NO: 26910 - RNA, 19 nt, synthetic construct
  source 1..19: mol_type = other RNA
gtggtggagccggtggccg

SEQ ID NO: 26911 - RNA, 19 nt, synthetic construct
  source 1..19: mol_type = other RNA
gggagtcactgtgctgctg

SEQ ID NO: 26912 - RNA, 19 nt, synthetic construct
  source 1..19: mol_type = other RNA
atcgcccgtgtgtggtggc

SEQ ID NO: 26913 - RNA, 19 nt, synthetic construct
  source 1..19: mol_type = other RNA
caccgtgtggggactgctg

SEQ ID NO: 26914 - RNA, 19 nt, synthetic construct
  source 1..19: mol_type = other RNA
gcgcaccgtgtggggactg

SEQ ID NO: 26915 - RNA, 19 nt, synthetic construct
  source 1..19: mol_type = other RNA
ccgaagtccaggctgtgcg

SEQ ID NO: 26916 - RNA, 19 nt, synthetic construct
  source 1..19: mol_type = other RNA
gcctgaggtggccgaagtc

SEQ ID NO: 26917 - RNA, 19 nt, synthetic construct
  source 1..19: mol_type = other RNA
tgcctgaggtggccgaagt

SEQ ID NO: 26918 - RNA, 19 nt, synthetic construct
  source 1..19: mol_type = other RNA
ggtgcccaaggtgcctgag

SEQ ID NO: 26919 - RNA, 19 nt, synthetic construct
  source 1..19: mol_type = other RNA
gggtggtgcccaaggtgcc

SEQ ID NO: 26920 - RNA, 19 nt, synthetic construct
  source 1..19: mol_type = other RNA
cgtggaaggctctgtgatg

SEQ ID NO: 26921 - RNA, 19 nt, synthetic construct
  source 1..19: mol_type = other RNA
ccgtggaaggctctgtgat

SEQ ID NO: 26922 - RNA, 19 nt, synthetic construct
  source 1..19: mol_type = other RNA
ccagccactctgaccaggc

SEQ ID NO: 26923 - RNA, 19 nt, synthetic construct
  source 1..19: mol_type = other RNA
gccccggcatggggtagct

SEQ ID NO: 26924 - RNA, 19 nt, synthetic construct
  source 1..19: mol_type = other RNA
gtccccgccagagggcccc

SEQ ID NO: 26925 - RNA, 19 nt, synthetic construct
  source 1..19: mol_type = other RNA
cacggatgttggagtaggt

SEQ ID NO: 26926 - RNA, 19 nt, synthetic construct
  source 1..19: mol_type = other RNA
cacggttcctgcagaccag

SEQ ID NO: 26927 - RNA, 19 nt, synthetic construct
  source 1..19: mol_type = other RNA
cttgaacttccccacctgc

SEQ ID NO: 26928 - RNA, 19 nt, synthetic construct
  source 1..19: mol_type = other RNA
ggtctgctctgtgaggatc

SEQ ID NO: 26929 - RNA, 19 nt, synthetic construct
  source 1..19: mol_type = other RNA
gtcgtagtggctgctgtgg

SEQ ID NO: 26930 - RNA, 19 nt, synthetic construct
  source 1..19: mol_type = other RNA
gtggctttggaactggtgg

SEQ ID NO: 26931 - RNA, 19 nt, synthetic construct
  source 1..19: mol_type = other RNA
ctggtagctgtggatttgg

SEQ ID NO: 26932 - RNA, 19 nt, synthetic construct
  source 1..19: mol_type = other RNA
gtaaagctggtagctgtgg

SEQ ID NO: 26933 - RNA, 19 nt, synthetic construct
  source 1..19: mol_type = other RNA
cggtggtcccaagggtgaa

SEQ ID NO: 26934 - RNA, 19 nt, synthetic construct
  source 1..19: mol_type = other RNA
gattgtggacatggtggcc

SEQ ID NO: 26935 - RNA, 19 nt, synthetic construct
  source 1..19: mol_type = other RNA
ggattgtggacatggtggc

SEQ ID NO: 26936 - RNA, 19 nt, synthetic construct
  source 1..19: mol_type = other RNA
ggggtggattgtggacatg

SEQ ID NO: 26937 - RNA, 19 nt, synthetic construct
  source 1..19: mol_type = other RNA
ggtctccggagtggaggag

SEQ ID NO: 26938 - RNA, 19 nt, synthetic construct
  source 1..19: mol_type = other RNA
ttcgtggtcagcactgtgg

SEQ ID NO: 26939 - RNA, 19 nt, synthetic construct
  source 1..19: mol_type = other RNA
acatggaactggtggccct

SEQ ID NO: 26940 - RNA, 19 nt, synthetic construct
  source 1..19: mol_type = other RNA
ggctgtagtgctgggctct

SEQ ID NO: 26941 - RNA, 19 nt, synthetic construct
  source 1..19: mol_type = other RNA
tcacggtggctgtagtgct

SEQ ID NO: 26942 - RNA, 19 nt, synthetic construct
  source 1..19: mol_type = other RNA
ccggtgggcaccgtcacgg

SEQ ID NO: 26943 - RNA, 19 nt, synthetic construct
  source 1..19: mol_type = other RNA
gggcggttgcagtccctgg

SEQ ID NO: 26944 - RNA, 19 nt, synthetic construct
  source 1..19: mol_type = other RNA
taggcgggtccaggcggtg

SEQ ID NO: 26945 - RNA, 19 nt, synthetic construct
  source 1..19: mol_type = other RNA
ggtagtgtgagctgttcct

SEQ ID NO: 26946 - RNA, 19 nt, synthetic construct
  source 1..19: mol_type = other RNA
tgagtgccgtccctgggct

SEQ ID NO: 26947 - RNA, 19 nt, synthetic construct
  source 1..19: mol_type = other RNA
ggaggagggggtcaccgtg

SEQ ID NO: 26948 - RNA, 19 nt, synthetic construct
  source 1..19: mol_type = other RNA
cggtgtgggtggtccccgg

SEQ ID NO: 26949 - RNA, 19 nt, synthetic construct
  source 1..19: mol_type = other RNA
cggtggctgtgatcgtagt

SEQ ID NO: 26950 - RNA, 19 nt, synthetic construct
  source 1..19: mol_type = other RNA
gggagtcactgtgctgctg

SEQ ID NO: 26951 - RNA, 19 nt, synthetic construct
  source 1..19: mol_type = other RNA
caccgtgtggggactgctg

SEQ ID NO: 26952 - RNA, 19 nt, synthetic construct
  source 1..19: mol_type = other RNA
gcgcaccgtgtggggactg

SEQ ID NO: 26953 - RNA, 19 nt, synthetic construct
  source 1..19: mol_type = other RNA
ccgaagtccaggctgtgcg

SEQ ID NO: 26954 - RNA, 19 nt, synthetic construct
  source 1..19: mol_type = other RNA
gcccgaggtggccgaagtc

SEQ ID NO: 26955 - RNA, 19 nt, synthetic construct
  source 1..19: mol_type = other RNA
tgcccgaggtggccgaagt

SEQ ID NO: 26956 - RNA, 19 nt, synthetic construct
  source 1..19: mol_type = other RNA
ggtgcccaagatgcccgag

SEQ ID NO: 26957 - RNA, 19 nt, synthetic construct
  source 1..19: mol_type = other RNA
cgtggaaggctctgtgatg

SEQ ID NO: 26958 - RNA, 19 nt, synthetic construct
  source 1..19: mol_type = other RNA
ccgtggaaggctctgtgat

SEQ ID NO: 26959 - RNA, 19 nt, synthetic construct
  source 1..19: mol_type = other RNA
ggtcttgctgggtgtggct

SEQ ID NO: 26960 - RNA, 19 nt, synthetic construct
  source 1..19: mol_type = other RNA
ccgtggtcaccaccgtggt

SEQ ID NO: 26961 - RNA, 19 nt, synthetic construct
  source 1..19: mol_type = other RNA
cacagcccgtggtcaccac

SEQ ID NO: 26962 - RNA, 19 nt, synthetic construct
  source 1..19: mol_type = other RNA
ctggggctcacagcccgtg

SEQ ID NO: 26963 - RNA, 19 nt, synthetic construct
  source 1..19: mol_type = other RNA
ccagccactctgaccaggc

SEQ ID NO: 26964 - RNA, 19 nt, synthetic construct
  source 1..19: mol_type = other RNA
gccccggcatggggtagct

SEQ ID NO: 26965 - RNA, 19 nt, synthetic construct
  source 1..19: mol_type = other RNA
gtccccgccagagggcccc

SEQ ID NO: 26966 - RNA, 19 nt, synthetic construct
  source 1..19: mol_type = other RNA
cacggatgttggagtaggt

SEQ ID NO: 26967 - RNA, 19 nt, synthetic construct
  source 1..19: mol_type = other RNA
cacagactgcccctccggc

SEQ ID NO: 26968 - RNA, 19 nt, synthetic construct
  source 1..19: mol_type = other RNA
tcacagactgcccctccgg

SEQ ID NO: 26969 - RNA, 19 nt, synthetic construct
  source 1..19: mol_type = other RNA
cacggttcctgcagaccag

SEQ ID NO: 26970 - RNA, 19 nt, synthetic construct
  source 1..19: mol_type = other RNA
cttgaacttccccacctgc

SEQ ID NO: 26971 - RNA, 19 nt, synthetic construct
  source 1..19: mol_type = other RNA
gctcggctctgtgaggatc

SEQ ID NO: 26972 - RNA, 19 nt, synthetic construct
  source 1..19: mol_type = other RNA
ccggtgggcaccgtcacgg

SEQ ID NO: 26973 - RNA, 19 nt, synthetic construct
  source 1..19: mol_type = other RNA
ggtgccagcagttgcctgg

SEQ ID NO: 26974 - RNA, 19 nt, synthetic construct
  source 1..19: mol_type = other RNA
ggtgactgtgggtgtcgtg

SEQ ID NO: 26975 - RNA, 19 nt, synthetic construct
  source 1..19: mol_type = other RNA
gggcggttgcagtccctgg

SEQ ID NO: 26976 - RNA, 19 nt, synthetic construct
  source 1..19: mol_type = other RNA
tgttcctggggtggaagag

SEQ ID NO: 26977 - RNA, 19 nt, synthetic construct
  source 1..19: mol_type = other RNA
ggtagtgtgagctgttcct

SEQ ID NO: 26978 - RNA, 19 nt, synthetic construct
  source 1..19: mol_type = other RNA
ggtgactgtgaagcccgtg

SEQ ID NO: 26979 - RNA, 19 nt, synthetic construct
  source 1..19: mol_type = other RNA
gtcaccgtggagccactgg

SEQ ID NO: 26980 - RNA, 19 nt, synthetic construct
  source 1..19: mol_type = other RNA
ggaggagggggtcaccgtg

SEQ ID NO: 26981 - RNA, 19 nt, synthetic construct
  source 1..19: mol_type = other RNA
gggtgtgggtggtccccgg

SEQ ID NO: 26982 - RNA, 19 nt, synthetic construct
  source 1..19: mol_type = other RNA
gtggtggagccggtggccg

SEQ ID NO: 26983 - RNA, 19 nt, synthetic construct
  source 1..19: mol_type = other RNA
gggagtcactgtgctgctg

SEQ ID NO: 26984 - RNA, 19 nt, synthetic construct
  source 1..19: mol_type = other RNA
atcgcccgtgtgtggtggc

SEQ ID NO: 26985 - RNA, 19 nt, synthetic construct
  source 1..19: mol_type = other RNA
caccgtgtggggactgctg

SEQ ID NO: 26986 - RNA, 19 nt, synthetic construct
  source 1..19: mol_type = other RNA
gcgcaccgtgtggggactg

SEQ ID NO: 26987 - RNA, 19 nt, synthetic construct
  source 1..19: mol_type = other RNA
ccgaagtccaggctgtgcg

SEQ ID NO: 26988 - RNA, 19 nt, synthetic construct
  source 1..19: mol_type = other RNA
gcctgaggtggccgaagtc

SEQ ID NO: 26989 - RNA, 19 nt, synthetic construct
  source 1..19: mol_type = other RNA
tgcctgaggtggccgaagt

SEQ ID NO: 26990 - RNA, 19 nt, synthetic construct
  source 1..19: mol_type = other RNA
ggtgcccaaggtgcctgag

SEQ ID NO: 26991 - RNA, 19 nt, synthetic construct
  source 1..19: mol_type = other RNA
gggtggtgcccaaggtgcc

SEQ ID NO: 26992 - RNA, 19 nt, synthetic construct
  source 1..19: mol_type = other RNA
cgtggaaggctctgtgatg

SEQ ID NO: 26993 - RNA, 19 nt, synthetic construct
  source 1..19: mol_type = other RNA
ccgtggaaggctctgtgat

SEQ ID NO: 26994 - RNA, 19 nt, synthetic construct
  source 1..19: mol_type = other RNA
ggtggtcgtccctggggaa

SEQ ID NO: 26995 - RNA, 19 nt, synthetic construct
  source 1..19: mol_type = other RNA
ccggggtggtcgtccctgg

SEQ ID NO: 26996 - RNA, 19 nt, synthetic construct
  source 1..19: mol_type = other RNA
ccgtggtcaccaccgtggt

SEQ ID NO: 26997 - RNA, 19 nt, synthetic construct
  source 1..19: mol_type = other RNA
cacagcccgtggtcaccac

SEQ ID NO: 26998 - RNA, 19 nt, synthetic construct
  source 1..19: mol_type = other RNA
ctggggctcacagcccgtg

SEQ ID NO: 26999 - RNA, 19 nt, synthetic construct
  source 1..19: mol_type = other RNA
ccagccactctgaccaggc

SEQ ID NO: 27000 - RNA, 19 nt, synthetic construct
  source 1..19: mol_type = other RNA
gccccggcatggggtagct

SEQ ID NO: 27001 - RNA, 19 nt, synthetic construct
  source 1..19: mol_type = other RNA
gtccccgccagagggcccc

SEQ ID NO: 27002 - RNA, 19 nt, synthetic construct
  source 1..19: mol_type = other RNA
cacggatgttggagtaggt

SEQ ID NO: 27003 - RNA, 19 nt, synthetic construct
  source 1..19: mol_type = other RNA
cacggttcctgcagaccag

SEQ ID NO: 27004 - RNA, 19 nt, synthetic construct
  source 1..19: mol_type = other RNA
cttgaacttccccacctgc

SEQ ID NO: 27005 - RNA, 19 nt, synthetic construct
  source 1..19: mol_type = other RNA
gaggagggcatggccgtag

SEQ ID NO: 27006 - RNA, 19 nt, synthetic construct
  source 1..19: mol_type = other RNA
gtggctttggaactggtgg

SEQ ID NO: 27007 - RNA, 19 nt, synthetic construct
  source 1..19: mol_type = other RNA
ctggtagctgtggatttgg

SEQ ID NO: 27008 - RNA, 19 nt, synthetic construct
  source 1..19: mol_type = other RNA
acgctggtagctgtggatt

SEQ ID NO: 27009 - RNA, 19 nt, synthetic construct
  source 1..19: mol_type = other RNA
taacgctggtagctgtgga

SEQ ID NO: 27010 - RNA, 19 nt, synthetic construct
  source 1..19: mol_type = other RNA
gattgtggacatggtggcc

SEQ ID NO: 27011 - RNA, 19 nt, synthetic construct
  source 1..19: mol_type = other RNA
ggattgtggacatggtggc

SEQ ID NO: 27012 - RNA, 19 nt, synthetic construct
  source 1..19: mol_type = other RNA
ggggtggattgtggacatg

SEQ ID NO: 27013 - RNA, 19 nt, synthetic construct
  source 1..19: mol_type = other RNA
ggtctccggagtggaggag

SEQ ID NO: 27014 - RNA, 19 nt, synthetic construct
  source 1..19: mol_type = other RNA
ttcgtggtcagcactgtgg

SEQ ID NO: 27015 - RNA, 19 nt, synthetic construct
  source 1..19: mol_type = other RNA
gctcggctctgtgaggatc

SEQ ID NO: 27016 - RNA, 19 nt, synthetic construct
  source 1..19: mol_type = other RNA
ccggtgggcaccgtcacgg

SEQ ID NO: 27017 - RNA, 19 nt, synthetic construct
  source 1..19: mol_type = other RNA
ggtgccagcagttgcctgg

SEQ ID NO: 27018 - RNA, 19 nt, synthetic construct
  source 1..19: mol_type = other RNA
ggtgactgtgggtgtcgtg

SEQ ID NO: 27019 - RNA, 19 nt, synthetic construct
  source 1..19: mol_type = other RNA
gaagggcagttgcagtccc

SEQ ID NO: 27020 - RNA, 19 nt, synthetic construct
  source 1..19: mol_type = other RNA
ggcggtaagcactgtggag

SEQ ID NO: 27021 - RNA, 19 nt, synthetic construct
  source 1..19: mol_type = other RNA
ggtagtgtgagctgttcct

SEQ ID NO: 27022 - RNA, 19 nt, synthetic construct
  source 1..19: mol_type = other RNA
tgagtgccgtccctgggct

SEQ ID NO: 27023 - RNA, 19 nt, synthetic construct
  source 1..19: mol_type = other RNA
gtcaccgtggagccactgg

SEQ ID NO: 27024 - RNA, 19 nt, synthetic construct
  source 1..19: mol_type = other RNA
ggaggagggggtcaccgtg

SEQ ID NO: 27025 - RNA, 19 nt, synthetic construct
  source 1..19: mol_type = other RNA
cggtgtgggtggtccccgg

SEQ ID NO: 27026 - RNA, 19 nt, synthetic construct
  source 1..19: mol_type = other RNA
gtggtggagccggtggccg

SEQ ID NO: 27027 - RNA, 19 nt, synthetic construct
  source 1..19: mol_type = other RNA
ggtgatgggtgttgtccct

SEQ ID NO: 27028 - RNA, 19 nt, synthetic construct
  source 1..19: mol_type = other RNA
ttttgtggctgtgcttgtc

SEQ ID NO: 27029 - RNA, 19 nt, synthetic construct
  source 1..19: mol_type = other RNA
ggtagctgtggattttgtg

SEQ ID NO: 27030 - RNA, 19 nt, synthetic construct
  source 1..19: mol_type = other RNA
gtaaagctggtagctgtgg

SEQ ID NO: 27031 - RNA, 19 nt, synthetic construct
  source 1..19: mol_type = other RNA
ggtggtctgtgctgggacg

SEQ ID NO: 27032 - RNA, 19 nt, synthetic construct
  source 1..19: mol_type = other RNA
ggattgtggacatggtgga

SEQ ID NO: 27033 - RNA, 19 nt, synthetic construct
  source 1..19: mol_type = other RNA
ggtgtggattgtggacatg

SEQ ID NO: 27034 - RNA, 19 nt, synthetic construct
  source 1..19: mol_type = other RNA
ggaggtgtggattgtggac

SEQ ID NO: 27035 - RNA, 19 nt, synthetic construct
  source 1..19: mol_type = other RNA
tagaggaggtgtggattgt

SEQ ID NO: 27036 - RNA, 19 nt, synthetic construct
  source 1..19: mol_type = other RNA
gcccttgtcatggtggctg

SEQ ID NO: 27037 - RNA, 19 nt, synthetic construct
  source 1..19: mol_type = other RNA
gatccagtggctgcagttg

SEQ ID NO: 27038 - RNA, 19 nt, synthetic construct
  source 1..19: mol_type = other RNA
ggaggacagggtggccgtg

SEQ ID NO: 27039 - RNA, 19 nt, synthetic construct
  source 1..19: mol_type = other RNA
gctcggctctgtgaggatc

SEQ ID NO: 27040 - RNA, 19 nt, synthetic construct
  source 1..19: mol_type = other RNA
ctatagtgctcggctctgt

SEQ ID NO: 27041 - RNA, 19 nt, synthetic construct
  source 1..19: mol_type = other RNA
accggtgggcaccatcacg

SEQ ID NO: 27042 - RNA, 19 nt, synthetic construct
  source 1..19: mol_type = other RNA
gggcatagtggccatggtg

SEQ ID NO: 27043 - RNA, 19 nt, synthetic construct
  source 1..19: mol_type = other RNA
gctgtgggcatagtggcca

SEQ ID NO: 27044 - RNA, 19 nt, synthetic construct
  source 1..19: mol_type = other RNA
ggctgtgggcatagtggcc

SEQ ID NO: 27045 - RNA, 19 nt, synthetic construct
  source 1..19: mol_type = other RNA
cggtggacgagctgggaac

SEQ ID NO: 27046 - RNA, 19 nt, synthetic construct
  source 1..19: mol_type = other RNA
cccacggtggacgagctgg

SEQ ID NO: 27047 - RNA, 19 nt, synthetic construct
  source 1..19: mol_type = other RNA
tccccacggtggacgagct

SEQ ID NO: 27048 - RNA, 19 nt, synthetic construct
  source 1..19: mol_type = other RNA
ggtccccacggtggacgag

SEQ ID NO: 27049 - RNA, 19 nt, synthetic construct
  source 1..19: mol_type = other RNA
gcgggtggtccccacggtg

SEQ ID NO: 27050 - RNA, 19 nt, synthetic construct
  source 1..19: mol_type = other RNA
cagtgggtctcagggtggt

SEQ ID NO: 27051 - RNA, 19 nt, synthetic construct
  source 1..19: mol_type = other RNA
gcgagaaaaactgtccaaa

SEQ ID NO: 27052 - RNA, 19 nt, synthetic construct
  source 1..19: mol_type = other RNA
ggacactggcggtggggag

SEQ ID NO: 27053 - RNA, 19 nt, synthetic construct
  source 1..19: mol_type = other RNA
cacctgccggagagggatg

SEQ ID NO: 27054 - RNA, 19 nt, synthetic construct
  source 1..19: mol_type = other RNA
gcggcagtggcagaggccg

SEQ ID NO: 27055 - RNA, 19 nt, synthetic construct
  source 1..19: mol_type = other RNA
atgcaccatggtgacagtg

SEQ ID NO: 27056 - RNA, 19 nt, synthetic construct
  source 1..19: mol_type = other RNA
cttcccatgcaccatggtg

SEQ ID NO: 27057 - RNA, 19 nt, synthetic construct
  source 1..19: mol_type = other RNA
acgcatggtggtggtcccc

SEQ ID NO: 27058 - RNA, 19 nt, synthetic construct
  source 1..19: mol_type = other RNA
gtccacacgcatggtggtg

SEQ ID NO: 27059 - RNA, 19 nt, synthetic construct
  source 1..19: mol_type = other RNA
ctggaagacttggccattg

SEQ ID NO: 27060 - RNA, 19 nt, synthetic construct
  source 1..19: mol_type = other RNA
ccgggcctggaagacttgg

SEQ ID NO: 27061 - RNA, 19 nt, synthetic construct
  source 1..19: mol_type = other RNA
gccacgtcttggccatgtc

SEQ ID NO: 27062 - RNA, 19 nt, synthetic construct
  source 1..19: mol_type = other RNA
catcagatcacagagcggc

SEQ ID NO: 27063 - RNA, 19 nt, synthetic construct
  source 1..19: mol_type = other RNA
gcatggcttgtacactttg

SEQ ID NO: 27064 - RNA, 19 nt, synthetic construct
  source 1..19: mol_type = other RNA
ctagagttgcaggtggcag

SEQ ID NO: 27065 - RNA, 19 nt, synthetic construct
  source 1..19: mol_type = other RNA
ctccgccatcccctccagc

SEQ ID NO: 27066 - RNA, 19 nt, synthetic construct
  source 1..19: mol_type = other RNA
gcagttgctgacccaccgc

SEQ ID NO: 27067 - RNA, 19 nt, synthetic construct
  source 1..19: mol_type = other RNA
ggttctcggcccggggcct

SEQ ID NO: 27068 - RNA, 19 nt, synthetic construct
  source 1..19: mol_type = other RNA
caggcatcctcctgacatt

SEQ ID NO: 27069 - RNA, 19 nt, synthetic construct
  source 1..19: mol_type = other RNA
ccggccactctcttgtact

SEQ ID NO: 27070 - RNA, 19 nt, synthetic construct
  source 1..19: mol_type = other RNA
ggactccaccctcagcctc

SEQ ID NO: 27071 - RNA, 19 nt, synthetic construct
  source 1..19: mol_type = other RNA
ctgcagctggacacatctg

SEQ ID NO: 27072 - RNA, 19 nt, synthetic construct
  source 1..19: mol_type = other RNA
tggacgctccggggcagga

SEQ ID NO: 27073 - RNA, 19 nt, synthetic construct
  source 1..19: mol_type = other RNA
tcgtggacccgcctctcct

SEQ ID NO: 27074 - RNA, 19 nt, synthetic construct
  source 1..19: mol_type = other RNA
ctcgtggacccgcctctcc

SEQ ID NO: 27075 - RNA, 19 nt, synthetic construct
  source 1..19: mol_type = other RNA
cgtctcctcgtggacccgc

SEQ ID NO: 27076 - RNA, 19 nt, synthetic construct
  source 1..19: mol_type = other RNA
gaagccacgggtgtgtggg

SEQ ID NO: 27077 - RNA, 19 nt, synthetic construct
  source 1..19: mol_type = other RNA
ggaagccacgggtgtgtgg

SEQ ID NO: 27078 - RNA, 19 nt, synthetic construct
  source 1..19: mol_type = other RNA
atcagacaatgcacatcct

SEQ ID NO: 27079 - RNA, 19 nt, synthetic construct
  source 1..19: mol_type = other RNA
gatcagacaatgcacatcc

SEQ ID NO: 27080 - RNA, 19 nt, synthetic construct
  source 1..19: mol_type = other RNA
gcccaaggttttcatgatc

SEQ ID NO: 27081 - RNA, 19 nt, synthetic construct
  source 1..19: mol_type = other RNA
gaggcccaaggttttcatg

SEQ ID NO: 27082 - RNA, 19 nt, synthetic construct
  source 1..19: mol_type = other RNA
ctcccagggtaggactcct

SEQ ID NO: 27083 - RNA, 19 nt, synthetic construct
  source 1..19: mol_type = other RNA
cagctggaatccgtgctgc

SEQ ID NO: 27084 - RNA, 19 nt, synthetic construct
  source 1..19: mol_type = other RNA
cagcggccggacgtggcca

SEQ ID NO: 27085 - RNA, 19 nt, synthetic construct
  source 1..19: mol_type = other RNA
gccccagcggccggacgtg

SEQ ID NO: 27086 - RNA, 19 nt, synthetic construct
  source 1..19: mol_type = other RNA
cctcagccctgagttaccc

SEQ ID NO: 27087 - RNA, 19 nt, synthetic construct
  source 1..19: mol_type = other RNA
tgacccctctctgacctgg

SEQ ID NO: 27088 - RNA, 19 nt, synthetic construct
  source 1..19: mol_type = other RNA
ttgggatgctgacccctct

SEQ ID NO: 27089 - RNA, 19 nt, synthetic construct
  source 1..19: mol_type = other RNA
tgctcagggtttatttgca

SEQ ID NO: 27090 - RNA, 19 nt, synthetic construct
  source 1..19: mol_type = other RNA
gggatgggagttgtccctg

SEQ ID NO: 27091 - RNA, 19 nt, synthetic construct
  source 1..19: mol_type = other RNA
tggggtgatgggtgttgtc

SEQ ID NO: 27092 - RNA, 19 nt, synthetic construct
  source 1..19: mol_type = other RNA
ggcacccatcctgggggct

SEQ ID NO: 27093 - RNA, 19 nt, synthetic construct
  source 1..19: mol_type = other RNA
tgatggcattgtcgtcgaa

SEQ ID NO: 27094 - RNA, 19 nt, synthetic construct
  source 1..19: mol_type = other RNA
ctcaaagtctccgcctccc

SEQ ID NO: 27095 - RNA, 19 nt, synthetic construct
  source 1..19: mol_type = other RNA
tagagttgcaggtggcagg

SEQ ID NO: 27096 - RNA, 19 nt, synthetic construct
  source 1..19: mol_type = other RNA
attcacctgccggagaggg

SEQ ID NO: 27097 - RNA, 19 nt, synthetic construct
  source 1..19: mol_type = other RNA
caccaccccgctgagggcc

SEQ ID NO: 27098 - RNA, 19 nt, synthetic construct
  source 1..19: mol_type = other RNA
ggtcttattgtagatgact

SEQ ID NO: 27099 - RNA, 19 nt, synthetic construct
  source 1..19: mol_type = other RNA
ccaggtttcattcagctgg

SEQ ID NO: 27100 - RNA, 19 nt, synthetic construct
  source 1..19: mol_type = other RNA
acaggctctcccagggtag

SEQ ID NO: 27101 - RNA, 19 nt, synthetic construct
  source 1..19: mol_type = other RNA
cagaacgtagctgcagtca

SEQ ID NO: 27102 - RNA, 19 nt, synthetic construct
  source 1..19: mol_type = other RNA
agctcggctccacagggcc

SEQ ID NO: 27103 - RNA, 19 nt, synthetic construct
  source 1..19: mol_type = other RNA
agggctgagcgtgttggaa

SEQ ID NO: 27104 - RNA, 19 nt, synthetic construct
  source 1..19: mol_type = other RNA
ggaagggctgagcgtgttg

SEQ ID NO: 27105 - RNA, 19 nt, synthetic construct
  source 1..19: mol_type = other RNA
tctcagggtggaggtcggg

SEQ ID NO: 27106 - RNA, 19 nt, synthetic construct
  source 1..19: mol_type = other RNA
tggccctggtgtggcccgg

SEQ ID NO: 27107 - RNA, 19 nt, synthetic construct
  source 1..19: mol_type = other RNA
agggtggttgcagtccttg

SEQ ID NO: 27108 - RNA, 19 nt, synthetic construct
  source 1..19: mol_type = other RNA
agactgcccctccggccgc

SEQ ID NO: 27109 - RNA, 19 nt, synthetic construct
  source 1..19: mol_type = other RNA
agggtggttgcagtccttg

SEQ ID NO: 27110 - RNA, 19 nt, synthetic construct
  source 1..19: mol_type = other RNA
agggtggttgcagtccttg

SEQ ID NO: 27111 - RNA, 19 nt, synthetic construct
  source 1..19: mol_type = other RNA
ggggttctcggcccggggc

SEQ ID NO: 27112 - RNA, 19 nt, synthetic construct
  source 1..19: mol_type = other RNA
cctggcgggcacacaggca

SEQ ID NO: 27113 - RNA, 19 nt, synthetic construct
  source 1..19: mol_type = other RNA
ggtgtgccctgcattctcc

SEQ ID NO: 27114 - RNA, 19 nt, synthetic construct
  source 1..19: mol_type = other RNA
caaggttttcatgatcaga

SEQ ID NO: 27115 - RNA, 19 nt, synthetic construct
  source 1..19: mol_type = other RNA
gtcctcgtaggcggcgcgg

SEQ ID NO: 27116 - RNA, 19 nt, synthetic construct
  source 1..19: mol_type = other RNA
gatgtagtccccgctctgc

SEQ ID NO: 27117 - RNA, 19 nt, synthetic construct
  source 1..19: mol_type = other RNA
gcagggtgagccacactcc

SEQ ID NO: 27118 - RNA, 19 nt, synthetic construct
  source 1..19: mol_type = other RNA
cccaggggtgcccgccgag

SEQ ID NO: 27119 - RNA, 19 nt, synthetic construct
  source 1..19: mol_type = other RNA
cgttgtgcacacaggggca

SEQ ID NO: 27120 - RNA, 19 nt, synthetic construct
  source 1..19: mol_type = other RNA
ggtgccagggcgtccgggc

SEQ ID NO: 27121 - RNA, 19 nt, synthetic construct
  source 1..19: mol_type = other RNA
ggaagctgcgccgcccggc

SEQ ID NO: 27122 - RNA, 19 nt, synthetic construct
  source 1..19: mol_type = other RNA
ggttggggtaggcacagca

SEQ ID NO: 27123 - RNA, 19 nt, synthetic construct
  source 1..19: mol_type = other RNA
tcggcactgggggtgtgtg

SEQ ID NO: 27124 - RNA, 19 nt, synthetic construct
  source 1..19: mol_type = other RNA
tcggcactgggggtgtgtg

SEQ ID NO: 27125 - RNA, 19 nt, synthetic construct
  source 1..19: mol_type = other RNA
gtctccggagtggaggagg

SEQ ID NO: 27126 - RNA, 19 nt, synthetic construct
  source 1..19: mol_type = other RNA
tcggcactgggggtgtgtg

SEQ ID NO: 27127 - RNA, 19 nt, synthetic construct
  source 1..19: mol_type = other RNA
gaggtgcccctggtgtggc

SEQ ID NO: 27128 - RNA, 19 nt, synthetic construct
  source 1..19: mol_type = other RNA
tcggcactgggggtgtgtg

SEQ ID NO: 27129 - RNA, 19 nt, synthetic construct
  source 1..19: mol_type = other RNA
ggcccaactcccccagggg

SEQ ID NO: 27130 - RNA, 19 nt, synthetic construct
  source 1..19: mol_type = other RNA
gtctccggagtggaggagg

SEQ ID NO: 27131 - RNA, 19 nt, synthetic construct
  source 1..19: mol_type = other RNA
ctccttcccatgcaccatg

SEQ ID NO: 27132 - RNA, 19 nt, synthetic construct
  source 1..19: mol_type = other RNA
gggttctcggcccggggcc

SEQ ID NO: 27133 - RNA, 19 nt, synthetic construct
  source 1..19: mol_type = other RNA
ggcgggcacacaggcaggc

SEQ ID NO: 27134 - RNA, 19 nt, synthetic construct
  source 1..19: mol_type = other RNA
gcactgcccggccactctc

SEQ ID NO: 27135 - RNA, 19 nt, synthetic construct
  source 1..19: mol_type = other RNA
gccgtgctggtcagcactg

SEQ ID NO: 27136 - RNA, 19 nt, synthetic construct
  source 1..19: mol_type = other RNA
tgggtggtccccgggatgg

SEQ ID NO: 27137 - RNA, 19 nt, synthetic construct
  source 1..19: mol_type = other RNA
tgggtggtccccgggatgg

SEQ ID NO: 27138 - RNA, 19 nt, synthetic construct
  source 1..19: mol_type = other RNA
tgggtggtccccgggatgg

SEQ ID NO: 27139 - RNA, 19 nt, synthetic construct
  source 1..19: mol_type = other RNA
tgggtggtccccgggatgg

SEQ ID NO: 27140 - RNA, 19 nt, synthetic construct
  source 1..19: mol_type = other RNA
gtcccagtgacatcaggga

SEQ ID NO: 27141 - RNA, 19 nt, synthetic construct
  source 1..19: mol_type = other RNA
cacccggccctctcgccac

SEQ ID NO: 27142 - RNA, 19 nt, synthetic construct
  source 1..19: mol_type = other RNA
ccaccccgctgagggccgt

SEQ ID NO: 27143 - RNA, 19 nt, synthetic construct
  source 1..19: mol_type = other RNA
aaccagtggccacagttgt

SEQ ID NO: 27144 - RNA, 19 nt, synthetic construct
  source 1..19: mol_type = other RNA
aaccagtggccacagttgt

SEQ ID NO: 27145 - RNA, 19 nt, synthetic construct
  source 1..19: mol_type = other RNA
aaccagtggccacagttgt

SEQ ID NO: 27146 - RNA, 19 nt, synthetic construct
  source 1..19: mol_type = other RNA
aaccagtggccacagttgt

SEQ ID NO: 27147 - RNA, 19 nt, synthetic construct
  source 1..19: mol_type = other RNA
aaccagtggccacagttgt

SEQ ID NO: 27148 - RNA, 19 nt, synthetic construct
  source 1..19: mol_type = other RNA
ctgcgaggtgagggccgcc

SEQ ID NO: 27149 - RNA, 19 nt, synthetic construct
  source 1..19: mol_type = other RNA
cagtgatgggggagtacca

SEQ ID NO: 27150 - RNA, 19 nt, synthetic construct
  source 1..19: mol_type = other RNA
cagtgatgggggagtacca

SEQ ID NO: 27151 - RNA, 19 nt, synthetic construct
  source 1..19: mol_type = other RNA
tgggtgtggtggtctgttc

SEQ ID NO: 27152 - RNA, 19 nt, synthetic construct
  source 1..19: mol_type = other RNA
ggaggtgtgggtggtctcc

SEQ ID NO: 27153 - RNA, 19 nt, synthetic construct
  source 1..19: mol_type = other RNA
cagtgatgggggagtacca

SEQ ID NO: 27154 - RNA, 19 nt, synthetic construct
  source 1..19: mol_type = other RNA
cagtgatgggggagtacca

SEQ ID NO: 27155 - RNA, 19 nt, synthetic construct
  source 1..19: mol_type = other RNA
gaggaggggatgggtgtaa

SEQ ID NO: 27156 - RNA, 19 nt, synthetic construct
  source 1..19: mol_type = other RNA
cgggtgtggtggtctgttc

SEQ ID NO: 27157 - RNA, 19 nt, synthetic construct
  source 1..19: mol_type = other RNA
ggaggtgtgggtggtctcc

SEQ ID NO: 27158 - RNA, 19 nt, synthetic construct
  source 1..19: mol_type = other RNA
cagtgatgggggagtacca

SEQ ID NO: 27159 - RNA, 19 nt, synthetic construct
  source 1..19: mol_type = other RNA
tctgctgtcggggaccagc

SEQ ID NO: 27160 - RNA, 19 nt, synthetic construct
  source 1..19: mol_type = other RNA
gcagtggggggtgtgccag

SEQ ID NO: 27161 - RNA, 19 nt, synthetic construct
  source 1..19: mol_type = other RNA
cgcggacacacacggtgga

SEQ ID NO: 27162 - RNA, 19 nt, synthetic construct
  source 1..19: mol_type = other RNA
ctggctgtgcctgtcgggc

SEQ ID NO: 27163 - RNA, 19 nt, synthetic construct
  source 1..19: mol_type = other RNA
gtcacggtggctgtagtgc

SEQ ID NO: 27164 - RNA, 19 nt, synthetic construct
  source 1..19: mol_type = other RNA
gtcacggtggctgtagtgc

SEQ ID NO: 27165 - RNA, 19 nt, synthetic construct
  source 1..19: mol_type = other RNA
gtcacggtggctgtagtgc

SEQ ID NO: 27166 - RNA, 19 nt, synthetic construct
  source 1..19: mol_type = other RNA
gtcacggtggctgtagtgc

SEQ ID NO: 27167 - RNA, 19 nt, synthetic construct
  source 1..19: mol_type = other RNA
ctgctgtcggggaccagcc

SEQ ID NO: 27168 - RNA, 19 nt, synthetic construct
  source 1..19: mol_type = other RNA
cactcccacctccggttcc

SEQ ID NO: 27169 - RNA, 19 nt, synthetic construct
  source 1..19: mol_type = other RNA
tgctgatccacactggaag

SEQ ID NO: 27170 - RNA, 19 nt, synthetic construct
  source 1..19: mol_type = other RNA
gggtggtccccacggtgga

SEQ ID NO: 27171 - RNA, 19 nt, synthetic construct
  source 1..19: mol_type = other RNA
cactgtggcggtgtgggtg

SEQ ID NO: 27172 - RNA, 19 nt, synthetic construct
  source 1..19: mol_type = other RNA
ctgctgctagggtgagggc

SEQ ID NO: 27173 - RNA, 19 nt, synthetic construct
  source 1..19: mol_type = other RNA
ctgctgctagggtgagggc

SEQ ID NO: 27174 - RNA, 19 nt, synthetic construct
  source 1..19: mol_type = other RNA
cactgtggcggtgtgggtg

SEQ ID NO: 27175 - RNA, 19 nt, synthetic construct
  source 1..19: mol_type = other RNA
gtactggtggttgctgctg

SEQ ID NO: 27176 - RNA, 19 nt, synthetic construct
  source 1..19: mol_type = other RNA
ctgctgctagggtgagggc

SEQ ID NO: 27177 - RNA, 19 nt, synthetic construct
  source 1..19: mol_type = other RNA
ctgctgctagggtgagggc

SEQ ID NO: 27178 - RNA, 19 nt, synthetic construct
  source 1..19: mol_type = other RNA
ccgccccacatgctgcaga

SEQ ID NO: 27179 - RNA, 19 nt, synthetic construct
  source 1..19: mol_type = other RNA
gtggatgctgagggcgcgg

SEQ ID NO: 27180 - RNA, 19 nt, synthetic construct
  source 1..19: mol_type = other RNA
tttctgctgtcggggacca

SEQ ID NO: 27181 - RNA, 19 nt, synthetic construct
  source 1..19: mol_type = other RNA
gggcacctccagttccgcg

SEQ ID NO: 27182 - RNA, 19 nt, synthetic construct
  source 1..19: mol_type = other RNA
ggccccgccctgcacagag

SEQ ID NO: 27183 - RNA, 19 nt, synthetic construct
  source 1..19: mol_type = other RNA
atgagtggcaccagctgca

SEQ ID NO: 27184 - RNA, 19 nt, synthetic construct
  source 1..19: mol_type = other RNA
cattggcacaggcagcctg

SEQ ID NO: 27185 - RNA, 19 nt, synthetic construct
  source 1..19: mol_type = other RNA
caggggtgcccgccgagct

SEQ ID NO: 27186 - RNA, 19 nt, synthetic construct
  source 1..19: mol_type = other RNA
tgtgcagttacagctctgg

SEQ ID NO: 27187 - RNA, 19 nt, synthetic construct
  source 1..19: mol_type = other RNA
agggtccagttggggaagc

SEQ ID NO: 27188 - RNA, 19 nt, synthetic construct
  source 1..19: mol_type = other RNA
gtggatgtggccacccctg

SEQ ID NO: 27189 - RNA, 19 nt, synthetic construct
  source 1..19: mol_type = other RNA
gggccagcgtgggtggctg

SEQ ID NO: 27190 - RNA, 19 nt, synthetic construct
  source 1..19: mol_type = other RNA
agctgttctcagggtggag

SEQ ID NO: 27191 - RNA, 19 nt, synthetic construct
  source 1..19: mol_type = other RNA
agggagtggctttggagct

SEQ ID NO: 27192 - RNA, 19 nt, synthetic construct
  source 1..19: mol_type = other RNA
acatggtggccgtgggtgt

SEQ ID NO: 27193 - RNA, 19 nt, synthetic construct
  source 1..19: mol_type = other RNA
cactgtgttgctggtggct

SEQ ID NO: 27194 - RNA, 19 nt, synthetic construct
  source 1..19: mol_type = other RNA
tctgctgctagggtgaggg

SEQ ID NO: 27195 - RNA, 19 nt, synthetic construct
  source 1..19: mol_type = other RNA
gggtcttgctgggtgtggc

SEQ ID NO: 27196 - RNA, 19 nt, synthetic construct
  source 1..19: mol_type = other RNA
tccccgccagagggccccg

SEQ ID NO: 27197 - RNA, 19 nt, synthetic construct
  source 1..19: mol_type = other RNA
gcagaccaggccaaagtcc

SEQ ID NO: 27198 - RNA, 19 nt, synthetic construct
  source 1..19: mol_type = other RNA
agggagtggctttggagct

SEQ ID NO: 27199 - RNA, 19 nt, synthetic construct
  source 1..19: mol_type = other RNA
acatggtggccgtgggtgt

SEQ ID NO: 27200 - RNA, 19 nt, synthetic construct
  source 1..19: mol_type = other RNA
cctgctgctagggtgaggg

SEQ ID NO: 27201 - RNA, 19 nt, synthetic construct
  source 1..19: mol_type = other RNA
gggtcttgctgggtgtggc

SEQ ID NO: 27202 - RNA, 19 nt, synthetic construct
  source 1..19: mol_type = other RNA
tccccgccagagggccccg

SEQ ID NO: 27203 - RNA, 19 nt, synthetic construct
  source 1..19: mol_type = other RNA
gcagaccaggccaaagtcc

SEQ ID NO: 27204 - RNA, 19 nt, synthetic construct
  source 1..19: mol_type = other RNA
gtctgctctgtgaggatcc

SEQ ID NO: 27205 - RNA, 19 nt, synthetic construct
  source 1..19: mol_type = other RNA
tgtcgtggtggccttcgtg

SEQ ID NO: 27206 - RNA, 19 nt, synthetic construct
  source 1..19: mol_type = other RNA
acatggtggccgtgggtgt

SEQ ID NO: 27207 - RNA, 19 nt, synthetic construct
  source 1..19: mol_type = other RNA
cctgctgctagggtgaggg

SEQ ID NO: 27208 - RNA, 19 nt, synthetic construct
  source 1..19: mol_type = other RNA
gggtcttgctgggtgtggc

SEQ ID NO: 27209 - RNA, 19 nt, synthetic construct
  source 1..19: mol_type = other RNA
cccgtggtcaccaccgtgg

SEQ ID NO: 27210 - RNA, 19 nt, synthetic construct
  source 1..19: mol_type = other RNA
tccccgccagagggccccg

SEQ ID NO: 27211 - RNA, 19 nt, synthetic construct
  source 1..19: mol_type = other RNA
gcagaccaggccaaagtcc

SEQ ID NO: 27212 - RNA, 19 nt, synthetic construct
  source 1..19: mol_type = other RNA
agggagtggctttggagct

SEQ ID NO: 27213 - RNA, 19 nt, synthetic construct
  source 1..19: mol_type = other RNA
acatggtggccgtgggtgt

SEQ ID NO: 27214 - RNA, 19 nt, synthetic construct
  source 1..19: mol_type = other RNA
ccctggttgtggtggccgt

SEQ ID NO: 27215 - RNA, 19 nt, synthetic construct
  source 1..19: mol_type = other RNA
cctgctgctagggtgaggg

SEQ ID NO: 27216 - RNA, 19 nt, synthetic construct
  source 1..19: mol_type = other RNA
gggtcttgctgggtgtggc

SEQ ID NO: 27217 - RNA, 19 nt, synthetic construct
  source 1..19: mol_type = other RNA
cccgtggtcaccaccgtgg

SEQ ID NO: 27218 - RNA, 19 nt, synthetic construct
  source 1..19: mol_type = other RNA
tccccgccagagggccccg

SEQ ID NO: 27219 - RNA, 19 nt, synthetic construct
  source 1..19: mol_type = other RNA
gcagaccaggccaaagtcc

SEQ ID NO: 27220 - RNA, 19 nt, synthetic construct
  source 1..19: mol_type = other RNA
tgtcgtggtggccttcgtg

SEQ ID NO: 27221 - RNA, 19 nt, synthetic construct
  source 1..19: mol_type = other RNA
agggagtggctttggagct

SEQ ID NO: 27222 - RNA, 19 nt, synthetic construct
  source 1..19: mol_type = other RNA
acatggtggccgtgggtgt

SEQ ID NO: 27223 - RNA, 19 nt, synthetic construct
  source 1..19: mol_type = other RNA
ccgtgctggtcagcactgg

SEQ ID NO: 27224 - RNA, 19 nt, synthetic construct
  source 1..19: mol_type = other RNA
tgcgggtgtggtggccgtg

SEQ ID NO: 27225 - RNA, 19 nt, synthetic construct
  source 1..19: mol_type = other RNA
ggaggtgtgggtggtctct

SEQ ID NO: 27226 - RNA, 19 nt, synthetic construct
  source 1..19: mol_type = other RNA
gagctgttcccagagtgga

SEQ ID NO: 27227 - RNA, 19 nt, synthetic construct
  source 1..19: mol_type = other RNA
gtggctgtgggcatagtgg

SEQ ID NO: 27228 - RNA, 19 nt, synthetic construct
  source 1..19: mol_type = other RNA
cgagctgggaaccgtggag

SEQ ID NO: 27229 - RNA, 19 nt, synthetic construct
  source 1..19: mol_type = other RNA
acgctgaaggttggcaggc

SEQ ID NO: 27230 - RNA, 19 nt, synthetic construct
  source 1..19: mol_type = other RNA
gtgacgctcacgcccaggg

SEQ ID NO: 27231 - RNA, 19 nt, synthetic construct
  source 1..19: mol_type = other RNA
ggcagtggggggtgtgcca

SEQ ID NO: 27232 - RNA, 19 nt, synthetic construct
  source 1..19: mol_type = other RNA
cagagcggctgtggtgggc

SEQ ID NO: 27233 - RNA, 19 nt, synthetic construct
  source 1..19: mol_type = other RNA
cacgcagatgcccatgtgt

SEQ ID NO: 27234 - RNA, 19 nt, synthetic construct
  source 1..19: mol_type = other RNA
ccagggtaggactcctgag

SEQ ID NO: 27235 - RNA, 19 nt, synthetic construct
  source 1..19: mol_type = other RNA
tgcttagtttgttccaggg

SEQ ID NO: 27236 - RNA, 19 nt, synthetic construct
  source 1..19: mol_type = other RNA
cctgtctgccccagcggcc

SEQ ID NO: 27237 - RNA, 19 nt, synthetic construct
  source 1..19: mol_type = other RNA
agcctgtctgccccagcgg

SEQ ID NO: 27238 - RNA, 19 nt, synthetic construct
  source 1..19: mol_type = other RNA
agggggctttgggatgctg

SEQ ID NO: 27239 - RNA, 19 nt, synthetic construct
  source 1..19: mol_type = other RNA
gaggtggccgaagtccagg

SEQ ID NO: 27240 - RNA, 19 nt, synthetic construct
  source 1..19: mol_type = other RNA
gaggtggccgaagtccagg

SEQ ID NO: 27241 - RNA, 19 nt, synthetic construct
  source 1..19: mol_type = other RNA
gaggtggccgaagtccagg

SEQ ID NO: 27242 - RNA, 19 nt, synthetic construct
  source 1..19: mol_type = other RNA
gaggtggccgaagtccagg

SEQ ID NO: 27243 - RNA, 19 nt, synthetic construct
  source 1..19: mol_type = other RNA
ctggtcctcagggcagaag

SEQ ID NO: 27244 - RNA, 19 nt, synthetic construct
  source 1..19: mol_type = other RNA
ggtaggactcctgagtggc

SEQ ID NO: 27245 - RNA, 19 nt, synthetic construct
  source 1..19: mol_type = other RNA
cgacctggcccaactcccc

SEQ ID NO: 27246 - RNA, 19 nt, synthetic construct
  source 1..19: mol_type = other RNA
acggcgggggctgaccctg

SEQ ID NO: 27247 - RNA, 19 nt, synthetic construct
  source 1..19: mol_type = other RNA
ggcccctcacccttctggg

SEQ ID NO: 27248 - RNA, 19 nt, synthetic construct
  source 1..19: mol_type = other RNA
ctcgttgtgcacacagggg

SEQ ID NO: 27249 - RNA, 19 nt, synthetic construct
  source 1..19: mol_type = other RNA
acgcccagggcaggaatgt

SEQ ID NO: 27250 - RNA, 19 nt, synthetic construct
  source 1..19: mol_type = other RNA
gccgtggatccagtggact

SEQ ID NO: 27251 - RNA, 19 nt, synthetic construct
  source 1..19: mol_type = other RNA
gccgtggatccagtggact

SEQ ID NO: 27252 - RNA, 19 nt, synthetic construct
  source 1..19: mol_type = other RNA
tcaaaggtggaatagtggg

SEQ ID NO: 27253 - RNA, 19 nt, synthetic construct
  source 1..19: mol_type = other RNA
tctccgctgtggggaccct

SEQ ID NO: 27254 - RNA, 19 nt, synthetic construct
  source 1..19: mol_type = other RNA
ttgctgtggtctgggttgg

SEQ ID NO: 27255 - RNA, 19 nt, synthetic construct
  source 1..19: mol_type = other RNA
gtgaggggcgccatgtgcc

SEQ ID NO: 27256 - RNA, 19 nt, synthetic construct
  source 1..19: mol_type = other RNA
cggcgggggctgaccctgg

SEQ ID NO: 27257 - RNA, 19 nt, synthetic construct
  source 1..19: mol_type = other RNA
gtgcaagggcaccgtctcc

SEQ ID NO: 27258 - RNA, 19 nt, synthetic construct
  source 1..19: mol_type = other RNA
tgatcagacaatgcacatc

SEQ ID NO: 27259 - RNA, 19 nt, synthetic construct
  source 1..19: mol_type = other RNA
aaagtccccgccagagggc

SEQ ID NO: 27260 - RNA, 19 nt, synthetic construct
  source 1..19: mol_type = other RNA
aaagtccccgccagagggc

SEQ ID NO: 27261 - RNA, 19 nt, synthetic construct
  source 1..19: mol_type = other RNA
aaagtccccgccagagggc

SEQ ID NO: 27262 - RNA, 19 nt, synthetic construct
  source 1..19: mol_type = other RNA
aaagtccccgccagagggc

SEQ ID NO: 27263 - RNA, 19 nt, synthetic construct
  source 1..19: mol_type = other RNA
cggatgctcggggtcaccc

SEQ ID NO: 27264 - RNA, 19 nt, synthetic construct
  source 1..19: mol_type = other RNA
gacagaacgtagctgcagt

SEQ ID NO: 27265 - RNA, 19 nt, synthetic construct
  source 1..19: mol_type = other RNA
gctccccgtcgtccctgga

SEQ ID NO: 27266 - RNA, 19 nt, synthetic construct
  source 1..19: mol_type = other RNA
gcacgcgctcggggcaccc

SEQ ID NO: 27267 - RNA, 19 nt, synthetic construct
  source 1..19: mol_type = other RNA
ttcctgatgatggtgccgt

SEQ ID NO: 27268 - RNA, 19 nt, synthetic construct
  source 1..19: mol_type = other RNA
aggctgctggcataagtgc

SEQ ID NO: 27269 - RNA, 19 nt, synthetic construct
  source 1..19: mol_type = other RNA
aggtggccgaagtccaggc

SEQ ID NO: 27270 - RNA, 19 nt, synthetic construct
  source 1..19: mol_type = other RNA
cgaggtgcgggtcttgctg

SEQ ID NO: 27271 - RNA, 19 nt, synthetic construct
  source 1..19: mol_type = other RNA
aggtggccgaagtccaggc

SEQ ID NO: 27272 - RNA, 19 nt, synthetic construct
  source 1..19: mol_type = other RNA
tggggtgtgggaagtcccc

SEQ ID NO: 27273 - RNA, 19 nt, synthetic construct
  source 1..19: mol_type = other RNA
ggtgactcggtggtcctgc

SEQ ID NO: 27274 - RNA, 19 nt, synthetic construct
  source 1..19: mol_type = other RNA
cgaggtgcgggtcttgctg

SEQ ID NO: 27275 - RNA, 19 nt, synthetic construct
  source 1..19: mol_type = other RNA
aggtggccgaagtccaggc

SEQ ID NO: 27276 - RNA, 19 nt, synthetic construct
  source 1..19: mol_type = other RNA
ggtgactcggtggtcctgc

SEQ ID NO: 27277 - RNA, 19 nt, synthetic construct
  source 1..19: mol_type = other RNA
gtgcccctggtgtggcccg

SEQ ID NO: 27278 - RNA, 19 nt, synthetic construct
  source 1..19: mol_type = other RNA
ggtgcccctggtgtggccc

SEQ ID NO: 27279 - RNA, 19 nt, synthetic construct
  source 1..19: mol_type = other RNA
cgaggtgcgggtcttgctg

SEQ ID NO: 27280 - RNA, 19 nt, synthetic construct
  source 1..19: mol_type = other RNA
aggtggccgaagtccaggc

SEQ ID NO: 27281 - RNA, 19 nt, synthetic construct
  source 1..19: mol_type = other RNA
tggggtgtgggaagtcccc

SEQ ID NO: 27282 - RNA, 19 nt, synthetic construct
  source 1..19: mol_type = other RNA
ggtgactcggtggtcctgc

SEQ ID NO: 27283 - RNA, 19 nt, synthetic construct
  source 1..19: mol_type = other RNA
cgaggtgcgggtcttgctg

SEQ ID NO: 27284 - RNA, 19 nt, synthetic construct
  source 1..19: mol_type = other RNA
cctggcccaactcccccag

SEQ ID NO: 27285 - RNA, 19 nt, synthetic construct
  source 1..19: mol_type = other RNA
gtttcattcagctggactg

SEQ ID NO: 27286 - RNA, 19 nt, synthetic construct
  source 1..19: mol_type = other RNA
agcaggagcacggagcgcg

SEQ ID NO: 27287 - RNA, 19 nt, synthetic construct
  source 1..19: mol_type = other RNA
gcaggcggccaggtacgca

SEQ ID NO: 27288 - RNA, 19 nt, synthetic construct
  source 1..19: mol_type = other RNA
tgtgggtggtccccgggac

SEQ ID NO: 27289 - RNA, 19 nt, synthetic construct
  source 1..19: mol_type = other RNA
taggactcctgagtggcgc

SEQ ID NO: 27290 - RNA, 19 nt, synthetic construct
  source 1..19: mol_type = other RNA
atttgggatccagctccag

SEQ ID NO: 27291 - RNA, 19 nt, synthetic construct
  source 1..19: mol_type = other RNA
cataggtggagatgtgggc

SEQ ID NO: 27292 - RNA, 19 nt, synthetic construct
  source 1..19: mol_type = other RNA
cgcacttccgcagctcagc

SEQ ID NO: 27293 - RNA, 19 nt, synthetic construct
  source 1..19: mol_type = other RNA
gttctccgctgtggggacc

SEQ ID NO: 27294 - RNA, 19 nt, synthetic construct
  source 1..19: mol_type = other RNA
gggtcaccgtggagcctct

SEQ ID NO: 27295 - RNA, 19 nt, synthetic construct
  source 1..19: mol_type = other RNA
gtgtggtggccatggtgtt

SEQ ID NO: 27296 - RNA, 19 nt, synthetic construct
  source 1..19: mol_type = other RNA
ctgctgtggtctgctctgt

SEQ ID NO: 27297 - RNA, 19 nt, synthetic construct
  source 1..19: mol_type = other RNA
gggtggacatggaactggt

SEQ ID NO: 27298 - RNA, 19 nt, synthetic construct
  source 1..19: mol_type = other RNA
gggtcaccgtggagcctct

SEQ ID NO: 27299 - RNA, 19 nt, synthetic construct
  source 1..19: mol_type = other RNA
tggggctcacagcccgtgg

SEQ ID NO: 27300 - RNA, 19 nt, synthetic construct
  source 1..19: mol_type = other RNA
ggggtggtcgtccctgggg

SEQ ID NO: 27301 - RNA, 19 nt, synthetic construct
  source 1..19: mol_type = other RNA
tggggctcacagcccgtgg

SEQ ID NO: 27302 - RNA, 19 nt, synthetic construct
  source 1..19: mol_type = other RNA
acgtggaactggtggccct

SEQ ID NO: 27303 - RNA, 19 nt, synthetic construct
  source 1..19: mol_type = other RNA
ctagacaccggggctgcgg

SEQ ID NO: 27304 - RNA, 19 nt, synthetic construct
  source 1..19: mol_type = other RNA
ctcgcagccctggtgccac

SEQ ID NO: 27305 - RNA, 19 nt, synthetic construct
  source 1..19: mol_type = other RNA
cccagcggccggacgtggc

SEQ ID NO: 27306 - RNA, 19 nt, synthetic construct
  source 1..19: mol_type = other RNA
gaccagcctgtctgcccca

SEQ ID NO: 27307 - RNA, 19 nt, synthetic construct
  source 1..19: mol_type = other RNA
ggatgctgacccctctctg

SEQ ID NO: 27308 - RNA, 19 nt, synthetic construct
  source 1..19: mol_type = other RNA
gcgaggtgagggccgccgt

SEQ ID NO: 27309 - RNA, 19 nt, synthetic construct
  source 1..19: mol_type = other RNA
tggcacgtcccctgcagtg

SEQ ID NO: 27310 - RNA, 19 nt, synthetic construct
  source 1..19: mol_type = other RNA
aggtgtggacagtctctgg

SEQ ID NO: 27311 - RNA, 19 nt, synthetic construct
  source 1..19: mol_type = other RNA
aggtgtggacagtctctgg

SEQ ID NO: 27312 - RNA, 19 nt, synthetic construct
  source 1..19: mol_type = other RNA
aggtgtggacagtctctgg

SEQ ID NO: 27313 - RNA, 19 nt, synthetic construct
  source 1..19: mol_type = other RNA
ccggttcctgcaggtgcag

SEQ ID NO: 27314 - RNA, 19 nt, synthetic construct
  source 1..19: mol_type = other RNA
gtcacccatagggtggtct

SEQ ID NO: 27315 - RNA, 19 nt, synthetic construct
  source 1..19: mol_type = other RNA
tatgtccttaggctgctgg

SEQ ID NO: 27316 - RNA, 19 nt, synthetic construct
  source 1..19: mol_type = other RNA
ccccggttgtggtggccgt

SEQ ID NO: 27317 - RNA, 19 nt, synthetic construct
  source 1..19: mol_type = other RNA
ccccggttgtggtggccgt

SEQ ID NO: 27318 - RNA, 19 nt, synthetic construct
  source 1..19: mol_type = other RNA
acgctcacgcccagggcag

SEQ ID NO: 27319 - RNA, 19 nt, synthetic construct
  source 1..19: mol_type = other RNA
gcacaaggttgtggcactc

SEQ ID NO: 27320 - RNA, 19 nt, synthetic construct
  source 1..19: mol_type = other RNA
gcctggagcccactaggcc

SEQ ID NO: 27321 - RNA, 19 nt, synthetic construct
  source 1..19: mol_type = other RNA
caagtgggctggcaggcat

SEQ ID NO: 27322 - RNA, 19 nt, synthetic construct
  source 1..19: mol_type = other RNA
cccattgtaccagctggac

SEQ ID NO: 27323 - RNA, 19 nt, synthetic construct
  source 1..19: mol_type = other RNA
cagccagcacagggcatac

SEQ ID NO: 27324 - RNA, 19 nt, synthetic construct
  source 1..19: mol_type = other RNA
tgcacaccaggccgaagtg

SEQ ID NO: 27325 - RNA, 19 nt, synthetic construct
  source 1..19: mol_type = other RNA
acgctggtagctgtgggtg

SEQ ID NO: 27326 - RNA, 19 nt, synthetic construct
  source 1..19: mol_type = other RNA
tcagcactgtggcggtgtg

SEQ ID NO: 27327 - RNA, 19 nt, synthetic construct
  source 1..19: mol_type = other RNA
tggtcagtgatgggggagt

SEQ ID NO: 27328 - RNA, 19 nt, synthetic construct
  source 1..19: mol_type = other RNA
tcgtggccgtggtgctcac

SEQ ID NO: 27329 - RNA, 19 nt, synthetic construct
  source 1..19: mol_type = other RNA
tggtcagtgatgggggagt

SEQ ID NO: 27330 - RNA, 19 nt, synthetic construct
  source 1..19: mol_type = other RNA
tgcttgtcagcactggaag

SEQ ID NO: 27331 - RNA, 19 nt, synthetic construct
  source 1..19: mol_type = other RNA
acgctggtagctgtgggtg

SEQ ID NO: 27332 - RNA, 19 nt, synthetic construct
  source 1..19: mol_type = other RNA
agccggtggccctggttgt

SEQ ID NO: 27333 - RNA, 19 nt, synthetic construct
  source 1..19: mol_type = other RNA
tcagcactgtggcggtgtg

SEQ ID NO: 27334 - RNA, 19 nt, synthetic construct
  source 1..19: mol_type = other RNA
tggtcagtgatgggggagt

SEQ ID NO: 27335 - RNA, 19 nt, synthetic construct
  source 1..19: mol_type = other RNA
tcgtggccgtggtgctcac

SEQ ID NO: 27336 - RNA, 19 nt, synthetic construct
  source 1..19: mol_type = other RNA
agccggtggccctggttgt

SEQ ID NO: 27337 - RNA, 19 nt, synthetic construct
  source 1..19: mol_type = other RNA
gggggtgactgtgaagccc

SEQ ID NO: 27338 - RNA, 19 nt, synthetic construct
  source 1..19: mol_type = other RNA
gtggccgggctggtcagca

SEQ ID NO: 27339 - RNA, 19 nt, synthetic construct
  source 1..19: mol_type = other RNA
tgcttgtcagcactggaag

SEQ ID NO: 27340 - RNA, 19 nt, synthetic construct
  source 1..19: mol_type = other RNA
tcgtggccgtggtgctcac

SEQ ID NO: 27341 - RNA, 19 nt, synthetic construct
  source 1..19: mol_type = other RNA
tggtcagtgatgggggagt

SEQ ID NO: 27342 - RNA, 19 nt, synthetic construct
  source 1..19: mol_type = other RNA
tgcttgtcagcactggaag

SEQ ID NO: 27343 - RNA, 19 nt, synthetic construct
  source 1..19: mol_type = other RNA
tggtagctgtggattttgt

SEQ ID NO: 27344 - RNA, 19 nt, synthetic construct
  source 1..19: mol_type = other RNA
gacagggtggccgtggatc

SEQ ID NO: 27345 - RNA, 19 nt, synthetic construct
  source 1..19: mol_type = other RNA
cggtgggcaccatcacggt

SEQ ID NO: 27346 - RNA, 19 nt, synthetic construct
  source 1..19: mol_type = other RNA
cagtggggggtgtgccagt

SEQ ID NO: 27347 - RNA, 19 nt, synthetic construct
  source 1..19: mol_type = other RNA
gggcacctcaaggcggccc

SEQ ID NO: 27348 - RNA, 19 nt, synthetic construct
  source 1..19: mol_type = other RNA
tccccgggcgcggcagagc

SEQ ID NO: 27349 - RNA, 19 nt, synthetic construct
  source 1..19: mol_type = other RNA
gttgcaggtggcaggctgt

SEQ ID NO: 27350 - RNA, 19 nt, synthetic construct
  source 1..19: mol_type = other RNA
aggtctgcagcggaaggtg

SEQ ID NO: 27351 - RNA, 19 nt, synthetic construct
  source 1..19: mol_type = other RNA
acatctgggcaggatgcag

SEQ ID NO: 27352 - RNA, 19 nt, synthetic construct
  source 1..19: mol_type = other RNA
ggggagccatgggcgcagg

SEQ ID NO: 27353 - RNA, 19 nt, synthetic construct
  source 1..19: mol_type = other RNA
gggggagccatgggcgcag

SEQ ID NO: 27354 - RNA, 19 nt, synthetic construct
  source 1..19: mol_type = other RNA
cgggaagctgcgccgcccg

SEQ ID NO: 27355 - RNA, 19 nt, synthetic construct
  source 1..19: mol_type = other RNA
ggagggagtggctttggag

SEQ ID NO: 27356 - RNA, 19 nt, synthetic construct
  source 1..19: mol_type = other RNA
tggaaagggctggagtcga

SEQ ID NO: 27357 - RNA, 19 nt, synthetic construct
  source 1..19: mol_type = other RNA
ggagggagtggctttggag

SEQ ID NO: 27358 - RNA, 19 nt, synthetic construct
  source 1..19: mol_type = other RNA
cactgcaggggtgcgggtg

SEQ ID NO: 27359 - RNA, 19 nt, synthetic construct
  source 1..19: mol_type = other RNA
gttgctgacccaccgctcc

SEQ ID NO: 27360 - RNA, 19 nt, synthetic construct
  source 1..19: mol_type = other RNA
tccacgtgggtgtaggtgt

SEQ ID NO: 27361 - RNA, 19 nt, synthetic construct
  source 1..19: mol_type = other RNA
gggatggaggcagaacgtt

SEQ ID NO: 27362 - RNA, 19 nt, synthetic construct
  source 1..19: mol_type = other RNA
ttgccggccggcaagggca

SEQ ID NO: 27363 - RNA, 19 nt, synthetic construct
  source 1..19: mol_type = other RNA
aagggggtgactcggtggt

SEQ ID NO: 27364 - RNA, 19 nt, synthetic construct
  source 1..19: mol_type = other RNA
cagtctctggagtagagga

SEQ ID NO: 27365 - RNA, 19 nt, synthetic construct
  source 1..19: mol_type = other RNA
tgggcaccatcacggtggc

SEQ ID NO: 27366 - RNA, 19 nt, synthetic construct
  source 1..19: mol_type = other RNA
gtggtccccagcacagaca

SEQ ID NO: 27367 - RNA, 19 nt, synthetic construct
  source 1..19: mol_type = other RNA
gttgaagaggatctggtcc

SEQ ID NO: 27368 - RNA, 19 nt, synthetic construct
  source 1..19: mol_type = other RNA
cagcactgcccggccactc

SEQ ID NO: 27369 - RNA, 19 nt, synthetic construct
  source 1..19: mol_type = other RNA
gacttgacaggagtcctcc

SEQ ID NO: 27370 - RNA, 19 nt, synthetic construct
  source 1..19: mol_type = other RNA
tgtagtggaagtcacccca

SEQ ID NO: 27371 - RNA, 19 nt, synthetic construct
  source 1..19: mol_type = other RNA
gcctcactcaggccgcggc

SEQ ID NO: 27372 - RNA, 19 nt, synthetic construct
  source 1..19: mol_type = other RNA
gcagtcctcctcggcaatg

SEQ ID NO: 27373 - RNA, 19 nt, synthetic construct
  source 1..19: mol_type = other RNA
ctggtagctgtaggtcctg

SEQ ID NO: 27374 - RNA, 19 nt, synthetic construct
  source 1..19: mol_type = other RNA
tcaagcaggcgccaagccc

SEQ ID NO: 27375 - RNA, 19 nt, synthetic construct
  source 1..19: mol_type = other RNA
catacctggtaccctctct

SEQ ID NO: 27376 - RNA, 19 nt, synthetic construct
  source 1..19: mol_type = other RNA
tctgcgaggtgagggccgc

SEQ ID NO: 27377 - RNA, 19 nt, synthetic construct
  source 1..19: mol_type = other RNA
gccctccagcggccctgat

SEQ ID NO: 27378 - RNA, 19 nt, synthetic construct
  source 1..19: mol_type = other RNA
tgtccttaggctgctggca

SEQ ID NO: 27379 - RNA, 19 nt, synthetic construct
  source 1..19: mol_type = other RNA
tccagctctgtggtcggtg

SEQ ID NO: 27380 - RNA, 19 nt, synthetic construct
  source 1..19: mol_type = other RNA
gaagggctgagcgtgttgg

SEQ ID NO: 27381 - RNA, 19 nt, synthetic construct
  source 1..19: mol_type = other RNA
ggtggctgtgaagcccgtg

SEQ ID NO: 27382 - RNA, 19 nt, synthetic construct
  source 1..19: mol_type = other RNA
cgtggtggtcagtgatggg

SEQ ID NO: 27383 - RNA, 19 nt, synthetic construct
  source 1..19: mol_type = other RNA
ggtggtggtcagcactggg

SEQ ID NO: 27384 - RNA, 19 nt, synthetic construct
  source 1..19: mol_type = other RNA
tgtggtggccatggtgttc

SEQ ID NO: 27385 - RNA, 19 nt, synthetic construct
  source 1..19: mol_type = other RNA
agaccaggccaaagtccag

SEQ ID NO: 27386 - RNA, 19 nt, synthetic construct
  source 1..19: mol_type = other RNA
ggtggctgtgaagcccgtg

SEQ ID NO: 27387 - RNA, 19 nt, synthetic construct
  source 1..19: mol_type = other RNA
cgtggtggtcagtgatggg

SEQ ID NO: 27388 - RNA, 19 nt, synthetic construct
  source 1..19: mol_type = other RNA
ggtggtggtcagcactggg

SEQ ID NO: 27389 - RNA, 19 nt, synthetic construct
  source 1..19: mol_type = other RNA
agaccaggccaaagtccag

SEQ ID NO: 27390 - RNA, 19 nt, synthetic construct
  source 1..19: mol_type = other RNA
ggtggctgtgaagcccgtg

SEQ ID NO: 27391 - RNA, 19 nt, synthetic construct
  source 1..19: mol_type = other RNA
cgtggtggtcagtgatggg

SEQ ID NO: 27392 - RNA, 19 nt, synthetic construct
  source 1..19: mol_type = other RNA
ggtggtggtcagcactggg

SEQ ID NO: 27393 - RNA, 19 nt, synthetic construct
  source 1..19: mol_type = other RNA
agaccaggccaaagtccag

SEQ ID NO: 27394 - RNA, 19 nt, synthetic construct
  source 1..19: mol_type = other RNA
ggtggtggtcagcactggg

SEQ ID NO: 27395 - RNA, 19 nt, synthetic construct
  source 1..19: mol_type = other RNA
ctcccccagggggacacca

SEQ ID NO: 27396 - RNA, 19 nt, synthetic construct
  source 1..19: mol_type = other RNA
caactcccccagggggaca

SEQ ID NO: 27397 - RNA, 19 nt, synthetic construct
  source 1..19: mol_type = other RNA
agaccaggccaaagtccag

SEQ ID NO: 27398 - RNA, 19 nt, synthetic construct
  source 1..19: mol_type = other RNA
ggtggctgtgaagcccgtg

SEQ ID NO: 27399 - RNA, 19 nt, synthetic construct
  source 1..19: mol_type = other RNA
cgtggtggtcagtgatggg

SEQ ID NO: 27400 - RNA, 19 nt, synthetic construct
  source 1..19: mol_type = other RNA
gatgggtgttgtccctgga

SEQ ID NO: 27401 - RNA, 19 nt, synthetic construct
  source 1..19: mol_type = other RNA
cctgccggagagggatggc

SEQ ID NO: 27402 - RNA, 19 nt, synthetic construct
  source 1..19: mol_type = other RNA
ttcacctgccggagaggga

SEQ ID NO: 27403 - RNA, 19 nt, synthetic construct
  source 1..19: mol_type = other RNA
tgacatcagggaggggcaa

SEQ ID NO: 27404 - RNA, 19 nt, synthetic construct
  source 1..19: mol_type = other RNA
gcacccatcctgggggctg

SEQ ID NO: 27405 - RNA, 19 nt, synthetic construct
  source 1..19: mol_type = other RNA
ccacgagcatggccgccag

SEQ ID NO: 27406 - RNA, 19 nt, synthetic construct
  source 1..19: mol_type = other RNA
gtagtggaagtcaccccag

SEQ ID NO: 27407 - RNA, 19 nt, synthetic construct
  source 1..19: mol_type = other RNA
ttgtagtggaagtcacccc

SEQ ID NO: 27408 - RNA, 19 nt, synthetic construct
  source 1..19: mol_type = other RNA
cgtaggcggcgcggcagtg

SEQ ID NO: 27409 - RNA, 19 nt, synthetic construct
  source 1..19: mol_type = other RNA
tcccgctgcccattgatga

SEQ ID NO: 27410 - RNA, 19 nt, synthetic construct
  source 1..19: mol_type = other RNA
tgtagtccccgctctgctc

SEQ ID NO: 27411 - RNA, 19 nt, synthetic construct
  source 1..19: mol_type = other RNA
cacacgggcaggtggggca

SEQ ID NO: 27412 - RNA, 19 nt, synthetic construct
  source 1..19: mol_type = other RNA
ctgcatgttgagggggcag

SEQ ID NO: 27413 - RNA, 19 nt, synthetic construct
  source 1..19: mol_type = other RNA
gctgcatgttgagggggca

SEQ ID NO: 27414 - RNA, 19 nt, synthetic construct
  source 1..19: mol_type = other RNA
agggtgagccacactcctg

SEQ ID NO: 27415 - RNA, 19 nt, synthetic construct
  source 1..19: mol_type = other RNA
cagggtgagccacactcct

SEQ ID NO: 27416 - RNA, 19 nt, synthetic construct
  source 1..19: mol_type = other RNA
ataggtggagatgtgggcc

SEQ ID NO: 27417 - RNA, 19 nt, synthetic construct
  source 1..19: mol_type = other RNA
agccagcacggtgaagctg

SEQ ID NO: 27418 - RNA, 19 nt, synthetic construct
  source 1..19: mol_type = other RNA
caatgcagcccccactccc

SEQ ID NO: 27419 - RNA, 19 nt, synthetic construct
  source 1..19: mol_type = other RNA
ctccggttcctgcaggtgc

SEQ ID NO: 27420 - RNA, 19 nt, synthetic construct
  source 1..19: mol_type = other RNA
ggtccccacccggccctct

SEQ ID NO: 27421 - RNA, 19 nt, synthetic construct
  source 1..19: mol_type = other RNA
caaggggcaggtgtccgga

SEQ ID NO: 27422 - RNA, 19 nt, synthetic construct
  source 1..19: mol_type = other RNA
tagaagtcacagaacaagg

SEQ ID NO: 27423 - RNA, 19 nt, synthetic construct
  source 1..19: mol_type = other RNA
ttctccgctgtggggaccc

SEQ ID NO: 27424 - RNA, 19 nt, synthetic construct
  source 1..19: mol_type = other RNA
ggacccaggcggtggtgaa

SEQ ID NO: 27425 - RNA, 19 nt, synthetic construct
  source 1..19: mol_type = other RNA
gcccattgtaccagctgga

SEQ ID NO: 27426 - RNA, 19 nt, synthetic construct
  source 1..19: mol_type = other RNA
gggaagctgcgccgcccgg

SEQ ID NO: 27427 - RNA, 19 nt, synthetic construct
  source 1..19: mol_type = other RNA
gttgctgtggtctgggttg

SEQ ID NO: 27428 - RNA, 19 nt, synthetic construct
  source 1..19: mol_type = other RNA
gacgccctcctgctcccag

SEQ ID NO: 27429 - RNA, 19 nt, synthetic construct
  source 1..19: mol_type = other RNA
tgaagacgccctcctgctc

SEQ ID NO: 27430 - RNA, 19 nt, synthetic construct
  source 1..19: mol_type = other RNA
ggggcctcccgtggtggct

SEQ ID NO: 27431 - RNA, 19 nt, synthetic construct
  source 1..19: mol_type = other RNA
ggtggatgtggccacccct

SEQ ID NO: 27432 - RNA, 19 nt, synthetic construct
  source 1..19: mol_type = other RNA
gggtggatgtggccacccc

SEQ ID NO: 27433 - RNA, 19 nt, synthetic construct
  source 1..19: mol_type = other RNA
tgtcgggcgagctctggag

SEQ ID NO: 27434 - RNA, 19 nt, synthetic construct
  source 1..19: mol_type = other RNA
ggctcattgtcgtctctgt

SEQ ID NO: 27435 - RNA, 19 nt, synthetic construct
  source 1..19: mol_type = other RNA
ccgtggatccagtggacgc

SEQ ID NO: 27436 - RNA, 19 nt, synthetic construct
  source 1..19: mol_type = other RNA
ttgcagtccctggactgga

SEQ ID NO: 27437 - RNA, 19 nt, synthetic construct
  source 1..19: mol_type = other RNA
tgtggacatggtggccgtg

SEQ ID NO: 27438 - RNA, 19 nt, synthetic construct
  source 1..19: mol_type = other RNA
ggggtcaccgtggagcctc

SEQ ID NO: 27439 - RNA, 19 nt, synthetic construct
  source 1..19: mol_type = other RNA
tggtgcccaagatgcccga

SEQ ID NO: 27440 - RNA, 19 nt, synthetic construct
  source 1..19: mol_type = other RNA
gtcgtccctggagaagggg

SEQ ID NO: 27441 - RNA, 19 nt, synthetic construct
  source 1..19: mol_type = other RNA
ggaggtggccgtggtgtgg

SEQ ID NO: 27442 - RNA, 19 nt, synthetic construct
  source 1..19: mol_type = other RNA
ggttcctgcagaccaggcc

SEQ ID NO: 27443 - RNA, 19 nt, synthetic construct
  source 1..19: mol_type = other RNA
gaacttccccacctgctca

SEQ ID NO: 27444 - RNA, 19 nt, synthetic construct
  source 1..19: mol_type = other RNA
ggtggccgtggatccggtg

SEQ ID NO: 27445 - RNA, 19 nt, synthetic construct
  source 1..19: mol_type = other RNA
ttgcagtccctggactgga

SEQ ID NO: 27446 - RNA, 19 nt, synthetic construct
  source 1..19: mol_type = other RNA
tgtggacatggtggccgtg

SEQ ID NO: 27447 - RNA, 19 nt, synthetic construct
  source 1..19: mol_type = other RNA
gaggtgtggacagtctctg

SEQ ID NO: 27448 - RNA, 19 nt, synthetic construct
  source 1..19: mol_type = other RNA
ggaggtgtggacagtctct

SEQ ID NO: 27449 - RNA, 19 nt, synthetic construct
  source 1..19: mol_type = other RNA
gtgtggtggccgtggtgtt

SEQ ID NO: 27450 - RNA, 19 nt, synthetic construct
  source 1..19: mol_type = other RNA
gtgtgtggtggccgtggtg

SEQ ID NO: 27451 - RNA, 19 nt, synthetic construct
  source 1..19: mol_type = other RNA
cgtgtgtggtggccgtggt

SEQ ID NO: 27452 - RNA, 19 nt, synthetic construct
  source 1..19: mol_type = other RNA
gtcgtccctggagaagggg

SEQ ID NO: 27453 - RNA, 19 nt, synthetic construct
  source 1..19: mol_type = other RNA
ggttcctgcagaccaggcc

SEQ ID NO: 27454 - RNA, 19 nt, synthetic construct
  source 1..19: mol_type = other RNA
gaacttccccacctgctca

SEQ ID NO: 27455 - RNA, 19 nt, synthetic construct
  source 1..19: mol_type = other RNA
tgcagtccttggactggag

SEQ ID NO: 27456 - RNA, 19 nt, synthetic construct
  source 1..19: mol_type = other RNA
aagctggtagctgtggatt

SEQ ID NO: 27457 - RNA, 19 nt, synthetic construct
  source 1..19: mol_type = other RNA
gtgtaaagctggtagctgt

SEQ ID NO: 27458 - RNA, 19 nt, synthetic construct
  source 1..19: mol_type = other RNA
ggtggtctccggagtggag

SEQ ID NO: 27459 - RNA, 19 nt, synthetic construct
  source 1..19: mol_type = other RNA
gggtggtctccggagtgga

SEQ ID NO: 27460 - RNA, 19 nt, synthetic construct
  source 1..19: mol_type = other RNA
cagttgtagtggctgctgt

SEQ ID NO: 27461 - RNA, 19 nt, synthetic construct
  source 1..19: mol_type = other RNA
ggtggccgtggatccggtg

SEQ ID NO: 27462 - RNA, 19 nt, synthetic construct
  source 1..19: mol_type = other RNA
tgatgactgtgggtgtggt

SEQ ID NO: 27463 - RNA, 19 nt, synthetic construct
  source 1..19: mol_type = other RNA
gaggagggagtggctctgg

SEQ ID NO: 27464 - RNA, 19 nt, synthetic construct
  source 1..19: mol_type = other RNA
ttgcagtccctggactgga

SEQ ID NO: 27465 - RNA, 19 nt, synthetic construct
  source 1..19: mol_type = other RNA
tgtggacatggtggccgtg

SEQ ID NO: 27466 - RNA, 19 nt, synthetic construct
  source 1..19: mol_type = other RNA
gaggtgtggacagtctctg

SEQ ID NO: 27467 - RNA, 19 nt, synthetic construct
  source 1..19: mol_type = other RNA
ggaggtgtggacagtctct

SEQ ID NO: 27468 - RNA, 19 nt, synthetic construct
  source 1..19: mol_type = other RNA
ggggtcaccgtggagcctc

SEQ ID NO: 27469 - RNA, 19 nt, synthetic construct
  source 1..19: mol_type = other RNA
gtgtggtggccgtggtgtt

SEQ ID NO: 27470 - RNA, 19 nt, synthetic construct
  source 1..19: mol_type = other RNA
gtgtgtggtggccgtggtg

SEQ ID NO: 27471 - RNA, 19 nt, synthetic construct
  source 1..19: mol_type = other RNA
cgtgtgtggtggccgtggt

SEQ ID NO: 27472 - RNA, 19 nt, synthetic construct
  source 1..19: mol_type = other RNA
tggtgcccaagatgcccga

SEQ ID NO: 27473 - RNA, 19 nt, synthetic construct
  source 1..19: mol_type = other RNA
gtcgtccctggagaagggg

SEQ ID NO: 27474 - RNA, 19 nt, synthetic construct
  source 1..19: mol_type = other RNA
aggtgcccctggtgtggcc

SEQ ID NO: 27475 - RNA, 19 nt, synthetic construct
  source 1..19: mol_type = other RNA
aggggctgctcacagactg

SEQ ID NO: 27476 - RNA, 19 nt, synthetic construct
  source 1..19: mol_type = other RNA
ggttcctgcagaccaggcc

SEQ ID NO: 27477 - RNA, 19 nt, synthetic construct
  source 1..19: mol_type = other RNA
gaacttccccacctgctca

SEQ ID NO: 27478 - RNA, 19 nt, synthetic construct
  source 1..19: mol_type = other RNA
ggtggccgtggatccggtg

SEQ ID NO: 27479 - RNA, 19 nt, synthetic construct
  source 1..19: mol_type = other RNA
ttgcagtccctggactgga

SEQ ID NO: 27480 - RNA, 19 nt, synthetic construct
  source 1..19: mol_type = other RNA
tgtggacatggtggccgtg

SEQ ID NO: 27481 - RNA, 19 nt, synthetic construct
  source 1..19: mol_type = other RNA
gaagagggggtggccacag

SEQ ID NO: 27482 - RNA, 19 nt, synthetic construct
  source 1..19: mol_type = other RNA
gtgtggtggccgtggtgtt

SEQ ID NO: 27483 - RNA, 19 nt, synthetic construct
  source 1..19: mol_type = other RNA
gtgtgtggtggccgtggtg

SEQ ID NO: 27484 - RNA, 19 nt, synthetic construct
  source 1..19: mol_type = other RNA
cgtgtgtggtggccgtggt

SEQ ID NO: 27485 - RNA, 19 nt, synthetic construct
  source 1..19: mol_type = other RNA
ggaggtggccgtggtgtgg

SEQ ID NO: 27486 - RNA, 19 nt, synthetic construct
  source 1..19: mol_type = other RNA
ggttcctgcagaccaggcc

SEQ ID NO: 27487 - RNA, 19 nt, synthetic construct
  source 1..19: mol_type = other RNA
gaacttccccacctgctca

SEQ ID NO: 27488 - RNA, 19 nt, synthetic construct
  source 1..19: mol_type = other RNA
tgcagtccttggactggag

SEQ ID NO: 27489 - RNA, 19 nt, synthetic construct
  source 1..19: mol_type = other RNA
ggccacgggtgtggtggtc

SEQ ID NO: 27490 - RNA, 19 nt, synthetic construct
  source 1..19: mol_type = other RNA
ggtggtctccggagtggag

SEQ ID NO: 27491 - RNA, 19 nt, synthetic construct
  source 1..19: mol_type = other RNA
gggtggtctccggagtgga

SEQ ID NO: 27492 - RNA, 19 nt, synthetic construct
  source 1..19: mol_type = other RNA
cagttgtagtggctgctgt

SEQ ID NO: 27493 - RNA, 19 nt, synthetic construct
  source 1..19: mol_type = other RNA
ccgtggatccagtggacgc

SEQ ID NO: 27494 - RNA, 19 nt, synthetic construct
  source 1..19: mol_type = other RNA
ggtggccgtggatccggtg

SEQ ID NO: 27495 - RNA, 19 nt, synthetic construct
  source 1..19: mol_type = other RNA
ttgcagtccctggactgga

SEQ ID NO: 27496 - RNA, 19 nt, synthetic construct
  source 1..19: mol_type = other RNA
tgtggacatggtggccgtg

SEQ ID NO: 27497 - RNA, 19 nt, synthetic construct
  source 1..19: mol_type = other RNA
gaggtgtggacagtctctg

SEQ ID NO: 27498 - RNA, 19 nt, synthetic construct
  source 1..19: mol_type = other RNA
ggaggtgtggacagtctct

SEQ ID NO: 27499 - RNA, 19 nt, synthetic construct
  source 1..19: mol_type = other RNA
tgcagtccttggactggag

SEQ ID NO: 27500 - RNA, 19 nt, synthetic construct
  source 1..19: mol_type = other RNA
aagctggtagctgtggatt

SEQ ID NO: 27501 - RNA, 19 nt, synthetic construct
  source 1..19: mol_type = other RNA
gtgtaaagctggtagctgt

SEQ ID NO: 27502 - RNA, 19 nt, synthetic construct
  source 1..19: mol_type = other RNA
gacatgggtgtggtggtct

SEQ ID NO: 27503 - RNA, 19 nt, synthetic construct
  source 1..19: mol_type = other RNA
ggtggtctctggagtagag

SEQ ID NO: 27504 - RNA, 19 nt, synthetic construct
  source 1..19: mol_type = other RNA
gaggtgtgggtggtctctg

SEQ ID NO: 27505 - RNA, 19 nt, synthetic construct
  source 1..19: mol_type = other RNA
ggcccttgtcatggtggct

SEQ ID NO: 27506 - RNA, 19 nt, synthetic construct
  source 1..19: mol_type = other RNA
tccgggtcgtccccagagt

SEQ ID NO: 27507 - RNA, 19 nt, synthetic construct
  source 1..19: mol_type = other RNA
ctgttgtggtcagctcagt

SEQ ID NO: 27508 - RNA, 19 nt, synthetic construct
  source 1..19: mol_type = other RNA
agtggccatggtggtcacc

SEQ ID NO: 27509 - RNA, 19 nt, synthetic construct
  source 1..19: mol_type = other RNA
acaggcgccctggaagcgg

SEQ ID NO: 27510 - RNA, 19 nt, synthetic construct
  source 1..19: mol_type = other RNA
ggtgggacaggcgccctgg

SEQ ID NO: 27511 - RNA, 19 nt, synthetic construct
  source 1..19: mol_type = other RNA
ggcgaggacagcggggcgg

SEQ ID NO: 27512 - RNA, 19 nt, synthetic construct
  source 1..19: mol_type = other RNA
gggagccgccccacatgct

SEQ ID NO: 27513 - RNA, 19 nt, synthetic construct
  source 1..19: mol_type = other RNA
gcatggtggtggtccccag

SEQ ID NO: 27514 - RNA, 19 nt, synthetic construct
  source 1..19: mol_type = other RNA
tgacccaccgctccccggg

SEQ ID NO: 27515 - RNA, 19 nt, synthetic construct
  source 1..19: mol_type = other RNA
ggcgggggctgaccctggg

SEQ ID NO: 27516 - RNA, 19 nt, synthetic construct
  source 1..19: mol_type = other RNA
accgtctcggggcagcagg

SEQ ID NO: 27517 - RNA, 19 nt, synthetic construct
  source 1..19: mol_type = other RNA
tggcgggcacacaggcagg

SEQ ID NO: 27518 - RNA, 19 nt, synthetic construct
  source 1..19: mol_type = other RNA
gccctggcgggcacacagg

SEQ ID NO: 27519 - RNA, 19 nt, synthetic construct
  source 1..19: mol_type = other RNA
acttgacaggagtcctcct

SEQ ID NO: 27520 - RNA, 19 nt, synthetic construct
  source 1..19: mol_type = other RNA
cgcagccctggtgccacag

SEQ ID NO: 27521 - RNA, 19 nt, synthetic construct
  source 1..19: mol_type = other RNA
cacgggtgtgtgggggagc

SEQ ID NO: 27522 - RNA, 19 nt, synthetic construct
  source 1..19: mol_type = other RNA
ggggggctccgcagaggag

SEQ ID NO: 27523 - RNA, 19 nt, synthetic construct
  source 1..19: mol_type = other RNA
acccctctctgacctggcc

SEQ ID NO: 27524 - RNA, 19 nt, synthetic construct
  source 1..19: mol_type = other RNA
gatgctgacccctctctga

SEQ ID NO: 27525 - RNA, 19 nt, synthetic construct
  source 1..19: mol_type = other RNA
ggtctctgcctgcggcacc

SEQ ID NO: 27526 - RNA, 19 nt, synthetic construct
  source 1..19: mol_type = other RNA
aggctttgggtccagcagg

SEQ ID NO: 27527 - RNA, 19 nt, synthetic construct
  source 1..19: mol_type = other RNA
taggctgctggcataagtg

SEQ ID NO: 27528 - RNA, 19 nt, synthetic construct
  source 1..19: mol_type = other RNA
agggcgcctgggaaggttg

SEQ ID NO: 27529 - RNA, 19 nt, synthetic construct
  source 1..19: mol_type = other RNA
gtgatgggtgttgtccctg

SEQ ID NO: 27530 - RNA, 19 nt, synthetic construct
  source 1..19: mol_type = other RNA
gcagagctgcgcgcgctgg

SEQ ID NO: 27531 - RNA, 19 nt, synthetic construct
  source 1..19: mol_type = other RNA
gagctgttcccggggtgga

SEQ ID NO: 27532 - RNA, 19 nt, synthetic construct
  source 1..19: mol_type = other RNA
gagctgttcccggggtgga

SEQ ID NO: 27533 - RNA, 19 nt, synthetic construct
  source 1..19: mol_type = other RNA
gccatccatggtgtgccct

SEQ ID NO: 27534 - RNA, 19 nt, synthetic construct
  source 1..19: mol_type = other RNA
ggtgtgcaggatggctgag

SEQ ID NO: 27535 - RNA, 19 nt, synthetic construct
  source 1..19: mol_type = other RNA
catgcagttcgagtggaag

SEQ ID NO: 27536 - RNA, 19 nt, synthetic construct
  source 1..19: mol_type = other RNA
acatgcagttcgagtggaa

SEQ ID NO: 27537 - RNA, 19 nt, synthetic construct
  source 1..19: mol_type = other RNA
aagatgtactcgcagctgc

SEQ ID NO: 27538 - RNA, 19 nt, synthetic construct
  source 1..19: mol_type = other RNA
accgtggttattggggccg

SEQ ID NO: 27539 - RNA, 19 nt, synthetic construct
  source 1..19: mol_type = other RNA
cttcgtggtcagcactgtg

SEQ ID NO: 27540 - RNA, 19 nt, synthetic construct
  source 1..19: mol_type = other RNA
cttcgtggtcagcactgtg

SEQ ID NO: 27541 - RNA, 19 nt, synthetic construct
  source 1..19: mol_type = other RNA
ggcagttgctgacccaccg

SEQ ID NO: 27542 - RNA, 19 nt, synthetic construct
  source 1..19: mol_type = other RNA
gtgcttctcagtgctggaa

SEQ ID NO: 27543 - RNA, 19 nt, synthetic construct
  source 1..19: mol_type = other RNA
gtgcttctcagtgctggaa

SEQ ID NO: 27544 - RNA, 19 nt, synthetic construct
  source 1..19: mol_type = other RNA
gtgcttctcagtgctggaa

SEQ ID NO: 27545 - RNA, 19 nt, synthetic construct
  source 1..19: mol_type = other RNA
gtgcttctcagtgctggaa

SEQ ID NO: 27546 - RNA, 19 nt, synthetic construct
  source 1..19: mol_type = other RNA
gtgcttctcagtgctggaa

SEQ ID NO: 27547 - RNA, 19 nt, synthetic construct
  source 1..19: mol_type = other RNA
catgggggctgcacaccct

SEQ ID NO: 27548 - RNA, 19 nt, synthetic construct
  source 1..19: mol_type = other RNA
ccacccggccctctcgcca

SEQ ID NO: 27549 - RNA, 19 nt, synthetic construct
  source 1..19: mol_type = other RNA
gcacttccgcagctcagcc

SEQ ID NO: 27550 - RNA, 19 nt, synthetic construct
  source 1..19: mol_type = other RNA
ccatgggtgtggtggtctg

SEQ ID NO: 27551 - RNA, 19 nt, synthetic construct
  source 1..19: mol_type = other RNA
acatgggtgtggtggtctg

SEQ ID NO: 27552 - RNA, 19 nt, synthetic construct
  source 1..19: mol_type = other RNA
gtacttggtgcagacgccg

SEQ ID NO: 27553 - RNA, 19 nt, synthetic construct
  source 1..19: mol_type = other RNA
taggtcctgtcctcatagg

SEQ ID NO: 27554 - RNA, 19 nt, synthetic construct
  source 1..19: mol_type = other RNA
gccacaggtctggttggcg

SEQ ID NO: 27555 - RNA, 19 nt, synthetic construct
  source 1..19: mol_type = other RNA
tgcacataggaggacagcg

SEQ ID NO: 27556 - RNA, 19 nt, synthetic construct
  source 1..19: mol_type = other RNA
gatctctctcatgaggaca

SEQ ID NO: 27557 - RNA, 19 nt, synthetic construct
  source 1..19: mol_type = other RNA
acactttgatgggcaggtg

SEQ ID NO: 27558 - RNA, 19 nt, synthetic construct
  source 1..19: mol_type = other RNA
tgttcagacttggggtagt

SEQ ID NO: 27559 - RNA, 19 nt, synthetic construct
  source 1..19: mol_type = other RNA
tgtgtgctgaaacagccca

SEQ ID NO: 27560 - RNA, 19 nt, synthetic construct
  source 1..19: mol_type = other RNA
cagaccctgcccttgtagt

SEQ ID NO: 27561 - RNA, 19 nt, synthetic construct
  source 1..19: mol_type = other RNA
gtcttttcggttgctgtgg

SEQ ID NO: 27562 - RNA, 19 nt, synthetic construct
  source 1..19: mol_type = other RNA
ggccgtggtggtcagcact

SEQ ID NO: 27563 - RNA, 19 nt, synthetic construct
  source 1..19: mol_type = other RNA
agccggtggctgcactccc

SEQ ID NO: 27564 - RNA, 19 nt, synthetic construct
  source 1..19: mol_type = other RNA
ccggttttcctgaggctcc

SEQ ID NO: 27565 - RNA, 19 nt, synthetic construct
  source 1..19: mol_type = other RNA
agcaccgtgcctggggggc

SEQ ID NO: 27566 - RNA, 19 nt, synthetic construct
  source 1..19: mol_type = other RNA
gggagcaggggtcctcaaa

SEQ ID NO: 27567 - RNA, 19 nt, synthetic construct
  source 1..19: mol_type = other RNA
ccgtaggccacgcaggtgc

SEQ ID NO: 27568 - RNA, 19 nt, synthetic construct
  source 1..19: mol_type = other RNA
ccttgtagtcctggtgcag

SEQ ID NO: 27569 - RNA, 19 nt, synthetic construct
  source 1..19: mol_type = other RNA
gggcttgtcgtggagtggg

SEQ ID NO: 27570 - RNA, 19 nt, synthetic construct
  source 1..19: mol_type = other RNA
cgggcttgtcgtggagtgg

SEQ ID NO: 27571 - RNA, 19 nt, synthetic construct
  source 1..19: mol_type = other RNA
ggccgatgtggggctgctg

SEQ ID NO: 27572 - RNA, 19 nt, synthetic construct
  source 1..19: mol_type = other RNA
ggccgatgtggggctgctg

SEQ ID NO: 27573 - RNA, 19 nt, synthetic construct
  source 1..19: mol_type = other RNA
ggccgatgtggggctgctg

SEQ ID NO: 27574 - RNA, 19 nt, synthetic construct
  source 1..19: mol_type = other RNA
ggccgatgtggggctgctg

SEQ ID NO: 27575 - RNA, 19 nt, synthetic construct
  source 1..19: mol_type = other RNA
ggatctctctcatgaggac

SEQ ID NO: 27576 - RNA, 19 nt, synthetic construct
  source 1..19: mol_type = other RNA
tccccagagaggcaggtac

SEQ ID NO: 27577 - RNA, 19 nt, synthetic construct
  source 1..19: mol_type = other RNA
ccgttgggtcctgggtgtc

SEQ ID NO: 27578 - RNA, 19 nt, synthetic construct
  source 1..19: mol_type = other RNA
ccgcaaaggccggccccag

SEQ ID NO: 27579 - RNA, 19 nt, synthetic construct
  source 1..19: mol_type = other RNA
ccgggcttgtcgtggagtg

SEQ ID NO: 27580 - RNA, 19 nt, synthetic construct
  source 1..19: mol_type = other RNA
ccatgggcgcagggacaca

SEQ ID NO: 27581 - RNA, 19 nt, synthetic construct
  source 1..19: mol_type = other RNA
ggtgcaggcctcaaggctg

SEQ ID NO: 27582 - RNA, 19 nt, synthetic construct
  source 1..19: mol_type = other RNA
ctggtcttccggtcccagg

SEQ ID NO: 27583 - RNA, 19 nt, synthetic construct
  source 1..19: mol_type = other RNA
ctggggaagacagtgacgg

SEQ ID NO: 27584 - RNA, 19 nt, synthetic construct
  source 1..19: mol_type = other RNA
cccatccaacttctgcagg

SEQ ID NO: 27585 - RNA, 19 nt, synthetic construct
  source 1..19: mol_type = other RNA
gcaggcagccagagtgcgt

SEQ ID NO: 27586 - RNA, 19 nt, synthetic construct
  source 1..19: mol_type = other RNA
agcctggttctggttgaag

SEQ ID NO: 27587 - RNA, 19 nt, synthetic construct
  source 1..19: mol_type = other RNA
cacacaggcccgcgtcgtg

SEQ ID NO: 27588 - RNA, 19 nt, synthetic construct
  source 1..19: mol_type = other RNA
gtggtgaaggtgaatggcg

SEQ ID NO: 27589 - RNA, 19 nt, synthetic construct
  source 1..19: mol_type = other RNA
agttggggaagctctcggc

SEQ ID NO: 27590 - RNA, 19 nt, synthetic construct
  source 1..19: mol_type = other RNA
ggctctgtgatgtgggtgg

SEQ ID NO: 27591 - RNA, 19 nt, synthetic construct
  source 1..19: mol_type = other RNA
ggctctgtgatgtgggtgg

SEQ ID NO: 27592 - RNA, 19 nt, synthetic construct
  source 1..19: mol_type = other RNA
ggctctgtgatgtgggtgg

SEQ ID NO: 27593 - RNA, 19 nt, synthetic construct
  source 1..19: mol_type = other RNA
ggctctgtgatgtgggtgg

SEQ ID NO: 27594 - RNA, 19 nt, synthetic construct
  source 1..19: mol_type = other RNA
tcggtgttgttgtggaaga

SEQ ID NO: 27595 - RNA, 19 nt, synthetic construct
  source 1..19: mol_type = other RNA
tgaagcacatcttgaactt

SEQ ID NO: 27596 - RNA, 19 nt, synthetic construct
  source 1..19: mol_type = other RNA
tgaagcacatcttgaactt

SEQ ID NO: 27597 - RNA, 19 nt, synthetic construct
  source 1..19: mol_type = other RNA
tgaagcacatcttgaactt

SEQ ID NO: 27598 - RNA, 19 nt, synthetic construct
  source 1..19: mol_type = other RNA
tgaagcacatcttgaactt

SEQ ID NO: 27599 - RNA, 19 nt, synthetic construct
  source 1..19: mol_type = other RNA
tcgtcagcctggttctggt

SEQ ID NO: 27600 - RNA, 19 nt, synthetic construct
  source 1..19: mol_type = other RNA
ggtttttaggcagggtgcc

SEQ ID NO: 27601 - RNA, 19 nt, synthetic construct
  source 1..19: mol_type = other RNA
ctggcactctatgtcctta

SEQ ID NO: 27602 - RNA, 19 nt, synthetic construct
  source 1..19: mol_type = other RNA
ggtccctagggcagaggag

SEQ ID NO: 27603 - RNA, 19 nt, synthetic construct
  source 1..19: mol_type = other RNA
ggggctgctcacagacggc

SEQ ID NO: 27604 - RNA, 19 nt, synthetic construct
  source 1..19: mol_type = other RNA
tccccggagtggaggaggg

SEQ ID NO: 27605 - RNA, 19 nt, synthetic construct
  source 1..19: mol_type = other RNA
ggtccctagggcagaggag

SEQ ID NO: 27606 - RNA, 19 nt, synthetic construct
  source 1..19: mol_type = other RNA
gtggccgtggccgtggtcc

SEQ ID NO: 27607 - RNA, 19 nt, synthetic construct
  source 1..19: mol_type = other RNA
ggggctgctcacagacggc

SEQ ID NO: 27608 - RNA, 19 nt, synthetic construct
  source 1..19: mol_type = other RNA
ggtccctagggcagaggag

SEQ ID NO: 27609 - RNA, 19 nt, synthetic construct
  source 1..19: mol_type = other RNA
ggtccctagggcagaggag

SEQ ID NO: 27610 - RNA, 19 nt, synthetic construct
  source 1..19: mol_type = other RNA
gtggccgtggccgtggtcc

SEQ ID NO: 27611 - RNA, 19 nt, synthetic construct
  source 1..19: mol_type = other RNA
ggggctgctcacagacggc

SEQ ID NO: 27612 - RNA, 19 nt, synthetic construct
  source 1..19: mol_type = other RNA
tccccggagtggaggaggg

SEQ ID NO: 27613 - RNA, 19 nt, synthetic construct
  source 1..19: mol_type = other RNA
actttgatgggcaggtgct

SEQ ID NO: 27614 - RNA, 19 nt, synthetic construct
  source 1..19: mol_type = other RNA
cggttttcctgaggctccc

SEQ ID NO: 27615 - RNA, 19 nt, synthetic construct
  source 1..19: mol_type = other RNA
cttgtagtcctggtgcagt

SEQ ID NO: 27616 - RNA, 19 nt, synthetic construct
  source 1..19: mol_type = other RNA
ggcaagggcagcgggtccg

SEQ ID NO: 27617 - RNA, 19 nt, synthetic construct
  source 1..19: mol_type = other RNA
tgggacagtgggttctgtg

SEQ ID NO: 27618 - RNA, 19 nt, synthetic construct
  source 1..19: mol_type = other RNA
gcttgtcgtggagtggggg

SEQ ID NO: 27619 - RNA, 19 nt, synthetic construct
  source 1..19: mol_type = other RNA
cggcagacctcgcggacac

SEQ ID NO: 27620 - RNA, 19 nt, synthetic construct
  source 1..19: mol_type = other RNA
caggtggtggtacctgggg

SEQ ID NO: 27621 - RNA, 19 nt, synthetic construct
  source 1..19: mol_type = other RNA
cacatttcttggacagaac

SEQ ID NO: 27622 - RNA, 19 nt, synthetic construct
  source 1..19: mol_type = other RNA
agccacactgggccacgca

SEQ ID NO: 27623 - RNA, 19 nt, synthetic construct
  source 1..19: mol_type = other RNA
ctcatcaaaccactctgtc

SEQ ID NO: 27624 - RNA, 19 nt, synthetic construct
  source 1..19: mol_type = other RNA
cctcatcaaaccactctgt

SEQ ID NO: 27625 - RNA, 19 nt, synthetic construct
  source 1..19: mol_type = other RNA
ctggctcagcatcagatca

SEQ ID NO: 27626 - RNA, 19 nt, synthetic construct
  source 1..19: mol_type = other RNA
ctcaggctggggaagacag

SEQ ID NO: 27627 - RNA, 19 nt, synthetic construct
  source 1..19: mol_type = other RNA
gcccactggggttccggca

SEQ ID NO: 27628 - RNA, 19 nt, synthetic construct
  source 1..19: mol_type = other RNA
ttgcagcagaacacacgga

SEQ ID NO: 27629 - RNA, 19 nt, synthetic construct
  source 1..19: mol_type = other RNA
ttgcagcagaacacacgga

SEQ ID NO: 27630 - RNA, 19 nt, synthetic construct
  source 1..19: mol_type = other RNA
ttgcagcagaacacacgga

SEQ ID NO: 27631 - RNA, 19 nt, synthetic construct
  source 1..19: mol_type = other RNA
ttgcagcagaacacacgga

SEQ ID NO: 27632 - RNA, 19 nt, synthetic construct
  source 1..19: mol_type = other RNA
ctgccgacaggggcagctg

SEQ ID NO: 27633 - RNA, 19 nt, synthetic construct
  source 1..19: mol_type = other RNA
gctgccgacaggggcagct

SEQ ID NO: 27634 - RNA, 19 nt, synthetic construct
  source 1..19: mol_type = other RNA
gggtggtccctagggcaga

SEQ ID NO: 27635 - RNA, 19 nt, synthetic construct
  source 1..19: mol_type = other RNA
gggtggtccctagggcaga

SEQ ID NO: 27636 - RNA, 19 nt, synthetic construct
  source 1..19: mol_type = other RNA
gggtggtccctagggcaga

SEQ ID NO: 27637 - RNA, 19 nt, synthetic construct
  source 1..19: mol_type = other RNA
gggtggtccctagggcaga

SEQ ID NO: 27638 - RNA, 19 nt, synthetic construct
  source 1..19: mol_type = other RNA
ccaggcttgtaggtggcct

SEQ ID NO: 27639 - RNA, 19 nt, synthetic construct
  source 1..19: mol_type = other RNA
catcaaaggtgatgaagtg

SEQ ID NO: 27640 - RNA, 19 nt, synthetic construct
  source 1..19: mol_type = other RNA
tccggtcccaggacacggc

SEQ ID NO: 27641 - RNA, 19 nt, synthetic construct
  source 1..19: mol_type = other RNA
ttcatctggtcctcattga

SEQ ID NO: 27642 - RNA, 19 nt, synthetic construct
  source 1..19: mol_type = other RNA
gtgcaggtgcaggcctcaa

SEQ ID NO: 27643 - RNA, 19 nt, synthetic construct
  source 1..19: mol_type = other RNA
tgggtggtccctagggcag

SEQ ID NO: 27644 - RNA, 19 nt, synthetic construct
  source 1..19: mol_type = other RNA
tgggtggtccctagggcag

SEQ ID NO: 27645 - RNA, 19 nt, synthetic construct
  source 1..19: mol_type = other RNA
tgggtggtccctagggcag

SEQ ID NO: 27646 - RNA, 19 nt, synthetic construct
  source 1..19: mol_type = other RNA
tgggtggtccctagggcag

SEQ ID NO: 27647 - RNA, 19 nt, synthetic construct
  source 1..19: mol_type = other RNA
gtggtgaggactgaggagg

SEQ ID NO: 27648 - RNA, 19 nt, synthetic construct
  source 1..19: mol_type = other RNA
agcagggagtagagaagtg

SEQ ID NO: 27649 - RNA, 19 nt, synthetic construct
  source 1..19: mol_type = other RNA
cagtcactgcacactcccc

SEQ ID NO: 27650 - RNA, 19 nt, synthetic construct
  source 1..19: mol_type = other RNA
tgggccttccaggtgttgg

SEQ ID NO: 27651 - RNA, 19 nt, synthetic construct
  source 1..19: mol_type = other RNA
gtaggcagccacagccgtg

SEQ ID NO: 27652 - RNA, 19 nt, synthetic construct
  source 1..19: mol_type = other RNA
ggtgttgtagatgacgtcc

SEQ ID NO: 27653 - RNA, 19 nt, synthetic construct
  source 1..19: mol_type = other RNA
gcactctatgtccttaggc

SEQ ID NO: 27654 - RNA, 19 nt, synthetic construct
  source 1..19: mol_type = other RNA
tctcttgtactcaaagccc

SEQ ID NO: 27655 - RNA, 19 nt, synthetic construct
  source 1..19: mol_type = other RNA
aagggcaccgtctcctcgt

SEQ ID NO: 27656 - RNA, 19 nt, synthetic construct
  source 1..19: mol_type = other RNA
gagccatgggcgcagggac

SEQ ID NO: 27657 - RNA, 19 nt, synthetic construct
  source 1..19: mol_type = other RNA
tctctctcatgaggacata

SEQ ID NO: 27658 - RNA, 19 nt, synthetic construct
  source 1..19: mol_type = other RNA
gtagctctccacgaagagc

SEQ ID NO: 27659 - RNA, 19 nt, synthetic construct
  source 1..19: mol_type = other RNA
ggagttccaggacatgcca

SEQ ID NO: 27660 - RNA, 19 nt, synthetic construct
  source 1..19: mol_type = other RNA
cagacttggggtagtcctc

SEQ ID NO: 27661 - RNA, 19 nt, synthetic construct
  source 1..19: mol_type = other RNA
gcccttgtagtcctggtgc

SEQ ID NO: 27662 - RNA, 19 nt, synthetic construct
  source 1..19: mol_type = other RNA
ctggtcctcattgaagaag

SEQ ID NO: 27663 - RNA, 19 nt, synthetic construct
  source 1..19: mol_type = other RNA
ccgtgctggcactgaggga

SEQ ID NO: 27664 - RNA, 19 nt, synthetic construct
  source 1..19: mol_type = other RNA
gaatttggtcaaacaggat

SEQ ID NO: 27665 - RNA, 19 nt, synthetic construct
  source 1..19: mol_type = other RNA
acataggaggacagcgcgg

SEQ ID NO: 27666 - RNA, 19 nt, synthetic construct
  source 1..19: mol_type = other RNA
ggtggtgccggtggtccca

SEQ ID NO: 27667 - RNA, 19 nt, synthetic construct
  source 1..19: mol_type = other RNA
aagagcttgatggccttgg

SEQ ID NO: 27668 - RNA, 19 nt, synthetic construct
  source 1..19: mol_type = other RNA
cgtggcaaagtcattgatg

SEQ ID NO: 27669 - RNA, 19 nt, synthetic construct
  source 1..19: mol_type = other RNA
agtcaacctgggagcggca

SEQ ID NO: 27670 - RNA, 19 nt, synthetic construct
  source 1..19: mol_type = other RNA
gggtgccccgcagggctgg

SEQ ID NO: 27671 - RNA, 19 nt, synthetic construct
  source 1..19: mol_type = other RNA
ccagttcctgcacaccagg

SEQ ID NO: 27672 - RNA, 19 nt, synthetic construct
  source 1..19: mol_type = other RNA
aagtccaggctgcattcca

SEQ ID NO: 27673 - RNA, 19 nt, synthetic construct
  source 1..19: mol_type = other RNA
aagtccaggctgcattcca

SEQ ID NO: 27674 - RNA, 19 nt, synthetic construct
  source 1..19: mol_type = other RNA
aagtccaggctgcattcca

SEQ ID NO: 27675 - RNA, 19 nt, synthetic construct
  source 1..19: mol_type = other RNA
aagtccaggctgcattcca

SEQ ID NO: 27676 - RNA, 19 nt, synthetic construct
  source 1..19: mol_type = other RNA
aactgtccaaatgccctgc

SEQ ID NO: 27677 - RNA, 19 nt, synthetic construct
  source 1..19: mol_type = other RNA
gccaccgtgcagttctcca

SEQ ID NO: 27678 - RNA, 19 nt, synthetic construct
  source 1..19: mol_type = other RNA
tgggcaggtgcttgttcac

SEQ ID NO: 27679 - RNA, 19 nt, synthetic construct
  source 1..19: mol_type = other RNA
atgggcaggtgcttgttca

SEQ ID NO: 27680 - RNA, 19 nt, synthetic construct
  source 1..19: mol_type = other RNA
agaggtgccgtcaaaggtg

SEQ ID NO: 27681 - RNA, 19 nt, synthetic construct
  source 1..19: mol_type = other RNA
cccgcagggggacaccagg

SEQ ID NO: 27682 - RNA, 19 nt, synthetic construct
  source 1..19: mol_type = other RNA
cccgcagggggacaccagg

SEQ ID NO: 27683 - RNA, 19 nt, synthetic construct
  source 1..19: mol_type = other RNA
cccgcagggggacaccagg

SEQ ID NO: 27684 - RNA, 19 nt, synthetic construct
  source 1..19: mol_type = other RNA
catccaacttctgcaggtt

SEQ ID NO: 27685 - RNA, 19 nt, synthetic construct
  source 1..19: mol_type = other RNA
ggtcctcaaagctgttcct

SEQ ID NO: 27686 - RNA, 19 nt, synthetic construct
  source 1..19: mol_type = other RNA
ccaagttgttcagacttgg

SEQ ID NO: 27687 - RNA, 19 nt, synthetic construct
  source 1..19: mol_type = other RNA
tgggggttggagcaggtgt

SEQ ID NO: 27688 - RNA, 19 nt, synthetic construct
  source 1..19: mol_type = other RNA
atccaacttctgcaggttc

SEQ ID NO: 27689 - RNA, 19 nt, synthetic construct
  source 1..19: mol_type = other RNA
aacagggtgatgttggctg

SEQ ID NO: 27690 - RNA, 19 nt, synthetic construct
  source 1..19: mol_type = other RNA
ccaggtgttggcgaaggct

SEQ ID NO: 27691 - RNA, 19 nt, synthetic construct
  source 1..19: mol_type = other RNA
ggtccaggtctcattcacc

SEQ ID NO: 27692 - RNA, 19 nt, synthetic construct
  source 1..19: mol_type = other RNA
gcgtgcacataggaggaca

SEQ ID NO: 27693 - RNA, 19 nt, synthetic construct
  source 1..19: mol_type = other RNA
ggcttgtcgtggagtgggg

SEQ ID NO: 27694 - RNA, 19 nt, synthetic construct
  source 1..19: mol_type = other RNA
gccgggcttgtcgtggagt

SEQ ID NO: 27695 - RNA, 19 nt, synthetic construct
  source 1..19: mol_type = other RNA
ggtcacagtccacctgctg

SEQ ID NO: 27696 - RNA, 19 nt, synthetic construct
  source 1..19: mol_type = other RNA
tcccgcagggggacaccag

SEQ ID NO: 27697 - RNA, 19 nt, synthetic construct
  source 1..19: mol_type = other RNA
tcccgcagggggacaccag

SEQ ID NO: 27698 - RNA, 19 nt, synthetic construct
  source 1..19: mol_type = other RNA
tcccgcagggggacaccag

SEQ ID NO: 27699 - RNA, 19 nt, synthetic construct
  source 1..19: mol_type = other RNA
ggtgaggactgaggaggac

SEQ ID NO: 27700 - RNA, 19 nt, synthetic construct
  source 1..19: mol_type = other RNA
cggggtccagcctgacaaa

SEQ ID NO: 27701 - RNA, 19 nt, synthetic construct
  source 1..19: mol_type = other RNA
ggcgtgcacataggaggac

SEQ ID NO: 27702 - RNA, 19 nt, synthetic construct
  source 1..19: mol_type = other RNA
cggtcccaggacacggcca

SEQ ID NO: 27703 - RNA, 19 nt, synthetic construct
  source 1..19: mol_type = other RNA
cgtgcagttctccagggtc

SEQ ID NO: 27704 - RNA, 19 nt, synthetic construct
  source 1..19: mol_type = other RNA
caaagacctggctcagcat

SEQ ID NO: 27705 - RNA, 19 nt, synthetic construct
  source 1..19: mol_type = other RNA
gtggccgtggtggtcagca

SEQ ID NO: 27706 - RNA, 19 nt, synthetic construct
  source 1..19: mol_type = other RNA
gccagggcacggcaggtcc

SEQ ID NO: 27707 - RNA, 19 nt, synthetic construct
  source 1..19: mol_type = other RNA
gagtggaagggcttggggt

SEQ ID NO: 27708 - RNA, 19 nt, synthetic construct
  source 1..19: mol_type = other RNA
gctagaggagggtgttgcc

SEQ ID NO: 27709 - RNA, 19 nt, synthetic construct
  source 1..19: mol_type = other RNA
gctagaggagggtgttgcc

SEQ ID NO: 27710 - RNA, 19 nt, synthetic construct
  source 1..19: mol_type = other RNA
gctagaggagggtgttgcc

SEQ ID NO: 27711 - RNA, 19 nt, synthetic construct
  source 1..19: mol_type = other RNA
gctagaggagggtgttgcc

SEQ ID NO: 27712 - RNA, 19 nt, synthetic construct
  source 1..19: mol_type = other RNA
gctagaggagggtgttgcc

SEQ ID NO: 27713 - RNA, 19 nt, synthetic construct
  source 1..19: mol_type = other RNA
tcacacacgcaggactggc

SEQ ID NO: 27714 - RNA, 19 nt, synthetic construct
  source 1..19: mol_type = other RNA
ctccagcagggcactgtcc

SEQ ID NO: 27715 - RNA, 19 nt, synthetic construct
  source 1..19: mol_type = other RNA
ggcacggcaggtcctggca

SEQ ID NO: 27716 - RNA, 19 nt, synthetic construct
  source 1..19: mol_type = other RNA
acacaggccgcacatctgg

SEQ ID NO: 27717 - RNA, 19 nt, synthetic construct
  source 1..19: mol_type = other RNA
gggcgggcacacaggcgcc

SEQ ID NO: 27718 - RNA, 19 nt, synthetic construct
  source 1..19: mol_type = other RNA
tccccacagtagtcctggg

SEQ ID NO: 27719 - RNA, 19 nt, synthetic construct
  source 1..19: mol_type = other RNA
caggggatgttctcggtga

SEQ ID NO: 27720 - RNA, 19 nt, synthetic construct
  source 1..19: mol_type = other RNA
gccaggcaggtccaccagg

SEQ ID NO: 27721 - RNA, 19 nt, synthetic construct
  source 1..19: mol_type = other RNA
tgtgagcgcactggatgcc

SEQ ID NO: 27722 - RNA, 19 nt, synthetic construct
  source 1..19: mol_type = other RNA
cctccaagttgttcagact

SEQ ID NO: 27723 - RNA, 19 nt, synthetic construct
  source 1..19: mol_type = other RNA
tcttgaacttccccacctg

SEQ ID NO: 27724 - RNA, 19 nt, synthetic construct
  source 1..19: mol_type = other RNA
atggctgtaaagctggtag

SEQ ID NO: 27725 - RNA, 19 nt, synthetic construct
  source 1..19: mol_type = other RNA
tcttgaacttccccacctg

SEQ ID NO: 27726 - RNA, 19 nt, synthetic construct
  source 1..19: mol_type = other RNA
tcttgaacttccccacctg

SEQ ID NO: 27727 - RNA, 19 nt, synthetic construct
  source 1..19: mol_type = other RNA
atggctgtaaagctggtag

SEQ ID NO: 27728 - RNA, 19 nt, synthetic construct
  source 1..19: mol_type = other RNA
tcttgaacttccccacctg

SEQ ID NO: 27729 - RNA, 19 nt, synthetic construct
  source 1..19: mol_type = other RNA
atggctgtaaagctggtag

SEQ ID NO: 27730 - RNA, 19 nt, synthetic construct
  source 1..19: mol_type = other RNA
tccaacttctgcaggttcc

SEQ ID NO: 27731 - RNA, 19 nt, synthetic construct
  source 1..19: mol_type = other RNA
gcaggtggggcagcggcac

SEQ ID NO: 27732 - RNA, 19 nt, synthetic construct
  source 1..19: mol_type = other RNA
gggcaggcagccagagtgc

SEQ ID NO: 27733 - RNA, 19 nt, synthetic construct
  source 1..19: mol_type = other RNA
gcaggggcactgcccgagg

SEQ ID NO: 27734 - RNA, 19 nt, synthetic construct
  source 1..19: mol_type = other RNA
cccgccgtccaggctgagc

SEQ ID NO: 27735 - RNA, 19 nt, synthetic construct
  source 1..19: mol_type = other RNA
gttctggttgaagttccca

SEQ ID NO: 27736 - RNA, 19 nt, synthetic construct
  source 1..19: mol_type = other RNA
ggttctggttgaagttccc

SEQ ID NO: 27737 - RNA, 19 nt, synthetic construct
  source 1..19: mol_type = other RNA
caggggtcctcaaagctgt

SEQ ID NO: 27738 - RNA, 19 nt, synthetic construct
  source 1..19: mol_type = other RNA
cagttctgcatgtacttgg

SEQ ID NO: 27739 - RNA, 19 nt, synthetic construct
  source 1..19: mol_type = other RNA
acagcccacgtccagcgtg

SEQ ID NO: 27740 - RNA, 19 nt, synthetic construct
  source 1..19: mol_type = other RNA
ggcagagccggtggctgca

SEQ ID NO: 27741 - RNA, 19 nt, synthetic construct
  source 1..19: mol_type = other RNA
atcaaaggtgatgaagtgg

SEQ ID NO: 27742 - RNA, 19 nt, synthetic construct
  source 1..19: mol_type = other RNA
gagcttgatggccttggag

SEQ ID NO: 27743 - RNA, 19 nt, synthetic construct
  source 1..19: mol_type = other RNA
caggcagtgcccactgggg

SEQ ID NO: 27744 - RNA, 19 nt, synthetic construct
  source 1..19: mol_type = other RNA
acttcatctggtcctcatt

SEQ ID NO: 27745 - RNA, 19 nt, synthetic construct
  source 1..19: mol_type = other RNA
gcagccacactgggccacg

SEQ ID NO: 27746 - RNA, 19 nt, synthetic construct
  source 1..19: mol_type = other RNA
aggcctcaaggctgtgagc

SEQ ID NO: 27747 - RNA, 19 nt, synthetic construct
  source 1..19: mol_type = other RNA
tctctgcctcaggttttca

SEQ ID NO: 27748 - RNA, 19 nt, synthetic construct
  source 1..19: mol_type = other RNA
ctctctgcctcaggttttc

SEQ ID NO: 27749 - RNA, 19 nt, synthetic construct
  source 1..19: mol_type = other RNA
gtgctggcactgagggagg

SEQ ID NO: 27750 - RNA, 19 nt, synthetic construct
  source 1..19: mol_type = other RNA
agcaggctccgtgctggca

SEQ ID NO: 27751 - RNA, 19 nt, synthetic construct
  source 1..19: mol_type = other RNA
ccactctgtccactcacac

SEQ ID NO: 27752 - RNA, 19 nt, synthetic construct
  source 1..19: mol_type = other RNA
agtccaggctgcattccac

SEQ ID NO: 27753 - RNA, 19 nt, synthetic construct
  source 1..19: mol_type = other RNA
tgtggccgtggccgtggtc

SEQ ID NO: 27754 - RNA, 19 nt, synthetic construct
  source 1..19: mol_type = other RNA
agtccaggctgcattccac

SEQ ID NO: 27755 - RNA, 19 nt, synthetic construct
  source 1..19: mol_type = other RNA
agtccaggctgcattccac

SEQ ID NO: 27756 - RNA, 19 nt, synthetic construct
  source 1..19: mol_type = other RNA
tgtggccgtggccgtggtc

SEQ ID NO: 27757 - RNA, 19 nt, synthetic construct
  source 1..19: mol_type = other RNA
agtccaggctgcattccac

SEQ ID NO: 27758 - RNA, 19 nt, synthetic construct
  source 1..19: mol_type = other RNA
gttgttggtgcaggtgccg

SEQ ID NO: 27759 - RNA, 19 nt, synthetic construct
  source 1..19: mol_type = other RNA
tgctgcatggcctgggcct

SEQ ID NO: 27760 - RNA, 19 nt, synthetic construct
  source 1..19: mol_type = other RNA
ggagccatgggcgcaggga

SEQ ID NO: 27761 - RNA, 19 nt, synthetic construct
  source 1..19: mol_type = other RNA
gcaggcctcgtagtacttg

SEQ ID NO: 27762 - RNA, 19 nt, synthetic construct
  source 1..19: mol_type = other RNA
cagcggcacaggtcctggg

SEQ ID NO: 27763 - RNA, 19 nt, synthetic construct
  source 1..19: mol_type = other RNA
tgccagggcacggcaggtc

SEQ ID NO: 27764 - RNA, 19 nt, synthetic construct
  source 1..19: mol_type = other RNA
tccaggtgttggcgaaggc

SEQ ID NO: 27765 - RNA, 19 nt, synthetic construct
  source 1..19: mol_type = other RNA
aggggtcctcaaagctgtt

SEQ ID NO: 27766 - RNA, 19 nt, synthetic construct
  source 1..19: mol_type = other RNA
caggcctcgtagtacttgg

SEQ ID NO: 27767 - RNA, 19 nt, synthetic construct
  source 1..19: mol_type = other RNA
agctggaccagcggcagac

SEQ ID NO: 27768 - RNA, 19 nt, synthetic construct
  source 1..19: mol_type = other RNA
cccagttcctgcacaccag

SEQ ID NO: 27769 - RNA, 19 nt, synthetic construct
  source 1..19: mol_type = other RNA
ggtccagcctgacaaacac

SEQ ID NO: 27770 - RNA, 19 nt, synthetic construct
  source 1..19: mol_type = other RNA
tgggacttggggcagttct

SEQ ID NO: 27771 - RNA, 19 nt, synthetic construct
  source 1..19: mol_type = other RNA
ctgggacttggggcagttc

SEQ ID NO: 27772 - RNA, 19 nt, synthetic construct
  source 1..19: mol_type = other RNA
tagctctccacgaagagct

SEQ ID NO: 27773 - RNA, 19 nt, synthetic construct
  source 1..19: mol_type = other RNA
tcccctccaagttgttcag

SEQ ID NO: 27774 - RNA, 19 nt, synthetic construct
  source 1..19: mol_type = other RNA
ctctggttgttggtgcagg

SEQ ID NO: 27775 - RNA, 19 nt, synthetic construct
  source 1..19: mol_type = other RNA
aggttcccaaactggagcg

SEQ ID NO: 27776 - RNA, 19 nt, synthetic construct
  source 1..19: mol_type = other RNA
agggcagcgggtccgggca

SEQ ID NO: 27777 - RNA, 19 nt, synthetic construct
  source 1..19: mol_type = other RNA
actccgcaaaggccggccc

SEQ ID NO: 27778 - RNA, 19 nt, synthetic construct
  source 1..19: mol_type = other RNA
tccagcaccgtgcctgggg

SEQ ID NO: 27779 - RNA, 19 nt, synthetic construct
  source 1..19: mol_type = other RNA
gggcacggcaggtcctggc

SEQ ID NO: 27780 - RNA, 19 nt, synthetic construct
  source 1..19: mol_type = other RNA
cagggtgatgttggctgcc

SEQ ID NO: 27781 - RNA, 19 nt, synthetic construct
  source 1..19: mol_type = other RNA
agcctgacaaacacctgca

SEQ ID NO: 27782 - RNA, 19 nt, synthetic construct
  source 1..19: mol_type = other RNA
tggtgggcggggtccagcc

SEQ ID NO: 27783 - RNA, 19 nt, synthetic construct
  source 1..19: mol_type = other RNA
tgagggagcaggggtcctc

SEQ ID NO: 27784 - RNA, 19 nt, synthetic construct
  source 1..19: mol_type = other RNA
gggcgtagttctcattctc

SEQ ID NO: 27785 - RNA, 19 nt, synthetic construct
  source 1..19: mol_type = other RNA
ggggcagttctgcatgtac

SEQ ID NO: 27786 - RNA, 19 nt, synthetic construct
  source 1..19: mol_type = other RNA
tggggcagttctgcatgta

SEQ ID NO: 27787 - RNA, 19 nt, synthetic construct
  source 1..19: mol_type = other RNA
ccagccccgggggacagac

SEQ ID NO: 27788 - RNA, 19 nt, synthetic construct
  source 1..19: mol_type = other RNA
ccatcaaaggtgatgaagt

SEQ ID NO: 27789 - RNA, 19 nt, synthetic construct
  source 1..19: mol_type = other RNA
cccacaggggatgttctcg

SEQ ID NO: 27790 - RNA, 19 nt, synthetic construct
  source 1..19: mol_type = other RNA
agctctccacgaagagctt

SEQ ID NO: 27791 - RNA, 19 nt, synthetic construct
  source 1..19: mol_type = other RNA
tcagctcgtagctctccac

SEQ ID NO: 27792 - RNA, 19 nt, synthetic construct
  source 1..19: mol_type = other RNA
cccttgtagtcctggtgca

SEQ ID NO: 27793 - RNA, 19 nt, synthetic construct
  source 1..19: mol_type = other RNA
gcgtggcaaagtcattgat

SEQ ID NO: 27794 - RNA, 19 nt, synthetic construct
  source 1..19: mol_type = other RNA
tgcaggtgcaggcctcaag

SEQ ID NO: 27795 - RNA, 19 nt, synthetic construct
  source 1..19: mol_type = other RNA
tcataggtgcaggtgcagg

SEQ ID NO: 27796 - RNA, 19 nt, synthetic construct
  source 1..19: mol_type = other RNA
tcctcataggtgcaggtgc

SEQ ID NO: 27797 - RNA, 19 nt, synthetic construct
  source 1..19: mol_type = other RNA
tggggactgctgtggtgct

SEQ ID NO: 27798 - RNA, 19 nt, synthetic construct
  source 1..19: mol_type = other RNA
cagtgggttctgtggagcc

SEQ ID NO: 27799 - RNA, 19 nt, synthetic construct
  source 1..19: mol_type = other RNA
accactctgtccactcaca

SEQ ID NO: 27800 - RNA, 19 nt, synthetic construct
  source 1..19: mol_type = other RNA
tggtagctgtgggtgtggt

SEQ ID NO: 27801 - RNA, 19 nt, synthetic construct
  source 1..19: mol_type = other RNA
ctggtagctgtgggtgtgg

SEQ ID NO: 27802 - RNA, 19 nt, synthetic construct
  source 1..19: mol_type = other RNA
tctgaccaggcacactggg

SEQ ID NO: 27803 - RNA, 19 nt, synthetic construct
  source 1..19: mol_type = other RNA
atcttgaacttccccacct

SEQ ID NO: 27804 - RNA, 19 nt, synthetic construct
  source 1..19: mol_type = other RNA
tggtagctgtgggtgtggt

SEQ ID NO: 27805 - RNA, 19 nt, synthetic construct
  source 1..19: mol_type = other RNA
ctggtagctgtgggtgtgg

SEQ ID NO: 27806 - RNA, 19 nt, synthetic construct
  source 1..19: mol_type = other RNA
tctgaccaggcacactggg

SEQ ID NO: 27807 - RNA, 19 nt, synthetic construct
  source 1..19: mol_type = other RNA
atcttgaacttccccacct

SEQ ID NO: 27808 - RNA, 19 nt, synthetic construct
  source 1..19: mol_type = other RNA
tggtagctgtgggtgtggt

SEQ ID NO: 27809 - RNA, 19 nt, synthetic construct
  source 1..19: mol_type = other RNA
ctggtagctgtgggtgtgg

SEQ ID NO: 27810 - RNA, 19 nt, synthetic construct
  source 1..19: mol_type = other RNA
tctgaccaggcacactggg

SEQ ID NO: 27811 - RNA, 19 nt, synthetic construct
  source 1..19: mol_type = other RNA
atcttgaacttccccacct

SEQ ID NO: 27812 - RNA, 19 nt, synthetic construct
  source 1..19: mol_type = other RNA
tggtagctgtgggtgtggt

SEQ ID NO: 27813 - RNA, 19 nt, synthetic construct
  source 1..19: mol_type = other RNA
ctggtagctgtgggtgtgg

SEQ ID NO: 27814 - RNA, 19 nt, synthetic construct
  source 1..19: mol_type = other RNA
tctgaccaggcacactggg

SEQ ID NO: 27815 - RNA, 19 nt, synthetic construct
  source 1..19: mol_type = other RNA
atcttgaacttccccacct

SEQ ID NO: 27816 - RNA, 19 nt, synthetic construct
  source 1..19: mol_type = other RNA
tggtagctgtgggtgtggt

SEQ ID NO: 27817 - RNA, 19 nt, synthetic construct
  source 1..19: mol_type = other RNA
ctggtagctgtgggtgtgg

SEQ ID NO: 27818 - RNA, 19 nt, synthetic construct
  source 1..19: mol_type = other RNA
gtccaggtctcattcacct

SEQ ID NO: 27819 - RNA, 19 nt, synthetic construct
  source 1..19: mol_type = other RNA
gcagttctccagggtccag

SEQ ID NO: 27820 - RNA, 19 nt, synthetic construct
  source 1..19: mol_type = other RNA
caggtgcttgttcacgcag

SEQ ID NO: 27821 - RNA, 19 nt, synthetic construct
  source 1..19: mol_type = other RNA
atctctctcatgaggacat

SEQ ID NO: 27822 - RNA, 19 nt, synthetic construct
  source 1..19: mol_type = other RNA
ggaatttggtcaaacagga

SEQ ID NO: 27823 - RNA, 19 nt, synthetic construct
  source 1..19: mol_type = other RNA
agaggctgtagggcagccg

SEQ ID NO: 27824 - RNA, 19 nt, synthetic construct
  source 1..19: mol_type = other RNA
aagaggctgtagggcagcc

SEQ ID NO: 27825 - RNA, 19 nt, synthetic construct
  source 1..19: mol_type = other RNA
tccaggctctggcagggca

SEQ ID NO: 27826 - RNA, 19 nt, synthetic construct
  source 1..19: mol_type = other RNA
cacacacgcaggactggca

SEQ ID NO: 27827 - RNA, 19 nt, synthetic construct
  source 1..19: mol_type = other RNA
aggtgcactggtgctgcat

SEQ ID NO: 27828 - RNA, 19 nt, synthetic construct
  source 1..19: mol_type = other RNA
atgcaggctgtggggtcag

SEQ ID NO: 27829 - RNA, 19 nt, synthetic construct
  source 1..19: mol_type = other RNA
ctccagggtccaggtctca

SEQ ID NO: 27830 - RNA, 19 nt, synthetic construct
  source 1..19: mol_type = other RNA
gtgcacataggaggacagc

SEQ ID NO: 27831 - RNA, 19 nt, synthetic construct
  source 1..19: mol_type = other RNA
ccgtgcagaaacactcgca

SEQ ID NO: 27832 - RNA, 19 nt, synthetic construct
  source 1..19: mol_type = other RNA
agttcccgcacaggccgca

SEQ ID NO: 27833 - RNA, 19 nt, synthetic construct
  source 1..19: mol_type = other RNA
gcaggtttttaggcagggt

SEQ ID NO: 27834 - RNA, 19 nt, synthetic construct
  source 1..19: mol_type = other RNA
ccccgggggacagacacag

SEQ ID NO: 27835 - RNA, 19 nt, synthetic construct
  source 1..19: mol_type = other RNA
gccgtgcagaaacactcgc

SEQ ID NO: 27836 - RNA, 19 nt, synthetic construct
  source 1..19: mol_type = other RNA
cacagccgtgcagaaacac

SEQ ID NO: 27837 - RNA, 19 nt, synthetic construct
  source 1..19: mol_type = other RNA
caggacacacacaggcccg

SEQ ID NO: 27838 - RNA, 19 nt, synthetic construct
  source 1..19: mol_type = other RNA
tgggcggggtccagcctga

SEQ ID NO: 27839 - RNA, 19 nt, synthetic construct
  source 1..19: mol_type = other RNA
ccacacaggccgcacatct

SEQ ID NO: 27840 - RNA, 19 nt, synthetic construct
  source 1..19: mol_type = other RNA
ccacagccgtgcagaaaca

SEQ ID NO: 27841 - RNA, 19 nt, synthetic construct
  source 1..19: mol_type = other RNA
gggcgtaggcagccacagc

SEQ ID NO: 27842 - RNA, 19 nt, synthetic construct
  source 1..19: mol_type = other RNA
gtaccctctctgcctcagg

SEQ ID NO: 27843 - RNA, 19 nt, synthetic construct
  source 1..19: mol_type = other RNA
gaggtgccgtcaaaggtgg

SEQ ID NO: 27844 - RNA, 19 nt, synthetic construct
  source 1..19: mol_type = other RNA
acctggtaccctctctgcc

SEQ ID NO: 27845 - RNA, 19 nt, synthetic construct
  source 1..19: mol_type = other RNA
catgggcgcagggacacag

SEQ ID NO: 27846 - RNA, 19 nt, synthetic construct
  source 1..19: mol_type = other RNA
aaggtgatgaagtggccat

SEQ ID NO: 27847 - RNA, 19 nt, synthetic construct
  source 1..19: mol_type = other RNA
ggggaagacagtgacgggt

SEQ ID NO: 27848 - RNA, 19 nt, synthetic construct
  source 1..19: mol_type = other RNA
ggtgcactggtgctgcatg

SEQ ID NO: 27849 - RNA, 19 nt, synthetic construct
  source 1..19: mol_type = other RNA
gagggagcaggggtcctca

SEQ ID NO: 27850 - RNA, 19 nt, synthetic construct
  source 1..19: mol_type = other RNA
cacgcagtgtgtgctgaaa

SEQ ID NO: 27851 - RNA, 19 nt, synthetic construct
  source 1..19: mol_type = other RNA
gtggtcttttcggttgctg

SEQ ID NO: 27852 - RNA, 19 nt, synthetic construct
  source 1..19: mol_type = other RNA
gccgtgggtgcaggggcac

SEQ ID NO: 27853 - RNA, 19 nt, synthetic construct
  source 1..19: mol_type = other RNA
gtttttaggcagggtgccc

SEQ ID NO: 27854 - RNA, 19 nt, synthetic construct
  source 1..19: mol_type = other RNA
ggttgggaagtccacgtca

SEQ ID NO: 27855 - RNA, 19 nt, synthetic construct
  source 1..19: mol_type = other RNA
tacgcgtggcaaagtcatt

SEQ ID NO: 27856 - RNA, 19 nt, synthetic construct
  source 1..19: mol_type = other RNA
catccagcaccgtgcctgg

SEQ ID NO: 27857 - RNA, 19 nt, synthetic construct
  source 1..19: mol_type = other RNA
caccgttgggtcctgggtg

SEQ ID NO: 27858 - RNA, 19 nt, synthetic construct
  source 1..19: mol_type = other RNA
tgacaggagtcctcctcac

SEQ ID NO: 27859 - RNA, 19 nt, synthetic construct
  source 1..19: mol_type = other RNA
ctggtaccctctctgcctc

SEQ ID NO: 27860 - RNA, 19 nt, synthetic construct
  source 1..19: mol_type = other RNA
taaggcagctcctcccgct

SEQ ID NO: 27861 - RNA, 19 nt, synthetic construct
  source 1..19: mol_type = other RNA
ccgtgcctggggggcagaa

SEQ ID NO: 27862 - RNA, 19 nt, synthetic construct
  source 1..19: mol_type = other RNA
accgtgcctggggggcaga

SEQ ID NO: 27863 - RNA, 19 nt, synthetic construct
  source 1..19: mol_type = other RNA
gatggccgtgtccccgccg

SEQ ID NO: 27864 - RNA, 19 nt, synthetic construct
  source 1..19: mol_type = other RNA
gctctgtgatgtgggtggt

SEQ ID NO: 27865 - RNA, 19 nt, synthetic construct
  source 1..19: mol_type = other RNA
gctctgtgatgtgggtggt

SEQ ID NO: 27866 - RNA, 19 nt, synthetic construct
  source 1..19: mol_type = other RNA
gctctgtgatgtgggtggt

SEQ ID NO: 27867 - RNA, 19 nt, synthetic construct
  source 1..19: mol_type = other RNA
gctctgtgatgtgggtggt

SEQ ID NO: 27868 - RNA, 19 nt, synthetic construct
  source 1..19: mol_type = other RNA
ggtgatgaagtggccatcc

SEQ ID NO: 27869 - RNA, 19 nt, synthetic construct
  source 1..19: mol_type = other RNA
aacgtcccctccaagttgt

SEQ ID NO: 27870 - RNA, 19 nt, synthetic construct
  source 1..19: mol_type = other RNA
aggtctggttggcgtattt

SEQ ID NO: 27871 - RNA, 19 nt, synthetic construct
  source 1..19: mol_type = other RNA
gtcgtcagcctggttctgg

SEQ ID NO: 27872 - RNA, 19 nt, synthetic construct
  source 1..19: mol_type = other RNA
ccggtggctgcactcccac

SEQ ID NO: 27873 - RNA, 19 nt, synthetic construct
  source 1..19: mol_type = other RNA
gtgaccacaggcctggagc

SEQ ID NO: 27874 - RNA, 19 nt, synthetic construct
  source 1..19: mol_type = other RNA
acgggtgaccacaggcctg

SEQ ID NO: 27875 - RNA, 19 nt, synthetic construct
  source 1..19: mol_type = other RNA
caagggcagcgggtccggg

SEQ ID NO: 27876 - RNA, 19 nt, synthetic construct
  source 1..19: mol_type = other RNA
aaaggccggccccagcagg

SEQ ID NO: 27877 - RNA, 19 nt, synthetic construct
  source 1..19: mol_type = other RNA
gcactccgcaaaggccggc

SEQ ID NO: 27878 - RNA, 19 nt, synthetic construct
  source 1..19: mol_type = other RNA
gggtgcaggggcactgccc

SEQ ID NO: 27879 - RNA, 19 nt, synthetic construct
  source 1..19: mol_type = other RNA
caggcagagccggtggctg

SEQ ID NO: 27880 - RNA, 19 nt, synthetic construct
  source 1..19: mol_type = other RNA
ggcagacctcgcggacaca

SEQ ID NO: 27881 - RNA, 19 nt, synthetic construct
  source 1..19: mol_type = other RNA
tcctcatcaaaccactctg

SEQ ID NO: 27882 - RNA, 19 nt, synthetic construct
  source 1..19: mol_type = other RNA
agtccccgccagagggccc

SEQ ID NO: 27883 - RNA, 19 nt, synthetic construct
  source 1..19: mol_type = other RNA
taaagctggtagctgtggg

SEQ ID NO: 27884 - RNA, 19 nt, synthetic construct
  source 1..19: mol_type = other RNA
agtccccgccagagggccc

SEQ ID NO: 27885 - RNA, 19 nt, synthetic construct
  source 1..19: mol_type = other RNA
agtccccgccagagggccc

SEQ ID NO: 27886 - RNA, 19 nt, synthetic construct
  source 1..19: mol_type = other RNA
taaagctggtagctgtggg

SEQ ID NO: 27887 - RNA, 19 nt, synthetic construct
  source 1..19: mol_type = other RNA
agtccccgccagagggccc

SEQ ID NO: 27888 - RNA, 19 nt, synthetic construct
  source 1..19: mol_type = other RNA
taaagctggtagctgtggg

SEQ ID NO: 27889 - RNA, 19 nt, synthetic construct
  source 1..19: mol_type = other RNA
cactccccacagcactgcc

SEQ ID NO: 27890 - RNA, 19 nt, synthetic construct
  source 1..19: mol_type = other RNA
aagctctcggcctggcact

SEQ ID NO: 27891 - RNA, 19 nt, synthetic construct
  source 1..19: mol_type = other RNA
agttgcagcagaacacacg

SEQ ID NO: 27892 - RNA, 19 nt, synthetic construct
  source 1..19: mol_type = other RNA
agttgcagcagaacacacg

SEQ ID NO: 27893 - RNA, 19 nt, synthetic construct
  source 1..19: mol_type = other RNA
agttgcagcagaacacacg

SEQ ID NO: 27894 - RNA, 19 nt, synthetic construct
  source 1..19: mol_type = other RNA
agttgcagcagaacacacg

SEQ ID NO: 27895 - RNA, 19 nt, synthetic construct
  source 1..19: mol_type = other RNA
gtagtcctggtgcagtcgg

SEQ ID NO: 27896 - RNA, 19 nt, synthetic construct
  source 1..19: mol_type = other RNA
aagtccccgccagagggcc

SEQ ID NO: 27897 - RNA, 19 nt, synthetic construct
  source 1..19: mol_type = other RNA
aagtccccgccagagggcc

SEQ ID NO: 27898 - RNA, 19 nt, synthetic construct
  source 1..19: mol_type = other RNA
aagtccccgccagagggcc

SEQ ID NO: 27899 - RNA, 19 nt, synthetic construct
  source 1..19: mol_type = other RNA
aagtccccgccagagggcc

SEQ ID NO: 27900 - RNA, 19 nt, synthetic construct
  source 1..19: mol_type = other RNA
gcactggtgctgcatggcc

SEQ ID NO: 27901 - RNA, 19 nt, synthetic construct
  source 1..19: mol_type = other RNA
ggctgtgagcgcactggat

SEQ ID NO: 27902 - RNA, 19 nt, synthetic construct
  source 1..19: mol_type = other RNA
cgtaggccacgcaggtgcc

SEQ ID NO: 27903 - RNA, 19 nt, synthetic construct
  source 1..19: mol_type = other RNA
gggtgtccccagagaggca

SEQ ID NO: 27904 - RNA, 19 nt, synthetic construct
  source 1..19: mol_type = other RNA
gcgtgcagccacactcatc

SEQ ID NO: 27905 - RNA, 19 nt, synthetic construct
  source 1..19: mol_type = other RNA
cagggcactgtcctctccg

SEQ ID NO: 27906 - RNA, 19 nt, synthetic construct
  source 1..19: mol_type = other RNA
aggacatgccacagccttc

SEQ ID NO: 27907 - RNA, 19 nt, synthetic construct
  source 1..19: mol_type = other RNA
ggtgttgttgtggaagagg

SEQ ID NO: 27908 - RNA, 19 nt, synthetic construct
  source 1..19: mol_type = other RNA
ttccaggacatgccacagc

SEQ ID NO: 27909 - RNA, 19 nt, synthetic construct
  source 1..19: mol_type = other RNA
tggtggctgtaccaagggt

SEQ ID NO: 27910 - RNA, 19 nt, synthetic construct
  source 1..19: mol_type = other RNA
ccgtggtggtcagcacttt

SEQ ID NO: 27911 - RNA, 19 nt, synthetic construct
  source 1..19: mol_type = other RNA
ggggtcctcaaagctgttc

SEQ ID NO: 27912 - RNA, 19 nt, synthetic construct
  source 1..19: mol_type = other RNA
ctgctcccagttcctgcac

SEQ ID NO: 27913 - RNA, 19 nt, synthetic construct
  source 1..19: mol_type = other RNA
gtagttgcagcagaacaca

SEQ ID NO: 27914 - RNA, 19 nt, synthetic construct
  source 1..19: mol_type = other RNA
gtagttgcagcagaacaca

SEQ ID NO: 27915 - RNA, 19 nt, synthetic construct
  source 1..19: mol_type = other RNA
gtagttgcagcagaacaca

SEQ ID NO: 27916 - RNA, 19 nt, synthetic construct
  source 1..19: mol_type = other RNA
gtagttgcagcagaacaca

SEQ ID NO: 27917 - RNA, 19 nt, synthetic construct
  source 1..19: mol_type = other RNA
tggagcaggtggtgccggt

SEQ ID NO: 27918 - RNA, 19 nt, synthetic construct
  source 1..19: mol_type = other RNA
ctttgatgggcaggtgctt

SEQ ID NO: 27919 - RNA, 19 nt, synthetic construct
  source 1..19: mol_type = other RNA
cttggtggagtcaacctgg

SEQ ID NO: 27920 - RNA, 19 nt, synthetic construct
  source 1..19: mol_type = other RNA
cagagtggaggagggtgtg

SEQ ID NO: 27921 - RNA, 19 nt, synthetic construct
  source 1..19: mol_type = other RNA
cacttcatctggtcctcat

SEQ ID NO: 27922 - RNA, 19 nt, synthetic construct
  source 1..19: mol_type = other RNA
tccccacagcactgcccgg

SEQ ID NO: 27923 - RNA, 19 nt, synthetic construct
  source 1..19: mol_type = other RNA
gggcactgtcctctccgtt

SEQ ID NO: 27924 - RNA, 19 nt, synthetic construct
  source 1..19: mol_type = other RNA
tcatctggtcctcattgaa

SEQ ID NO: 27925 - RNA, 19 nt, synthetic construct
  source 1..19: mol_type = other RNA
aaccactctgtccactgac

SEQ ID NO: 27926 - RNA, 19 nt, synthetic construct
  source 1..19: mol_type = other RNA
gtggccacccctgggacag

SEQ ID NO: 27927 - RNA, 19 nt, synthetic construct
  source 1..19: mol_type = other RNA
tgtcacccacgcacctggc

SEQ ID NO: 27928 - RNA, 19 nt, synthetic construct
  source 1..19: mol_type = other RNA
cgtgcctggggggcagaag

SEQ ID NO: 27929 - RNA, 19 nt, synthetic construct
  source 1..19: mol_type = other RNA
tcatccagcaccgtgcctg

SEQ ID NO: 27930 - RNA, 19 nt, synthetic construct
  source 1..19: mol_type = other RNA
gttctgcatgtacttggtg

SEQ ID NO: 27931 - RNA, 19 nt, synthetic construct
  source 1..19: mol_type = other RNA
tcattgaagaagggctggc

SEQ ID NO: 27932 - RNA, 19 nt, synthetic construct
  source 1..19: mol_type = other RNA
ctcattgaagaagggctgg

SEQ ID NO: 27933 - RNA, 19 nt, synthetic construct
  source 1..19: mol_type = other RNA
ctgtgagcgcactggatgc

SEQ ID NO: 27934 - RNA, 19 nt, synthetic construct
  source 1..19: mol_type = other RNA
cttgtcgtggagtggggga

SEQ ID NO: 27935 - RNA, 19 nt, synthetic construct
  source 1..19: mol_type = other RNA
cacccctgggacagtgggt

SEQ ID NO: 27936 - RNA, 19 nt, synthetic construct
  source 1..19: mol_type = other RNA
atgtggccacccctgggac

SEQ ID NO: 27937 - RNA, 19 nt, synthetic construct
  source 1..19: mol_type = other RNA
tcaaaccactctgtccact

SEQ ID NO: 27938 - RNA, 19 nt, synthetic construct
  source 1..19: mol_type = other RNA
gctggtagctgtgggtgtg

SEQ ID NO: 27939 - RNA, 19 nt, synthetic construct
  source 1..19: mol_type = other RNA
tctgtgatgtgggtggtgc

SEQ ID NO: 27940 - RNA, 19 nt, synthetic construct
  source 1..19: mol_type = other RNA
ttgaagcacatcttgaact

SEQ ID NO: 27941 - RNA, 19 nt, synthetic construct
  source 1..19: mol_type = other RNA
gctggtagctgtgggtgtg

SEQ ID NO: 27942 - RNA, 19 nt, synthetic construct
  source 1..19: mol_type = other RNA
gcactgtgggggtgtgggt

SEQ ID NO: 27943 - RNA, 19 nt, synthetic construct
  source 1..19: mol_type = other RNA
tctgtgatgtgggtggtgc

SEQ ID NO: 27944 - RNA, 19 nt, synthetic construct
  source 1..19: mol_type = other RNA
ttgaagcacatcttgaact

SEQ ID NO: 27945 - RNA, 19 nt, synthetic construct
  source 1..19: mol_type = other RNA
tggtggctgtgcttgtcag

SEQ ID NO: 27946 - RNA, 19 nt, synthetic construct
  source 1..19: mol_type = other RNA
gctggtagctgtgggtgtg

SEQ ID NO: 27947 - RNA, 19 nt, synthetic construct
  source 1..19: mol_type = other RNA
tctgtgatgtgggtggtgc

SEQ ID NO: 27948 - RNA, 19 nt, synthetic construct
  source 1..19: mol_type = other RNA
ttgaagcacatcttgaact

SEQ ID NO: 27949 - RNA, 19 nt, synthetic construct
  source 1..19: mol_type = other RNA
gctggtagctgtgggtgtg

SEQ ID NO: 27950 - RNA, 19 nt, synthetic construct
  source 1..19: mol_type = other RNA
gcactgtgggggtgtgggt

SEQ ID NO: 27951 - RNA, 19 nt, synthetic construct
  source 1..19: mol_type = other RNA
tctgtgatgtgggtggtgc

SEQ ID NO: 27952 - RNA, 19 nt, synthetic construct
  source 1..19: mol_type = other RNA
ttgaagcacatcttgaact

SEQ ID NO: 27953 - RNA, 19 nt, synthetic construct
  source 1..19: mol_type = other RNA
tggtggctgtgcttgtcag

SEQ ID NO: 27954 - RNA, 19 nt, synthetic construct
  source 1..19: mol_type = other RNA
gctggtagctgtgggtgtg

SEQ ID NO: 27955 - RNA, 19 nt, synthetic construct
  source 1..19: mol_type = other RNA
atggcattgtcacagccag

SEQ ID NO: 27956 - RNA, 19 nt, synthetic construct
  source 1..19: mol_type = other RNA
ggatggcattgtcacagcc

SEQ ID NO: 27957 - RNA, 19 nt, synthetic construct
  source 1..19: mol_type = other RNA
gggatggcattgtcacagc

SEQ ID NO: 27958 - RNA, 19 nt, synthetic construct
  source 1..19: mol_type = other RNA
gagggatggcattgtcaca

SEQ ID NO: 27959 - RNA, 19 nt, synthetic construct
  source 1..19: mol_type = other RNA
gtgtaagaggtgccgtcaa

SEQ ID NO: 27960 - RNA, 19 nt, synthetic construct
  source 1..19: mol_type = other RNA
agacctggctcagcatcag

SEQ ID NO: 27961 - RNA, 19 nt, synthetic construct
  source 1..19: mol_type = other RNA
aagacctggctcagcatca

SEQ ID NO: 27962 - RNA, 19 nt, synthetic construct
  source 1..19: mol_type = other RNA
gcaaagacctggctcagca

SEQ ID NO: 27963 - RNA, 19 nt, synthetic construct
  source 1..19: mol_type = other RNA
gttgggtcctgggtgtccc

SEQ ID NO: 27964 - RNA, 19 nt, synthetic construct
  source 1..19: mol_type = other RNA
ttttcctgaggctccccct

SEQ ID NO: 27965 - RNA, 19 nt, synthetic construct
  source 1..19: mol_type = other RNA
ggagtcaacctgggagcgg

SEQ ID NO: 27966 - RNA, 19 nt, synthetic construct
  source 1..19: mol_type = other RNA
ggctggcaggtggtggtac

SEQ ID NO: 27967 - RNA, 19 nt, synthetic construct
  source 1..19: mol_type = other RNA
tggtgaggactgaggagga

SEQ ID NO: 27968 - RNA, 19 nt, synthetic construct
  source 1..19: mol_type = other RNA
tggaagggcttggggttga

SEQ ID NO: 27969 - RNA, 19 nt, synthetic construct
  source 1..19: mol_type = other RNA
tggtcagcactgtgggggt

SEQ ID NO: 27970 - RNA, 19 nt, synthetic construct
  source 1..19: mol_type = other RNA
tggtcagcactgtgggggt

SEQ ID NO: 27971 - RNA, 19 nt, synthetic construct
  source 1..19: mol_type = other RNA
agtggaagggcttggggtt

SEQ ID NO: 27972 - RNA, 19 nt, synthetic construct
  source 1..19: mol_type = other RNA
cggagtccgccaggacaca

SEQ ID NO: 27973 - RNA, 19 nt, synthetic construct
  source 1..19: mol_type = other RNA
ccaacttctgcaggttccc

SEQ ID NO: 27974 - RNA, 19 nt, synthetic construct
  source 1..19: mol_type = other RNA
caggccgcacatctggccc

SEQ ID NO: 27975 - RNA, 19 nt, synthetic construct
  source 1..19: mol_type = other RNA
gcattgtcacagccagggg

SEQ ID NO: 27976 - RNA, 19 nt, synthetic construct
  source 1..19: mol_type = other RNA
gtggggcagcggcacaggt

SEQ ID NO: 27977 - RNA, 19 nt, synthetic construct
  source 1..19: mol_type = other RNA
ccgggttcagggggctcag

SEQ ID NO: 27978 - RNA, 19 nt, synthetic construct
  source 1..19: mol_type = other RNA
agcaggtgccagggcacgg

SEQ ID NO: 27979 - RNA, 19 nt, synthetic construct
  source 1..19: mol_type = other RNA
ggaagggcttggggttgat

SEQ ID NO: 27980 - RNA, 19 nt, synthetic construct
  source 1..19: mol_type = other RNA
gacaccagccccgggggac

SEQ ID NO: 27981 - RNA, 19 nt, synthetic construct
  source 1..19: mol_type = other RNA
gcagccacagccgtgcaga

SEQ ID NO: 27982 - RNA, 19 nt, synthetic construct
  source 1..19: mol_type = other RNA
aggcagccacagccgtgca

SEQ ID NO: 27983 - RNA, 19 nt, synthetic construct
  source 1..19: mol_type = other RNA
ccacgcacttcatctggtc

SEQ ID NO: 27984 - RNA, 19 nt, synthetic construct
  source 1..19: mol_type = other RNA
gagttccaggacatgccac

SEQ ID NO: 27985 - RNA, 19 nt, synthetic construct
  source 1..19: mol_type = other RNA
ccgttcttgctgaaaccgc

SEQ ID NO: 27986 - RNA, 19 nt, synthetic construct
  source 1..19: mol_type = other RNA
tcccagttcctgcacacca

SEQ ID NO: 27987 - RNA, 19 nt, synthetic construct
  source 1..19: mol_type = other RNA
gtgtccccagagaggcagg

SEQ ID NO: 27988 - RNA, 19 nt, synthetic construct
  source 1..19: mol_type = other RNA
ggaagaggctgtagggcag

SEQ ID NO: 27989 - RNA, 19 nt, synthetic construct
  source 1..19: mol_type = other RNA
ctcccagttcctgcacacc

SEQ ID NO: 27990 - RNA, 19 nt, synthetic construct
  source 1..19: mol_type = other RNA
ggtggtgaggactgaggag

SEQ ID NO: 27991 - RNA, 19 nt, synthetic construct
  source 1..19: mol_type = other RNA
ctggcagcaggtgcactgg

SEQ ID NO: 27992 - RNA, 19 nt, synthetic construct
  source 1..19: mol_type = other RNA
agcaccagcccctgggcct

SEQ ID NO: 27993 - RNA, 19 nt, synthetic construct
  source 1..19: mol_type = other RNA
tccagcctgacaaacacct

SEQ ID NO: 27994 - RNA, 19 nt, synthetic construct
  source 1..19: mol_type = other RNA
gccacgcaggtgcccaggc

SEQ ID NO: 27995 - RNA, 19 nt, synthetic construct
  source 1..19: mol_type = other RNA
agagcttgatggccttgga

SEQ ID NO: 27996 - RNA, 19 nt, synthetic construct
  source 1..19: mol_type = other RNA
taggcagccacagccgtgc

SEQ ID NO: 27997 - RNA, 19 nt, synthetic construct
  source 1..19: mol_type = other RNA
caccggggctggcaggtgg

SEQ ID NO: 27998 - RNA, 19 nt, synthetic construct
  source 1..19: mol_type = other RNA
tgggttctgtggagcctgc

SEQ ID NO: 27999 - RNA, 19 nt, synthetic construct
  source 1..19: mol_type = other RNA
gtccccagagaggcaggta

SEQ ID NO: 28000 - RNA, 19 nt, synthetic construct
  source 1..19: mol_type = other RNA
cctcctcacaggagtagca

SEQ ID NO: 28001 - RNA, 19 nt, synthetic construct
  source 1..19: mol_type = other RNA
gggcaccgtctcctcgtgg

SEQ ID NO: 28002 - RNA, 19 nt, synthetic construct
  source 1..19: mol_type = other RNA
ctgaccaggcacactgggg

SEQ ID NO: 28003 - RNA, 19 nt, synthetic construct
  source 1..19: mol_type = other RNA
cacatcttgaacttcccca

SEQ ID NO: 28004 - RNA, 19 nt, synthetic construct
  source 1..19: mol_type = other RNA
ctgaccaggcacactgggg

SEQ ID NO: 28005 - RNA, 19 nt, synthetic construct
  source 1..19: mol_type = other RNA
cacatcttgaacttcccca

SEQ ID NO: 28006 - RNA, 19 nt, synthetic construct
  source 1..19: mol_type = other RNA
ctgaccaggcacactgggg

SEQ ID NO: 28007 - RNA, 19 nt, synthetic construct
  source 1..19: mol_type = other RNA
cacatcttgaacttcccca

SEQ ID NO: 28008 - RNA, 19 nt, synthetic construct
  source 1..19: mol_type = other RNA
ctgaccaggcacactgggg

SEQ ID NO: 28009 - RNA, 19 nt, synthetic construct
  source 1..19: mol_type = other RNA
cacatcttgaacttcccca

SEQ ID NO: 28010 - RNA, 19 nt, synthetic construct
  source 1..19: mol_type = other RNA
cgtcattgaggaaggtgcc

SEQ ID NO: 28011 - RNA, 19 nt, synthetic construct
  source 1..19: mol_type = other RNA
tgtagatggagttgaggaa

SEQ ID NO: 28012 - RNA, 19 nt, synthetic construct
  source 1..19: mol_type = other RNA
cacaggccacaggtctggt

SEQ ID NO: 28013 - RNA, 19 nt, synthetic construct
  source 1..19: mol_type = other RNA
cctggtaccctctctgcct

SEQ ID NO: 28014 - RNA, 19 nt, synthetic construct
  source 1..19: mol_type = other RNA
ggatgtggccacccctggg

SEQ ID NO: 28015 - RNA, 19 nt, synthetic construct
  source 1..19: mol_type = other RNA
gagggtgtgaacagggtga

SEQ ID NO: 28016 - RNA, 19 nt, synthetic construct
  source 1..19: mol_type = other RNA
agggtgtgaacagggtgat

SEQ ID NO: 28017 - RNA, 19 nt, synthetic construct
  source 1..19: mol_type = other RNA
gttcgagtggaagggcttg

SEQ ID NO: 28018 - RNA, 19 nt, synthetic construct
  source 1..19: mol_type = other RNA
agttcgagtggaagggctt

SEQ ID NO: 28019 - RNA, 19 nt, synthetic construct
  source 1..19: mol_type = other RNA
gacatgccacagccttcct

SEQ ID NO: 28020 - RNA, 19 nt, synthetic construct
  source 1..19: mol_type = other RNA
gacaccggggctggcaggt

SEQ ID NO: 28021 - RNA, 19 nt, synthetic construct
  source 1..19: mol_type = other RNA
gtgcagttacagctctggc

SEQ ID NO: 28022 - RNA, 19 nt, synthetic construct
  source 1..19: mol_type = other RNA
gtgttgttgtggaagaggc

SEQ ID NO: 28023 - RNA, 19 nt, synthetic construct
  source 1..19: mol_type = other RNA
caggcctcaaggctgtgag

SEQ ID NO: 28024 - RNA, 19 nt, synthetic construct
  source 1..19: mol_type = other RNA
aagctggtagctgtgggtg

SEQ ID NO: 28025 - RNA, 19 nt, synthetic construct
  source 1..19: mol_type = other RNA
aagctggtagctgtgggtg

SEQ ID NO: 28026 - RNA, 19 nt, synthetic construct
  source 1..19: mol_type = other RNA
aagctggtagctgtgggtg

SEQ ID NO: 28027 - RNA, 19 nt, synthetic construct
  source 1..19: mol_type = other RNA
caccaggcagtgcccactg

SEQ ID NO: 28028 - RNA, 19 nt, synthetic construct
  source 1..19: mol_type = other RNA
aggtggggcagcggcacag

SEQ ID NO: 28029 - RNA, 19 nt, synthetic construct
  source 1..19: mol_type = other RNA
gcaggctccgtgctggcac

SEQ ID NO: 28030 - RNA, 19 nt, synthetic construct
  source 1..19: mol_type = other RNA
gctcaggctggggaagaca

SEQ ID NO: 28031 - RNA, 19 nt, synthetic construct
  source 1..19: mol_type = other RNA
gccgggttcagggggctca

SEQ ID NO: 28032 - RNA, 19 nt, synthetic construct
  source 1..19: mol_type = other RNA
gggtgaccacaggcctgga

SEQ ID NO: 28033 - RNA, 19 nt, synthetic construct
  source 1..19: mol_type = other RNA
cgggtgaccacaggcctgg

SEQ ID NO: 28034 - RNA, 19 nt, synthetic construct
  source 1..19: mol_type = other RNA
ccagcaccgtgcctggggg

SEQ ID NO: 28035 - RNA, 19 nt, synthetic construct
  source 1..19: mol_type = other RNA
ccagggcacggcaggtcct

SEQ ID NO: 28036 - RNA, 19 nt, synthetic construct
  source 1..19: mol_type = other RNA
gcagtgtgtgctgaaacag

SEQ ID NO: 28037 - RNA, 19 nt, synthetic construct
  source 1..19: mol_type = other RNA
tggtcccacaggggatgtt

SEQ ID NO: 28038 - RNA, 19 nt, synthetic construct
  source 1..19: mol_type = other RNA
aacctgggagcggcaggcg

SEQ ID NO: 28039 - RNA, 19 nt, synthetic construct
  source 1..19: mol_type = other RNA
ggtccaccaggcagtgccc

SEQ ID NO: 28040 - RNA, 19 nt, synthetic construct
  source 1..19: mol_type = other RNA
aggtccaccaggcagtgcc

SEQ ID NO: 28041 - RNA, 19 nt, synthetic construct
  source 1..19: mol_type = other RNA
gttccaggacatgccacag

SEQ ID NO: 28042 - RNA, 19 nt, synthetic construct
  source 1..19: mol_type = other RNA
ctcctgctcccagttcctg

SEQ ID NO: 28043 - RNA, 19 nt, synthetic construct
  source 1..19: mol_type = other RNA
gagggtggggactgctgtg

SEQ ID NO: 28044 - RNA, 19 nt, synthetic construct
  source 1..19: mol_type = other RNA
gatgtggccacccctggga

SEQ ID NO: 28045 - RNA, 19 nt, synthetic construct
  source 1..19: mol_type = other RNA
gtccctagggcagaggagg

SEQ ID NO: 28046 - RNA, 19 nt, synthetic construct
  source 1..19: mol_type = other RNA
gtccctagggcagaggagg

SEQ ID NO: 28047 - RNA, 19 nt, synthetic construct
  source 1..19: mol_type = other RNA
gtccctagggcagaggagg

SEQ ID NO: 28048 - RNA, 19 nt, synthetic construct
  source 1..19: mol_type = other RNA
gtccctagggcagaggagg

SEQ ID NO: 28049 - RNA, 19 nt, synthetic construct
  source 1..19: mol_type = other RNA
gactgaggaggacacagtg

SEQ ID NO: 28050 - RNA, 19 nt, synthetic construct
  source 1..19: mol_type = other RNA
gcactcatagtggaagtca

SEQ ID NO: 28051 - RNA, 19 nt, synthetic construct
  source 1..19: mol_type = other RNA
ggctcagcatcagatcaca

SEQ ID NO: 28052 - RNA, 19 nt, synthetic construct
  source 1..19: mol_type = other RNA
cgtaggcagccacagccgt

SEQ ID NO: 28053 - RNA, 19 nt, synthetic construct
  source 1..19: mol_type = other RNA
caggagtcctcctcacagg

SEQ ID NO: 28054 - RNA, 19 nt, synthetic construct
  source 1..19: mol_type = other RNA
gccatcaaaggtgatgaag

SEQ ID NO: 28055 - RNA, 19 nt, synthetic construct
  source 1..19: mol_type = other RNA
ggagtcctcctcacaggag

SEQ ID NO: 28056 - RNA, 19 nt, synthetic construct
  source 1..19: mol_type = other RNA
gcactcggccccaggggtg

SEQ ID NO: 28057 - RNA, 19 nt, synthetic construct
  source 1..19: mol_type = other RNA
ggtcgtccccggagtggag

SEQ ID NO: 28058 - RNA, 19 nt, synthetic construct
  source 1..19: mol_type = other RNA
ggtcgtccccggagtggag

SEQ ID NO: 28059 - RNA, 19 nt, synthetic construct
  source 1..19: mol_type = other RNA
ggtcgtccccggagtggag

SEQ ID NO: 28060 - RNA, 19 nt, synthetic construct
  source 1..19: mol_type = other RNA
ggtcgtccccggagtggag

SEQ ID NO: 28061 - RNA, 19 nt, synthetic construct
  source 1..19: mol_type = other RNA
tggtgccggtggtcccaca

SEQ ID NO: 28062 - RNA, 19 nt, synthetic construct
  source 1..19: mol_type = other RNA
cctggtgggcggggtccag

SEQ ID NO: 28063 - RNA, 19 nt, synthetic construct
  source 1..19: mol_type = other RNA
cataggaggacagcgcggc

SEQ ID NO: 28064 - RNA, 19 nt, synthetic construct
  source 1..19: mol_type = other RNA
gccggtggctgcactccca

SEQ ID NO: 28065 - RNA, 19 nt, synthetic construct
  source 1..19: mol_type = other RNA
gggttgtagaagtcacaga

SEQ ID NO: 28066 - RNA, 19 nt, synthetic construct
  source 1..19: mol_type = other RNA
tgggttgtagaagtcacag

SEQ ID NO: 28067 - RNA, 19 nt, synthetic construct
  source 1..19: mol_type = other RNA
agtgtgtgctgaaacagcc

SEQ ID NO: 28068 - RNA, 19 nt, synthetic construct
  source 1..19: mol_type = other RNA
gccatgggcgcagggacac

SEQ ID NO: 28069 - RNA, 19 nt, synthetic construct
  source 1..19: mol_type = other RNA
agcggcacaggtcctgggc

SEQ ID NO: 28070 - RNA, 19 nt, synthetic construct
  source 1..19: mol_type = other RNA
ggtgggcggggtccagcct

SEQ ID NO: 28071 - RNA, 19 nt, synthetic construct
  source 1..19: mol_type = other RNA
catcttgaacttccccacc

SEQ ID NO: 28072 - RNA, 19 nt, synthetic construct
  source 1..19: mol_type = other RNA
catcttgaacttccccacc

SEQ ID NO: 28073 - RNA, 19 nt, synthetic construct
  source 1..19: mol_type = other RNA
catcttgaacttccccacc

SEQ ID NO: 28074 - RNA, 19 nt, synthetic construct
  source 1..19: mol_type = other RNA
catcttgaacttccccacc

SEQ ID NO: 28075 - RNA, 19 nt, synthetic construct
  source 1..19: mol_type = other RNA
tccagcagggcactgtcct

SEQ ID NO: 28076 - RNA, 19 nt, synthetic construct
  source 1..19: mol_type = other RNA
gcaagggcagcgggtccgg

SEQ ID NO: 28077 - RNA, 19 nt, synthetic construct
  source 1..19: mol_type = other RNA
ctggtgggcggggtccagc

SEQ ID NO: 28078 - RNA, 19 nt, synthetic construct
  source 1..19: mol_type = other RNA
gtgcttttctgcagagagg

SEQ ID NO: 28079 - RNA, 19 nt, synthetic construct
  source 1..19: mol_type = other RNA
cactcggccccaggggtgc

SEQ ID NO: 28080 - RNA, 19 nt, synthetic construct
  source 1..19: mol_type = other RNA
acagtgggttctgtggagc

SEQ ID NO: 28081 - RNA, 19 nt, synthetic construct
  source 1..19: mol_type = other RNA
gcagaagcagggagtagag

SEQ ID NO: 28082 - RNA, 19 nt, synthetic construct
  source 1..19: mol_type = other RNA
ctgtagggcagccgggcct

SEQ ID NO: 28083 - RNA, 19 nt, synthetic construct
  source 1..19: mol_type = other RNA
gagtcctcctcacaggagt

SEQ ID NO: 28084 - RNA, 19 nt, synthetic construct
  source 1..19: mol_type = other RNA
ttgtcgtggagtgggggac

SEQ ID NO: 28085 - RNA, 19 nt, synthetic construct
  source 1..19: mol_type = other RNA
aaaccgctgctcaccggaa

SEQ ID NO: 28086 - RNA, 19 nt, synthetic construct
  source 1..19: mol_type = other RNA
gtcctggaggtggccgtgg

SEQ ID NO: 28087 - RNA, 19 nt, synthetic construct
  source 1..19: mol_type = other RNA
gtcctggaggtggccgtgg

SEQ ID NO: 28088 - RNA, 19 nt, synthetic construct
  source 1..19: mol_type = other RNA
accctgcccttgtagtcct

SEQ ID NO: 28089 - RNA, 19 nt, synthetic construct
  source 1..19: mol_type = other RNA
tgaccacaggcctggagcc

SEQ ID NO: 28090 - RNA, 19 nt, synthetic construct
  source 1..19: mol_type = other RNA
tccggcaggtttttaggca

SEQ ID NO: 28091 - RNA, 19 nt, synthetic construct
  source 1..19: mol_type = other RNA
cagccttccaggccaggca

SEQ ID NO: 28092 - RNA, 19 nt, synthetic construct
  source 1..19: mol_type = other RNA
tccaagttgttcagacttg

SEQ ID NO: 28093 - RNA, 19 nt, synthetic construct
  source 1..19: mol_type = other RNA
gacagtgggttctgtggag

SEQ ID NO: 28094 - RNA, 19 nt, synthetic construct
  source 1..19: mol_type = other RNA
cctggcccaactcccgcag

SEQ ID NO: 28095 - RNA, 19 nt, synthetic construct
  source 1..19: mol_type = other RNA
cctggcccaactcccgcag

SEQ ID NO: 28096 - RNA, 19 nt, synthetic construct
  source 1..19: mol_type = other RNA
cctggcccaactcccgcag

SEQ ID NO: 28097 - RNA, 19 nt, synthetic construct
  source 1..19: mol_type = other RNA
cattgtcacagccaggggc

SEQ ID NO: 28098 - RNA, 19 nt, synthetic construct
  source 1..19: mol_type = other RNA
ctcctcacaggagtagcag

SEQ ID NO: 28099 - RNA, 19 nt, synthetic construct
  source 1..19: mol_type = other RNA
attgtcacagccaggggca

SEQ ID NO: 28100 - RNA, 19 nt, synthetic construct
  source 1..19: mol_type = other RNA
cacaggggatgttctcggt

SEQ ID NO: 28101 - RNA, 19 nt, synthetic construct
  source 1..19: mol_type = other RNA
gggacaccaggctgggcct

SEQ ID NO: 28102 - RNA, 19 nt, synthetic construct
  source 1..19: mol_type = other RNA
gggacaccaggctgggcct

SEQ ID NO: 28103 - RNA, 19 nt, synthetic construct
  source 1..19: mol_type = other RNA
gggacaccaggctgggcct

SEQ ID NO: 28104 - RNA, 19 nt, synthetic construct
  source 1..19: mol_type = other RNA
gggacaccaggctgggcct

SEQ ID NO: 28105 - RNA, 19 nt, synthetic construct
  source 1..19: mol_type = other RNA
tccaggagccagcacggtg

SEQ ID NO: 28106 - RNA, 19 nt, synthetic construct
  source 1..19: mol_type = other RNA
aggccacgcaggtgcccag

SEQ ID NO: 28107 - RNA, 19 nt, synthetic construct
  source 1..19: mol_type = other RNA
gtagtgccactcacagccc

SEQ ID NO: 28108 - RNA, 19 nt, synthetic construct
  source 1..19: mol_type = other RNA
agcagccttccaggccagg

SEQ ID NO: 28109 - RNA, 19 nt, synthetic construct
  source 1..19: mol_type = other RNA
cacactggggctcacagcc

SEQ ID NO: 28110 - RNA, 19 nt, synthetic construct
  source 1..19: mol_type = other RNA
cacactggggctcacagcc

SEQ ID NO: 28111 - RNA, 19 nt, synthetic construct
  source 1..19: mol_type = other RNA
agggatggcattgtcacag

SEQ ID NO: 28112 - RNA, 19 nt, synthetic construct
  source 1..19: mol_type = other RNA
gttgttgtggaagaggctg

SEQ ID NO: 28113 - RNA, 19 nt, synthetic construct
  source 1..19: mol_type = other RNA
tgggtgtccccagagaggc

SEQ ID NO: 28114 - RNA, 19 nt, synthetic construct
  source 1..19: mol_type = other RNA
gggcaggatgcaggctgtg

SEQ ID NO: 28115 - RNA, 19 nt, synthetic construct
  source 1..19: mol_type = other RNA
ggttttcctgaggctcccc

SEQ ID NO: 28116 - RNA, 19 nt, synthetic construct
  source 1..19: mol_type = other RNA
acaggccgcacatctggcc

SEQ ID NO: 28117 - RNA, 19 nt, synthetic construct
  source 1..19: mol_type = other RNA
aagtggccatccccgtagg

SEQ ID NO: 28118 - RNA, 19 nt, synthetic construct
  source 1..19: mol_type = other RNA
tctcgatgaccaggaagat

SEQ ID NO: 28119 - RNA, 19 nt, synthetic construct
  source 1..19: mol_type = other RNA
tggccgtggtggtcagcac

SEQ ID NO: 28120 - RNA, 19 nt, synthetic construct
  source 1..19: mol_type = other RNA
cgcaaaggccggccccagc

SEQ ID NO: 28121 - RNA, 19 nt, synthetic construct
  source 1..19: mol_type = other RNA
gggacagacacagccggac

SEQ ID NO: 28122 - RNA, 19 nt, synthetic construct
  source 1..19: mol_type = other RNA
atgaccaggaagatcccca

SEQ ID NO: 28123 - RNA, 19 nt, synthetic construct
  source 1..19: mol_type = other RNA
ggcaggtggtggtacctgg

SEQ ID NO: 28124 - RNA, 19 nt, synthetic construct
  source 1..19: mol_type = other RNA
ggttcagggggctcaggct

SEQ ID NO: 28125 - RNA, 19 nt, synthetic construct
  source 1..19: mol_type = other RNA
tacttggtggagtcaacct

SEQ ID NO: 28126 - RNA, 19 nt, synthetic construct
  source 1..19: mol_type = other RNA
ccggagtggaggagggcat

SEQ ID NO: 28127 - RNA, 19 nt, synthetic construct
  source 1..19: mol_type = other RNA
cagcactgtgggggtgtgg

SEQ ID NO: 28128 - RNA, 19 nt, synthetic construct
  source 1..19: mol_type = other RNA
cagcactgtgggggtgtgg

SEQ ID NO: 28129 - RNA, 19 nt, synthetic construct
  source 1..19: mol_type = other RNA
ccggagtggaggagggcat

SEQ ID NO: 28130 - RNA, 19 nt, synthetic construct
  source 1..19: mol_type = other RNA
cttccggtcccaggacacg

SEQ ID NO: 28131 - RNA, 19 nt, synthetic construct
  source 1..19: mol_type = other RNA
gatgggcaggtgcttgttc

SEQ ID NO: 28132 - RNA, 19 nt, synthetic construct
  source 1..19: mol_type = other RNA
caggctggggaagacagtg

SEQ ID NO: 28133 - RNA, 19 nt, synthetic construct
  source 1..19: mol_type = other RNA
cgggttcagggggctcagg

SEQ ID NO: 28134 - RNA, 19 nt, synthetic construct
  source 1..19: mol_type = other RNA
ccagccggatgctgacctt

SEQ ID NO: 28135 - RNA, 19 nt, synthetic construct
  source 1..19: mol_type = other RNA
accagccggatgctgacct

SEQ ID NO: 28136 - RNA, 19 nt, synthetic construct
  source 1..19: mol_type = other RNA
tgggtgcaggggcactgcc

SEQ ID NO: 28137 - RNA, 19 nt, synthetic construct
  source 1..19: mol_type = other RNA
gtgtccccgccgtccaggc

SEQ ID NO: 28138 - RNA, 19 nt, synthetic construct
  source 1..19: mol_type = other RNA
gcggggtccagcctgacaa

SEQ ID NO: 28139 - RNA, 19 nt, synthetic construct
  source 1..19: mol_type = other RNA
tcctcaaagctgttcctgg

SEQ ID NO: 28140 - RNA, 19 nt, synthetic construct
  source 1..19: mol_type = other RNA
gtcctcaaagctgttcctg

SEQ ID NO: 28141 - RNA, 19 nt, synthetic construct
  source 1..19: mol_type = other RNA
gcgtcattgaggaaggtgc

SEQ ID NO: 28142 - RNA, 19 nt, synthetic construct
  source 1..19: mol_type = other RNA
cgcgtcattgaggaaggtg

SEQ ID NO: 28143 - RNA, 19 nt, synthetic construct
  source 1..19: mol_type = other RNA
agcttgatggccttggagc

SEQ ID NO: 28144 - RNA, 19 nt, synthetic construct
  source 1..19: mol_type = other RNA
gaagagcttgatggccttg

SEQ ID NO: 28145 - RNA, 19 nt, synthetic construct
  source 1..19: mol_type = other RNA
tcgggtagcagccttccag

SEQ ID NO: 28146 - RNA, 19 nt, synthetic construct
  source 1..19: mol_type = other RNA
cagttacagctctggcagt

SEQ ID NO: 28147 - RNA, 19 nt, synthetic construct
  source 1..19: mol_type = other RNA
aggcacagcaggctccgtg

SEQ ID NO: 28148 - RNA, 19 nt, synthetic construct
  source 1..19: mol_type = other RNA
ggggcctgagctggaccca

SEQ ID NO: 28149 - RNA, 19 nt, synthetic construct
  source 1..19: mol_type = other RNA
gtccactgacaccggggct

SEQ ID NO: 28150 - RNA, 19 nt, synthetic construct
  source 1..19: mol_type = other RNA
cccctccaagttgttcaga

SEQ ID NO: 28151 - RNA, 19 nt, synthetic construct
  source 1..19: mol_type = other RNA
cagttcctgcacaccaggc

SEQ ID NO: 28152 - RNA, 19 nt, synthetic construct
  source 1..19: mol_type = other RNA
gccacccctgggacagtgg

SEQ ID NO: 28153 - RNA, 19 nt, synthetic construct
  source 1..19: mol_type = other RNA
tggatgtggccacccctgg

SEQ ID NO: 28154 - RNA, 19 nt, synthetic construct
  source 1..19: mol_type = other RNA
agctctggaggttgccatt

SEQ ID NO: 28155 - RNA, 19 nt, synthetic construct
  source 1..19: mol_type = other RNA
gtggtcctggaggtggccg

SEQ ID NO: 28156 - RNA, 19 nt, synthetic construct
  source 1..19: mol_type = other RNA
caggcacactggggctcac

SEQ ID NO: 28157 - RNA, 19 nt, synthetic construct
  source 1..19: mol_type = other RNA
gtccccggagtggaggagg

SEQ ID NO: 28158 - RNA, 19 nt, synthetic construct
  source 1..19: mol_type = other RNA
caggcacactggggctcac

SEQ ID NO: 28159 - RNA, 19 nt, synthetic construct
  source 1..19: mol_type = other RNA
caggcacactggggctcac

SEQ ID NO: 28160 - RNA, 19 nt, synthetic construct
  source 1..19: mol_type = other RNA
gtggtcctggaggtggccg

SEQ ID NO: 28161 - RNA, 19 nt, synthetic construct
  source 1..19: mol_type = other RNA
caggcacactggggctcac

SEQ ID NO: 28162 - RNA, 19 nt, synthetic construct
  source 1..19: mol_type = other RNA
gtccccggagtggaggagg

SEQ ID NO: 28163 - RNA, 19 nt, synthetic construct
  source 1..19: mol_type = other RNA
gagaagtgggagctgggga

SEQ ID NO: 28164 - RNA, 19 nt, synthetic construct
  source 1..19: mol_type = other RNA
gtagagaagtgggagctgg

SEQ ID NO: 28165 - RNA, 19 nt, synthetic construct
  source 1..19: mol_type = other RNA
caaatgccctgcagaagca

SEQ ID NO: 28166 - RNA, 19 nt, synthetic construct
  source 1..19: mol_type = other RNA
gttgtggaagaggctgtag

SEQ ID NO: 28167 - RNA, 19 nt, synthetic construct
  source 1..19: mol_type = other RNA
tcgccagtcactgcacact

SEQ ID NO: 28168 - RNA, 19 nt, synthetic construct
  source 1..19: mol_type = other RNA
ttgggtcctgggtgtcccc

SEQ ID NO: 28169 - RNA, 19 nt, synthetic construct
  source 1..19: mol_type = other RNA
tcctcacaggagtagcagc

SEQ ID NO: 28170 - RNA, 19 nt, synthetic construct
  source 1..19: mol_type = other RNA
ctgcatggcctgggcctct

SEQ ID NO: 28171 - RNA, 19 nt, synthetic construct
  source 1..19: mol_type = other RNA
gtccccgccgtccaggctg

SEQ ID NO: 28172 - RNA, 19 nt, synthetic construct
  source 1..19: mol_type = other RNA
ggtgccccgcagggctggt

SEQ ID NO: 28173 - RNA, 19 nt, synthetic construct
  source 1..19: mol_type = other RNA
cgtgtccccgccgtccagg

SEQ ID NO: 28174 - RNA, 19 nt, synthetic construct
  source 1..19: mol_type = other RNA
aggcaggtccaccaggcag

SEQ ID NO: 28175 - RNA, 19 nt, synthetic construct
  source 1..19: mol_type = other RNA
caaaccactctgtccactg

SEQ ID NO: 28176 - RNA, 19 nt, synthetic construct
  source 1..19: mol_type = other RNA
tagttgaagcacatcttga

SEQ ID NO: 28177 - RNA, 19 nt, synthetic construct
  source 1..19: mol_type = other RNA
tagttgaagcacatcttga

SEQ ID NO: 28178 - RNA, 19 nt, synthetic construct
  source 1..19: mol_type = other RNA
tagttgaagcacatcttga

SEQ ID NO: 28179 - RNA, 19 nt, synthetic construct
  source 1..19: mol_type = other RNA
tagttgaagcacatcttga

SEQ ID NO: 28180 - RNA, 19 nt, synthetic construct
  source 1..19: mol_type = other RNA
cagctccagcagggcactg

SEQ ID NO: 28181 - RNA, 19 nt, synthetic construct
  source 1..19: mol_type = other RNA
tgcaggttcccaaactgga

SEQ ID NO: 28182 - RNA, 19 nt, synthetic construct
  source 1..19: mol_type = other RNA
gcagcggcacaggtcctgg

SEQ ID NO: 28183 - RNA, 19 nt, synthetic construct
  source 1..19: mol_type = other RNA
cgtgcacataggaggacag

SEQ ID NO: 28184 - RNA, 19 nt, synthetic construct
  source 1..19: mol_type = other RNA
cggacacgcagtgtgtgct

SEQ ID NO: 28185 - RNA, 19 nt, synthetic construct
  source 1..19: mol_type = other RNA
gtgcaggcctcaaggctgt

SEQ ID NO: 28186 - RNA, 19 nt, synthetic construct
  source 1..19: mol_type = other RNA
gcagggggacaccaggctg

SEQ ID NO: 28187 - RNA, 19 nt, synthetic construct
  source 1..19: mol_type = other RNA
gcagggggacaccaggctg

SEQ ID NO: 28188 - RNA, 19 nt, synthetic construct
  source 1..19: mol_type = other RNA
gcagggggacaccaggctg

SEQ ID NO: 28189 - RNA, 19 nt, synthetic construct
  source 1..19: mol_type = other RNA
cgtggtcctggaggtggcc

SEQ ID NO: 28190 - RNA, 19 nt, synthetic construct
  source 1..19: mol_type = other RNA
acaggccacaggtctggtt

SEQ ID NO: 28191 - RNA, 19 nt, synthetic construct
  source 1..19: mol_type = other RNA
acgggcaggtggggcagcg

SEQ ID NO: 28192 - RNA, 19 nt, synthetic construct
  source 1..19: mol_type = other RNA
tggtggccgtggtggtcag

SEQ ID NO: 28193 - RNA, 19 nt, synthetic construct
  source 1..19: mol_type = other RNA
ccccgccgtccaggctgag

SEQ ID NO: 28194 - RNA, 19 nt, synthetic construct
  source 1..19: mol_type = other RNA
gaagcagggagtagagaag

SEQ ID NO: 28195 - RNA, 19 nt, synthetic construct
  source 1..19: mol_type = other RNA
aacttctgcaggttcccaa

SEQ ID NO: 28196 - RNA, 19 nt, synthetic construct
  source 1..19: mol_type = other RNA
ggcacaggtcctgggcgca

SEQ ID NO: 28197 - RNA, 19 nt, synthetic construct
  source 1..19: mol_type = other RNA
tgtccccgccgtccaggct

SEQ ID NO: 28198 - RNA, 19 nt, synthetic construct
  source 1..19: mol_type = other RNA
gggtcctcaaagctgttcc

SEQ ID NO: 28199 - RNA, 19 nt, synthetic construct
  source 1..19: mol_type = other RNA
tgtgcttttctgcagagag

SEQ ID NO: 28200 - RNA, 19 nt, synthetic construct
  source 1..19: mol_type = other RNA
tggctgcactcccacctcc

SEQ ID NO: 28201 - RNA, 19 nt, synthetic construct
  source 1..19: mol_type = other RNA
ccaggacatgccacagcct

SEQ ID NO: 28202 - RNA, 19 nt, synthetic construct
  source 1..19: mol_type = other RNA
acttggggtagtcctcatc

SEQ ID NO: 28203 - RNA, 19 nt, synthetic construct
  source 1..19: mol_type = other RNA
gagctctggaggttgccat

SEQ ID NO: 28204 - RNA, 19 nt, synthetic construct
  source 1..19: mol_type = other RNA
tagaggagggtgttgccat

SEQ ID NO: 28205 - RNA, 19 nt, synthetic construct
  source 1..19: mol_type = other RNA
tggtcctggaggtggccgt

SEQ ID NO: 28206 - RNA, 19 nt, synthetic construct
  source 1..19: mol_type = other RNA
tagaggagggtgttgccat

SEQ ID NO: 28207 - RNA, 19 nt, synthetic construct
  source 1..19: mol_type = other RNA
tagaggagggtgttgccat

SEQ ID NO: 28208 - RNA, 19 nt, synthetic construct
  source 1..19: mol_type = other RNA
tagaggagggtgttgccat

SEQ ID NO: 28209 - RNA, 19 nt, synthetic construct
  source 1..19: mol_type = other RNA
tggtcctggaggtggccgt

SEQ ID NO: 28210 - RNA, 19 nt, synthetic construct
  source 1..19: mol_type = other RNA
tagaggagggtgttgccat

SEQ ID NO: 28211 - RNA, 19 nt, synthetic construct
  source 1..19: mol_type = other RNA
gttcctgcacaccaggccg

SEQ ID NO: 28212 - RNA, 19 nt, synthetic construct
  source 1..19: mol_type = other RNA
aaaccactctgtccactca

SEQ ID NO: 28213 - RNA, 19 nt, synthetic construct
  source 1..19: mol_type = other RNA
tctggtcctcattgaagaa

SEQ ID NO: 28214 - RNA, 19 nt, synthetic construct
  source 1..19: mol_type = other RNA
tgttggctgccgacagggg

SEQ ID NO: 28215 - RNA, 19 nt, synthetic construct
  source 1..19: mol_type = other RNA
cacacaggccgcacatctg

SEQ ID NO: 28216 - RNA, 19 nt, synthetic construct
  source 1..19: mol_type = other RNA
cttgctgaaaccgctgctc

SEQ ID NO: 28217 - RNA, 19 nt, synthetic construct
  source 1..19: mol_type = other RNA
cacgcaggactggcagttg

SEQ ID NO: 28218 - RNA, 19 nt, synthetic construct
  source 1..19: mol_type = other RNA
ggggctcaggctggggaag

SEQ ID NO: 28219 - RNA, 19 nt, synthetic construct
  source 1..19: mol_type = other RNA
gcaggtgcaggagctgcag

SEQ ID NO: 28220 - RNA, 19 nt, synthetic construct
  source 1..19: mol_type = other RNA
tccccgccgtccaggctga

SEQ ID NO: 28221 - RNA, 19 nt, synthetic construct
  source 1..19: mol_type = other RNA
gccgacaggggcagctgcg

SEQ ID NO: 28222 - RNA, 19 nt, synthetic construct
  source 1..19: mol_type = other RNA
ctgggccttccaggtgttg

SEQ ID NO: 28223 - RNA, 19 nt, synthetic construct
  source 1..19: mol_type = other RNA
ggcgtagttctcattctcc

SEQ ID NO: 28224 - RNA, 19 nt, synthetic construct
  source 1..19: mol_type = other RNA
cacaccctgtgcttttctg

SEQ ID NO: 28225 - RNA, 19 nt, synthetic construct
  source 1..19: mol_type = other RNA
aggcagagccggtggctgc

SEQ ID NO: 28226 - RNA, 19 nt, synthetic construct
  source 1..19: mol_type = other RNA
acctgggagcggcaggcgg

SEQ ID NO: 28227 - RNA, 19 nt, synthetic construct
  source 1..19: mol_type = other RNA
tgctcccagttcctgcaca

SEQ ID NO: 28228 - RNA, 19 nt, synthetic construct
  source 1..19: mol_type = other RNA
ctggaggagggggtggctg

SEQ ID NO: 28229 - RNA, 19 nt, synthetic construct
  source 1..19: mol_type = other RNA
ctggaggagggggtggctg

SEQ ID NO: 28230 - RNA, 19 nt, synthetic construct
  source 1..19: mol_type = other RNA
ctggagtggaggagggcgt

SEQ ID NO: 28231 - RNA, 19 nt, synthetic construct
  source 1..19: mol_type = other RNA
tccctggagtggaggaggg

SEQ ID NO: 28232 - RNA, 19 nt, synthetic construct
  source 1..19: mol_type = other RNA
ctggaggagggggtggctg

SEQ ID NO: 28233 - RNA, 19 nt, synthetic construct
  source 1..19: mol_type = other RNA
gatgggagttgtccctgga

SEQ ID NO: 28234 - RNA, 19 nt, synthetic construct
  source 1..19: mol_type = other RNA
ctggaggagggggtggctg

SEQ ID NO: 28235 - RNA, 19 nt, synthetic construct
  source 1..19: mol_type = other RNA
cccagagtggaggagggtg

SEQ ID NO: 28236 - RNA, 19 nt, synthetic construct
  source 1..19: mol_type = other RNA
ctgcagaagcagggagtag

SEQ ID NO: 28237 - RNA, 19 nt, synthetic construct
  source 1..19: mol_type = other RNA
ttgttgtggaagaggctgt

SEQ ID NO: 28238 - RNA, 19 nt, synthetic construct
  source 1..19: mol_type = other RNA
ggggggcagaagcagccgt

SEQ ID NO: 28239 - RNA, 19 nt, synthetic construct
  source 1..19: mol_type = other RNA
gaggggcaggcagccagag

SEQ ID NO: 28240 - RNA, 19 nt, synthetic construct
  source 1..19: mol_type = other RNA
ttcaggcagttctcgttgt

SEQ ID NO: 28241 - RNA, 19 nt, synthetic construct
  source 1..19: mol_type = other RNA
cgtgtagatggagttgagg

SEQ ID NO: 28242 - RNA, 19 nt, synthetic construct
  source 1..19: mol_type = other RNA
ccgacaggggcagctgcgt

SEQ ID NO: 28243 - RNA, 19 nt, synthetic construct
  source 1..19: mol_type = other RNA
ttggctgccgacaggggca

SEQ ID NO: 28244 - RNA, 19 nt, synthetic construct
  source 1..19: mol_type = other RNA
agggtgatgttggctgccg

SEQ ID NO: 28245 - RNA, 19 nt, synthetic construct
  source 1..19: mol_type = other RNA
gccttccaggtgttggcga

SEQ ID NO: 28246 - RNA, 19 nt, synthetic construct
  source 1..19: mol_type = other RNA
ggggcaggtgcagccgtcc

SEQ ID NO: 28247 - RNA, 19 nt, synthetic construct
  source 1..19: mol_type = other RNA
ccaggagccagcacggtgc

SEQ ID NO: 28248 - RNA, 19 nt, synthetic construct
  source 1..19: mol_type = other RNA
ctcggccccaggggtgccc

SEQ ID NO: 28249 - RNA, 19 nt, synthetic construct
  source 1..19: mol_type = other RNA
ggggacagacacagccgga

SEQ ID NO: 28250 - RNA, 19 nt, synthetic construct
  source 1..19: mol_type = other RNA
gagcaggtggtgccggtgg

SEQ ID NO: 28251 - RNA, 19 nt, synthetic construct
  source 1..19: mol_type = other RNA
gatgaccaggaagatcccc

SEQ ID NO: 28252 - RNA, 19 nt, synthetic construct
  source 1..19: mol_type = other RNA
ggcagggtgccccgcaggg

SEQ ID NO: 28253 - RNA, 19 nt, synthetic construct
  source 1..19: mol_type = other RNA
ccaccaggcagtgcccact

SEQ ID NO: 28254 - RNA, 19 nt, synthetic construct
  source 1..19: mol_type = other RNA
ccaggccaggcaggtccac

SEQ ID NO: 28255 - RNA, 19 nt, synthetic construct
  source 1..19: mol_type = other RNA
gccttccaggccaggcagg

SEQ ID NO: 28256 - RNA, 19 nt, synthetic construct
  source 1..19: mol_type = other RNA
acgcacttcatctggtcct

SEQ ID NO: 28257 - RNA, 19 nt, synthetic construct
  source 1..19: mol_type = other RNA
gttggggaagctctcggcc

SEQ ID NO: 28258 - RNA, 19 nt, synthetic construct
  source 1..19: mol_type = other RNA
ggtggggactgctgtggtg

SEQ ID NO: 28259 - RNA, 19 nt, synthetic construct
  source 1..19: mol_type = other RNA
ccctgggacagtgggttct

SEQ ID NO: 28260 - RNA, 19 nt, synthetic construct
  source 1..19: mol_type = other RNA
gtggtggccgtggtggtca

SEQ ID NO: 28261 - RNA, 19 nt, synthetic construct
  source 1..19: mol_type = other RNA
gtgggtgtggtggctgtgc

SEQ ID NO: 28262 - RNA, 19 nt, synthetic construct
  source 1..19: mol_type = other RNA
caggggctgctcacagacg

SEQ ID NO: 28263 - RNA, 19 nt, synthetic construct
  source 1..19: mol_type = other RNA
aggcccaggggctgctcac

SEQ ID NO: 28264 - RNA, 19 nt, synthetic construct
  source 1..19: mol_type = other RNA
acatcttgaacttccccac

SEQ ID NO: 28265 - RNA, 19 nt, synthetic construct
  source 1..19: mol_type = other RNA
gtgggtgtggtggctgtgc

SEQ ID NO: 28266 - RNA, 19 nt, synthetic construct
  source 1..19: mol_type = other RNA
gtggccgtggtcctggagg

SEQ ID NO: 28267 - RNA, 19 nt, synthetic construct
  source 1..19: mol_type = other RNA
caggggctgctcacagacg

SEQ ID NO: 28268 - RNA, 19 nt, synthetic construct
  source 1..19: mol_type = other RNA
aggcccaggggctgctcac

SEQ ID NO: 28269 - RNA, 19 nt, synthetic construct
  source 1..19: mol_type = other RNA
acatcttgaacttccccac

SEQ ID NO: 28270 - RNA, 19 nt, synthetic construct
  source 1..19: mol_type = other RNA
gtgggtgtggtggctgtgc

SEQ ID NO: 28271 - RNA, 19 nt, synthetic construct
  source 1..19: mol_type = other RNA
aggcccaggggctgctcac

SEQ ID NO: 28272 - RNA, 19 nt, synthetic construct
  source 1..19: mol_type = other RNA
acatcttgaacttccccac

SEQ ID NO: 28273 - RNA, 19 nt, synthetic construct
  source 1..19: mol_type = other RNA
gtgggtgtggtggctgtgc

SEQ ID NO: 28274 - RNA, 19 nt, synthetic construct
  source 1..19: mol_type = other RNA
gtggccgtggtcctggagg

SEQ ID NO: 28275 - RNA, 19 nt, synthetic construct
  source 1..19: mol_type = other RNA
caggggctgctcacagacg

SEQ ID NO: 28276 - RNA, 19 nt, synthetic construct
  source 1..19: mol_type = other RNA
aggcccaggggctgctcac

SEQ ID NO: 28277 - RNA, 19 nt, synthetic construct
  source 1..19: mol_type = other RNA
acatcttgaacttccccac

SEQ ID NO: 28278 - RNA, 19 nt, synthetic construct
  source 1..19: mol_type = other RNA
gtgggtgtggtggctgtgc

SEQ ID NO: 28279 - RNA, 19 nt, synthetic construct
  source 1..19: mol_type = other RNA
ccccagagtggaggagggt

SEQ ID NO: 28280 - RNA, 19 nt, synthetic construct
  source 1..19: mol_type = other RNA
ccctgcagaagcagggagt

SEQ ID NO: 28281 - RNA, 19 nt, synthetic construct
  source 1..19: mol_type = other RNA
ttgtggaagaggctgtagg

SEQ ID NO: 28282 - RNA, 19 nt, synthetic construct
  source 1..19: mol_type = other RNA
gcaggtgcactggtgctgc

SEQ ID NO: 28283 - RNA, 19 nt, synthetic construct
  source 1..19: mol_type = other RNA
gggagccatgggcgcaggg

SEQ ID NO: 28284 - RNA, 19 nt, synthetic construct
  source 1..19: mol_type = other RNA
ccgggcactgctccgtggg

SEQ ID NO: 28285 - RNA, 19 nt, synthetic construct
  source 1..19: mol_type = other RNA
ggtgccagggcacggcagg

SEQ ID NO: 28286 - RNA, 19 nt, synthetic construct
  source 1..19: mol_type = other RNA
ttctggttgaagttcccac

SEQ ID NO: 28287 - RNA, 19 nt, synthetic construct
  source 1..19: mol_type = other RNA
tcggccccaggggtgcccg

SEQ ID NO: 28288 - RNA, 19 nt, synthetic construct
  source 1..19: mol_type = other RNA
aggtgcaggtgttgcagtc

SEQ ID NO: 28289 - RNA, 19 nt, synthetic construct
  source 1..19: mol_type = other RNA
ttggagcaggtggtgccgg

SEQ ID NO: 28290 - RNA, 19 nt, synthetic construct
  source 1..19: mol_type = other RNA
tcccaggacacggccatcc

SEQ ID NO: 28291 - RNA, 19 nt, synthetic construct
  source 1..19: mol_type = other RNA
ccaggcagtgcccactggg

SEQ ID NO: 28292 - RNA, 19 nt, synthetic construct
  source 1..19: mol_type = other RNA
agttgaagcacatcttgaa

SEQ ID NO: 28293 - RNA, 19 nt, synthetic construct
  source 1..19: mol_type = other RNA
tcagcactgtgggggtgtg

SEQ ID NO: 28294 - RNA, 19 nt, synthetic construct
  source 1..19: mol_type = other RNA
agttgaagcacatcttgaa

SEQ ID NO: 28295 - RNA, 19 nt, synthetic construct
  source 1..19: mol_type = other RNA
agttgaagcacatcttgaa

SEQ ID NO: 28296 - RNA, 19 nt, synthetic construct
  source 1..19: mol_type = other RNA
tcagcactgtgggggtgtg

SEQ ID NO: 28297 - RNA, 19 nt, synthetic construct
  source 1..19: mol_type = other RNA
agttgaagcacatcttgaa

SEQ ID NO: 28298 - RNA, 19 nt, synthetic construct
  source 1..19: mol_type = other RNA
cggtgttgttgtggaagag

SEQ ID NO: 28299 - RNA, 19 nt, synthetic construct
  source 1..19: mol_type = other RNA
ttcagggggctcaggctgg

SEQ ID NO: 28300 - RNA, 19 nt, synthetic construct
  source 1..19: mol_type = other RNA
gcactgtcctctccgttcc

SEQ ID NO: 28301 - RNA, 19 nt, synthetic construct
  source 1..19: mol_type = other RNA
ggtgcaggtgttgcagtcg

SEQ ID NO: 28302 - RNA, 19 nt, synthetic construct
  source 1..19: mol_type = other RNA
gcaggtggtgccggtggtc

SEQ ID NO: 28303 - RNA, 19 nt, synthetic construct
  source 1..19: mol_type = other RNA
tccgtgctggcactgaggg

SEQ ID NO: 28304 - RNA, 19 nt, synthetic construct
  source 1..19: mol_type = other RNA
ttgggaagtccacgtcaaa

SEQ ID NO: 28305 - RNA, 19 nt, synthetic construct
  source 1..19: mol_type = other RNA
tgtggaagaggctgtaggg

SEQ ID NO: 28306 - RNA, 19 nt, synthetic construct
  source 1..19: mol_type = other RNA
tgtccccagagaggcaggt

SEQ ID NO: 28307 - RNA, 19 nt, synthetic construct
  source 1..19: mol_type = other RNA
gcggcacaggtcctgggcg

SEQ ID NO: 28308 - RNA, 19 nt, synthetic construct
  source 1..19: mol_type = other RNA
ggtggggcagcggcacagg

SEQ ID NO: 28309 - RNA, 19 nt, synthetic construct
  source 1..19: mol_type = other RNA
tggccctggtgggcggggt

SEQ ID NO: 28310 - RNA, 19 nt, synthetic construct
  source 1..19: mol_type = other RNA
tgaaacagcccacgtccag

SEQ ID NO: 28311 - RNA, 19 nt, synthetic construct
  source 1..19: mol_type = other RNA
cgccatcaaaggtgatgaa

SEQ ID NO: 28312 - RNA, 19 nt, synthetic construct
  source 1..19: mol_type = other RNA
acgaagagcttgatggcct

SEQ ID NO: 28313 - RNA, 19 nt, synthetic construct
  source 1..19: mol_type = other RNA
tgcccttgtagtcctggtg

SEQ ID NO: 28314 - RNA, 19 nt, synthetic construct
  source 1..19: mol_type = other RNA
gcaggtccaccaggcagtg

SEQ ID NO: 28315 - RNA, 19 nt, synthetic construct
  source 1..19: mol_type = other RNA
ggccaggcaggtccaccag

SEQ ID NO: 28316 - RNA, 19 nt, synthetic construct
  source 1..19: mol_type = other RNA
caggccaggcaggtccacc

SEQ ID NO: 28317 - RNA, 19 nt, synthetic construct
  source 1..19: mol_type = other RNA
cagctggaccagcggcaga

SEQ ID NO: 28318 - RNA, 19 nt, synthetic construct
  source 1..19: mol_type = other RNA
accagctggaccagcggca

SEQ ID NO: 28319 - RNA, 19 nt, synthetic construct
  source 1..19: mol_type = other RNA
tgggctggaggagggggtg

SEQ ID NO: 28320 - RNA, 19 nt, synthetic construct
  source 1..19: mol_type = other RNA
gtggtccctagggcagagg

SEQ ID NO: 28321 - RNA, 19 nt, synthetic construct
  source 1..19: mol_type = other RNA
tgggctggaggagggggtg

SEQ ID NO: 28322 - RNA, 19 nt, synthetic construct
  source 1..19: mol_type = other RNA
gtggtccctagggcagagg

SEQ ID NO: 28323 - RNA, 19 nt, synthetic construct
  source 1..19: mol_type = other RNA
tgggctggaggagggggtg

SEQ ID NO: 28324 - RNA, 19 nt, synthetic construct
  source 1..19: mol_type = other RNA
gtggtccctagggcagagg

SEQ ID NO: 28325 - RNA, 19 nt, synthetic construct
  source 1..19: mol_type = other RNA
gtggtccctagggcagagg

SEQ ID NO: 28326 - RNA, 19 nt, synthetic construct
  source 1..19: mol_type = other RNA
tgggctggaggagggggtg

SEQ ID NO: 28327 - RNA, 19 nt, synthetic construct
  source 1..19: mol_type = other RNA
cagaagcagggagtagaga

SEQ ID NO: 28328 - RNA, 19 nt, synthetic construct
  source 1..19: mol_type = other RNA
tgcagaagcagggagtaga

SEQ ID NO: 28329 - RNA, 19 nt, synthetic construct
  source 1..19: mol_type = other RNA
gttctccagggtccaggtc

SEQ ID NO: 28330 - RNA, 19 nt, synthetic construct
  source 1..19: mol_type = other RNA
tggtgctgcatggcctggg

SEQ ID NO: 28331 - RNA, 19 nt, synthetic construct
  source 1..19: mol_type = other RNA
ctggtgctgcatggcctgg

SEQ ID NO: 28332 - RNA, 19 nt, synthetic construct
  source 1..19: mol_type = other RNA
cagcaggtgcactggtgct

SEQ ID NO: 28333 - RNA, 19 nt, synthetic construct
  source 1..19: mol_type = other RNA
gctggggaagacagtgacg

SEQ ID NO: 28334 - RNA, 19 nt, synthetic construct
  source 1..19: mol_type = other RNA
aggctggggaagacagtga

SEQ ID NO: 28335 - RNA, 19 nt, synthetic construct
  source 1..19: mol_type = other RNA
tcaggctggggaagacagt

SEQ ID NO: 28336 - RNA, 19 nt, synthetic construct
  source 1..19: mol_type = other RNA
gggggctcaggctggggaa

SEQ ID NO: 28337 - RNA, 19 nt, synthetic construct
  source 1..19: mol_type = other RNA
gttcagggggctcaggctg

SEQ ID NO: 28338 - RNA, 19 nt, synthetic construct
  source 1..19: mol_type = other RNA
gaccacaggcctggagccc

SEQ ID NO: 28339 - RNA, 19 nt, synthetic construct
  source 1..19: mol_type = other RNA
ggtgaccacaggcctggag

SEQ ID NO: 28340 - RNA, 19 nt, synthetic construct
  source 1..19: mol_type = other RNA
agcccctgggccttgatga

SEQ ID NO: 28341 - RNA, 19 nt, synthetic construct
  source 1..19: mol_type = other RNA
cagcccctgggccttgatg

SEQ ID NO: 28342 - RNA, 19 nt, synthetic construct
  source 1..19: mol_type = other RNA
ccagcccctgggccttgat

SEQ ID NO: 28343 - RNA, 19 nt, synthetic construct
  source 1..19: mol_type = other RNA
aggcagctcctcccgctgc

SEQ ID NO: 28344 - RNA, 19 nt, synthetic construct
  source 1..19: mol_type = other RNA
aaggcagctcctcccgctg

SEQ ID NO: 28345 - RNA, 19 nt, synthetic construct
  source 1..19: mol_type = other RNA
gctccagcagggcactgtc

SEQ ID NO: 28346 - RNA, 19 nt, synthetic construct
  source 1..19: mol_type = other RNA
cgggcaggtggggcagcgg

SEQ ID NO: 28347 - RNA, 19 nt, synthetic construct
  source 1..19: mol_type = other RNA
cacgggcaggtggggcagc

SEQ ID NO: 28348 - RNA, 19 nt, synthetic construct
  source 1..19: mol_type = other RNA
ctgggggttggagcaggtg

SEQ ID NO: 28349 - RNA, 19 nt, synthetic construct
  source 1..19: mol_type = other RNA
gctgggggttggagcaggt

SEQ ID NO: 28350 - RNA, 19 nt, synthetic construct
  source 1..19: mol_type = other RNA
cgctgggggttggagcagg

SEQ ID NO: 28351 - RNA, 19 nt, synthetic construct
  source 1..19: mol_type = other RNA
cgcgctgggggttggagca

SEQ ID NO: 28352 - RNA, 19 nt, synthetic construct
  source 1..19: mol_type = other RNA
tgcctggggggcagaagca

SEQ ID NO: 28353 - RNA, 19 nt, synthetic construct
  source 1..19: mol_type = other RNA
ggggcaggcagccagagtg

SEQ ID NO: 28354 - RNA, 19 nt, synthetic construct
  source 1..19: mol_type = other RNA
aggggcaggcagccagagt

SEQ ID NO: 28355 - RNA, 19 nt, synthetic construct
  source 1..19: mol_type = other RNA
actgcccgaggggcaggca

SEQ ID NO: 28356 - RNA, 19 nt, synthetic construct
  source 1..19: mol_type = other RNA
gcactgcccgaggggcagg

SEQ ID NO: 28357 - RNA, 19 nt, synthetic construct
  source 1..19: mol_type = other RNA
ggggcactgcccgaggggc

SEQ ID NO: 28358 - RNA, 19 nt, synthetic construct
  source 1..19: mol_type = other RNA
caggggcactgcccgaggg

SEQ ID NO: 28359 - RNA, 19 nt, synthetic construct
  source 1..19: mol_type = other RNA
aggagctgcaggtggtgtt

SEQ ID NO: 28360 - RNA, 19 nt, synthetic construct
  source 1..19: mol_type = other RNA
aggtgcaggagctgcaggt

SEQ ID NO: 28361 - RNA, 19 nt, synthetic construct
  source 1..19: mol_type = other RNA
caggtgcaggagctgcagg

SEQ ID NO: 28362 - RNA, 19 nt, synthetic construct
  source 1..19: mol_type = other RNA
acggcaggtcctggcactg

SEQ ID NO: 28363 - RNA, 19 nt, synthetic construct
  source 1..19: mol_type = other RNA
gatgtgggccccgccctgc

SEQ ID NO: 28364 - RNA, 19 nt, synthetic construct
  source 1..19: mol_type = other RNA
cgacaggggcagctgcgtg

SEQ ID NO: 28365 - RNA, 19 nt, synthetic construct
  source 1..19: mol_type = other RNA
ctgcaccagcagctgcagc

SEQ ID NO: 28366 - RNA, 19 nt, synthetic construct
  source 1..19: mol_type = other RNA
gcaccagctgcaccagcag

SEQ ID NO: 28367 - RNA, 19 nt, synthetic construct
  source 1..19: mol_type = other RNA
ggggtccagcctgacaaac

SEQ ID NO: 28368 - RNA, 19 nt, synthetic construct
  source 1..19: mol_type = other RNA
gtgggcggggtccagcctg

SEQ ID NO: 28369 - RNA, 19 nt, synthetic construct
  source 1..19: mol_type = other RNA
ggccctggtgggcggggtc

SEQ ID NO: 28370 - RNA, 19 nt, synthetic construct
  source 1..19: mol_type = other RNA
atctggccctggtgggcgg

SEQ ID NO: 28371 - RNA, 19 nt, synthetic construct
  source 1..19: mol_type = other RNA
gcacatctggccctggtgg

SEQ ID NO: 28372 - RNA, 19 nt, synthetic construct
  source 1..19: mol_type = other RNA
cacaggccgcacatctggc

SEQ ID NO: 28373 - RNA, 19 nt, synthetic construct
  source 1..19: mol_type = other RNA
agggagcaggggtcctcaa

SEQ ID NO: 28374 - RNA, 19 nt, synthetic construct
  source 1..19: mol_type = other RNA
ctgagggagcaggggtcct

SEQ ID NO: 28375 - RNA, 19 nt, synthetic construct
  source 1..19: mol_type = other RNA
cgagtggaagggcttgggg

SEQ ID NO: 28376 - RNA, 19 nt, synthetic construct
  source 1..19: mol_type = other RNA
tcgagtggaagggcttggg

SEQ ID NO: 28377 - RNA, 19 nt, synthetic construct
  source 1..19: mol_type = other RNA
tctgcatgtacttggtgca

SEQ ID NO: 28378 - RNA, 19 nt, synthetic construct
  source 1..19: mol_type = other RNA
gggacttggggcagttctg

SEQ ID NO: 28379 - RNA, 19 nt, synthetic construct
  source 1..19: mol_type = other RNA
ctctccaggagccagcacg

SEQ ID NO: 28380 - RNA, 19 nt, synthetic construct
  source 1..19: mol_type = other RNA
cctctccaggagccagcac

SEQ ID NO: 28381 - RNA, 19 nt, synthetic construct
  source 1..19: mol_type = other RNA
acctctccaggagccagca

SEQ ID NO: 28382 - RNA, 19 nt, synthetic construct
  source 1..19: mol_type = other RNA
acaccctgtgcttttctgc

SEQ ID NO: 28383 - RNA, 19 nt, synthetic construct
  source 1..19: mol_type = other RNA
cggaggcactcggccccag

SEQ ID NO: 28384 - RNA, 19 nt, synthetic construct
  source 1..19: mol_type = other RNA
cgggggacagacacagccg

SEQ ID NO: 28385 - RNA, 19 nt, synthetic construct
  source 1..19: mol_type = other RNA
cccgggggacagacacagc

SEQ ID NO: 28386 - RNA, 19 nt, synthetic construct
  source 1..19: mol_type = other RNA
ggctgcactcccacctccg

SEQ ID NO: 28387 - RNA, 19 nt, synthetic construct
  source 1..19: mol_type = other RNA
cccaggcagagccggtggc

SEQ ID NO: 28388 - RNA, 19 nt, synthetic construct
  source 1..19: mol_type = other RNA
gcccaggcagagccggtgg

SEQ ID NO: 28389 - RNA, 19 nt, synthetic construct
  source 1..19: mol_type = other RNA
tgcccaggcagagccggtg

SEQ ID NO: 28390 - RNA, 19 nt, synthetic construct
  source 1..19: mol_type = other RNA
gcaggtgcccaggcagagc

SEQ ID NO: 28391 - RNA, 19 nt, synthetic construct
  source 1..19: mol_type = other RNA
cgcaggtgcccaggcagag

SEQ ID NO: 28392 - RNA, 19 nt, synthetic construct
  source 1..19: mol_type = other RNA
cacgcaggtgcccaggcag

SEQ ID NO: 28393 - RNA, 19 nt, synthetic construct
  source 1..19: mol_type = other RNA
ggccacgcaggtgcccagg

SEQ ID NO: 28394 - RNA, 19 nt, synthetic construct
  source 1..19: mol_type = other RNA
cgaagagcttgatggcctt

SEQ ID NO: 28395 - RNA, 19 nt, synthetic construct
  source 1..19: mol_type = other RNA
gtctcgatgaccaggaaga

SEQ ID NO: 28396 - RNA, 19 nt, synthetic construct
  source 1..19: mol_type = other RNA
ggtctcgatgaccaggaag

SEQ ID NO: 28397 - RNA, 19 nt, synthetic construct
  source 1..19: mol_type = other RNA
gtcccaggacacggccatc

SEQ ID NO: 28398 - RNA, 19 nt, synthetic construct
  source 1..19: mol_type = other RNA
ggtcccaggacacggccat

SEQ ID NO: 28399 - RNA, 19 nt, synthetic construct
  source 1..19: mol_type = other RNA
tgtagtcctggtgcagtcg

SEQ ID NO: 28400 - RNA, 19 nt, synthetic construct
  source 1..19: mol_type = other RNA
ggagcggcaggcggcgaag

SEQ ID NO: 28401 - RNA, 19 nt, synthetic construct
  source 1..19: mol_type = other RNA
cctgggagcggcaggcggc

SEQ ID NO: 28402 - RNA, 19 nt, synthetic construct
  source 1..19: mol_type = other RNA
cagggtgccccgcagggct

SEQ ID NO: 28403 - RNA, 19 nt, synthetic construct
  source 1..19: mol_type = other RNA
accaggcagtgcccactgg

SEQ ID NO: 28404 - RNA, 19 nt, synthetic construct
  source 1..19: mol_type = other RNA
caggtccaccaggcagtgc

SEQ ID NO: 28405 - RNA, 19 nt, synthetic construct
  source 1..19: mol_type = other RNA
caggcaggtccaccaggca

SEQ ID NO: 28406 - RNA, 19 nt, synthetic construct
  source 1..19: mol_type = other RNA
aggccaggcaggtccacca

SEQ ID NO: 28407 - RNA, 19 nt, synthetic construct
  source 1..19: mol_type = other RNA
ttccaggccaggcaggtcc

SEQ ID NO: 28408 - RNA, 19 nt, synthetic construct
  source 1..19: mol_type = other RNA
cttccaggccaggcaggtc

SEQ ID NO: 28409 - RNA, 19 nt, synthetic construct
  source 1..19: mol_type = other RNA
agccttccaggccaggcag

SEQ ID NO: 28410 - RNA, 19 nt, synthetic construct
  source 1..19: mol_type = other RNA
gcagccttccaggccaggc

SEQ ID NO: 28411 - RNA, 19 nt, synthetic construct
  source 1..19: mol_type = other RNA
tgaagaagggctggctggg

SEQ ID NO: 28412 - RNA, 19 nt, synthetic construct
  source 1..19: mol_type = other RNA
cattgaagaagggctggct

SEQ ID NO: 28413 - RNA, 19 nt, synthetic construct
  source 1..19: mol_type = other RNA
cgcacttcatctggtcctc

SEQ ID NO: 28414 - RNA, 19 nt, synthetic construct
  source 1..19: mol_type = other RNA
gcaggtgcaggcctcaagg

SEQ ID NO: 28415 - RNA, 19 nt, synthetic construct
  source 1..19: mol_type = other RNA
ggtgcaggtgcaggcctca

SEQ ID NO: 28416 - RNA, 19 nt, synthetic construct
  source 1..19: mol_type = other RNA
caggacatgccacagcctt

SEQ ID NO: 28417 - RNA, 19 nt, synthetic construct
  source 1..19: mol_type = other RNA
ggagggccgggcttgtcgt

SEQ ID NO: 28418 - RNA, 19 nt, synthetic construct
  source 1..19: mol_type = other RNA
gggagggccgggcttgtcg

SEQ ID NO: 28419 - RNA, 19 nt, synthetic construct
  source 1..19: mol_type = other RNA
gtccacctgctggcccagc

SEQ ID NO: 28420 - RNA, 19 nt, synthetic construct
  source 1..19: mol_type = other RNA
agtccacctgctggcccag

SEQ ID NO: 28421 - RNA, 19 nt, synthetic construct
  source 1..19: mol_type = other RNA
cagtccacctgctggccca

SEQ ID NO: 28422 - RNA, 19 nt, synthetic construct
  source 1..19: mol_type = other RNA
acagtccacctgctggccc

SEQ ID NO: 28423 - RNA, 19 nt, synthetic construct
  source 1..19: mol_type = other RNA
gctggcactgagggagggc

SEQ ID NO: 28424 - RNA, 19 nt, synthetic construct
  source 1..19: mol_type = other RNA
cgtgctggcactgagggag

SEQ ID NO: 28425 - RNA, 19 nt, synthetic construct
  source 1..19: mol_type = other RNA
ctggcaggtggtggtacct

SEQ ID NO: 28426 - RNA, 19 nt, synthetic construct
  source 1..19: mol_type = other RNA
ccggggctggcaggtggtg

SEQ ID NO: 28427 - RNA, 19 nt, synthetic construct
  source 1..19: mol_type = other RNA
acaccggggctggcaggtg

SEQ ID NO: 28428 - RNA, 19 nt, synthetic construct
  source 1..19: mol_type = other RNA
ccctccaagttgttcagac

SEQ ID NO: 28429 - RNA, 19 nt, synthetic construct
  source 1..19: mol_type = other RNA
agttcctgcacaccaggcc

SEQ ID NO: 28430 - RNA, 19 nt, synthetic construct
  source 1..19: mol_type = other RNA
cctgctcccagttcctgca

SEQ ID NO: 28431 - RNA, 19 nt, synthetic construct
  source 1..19: mol_type = other RNA
ggtggtggtggtggccgtc

SEQ ID NO: 28432 - RNA, 19 nt, synthetic construct
  source 1..19: mol_type = other RNA
agagggtggggactgctgt

SEQ ID NO: 28433 - RNA, 19 nt, synthetic construct
  source 1..19: mol_type = other RNA
gagagggtggggactgctg

SEQ ID NO: 28434 - RNA, 19 nt, synthetic construct
  source 1..19: mol_type = other RNA
cctgggacagtgggttctg

SEQ ID NO: 28435 - RNA, 19 nt, synthetic construct
  source 1..19: mol_type = other RNA
tggccacccctgggacagt

SEQ ID NO: 28436 - RNA, 19 nt, synthetic construct
  source 1..19: mol_type = other RNA
tgtgggtgtggtggctgtg

SEQ ID NO: 28437 - RNA, 19 nt, synthetic construct
  source 1..19: mol_type = other RNA
ggtagctgtgggtgtggtg

SEQ ID NO: 28438 - RNA, 19 nt, synthetic construct
  source 1..19: mol_type = other RNA
gctggaggagggggtggct

SEQ ID NO: 28439 - RNA, 19 nt, synthetic construct
  source 1..19: mol_type = other RNA
ggctggaggagggggtggc

SEQ ID NO: 28440 - RNA, 19 nt, synthetic construct
  source 1..19: mol_type = other RNA
gggctggaggagggggtgg

SEQ ID NO: 28441 - RNA, 19 nt, synthetic construct
  source 1..19: mol_type = other RNA
ctgggctggaggagggggt

SEQ ID NO: 28442 - RNA, 19 nt, synthetic construct
  source 1..19: mol_type = other RNA
ggtggctgcaggtgtggtg

SEQ ID NO: 28443 - RNA, 19 nt, synthetic construct
  source 1..19: mol_type = other RNA
tggtggctgcaggtgtggt

SEQ ID NO: 28444 - RNA, 19 nt, synthetic construct
  source 1..19: mol_type = other RNA
ctggtggctgcaggtgtgg

SEQ ID NO: 28445 - RNA, 19 nt, synthetic construct
  source 1..19: mol_type = other RNA
gctggtggctgcaggtgtg

SEQ ID NO: 28446 - RNA, 19 nt, synthetic construct
  source 1..19: mol_type = other RNA
ctgggcagcagggtcgagg

SEQ ID NO: 28447 - RNA, 19 nt, synthetic construct
  source 1..19: mol_type = other RNA
gctgggcagcagggtcgag

SEQ ID NO: 28448 - RNA, 19 nt, synthetic construct
  source 1..19: mol_type = other RNA
tgctgggcagcagggtcga

SEQ ID NO: 28449 - RNA, 19 nt, synthetic construct
  source 1..19: mol_type = other RNA
ctgctgggcagcagggtcg

SEQ ID NO: 28450 - RNA, 19 nt, synthetic construct
  source 1..19: mol_type = other RNA
tgtggggctgctgggcagc

SEQ ID NO: 28451 - RNA, 19 nt, synthetic construct
  source 1..19: mol_type = other RNA
gatgtggggctgctgggca

SEQ ID NO: 28452 - RNA, 19 nt, synthetic construct
  source 1..19: mol_type = other RNA
cgatgtggggctgctgggc

SEQ ID NO: 28453 - RNA, 19 nt, synthetic construct
  source 1..19: mol_type = other RNA
tgggggccgatgtggggct

SEQ ID NO: 28454 - RNA, 19 nt, synthetic construct
  source 1..19: mol_type = other RNA
gcacactggggctcacagc

SEQ ID NO: 28455 - RNA, 19 nt, synthetic construct
  source 1..19: mol_type = other RNA
ccaggcacactggggctca

SEQ ID NO: 28456 - RNA, 19 nt, synthetic construct
  source 1..19: mol_type = other RNA
ggcccaggggctgctcaca

SEQ ID NO: 28457 - RNA, 19 nt, synthetic construct
  source 1..19: mol_type = other RNA
ggacaccaggctgggcctg

SEQ ID NO: 28458 - RNA, 19 nt, synthetic construct
  source 1..19: mol_type = other RNA
ggggacaccaggctgggcc

SEQ ID NO: 28459 - RNA, 19 nt, synthetic construct
  source 1..19: mol_type = other RNA
aagcacatcttgaacttcc

SEQ ID NO: 28460 - RNA, 19 nt, synthetic construct
  source 1..19: mol_type = other RNA
gtggccggggtgctggggc

SEQ ID NO: 28461 - RNA, 19 nt, synthetic construct
  source 1..19: mol_type = other RNA
tggtggccggggtgctggg

SEQ ID NO: 28462 - RNA, 19 nt, synthetic construct
  source 1..19: mol_type = other RNA
ctggtggccggggtgctgg

SEQ ID NO: 28463 - RNA, 19 nt, synthetic construct
  source 1..19: mol_type = other RNA
cgtccccggagtggaggag

SEQ ID NO: 28464 - RNA, 19 nt, synthetic construct
  source 1..19: mol_type = other RNA
tgtgggtgtggtggctgtg

SEQ ID NO: 28465 - RNA, 19 nt, synthetic construct
  source 1..19: mol_type = other RNA
ggtagctgtgggtgtggtg

SEQ ID NO: 28466 - RNA, 19 nt, synthetic construct
  source 1..19: mol_type = other RNA
gctggaggagggggtggct

SEQ ID NO: 28467 - RNA, 19 nt, synthetic construct
  source 1..19: mol_type = other RNA
ggctggaggagggggtggc

SEQ ID NO: 28468 - RNA, 19 nt, synthetic construct
  source 1..19: mol_type = other RNA
gggctggaggagggggtgg

SEQ ID NO: 28469 - RNA, 19 nt, synthetic construct
  source 1..19: mol_type = other RNA
ctgggctggaggagggggt

SEQ ID NO: 28470 - RNA, 19 nt, synthetic construct
  source 1..19: mol_type = other RNA
ggtggctgcaggtgtggtg

SEQ ID NO: 28471 - RNA, 19 nt, synthetic construct
  source 1..19: mol_type = other RNA
tggtggctgcaggtgtggt

SEQ ID NO: 28472 - RNA, 19 nt, synthetic construct
  source 1..19: mol_type = other RNA
ctggtggctgcaggtgtgg

SEQ ID NO: 28473 - RNA, 19 nt, synthetic construct
  source 1..19: mol_type = other RNA
gctggtggctgcaggtgtg

SEQ ID NO: 28474 - RNA, 19 nt, synthetic construct
  source 1..19: mol_type = other RNA
ggccgtggtcctggaggtg

SEQ ID NO: 28475 - RNA, 19 nt, synthetic construct
  source 1..19: mol_type = other RNA
tggccgtggtcctggaggt

SEQ ID NO: 28476 - RNA, 19 nt, synthetic construct
  source 1..19: mol_type = other RNA
ctgggcagcagggtcgagg

SEQ ID NO: 28477 - RNA, 19 nt, synthetic construct
  source 1..19: mol_type = other RNA
gctgggcagcagggtcgag

SEQ ID NO: 28478 - RNA, 19 nt, synthetic construct
  source 1..19: mol_type = other RNA
tgctgggcagcagggtcga

SEQ ID NO: 28479 - RNA, 19 nt, synthetic construct
  source 1..19: mol_type = other RNA
ctgctgggcagcagggtcg

SEQ ID NO: 28480 - RNA, 19 nt, synthetic construct
  source 1..19: mol_type = other RNA
tgtggggctgctgggcagc

SEQ ID NO: 28481 - RNA, 19 nt, synthetic construct
  source 1..19: mol_type = other RNA
gatgtggggctgctgggca

SEQ ID NO: 28482 - RNA, 19 nt, synthetic construct
  source 1..19: mol_type = other RNA
cgatgtggggctgctgggc

SEQ ID NO: 28483 - RNA, 19 nt, synthetic construct
  source 1..19: mol_type = other RNA
gcacactggggctcacagc

SEQ ID NO: 28484 - RNA, 19 nt, synthetic construct
  source 1..19: mol_type = other RNA
ccaggcacactggggctca

SEQ ID NO: 28485 - RNA, 19 nt, synthetic construct
  source 1..19: mol_type = other RNA
ggcccaggggctgctcaca

SEQ ID NO: 28486 - RNA, 19 nt, synthetic construct
  source 1..19: mol_type = other RNA
ggacaccaggctgggcctg

SEQ ID NO: 28487 - RNA, 19 nt, synthetic construct
  source 1..19: mol_type = other RNA
ggggacaccaggctgggcc

SEQ ID NO: 28488 - RNA, 19 nt, synthetic construct
  source 1..19: mol_type = other RNA
aagcacatcttgaacttcc

SEQ ID NO: 28489 - RNA, 19 nt, synthetic construct
  source 1..19: mol_type = other RNA
gtggccggggtgctggggc

SEQ ID NO: 28490 - RNA, 19 nt, synthetic construct
  source 1..19: mol_type = other RNA
tggtggccggggtgctggg

SEQ ID NO: 28491 - RNA, 19 nt, synthetic construct
  source 1..19: mol_type = other RNA
ctggtggccggggtgctgg

SEQ ID NO: 28492 - RNA, 19 nt, synthetic construct
  source 1..19: mol_type = other RNA
gagtggaggagggcgtggc

SEQ ID NO: 28493 - RNA, 19 nt, synthetic construct
  source 1..19: mol_type = other RNA
ggagtggaggagggcgtgg

SEQ ID NO: 28494 - RNA, 19 nt, synthetic construct
  source 1..19: mol_type = other RNA
cgtccccggagtggaggag

SEQ ID NO: 28495 - RNA, 19 nt, synthetic construct
  source 1..19: mol_type = other RNA
tgtgggtgtggtggctgtg

SEQ ID NO: 28496 - RNA, 19 nt, synthetic construct
  source 1..19: mol_type = other RNA
ggtagctgtgggtgtggtg

SEQ ID NO: 28497 - RNA, 19 nt, synthetic construct
  source 1..19: mol_type = other RNA
gctggaggagggggtggct

SEQ ID NO: 28498 - RNA, 19 nt, synthetic construct
  source 1..19: mol_type = other RNA
ggctggaggagggggtggc

SEQ ID NO: 28499 - RNA, 19 nt, synthetic construct
  source 1..19: mol_type = other RNA
gggctggaggagggggtgg

SEQ ID NO: 28500 - RNA, 19 nt, synthetic construct
  source 1..19: mol_type = other RNA
ctgggctggaggagggggt

SEQ ID NO: 28501 - RNA, 19 nt, synthetic construct
  source 1..19: mol_type = other RNA
ggtggctgcaggtgtggtg

SEQ ID NO: 28502 - RNA, 19 nt, synthetic construct
  source 1..19: mol_type = other RNA
tggtggctgcaggtgtggt

SEQ ID NO: 28503 - RNA, 19 nt, synthetic construct
  source 1..19: mol_type = other RNA
ctggtggctgcaggtgtgg

SEQ ID NO: 28504 - RNA, 19 nt, synthetic construct
  source 1..19: mol_type = other RNA
gctggtggctgcaggtgtg

SEQ ID NO: 28505 - RNA, 19 nt, synthetic construct
  source 1..19: mol_type = other RNA
ctgggcagcagggtcgagg

SEQ ID NO: 28506 - RNA, 19 nt, synthetic construct
  source 1..19: mol_type = other RNA
gctgggcagcagggtcgag

SEQ ID NO: 28507 - RNA, 19 nt, synthetic construct
  source 1..19: mol_type = other RNA
tgctgggcagcagggtcga

SEQ ID NO: 28508 - RNA, 19 nt, synthetic construct
  source 1..19: mol_type = other RNA
ctgctgggcagcagggtcg

SEQ ID NO: 28509 - RNA, 19 nt, synthetic construct
  source 1..19: mol_type = other RNA
tgtggggctgctgggcagc

SEQ ID NO: 28510 - RNA, 19 nt, synthetic construct
  source 1..19: mol_type = other RNA
gatgtggggctgctgggca

SEQ ID NO: 28511 - RNA, 19 nt, synthetic construct
  source 1..19: mol_type = other RNA
cgatgtggggctgctgggc

SEQ ID NO: 28512 - RNA, 19 nt, synthetic construct
  source 1..19: mol_type = other RNA
tgggggccgatgtggggct

SEQ ID NO: 28513 - RNA, 19 nt, synthetic construct
  source 1..19: mol_type = other RNA
gcacactggggctcacagc

SEQ ID NO: 28514 - RNA, 19 nt, synthetic construct
  source 1..19: mol_type = other RNA
ccaggcacactggggctca

SEQ ID NO: 28515 - RNA, 19 nt, synthetic construct
  source 1..19: mol_type = other RNA
ggcccaggggctgctcaca

SEQ ID NO: 28516 - RNA, 19 nt, synthetic construct
  source 1..19: mol_type = other RNA
ggacaccaggctgggcctg

SEQ ID NO: 28517 - RNA, 19 nt, synthetic construct
  source 1..19: mol_type = other RNA
ggggacaccaggctgggcc

SEQ ID NO: 28518 - RNA, 19 nt, synthetic construct
  source 1..19: mol_type = other RNA
aagcacatcttgaacttcc

SEQ ID NO: 28519 - RNA, 19 nt, synthetic construct
  source 1..19: mol_type = other RNA
gtggccggggtgctggggc

SEQ ID NO: 28520 - RNA, 19 nt, synthetic construct
  source 1..19: mol_type = other RNA
tggtggccggggtgctggg

SEQ ID NO: 28521 - RNA, 19 nt, synthetic construct
  source 1..19: mol_type = other RNA
ctggtggccggggtgctgg

SEQ ID NO: 28522 - RNA, 19 nt, synthetic construct
  source 1..19: mol_type = other RNA
tgtgggtgtggtggctgtg

SEQ ID NO: 28523 - RNA, 19 nt, synthetic construct
  source 1..19: mol_type = other RNA
ggtagctgtgggtgtggtg

SEQ ID NO: 28524 - RNA, 19 nt, synthetic construct
  source 1..19: mol_type = other RNA
ggtggctgcaggtgtggtg

SEQ ID NO: 28525 - RNA, 19 nt, synthetic construct
  source 1..19: mol_type = other RNA
tggtggctgcaggtgtggt

SEQ ID NO: 28526 - RNA, 19 nt, synthetic construct
  source 1..19: mol_type = other RNA
ctggtggctgcaggtgtgg

SEQ ID NO: 28527 - RNA, 19 nt, synthetic construct
  source 1..19: mol_type = other RNA
gctggtggctgcaggtgtg

SEQ ID NO: 28528 - RNA, 19 nt, synthetic construct
  source 1..19: mol_type = other RNA
ccgtggtcctggaggtggc

SEQ ID NO: 28529 - RNA, 19 nt, synthetic construct
  source 1..19: mol_type = other RNA
ggccgtggtcctggaggtg

SEQ ID NO: 28530 - RNA, 19 nt, synthetic construct
  source 1..19: mol_type = other RNA
tggccgtggtcctggaggt

SEQ ID NO: 28531 - RNA, 19 nt, synthetic construct
  source 1..19: mol_type = other RNA
ctgggcagcagggtcgagg

SEQ ID NO: 28532 - RNA, 19 nt, synthetic construct
  source 1..19: mol_type = other RNA
gctgggcagcagggtcgag

SEQ ID NO: 28533 - RNA, 19 nt, synthetic construct
  source 1..19: mol_type = other RNA
tgctgggcagcagggtcga

SEQ ID NO: 28534 - RNA, 19 nt, synthetic construct
  source 1..19: mol_type = other RNA
ctgctgggcagcagggtcg

SEQ ID NO: 28535 - RNA, 19 nt, synthetic construct
  source 1..19: mol_type = other RNA
tgtggggctgctgggcagc

SEQ ID NO: 28536 - RNA, 19 nt, synthetic construct
  source 1..19: mol_type = other RNA
gatgtggggctgctgggca

SEQ ID NO: 28537 - RNA, 19 nt, synthetic construct
  source 1..19: mol_type = other RNA
cgatgtggggctgctgggc

SEQ ID NO: 28538 - RNA, 19 nt, synthetic construct
  source 1..19: mol_type = other RNA
tgggggccgatgtggggct

SEQ ID NO: 28539 - RNA, 19 nt, synthetic construct
  source 1..19: mol_type = other RNA
gcacactggggctcacagc

SEQ ID NO: 28540 - RNA, 19 nt, synthetic construct
  source 1..19: mol_type = other RNA
ccaggcacactggggctca

SEQ ID NO: 28541 - RNA, 19 nt, synthetic construct
  source 1..19: mol_type = other RNA
ggcccaggggctgctcaca

SEQ ID NO: 28542 - RNA, 19 nt, synthetic construct
  source 1..19: mol_type = other RNA
ggacaccaggctgggcctg

SEQ ID NO: 28543 - RNA, 19 nt, synthetic construct
  source 1..19: mol_type = other RNA
ggggacaccaggctgggcc

SEQ ID NO: 28544 - RNA, 19 nt, synthetic construct
  source 1..19: mol_type = other RNA
aagcacatcttgaacttcc

SEQ ID NO: 28545 - RNA, 19 nt, synthetic construct
  source 1..19: mol_type = other RNA
gtggccggggtgctggggc

SEQ ID NO: 28546 - RNA, 19 nt, synthetic construct
  source 1..19: mol_type = other RNA
tggtggccggggtgctggg

SEQ ID NO: 28547 - RNA, 19 nt, synthetic construct
  source 1..19: mol_type = other RNA
ctggtggccggggtgctgg

SEQ ID NO: 28548 - RNA, 19 nt, synthetic construct
  source 1..19: mol_type = other RNA
cgtccccggagtggaggag

SEQ ID NO: 28549 - RNA, 19 nt, synthetic construct
  source 1..19: mol_type = other RNA
cgtccccggagtggaggag

SEQ ID NO: 28550 - RNA, 19 nt, synthetic construct
  source 1..19: mol_type = other RNA
tgtgggtgtggtggctgtg

SEQ ID NO: 28551 - RNA, 19 nt, synthetic construct
  source 1..19: mol_type = other RNA
ggtagctgtgggtgtggtg

SEQ ID NO: 28552 - RNA, 19 nt, synthetic construct
  source 1..19: mol_type = other RNA
gctggaggagggggtggct

SEQ ID NO: 28553 - RNA, 19 nt, synthetic construct
  source 1..19: mol_type = other RNA
ggctggaggagggggtggc

SEQ ID NO: 28554 - RNA, 19 nt, synthetic construct
  source 1..19: mol_type = other RNA
gggctggaggagggggtgg

SEQ ID NO: 28555 - RNA, 19 nt, synthetic construct
  source 1..19: mol_type = other RNA
ctgggctggaggagggggt

SEQ ID NO: 28556 - RNA, 19 nt, synthetic construct
  source 1..19: mol_type = other RNA
agagtggaggagggtgtgg

SEQ ID NO: 28557 - RNA, 19 nt, synthetic construct
  source 1..19: mol_type = other RNA
ccagagtggaggagggtgt

SEQ ID NO: 28558 - RNA, 19 nt, synthetic construct
  source 1..19: mol_type = other RNA
gcaggctgctggggagcac

SEQ ID NO: 28559 - RNA, 19 nt, synthetic construct
  source 1..19: mol_type = other RNA
tggcaggctgctggggagc

SEQ ID NO: 28560 - RNA, 19 nt, synthetic construct
  source 1..19: mol_type = other RNA
actgaggaggacacagtgg

SEQ ID NO: 28561 - RNA, 19 nt, synthetic construct
  source 1..19: mol_type = other RNA
tgaggactgaggaggacac

SEQ ID NO: 28562 - RNA, 19 nt, synthetic construct
  source 1..19: mol_type = other RNA
tagagaagtgggagctggg

SEQ ID NO: 28563 - RNA, 19 nt, synthetic construct
  source 1..19: mol_type = other RNA
agaagcagggagtagagaa

SEQ ID NO: 28564 - RNA, 19 nt, synthetic construct
  source 1..19: mol_type = other RNA
gccctgcagaagcagggag

SEQ ID NO: 28565 - RNA, 19 nt, synthetic construct
  source 1..19: mol_type = other RNA
tgccctgcagaagcaggga

SEQ ID NO: 28566 - RNA, 19 nt, synthetic construct
  source 1..19: mol_type = other RNA
aatgccctgcagaagcagg

SEQ ID NO: 28567 - RNA, 19 nt, synthetic construct
  source 1..19: mol_type = other RNA
ccaaatgccctgcagaagc

SEQ ID NO: 28568 - RNA, 19 nt, synthetic construct
  source 1..19: mol_type = other RNA
acagccaggggcaggggag

SEQ ID NO: 28569 - RNA, 19 nt, synthetic construct
  source 1..19: mol_type = other RNA
cacagccaggggcagggga

SEQ ID NO: 28570 - RNA, 19 nt, synthetic construct
  source 1..19: mol_type = other RNA
tcacagccaggggcagggg

SEQ ID NO: 28571 - RNA, 19 nt, synthetic construct
  source 1..19: mol_type = other RNA
tggcattgtcacagccagg

SEQ ID NO: 28572 - RNA, 19 nt, synthetic construct
  source 1..19: mol_type = other RNA
cagttctccagggtccagg

SEQ ID NO: 28573 - RNA, 19 nt, synthetic construct
  source 1..19: mol_type = other RNA
cgcacctggccaccgtgca

SEQ ID NO: 28574 - RNA, 19 nt, synthetic construct
  source 1..19: mol_type = other RNA
cggaatttggtcaaacagg

SEQ ID NO: 28575 - RNA, 19 nt, synthetic construct
  source 1..19: mol_type = other RNA
tgtagggcagccgggcctg

SEQ ID NO: 28576 - RNA, 19 nt, synthetic construct
  source 1..19: mol_type = other RNA
gctcagcatcagatcacag

SEQ ID NO: 28577 - RNA, 19 nt, synthetic construct
  source 1..19: mol_type = other RNA
acctggctcagcatcagat

SEQ ID NO: 28578 - RNA, 19 nt, synthetic construct
  source 1..19: mol_type = other RNA
cctccaggctctggcaggg

SEQ ID NO: 28579 - RNA, 19 nt, synthetic construct
  source 1..19: mol_type = other RNA
gcctccaggctctggcagg

SEQ ID NO: 28580 - RNA, 19 nt, synthetic construct
  source 1..19: mol_type = other RNA
cacacgcaggactggcagt

SEQ ID NO: 28581 - RNA, 19 nt, synthetic construct
  source 1..19: mol_type = other RNA
tcctgggtgtccccagaga

SEQ ID NO: 28582 - RNA, 19 nt, synthetic construct
  source 1..19: mol_type = other RNA
gtcctgggtgtccccagag

SEQ ID NO: 28583 - RNA, 19 nt, synthetic construct
  source 1..19: mol_type = other RNA
ctcttgtactcaaagccct

SEQ ID NO: 28584 - RNA, 19 nt, synthetic construct
  source 1..19: mol_type = other RNA
actccccacagcactgccc

SEQ ID NO: 28585 - RNA, 19 nt, synthetic construct
  source 1..19: mol_type = other RNA
caggctgtggggtcagcaa

SEQ ID NO: 28586 - RNA, 19 nt, synthetic construct
  source 1..19: mol_type = other RNA
gatgcaggctgtggggtca

SEQ ID NO: 28587 - RNA, 19 nt, synthetic construct
  source 1..19: mol_type = other RNA
aggatgcaggctgtggggt

SEQ ID NO: 28588 - RNA, 19 nt, synthetic construct
  source 1..19: mol_type = other RNA
gcaggatgcaggctgtggg

SEQ ID NO: 28589 - RNA, 19 nt, synthetic construct
  source 1..19: mol_type = other RNA
ggcaggatgcaggctgtgg

SEQ ID NO: 28590 - RNA, 19 nt, synthetic construct
  source 1..19: mol_type = other RNA
ggctccccctgcagctgga

SEQ ID NO: 28591 - RNA, 19 nt, synthetic construct
  source 1..19: mol_type = other RNA
tgaggctccccctgcagct

SEQ ID NO: 28592 - RNA, 19 nt, synthetic construct
  source 1..19: mol_type = other RNA
gttttcctgaggctccccc

SEQ ID NO: 28593 - RNA, 19 nt, synthetic construct
  source 1..19: mol_type = other RNA
gctgcatggcctgggcctc

SEQ ID NO: 28594 - RNA, 19 nt, synthetic construct
  source 1..19: mol_type = other RNA
gtgctgcatggcctgggcc

SEQ ID NO: 28595 - RNA, 19 nt, synthetic construct
  source 1..19: mol_type = other RNA
ggtgctgcatggcctgggc

SEQ ID NO: 28596 - RNA, 19 nt, synthetic construct
  source 1..19: mol_type = other RNA
gtgcactggtgctgcatgg

SEQ ID NO: 28597 - RNA, 19 nt, synthetic construct
  source 1..19: mol_type = other RNA
tggcagcaggtgcactggt

SEQ ID NO: 28598 - RNA, 19 nt, synthetic construct
  source 1..19: mol_type = other RNA
cctggcagcaggtgcactg

SEQ ID NO: 28599 - RNA, 19 nt, synthetic construct
  source 1..19: mol_type = other RNA
ctctcctggcagcaggtgc

SEQ ID NO: 28600 - RNA, 19 nt, synthetic construct
  source 1..19: mol_type = other RNA
caccagccccgggggacag

SEQ ID NO: 28601 - RNA, 19 nt, synthetic construct
  source 1..19: mol_type = other RNA
ttctgcaggttcccaaact

SEQ ID NO: 28602 - RNA, 19 nt, synthetic construct
  source 1..19: mol_type = other RNA
ccaactcccgcagggggac

SEQ ID NO: 28603 - RNA, 19 nt, synthetic construct
  source 1..19: mol_type = other RNA
ccaactcccgcagggggac

SEQ ID NO: 28604 - RNA, 19 nt, synthetic construct
  source 1..19: mol_type = other RNA
ccaactcccgcagggggac

SEQ ID NO: 28605 - RNA, 19 nt, synthetic construct
  source 1..19: mol_type = other RNA
tctgggcaggatgcaggct

SEQ ID NO: 28606 - RNA, 19 nt, synthetic construct
  source 1..19: mol_type = other RNA
gtccaccaggcagtgccca

SEQ ID NO: 28607 - RNA, 19 nt, synthetic construct
  source 1..19: mol_type = other RNA
gtccctgggctggaggagg

SEQ ID NO: 28608 - RNA, 19 nt, synthetic construct
  source 1..19: mol_type = other RNA
gtccctgggctggaggagg

SEQ ID NO: 28609 - RNA, 19 nt, synthetic construct
  source 1..19: mol_type = other RNA
gtccctgggctggaggagg

SEQ ID NO: 28610 - RNA, 19 nt, synthetic construct
  source 1..19: mol_type = other RNA
gtccctgggctggaggagg

SEQ ID NO: 28611 - RNA, 19 nt, synthetic construct
  source 1..19: mol_type = other RNA
gtccctgggctggaggagg

SEQ ID NO: 28612 - RNA, 19 nt, synthetic construct
  source 1..19: mol_type = other RNA
aggctccccctgcagctgg

SEQ ID NO: 28613 - RNA, 19 nt, synthetic construct
  source 1..19: mol_type = other RNA
ttctccagggtccaggtct

SEQ ID NO: 28614 - RNA, 19 nt, synthetic construct
  source 1..19: mol_type = other RNA
tgggcgtaggcagccacag

SEQ ID NO: 28615 - RNA, 19 nt, synthetic construct
  source 1..19: mol_type = other RNA
tctccagggtccaggtctc

SEQ ID NO: 28616 - RNA, 19 nt, synthetic construct
  source 1..19: mol_type = other RNA
ggtgcccaggcagagccgg

SEQ ID NO: 28617 - RNA, 19 nt, synthetic construct
  source 1..19: mol_type = other RNA
aggtgcccaggcagagccg

SEQ ID NO: 28618 - RNA, 19 nt, synthetic construct
  source 1..19: mol_type = other RNA
gggtcctgggtgtccccag

SEQ ID NO: 28619 - RNA, 19 nt, synthetic construct
  source 1..19: mol_type = other RNA
gtgcaggagctgcaggtgg

SEQ ID NO: 28620 - RNA, 19 nt, synthetic construct
  source 1..19: mol_type = other RNA
ggtgcaggagctgcaggtg

SEQ ID NO: 28621 - RNA, 19 nt, synthetic construct
  source 1..19: mol_type = other RNA
tgggtcctgggtgtcccca

SEQ ID NO: 28622 - RNA, 19 nt, synthetic construct
  source 1..19: mol_type = other RNA
cctgaggctccccctgcag

SEQ ID NO: 28623 - RNA, 19 nt, synthetic construct
  source 1..19: mol_type = other RNA
ctcgatgaccaggaagatc

SEQ ID NO: 28624 - RNA, 19 nt, synthetic construct
  source 1..19: mol_type = other RNA
caggtttttaggcagggtg

SEQ ID NO: 28625 - RNA, 19 nt, synthetic construct
  source 1..19: mol_type = other RNA
accagccccgggggacaga

SEQ ID NO: 28626 - RNA, 19 nt, synthetic construct
  source 1..19: mol_type = other RNA
tgtaccagctggaccagcg

SEQ ID NO: 28627 - RNA, 19 nt, synthetic construct
  source 1..19: mol_type = other RNA
ttgttggtgcaggtgccgc

SEQ ID NO: 28628 - RNA, 19 nt, synthetic construct
  source 1..19: mol_type = other RNA
ttgtaccagctggaccagc

SEQ ID NO: 28629 - RNA, 19 nt, synthetic construct
  source 1..19: mol_type = other RNA
ggtgcaggtgccgcactgg

SEQ ID NO: 28630 - RNA, 19 nt, synthetic construct
  source 1..19: mol_type = other RNA
gccccgggggacagacaca

SEQ ID NO: 28631 - RNA, 19 nt, synthetic construct
  source 1..19: mol_type = other RNA
acaccagccccgggggaca

SEQ ID NO: 28632 - RNA, 19 nt, synthetic construct
  source 1..19: mol_type = other RNA
gttcccgcacaggccgcag

SEQ ID NO: 28633 - RNA, 19 nt, synthetic construct
  source 1..19: mol_type = other RNA
cagggggctcaggctgggg

SEQ ID NO: 28634 - RNA, 19 nt, synthetic construct
  source 1..19: mol_type = other RNA
tccagctccagcagggcac

SEQ ID NO: 28635 - RNA, 19 nt, synthetic construct
  source 1..19: mol_type = other RNA
cttctgcaggttcccaaac

SEQ ID NO: 28636 - RNA, 19 nt, synthetic construct
  source 1..19: mol_type = other RNA
acttctgcaggttcccaaa

SEQ ID NO: 28637 - RNA, 19 nt, synthetic construct
  source 1..19: mol_type = other RNA
gcaggagctgcaggtggtg

SEQ ID NO: 28638 - RNA, 19 nt, synthetic construct
  source 1..19: mol_type = other RNA
aggccgcacatctggccct

SEQ ID NO: 28639 - RNA, 19 nt, synthetic construct
  source 1..19: mol_type = other RNA
acgcaggtgcccaggcaga

SEQ ID NO: 28640 - RNA, 19 nt, synthetic construct
  source 1..19: mol_type = other RNA
ccgcacaggccgcagaccc

SEQ ID NO: 28641 - RNA, 19 nt, synthetic construct
  source 1..19: mol_type = other RNA
tcccgcacaggccgcagac

SEQ ID NO: 28642 - RNA, 19 nt, synthetic construct
  source 1..19: mol_type = other RNA
aggcagggtgccccgcagg

SEQ ID NO: 28643 - RNA, 19 nt, synthetic construct
  source 1..19: mol_type = other RNA
caggggcaggggagggcga

SEQ ID NO: 28644 - RNA, 19 nt, synthetic construct
  source 1..19: mol_type = other RNA
acaggagtagcagcagccg

SEQ ID NO: 28645 - RNA, 19 nt, synthetic construct
  source 1..19: mol_type = other RNA
gacaggggcagctgcgtgt

SEQ ID NO: 28646 - RNA, 19 nt, synthetic construct
  source 1..19: mol_type = other RNA
cctgggtgtccccagagag

SEQ ID NO: 28647 - RNA, 19 nt, synthetic construct
  source 1..19: mol_type = other RNA
agtggaggagggcgtggcc

SEQ ID NO: 28648 - RNA, 19 nt, synthetic construct
  source 1..19: mol_type = other RNA
ccaggcagagccggtggct

SEQ ID NO: 28649 - RNA, 19 nt, synthetic construct
  source 1..19: mol_type = other RNA
ttgaagaagggctggctgg

SEQ ID NO: 28650 - RNA, 19 nt, synthetic construct
  source 1..19: mol_type = other RNA
gccgtggtcctggaggtgg

SEQ ID NO: 28651 - RNA, 19 nt, synthetic construct
  source 1..19: mol_type = other RNA
gccgtggtcctggaggtgg

SEQ ID NO: 28652 - RNA, 19 nt, synthetic construct
  source 1..19: mol_type = other RNA
tgttgtggaagaggctgta

SEQ ID NO: 28653 - RNA, 19 nt, synthetic construct
  source 1..19: mol_type = other RNA
attgaagaagggctggctg

SEQ ID NO: 28654 - RNA, 19 nt, synthetic construct
  source 1..19: mol_type = other RNA
cacgcacttcatctggtcc

SEQ ID NO: 28655 - RNA, 19 nt, synthetic construct
  source 1..19: mol_type = other RNA
acactggggctcacagccc

SEQ ID NO: 28656 - RNA, 19 nt, synthetic construct
  source 1..19: mol_type = other RNA
acactggggctcacagccc

SEQ ID NO: 28657 - RNA, 19 nt, synthetic construct
  source 1..19: mol_type = other RNA
cagccaggggcaggggagg

SEQ ID NO: 28658 - RNA, 19 nt, synthetic construct
  source 1..19: mol_type = other RNA
acaggggcagctgcgtgta

SEQ ID NO: 28659 - RNA, 19 nt, synthetic construct
  source 1..19: mol_type = other RNA
tgcttttctgcagagaggc

SEQ ID NO: 28660 - RNA, 19 nt, synthetic construct
  source 1..19: mol_type = other RNA
aagaagggctggctgggtg

SEQ ID NO: 28661 - RNA, 19 nt, synthetic construct
  source 1..19: mol_type = other RNA
gaagaagggctggctgggt

SEQ ID NO: 28662 - RNA, 19 nt, synthetic construct
  source 1..19: mol_type = other RNA
gagtagagaagtgggagct

SEQ ID NO: 28663 - RNA, 19 nt, synthetic construct
  source 1..19: mol_type = other RNA
tgttgttgtggaagaggct

SEQ ID NO: 28664 - RNA, 19 nt, synthetic construct
  source 1..19: mol_type = other RNA
ctgggtgtccccagagagg

SEQ ID NO: 28665 - RNA, 19 nt, synthetic construct
  source 1..19: mol_type = other RNA
gggagcggcaggcggcgaa

SEQ ID NO: 28666 - RNA, 19 nt, synthetic construct
  source 1..19: mol_type = other RNA
cgtgcagccacactcatcc

SEQ ID NO: 28667 - RNA, 19 nt, synthetic construct
  source 1..19: mol_type = other RNA
ccgatgtggggctgctggg

SEQ ID NO: 28668 - RNA, 19 nt, synthetic construct
  source 1..19: mol_type = other RNA
ccgatgtggggctgctggg

SEQ ID NO: 28669 - RNA, 19 nt, synthetic construct
  source 1..19: mol_type = other RNA
ccgatgtggggctgctggg

SEQ ID NO: 28670 - RNA, 19 nt, synthetic construct
  source 1..19: mol_type = other RNA
ccgatgtggggctgctggg

SEQ ID NO: 28671 - RNA, 19 nt, synthetic construct
  source 1..19: mol_type = other RNA
tgggagcggcaggcggcga

SEQ ID NO: 28672 - RNA, 19 nt, synthetic construct
  source 1..19: mol_type = other RNA
cctcctgctcccagttcct

SEQ ID NO: 28673 - RNA, 19 nt, synthetic construct
  source 1..19: mol_type = other RNA
gccctcctgctcccagttc

SEQ ID NO: 28674 - RNA, 19 nt, synthetic construct
  source 1..19: mol_type = other RNA
tgcaggagctgcaggtggt

SEQ ID NO: 28675 - RNA, 19 nt, synthetic construct
  source 1..19: mol_type = other RNA
ctgggagcggcaggcggcg

SEQ ID NO: 28676 - RNA, 19 nt, synthetic construct
  source 1..19: mol_type = other RNA
gctggtggccggggtgctg

SEQ ID NO: 28677 - RNA, 19 nt, synthetic construct
  source 1..19: mol_type = other RNA
gctggtggccggggtgctg

SEQ ID NO: 28678 - RNA, 19 nt, synthetic construct
  source 1..19: mol_type = other RNA
gctggtggccggggtgctg

SEQ ID NO: 28679 - RNA, 19 nt, synthetic construct
  source 1..19: mol_type = other RNA
gctggtggccggggtgctg

SEQ ID NO: 28680 - RNA, 19 nt, synthetic construct
  source 1..19: mol_type = other RNA
agccaggggcaggggaggg

SEQ ID NO: 28681 - RNA, 19 nt, synthetic construct
  source 1..19: mol_type = other RNA
actggtgctgcatggcctg

SEQ ID NO: 28682 - RNA, 19 nt, synthetic construct
  source 1..19: mol_type = other RNA
aggtgcaggtgcaggcctc

SEQ ID NO: 28683 - RNA, 19 nt, synthetic construct
  source 1..19: mol_type = other RNA
accacggaccggctacgcg

SEQ ID NO: 28684 - RNA, 19 nt, synthetic construct
  source 1..19: mol_type = other RNA
ctctgtgaggatccaggtg

SEQ ID NO: 28685 - RNA, 19 nt, synthetic construct
  source 1..19: mol_type = other RNA
ctctgtgaggatccaggtg

SEQ ID NO: 28686 - RNA, 19 nt, synthetic construct
  source 1..19: mol_type = other RNA
ctctgtgaggatccaggtg

SEQ ID NO: 28687 - RNA, 19 nt, synthetic construct
  source 1..19: mol_type = other RNA
ctctgtgaggatccaggtg

SEQ ID NO: 28688 - RNA, 19 nt, synthetic construct
  source 1..19: mol_type = other RNA
ctctgtgaggatccaggtg

SEQ ID NO: 28689 - RNA, 19 nt, synthetic construct
  source 1..19: mol_type = other RNA
ctctgtgaggatccaggtg

SEQ ID NO: 28690 - RNA, 19 nt, synthetic construct
  source 1..19: mol_type = other RNA
ttatttgcaaaactgggct

SEQ ID NO: 28691 - RNA, 19 nt, synthetic construct
  source 1..19: mol_type = other RNA
gggttgagcagagggggct

SEQ ID NO: 28692 - RNA, 19 nt, synthetic construct
  source 1..19: mol_type = other RNA
cggctctgtgaggatccag

SEQ ID NO: 28693 - RNA, 19 nt, synthetic construct
  source 1..19: mol_type = other RNA
gggctctgtgaggatccag

SEQ ID NO: 28694 - RNA, 19 nt, synthetic construct
  source 1..19: mol_type = other RNA
cggctctgtgaggatccag

SEQ ID NO: 28695 - RNA, 19 nt, synthetic construct
  source 1..19: mol_type = other RNA
cggctctgtgaggatccag

SEQ ID NO: 28696 - RNA, 19 nt, synthetic construct
  source 1..19: mol_type = other RNA
cggctctgtgaggatccag

SEQ ID NO: 28697 - RNA, 19 nt, synthetic construct
  source 1..19: mol_type = other RNA
ccaaggtgggccacaggct

SEQ ID NO: 28698 - RNA, 19 nt, synthetic construct
  source 1..19: mol_type = other RNA
cacagaagggcgtgcagcc

SEQ ID NO: 28699 - RNA, 19 nt, synthetic construct
  source 1..19: mol_type = other RNA
tgggctgggttgagcagag

SEQ ID NO: 28700 - RNA, 19 nt, synthetic construct
  source 1..19: mol_type = other RNA
gctctgtgaggatccaggt

SEQ ID NO: 28701 - RNA, 19 nt, synthetic construct
  source 1..19: mol_type = other RNA
gctctgtgaggatccaggt

SEQ ID NO: 28702 - RNA, 19 nt, synthetic construct
  source 1..19: mol_type = other RNA
gctctgtgaggatccaggt

SEQ ID NO: 28703 - RNA, 19 nt, synthetic construct
  source 1..19: mol_type = other RNA
gctctgtgaggatccaggt

SEQ ID NO: 28704 - RNA, 19 nt, synthetic construct
  source 1..19: mol_type = other RNA
gctctgtgaggatccaggt

SEQ ID NO: 28705 - RNA, 19 nt, synthetic construct
  source 1..19: mol_type = other RNA
gctctgtgaggatccaggt

SEQ ID NO: 28706 - RNA, 19 nt, synthetic construct
  source 1..19: mol_type = other RNA
gctgggttgagcagagggg

SEQ ID NO: 28707 - RNA, 19 nt, synthetic construct
  source 1..19: mol_type = other RNA
tttgcaaaactgggctggg

SEQ ID NO: 28708 - RNA, 19 nt, synthetic construct
  source 1..19: mol_type = other RNA
tctgtgaggatccaggtgg

SEQ ID NO: 28709 - RNA, 19 nt, synthetic construct
  source 1..19: mol_type = other RNA
tctgtgaggatccaggtgg

SEQ ID NO: 28710 - RNA, 19 nt, synthetic construct
  source 1..19: mol_type = other RNA
tctgtgaggatccaggtgg

SEQ ID NO: 28711 - RNA, 19 nt, synthetic construct
  source 1..19: mol_type = other RNA
tctgtgaggatccaggtgg

SEQ ID NO: 28712 - RNA, 19 nt, synthetic construct
  source 1..19: mol_type = other RNA
tctgtgaggatccaggtgg

SEQ ID NO: 28713 - RNA, 19 nt, synthetic construct
  source 1..19: mol_type = other RNA
tctgtgaggatccaggtgg

SEQ ID NO: 28714 - RNA, 19 nt, synthetic construct
  source 1..19: mol_type = other RNA
atagttgaagcacatcttg

SEQ ID NO: 28715 - RNA, 19 nt, synthetic construct
  source 1..19: mol_type = other RNA
atagttgaagcacatcttg

SEQ ID NO: 28716 - RNA, 19 nt, synthetic construct
  source 1..19: mol_type = other RNA
atagttgaagcacatcttg

SEQ ID NO: 28717 - RNA, 19 nt, synthetic construct
  source 1..19: mol_type = other RNA
atagttgaagcacatcttg

SEQ ID NO: 28718 - RNA, 19 nt, synthetic construct
  source 1..19: mol_type = other RNA
ggacacagtggacacgctg

SEQ ID NO: 28719 - RNA, 19 nt, synthetic construct
  source 1..19: mol_type = other RNA
tcatagttgaagcacatct

SEQ ID NO: 28720 - RNA, 19 nt, synthetic construct
  source 1..19: mol_type = other RNA
tcatagttgaagcacatct

SEQ ID NO: 28721 - RNA, 19 nt, synthetic construct
  source 1..19: mol_type = other RNA
tcatagttgaagcacatct

SEQ ID NO: 28722 - RNA, 19 nt, synthetic construct
  source 1..19: mol_type = other RNA
tcatagttgaagcacatct

SEQ ID NO: 28723 - RNA, 19 nt, synthetic construct
  source 1..19: mol_type = other RNA
acagaagggcgtgcagcca

SEQ ID NO: 28724 - RNA, 19 nt, synthetic construct
  source 1..19: mol_type = other RNA
ccgacactttgatgggcag

SEQ ID NO: 28725 - RNA, 19 nt, synthetic construct
  source 1..19: mol_type = other RNA
ctgggttgagcagaggggg

SEQ ID NO: 28726 - RNA, 19 nt, synthetic construct
  source 1..19: mol_type = other RNA
atttgcaaaactgggctgg

SEQ ID NO: 28727 - RNA, 19 nt, synthetic construct
  source 1..19: mol_type = other RNA
tcgggtccgacactttgat

SEQ ID NO: 28728 - RNA, 19 nt, synthetic construct
  source 1..19: mol_type = other RNA
cgacactttgatgggcagg

SEQ ID NO: 28729 - RNA, 19 nt, synthetic construct
  source 1..19: mol_type = other RNA
actccccgggcgcggcaga

SEQ ID NO: 28730 - RNA, 19 nt, synthetic construct
  source 1..19: mol_type = other RNA
tgggttgagcagagggggc

SEQ ID NO: 28731 - RNA, 19 nt, synthetic construct
  source 1..19: mol_type = other RNA
gctcgggtccgacactttg

SEQ ID NO: 28732 - RNA, 19 nt, synthetic construct
  source 1..19: mol_type = other RNA
ctccaggtggacagagcat

SEQ ID NO: 28733 - RNA, 19 nt, synthetic construct
  source 1..19: mol_type = other RNA
agggcgtgcagccacactc

SEQ ID NO: 28734 - RNA, 19 nt, synthetic construct
  source 1..19: mol_type = other RNA
acagagcatggggatggag

SEQ ID NO: 28735 - RNA, 19 nt, synthetic construct
  source 1..19: mol_type = other RNA
gggctgggttgagcagagg

SEQ ID NO: 28736 - RNA, 19 nt, synthetic construct
  source 1..19: mol_type = other RNA
aagggcgtgcagccacact

SEQ ID NO: 28737 - RNA, 19 nt, synthetic construct
  source 1..19: mol_type = other RNA
gcagagggggctttgggat

SEQ ID NO: 28738 - RNA, 19 nt, synthetic construct
  source 1..19: mol_type = other RNA
tgtgaggatccaggtggtc

SEQ ID NO: 28739 - RNA, 19 nt, synthetic construct
  source 1..19: mol_type = other RNA
tgtgaggatccaggtggtc

SEQ ID NO: 28740 - RNA, 19 nt, synthetic construct
  source 1..19: mol_type = other RNA
tgtgaggatccaggtggtc

SEQ ID NO: 28741 - RNA, 19 nt, synthetic construct
  source 1..19: mol_type = other RNA
tgtgaggatccaggtggtc

SEQ ID NO: 28742 - RNA, 19 nt, synthetic construct
  source 1..19: mol_type = other RNA
tgtgaggatccaggtggtc

SEQ ID NO: 28743 - RNA, 19 nt, synthetic construct
  source 1..19: mol_type = other RNA
tgtgaggatccaggtggtc

SEQ ID NO: 28744 - RNA, 19 nt, synthetic construct
  source 1..19: mol_type = other RNA
aactgggctgggttgagca

SEQ ID NO: 28745 - RNA, 19 nt, synthetic construct
  source 1..19: mol_type = other RNA
cttgcctggaccagcctgt

SEQ ID NO: 28746 - RNA, 19 nt, synthetic construct
  source 1..19: mol_type = other RNA
gctctgtgaggatccaggt

SEQ ID NO: 28747 - RNA, 19 nt, synthetic construct
  source 1..19: mol_type = other RNA
gtgaggatccaggtggtcc

SEQ ID NO: 28748 - RNA, 19 nt, synthetic construct
  source 1..19: mol_type = other RNA
gctctgtgaggatccaggt

SEQ ID NO: 28749 - RNA, 19 nt, synthetic construct
  source 1..19: mol_type = other RNA
gctctgtgaggatccaggt

SEQ ID NO: 28750 - RNA, 19 nt, synthetic construct
  source 1..19: mol_type = other RNA
gtgaggatccaggtggtcc

SEQ ID NO: 28751 - RNA, 19 nt, synthetic construct
  source 1..19: mol_type = other RNA
gtgaggatccaggtggtcc

SEQ ID NO: 28752 - RNA, 19 nt, synthetic construct
  source 1..19: mol_type = other RNA
gctctgtgaggatccaggt

SEQ ID NO: 28753 - RNA, 19 nt, synthetic construct
  source 1..19: mol_type = other RNA
gctctgtgaggatccaggt

SEQ ID NO: 28754 - RNA, 19 nt, synthetic construct
  source 1..19: mol_type = other RNA
gtgaggatccaggtggtcc

SEQ ID NO: 28755 - RNA, 19 nt, synthetic construct
  source 1..19: mol_type = other RNA
gtgaggatccaggtggtcc

SEQ ID NO: 28756 - RNA, 19 nt, synthetic construct
  source 1..19: mol_type = other RNA
gtgaggatccaggtggtcc

SEQ ID NO: 28757 - RNA, 19 nt, synthetic construct
  source 1..19: mol_type = other RNA
tacactttggtgggtgggc

SEQ ID NO: 28758 - RNA, 19 nt, synthetic construct
  source 1..19: mol_type = other RNA
ggggcttgcactgcaccga

SEQ ID NO: 28759 - RNA, 19 nt, synthetic construct
  source 1..19: mol_type = other RNA
ccaggtggacagagcatgg

SEQ ID NO: 28760 - RNA, 19 nt, synthetic construct
  source 1..19: mol_type = other RNA
ctggctccaggtggacaga

SEQ ID NO: 28761 - RNA, 19 nt, synthetic construct
  source 1..19: mol_type = other RNA
aggcccaaggttttcatga

SEQ ID NO: 28762 - RNA, 19 nt, synthetic construct
  source 1..19: mol_type = other RNA
ccttgcctggaccagcctg

SEQ ID NO: 28763 - RNA, 19 nt, synthetic construct
  source 1..19: mol_type = other RNA
ggccttgcctggaccagcc

SEQ ID NO: 28764 - RNA, 19 nt, synthetic construct
  source 1..19: mol_type = other RNA
gcaaaactgggctgggttg

SEQ ID NO: 28765 - RNA, 19 nt, synthetic construct
  source 1..19: mol_type = other RNA
ggaggacacagtggacacg

SEQ ID NO: 28766 - RNA, 19 nt, synthetic construct
  source 1..19: mol_type = other RNA
ggctccaggtggacagagc

SEQ ID NO: 28767 - RNA, 19 nt, synthetic construct
  source 1..19: mol_type = other RNA
ggggcaaggccaaggtggg

SEQ ID NO: 28768 - RNA, 19 nt, synthetic construct
  source 1..19: mol_type = other RNA
gttgagcagagggggcttt

SEQ ID NO: 28769 - RNA, 19 nt, synthetic construct
  source 1..19: mol_type = other RNA
gccgccagagccaacacca

SEQ ID NO: 28770 - RNA, 19 nt, synthetic construct
  source 1..19: mol_type = other RNA
gtcgtccctggagtggagg

SEQ ID NO: 28771 - RNA, 19 nt, synthetic construct
  source 1..19: mol_type = other RNA
ggacagagcatggggatgg

SEQ ID NO: 28772 - RNA, 19 nt, synthetic construct
  source 1..19: mol_type = other RNA
acactccccgggcgcggca

SEQ ID NO: 28773 - RNA, 19 nt, synthetic construct
  source 1..19: mol_type = other RNA
actggtggctgtgggtgtg

SEQ ID NO: 28774 - RNA, 19 nt, synthetic construct
  source 1..19: mol_type = other RNA
gaactggtggctgtgggtg

SEQ ID NO: 28775 - RNA, 19 nt, synthetic construct
  source 1..19: mol_type = other RNA
actggtggctgtgggtgtg

SEQ ID NO: 28776 - RNA, 19 nt, synthetic construct
  source 1..19: mol_type = other RNA
gaactggtggctgtgggtg

SEQ ID NO: 28777 - RNA, 19 nt, synthetic construct
  source 1..19: mol_type = other RNA
ttgagcagagggggctttg

SEQ ID NO: 28778 - RNA, 19 nt, synthetic construct
  source 1..19: mol_type = other RNA
gcaaggccaaggtgggcca

SEQ ID NO: 28779 - RNA, 19 nt, synthetic construct
  source 1..19: mol_type = other RNA
gctccggaggcactcggcc

SEQ ID NO: 28780 - RNA, 19 nt, synthetic construct
  source 1..19: mol_type = other RNA
aggtggacagagcatgggg

SEQ ID NO: 28781 - RNA, 19 nt, synthetic construct
  source 1..19: mol_type = other RNA
tcctggctccaggtggaca

SEQ ID NO: 28782 - RNA, 19 nt, synthetic construct
  source 1..19: mol_type = other RNA
ctcctgccctggcgggcac

SEQ ID NO: 28783 - RNA, 19 nt, synthetic construct
  source 1..19: mol_type = other RNA
gggcgcagggacacagaag

SEQ ID NO: 28784 - RNA, 19 nt, synthetic construct
  source 1..19: mol_type = other RNA
tggacagagcatggggatg

SEQ ID NO: 28785 - RNA, 19 nt, synthetic construct
  source 1..19: mol_type = other RNA
aggggcaaggccaaggtgg

SEQ ID NO: 28786 - RNA, 19 nt, synthetic construct
  source 1..19: mol_type = other RNA
gcatggggatggaggcaga

SEQ ID NO: 28787 - RNA, 19 nt, synthetic construct
  source 1..19: mol_type = other RNA
agcatggggatggaggcag

SEQ ID NO: 28788 - RNA, 19 nt, synthetic construct
  source 1..19: mol_type = other RNA
agagcatggggatggaggc

SEQ ID NO: 28789 - RNA, 19 nt, synthetic construct
  source 1..19: mol_type = other RNA
aggacacagtggacacgct

SEQ ID NO: 28790 - RNA, 19 nt, synthetic construct
  source 1..19: mol_type = other RNA
catagttgaagcacatctt

SEQ ID NO: 28791 - RNA, 19 nt, synthetic construct
  source 1..19: mol_type = other RNA
catagttgaagcacatctt

SEQ ID NO: 28792 - RNA, 19 nt, synthetic construct
  source 1..19: mol_type = other RNA
catagttgaagcacatctt

SEQ ID NO: 28793 - RNA, 19 nt, synthetic construct
  source 1..19: mol_type = other RNA
catagttgaagcacatctt

SEQ ID NO: 28794 - RNA, 19 nt, synthetic construct
  source 1..19: mol_type = other RNA
aaggggtcctgctggcccc

SEQ ID NO: 28795 - RNA, 19 nt, synthetic construct
  source 1..19: mol_type = other RNA
cgtccagcgtgtggcagct

SEQ ID NO: 28796 - RNA, 19 nt, synthetic construct
  source 1..19: mol_type = other RNA
agtggaggagggtgtggcc

SEQ ID NO: 28797 - RNA, 19 nt, synthetic construct
  source 1..19: mol_type = other RNA
cgctggagacagtcgtccc

SEQ ID NO: 28798 - RNA, 19 nt, synthetic construct
  source 1..19: mol_type = other RNA
gcagggacacagaagggcg

SEQ ID NO: 28799 - RNA, 19 nt, synthetic construct
  source 1..19: mol_type = other RNA
ggtggacagagcatgggga

SEQ ID NO: 28800 - RNA, 19 nt, synthetic construct
  source 1..19: mol_type = other RNA
ggggtcctgctggcccctc

SEQ ID NO: 28801 - RNA, 19 nt, synthetic construct
  source 1..19: mol_type = other RNA
aggccaaggtgggccacag

SEQ ID NO: 28802 - RNA, 19 nt, synthetic construct
  source 1..19: mol_type = other RNA
ttgcaaaactgggctgggt

SEQ ID NO: 28803 - RNA, 19 nt, synthetic construct
  source 1..19: mol_type = other RNA
gccaaggtgggccacaggc

SEQ ID NO: 28804 - RNA, 19 nt, synthetic construct
  source 1..19: mol_type = other RNA
gtggaggagggtgtggctg

SEQ ID NO: 28805 - RNA, 19 nt, synthetic construct
  source 1..19: mol_type = other RNA
agtggaggagggcatggcc

SEQ ID NO: 28806 - RNA, 19 nt, synthetic construct
  source 1..19: mol_type = other RNA
gtggaggagggtgtggctg

SEQ ID NO: 28807 - RNA, 19 nt, synthetic construct
  source 1..19: mol_type = other RNA
gtggaggagggtgtggctg

SEQ ID NO: 28808 - RNA, 19 nt, synthetic construct
  source 1..19: mol_type = other RNA
agtggaggagggcatggcc

SEQ ID NO: 28809 - RNA, 19 nt, synthetic construct
  source 1..19: mol_type = other RNA
gtggaggagggtgtggctg

SEQ ID NO: 28810 - RNA, 19 nt, synthetic construct
  source 1..19: mol_type = other RNA
cactccccgggcgcggcag

SEQ ID NO: 28811 - RNA, 19 nt, synthetic construct
  source 1..19: mol_type = other RNA
tcactgcacactccccggg

SEQ ID NO: 28812 - RNA, 19 nt, synthetic construct
  source 1..19: mol_type = other RNA
cggcccggggcctggtcac

SEQ ID NO: 28813 - RNA, 19 nt, synthetic construct
  source 1..19: mol_type = other RNA
ccagagccaacaccagcgt

SEQ ID NO: 28814 - RNA, 19 nt, synthetic construct
  source 1..19: mol_type = other RNA
agggccctgggtctctgcc

SEQ ID NO: 28815 - RNA, 19 nt, synthetic construct
  source 1..19: mol_type = other RNA
agtggaggagggtgtggct

SEQ ID NO: 28816 - RNA, 19 nt, synthetic construct
  source 1..19: mol_type = other RNA
gagtggaggagggtgtggc

SEQ ID NO: 28817 - RNA, 19 nt, synthetic construct
  source 1..19: mol_type = other RNA
ggagtggaggagggtgtgg

SEQ ID NO: 28818 - RNA, 19 nt, synthetic construct
  source 1..19: mol_type = other RNA
ctggagtggaggagggtgt

SEQ ID NO: 28819 - RNA, 19 nt, synthetic construct
  source 1..19: mol_type = other RNA
ggtggtccctggggtggag

SEQ ID NO: 28820 - RNA, 19 nt, synthetic construct
  source 1..19: mol_type = other RNA
gatccaggtggtccctggg

SEQ ID NO: 28821 - RNA, 19 nt, synthetic construct
  source 1..19: mol_type = other RNA
ggatccaggtggtccctgg

SEQ ID NO: 28822 - RNA, 19 nt, synthetic construct
  source 1..19: mol_type = other RNA
agtggaggagggtgtggct

SEQ ID NO: 28823 - RNA, 19 nt, synthetic construct
  source 1..19: mol_type = other RNA
gagtggaggagggtgtggc

SEQ ID NO: 28824 - RNA, 19 nt, synthetic construct
  source 1..19: mol_type = other RNA
ggagtggaggagggtgtgg

SEQ ID NO: 28825 - RNA, 19 nt, synthetic construct
  source 1..19: mol_type = other RNA
ctggagtggaggagggtgt

SEQ ID NO: 28826 - RNA, 19 nt, synthetic construct
  source 1..19: mol_type = other RNA
cgtccctggagtggaggag

SEQ ID NO: 28827 - RNA, 19 nt, synthetic construct
  source 1..19: mol_type = other RNA
tcgtccctggagtggagga

SEQ ID NO: 28828 - RNA, 19 nt, synthetic construct
  source 1..19: mol_type = other RNA
aactggtggctgtgggtgt

SEQ ID NO: 28829 - RNA, 19 nt, synthetic construct
  source 1..19: mol_type = other RNA
ggtggtccctggggtggag

SEQ ID NO: 28830 - RNA, 19 nt, synthetic construct
  source 1..19: mol_type = other RNA
gatccaggtggtccctggg

SEQ ID NO: 28831 - RNA, 19 nt, synthetic construct
  source 1..19: mol_type = other RNA
ggatccaggtggtccctgg

SEQ ID NO: 28832 - RNA, 19 nt, synthetic construct
  source 1..19: mol_type = other RNA
ggtggtccctggggtggag

SEQ ID NO: 28833 - RNA, 19 nt, synthetic construct
  source 1..19: mol_type = other RNA
gatccaggtggtccctggg

SEQ ID NO: 28834 - RNA, 19 nt, synthetic construct
  source 1..19: mol_type = other RNA
ggatccaggtggtccctgg

SEQ ID NO: 28835 - RNA, 19 nt, synthetic construct
  source 1..19: mol_type = other RNA
agtggaggagggtgtggct

SEQ ID NO: 28836 - RNA, 19 nt, synthetic construct
  source 1..19: mol_type = other RNA
gagtggaggagggtgtggc

SEQ ID NO: 28837 - RNA, 19 nt, synthetic construct
  source 1..19: mol_type = other RNA
ggagtggaggagggtgtgg

SEQ ID NO: 28838 - RNA, 19 nt, synthetic construct
  source 1..19: mol_type = other RNA
ctggagtggaggagggtgt

SEQ ID NO: 28839 - RNA, 19 nt, synthetic construct
  source 1..19: mol_type = other RNA
aactggtggctgtgggtgt

SEQ ID NO: 28840 - RNA, 19 nt, synthetic construct
  source 1..19: mol_type = other RNA
ggtggtccctggggtggag

SEQ ID NO: 28841 - RNA, 19 nt, synthetic construct
  source 1..19: mol_type = other RNA
gatccaggtggtccctggg

SEQ ID NO: 28842 - RNA, 19 nt, synthetic construct
  source 1..19: mol_type = other RNA
ggatccaggtggtccctgg

SEQ ID NO: 28843 - RNA, 19 nt, synthetic construct
  source 1..19: mol_type = other RNA
ggtggtccctggggtggag

SEQ ID NO: 28844 - RNA, 19 nt, synthetic construct
  source 1..19: mol_type = other RNA
gatccaggtggtccctggg

SEQ ID NO: 28845 - RNA, 19 nt, synthetic construct
  source 1..19: mol_type = other RNA
ggatccaggtggtccctgg

SEQ ID NO: 28846 - RNA, 19 nt, synthetic construct
  source 1..19: mol_type = other RNA
agtggaggagggtgtggct

SEQ ID NO: 28847 - RNA, 19 nt, synthetic construct
  source 1..19: mol_type = other RNA
gagtggaggagggtgtggc

SEQ ID NO: 28848 - RNA, 19 nt, synthetic construct
  source 1..19: mol_type = other RNA
ggagtggaggagggtgtgg

SEQ ID NO: 28849 - RNA, 19 nt, synthetic construct
  source 1..19: mol_type = other RNA
ctggagtggaggagggtgt

SEQ ID NO: 28850 - RNA, 19 nt, synthetic construct
  source 1..19: mol_type = other RNA
tggaggagggtgtggccgt

SEQ ID NO: 28851 - RNA, 19 nt, synthetic construct
  source 1..19: mol_type = other RNA
gtggaggagggtgtggccg

SEQ ID NO: 28852 - RNA, 19 nt, synthetic construct
  source 1..19: mol_type = other RNA
gagtggaggagggtgtggc

SEQ ID NO: 28853 - RNA, 19 nt, synthetic construct
  source 1..19: mol_type = other RNA
tccccagagtggaggaggg

SEQ ID NO: 28854 - RNA, 19 nt, synthetic construct
  source 1..19: mol_type = other RNA
ggtcgtccccagagtggag

SEQ ID NO: 28855 - RNA, 19 nt, synthetic construct
  source 1..19: mol_type = other RNA
ggtggtccctggggtggag

SEQ ID NO: 28856 - RNA, 19 nt, synthetic construct
  source 1..19: mol_type = other RNA
gatccaggtggtccctggg

SEQ ID NO: 28857 - RNA, 19 nt, synthetic construct
  source 1..19: mol_type = other RNA
ggatccaggtggtccctgg

SEQ ID NO: 28858 - RNA, 19 nt, synthetic construct
  source 1..19: mol_type = other RNA
tgaggaggacacagtggac

SEQ ID NO: 28859 - RNA, 19 nt, synthetic construct
  source 1..19: mol_type = other RNA
tttggtgggtgggcaggtg

SEQ ID NO: 28860 - RNA, 19 nt, synthetic construct
  source 1..19: mol_type = other RNA
gggcaggggcttgcactgc

SEQ ID NO: 28861 - RNA, 19 nt, synthetic construct
  source 1..19: mol_type = other RNA
tcacagggcaggggcttgc

SEQ ID NO: 28862 - RNA, 19 nt, synthetic construct
  source 1..19: mol_type = other RNA
actcctgccctggcgggca

SEQ ID NO: 28863 - RNA, 19 nt, synthetic construct
  source 1..19: mol_type = other RNA
gcgcagggacacagaaggg

SEQ ID NO: 28864 - RNA, 19 nt, synthetic construct
  source 1..19: mol_type = other RNA
ggcgcagggacacagaagg

SEQ ID NO: 28865 - RNA, 19 nt, synthetic construct
  source 1..19: mol_type = other RNA
cagagcatggggatggagg

SEQ ID NO: 28866 - RNA, 19 nt, synthetic construct
  source 1..19: mol_type = other RNA
gtggacagagcatggggat

SEQ ID NO: 28867 - RNA, 19 nt, synthetic construct
  source 1..19: mol_type = other RNA
gtcctgctggcccctcacc

SEQ ID NO: 28868 - RNA, 19 nt, synthetic construct
  source 1..19: mol_type = other RNA
gggtcctgctggcccctca

SEQ ID NO: 28869 - RNA, 19 nt, synthetic construct
  source 1..19: mol_type = other RNA
gaaaggggtcctgctggcc

SEQ ID NO: 28870 - RNA, 19 nt, synthetic construct
  source 1..19: mol_type = other RNA
ggtgggccacaggctctcc

SEQ ID NO: 28871 - RNA, 19 nt, synthetic construct
  source 1..19: mol_type = other RNA
aaggccaaggtgggccaca

SEQ ID NO: 28872 - RNA, 19 nt, synthetic construct
  source 1..19: mol_type = other RNA
caaggccaaggtgggccac

SEQ ID NO: 28873 - RNA, 19 nt, synthetic construct
  source 1..19: mol_type = other RNA
gagcagagggggctttggg

SEQ ID NO: 28874 - RNA, 19 nt, synthetic construct
  source 1..19: mol_type = other RNA
ggctgggttgagcagaggg

SEQ ID NO: 28875 - RNA, 19 nt, synthetic construct
  source 1..19: mol_type = other RNA
tgagcagagggggctttgg

SEQ ID NO: 28876 - RNA, 19 nt, synthetic construct
  source 1..19: mol_type = other RNA
tggaactggtggctgtggg

SEQ ID NO: 28877 - RNA, 19 nt, synthetic construct
  source 1..19: mol_type = other RNA
ttggaactggtggctgtgg

SEQ ID NO: 28878 - RNA, 19 nt, synthetic construct
  source 1..19: mol_type = other RNA
tggaactggtggctgtggg

SEQ ID NO: 28879 - RNA, 19 nt, synthetic construct
  source 1..19: mol_type = other RNA
ttggaactggtggctgtgg

SEQ ID NO: 28880 - RNA, 19 nt, synthetic construct
  source 1..19: mol_type = other RNA
tggaggagggtgtggctgt

SEQ ID NO: 28881 - RNA, 19 nt, synthetic construct
  source 1..19: mol_type = other RNA
gttcctggggtggaggagg

SEQ ID NO: 28882 - RNA, 19 nt, synthetic construct
  source 1..19: mol_type = other RNA
tggaggagggtgtggctgt

SEQ ID NO: 28883 - RNA, 19 nt, synthetic construct
  source 1..19: mol_type = other RNA
gttcctggggtggaggagg

SEQ ID NO: 28884 - RNA, 19 nt, synthetic construct
  source 1..19: mol_type = other RNA
gttcctggggtggaggagg

SEQ ID NO: 28885 - RNA, 19 nt, synthetic construct
  source 1..19: mol_type = other RNA
tggaggagggtgtggctgt

SEQ ID NO: 28886 - RNA, 19 nt, synthetic construct
  source 1..19: mol_type = other RNA
tggaggagggtgtggctgt

SEQ ID NO: 28887 - RNA, 19 nt, synthetic construct
  source 1..19: mol_type = other RNA
gttcctggggtggaggagg

SEQ ID NO: 28888 - RNA, 19 nt, synthetic construct
  source 1..19: mol_type = other RNA
gtgggccacaggctctccc

SEQ ID NO: 28889 - RNA, 19 nt, synthetic construct
  source 1..19: mol_type = other RNA
ggaggagggtgtggctgtg

SEQ ID NO: 28890 - RNA, 19 nt, synthetic construct
  source 1..19: mol_type = other RNA
ggaggagggtgtggctgtg

SEQ ID NO: 28891 - RNA, 19 nt, synthetic construct
  source 1..19: mol_type = other RNA
ggtggctgtgggtgtggtg

SEQ ID NO: 28892 - RNA, 19 nt, synthetic construct
  source 1..19: mol_type = other RNA
ggaggagggtgtggctgtg

SEQ ID NO: 28893 - RNA, 19 nt, synthetic construct
  source 1..19: mol_type = other RNA
ggtggctgtgggtgtggtg

SEQ ID NO: 28894 - RNA, 19 nt, synthetic construct
  source 1..19: mol_type = other RNA
ggaggagggtgtggctgtg

SEQ ID NO: 28895 - RNA, 19 nt, synthetic construct
  source 1..19: mol_type = other RNA
gtccccagagtggaggagg

SEQ ID NO: 28896 - RNA, 19 nt, synthetic construct
  source 1..19: mol_type = other RNA
tagtcagcactttggtagt

SEQ ID NO: 28897 - RNA, 19 nt, synthetic construct
  source 1..19: mol_type = other RNA
gccgccgtgggtgcagggg

SEQ ID NO: 28898 - RNA, 19 nt, synthetic construct
  source 1..19: mol_type = other RNA
ggcagttctccgctgtggg

SEQ ID NO: 28899 - RNA, 19 nt, synthetic construct
  source 1..19: mol_type = other RNA
ggccttgatgacaacacgg

SEQ ID NO: 28900 - RNA, 19 nt, synthetic construct
  source 1..19: mol_type = other RNA
tgggccttgatgacaacac

SEQ ID NO: 28901 - RNA, 19 nt, synthetic construct
  source 1..19: mol_type = other RNA
ctgttcccaaactccagtg

SEQ ID NO: 28902 - RNA, 19 nt, synthetic construct
  source 1..19: mol_type = other RNA
acgctgcaggtgacgtcgg

SEQ ID NO: 28903 - RNA, 19 nt, synthetic construct
  source 1..19: mol_type = other RNA
tggacagggctggagtcga

SEQ ID NO: 28904 - RNA, 19 nt, synthetic construct
  source 1..19: mol_type = other RNA
tggacagggctggagtcga

SEQ ID NO: 28905 - RNA, 19 nt, synthetic construct
  source 1..19: mol_type = other RNA
tggacagggctggagtcga

SEQ ID NO: 28906 - RNA, 19 nt, synthetic construct
  source 1..19: mol_type = other RNA
gtagttctcattctccaca

SEQ ID NO: 28907 - RNA, 19 nt, synthetic construct
  source 1..19: mol_type = other RNA
gcagttctccgctgtgggg

SEQ ID NO: 28908 - RNA, 19 nt, synthetic construct
  source 1..19: mol_type = other RNA
tcatagtggaagtcacagg

SEQ ID NO: 28909 - RNA, 19 nt, synthetic construct
  source 1..19: mol_type = other RNA
agtgtgagctgttcctggg

SEQ ID NO: 28910 - RNA, 19 nt, synthetic construct
  source 1..19: mol_type = other RNA
agtgtgagctgttcctggg

SEQ ID NO: 28911 - RNA, 19 nt, synthetic construct
  source 1..19: mol_type = other RNA
agtgtgagctgttcctggg

SEQ ID NO: 28912 - RNA, 19 nt, synthetic construct
  source 1..19: mol_type = other RNA
agtgtgagctgttcctggg

SEQ ID NO: 28913 - RNA, 19 nt, synthetic construct
  source 1..19: mol_type = other RNA
agtgtgagctgttcctggg

SEQ ID NO: 28914 - RNA, 19 nt, synthetic construct
  source 1..19: mol_type = other RNA
tgctggggcagtggccgta

SEQ ID NO: 28915 - RNA, 19 nt, synthetic construct
  source 1..19: mol_type = other RNA
tgctggggcagtggccgta

SEQ ID NO: 28916 - RNA, 19 nt, synthetic construct
  source 1..19: mol_type = other RNA
tgctggggcagtggccgta

SEQ ID NO: 28917 - RNA, 19 nt, synthetic construct
  source 1..19: mol_type = other RNA
tgctggggcagtggccgta

SEQ ID NO: 28918 - RNA, 19 nt, synthetic construct
  source 1..19: mol_type = other RNA
cactgagggagcaggggtc

SEQ ID NO: 28919 - RNA, 19 nt, synthetic construct
  source 1..19: mol_type = other RNA
tgttcccaaactccagtgc

SEQ ID NO: 28920 - RNA, 19 nt, synthetic construct
  source 1..19: mol_type = other RNA
gctggggcagtggccgtag

SEQ ID NO: 28921 - RNA, 19 nt, synthetic construct
  source 1..19: mol_type = other RNA
gtgctggggcagtggccgt

SEQ ID NO: 28922 - RNA, 19 nt, synthetic construct
  source 1..19: mol_type = other RNA
gctggggcagtggccgtag

SEQ ID NO: 28923 - RNA, 19 nt, synthetic construct
  source 1..19: mol_type = other RNA
gtgctggggcagtggccgt

SEQ ID NO: 28924 - RNA, 19 nt, synthetic construct
  source 1..19: mol_type = other RNA
gctggggcagtggccgtag

SEQ ID NO: 28925 - RNA, 19 nt, synthetic construct
  source 1..19: mol_type = other RNA
gtgctggggcagtggccgt

SEQ ID NO: 28926 - RNA, 19 nt, synthetic construct
  source 1..19: mol_type = other RNA
gctggggcagtggccgtag

SEQ ID NO: 28927 - RNA, 19 nt, synthetic construct
  source 1..19: mol_type = other RNA
gtgctggggcagtggccgt

SEQ ID NO: 28928 - RNA, 19 nt, synthetic construct
  source 1..19: mol_type = other RNA
ggaaggtgggacagcagtc

SEQ ID NO: 28929 - RNA, 19 nt, synthetic construct
  source 1..19: mol_type = other RNA
cgctgcaggtgacgtcggc

SEQ ID NO: 28930 - RNA, 19 nt, synthetic construct
  source 1..19: mol_type = other RNA
gcggccgccgtgggtgcag

SEQ ID NO: 28931 - RNA, 19 nt, synthetic construct
  source 1..19: mol_type = other RNA
cattctccacactgaggga

SEQ ID NO: 28932 - RNA, 19 nt, synthetic construct
  source 1..19: mol_type = other RNA
cggccgccgtgggtgcagg

SEQ ID NO: 28933 - RNA, 19 nt, synthetic construct
  source 1..19: mol_type = other RNA
ggctgtaggtgcggccgcc

SEQ ID NO: 28934 - RNA, 19 nt, synthetic construct
  source 1..19: mol_type = other RNA
tttctgcagagaggctccc

SEQ ID NO: 28935 - RNA, 19 nt, synthetic construct
  source 1..19: mol_type = other RNA
ggcagtctctggagtggag

SEQ ID NO: 28936 - RNA, 19 nt, synthetic construct
  source 1..19: mol_type = other RNA
ggcagtctctggagtggag

SEQ ID NO: 28937 - RNA, 19 nt, synthetic construct
  source 1..19: mol_type = other RNA
ttgtgggtgtggtggttgt

SEQ ID NO: 28938 - RNA, 19 nt, synthetic construct
  source 1..19: mol_type = other RNA
gtggaagtcacagggctgg

SEQ ID NO: 28939 - RNA, 19 nt, synthetic construct
  source 1..19: mol_type = other RNA
tggaagtcacagggctggc

SEQ ID NO: 28940 - RNA, 19 nt, synthetic construct
  source 1..19: mol_type = other RNA
catagtggaagtcacaggg

SEQ ID NO: 28941 - RNA, 19 nt, synthetic construct
  source 1..19: mol_type = other RNA
atgacaacacgggtgacca

SEQ ID NO: 28942 - RNA, 19 nt, synthetic construct
  source 1..19: mol_type = other RNA
aaggtgggacagcagtcgc

SEQ ID NO: 28943 - RNA, 19 nt, synthetic construct
  source 1..19: mol_type = other RNA
cttttctgcagagaggctc

SEQ ID NO: 28944 - RNA, 19 nt, synthetic construct
  source 1..19: mol_type = other RNA
atagtggaagtcacagggc

SEQ ID NO: 28945 - RNA, 19 nt, synthetic construct
  source 1..19: mol_type = other RNA
tgacaacacgggtgaccac

SEQ ID NO: 28946 - RNA, 19 nt, synthetic construct
  source 1..19: mol_type = other RNA
cactcgaggcccaggggct

SEQ ID NO: 28947 - RNA, 19 nt, synthetic construct
  source 1..19: mol_type = other RNA
ccggggtgctggggcagtg

SEQ ID NO: 28948 - RNA, 19 nt, synthetic construct
  source 1..19: mol_type = other RNA
cactcgaggcccaggggct

SEQ ID NO: 28949 - RNA, 19 nt, synthetic construct
  source 1..19: mol_type = other RNA
ccggggtgctggggcagtg

SEQ ID NO: 28950 - RNA, 19 nt, synthetic construct
  source 1..19: mol_type = other RNA
cactcgaggcccaggggct

SEQ ID NO: 28951 - RNA, 19 nt, synthetic construct
  source 1..19: mol_type = other RNA
ccggggtgctggggcagtg

SEQ ID NO: 28952 - RNA, 19 nt, synthetic construct
  source 1..19: mol_type = other RNA
cactcgaggcccaggggct

SEQ ID NO: 28953 - RNA, 19 nt, synthetic construct
  source 1..19: mol_type = other RNA
ccggggtgctggggcagtg

SEQ ID NO: 28954 - RNA, 19 nt, synthetic construct
  source 1..19: mol_type = other RNA
cccctgggccttgatgaca

SEQ ID NO: 28955 - RNA, 19 nt, synthetic construct
  source 1..19: mol_type = other RNA
gggccttgatgacaacacg

SEQ ID NO: 28956 - RNA, 19 nt, synthetic construct
  source 1..19: mol_type = other RNA
ggcagtggccgtagttgca

SEQ ID NO: 28957 - RNA, 19 nt, synthetic construct
  source 1..19: mol_type = other RNA
ggcagtggccgtagttgca

SEQ ID NO: 28958 - RNA, 19 nt, synthetic construct
  source 1..19: mol_type = other RNA
ggcagtggccgtagttgca

SEQ ID NO: 28959 - RNA, 19 nt, synthetic construct
  source 1..19: mol_type = other RNA
ggcagtggccgtagttgca

SEQ ID NO: 28960 - RNA, 19 nt, synthetic construct
  source 1..19: mol_type = other RNA
cagtccctggactggagga

SEQ ID NO: 28961 - RNA, 19 nt, synthetic construct
  source 1..19: mol_type = other RNA
gcagtccctggactggagg

SEQ ID NO: 28962 - RNA, 19 nt, synthetic construct
  source 1..19: mol_type = other RNA
gtgagctgttcctggggtg

SEQ ID NO: 28963 - RNA, 19 nt, synthetic construct
  source 1..19: mol_type = other RNA
gtgagctgttcctggggtg

SEQ ID NO: 28964 - RNA, 19 nt, synthetic construct
  source 1..19: mol_type = other RNA
cagtccctggactggagga

SEQ ID NO: 28965 - RNA, 19 nt, synthetic construct
  source 1..19: mol_type = other RNA
gcagtccctggactggagg

SEQ ID NO: 28966 - RNA, 19 nt, synthetic construct
  source 1..19: mol_type = other RNA
gtgagctgttcctggggtg

SEQ ID NO: 28967 - RNA, 19 nt, synthetic construct
  source 1..19: mol_type = other RNA
gtgagctgttcctggggtg

SEQ ID NO: 28968 - RNA, 19 nt, synthetic construct
  source 1..19: mol_type = other RNA
cagtccctggactggagga

SEQ ID NO: 28969 - RNA, 19 nt, synthetic construct
  source 1..19: mol_type = other RNA
gcagtccctggactggagg

SEQ ID NO: 28970 - RNA, 19 nt, synthetic construct
  source 1..19: mol_type = other RNA
gtgagctgttcctggggtg

SEQ ID NO: 28971 - RNA, 19 nt, synthetic construct
  source 1..19: mol_type = other RNA
tagtggaagtcacagggct

SEQ ID NO: 28972 - RNA, 19 nt, synthetic construct
  source 1..19: mol_type = other RNA
ctggggagcactgcagggg

SEQ ID NO: 28973 - RNA, 19 nt, synthetic construct
  source 1..19: mol_type = other RNA
gctgttcctggggtggagg

SEQ ID NO: 28974 - RNA, 19 nt, synthetic construct
  source 1..19: mol_type = other RNA
gctgttcctggggtggagg

SEQ ID NO: 28975 - RNA, 19 nt, synthetic construct
  source 1..19: mol_type = other RNA
gctgttcctggggtggagg

SEQ ID NO: 28976 - RNA, 19 nt, synthetic construct
  source 1..19: mol_type = other RNA
gctgttcctggggtggagg

SEQ ID NO: 28977 - RNA, 19 nt, synthetic construct
  source 1..19: mol_type = other RNA
ggggcaggtccgggggcag

SEQ ID NO: 28978 - RNA, 19 nt, synthetic construct
  source 1..19: mol_type = other RNA
ttctgcagagaggctccca

SEQ ID NO: 28979 - RNA, 19 nt, synthetic construct
  source 1..19: mol_type = other RNA
gggtgctggggcagtggcc

SEQ ID NO: 28980 - RNA, 19 nt, synthetic construct
  source 1..19: mol_type = other RNA
gggtgctggggcagtggcc

SEQ ID NO: 28981 - RNA, 19 nt, synthetic construct
  source 1..19: mol_type = other RNA
gggtgctggggcagtggcc

SEQ ID NO: 28982 - RNA, 19 nt, synthetic construct
  source 1..19: mol_type = other RNA
gggtgctggggcagtggcc

SEQ ID NO: 28983 - RNA, 19 nt, synthetic construct
  source 1..19: mol_type = other RNA
tgagctgttcctggggtgg

SEQ ID NO: 28984 - RNA, 19 nt, synthetic construct
  source 1..19: mol_type = other RNA
tgagctgttcctggggtgg

SEQ ID NO: 28985 - RNA, 19 nt, synthetic construct
  source 1..19: mol_type = other RNA
tgagctgttcctggggtgg

SEQ ID NO: 28986 - RNA, 19 nt, synthetic construct
  source 1..19: mol_type = other RNA
tgagctgttcctggggtgg

SEQ ID NO: 28987 - RNA, 19 nt, synthetic construct
  source 1..19: mol_type = other RNA
tgctggggagcactgcagg

SEQ ID NO: 28988 - RNA, 19 nt, synthetic construct
  source 1..19: mol_type = other RNA
ctgctggggagcactgcag

SEQ ID NO: 28989 - RNA, 19 nt, synthetic construct
  source 1..19: mol_type = other RNA
gtccctggactggaggagg

SEQ ID NO: 28990 - RNA, 19 nt, synthetic construct
  source 1..19: mol_type = other RNA
gtctctggagtggaggagg

SEQ ID NO: 28991 - RNA, 19 nt, synthetic construct
  source 1..19: mol_type = other RNA
gtctctggagtggaggagg

SEQ ID NO: 28992 - RNA, 19 nt, synthetic construct
  source 1..19: mol_type = other RNA
gtccctggactggaggagg

SEQ ID NO: 28993 - RNA, 19 nt, synthetic construct
  source 1..19: mol_type = other RNA
gtctctggagtggaggagg

SEQ ID NO: 28994 - RNA, 19 nt, synthetic construct
  source 1..19: mol_type = other RNA
gtccctggactggaggagg

SEQ ID NO: 28995 - RNA, 19 nt, synthetic construct
  source 1..19: mol_type = other RNA
gtctctggagtggaggagg

SEQ ID NO: 28996 - RNA, 19 nt, synthetic construct
  source 1..19: mol_type = other RNA
cgcactccccacagcactg

SEQ ID NO: 28997 - RNA, 19 nt, synthetic construct
  source 1..19: mol_type = other RNA
gggatggaggagggggtca

SEQ ID NO: 28998 - RNA, 19 nt, synthetic construct
  source 1..19: mol_type = other RNA
gggatggaggagggggtca

SEQ ID NO: 28999 - RNA, 19 nt, synthetic construct
  source 1..19: mol_type = other RNA
gggatggaggagggggtca

SEQ ID NO: 29000 - RNA, 19 nt, synthetic construct
  source 1..19: mol_type = other RNA
gggatggaggagggggtca

SEQ ID NO: 29001 - RNA, 19 nt, synthetic construct
  source 1..19: mol_type = other RNA
aggtgcggccgccgtgggt

SEQ ID NO: 29002 - RNA, 19 nt, synthetic construct
  source 1..19: mol_type = other RNA
ctggacagggctggagtcg

SEQ ID NO: 29003 - RNA, 19 nt, synthetic construct
  source 1..19: mol_type = other RNA
ctggacagggctggagtcg

SEQ ID NO: 29004 - RNA, 19 nt, synthetic construct
  source 1..19: mol_type = other RNA
ctggacagggctggagtcg

SEQ ID NO: 29005 - RNA, 19 nt, synthetic construct
  source 1..19: mol_type = other RNA
cccgggctgtaggtgcggc

SEQ ID NO: 29006 - RNA, 19 nt, synthetic construct
  source 1..19: mol_type = other RNA
gcggaaggtgggacagcag

SEQ ID NO: 29007 - RNA, 19 nt, synthetic construct
  source 1..19: mol_type = other RNA
gtccgggggcagagctcag

SEQ ID NO: 29008 - RNA, 19 nt, synthetic construct
  source 1..19: mol_type = other RNA
ggtccgggggcagagctca

SEQ ID NO: 29009 - RNA, 19 nt, synthetic construct
  source 1..19: mol_type = other RNA
gcccgggctgtaggtgcgg

SEQ ID NO: 29010 - RNA, 19 nt, synthetic construct
  source 1..19: mol_type = other RNA
cagagaggctcccaggcag

SEQ ID NO: 29011 - RNA, 19 nt, synthetic construct
  source 1..19: mol_type = other RNA
gcagagaggctcccaggca

SEQ ID NO: 29012 - RNA, 19 nt, synthetic construct
  source 1..19: mol_type = other RNA
gcactcgaggcccaggggc

SEQ ID NO: 29013 - RNA, 19 nt, synthetic construct
  source 1..19: mol_type = other RNA
gcactcgaggcccaggggc

SEQ ID NO: 29014 - RNA, 19 nt, synthetic construct
  source 1..19: mol_type = other RNA
gcactcgaggcccaggggc

SEQ ID NO: 29015 - RNA, 19 nt, synthetic construct
  source 1..19: mol_type = other RNA
gcactcgaggcccaggggc

SEQ ID NO: 29016 - RNA, 19 nt, synthetic construct
  source 1..19: mol_type = other RNA
agcggaaggtgggacagca

SEQ ID NO: 29017 - RNA, 19 nt, synthetic construct
  source 1..19: mol_type = other RNA
tctccacactgagggagca

SEQ ID NO: 29018 - RNA, 19 nt, synthetic construct
  source 1..19: mol_type = other RNA
tggccccagttgtggtggc

SEQ ID NO: 29019 - RNA, 19 nt, synthetic construct
  source 1..19: mol_type = other RNA
ggttgtgggtgtggtggtt

SEQ ID NO: 29020 - RNA, 19 nt, synthetic construct
  source 1..19: mol_type = other RNA
ggttgtgggtgtggtggtt

SEQ ID NO: 29021 - RNA, 19 nt, synthetic construct
  source 1..19: mol_type = other RNA
ggttgtgggtgtggtggtt

SEQ ID NO: 29022 - RNA, 19 nt, synthetic construct
  source 1..19: mol_type = other RNA
ggttgtgggtgtggtggtt

SEQ ID NO: 29023 - RNA, 19 nt, synthetic construct
  source 1..19: mol_type = other RNA
ggttgtgggtgtggtggtt

SEQ ID NO: 29024 - RNA, 19 nt, synthetic construct
  source 1..19: mol_type = other RNA
ggttgtgggtgtggtggtt

SEQ ID NO: 29025 - RNA, 19 nt, synthetic construct
  source 1..19: mol_type = other RNA
tgcggccgccgtgggtgca

SEQ ID NO: 29026 - RNA, 19 nt, synthetic construct
  source 1..19: mol_type = other RNA
gttctcattctccacactg

SEQ ID NO: 29027 - RNA, 19 nt, synthetic construct
  source 1..19: mol_type = other RNA
cgtagttctcattctccac

SEQ ID NO: 29028 - RNA, 19 nt, synthetic construct
  source 1..19: mol_type = other RNA
tgtgagctgttcctggggt

SEQ ID NO: 29029 - RNA, 19 nt, synthetic construct
  source 1..19: mol_type = other RNA
tggttgtgggtgtggtggt

SEQ ID NO: 29030 - RNA, 19 nt, synthetic construct
  source 1..19: mol_type = other RNA
tgtgagctgttcctggggt

SEQ ID NO: 29031 - RNA, 19 nt, synthetic construct
  source 1..19: mol_type = other RNA
tggttgtgggtgtggtggt

SEQ ID NO: 29032 - RNA, 19 nt, synthetic construct
  source 1..19: mol_type = other RNA
tgtgagctgttcctggggt

SEQ ID NO: 29033 - RNA, 19 nt, synthetic construct
  source 1..19: mol_type = other RNA
tggttgtgggtgtggtggt

SEQ ID NO: 29034 - RNA, 19 nt, synthetic construct
  source 1..19: mol_type = other RNA
tgtgagctgttcctggggt

SEQ ID NO: 29035 - RNA, 19 nt, synthetic construct
  source 1..19: mol_type = other RNA
tggttgtgggtgtggtggt

SEQ ID NO: 29036 - RNA, 19 nt, synthetic construct
  source 1..19: mol_type = other RNA
tgtgagctgttcctggggt

SEQ ID NO: 29037 - RNA, 19 nt, synthetic construct
  source 1..19: mol_type = other RNA
tggttgtgggtgtggtggt

SEQ ID NO: 29038 - RNA, 19 nt, synthetic construct
  source 1..19: mol_type = other RNA
tggttgtgggtgtggtggt

SEQ ID NO: 29039 - RNA, 19 nt, synthetic construct
  source 1..19: mol_type = other RNA
aggctgctggggagcactg

SEQ ID NO: 29040 - RNA, 19 nt, synthetic construct
  source 1..19: mol_type = other RNA
ggaagtcacagggctggct

SEQ ID NO: 29041 - RNA, 19 nt, synthetic construct
  source 1..19: mol_type = other RNA
ggctgctggggagcactgc

SEQ ID NO: 29042 - RNA, 19 nt, synthetic construct
  source 1..19: mol_type = other RNA
agctgttcctggggtggag

SEQ ID NO: 29043 - RNA, 19 nt, synthetic construct
  source 1..19: mol_type = other RNA
agctgttcctggggtggag

SEQ ID NO: 29044 - RNA, 19 nt, synthetic construct
  source 1..19: mol_type = other RNA
agctgttcctggggtggag

SEQ ID NO: 29045 - RNA, 19 nt, synthetic construct
  source 1..19: mol_type = other RNA
agctgttcctggggtggag

SEQ ID NO: 29046 - RNA, 19 nt, synthetic construct
  source 1..19: mol_type = other RNA
actgagggagcaggggtcc

SEQ ID NO: 29047 - RNA, 19 nt, synthetic construct
  source 1..19: mol_type = other RNA
cgaggcccaggggctgctc

SEQ ID NO: 29048 - RNA, 19 nt, synthetic construct
  source 1..19: mol_type = other RNA
cgaggcccaggggctgctc

SEQ ID NO: 29049 - RNA, 19 nt, synthetic construct
  source 1..19: mol_type = other RNA
cgaggcccaggggctgctc

SEQ ID NO: 29050 - RNA, 19 nt, synthetic construct
  source 1..19: mol_type = other RNA
cgaggcccaggggctgctc

SEQ ID NO: 29051 - RNA, 19 nt, synthetic construct
  source 1..19: mol_type = other RNA
aacacgggtgaccacaggc

SEQ ID NO: 29052 - RNA, 19 nt, synthetic construct
  source 1..19: mol_type = other RNA
cctgggccttgatgacaac

SEQ ID NO: 29053 - RNA, 19 nt, synthetic construct
  source 1..19: mol_type = other RNA
ggcaggtccgggggcagag

SEQ ID NO: 29054 - RNA, 19 nt, synthetic construct
  source 1..19: mol_type = other RNA
gtaggtgcggccgccgtgg

SEQ ID NO: 29055 - RNA, 19 nt, synthetic construct
  source 1..19: mol_type = other RNA
acactgagggagcaggggt

SEQ ID NO: 29056 - RNA, 19 nt, synthetic construct
  source 1..19: mol_type = other RNA
cacactgagggagcagggg

SEQ ID NO: 29057 - RNA, 19 nt, synthetic construct
  source 1..19: mol_type = other RNA
attctccacactgagggag

SEQ ID NO: 29058 - RNA, 19 nt, synthetic construct
  source 1..19: mol_type = other RNA
tcattctccacactgaggg

SEQ ID NO: 29059 - RNA, 19 nt, synthetic construct
  source 1..19: mol_type = other RNA
tagttctcattctccacac

SEQ ID NO: 29060 - RNA, 19 nt, synthetic construct
  source 1..19: mol_type = other RNA
tgcagagaggctcccaggc

SEQ ID NO: 29061 - RNA, 19 nt, synthetic construct
  source 1..19: mol_type = other RNA
ctgcagagaggctcccagg

SEQ ID NO: 29062 - RNA, 19 nt, synthetic construct
  source 1..19: mol_type = other RNA
gagctgttcctggggtgga

SEQ ID NO: 29063 - RNA, 19 nt, synthetic construct
  source 1..19: mol_type = other RNA
gttgtgggtgtggtggttg

SEQ ID NO: 29064 - RNA, 19 nt, synthetic construct
  source 1..19: mol_type = other RNA
ctggttgtgggtgtggtgg

SEQ ID NO: 29065 - RNA, 19 nt, synthetic construct
  source 1..19: mol_type = other RNA
gaggcccaggggctgctca

SEQ ID NO: 29066 - RNA, 19 nt, synthetic construct
  source 1..19: mol_type = other RNA
tcgaggcccaggggctgct

SEQ ID NO: 29067 - RNA, 19 nt, synthetic construct
  source 1..19: mol_type = other RNA
actcgaggcccaggggctg

SEQ ID NO: 29068 - RNA, 19 nt, synthetic construct
  source 1..19: mol_type = other RNA
ggggtgctggggcagtggc

SEQ ID NO: 29069 - RNA, 19 nt, synthetic construct
  source 1..19: mol_type = other RNA
cggggtgctggggcagtgg

SEQ ID NO: 29070 - RNA, 19 nt, synthetic construct
  source 1..19: mol_type = other RNA
gccggggtgctggggcagt

SEQ ID NO: 29071 - RNA, 19 nt, synthetic construct
  source 1..19: mol_type = other RNA
gagctgttcctggggtgga

SEQ ID NO: 29072 - RNA, 19 nt, synthetic construct
  source 1..19: mol_type = other RNA
gttgtgggtgtggtggttg

SEQ ID NO: 29073 - RNA, 19 nt, synthetic construct
  source 1..19: mol_type = other RNA
ctggttgtgggtgtggtgg

SEQ ID NO: 29074 - RNA, 19 nt, synthetic construct
  source 1..19: mol_type = other RNA
actgtgggggtgtgggtgg

SEQ ID NO: 29075 - RNA, 19 nt, synthetic construct
  source 1..19: mol_type = other RNA
tgagggctggacagggctg

SEQ ID NO: 29076 - RNA, 19 nt, synthetic construct
  source 1..19: mol_type = other RNA
gtgagggctggacagggct

SEQ ID NO: 29077 - RNA, 19 nt, synthetic construct
  source 1..19: mol_type = other RNA
gaggcccaggggctgctca

SEQ ID NO: 29078 - RNA, 19 nt, synthetic construct
  source 1..19: mol_type = other RNA
tcgaggcccaggggctgct

SEQ ID NO: 29079 - RNA, 19 nt, synthetic construct
  source 1..19: mol_type = other RNA
actcgaggcccaggggctg

SEQ ID NO: 29080 - RNA, 19 nt, synthetic construct
  source 1..19: mol_type = other RNA
ggggtgctggggcagtggc

SEQ ID NO: 29081 - RNA, 19 nt, synthetic construct
  source 1..19: mol_type = other RNA
cggggtgctggggcagtgg

SEQ ID NO: 29082 - RNA, 19 nt, synthetic construct
  source 1..19: mol_type = other RNA
gccggggtgctggggcagt

SEQ ID NO: 29083 - RNA, 19 nt, synthetic construct
  source 1..19: mol_type = other RNA
gagctgttcctggggtgga

SEQ ID NO: 29084 - RNA, 19 nt, synthetic construct
  source 1..19: mol_type = other RNA
gttgtgggtgtggtggttg

SEQ ID NO: 29085 - RNA, 19 nt, synthetic construct
  source 1..19: mol_type = other RNA
ctggttgtgggtgtggtgg

SEQ ID NO: 29086 - RNA, 19 nt, synthetic construct
  source 1..19: mol_type = other RNA
tgagggctggacagggctg

SEQ ID NO: 29087 - RNA, 19 nt, synthetic construct
  source 1..19: mol_type = other RNA
gtgagggctggacagggct

SEQ ID NO: 29088 - RNA, 19 nt, synthetic construct
  source 1..19: mol_type = other RNA
gaggcccaggggctgctca

SEQ ID NO: 29089 - RNA, 19 nt, synthetic construct
  source 1..19: mol_type = other RNA
tcgaggcccaggggctgct

SEQ ID NO: 29090 - RNA, 19 nt, synthetic construct
  source 1..19: mol_type = other RNA
actcgaggcccaggggctg

SEQ ID NO: 29091 - RNA, 19 nt, synthetic construct
  source 1..19: mol_type = other RNA
ggggtgctggggcagtggc

SEQ ID NO: 29092 - RNA, 19 nt, synthetic construct
  source 1..19: mol_type = other RNA
cggggtgctggggcagtgg

SEQ ID NO: 29093 - RNA, 19 nt, synthetic construct
  source 1..19: mol_type = other RNA
gccggggtgctggggcagt

SEQ ID NO: 29094 - RNA, 19 nt, synthetic construct
  source 1..19: mol_type = other RNA
gttgtgggtgtggtggttg

SEQ ID NO: 29095 - RNA, 19 nt, synthetic construct
  source 1..19: mol_type = other RNA
ctggttgtgggtgtggtgg

SEQ ID NO: 29096 - RNA, 19 nt, synthetic construct
  source 1..19: mol_type = other RNA
actgtgggggtgtgggtgg

SEQ ID NO: 29097 - RNA, 19 nt, synthetic construct
  source 1..19: mol_type = other RNA
tgagggctggacagggctg

SEQ ID NO: 29098 - RNA, 19 nt, synthetic construct
  source 1..19: mol_type = other RNA
gtgagggctggacagggct

SEQ ID NO: 29099 - RNA, 19 nt, synthetic construct
  source 1..19: mol_type = other RNA
gaggcccaggggctgctca

SEQ ID NO: 29100 - RNA, 19 nt, synthetic construct
  source 1..19: mol_type = other RNA
tcgaggcccaggggctgct

SEQ ID NO: 29101 - RNA, 19 nt, synthetic construct
  source 1..19: mol_type = other RNA
actcgaggcccaggggctg

SEQ ID NO: 29102 - RNA, 19 nt, synthetic construct
  source 1..19: mol_type = other RNA
ggggtgctggggcagtggc

SEQ ID NO: 29103 - RNA, 19 nt, synthetic construct
  source 1..19: mol_type = other RNA
cggggtgctggggcagtgg

SEQ ID NO: 29104 - RNA, 19 nt, synthetic construct
  source 1..19: mol_type = other RNA
gccggggtgctggggcagt

SEQ ID NO: 29105 - RNA, 19 nt, synthetic construct
  source 1..19: mol_type = other RNA
gagctgttcctggggtgga

SEQ ID NO: 29106 - RNA, 19 nt, synthetic construct
  source 1..19: mol_type = other RNA
gttgtgggtgtggtggttg

SEQ ID NO: 29107 - RNA, 19 nt, synthetic construct
  source 1..19: mol_type = other RNA
gttgtgggtgtggtggttg

SEQ ID NO: 29108 - RNA, 19 nt, synthetic construct
  source 1..19: mol_type = other RNA
ctggttgtgggtgtggtgg

SEQ ID NO: 29109 - RNA, 19 nt, synthetic construct
  source 1..19: mol_type = other RNA
agtggaagtcacagggctg

SEQ ID NO: 29110 - RNA, 19 nt, synthetic construct
  source 1..19: mol_type = other RNA
gcagtctctggagtggagg

SEQ ID NO: 29111 - RNA, 19 nt, synthetic construct
  source 1..19: mol_type = other RNA
gcagtctctggagtggagg

SEQ ID NO: 29112 - RNA, 19 nt, synthetic construct
  source 1..19: mol_type = other RNA
ctgtgggggtgtgggtggt

SEQ ID NO: 29113 - RNA, 19 nt, synthetic construct
  source 1..19: mol_type = other RNA
ctgtgggggtgtgggtggt

SEQ ID NO: 29114 - RNA, 19 nt, synthetic construct
  source 1..19: mol_type = other RNA
agtccctggactggaggag

SEQ ID NO: 29115 - RNA, 19 nt, synthetic construct
  source 1..19: mol_type = other RNA
agtccctggactggaggag

SEQ ID NO: 29116 - RNA, 19 nt, synthetic construct
  source 1..19: mol_type = other RNA
agtccctggactggaggag

SEQ ID NO: 29117 - RNA, 19 nt, synthetic construct
  source 1..19: mol_type = other RNA
cagtctctggagtggagga

SEQ ID NO: 29118 - RNA, 19 nt, synthetic construct
  source 1..19: mol_type = other RNA
cagtctctggagtggagga

SEQ ID NO: 29119 - RNA, 19 nt, synthetic construct
  source 1..19: mol_type = other RNA
cagtctctggagtggagga

SEQ ID NO: 29120 - RNA, 19 nt, synthetic construct
  source 1..19: mol_type = other RNA
cagtctctggagtggagga

SEQ ID NO: 29121 - RNA, 19 nt, synthetic construct
  source 1..19: mol_type = other RNA
gatcagtgatgggggagta

SEQ ID NO: 29122 - RNA, 19 nt, synthetic construct
  source 1..19: mol_type = other RNA
cgcccggcactcgatgtca

SEQ ID NO: 29123 - RNA, 19 nt, synthetic construct
  source 1..19: mol_type = other RNA
ggggacaggtagtattgtt

SEQ ID NO: 29124 - RNA, 19 nt, synthetic construct
  source 1..19: mol_type = other RNA
agacgccgtccctccagtc

SEQ ID NO: 29125 - RNA, 19 nt, synthetic construct
  source 1..19: mol_type = other RNA
acacacacggtggagaccg

SEQ ID NO: 29126 - RNA, 19 nt, synthetic construct
  source 1..19: mol_type = other RNA
agatgcccatgtgtgcgtt

SEQ ID NO: 29127 - RNA, 19 nt, synthetic construct
  source 1..19: mol_type = other RNA
ggcaggcatccaccacgta

SEQ ID NO: 29128 - RNA, 19 nt, synthetic construct
  source 1..19: mol_type = other RNA
tgagggtgccagcagttgc

SEQ ID NO: 29129 - RNA, 19 nt, synthetic construct
  source 1..19: mol_type = other RNA
gtcagccagcacagggcat

SEQ ID NO: 29130 - RNA, 19 nt, synthetic construct
  source 1..19: mol_type = other RNA
gtggggtgccagcagttgc

SEQ ID NO: 29131 - RNA, 19 nt, synthetic construct
  source 1..19: mol_type = other RNA
gtggggtgccagcagttgc

SEQ ID NO: 29132 - RNA, 19 nt, synthetic construct
  source 1..19: mol_type = other RNA
gtggggtgccagcagttgc

SEQ ID NO: 29133 - RNA, 19 nt, synthetic construct
  source 1..19: mol_type = other RNA
gtagaaggtgccattgtac

SEQ ID NO: 29134 - RNA, 19 nt, synthetic construct
  source 1..19: mol_type = other RNA
atggctgtaacgctggtag

SEQ ID NO: 29135 - RNA, 19 nt, synthetic construct
  source 1..19: mol_type = other RNA
ctgcacaccaggccgaagt

SEQ ID NO: 29136 - RNA, 19 nt, synthetic construct
  source 1..19: mol_type = other RNA
cccgtcgtccctggaaggg

SEQ ID NO: 29137 - RNA, 19 nt, synthetic construct
  source 1..19: mol_type = other RNA
tggactcagtcgtagtggc

SEQ ID NO: 29138 - RNA, 19 nt, synthetic construct
  source 1..19: mol_type = other RNA
tggattgtggacatggtgg

SEQ ID NO: 29139 - RNA, 19 nt, synthetic construct
  source 1..19: mol_type = other RNA
tggactcagtcgtagtggc

SEQ ID NO: 29140 - RNA, 19 nt, synthetic construct
  source 1..19: mol_type = other RNA
tggattgtggacatggtgg

SEQ ID NO: 29141 - RNA, 19 nt, synthetic construct
  source 1..19: mol_type = other RNA
gcaccgacactgaaccctc

SEQ ID NO: 29142 - RNA, 19 nt, synthetic construct
  source 1..19: mol_type = other RNA
ggaaccggtgggcaccatc

SEQ ID NO: 29143 - RNA, 19 nt, synthetic construct
  source 1..19: mol_type = other RNA
acaggtagtattgttgcag

SEQ ID NO: 29144 - RNA, 19 nt, synthetic construct
  source 1..19: mol_type = other RNA
acccgcccattgtgcgccg

SEQ ID NO: 29145 - RNA, 19 nt, synthetic construct
  source 1..19: mol_type = other RNA
gcaggcatccaccacgtag

SEQ ID NO: 29146 - RNA, 19 nt, synthetic construct
  source 1..19: mol_type = other RNA
ggggtcacccatagggtgg

SEQ ID NO: 29147 - RNA, 19 nt, synthetic construct
  source 1..19: mol_type = other RNA
agcagggtcgaggtgcggg

SEQ ID NO: 29148 - RNA, 19 nt, synthetic construct
  source 1..19: mol_type = other RNA
agcagggtcgaggtgcggg

SEQ ID NO: 29149 - RNA, 19 nt, synthetic construct
  source 1..19: mol_type = other RNA
agcagggtcgaggtgcggg

SEQ ID NO: 29150 - RNA, 19 nt, synthetic construct
  source 1..19: mol_type = other RNA
agcagggtcgaggtgcggg

SEQ ID NO: 29151 - RNA, 19 nt, synthetic construct
  source 1..19: mol_type = other RNA
agcggctctttggaagcgg

SEQ ID NO: 29152 - RNA, 19 nt, synthetic construct
  source 1..19: mol_type = other RNA
aggggatggctgtaaagct

SEQ ID NO: 29153 - RNA, 19 nt, synthetic construct
  source 1..19: mol_type = other RNA
aggggatggctgtaaagct

SEQ ID NO: 29154 - RNA, 19 nt, synthetic construct
  source 1..19: mol_type = other RNA
aggggatggctgtaaagct

SEQ ID NO: 29155 - RNA, 19 nt, synthetic construct
  source 1..19: mol_type = other RNA
gtgcccaagctccccgtcg

SEQ ID NO: 29156 - RNA, 19 nt, synthetic construct
  source 1..19: mol_type = other RNA
agagccggtggccccggtt

SEQ ID NO: 29157 - RNA, 19 nt, synthetic construct
  source 1..19: mol_type = other RNA
gtggtcctgctgctagggt

SEQ ID NO: 29158 - RNA, 19 nt, synthetic construct
  source 1..19: mol_type = other RNA
gtggtcctgctgctagggt

SEQ ID NO: 29159 - RNA, 19 nt, synthetic construct
  source 1..19: mol_type = other RNA
gtggtcctgctgctagggt

SEQ ID NO: 29160 - RNA, 19 nt, synthetic construct
  source 1..19: mol_type = other RNA
agagccggtggccccggtt

SEQ ID NO: 29161 - RNA, 19 nt, synthetic construct
  source 1..19: mol_type = other RNA
gctggccatcgggcgtgag

SEQ ID NO: 29162 - RNA, 19 nt, synthetic construct
  source 1..19: mol_type = other RNA
ggcactcgatgtcagccag

SEQ ID NO: 29163 - RNA, 19 nt, synthetic construct
  source 1..19: mol_type = other RNA
ccaaagtccaggctgcatt

SEQ ID NO: 29164 - RNA, 19 nt, synthetic construct
  source 1..19: mol_type = other RNA
gccgtggtgctcacatgtg

SEQ ID NO: 29165 - RNA, 19 nt, synthetic construct
  source 1..19: mol_type = other RNA
ccaaagtccaggctgcatt

SEQ ID NO: 29166 - RNA, 19 nt, synthetic construct
  source 1..19: mol_type = other RNA
ccaaagtccaggctgcatt

SEQ ID NO: 29167 - RNA, 19 nt, synthetic construct
  source 1..19: mol_type = other RNA
gccgtggtgctcacatgtg

SEQ ID NO: 29168 - RNA, 19 nt, synthetic construct
  source 1..19: mol_type = other RNA
ccaaagtccaggctgcatt

SEQ ID NO: 29169 - RNA, 19 nt, synthetic construct
  source 1..19: mol_type = other RNA
gccgtggtgctcacatgtg

SEQ ID NO: 29170 - RNA, 19 nt, synthetic construct
  source 1..19: mol_type = other RNA
atcctcctgacattgcacc

SEQ ID NO: 29171 - RNA, 19 nt, synthetic construct
  source 1..19: mol_type = other RNA
catcctcctgacattgcac

SEQ ID NO: 29172 - RNA, 19 nt, synthetic construct
  source 1..19: mol_type = other RNA
gactcctgagtggcgccct

SEQ ID NO: 29173 - RNA, 19 nt, synthetic construct
  source 1..19: mol_type = other RNA
ccagcacagggcatacctg

SEQ ID NO: 29174 - RNA, 19 nt, synthetic construct
  source 1..19: mol_type = other RNA
tggtggcccttgtcgtggt

SEQ ID NO: 29175 - RNA, 19 nt, synthetic construct
  source 1..19: mol_type = other RNA
tggtggcccttgtcgtggt

SEQ ID NO: 29176 - RNA, 19 nt, synthetic construct
  source 1..19: mol_type = other RNA
acgagcatggccgccagag

SEQ ID NO: 29177 - RNA, 19 nt, synthetic construct
  source 1..19: mol_type = other RNA
gtgttgaaggaggtgcccg

SEQ ID NO: 29178 - RNA, 19 nt, synthetic construct
  source 1..19: mol_type = other RNA
caccgtggagcctctggtt

SEQ ID NO: 29179 - RNA, 19 nt, synthetic construct
  source 1..19: mol_type = other RNA
gtcagtgatgggggagtac

SEQ ID NO: 29180 - RNA, 19 nt, synthetic construct
  source 1..19: mol_type = other RNA
gtcagtgatgggggagtac

SEQ ID NO: 29181 - RNA, 19 nt, synthetic construct
  source 1..19: mol_type = other RNA
caccgtggagcctctggtt

SEQ ID NO: 29182 - RNA, 19 nt, synthetic construct
  source 1..19: mol_type = other RNA
gtcagtgatgggggagtac

SEQ ID NO: 29183 - RNA, 19 nt, synthetic construct
  source 1..19: mol_type = other RNA
atcagtgatgggggagtac

SEQ ID NO: 29184 - RNA, 19 nt, synthetic construct
  source 1..19: mol_type = other RNA
gtcagtgatgggggagtac

SEQ ID NO: 29185 - RNA, 19 nt, synthetic construct
  source 1..19: mol_type = other RNA
tccgtgcagggtgagccac

SEQ ID NO: 29186 - RNA, 19 nt, synthetic construct
  source 1..19: mol_type = other RNA
cgggggcacaaggttgtgg

SEQ ID NO: 29187 - RNA, 19 nt, synthetic construct
  source 1..19: mol_type = other RNA
gtggtcgctgatgcaggcg

SEQ ID NO: 29188 - RNA, 19 nt, synthetic construct
  source 1..19: mol_type = other RNA
cagttccgcggctggcccc

SEQ ID NO: 29189 - RNA, 19 nt, synthetic construct
  source 1..19: mol_type = other RNA
ggcacatttcttggacaga

SEQ ID NO: 29190 - RNA, 19 nt, synthetic construct
  source 1..19: mol_type = other RNA
ctgcgcccgtggcctccac

SEQ ID NO: 29191 - RNA, 19 nt, synthetic construct
  source 1..19: mol_type = other RNA
tggcattggcacaggcagc

SEQ ID NO: 29192 - RNA, 19 nt, synthetic construct
  source 1..19: mol_type = other RNA
tgctgcagtccaggtacac

SEQ ID NO: 29193 - RNA, 19 nt, synthetic construct
  source 1..19: mol_type = other RNA
ttttcaaacgtctcaaagt

SEQ ID NO: 29194 - RNA, 19 nt, synthetic construct
  source 1..19: mol_type = other RNA
tggtggccgtctccagctc

SEQ ID NO: 29195 - RNA, 19 nt, synthetic construct
  source 1..19: mol_type = other RNA
ggtcagcggctctttggaa

SEQ ID NO: 29196 - RNA, 19 nt, synthetic construct
  source 1..19: mol_type = other RNA
ctgctctgtgaggatccag

SEQ ID NO: 29197 - RNA, 19 nt, synthetic construct
  source 1..19: mol_type = other RNA
ggtcgtagtggctgctgtg

SEQ ID NO: 29198 - RNA, 19 nt, synthetic construct
  source 1..19: mol_type = other RNA
gatggccgtggatccagtg

SEQ ID NO: 29199 - RNA, 19 nt, synthetic construct
  source 1..19: mol_type = other RNA
ggccgtgctggtcagcact

SEQ ID NO: 29200 - RNA, 19 nt, synthetic construct
  source 1..19: mol_type = other RNA
ggccgtgctggtcagcact

SEQ ID NO: 29201 - RNA, 19 nt, synthetic construct
  source 1..19: mol_type = other RNA
gggagttgtccctggagtt

SEQ ID NO: 29202 - RNA, 19 nt, synthetic construct
  source 1..19: mol_type = other RNA
gggggtcaccgtggagcca

SEQ ID NO: 29203 - RNA, 19 nt, synthetic construct
  source 1..19: mol_type = other RNA
gggggtcaccgtggagcca

SEQ ID NO: 29204 - RNA, 19 nt, synthetic construct
  source 1..19: mol_type = other RNA
gtgtgggtggtctctggag

SEQ ID NO: 29205 - RNA, 19 nt, synthetic construct
  source 1..19: mol_type = other RNA
acgttggccacaggctttg

SEQ ID NO: 29206 - RNA, 19 nt, synthetic construct
  source 1..19: mol_type = other RNA
gggcccagcagccatcctt

SEQ ID NO: 29207 - RNA, 19 nt, synthetic construct
  source 1..19: mol_type = other RNA
ctcagcaaagacctggctc

SEQ ID NO: 29208 - RNA, 19 nt, synthetic construct
  source 1..19: mol_type = other RNA
acacatgtggcagggaagg

SEQ ID NO: 29209 - RNA, 19 nt, synthetic construct
  source 1..19: mol_type = other RNA
ggacgcactccccacagca

SEQ ID NO: 29210 - RNA, 19 nt, synthetic construct
  source 1..19: mol_type = other RNA
tgttgacccaggtttcatt

SEQ ID NO: 29211 - RNA, 19 nt, synthetic construct
  source 1..19: mol_type = other RNA
ggactcctgagtggcgccc

SEQ ID NO: 29212 - RNA, 19 nt, synthetic construct
  source 1..19: mol_type = other RNA
tgaagtcgtcagcctggtt

SEQ ID NO: 29213 - RNA, 19 nt, synthetic construct
  source 1..19: mol_type = other RNA
tgagctgtacgcccttggc

SEQ ID NO: 29214 - RNA, 19 nt, synthetic construct
  source 1..19: mol_type = other RNA
cactgaaccctcgtcacac

SEQ ID NO: 29215 - RNA, 19 nt, synthetic construct
  source 1..19: mol_type = other RNA
gggtgaccgtcacggggcc

SEQ ID NO: 29216 - RNA, 19 nt, synthetic construct
  source 1..19: mol_type = other RNA
accgtggagcctctggttg

SEQ ID NO: 29217 - RNA, 19 nt, synthetic construct
  source 1..19: mol_type = other RNA
accgtggagcctctggttg

SEQ ID NO: 29218 - RNA, 19 nt, synthetic construct
  source 1..19: mol_type = other RNA
ctggagtcgagtgctgggt

SEQ ID NO: 29219 - RNA, 19 nt, synthetic construct
  source 1..19: mol_type = other RNA
ctggagtcgagtgctgggt

SEQ ID NO: 29220 - RNA, 19 nt, synthetic construct
  source 1..19: mol_type = other RNA
ctggagtcgagtgctgggt

SEQ ID NO: 29221 - RNA, 19 nt, synthetic construct
  source 1..19: mol_type = other RNA
tgtggtcagctttgtgagg

SEQ ID NO: 29222 - RNA, 19 nt, synthetic construct
  source 1..19: mol_type = other RNA
ctggagtcgagtgctgggt

SEQ ID NO: 29223 - RNA, 19 nt, synthetic construct
  source 1..19: mol_type = other RNA
gtacacatgtggcagggaa

SEQ ID NO: 29224 - RNA, 19 nt, synthetic construct
  source 1..19: mol_type = other RNA
acactgaaccctcgtcaca

SEQ ID NO: 29225 - RNA, 19 nt, synthetic construct
  source 1..19: mol_type = other RNA
gtaggactcctgagtggcg

SEQ ID NO: 29226 - RNA, 19 nt, synthetic construct
  source 1..19: mol_type = other RNA
ggttgcagtccttggactg

SEQ ID NO: 29227 - RNA, 19 nt, synthetic construct
  source 1..19: mol_type = other RNA
ggttgcagtccttggactg

SEQ ID NO: 29228 - RNA, 19 nt, synthetic construct
  source 1..19: mol_type = other RNA
ggttgcagtccttggactg

SEQ ID NO: 29229 - RNA, 19 nt, synthetic construct
  source 1..19: mol_type = other RNA
ctgctgtcggcacatttct

SEQ ID NO: 29230 - RNA, 19 nt, synthetic construct
  source 1..19: mol_type = other RNA
atggaactggtggcccttg

SEQ ID NO: 29231 - RNA, 19 nt, synthetic construct
  source 1..19: mol_type = other RNA
ttgtggtcagctttgtgag

SEQ ID NO: 29232 - RNA, 19 nt, synthetic construct
  source 1..19: mol_type = other RNA
gtggaactggtggcccttg

SEQ ID NO: 29233 - RNA, 19 nt, synthetic construct
  source 1..19: mol_type = other RNA
ggcctcccgtggtggctgt

SEQ ID NO: 29234 - RNA, 19 nt, synthetic construct
  source 1..19: mol_type = other RNA
ggaggtgcccctggtgtgg

SEQ ID NO: 29235 - RNA, 19 nt, synthetic construct
  source 1..19: mol_type = other RNA
gaagtggacgtcacagtgc

SEQ ID NO: 29236 - RNA, 19 nt, synthetic construct
  source 1..19: mol_type = other RNA
aggtcctgggcgcaggcgg

SEQ ID NO: 29237 - RNA, 19 nt, synthetic construct
  source 1..19: mol_type = other RNA
aagtggacgtcacagtgca

SEQ ID NO: 29238 - RNA, 19 nt, synthetic construct
  source 1..19: mol_type = other RNA
cagcactttgagggtgcca

SEQ ID NO: 29239 - RNA, 19 nt, synthetic construct
  source 1..19: mol_type = other RNA
acacccgcccattgtgcgc

SEQ ID NO: 29240 - RNA, 19 nt, synthetic construct
  source 1..19: mol_type = other RNA
cccagtctgcgaggtgagg

SEQ ID NO: 29241 - RNA, 19 nt, synthetic construct
  source 1..19: mol_type = other RNA
accaggccgaagtggacgt

SEQ ID NO: 29242 - RNA, 19 nt, synthetic construct
  source 1..19: mol_type = other RNA
gtgcttgtgtatctggggg

SEQ ID NO: 29243 - RNA, 19 nt, synthetic construct
  source 1..19: mol_type = other RNA
ggtgtggtggtctgtgata

SEQ ID NO: 29244 - RNA, 19 nt, synthetic construct
  source 1..19: mol_type = other RNA
cagccactctgaccaggca

SEQ ID NO: 29245 - RNA, 19 nt, synthetic construct
  source 1..19: mol_type = other RNA
ggtgtggtggtctgtgata

SEQ ID NO: 29246 - RNA, 19 nt, synthetic construct
  source 1..19: mol_type = other RNA
cagccactctgaccaggca

SEQ ID NO: 29247 - RNA, 19 nt, synthetic construct
  source 1..19: mol_type = other RNA
ctgggctctgtgaggatcc

SEQ ID NO: 29248 - RNA, 19 nt, synthetic construct
  source 1..19: mol_type = other RNA
ggtgtggtggtctgtgata

SEQ ID NO: 29249 - RNA, 19 nt, synthetic construct
  source 1..19: mol_type = other RNA
cagccactctgaccaggca

SEQ ID NO: 29250 - RNA, 19 nt, synthetic construct
  source 1..19: mol_type = other RNA
ggtgtggtggtctgtgata

SEQ ID NO: 29251 - RNA, 19 nt, synthetic construct
  source 1..19: mol_type = other RNA
cagccactctgaccaggca

SEQ ID NO: 29252 - RNA, 19 nt, synthetic construct
  source 1..19: mol_type = other RNA
ggtgtggtggtctgtgata

SEQ ID NO: 29253 - RNA, 19 nt, synthetic construct
  source 1..19: mol_type = other RNA
gtctctggagtagaggagg

SEQ ID NO: 29254 - RNA, 19 nt, synthetic construct
  source 1..19: mol_type = other RNA
gagggggctttgggatgct

SEQ ID NO: 29255 - RNA, 19 nt, synthetic construct
  source 1..19: mol_type = other RNA
gcattctcccagctcggct

SEQ ID NO: 29256 - RNA, 19 nt, synthetic construct
  source 1..19: mol_type = other RNA
aactggagcggggtcagcc

SEQ ID NO: 29257 - RNA, 19 nt, synthetic construct
  source 1..19: mol_type = other RNA
ttcgcagcagagaacccgc

SEQ ID NO: 29258 - RNA, 19 nt, synthetic construct
  source 1..19: mol_type = other RNA
ggtgctggctgtgcctgtc

SEQ ID NO: 29259 - RNA, 19 nt, synthetic construct
  source 1..19: mol_type = other RNA
tgctagaggagggtgttgc

SEQ ID NO: 29260 - RNA, 19 nt, synthetic construct
  source 1..19: mol_type = other RNA
aaagggctggagtcgagtg

SEQ ID NO: 29261 - RNA, 19 nt, synthetic construct
  source 1..19: mol_type = other RNA
ggggctcacagcccatggt

SEQ ID NO: 29262 - RNA, 19 nt, synthetic construct
  source 1..19: mol_type = other RNA
cactctgaccaggcacact

SEQ ID NO: 29263 - RNA, 19 nt, synthetic construct
  source 1..19: mol_type = other RNA
tgggcctgggcacggcact

SEQ ID NO: 29264 - RNA, 19 nt, synthetic construct
  source 1..19: mol_type = other RNA
tgctagaggagggtgttgc

SEQ ID NO: 29265 - RNA, 19 nt, synthetic construct
  source 1..19: mol_type = other RNA
ggggctcacagcccatggt

SEQ ID NO: 29266 - RNA, 19 nt, synthetic construct
  source 1..19: mol_type = other RNA
cactctgaccaggcacact

SEQ ID NO: 29267 - RNA, 19 nt, synthetic construct
  source 1..19: mol_type = other RNA
tgggcctgggcacggcact

SEQ ID NO: 29268 - RNA, 19 nt, synthetic construct
  source 1..19: mol_type = other RNA
aggatccaggtcgtccctg

SEQ ID NO: 29269 - RNA, 19 nt, synthetic construct
  source 1..19: mol_type = other RNA
agggggagctgttcccggg

SEQ ID NO: 29270 - RNA, 19 nt, synthetic construct
  source 1..19: mol_type = other RNA
tggtggtctgttctgggag

SEQ ID NO: 29271 - RNA, 19 nt, synthetic construct
  source 1..19: mol_type = other RNA
tcagcactttgagggtgcc

SEQ ID NO: 29272 - RNA, 19 nt, synthetic construct
  source 1..19: mol_type = other RNA
tgctagaggagggtgttgc

SEQ ID NO: 29273 - RNA, 19 nt, synthetic construct
  source 1..19: mol_type = other RNA
cactctgaccaggcacact

SEQ ID NO: 29274 - RNA, 19 nt, synthetic construct
  source 1..19: mol_type = other RNA
tgggcctgggcacggcact

SEQ ID NO: 29275 - RNA, 19 nt, synthetic construct
  source 1..19: mol_type = other RNA
actggaggcgtgcgtgccg

SEQ ID NO: 29276 - RNA, 19 nt, synthetic construct
  source 1..19: mol_type = other RNA
tgctagaggagggtgttgc

SEQ ID NO: 29277 - RNA, 19 nt, synthetic construct
  source 1..19: mol_type = other RNA
cactctgaccaggcacact

SEQ ID NO: 29278 - RNA, 19 nt, synthetic construct
  source 1..19: mol_type = other RNA
tgggcctgggcacggcact

SEQ ID NO: 29279 - RNA, 19 nt, synthetic construct
  source 1..19: mol_type = other RNA
agggggagctgttcccggg

SEQ ID NO: 29280 - RNA, 19 nt, synthetic construct
  source 1..19: mol_type = other RNA
tggtggtctgttctgggag

SEQ ID NO: 29281 - RNA, 19 nt, synthetic construct
  source 1..19: mol_type = other RNA
ttgtggacatggtggccac

SEQ ID NO: 29282 - RNA, 19 nt, synthetic construct
  source 1..19: mol_type = other RNA
tggtggtcagcactctggc

SEQ ID NO: 29283 - RNA, 19 nt, synthetic construct
  source 1..19: mol_type = other RNA
tgctagaggagggtgttgc

SEQ ID NO: 29284 - RNA, 19 nt, synthetic construct
  source 1..19: mol_type = other RNA
tgctgacccaccgctcccc

SEQ ID NO: 29285 - RNA, 19 nt, synthetic construct
  source 1..19: mol_type = other RNA
tgccctggcgggcacacag

SEQ ID NO: 29286 - RNA, 19 nt, synthetic construct
  source 1..19: mol_type = other RNA
gccactctcttgtactcaa

SEQ ID NO: 29287 - RNA, 19 nt, synthetic construct
  source 1..19: mol_type = other RNA
cctggtgctgcatgttgag

SEQ ID NO: 29288 - RNA, 19 nt, synthetic construct
  source 1..19: mol_type = other RNA
ggtgcttgtgtatctgggg

SEQ ID NO: 29289 - RNA, 19 nt, synthetic construct
  source 1..19: mol_type = other RNA
ctcattcacctgccggaga

SEQ ID NO: 29290 - RNA, 19 nt, synthetic construct
  source 1..19: mol_type = other RNA
atggagtggcagcgcgaga

SEQ ID NO: 29291 - RNA, 19 nt, synthetic construct
  source 1..19: mol_type = other RNA
ggctcacagcccgtggtca

SEQ ID NO: 29292 - RNA, 19 nt, synthetic construct
  source 1..19: mol_type = other RNA
ggctcacagcccgtggtca

SEQ ID NO: 29293 - RNA, 19 nt, synthetic construct
  source 1..19: mol_type = other RNA
caaatggactccaccctca

SEQ ID NO: 29294 - RNA, 19 nt, synthetic construct
  source 1..19: mol_type = other RNA
gtttcacccacggggtggg

SEQ ID NO: 29295 - RNA, 19 nt, synthetic construct
  source 1..19: mol_type = other RNA
caggtcctgggcgcaggcg

SEQ ID NO: 29296 - RNA, 19 nt, synthetic construct
  source 1..19: mol_type = other RNA
cgcagctgccttcaaagct

SEQ ID NO: 29297 - RNA, 19 nt, synthetic construct
  source 1..19: mol_type = other RNA
cttgtgtatctgggggatg

SEQ ID NO: 29298 - RNA, 19 nt, synthetic construct
  source 1..19: mol_type = other RNA
gggtgtgtgggtggtccct

SEQ ID NO: 29299 - RNA, 19 nt, synthetic construct
  source 1..19: mol_type = other RNA
tatgggggccgatgtgggg

SEQ ID NO: 29300 - RNA, 19 nt, synthetic construct
  source 1..19: mol_type = other RNA
tggggctcacagcccatgg

SEQ ID NO: 29301 - RNA, 19 nt, synthetic construct
  source 1..19: mol_type = other RNA
gggtgtgtgggtggtccct

SEQ ID NO: 29302 - RNA, 19 nt, synthetic construct
  source 1..19: mol_type = other RNA
tggggctcacagcccatgg

SEQ ID NO: 29303 - RNA, 19 nt, synthetic construct
  source 1..19: mol_type = other RNA
gggtgtgtgggtggtccct

SEQ ID NO: 29304 - RNA, 19 nt, synthetic construct
  source 1..19: mol_type = other RNA
tatgggggccgatgtgggg

SEQ ID NO: 29305 - RNA, 19 nt, synthetic construct
  source 1..19: mol_type = other RNA
gggtgtgtgggtggtccct

SEQ ID NO: 29306 - RNA, 19 nt, synthetic construct
  source 1..19: mol_type = other RNA
tatgggggccgatgtgggg

SEQ ID NO: 29307 - RNA, 19 nt, synthetic construct
  source 1..19: mol_type = other RNA
gggtgtgccagtcggggcc

SEQ ID NO: 29308 - RNA, 19 nt, synthetic construct
  source 1..19: mol_type = other RNA
ggggtgggtgtgctagaca

SEQ ID NO: 29309 - RNA, 19 nt, synthetic construct
  source 1..19: mol_type = other RNA
tgcctgcggcaccacgagc

SEQ ID NO: 29310 - RNA, 19 nt, synthetic construct
  source 1..19: mol_type = other RNA
cacacccgcccattgtgcg

SEQ ID NO: 29311 - RNA, 19 nt, synthetic construct
  source 1..19: mol_type = other RNA
ccacaggaatgtcagcacc

SEQ ID NO: 29312 - RNA, 19 nt, synthetic construct
  source 1..19: mol_type = other RNA
tccacaggaatgtcagcac

SEQ ID NO: 29313 - RNA, 19 nt, synthetic construct
  source 1..19: mol_type = other RNA
agtgcgtgatgtcatccag

SEQ ID NO: 29314 - RNA, 19 nt, synthetic construct
  source 1..19: mol_type = other RNA
ggtgcccgggctgtaggtg

SEQ ID NO: 29315 - RNA, 19 nt, synthetic construct
  source 1..19: mol_type = other RNA
agggccgtgaagtcgtcag

SEQ ID NO: 29316 - RNA, 19 nt, synthetic construct
  source 1..19: mol_type = other RNA
gacgccgtccctccagtcg

SEQ ID NO: 29317 - RNA, 19 nt, synthetic construct
  source 1..19: mol_type = other RNA
cggaaggtcccgtgggtgg

SEQ ID NO: 29318 - RNA, 19 nt, synthetic construct
  source 1..19: mol_type = other RNA
cccctcttggaggatcagc

SEQ ID NO: 29319 - RNA, 19 nt, synthetic construct
  source 1..19: mol_type = other RNA
aacaaggggcaggtgtccg

SEQ ID NO: 29320 - RNA, 19 nt, synthetic construct
  source 1..19: mol_type = other RNA
cagcagagaacccgcagct

SEQ ID NO: 29321 - RNA, 19 nt, synthetic construct
  source 1..19: mol_type = other RNA
atgctcggggtcacccata

SEQ ID NO: 29322 - RNA, 19 nt, synthetic construct
  source 1..19: mol_type = other RNA
gatgtcagtccttctgaga

SEQ ID NO: 29323 - RNA, 19 nt, synthetic construct
  source 1..19: mol_type = other RNA
gggtgcttgtgtatctggg

SEQ ID NO: 29324 - RNA, 19 nt, synthetic construct
  source 1..19: mol_type = other RNA
gttggggccagcgtgggtg

SEQ ID NO: 29325 - RNA, 19 nt, synthetic construct
  source 1..19: mol_type = other RNA
ttgttggggccagcgtggg

SEQ ID NO: 29326 - RNA, 19 nt, synthetic construct
  source 1..19: mol_type = other RNA
cgtggtcagcggctctttg

SEQ ID NO: 29327 - RNA, 19 nt, synthetic construct
  source 1..19: mol_type = other RNA
gagaggtggacagctcgct

SEQ ID NO: 29328 - RNA, 19 nt, synthetic construct
  source 1..19: mol_type = other RNA
gggagggggagctgttctc

SEQ ID NO: 29329 - RNA, 19 nt, synthetic construct
  source 1..19: mol_type = other RNA
gccatggtgttcggcactg

SEQ ID NO: 29330 - RNA, 19 nt, synthetic construct
  source 1..19: mol_type = other RNA
gaaggctctgtgatgtggg

SEQ ID NO: 29331 - RNA, 19 nt, synthetic construct
  source 1..19: mol_type = other RNA
ggaaggctctgtgatgtgg

SEQ ID NO: 29332 - RNA, 19 nt, synthetic construct
  source 1..19: mol_type = other RNA
accgtggaaggctctgtga

SEQ ID NO: 29333 - RNA, 19 nt, synthetic construct
  source 1..19: mol_type = other RNA
gaagtcaccgtggaaggct

SEQ ID NO: 29334 - RNA, 19 nt, synthetic construct
  source 1..19: mol_type = other RNA
ttctgctgctagggtgagg

SEQ ID NO: 29335 - RNA, 19 nt, synthetic construct
  source 1..19: mol_type = other RNA
ttatgggggccgatgtggg

SEQ ID NO: 29336 - RNA, 19 nt, synthetic construct
  source 1..19: mol_type = other RNA
ctgctcacggttcctgcag

SEQ ID NO: 29337 - RNA, 19 nt, synthetic construct
  source 1..19: mol_type = other RNA
atggccgtagagctggtgg

SEQ ID NO: 29338 - RNA, 19 nt, synthetic construct
  source 1..19: mol_type = other RNA
tggactggagaagggagtg

SEQ ID NO: 29339 - RNA, 19 nt, synthetic construct
  source 1..19: mol_type = other RNA
gaaggctctgtgatgtggg

SEQ ID NO: 29340 - RNA, 19 nt, synthetic construct
  source 1..19: mol_type = other RNA
ggaaggctctgtgatgtgg

SEQ ID NO: 29341 - RNA, 19 nt, synthetic construct
  source 1..19: mol_type = other RNA
cccgtggaaggctctgtga

SEQ ID NO: 29342 - RNA, 19 nt, synthetic construct
  source 1..19: mol_type = other RNA
ctgctcacggttcctgcag

SEQ ID NO: 29343 - RNA, 19 nt, synthetic construct
  source 1..19: mol_type = other RNA
gtggccgtagagctggtgg

SEQ ID NO: 29344 - RNA, 19 nt, synthetic construct
  source 1..19: mol_type = other RNA
tgtggtctgctctgtgagg

SEQ ID NO: 29345 - RNA, 19 nt, synthetic construct
  source 1..19: mol_type = other RNA
ggggtggaggacgggatgg

SEQ ID NO: 29346 - RNA, 19 nt, synthetic construct
  source 1..19: mol_type = other RNA
gtgtggtggtctgttctgg

SEQ ID NO: 29347 - RNA, 19 nt, synthetic construct
  source 1..19: mol_type = other RNA
tggacatggtggccatggg

SEQ ID NO: 29348 - RNA, 19 nt, synthetic construct
  source 1..19: mol_type = other RNA
gaaggctctgtgatgtggg

SEQ ID NO: 29349 - RNA, 19 nt, synthetic construct
  source 1..19: mol_type = other RNA
ggaaggctctgtgatgtgg

SEQ ID NO: 29350 - RNA, 19 nt, synthetic construct
  source 1..19: mol_type = other RNA
accgtggaaggctctgtga

SEQ ID NO: 29351 - RNA, 19 nt, synthetic construct
  source 1..19: mol_type = other RNA
gaagtcaccgtggaaggct

SEQ ID NO: 29352 - RNA, 19 nt, synthetic construct
  source 1..19: mol_type = other RNA
ttatgggggccgatgtggg

SEQ ID NO: 29353 - RNA, 19 nt, synthetic construct
  source 1..19: mol_type = other RNA
ctgctcacggttcctgcag

SEQ ID NO: 29354 - RNA, 19 nt, synthetic construct
  source 1..19: mol_type = other RNA
gtggccgtagagctggtgg

SEQ ID NO: 29355 - RNA, 19 nt, synthetic construct
  source 1..19: mol_type = other RNA
tggactggagaagggagtg

SEQ ID NO: 29356 - RNA, 19 nt, synthetic construct
  source 1..19: mol_type = other RNA
tggccgtggtgatcagtga

SEQ ID NO: 29357 - RNA, 19 nt, synthetic construct
  source 1..19: mol_type = other RNA
gaaggctctgtgatgtggg

SEQ ID NO: 29358 - RNA, 19 nt, synthetic construct
  source 1..19: mol_type = other RNA
ggaaggctctgtgatgtgg

SEQ ID NO: 29359 - RNA, 19 nt, synthetic construct
  source 1..19: mol_type = other RNA
cccgtggaaggctctgtga

SEQ ID NO: 29360 - RNA, 19 nt, synthetic construct
  source 1..19: mol_type = other RNA
ttatgggggccgatgtggg

SEQ ID NO: 29361 - RNA, 19 nt, synthetic construct
  source 1..19: mol_type = other RNA
ctgctcacggttcctgcag

SEQ ID NO: 29362 - RNA, 19 nt, synthetic construct
  source 1..19: mol_type = other RNA
atggccgtagagctggtgg

SEQ ID NO: 29363 - RNA, 19 nt, synthetic construct
  source 1..19: mol_type = other RNA
gtgtggtggtctgttctgg

SEQ ID NO: 29364 - RNA, 19 nt, synthetic construct
  source 1..19: mol_type = other RNA
ccacgtggtccacagggtg

SEQ ID NO: 29365 - RNA, 19 nt, synthetic construct
  source 1..19: mol_type = other RNA
gctgtggtggtcagcactg

SEQ ID NO: 29366 - RNA, 19 nt, synthetic construct
  source 1..19: mol_type = other RNA
cagggtggccgtggatcca

SEQ ID NO: 29367 - RNA, 19 nt, synthetic construct
  source 1..19: mol_type = other RNA
gggtctcagggtggtgagg

SEQ ID NO: 29368 - RNA, 19 nt, synthetic construct
  source 1..19: mol_type = other RNA
gaggctgagattcccaaag

SEQ ID NO: 29369 - RNA, 19 nt, synthetic construct
  source 1..19: mol_type = other RNA
cgcatggcttgtacacttt

SEQ ID NO: 29370 - RNA, 19 nt, synthetic construct
  source 1..19: mol_type = other RNA
ctgaggtctgcagcggaag

SEQ ID NO: 29371 - RNA, 19 nt, synthetic construct
  source 1..19: mol_type = other RNA
ccccagagaggcaggtaca

SEQ ID NO: 29372 - RNA, 19 nt, synthetic construct
  source 1..19: mol_type = other RNA
ccactctcttgtactcaaa

SEQ ID NO: 29373 - RNA, 19 nt, synthetic construct
  source 1..19: mol_type = other RNA
ggacttgacaggagtcctc

SEQ ID NO: 29374 - RNA, 19 nt, synthetic construct
  source 1..19: mol_type = other RNA
ccctggtgccacaggatgg

SEQ ID NO: 29375 - RNA, 19 nt, synthetic construct
  source 1..19: mol_type = other RNA
tgcaagggcaccgtctcct

SEQ ID NO: 29376 - RNA, 19 nt, synthetic construct
  source 1..19: mol_type = other RNA
tgtgggggagccatgggcg

SEQ ID NO: 29377 - RNA, 19 nt, synthetic construct
  source 1..19: mol_type = other RNA
tccgtgctgcgcgggcgct

SEQ ID NO: 29378 - RNA, 19 nt, synthetic construct
  source 1..19: mol_type = other RNA
tgcctgtcgcagcttcctg

SEQ ID NO: 29379 - RNA, 19 nt, synthetic construct
  source 1..19: mol_type = other RNA
ccaagggtgcttgtgtatc

SEQ ID NO: 29380 - RNA, 19 nt, synthetic construct
  source 1..19: mol_type = other RNA
ccagtcgctgagctgtacg

SEQ ID NO: 29381 - RNA, 19 nt, synthetic construct
  source 1..19: mol_type = other RNA
ccgggtgggcgaggacgtc

SEQ ID NO: 29382 - RNA, 19 nt, synthetic construct
  source 1..19: mol_type = other RNA
ccgtggaacctctggttgt

SEQ ID NO: 29383 - RNA, 19 nt, synthetic construct
  source 1..19: mol_type = other RNA
cactggggggataggtgtt

SEQ ID NO: 29384 - RNA, 19 nt, synthetic construct
  source 1..19: mol_type = other RNA
cactggggggataggtgtt

SEQ ID NO: 29385 - RNA, 19 nt, synthetic construct
  source 1..19: mol_type = other RNA
tgggtgggcaggtgaggtc

SEQ ID NO: 29386 - RNA, 19 nt, synthetic construct
  source 1..19: mol_type = other RNA
agctgaggtctgcagcgga

SEQ ID NO: 29387 - RNA, 19 nt, synthetic construct
  source 1..19: mol_type = other RNA
ccccatgtgggttgtagaa

SEQ ID NO: 29388 - RNA, 19 nt, synthetic construct
  source 1..19: mol_type = other RNA
tgctcacggttcctgcaga

SEQ ID NO: 29389 - RNA, 19 nt, synthetic construct
  source 1..19: mol_type = other RNA
tgctcacggttcctgcaga

SEQ ID NO: 29390 - RNA, 19 nt, synthetic construct
  source 1..19: mol_type = other RNA
tgctcacggttcctgcaga

SEQ ID NO: 29391 - RNA, 19 nt, synthetic construct
  source 1..19: mol_type = other RNA
tgctcacggttcctgcaga

SEQ ID NO: 29392 - RNA, 19 nt, synthetic construct
  source 1..19: mol_type = other RNA
aaaaactgtccaaatgccc

SEQ ID NO: 29393 - RNA, 19 nt, synthetic construct
  source 1..19: mol_type = other RNA
atggtgtgccctgcattct

SEQ ID NO: 29394 - RNA, 19 nt, synthetic construct
  source 1..19: mol_type = other RNA
cagcacagggcatacctgg

SEQ ID NO: 29395 - RNA, 19 nt, synthetic construct
  source 1..19: mol_type = other RNA
aggtgtgggcagtctctgg

SEQ ID NO: 29396 - RNA, 19 nt, synthetic construct
  source 1..19: mol_type = other RNA
ctgctagggtgagggctgg

SEQ ID NO: 29397 - RNA, 19 nt, synthetic construct
  source 1..19: mol_type = other RNA
ctgctagggtgagggctgg

SEQ ID NO: 29398 - RNA, 19 nt, synthetic construct
  source 1..19: mol_type = other RNA
ctgtagtgctgggctctgt

SEQ ID NO: 29399 - RNA, 19 nt, synthetic construct
  source 1..19: mol_type = other RNA
cagttgcccgggtggagga

SEQ ID NO: 29400 - RNA, 19 nt, synthetic construct
  source 1..19: mol_type = other RNA
ctgctagggtgagggctgg

SEQ ID NO: 29401 - RNA, 19 nt, synthetic construct
  source 1..19: mol_type = other RNA
aggtgtgggcagtctctgg

SEQ ID NO: 29402 - RNA, 19 nt, synthetic construct
  source 1..19: mol_type = other RNA
ctgctagggtgagggctgg

SEQ ID NO: 29403 - RNA, 19 nt, synthetic construct
  source 1..19: mol_type = other RNA
tgggtgttgtccctggagt

SEQ ID NO: 29404 - RNA, 19 nt, synthetic construct
  source 1..19: mol_type = other RNA
gcatggccgccagagccaa

SEQ ID NO: 29405 - RNA, 19 nt, synthetic construct
  source 1..19: mol_type = other RNA
cccccatgtgggttgtaga

SEQ ID NO: 29406 - RNA, 19 nt, synthetic construct
  source 1..19: mol_type = other RNA
ggcagggacacataggccc

SEQ ID NO: 29407 - RNA, 19 nt, synthetic construct
  source 1..19: mol_type = other RNA
caagggtgaaggaggggat

SEQ ID NO: 29408 - RNA, 19 nt, synthetic construct
  source 1..19: mol_type = other RNA
ggaggttgccattgttgtt

SEQ ID NO: 29409 - RNA, 19 nt, synthetic construct
  source 1..19: mol_type = other RNA
tcaccgctttcaggcagtt

SEQ ID NO: 29410 - RNA, 19 nt, synthetic construct
  source 1..19: mol_type = other RNA
tggaggttgccattgttgt

SEQ ID NO: 29411 - RNA, 19 nt, synthetic construct
  source 1..19: mol_type = other RNA
aggggtggattgtggacat

SEQ ID NO: 29412 - RNA, 19 nt, synthetic construct
  source 1..19: mol_type = other RNA
aggggtggattgtggacat

SEQ ID NO: 29413 - RNA, 19 nt, synthetic construct
  source 1..19: mol_type = other RNA
tgccccagcggccggacgt

SEQ ID NO: 29414 - RNA, 19 nt, synthetic construct
  source 1..19: mol_type = other RNA
ctggaggttgccattgttg

SEQ ID NO: 29415 - RNA, 19 nt, synthetic construct
  source 1..19: mol_type = other RNA
cccgagtcgcaggcacacg

SEQ ID NO: 29416 - RNA, 19 nt, synthetic construct
  source 1..19: mol_type = other RNA
ttggtgggtgggcaggtga

SEQ ID NO: 29417 - RNA, 19 nt, synthetic construct
  source 1..19: mol_type = other RNA
tcctagagttgcaggtggc

SEQ ID NO: 29418 - RNA, 19 nt, synthetic construct
  source 1..19: mol_type = other RNA
ggtggtcaccactttgggg

SEQ ID NO: 29419 - RNA, 19 nt, synthetic construct
  source 1..19: mol_type = other RNA
acgaacacagctgaggtct

SEQ ID NO: 29420 - RNA, 19 nt, synthetic construct
  source 1..19: mol_type = other RNA
gccgtccctccagtcgctg

SEQ ID NO: 29421 - RNA, 19 nt, synthetic construct
  source 1..19: mol_type = other RNA
ggctgttgtggtcagcttt

SEQ ID NO: 29422 - RNA, 19 nt, synthetic construct
  source 1..19: mol_type = other RNA
ttgaaggaggtgcccgggc

SEQ ID NO: 29423 - RNA, 19 nt, synthetic construct
  source 1..19: mol_type = other RNA
tctgtggtcggtggcgggg

SEQ ID NO: 29424 - RNA, 19 nt, synthetic construct
  source 1..19: mol_type = other RNA
gtggtggtcagcactttgg

SEQ ID NO: 29425 - RNA, 19 nt, synthetic construct
  source 1..19: mol_type = other RNA
gtggtggctgtgcttctca

SEQ ID NO: 29426 - RNA, 19 nt, synthetic construct
  source 1..19: mol_type = other RNA
cgccagagggccccggcat

SEQ ID NO: 29427 - RNA, 19 nt, synthetic construct
  source 1..19: mol_type = other RNA
gtggtggctgtgcttctca

SEQ ID NO: 29428 - RNA, 19 nt, synthetic construct
  source 1..19: mol_type = other RNA
ctgctggggtgtgggaagt

SEQ ID NO: 29429 - RNA, 19 nt, synthetic construct
  source 1..19: mol_type = other RNA
cgccagagggccccggcat

SEQ ID NO: 29430 - RNA, 19 nt, synthetic construct
  source 1..19: mol_type = other RNA
gtggtggctgtgcttctca

SEQ ID NO: 29431 - RNA, 19 nt, synthetic construct
  source 1..19: mol_type = other RNA
tctggagtagaggagggtg

SEQ ID NO: 29432 - RNA, 19 nt, synthetic construct
  source 1..19: mol_type = other RNA
ctgctggggtgtgggaagt

SEQ ID NO: 29433 - RNA, 19 nt, synthetic construct
  source 1..19: mol_type = other RNA
cgccagagggccccggcat

SEQ ID NO: 29434 - RNA, 19 nt, synthetic construct
  source 1..19: mol_type = other RNA
gtggtggctgtgcttctca

SEQ ID NO: 29435 - RNA, 19 nt, synthetic construct
  source 1..19: mol_type = other RNA
ctgctggggtgtgggaagt

SEQ ID NO: 29436 - RNA, 19 nt, synthetic construct
  source 1..19: mol_type = other RNA
cgccagagggccccggcat

SEQ ID NO: 29437 - RNA, 19 nt, synthetic construct
  source 1..19: mol_type = other RNA
gtggtggctgtgcttctca

SEQ ID NO: 29438 - RNA, 19 nt, synthetic construct
  source 1..19: mol_type = other RNA
ctcctccttcccatgcacc

SEQ ID NO: 29439 - RNA, 19 nt, synthetic construct
  source 1..19: mol_type = other RNA
tggtggtccccagcacaga

SEQ ID NO: 29440 - RNA, 19 nt, synthetic construct
  source 1..19: mol_type = other RNA
tcctgccctggcgggcaca

SEQ ID NO: 29441 - RNA, 19 nt, synthetic construct
  source 1..19: mol_type = other RNA
cggtctcgcagccctggtg

SEQ ID NO: 29442 - RNA, 19 nt, synthetic construct
  source 1..19: mol_type = other RNA
agggtttatttgcaaaact

SEQ ID NO: 29443 - RNA, 19 nt, synthetic construct
  source 1..19: mol_type = other RNA
gcatgcggtcacagtccac

SEQ ID NO: 29444 - RNA, 19 nt, synthetic construct
  source 1..19: mol_type = other RNA
gactgcccctccggccgca

SEQ ID NO: 29445 - RNA, 19 nt, synthetic construct
  source 1..19: mol_type = other RNA
ctttgggtccagcaggacg

SEQ ID NO: 29446 - RNA, 19 nt, synthetic construct
  source 1..19: mol_type = other RNA
ggcagtggctgtgggcata

SEQ ID NO: 29447 - RNA, 19 nt, synthetic construct
  source 1..19: mol_type = other RNA
gcagccacactcatccacg

SEQ ID NO: 29448 - RNA, 19 nt, synthetic construct
  source 1..19: mol_type = other RNA
tgtggtcagctcagtgagg

SEQ ID NO: 29449 - RNA, 19 nt, synthetic construct
  source 1..19: mol_type = other RNA
gtggtcagctcagtgagga

SEQ ID NO: 29450 - RNA, 19 nt, synthetic construct
  source 1..19: mol_type = other RNA
gccccaggggtgcccgccg

SEQ ID NO: 29451 - RNA, 19 nt, synthetic construct
  source 1..19: mol_type = other RNA
tgggagttgtccctggagt

SEQ ID NO: 29452 - RNA, 19 nt, synthetic construct
  source 1..19: mol_type = other RNA
attgtggacatggtggcca

SEQ ID NO: 29453 - RNA, 19 nt, synthetic construct
  source 1..19: mol_type = other RNA
acatcagggaggggcaagg

SEQ ID NO: 29454 - RNA, 19 nt, synthetic construct
  source 1..19: mol_type = other RNA
ggagcggggtcagcctggc

SEQ ID NO: 29455 - RNA, 19 nt, synthetic construct
  source 1..19: mol_type = other RNA
ccactgggtgtgcagttac

SEQ ID NO: 29456 - RNA, 19 nt, synthetic construct
  source 1..19: mol_type = other RNA
ctctgcctcaggttttcaa

SEQ ID NO: 29457 - RNA, 19 nt, synthetic construct
  source 1..19: mol_type = other RNA
gtgtgtggtggccatggtg

SEQ ID NO: 29458 - RNA, 19 nt, synthetic construct
  source 1..19: mol_type = other RNA
tcagcaaagacctggctca

SEQ ID NO: 29459 - RNA, 19 nt, synthetic construct
  source 1..19: mol_type = other RNA
ggccccaggggtgcccgcc

SEQ ID NO: 29460 - RNA, 19 nt, synthetic construct
  source 1..19: mol_type = other RNA
ctggactggctggccatcg

SEQ ID NO: 29461 - RNA, 19 nt, synthetic construct
  source 1..19: mol_type = other RNA
ccccacctgctcacggttc

SEQ ID NO: 29462 - RNA, 19 nt, synthetic construct
  source 1..19: mol_type = other RNA
cggtggccccggttgtggt

SEQ ID NO: 29463 - RNA, 19 nt, synthetic construct
  source 1..19: mol_type = other RNA
ccccacctgctcacggttc

SEQ ID NO: 29464 - RNA, 19 nt, synthetic construct
  source 1..19: mol_type = other RNA
ccccacctgctcacggttc

SEQ ID NO: 29465 - RNA, 19 nt, synthetic construct
  source 1..19: mol_type = other RNA
ccccacctgctcacggttc

SEQ ID NO: 29466 - RNA, 19 nt, synthetic construct
  source 1..19: mol_type = other RNA
cggtggccccggttgtggt

SEQ ID NO: 29467 - RNA, 19 nt, synthetic construct
  source 1..19: mol_type = other RNA
acagtggtcctcgcagagc

SEQ ID NO: 29468 - RNA, 19 nt, synthetic construct
  source 1..19: mol_type = other RNA
gtgtgggtggtccctaggg

SEQ ID NO: 29469 - RNA, 19 nt, synthetic construct
  source 1..19: mol_type = other RNA
gtgtgggtggtccctaggg

SEQ ID NO: 29470 - RNA, 19 nt, synthetic construct
  source 1..19: mol_type = other RNA
gtgtgggtggtccctaggg

SEQ ID NO: 29471 - RNA, 19 nt, synthetic construct
  source 1..19: mol_type = other RNA
gtgtgggtggtccctaggg

SEQ ID NO: 29472 - RNA, 19 nt, synthetic construct
  source 1..19: mol_type = other RNA
gcaggcatggacaggcggc

SEQ ID NO: 29473 - RNA, 19 nt, synthetic construct
  source 1..19: mol_type = other RNA
cctgggtctctgcctgcgg

SEQ ID NO: 29474 - RNA, 19 nt, synthetic construct
  source 1..19: mol_type = other RNA
ccgggggagccctggtcag

SEQ ID NO: 29475 - RNA, 19 nt, synthetic construct
  source 1..19: mol_type = other RNA
cagagccggtggccccagt

SEQ ID NO: 29476 - RNA, 19 nt, synthetic construct
  source 1..19: mol_type = other RNA
aggagggagtcactgtgtt

SEQ ID NO: 29477 - RNA, 19 nt, synthetic construct
  source 1..19: mol_type = other RNA
gggtgactcggtggttctg

SEQ ID NO: 29478 - RNA, 19 nt, synthetic construct
  source 1..19: mol_type = other RNA
gacagtctctggagtagag

SEQ ID NO: 29479 - RNA, 19 nt, synthetic construct
  source 1..19: mol_type = other RNA
tgggtggtctctggagtag

SEQ ID NO: 29480 - RNA, 19 nt, synthetic construct
  source 1..19: mol_type = other RNA
gtctcagggtggtgaggac

SEQ ID NO: 29481 - RNA, 19 nt, synthetic construct
  source 1..19: mol_type = other RNA
gaagtccccacacaggcca

SEQ ID NO: 29482 - RNA, 19 nt, synthetic construct
  source 1..19: mol_type = other RNA
tgcggtggcagatgccctc

SEQ ID NO: 29483 - RNA, 19 nt, synthetic construct
  source 1..19: mol_type = other RNA
cagccgtccacacagtggt

SEQ ID NO: 29484 - RNA, 19 nt, synthetic construct
  source 1..19: mol_type = other RNA
catgagtggcaccagctgc

SEQ ID NO: 29485 - RNA, 19 nt, synthetic construct
  source 1..19: mol_type = other RNA
gccgtgaagtcgtcagcct

SEQ ID NO: 29486 - RNA, 19 nt, synthetic construct
  source 1..19: mol_type = other RNA
tccttaggctgctggcata

SEQ ID NO: 29487 - RNA, 19 nt, synthetic construct
  source 1..19: mol_type = other RNA
agggtgcttgtgtatctgg

SEQ ID NO: 29488 - RNA, 19 nt, synthetic construct
  source 1..19: mol_type = other RNA
agggtggatgtggccaccc

SEQ ID NO: 29489 - RNA, 19 nt, synthetic construct
  source 1..19: mol_type = other RNA
agcgtgttggaagggtgga

SEQ ID NO: 29490 - RNA, 19 nt, synthetic construct
  source 1..19: mol_type = other RNA
ttgtggtggccgtggcggt

SEQ ID NO: 29491 - RNA, 19 nt, synthetic construct
  source 1..19: mol_type = other RNA
gagttgtcccaggagttga

SEQ ID NO: 29492 - RNA, 19 nt, synthetic construct
  source 1..19: mol_type = other RNA
caccgtcacggtggctgta

SEQ ID NO: 29493 - RNA, 19 nt, synthetic construct
  source 1..19: mol_type = other RNA
ggtggttgcagtccttgga

SEQ ID NO: 29494 - RNA, 19 nt, synthetic construct
  source 1..19: mol_type = other RNA
ccaagggtgaaggagggga

SEQ ID NO: 29495 - RNA, 19 nt, synthetic construct
  source 1..19: mol_type = other RNA
ggtgtggtggtctgttctg

SEQ ID NO: 29496 - RNA, 19 nt, synthetic construct
  source 1..19: mol_type = other RNA
caccgtcacggtggctgta

SEQ ID NO: 29497 - RNA, 19 nt, synthetic construct
  source 1..19: mol_type = other RNA
caccgtcacggtggctgta

SEQ ID NO: 29498 - RNA, 19 nt, synthetic construct
  source 1..19: mol_type = other RNA
ggtggttgcagtccttgga

SEQ ID NO: 29499 - RNA, 19 nt, synthetic construct
  source 1..19: mol_type = other RNA
ggtgtggtggtctgttctg

SEQ ID NO: 29500 - RNA, 19 nt, synthetic construct
  source 1..19: mol_type = other RNA
caccgtcacggtggctgta

SEQ ID NO: 29501 - RNA, 19 nt, synthetic construct
  source 1..19: mol_type = other RNA
ttgtggtggccgtggcggt

SEQ ID NO: 29502 - RNA, 19 nt, synthetic construct
  source 1..19: mol_type = other RNA
ggtggttgcagtccttgga

SEQ ID NO: 29503 - RNA, 19 nt, synthetic construct
  source 1..19: mol_type = other RNA
tcagatcacagagcggctg

SEQ ID NO: 29504 - RNA, 19 nt, synthetic construct
  source 1..19: mol_type = other RNA
cagcaggggttctcggccc

SEQ ID NO: 29505 - RNA, 19 nt, synthetic construct
  source 1..19: mol_type = other RNA
ggggtgtgggaagtccccg

SEQ ID NO: 29506 - RNA, 19 nt, synthetic construct
  source 1..19: mol_type = other RNA
ccgtggttgtggtagtcgg

SEQ ID NO: 29507 - RNA, 19 nt, synthetic construct
  source 1..19: mol_type = other RNA
ccgtggttgtggtagtcgg

SEQ ID NO: 29508 - RNA, 19 nt, synthetic construct
  source 1..19: mol_type = other RNA
ggggtcaccgtggagccac

SEQ ID NO: 29509 - RNA, 19 nt, synthetic construct
  source 1..19: mol_type = other RNA
ggggtgtgggaagtccccg

SEQ ID NO: 29510 - RNA, 19 nt, synthetic construct
  source 1..19: mol_type = other RNA
ccgtggttgtggtagtcgg

SEQ ID NO: 29511 - RNA, 19 nt, synthetic construct
  source 1..19: mol_type = other RNA
ggggtcaccgtggagccac

SEQ ID NO: 29512 - RNA, 19 nt, synthetic construct
  source 1..19: mol_type = other RNA
cctcgcagaaggtgatgtt

SEQ ID NO: 29513 - RNA, 19 nt, synthetic construct
  source 1..19: mol_type = other RNA
atcagcccccgcatgcggt

SEQ ID NO: 29514 - RNA, 19 nt, synthetic construct
  source 1..19: mol_type = other RNA
gccgggtgggcgaggacgt

SEQ ID NO: 29515 - RNA, 19 nt, synthetic construct
  source 1..19: mol_type = other RNA
ccatgcaggtcgtagagtt

SEQ ID NO: 29516 - RNA, 19 nt, synthetic construct
  source 1..19: mol_type = other RNA
gttttcaaacgtctcaaag

SEQ ID NO: 29517 - RNA, 19 nt, synthetic construct
  source 1..19: mol_type = other RNA
gggtgtggtggtctgttct

SEQ ID NO: 29518 - RNA, 19 nt, synthetic construct
  source 1..19: mol_type = other RNA
ccaactcccccagggggac

SEQ ID NO: 29519 - RNA, 19 nt, synthetic construct
  source 1..19: mol_type = other RNA
gggtgtggtggtctgttct

SEQ ID NO: 29520 - RNA, 19 nt, synthetic construct
  source 1..19: mol_type = other RNA
gggcaccatcacggtggct

SEQ ID NO: 29521 - RNA, 19 nt, synthetic construct
  source 1..19: mol_type = other RNA
ggtggtccccacggtggac

SEQ ID NO: 29522 - RNA, 19 nt, synthetic construct
  source 1..19: mol_type = other RNA
tggttcctagagttgcagg

SEQ ID NO: 29523 - RNA, 19 nt, synthetic construct
  source 1..19: mol_type = other RNA
gacagtgcaagggcaccgt

SEQ ID NO: 29524 - RNA, 19 nt, synthetic construct
  source 1..19: mol_type = other RNA
gtccggcacgcgctcgggg

SEQ ID NO: 29525 - RNA, 19 nt, synthetic construct
  source 1..19: mol_type = other RNA
gcgccgggttcagggggct

SEQ ID NO: 29526 - RNA, 19 nt, synthetic construct
  source 1..19: mol_type = other RNA
agccgtccacacagtggtc

SEQ ID NO: 29527 - RNA, 19 nt, synthetic construct
  source 1..19: mol_type = other RNA
tgcccgggctgtaggtgcg

SEQ ID NO: 29528 - RNA, 19 nt, synthetic construct
  source 1..19: mol_type = other RNA
gccccgccctgcacagagc

SEQ ID NO: 29529 - RNA, 19 nt, synthetic construct
  source 1..19: mol_type = other RNA
catgcaggtcgtagagttt

SEQ ID NO: 29530 - RNA, 19 nt, synthetic construct
  source 1..19: mol_type = other RNA
ggccaagatgtactcgcag

SEQ ID NO: 29531 - RNA, 19 nt, synthetic construct
  source 1..19: mol_type = other RNA
gcacttcgggtagcagcct

SEQ ID NO: 29532 - RNA, 19 nt, synthetic construct
  source 1..19: mol_type = other RNA
agatgacgtcctggtagct

SEQ ID NO: 29533 - RNA, 19 nt, synthetic construct
  source 1..19: mol_type = other RNA
ggcgtgctggtctcggcct

SEQ ID NO: 29534 - RNA, 19 nt, synthetic construct
  source 1..19: mol_type = other RNA
gcgggtcgtgccctggctg

SEQ ID NO: 29535 - RNA, 19 nt, synthetic construct
  source 1..19: mol_type = other RNA
ggtggccgtggatccagtg

SEQ ID NO: 29536 - RNA, 19 nt, synthetic construct
  source 1..19: mol_type = other RNA
ggagtaccactggtctgtg

SEQ ID NO: 29537 - RNA, 19 nt, synthetic construct
  source 1..19: mol_type = other RNA
gggagttgtcccaggagtt

SEQ ID NO: 29538 - RNA, 19 nt, synthetic construct
  source 1..19: mol_type = other RNA
ggtggccgtggatccagtg

SEQ ID NO: 29539 - RNA, 19 nt, synthetic construct
  source 1..19: mol_type = other RNA
ggagtaccactggtctgtg

SEQ ID NO: 29540 - RNA, 19 nt, synthetic construct
  source 1..19: mol_type = other RNA
gcactggggggataggtgt

SEQ ID NO: 29541 - RNA, 19 nt, synthetic construct
  source 1..19: mol_type = other RNA
ggagtaccactggtctgtg

SEQ ID NO: 29542 - RNA, 19 nt, synthetic construct
  source 1..19: mol_type = other RNA
ggtggccgtggatccagtg

SEQ ID NO: 29543 - RNA, 19 nt, synthetic construct
  source 1..19: mol_type = other RNA
ggagtaccactggtctgtg

SEQ ID NO: 29544 - RNA, 19 nt, synthetic construct
  source 1..19: mol_type = other RNA
gcactggggggataggtgt

SEQ ID NO: 29545 - RNA, 19 nt, synthetic construct
  source 1..19: mol_type = other RNA
ggtggccgtggatccagtg

SEQ ID NO: 29546 - RNA, 19 nt, synthetic construct
  source 1..19: mol_type = other RNA
ggtggccgtggatccagtg

SEQ ID NO: 29547 - RNA, 19 nt, synthetic construct
  source 1..19: mol_type = other RNA
cagttgcagtccctggact

SEQ ID NO: 29548 - RNA, 19 nt, synthetic construct
  source 1..19: mol_type = other RNA
ggagtaccactggtctgtg

SEQ ID NO: 29549 - RNA, 19 nt, synthetic construct
  source 1..19: mol_type = other RNA
ggctgcgggtgtggtggcc

SEQ ID NO: 29550 - RNA, 19 nt, synthetic construct
  source 1..19: mol_type = other RNA
ctgcagttgtagtggctgt

SEQ ID NO: 29551 - RNA, 19 nt, synthetic construct
  source 1..19: mol_type = other RNA
ggtggccgtggatccagtg

SEQ ID NO: 29552 - RNA, 19 nt, synthetic construct
  source 1..19: mol_type = other RNA
tcagggtggtgaggactga

SEQ ID NO: 29553 - RNA, 19 nt, synthetic construct
  source 1..19: mol_type = other RNA
ggctttgggtccagcagga

SEQ ID NO: 29554 - RNA, 19 nt, synthetic construct
  source 1..19: mol_type = other RNA
ctcacgcccagggcaggaa

SEQ ID NO: 29555 - RNA, 19 nt, synthetic construct
  source 1..19: mol_type = other RNA
aagacttggccattgaagg

SEQ ID NO: 29556 - RNA, 19 nt, synthetic construct
  source 1..19: mol_type = other RNA
actcagcaaagacctggct

SEQ ID NO: 29557 - RNA, 19 nt, synthetic construct
  source 1..19: mol_type = other RNA
gcagatgcccatgtgtgcg

SEQ ID NO: 29558 - RNA, 19 nt, synthetic construct
  source 1..19: mol_type = other RNA
tgaggcaggcggtctggac

SEQ ID NO: 29559 - RNA, 19 nt, synthetic construct
  source 1..19: mol_type = other RNA
gtgaggcaggcggtctgga

SEQ ID NO: 29560 - RNA, 19 nt, synthetic construct
  source 1..19: mol_type = other RNA
cctggtgccacaggatggt

SEQ ID NO: 29561 - RNA, 19 nt, synthetic construct
  source 1..19: mol_type = other RNA
gtctcctcgtggacccgcc

SEQ ID NO: 29562 - RNA, 19 nt, synthetic construct
  source 1..19: mol_type = other RNA
agccacactcatccacgtg

SEQ ID NO: 29563 - RNA, 19 nt, synthetic construct
  source 1..19: mol_type = other RNA
caatgcacatcctggctcc

SEQ ID NO: 29564 - RNA, 19 nt, synthetic construct
  source 1..19: mol_type = other RNA
ggtgccacacacaggccgg

SEQ ID NO: 29565 - RNA, 19 nt, synthetic construct
  source 1..19: mol_type = other RNA
gcgcacatcagcccccgca

SEQ ID NO: 29566 - RNA, 19 nt, synthetic construct
  source 1..19: mol_type = other RNA
ctgtggaggtgtggacagt

SEQ ID NO: 29567 - RNA, 19 nt, synthetic construct
  source 1..19: mol_type = other RNA
acggtggctgtagtgctgg

SEQ ID NO: 29568 - RNA, 19 nt, synthetic construct
  source 1..19: mol_type = other RNA
ctgtggaggtgtggacagt

SEQ ID NO: 29569 - RNA, 19 nt, synthetic construct
  source 1..19: mol_type = other RNA
ctggtggttgctgctgggg

SEQ ID NO: 29570 - RNA, 19 nt, synthetic construct
  source 1..19: mol_type = other RNA
ctgtggaggtgtggacagt

SEQ ID NO: 29571 - RNA, 19 nt, synthetic construct
  source 1..19: mol_type = other RNA
ggtgtgggtggtctctgga

SEQ ID NO: 29572 - RNA, 19 nt, synthetic construct
  source 1..19: mol_type = other RNA
aaccctcgtcacacacgca

SEQ ID NO: 29573 - RNA, 19 nt, synthetic construct
  source 1..19: mol_type = other RNA
gggttggggtaggcacagc

SEQ ID NO: 29574 - RNA, 19 nt, synthetic construct
  source 1..19: mol_type = other RNA
acagcactgcccggccact

SEQ ID NO: 29575 - RNA, 19 nt, synthetic construct
  source 1..19: mol_type = other RNA
cctgagttaccctgcagca

SEQ ID NO: 29576 - RNA, 19 nt, synthetic construct
  source 1..19: mol_type = other RNA
ctcagggcacctccagttc

SEQ ID NO: 29577 - RNA, 19 nt, synthetic construct
  source 1..19: mol_type = other RNA
aaacactcgcagtcgccac

SEQ ID NO: 29578 - RNA, 19 nt, synthetic construct
  source 1..19: mol_type = other RNA
gtgggtggctgtgaggggc

SEQ ID NO: 29579 - RNA, 19 nt, synthetic construct
  source 1..19: mol_type = other RNA
gggggagctgttcccgggg

SEQ ID NO: 29580 - RNA, 19 nt, synthetic construct
  source 1..19: mol_type = other RNA
gggggagctgttcccgggg

SEQ ID NO: 29581 - RNA, 19 nt, synthetic construct
  source 1..19: mol_type = other RNA
ttgcaggcatcctcctgac

SEQ ID NO: 29582 - RNA, 19 nt, synthetic construct
  source 1..19: mol_type = other RNA
ggctgtggacatggtggcc

SEQ ID NO: 29583 - RNA, 19 nt, synthetic construct
  source 1..19: mol_type = other RNA
ggctgtggacatggtggcc

SEQ ID NO: 29584 - RNA, 19 nt, synthetic construct
  source 1..19: mol_type = other RNA
ggctgtggacatggtggcc

SEQ ID NO: 29585 - RNA, 19 nt, synthetic construct
  source 1..19: mol_type = other RNA
ggctgtggacatggtggcc

SEQ ID NO: 29586 - RNA, 19 nt, synthetic construct
  source 1..19: mol_type = other RNA
ggctgtggacatggtggcc

SEQ ID NO: 29587 - RNA, 19 nt, synthetic construct
  source 1..19: mol_type = other RNA
agtgctgattgcacactgc

SEQ ID NO: 29588 - RNA, 19 nt, synthetic construct
  source 1..19: mol_type = other RNA
ccctgagttaccctgcagc

SEQ ID NO: 29589 - RNA, 19 nt, synthetic construct
  source 1..19: mol_type = other RNA
cagtgctcagagaacacgt

SEQ ID NO: 29590 - RNA, 19 nt, synthetic construct
  source 1..19: mol_type = other RNA
gaaccctcgtcacacacgc

SEQ ID NO: 29591 - RNA, 19 nt, synthetic construct
  source 1..19: mol_type = other RNA
caggcagcctgggccttcc

SEQ ID NO: 29592 - RNA, 19 nt, synthetic construct
  source 1..19: mol_type = other RNA
ctggcataagtgccctcca

SEQ ID NO: 29593 - RNA, 19 nt, synthetic construct
  source 1..19: mol_type = other RNA
ccctggagttgaggagggg

SEQ ID NO: 29594 - RNA, 19 nt, synthetic construct
  source 1..19: mol_type = other RNA
agtccccgtggaaggctct

SEQ ID NO: 29595 - RNA, 19 nt, synthetic construct
  source 1..19: mol_type = other RNA
ccctggagttgaggagggg

SEQ ID NO: 29596 - RNA, 19 nt, synthetic construct
  source 1..19: mol_type = other RNA
ccctggagttgaggagggg

SEQ ID NO: 29597 - RNA, 19 nt, synthetic construct
  source 1..19: mol_type = other RNA
agtccccgtggaaggctct

SEQ ID NO: 29598 - RNA, 19 nt, synthetic construct
  source 1..19: mol_type = other RNA
ccctggagttgaggagggg

SEQ ID NO: 29599 - RNA, 19 nt, synthetic construct
  source 1..19: mol_type = other RNA
cccaaagcgtgcatggatc

SEQ ID NO: 29600 - RNA, 19 nt, synthetic construct
  source 1..19: mol_type = other RNA
agcagtcgccctcctcctg

SEQ ID NO: 29601 - RNA, 19 nt, synthetic construct
  source 1..19: mol_type = other RNA
cggcaccacgagcatggcc

SEQ ID NO: 29602 - RNA, 19 nt, synthetic construct
  source 1..19: mol_type = other RNA
agctgccttcaaagctgta

SEQ ID NO: 29603 - RNA, 19 nt, synthetic construct
  source 1..19: mol_type = other RNA
ggggtggtcgtccctggag

SEQ ID NO: 29604 - RNA, 19 nt, synthetic construct
  source 1..19: mol_type = other RNA
ggggtggtcgtccctggag

SEQ ID NO: 29605 - RNA, 19 nt, synthetic construct
  source 1..19: mol_type = other RNA
gctgggtggtactggtggt

SEQ ID NO: 29606 - RNA, 19 nt, synthetic construct
  source 1..19: mol_type = other RNA
ggggtggtcgtccctggag

SEQ ID NO: 29607 - RNA, 19 nt, synthetic construct
  source 1..19: mol_type = other RNA
ggcctgcacgcagatgccc

SEQ ID NO: 29608 - RNA, 19 nt, synthetic construct
  source 1..19: mol_type = other RNA
caagctccccgtcgtccct

SEQ ID NO: 29609 - RNA, 19 nt, synthetic construct
  source 1..19: mol_type = other RNA
cagcagggtgcggtggcag

SEQ ID NO: 29610 - RNA, 19 nt, synthetic construct
  source 1..19: mol_type = other RNA
gttgtgcacacaggggcag

SEQ ID NO: 29611 - RNA, 19 nt, synthetic construct
  source 1..19: mol_type = other RNA
ggtggttgtgctgatccac

SEQ ID NO: 29612 - RNA, 19 nt, synthetic construct
  source 1..19: mol_type = other RNA
cggggtggtcgtccctgga

SEQ ID NO: 29613 - RNA, 19 nt, synthetic construct
  source 1..19: mol_type = other RNA
ggtggttgtgctgatccac

SEQ ID NO: 29614 - RNA, 19 nt, synthetic construct
  source 1..19: mol_type = other RNA
cggggtggtcgtccctgga

SEQ ID NO: 29615 - RNA, 19 nt, synthetic construct
  source 1..19: mol_type = other RNA
ggtggttgtgctgatccac

SEQ ID NO: 29616 - RNA, 19 nt, synthetic construct
  source 1..19: mol_type = other RNA
cggggtggtcgtccctgga

SEQ ID NO: 29617 - RNA, 19 nt, synthetic construct
  source 1..19: mol_type = other RNA
ggtggttgtgctgatccac

SEQ ID NO: 29618 - RNA, 19 nt, synthetic construct
  source 1..19: mol_type = other RNA
ggtggttgtgctgatccac

SEQ ID NO: 29619 - RNA, 19 nt, synthetic construct
  source 1..19: mol_type = other RNA
gctgacccaccgctccccg

SEQ ID NO: 29620 - RNA, 19 nt, synthetic construct
  source 1..19: mol_type = other RNA
accgtctcctcgtggaccc

SEQ ID NO: 29621 - RNA, 19 nt, synthetic construct
  source 1..19: mol_type = other RNA
gctcggggcacccatcctg

SEQ ID NO: 29622 - RNA, 19 nt, synthetic construct
  source 1..19: mol_type = other RNA
cccgctctgctccaccagg

SEQ ID NO: 29623 - RNA, 19 nt, synthetic construct
  source 1..19: mol_type = other RNA
gctcagggcacctccagtt

SEQ ID NO: 29624 - RNA, 19 nt, synthetic construct
  source 1..19: mol_type = other RNA
gccgtccacacagtggtcc

SEQ ID NO: 29625 - RNA, 19 nt, synthetic construct
  source 1..19: mol_type = other RNA
ctcctgggcgggcacacag

SEQ ID NO: 29626 - RNA, 19 nt, synthetic construct
  source 1..19: mol_type = other RNA
ccttaaaggtcccctcttg

SEQ ID NO: 29627 - RNA, 19 nt, synthetic construct
  source 1..19: mol_type = other RNA
gttgtagcacatcttgaag

SEQ ID NO: 29628 - RNA, 19 nt, synthetic construct
  source 1..19: mol_type = other RNA
ggtcggtggcggggttgtg

SEQ ID NO: 29629 - RNA, 19 nt, synthetic construct
  source 1..19: mol_type = other RNA
gtggctttggagctggtga

SEQ ID NO: 29630 - RNA, 19 nt, synthetic construct
  source 1..19: mol_type = other RNA
agtggctttggagctggtg

SEQ ID NO: 29631 - RNA, 19 nt, synthetic construct
  source 1..19: mol_type = other RNA
tggccgtgggtgtggtggt

SEQ ID NO: 29632 - RNA, 19 nt, synthetic construct
  source 1..19: mol_type = other RNA
ccgggatggaggagggggt

SEQ ID NO: 29633 - RNA, 19 nt, synthetic construct
  source 1..19: mol_type = other RNA
tgggagttgtcccaggagt

SEQ ID NO: 29634 - RNA, 19 nt, synthetic construct
  source 1..19: mol_type = other RNA
gtggctttggagctggtga

SEQ ID NO: 29635 - RNA, 19 nt, synthetic construct
  source 1..19: mol_type = other RNA
agtggctttggagctggtg

SEQ ID NO: 29636 - RNA, 19 nt, synthetic construct
  source 1..19: mol_type = other RNA
tggccgtgggtgtggtggt

SEQ ID NO: 29637 - RNA, 19 nt, synthetic construct
  source 1..19: mol_type = other RNA
ccgggatggaggagggggt

SEQ ID NO: 29638 - RNA, 19 nt, synthetic construct
  source 1..19: mol_type = other RNA
gagtggaggaggggtggat

SEQ ID NO: 29639 - RNA, 19 nt, synthetic construct
  source 1..19: mol_type = other RNA
tggtcagcactttgagggt

SEQ ID NO: 29640 - RNA, 19 nt, synthetic construct
  source 1..19: mol_type = other RNA
tggccgtgggtgtggtggt

SEQ ID NO: 29641 - RNA, 19 nt, synthetic construct
  source 1..19: mol_type = other RNA
ccgggatggaggagggggt

SEQ ID NO: 29642 - RNA, 19 nt, synthetic construct
  source 1..19: mol_type = other RNA
gtggctttggagctggtga

SEQ ID NO: 29643 - RNA, 19 nt, synthetic construct
  source 1..19: mol_type = other RNA
agtggctttggagctggtg

SEQ ID NO: 29644 - RNA, 19 nt, synthetic construct
  source 1..19: mol_type = other RNA
tggccgtgggtgtggtggt

SEQ ID NO: 29645 - RNA, 19 nt, synthetic construct
  source 1..19: mol_type = other RNA
gcccaactcccccaggggg

SEQ ID NO: 29646 - RNA, 19 nt, synthetic construct
  source 1..19: mol_type = other RNA
gagtggaggaggggtggat

SEQ ID NO: 29647 - RNA, 19 nt, synthetic construct
  source 1..19: mol_type = other RNA
gtggctttggagctggtga

SEQ ID NO: 29648 - RNA, 19 nt, synthetic construct
  source 1..19: mol_type = other RNA
agtggctttggagctggtg

SEQ ID NO: 29649 - RNA, 19 nt, synthetic construct
  source 1..19: mol_type = other RNA
cagtgctggaagggcagtt

SEQ ID NO: 29650 - RNA, 19 nt, synthetic construct
  source 1..19: mol_type = other RNA
tggccgtgggtgtggtggt

SEQ ID NO: 29651 - RNA, 19 nt, synthetic construct
  source 1..19: mol_type = other RNA
ccgggatggaggagggggt

SEQ ID NO: 29652 - RNA, 19 nt, synthetic construct
  source 1..19: mol_type = other RNA
tgtgggcatagtggccatg

SEQ ID NO: 29653 - RNA, 19 nt, synthetic construct
  source 1..19: mol_type = other RNA
gctgaaggttggcaggctg

SEQ ID NO: 29654 - RNA, 19 nt, synthetic construct
  source 1..19: mol_type = other RNA
cgtagaaggtgccattgta

SEQ ID NO: 29655 - RNA, 19 nt, synthetic construct
  source 1..19: mol_type = other RNA
atccgtgctgcgcgggcgc

SEQ ID NO: 29656 - RNA, 19 nt, synthetic construct
  source 1..19: mol_type = other RNA
gctggcacgggtgggggga

SEQ ID NO: 29657 - RNA, 19 nt, synthetic construct
  source 1..19: mol_type = other RNA
ggctccacagggccctggg

SEQ ID NO: 29658 - RNA, 19 nt, synthetic construct
  source 1..19: mol_type = other RNA
cgctgcccattgatgagga

SEQ ID NO: 29659 - RNA, 19 nt, synthetic construct
  source 1..19: mol_type = other RNA
tcagcaccagccggatgct

SEQ ID NO: 29660 - RNA, 19 nt, synthetic construct
  source 1..19: mol_type = other RNA
cgtatttgggatccagctc

SEQ ID NO: 29661 - RNA, 19 nt, synthetic construct
  source 1..19: mol_type = other RNA
tcagggcacctccagttcc

SEQ ID NO: 29662 - RNA, 19 nt, synthetic construct
  source 1..19: mol_type = other RNA
ggtgtccgtgcagggtgag

SEQ ID NO: 29663 - RNA, 19 nt, synthetic construct
  source 1..19: mol_type = other RNA
aggtgtccgtgcagggtga

SEQ ID NO: 29664 - RNA, 19 nt, synthetic construct
  source 1..19: mol_type = other RNA
ttggagcaggtgtccgtgc

SEQ ID NO: 29665 - RNA, 19 nt, synthetic construct
  source 1..19: mol_type = other RNA
gtggtcctcgcagagctgc

SEQ ID NO: 29666 - RNA, 19 nt, synthetic construct
  source 1..19: mol_type = other RNA
cagctcagccagcacggtg

SEQ ID NO: 29667 - RNA, 19 nt, synthetic construct
  source 1..19: mol_type = other RNA
agctgttcctggcattggc

SEQ ID NO: 29668 - RNA, 19 nt, synthetic construct
  source 1..19: mol_type = other RNA
ccgtccctccagtcgctga

SEQ ID NO: 29669 - RNA, 19 nt, synthetic construct
  source 1..19: mol_type = other RNA
cgctgggacttggggcagt

SEQ ID NO: 29670 - RNA, 19 nt, synthetic construct
  source 1..19: mol_type = other RNA
tgggctggcaggcatccac

SEQ ID NO: 29671 - RNA, 19 nt, synthetic construct
  source 1..19: mol_type = other RNA
caccatgggggctgcacac

SEQ ID NO: 29672 - RNA, 19 nt, synthetic construct
  source 1..19: mol_type = other RNA
tcccgtgggtggtgttgtc

SEQ ID NO: 29673 - RNA, 19 nt, synthetic construct
  source 1..19: mol_type = other RNA
gagcggcaggcggcgaagg

SEQ ID NO: 29674 - RNA, 19 nt, synthetic construct
  source 1..19: mol_type = other RNA
gctggagttccaggacatg

SEQ ID NO: 29675 - RNA, 19 nt, synthetic construct
  source 1..19: mol_type = other RNA
tcagccagcacagggcata

SEQ ID NO: 29676 - RNA, 19 nt, synthetic construct
  source 1..19: mol_type = other RNA
gcgccgcccggcactcgat

SEQ ID NO: 29677 - RNA, 19 nt, synthetic construct
  source 1..19: mol_type = other RNA
cctgtgccagggtccagtt

SEQ ID NO: 29678 - RNA, 19 nt, synthetic construct
  source 1..19: mol_type = other RNA
cccacctgtgccagggtcc

SEQ ID NO: 29679 - RNA, 19 nt, synthetic construct
  source 1..19: mol_type = other RNA
cttgaagacgccctcctgc

SEQ ID NO: 29680 - RNA, 19 nt, synthetic construct
  source 1..19: mol_type = other RNA
cccctgcagtggtcgtcac

SEQ ID NO: 29681 - RNA, 19 nt, synthetic construct
  source 1..19: mol_type = other RNA
tggtggtggccgtctccag

SEQ ID NO: 29682 - RNA, 19 nt, synthetic construct
  source 1..19: mol_type = other RNA
ggcgagctctggaggttgc

SEQ ID NO: 29683 - RNA, 19 nt, synthetic construct
  source 1..19: mol_type = other RNA
ggtggaggtcggggtggcc

SEQ ID NO: 29684 - RNA, 19 nt, synthetic construct
  source 1..19: mol_type = other RNA
gggtgtggtggtctgtgat

SEQ ID NO: 29685 - RNA, 19 nt, synthetic construct
  source 1..19: mol_type = other RNA
agcactgtggaggtgtggg

SEQ ID NO: 29686 - RNA, 19 nt, synthetic construct
  source 1..19: mol_type = other RNA
gtggtggccgtggcggtaa

SEQ ID NO: 29687 - RNA, 19 nt, synthetic construct
  source 1..19: mol_type = other RNA
agggggtggctgtgaagcc

SEQ ID NO: 29688 - RNA, 19 nt, synthetic construct
  source 1..19: mol_type = other RNA
atccacactggaggcgtga

SEQ ID NO: 29689 - RNA, 19 nt, synthetic construct
  source 1..19: mol_type = other RNA
taccactggtctgtgtgct

SEQ ID NO: 29690 - RNA, 19 nt, synthetic construct
  source 1..19: mol_type = other RNA
gtcactgtgttgctggtgg

SEQ ID NO: 29691 - RNA, 19 nt, synthetic construct
  source 1..19: mol_type = other RNA
agtccaggctgtgcgcacc

SEQ ID NO: 29692 - RNA, 19 nt, synthetic construct
  source 1..19: mol_type = other RNA
gtggccgtggtgtggcccg

SEQ ID NO: 29693 - RNA, 19 nt, synthetic construct
  source 1..19: mol_type = other RNA
ggtggccgtggtgtggccc

SEQ ID NO: 29694 - RNA, 19 nt, synthetic construct
  source 1..19: mol_type = other RNA
ctgggcctgggcacggcac

SEQ ID NO: 29695 - RNA, 19 nt, synthetic construct
  source 1..19: mol_type = other RNA
gctgggcctgggcacggca

SEQ ID NO: 29696 - RNA, 19 nt, synthetic construct
  source 1..19: mol_type = other RNA
tccaggtcgtccccggagt

SEQ ID NO: 29697 - RNA, 19 nt, synthetic construct
  source 1..19: mol_type = other RNA
tggaggacggggtggccgt

SEQ ID NO: 29698 - RNA, 19 nt, synthetic construct
  source 1..19: mol_type = other RNA
gtggaggacggggtggccg

SEQ ID NO: 29699 - RNA, 19 nt, synthetic construct
  source 1..19: mol_type = other RNA
ggtgggcaccgtcacggtg

SEQ ID NO: 29700 - RNA, 19 nt, synthetic construct
  source 1..19: mol_type = other RNA
gggtgtggtggtctgtgat

SEQ ID NO: 29701 - RNA, 19 nt, synthetic construct
  source 1..19: mol_type = other RNA
agggggtggctgtgaagcc

SEQ ID NO: 29702 - RNA, 19 nt, synthetic construct
  source 1..19: mol_type = other RNA
gtggtcagcactgtggggg

SEQ ID NO: 29703 - RNA, 19 nt, synthetic construct
  source 1..19: mol_type = other RNA
taccactggtctgtgtgct

SEQ ID NO: 29704 - RNA, 19 nt, synthetic construct
  source 1..19: mol_type = other RNA
actggggggataggtgttg

SEQ ID NO: 29705 - RNA, 19 nt, synthetic construct
  source 1..19: mol_type = other RNA
ctgggggacagggatcgcc

SEQ ID NO: 29706 - RNA, 19 nt, synthetic construct
  source 1..19: mol_type = other RNA
agtccaggctgtgcgcacc

SEQ ID NO: 29707 - RNA, 19 nt, synthetic construct
  source 1..19: mol_type = other RNA
ccggtggttgctgctgggg

SEQ ID NO: 29708 - RNA, 19 nt, synthetic construct
  source 1..19: mol_type = other RNA
gggtgactcggtggtcctg

SEQ ID NO: 29709 - RNA, 19 nt, synthetic construct
  source 1..19: mol_type = other RNA
ctgggcctgggcacggcac

SEQ ID NO: 29710 - RNA, 19 nt, synthetic construct
  source 1..19: mol_type = other RNA
gctgggcctgggcacggca

SEQ ID NO: 29711 - RNA, 19 nt, synthetic construct
  source 1..19: mol_type = other RNA
atccaggtcgtccctggag

SEQ ID NO: 29712 - RNA, 19 nt, synthetic construct
  source 1..19: mol_type = other RNA
gtctgttctgggagggtcc

SEQ ID NO: 29713 - RNA, 19 nt, synthetic construct
  source 1..19: mol_type = other RNA
tccaggtcgtccccggagt

SEQ ID NO: 29714 - RNA, 19 nt, synthetic construct
  source 1..19: mol_type = other RNA
tggaggacggggtggccgt

SEQ ID NO: 29715 - RNA, 19 nt, synthetic construct
  source 1..19: mol_type = other RNA
gtggaggacggggtggccg

SEQ ID NO: 29716 - RNA, 19 nt, synthetic construct
  source 1..19: mol_type = other RNA
ggtgggcaccgtcacggtg

SEQ ID NO: 29717 - RNA, 19 nt, synthetic construct
  source 1..19: mol_type = other RNA
gtcagcactttgagggtgc

SEQ ID NO: 29718 - RNA, 19 nt, synthetic construct
  source 1..19: mol_type = other RNA
ggagtggctctggagctga

SEQ ID NO: 29719 - RNA, 19 nt, synthetic construct
  source 1..19: mol_type = other RNA
gggtgtggtggtctgtgat

SEQ ID NO: 29720 - RNA, 19 nt, synthetic construct
  source 1..19: mol_type = other RNA
agggggtggctgtgaagcc

SEQ ID NO: 29721 - RNA, 19 nt, synthetic construct
  source 1..19: mol_type = other RNA
atccacactggaggcgtga

SEQ ID NO: 29722 - RNA, 19 nt, synthetic construct
  source 1..19: mol_type = other RNA
taccactggtctgtgtgct

SEQ ID NO: 29723 - RNA, 19 nt, synthetic construct
  source 1..19: mol_type = other RNA
agtccaggctgtgcgcacc

SEQ ID NO: 29724 - RNA, 19 nt, synthetic construct
  source 1..19: mol_type = other RNA
gggtgactcggtggtcctg

SEQ ID NO: 29725 - RNA, 19 nt, synthetic construct
  source 1..19: mol_type = other RNA
ctgggcctgggcacggcac

SEQ ID NO: 29726 - RNA, 19 nt, synthetic construct
  source 1..19: mol_type = other RNA
gctgggcctgggcacggca

SEQ ID NO: 29727 - RNA, 19 nt, synthetic construct
  source 1..19: mol_type = other RNA
tggaggacggggtggccgt

SEQ ID NO: 29728 - RNA, 19 nt, synthetic construct
  source 1..19: mol_type = other RNA
gtggaggacggggtggccg

SEQ ID NO: 29729 - RNA, 19 nt, synthetic construct
  source 1..19: mol_type = other RNA
ggtgggcaccgtcacggtg

SEQ ID NO: 29730 - RNA, 19 nt, synthetic construct
  source 1..19: mol_type = other RNA
gggtgtggtggtctgtgat

SEQ ID NO: 29731 - RNA, 19 nt, synthetic construct
  source 1..19: mol_type = other RNA
agcactgtggaggtgtggg

SEQ ID NO: 29732 - RNA, 19 nt, synthetic construct
  source 1..19: mol_type = other RNA
ggctggaggagggggtgac

SEQ ID NO: 29733 - RNA, 19 nt, synthetic construct
  source 1..19: mol_type = other RNA
cgtggagccactggttgtg

SEQ ID NO: 29734 - RNA, 19 nt, synthetic construct
  source 1..19: mol_type = other RNA
gtggtcagcactgtggggg

SEQ ID NO: 29735 - RNA, 19 nt, synthetic construct
  source 1..19: mol_type = other RNA
taccactggtctgtgtgct

SEQ ID NO: 29736 - RNA, 19 nt, synthetic construct
  source 1..19: mol_type = other RNA
actggggggataggtgttg

SEQ ID NO: 29737 - RNA, 19 nt, synthetic construct
  source 1..19: mol_type = other RNA
ctgggggacagggatcgcc

SEQ ID NO: 29738 - RNA, 19 nt, synthetic construct
  source 1..19: mol_type = other RNA
agtccaggctgtgcgcacc

SEQ ID NO: 29739 - RNA, 19 nt, synthetic construct
  source 1..19: mol_type = other RNA
ccggtggttgctgctgggg

SEQ ID NO: 29740 - RNA, 19 nt, synthetic construct
  source 1..19: mol_type = other RNA
gggtgactcggtggtcctg

SEQ ID NO: 29741 - RNA, 19 nt, synthetic construct
  source 1..19: mol_type = other RNA
gtggccgtggtgtggcccg

SEQ ID NO: 29742 - RNA, 19 nt, synthetic construct
  source 1..19: mol_type = other RNA
ggtggccgtggtgtggccc

SEQ ID NO: 29743 - RNA, 19 nt, synthetic construct
  source 1..19: mol_type = other RNA
ctgggcctgggcacggcac

SEQ ID NO: 29744 - RNA, 19 nt, synthetic construct
  source 1..19: mol_type = other RNA
gctgggcctgggcacggca

SEQ ID NO: 29745 - RNA, 19 nt, synthetic construct
  source 1..19: mol_type = other RNA
tccaggtcgtccccggagt

SEQ ID NO: 29746 - RNA, 19 nt, synthetic construct
  source 1..19: mol_type = other RNA
tggaggacggggtggccgt

SEQ ID NO: 29747 - RNA, 19 nt, synthetic construct
  source 1..19: mol_type = other RNA
gtggaggacggggtggccg

SEQ ID NO: 29748 - RNA, 19 nt, synthetic construct
  source 1..19: mol_type = other RNA
gtgggtgtggtggccgggc

SEQ ID NO: 29749 - RNA, 19 nt, synthetic construct
  source 1..19: mol_type = other RNA
gtctgttctgggagggtcc

SEQ ID NO: 29750 - RNA, 19 nt, synthetic construct
  source 1..19: mol_type = other RNA
tccaggtcgtccccggagt

SEQ ID NO: 29751 - RNA, 19 nt, synthetic construct
  source 1..19: mol_type = other RNA
tggaggacggggtggccgt

SEQ ID NO: 29752 - RNA, 19 nt, synthetic construct
  source 1..19: mol_type = other RNA
gtggaggacggggtggccg

SEQ ID NO: 29753 - RNA, 19 nt, synthetic construct
  source 1..19: mol_type = other RNA
tggaggacggggtggccgt

SEQ ID NO: 29754 - RNA, 19 nt, synthetic construct
  source 1..19: mol_type = other RNA
gtggaggacggggtggccg

SEQ ID NO: 29755 - RNA, 19 nt, synthetic construct
  source 1..19: mol_type = other RNA
ggtgggcaccgtcacggtg

SEQ ID NO: 29756 - RNA, 19 nt, synthetic construct
  source 1..19: mol_type = other RNA
gggtgtggtggtctgtgat

SEQ ID NO: 29757 - RNA, 19 nt, synthetic construct
  source 1..19: mol_type = other RNA
gtggtggccgtggcggtaa

SEQ ID NO: 29758 - RNA, 19 nt, synthetic construct
  source 1..19: mol_type = other RNA
agggggtggctgtgaagcc

SEQ ID NO: 29759 - RNA, 19 nt, synthetic construct
  source 1..19: mol_type = other RNA
atccacactggaggcgtga

SEQ ID NO: 29760 - RNA, 19 nt, synthetic construct
  source 1..19: mol_type = other RNA
cgtggagccactggttgtg

SEQ ID NO: 29761 - RNA, 19 nt, synthetic construct
  source 1..19: mol_type = other RNA
taccactggtctgtgtgct

SEQ ID NO: 29762 - RNA, 19 nt, synthetic construct
  source 1..19: mol_type = other RNA
aattggtggcccttgtcat

SEQ ID NO: 29763 - RNA, 19 nt, synthetic construct
  source 1..19: mol_type = other RNA
ggagggtgtggccgtggaa

SEQ ID NO: 29764 - RNA, 19 nt, synthetic construct
  source 1..19: mol_type = other RNA
tcagctcagtgaggatccg

SEQ ID NO: 29765 - RNA, 19 nt, synthetic construct
  source 1..19: mol_type = other RNA
gtggaggacagggtggccg

SEQ ID NO: 29766 - RNA, 19 nt, synthetic construct
  source 1..19: mol_type = other RNA
tcaccactttgggggtgtg

SEQ ID NO: 29767 - RNA, 19 nt, synthetic construct
  source 1..19: mol_type = other RNA
ccatggtggtcaccacttt

SEQ ID NO: 29768 - RNA, 19 nt, synthetic construct
  source 1..19: mol_type = other RNA
ggccatggtggtcaccact

SEQ ID NO: 29769 - RNA, 19 nt, synthetic construct
  source 1..19: mol_type = other RNA
agcactgcaggggtgcggg

SEQ ID NO: 29770 - RNA, 19 nt, synthetic construct
  source 1..19: mol_type = other RNA
atggcagccggctcggtcg

SEQ ID NO: 29771 - RNA, 19 nt, synthetic construct
  source 1..19: mol_type = other RNA
tggggaggtgggacaggcg

SEQ ID NO: 29772 - RNA, 19 nt, synthetic construct
  source 1..19: mol_type = other RNA
ggacagcggggcggaggac

SEQ ID NO: 29773 - RNA, 19 nt, synthetic construct
  source 1..19: mol_type = other RNA
gttggccacaggctttggg

SEQ ID NO: 29774 - RNA, 19 nt, synthetic construct
  source 1..19: mol_type = other RNA
gtgggagccgccccacatg

SEQ ID NO: 29775 - RNA, 19 nt, synthetic construct
  source 1..19: mol_type = other RNA
ggacttgtagtggatgctg

SEQ ID NO: 29776 - RNA, 19 nt, synthetic construct
  source 1..19: mol_type = other RNA
tcggggaccagccacgtct

SEQ ID NO: 29777 - RNA, 19 nt, synthetic construct
  source 1..19: mol_type = other RNA
tgggggtgggtgtgctaga

SEQ ID NO: 29778 - RNA, 19 nt, synthetic construct
  source 1..19: mol_type = other RNA
ggtgggggtgggtgtgcta

SEQ ID NO: 29779 - RNA, 19 nt, synthetic construct
  source 1..19: mol_type = other RNA
tgtggcactcagcaaagac

SEQ ID NO: 29780 - RNA, 19 nt, synthetic construct
  source 1..19: mol_type = other RNA
gttgtggcactcagcaaag

SEQ ID NO: 29781 - RNA, 19 nt, synthetic construct
  source 1..19: mol_type = other RNA
ttgcaggtggcaggctgta

SEQ ID NO: 29782 - RNA, 19 nt, synthetic construct
  source 1..19: mol_type = other RNA
aggtggttgtgttgcacac

SEQ ID NO: 29783 - RNA, 19 nt, synthetic construct
  source 1..19: mol_type = other RNA
tgcagcggaaggtgggaca

SEQ ID NO: 29784 - RNA, 19 nt, synthetic construct
  source 1..19: mol_type = other RNA
tgttgcaggcatcctcctg

SEQ ID NO: 29785 - RNA, 19 nt, synthetic construct
  source 1..19: mol_type = other RNA
agccctggggacaggtagt

SEQ ID NO: 29786 - RNA, 19 nt, synthetic construct
  source 1..19: mol_type = other RNA
aagccctggggacaggtag

SEQ ID NO: 29787 - RNA, 19 nt, synthetic construct
  source 1..19: mol_type = other RNA
tggactggctggccatcgg

SEQ ID NO: 29788 - RNA, 19 nt, synthetic construct
  source 1..19: mol_type = other RNA
gtccacatggctgttgacc

SEQ ID NO: 29789 - RNA, 19 nt, synthetic construct
  source 1..19: mol_type = other RNA
acccacggggtgggcagca

SEQ ID NO: 29790 - RNA, 19 nt, synthetic construct
  source 1..19: mol_type = other RNA
cacaggctctcccagggta

SEQ ID NO: 29791 - RNA, 19 nt, synthetic construct
  source 1..19: mol_type = other RNA
accgggagggccgggcttg

SEQ ID NO: 29792 - RNA, 19 nt, synthetic construct
  source 1..19: mol_type = other RNA
gggtgtggtggttgtgctg

SEQ ID NO: 29793 - RNA, 19 nt, synthetic construct
  source 1..19: mol_type = other RNA
aggagggggtcaccgtgga

SEQ ID NO: 29794 - RNA, 19 nt, synthetic construct
  source 1..19: mol_type = other RNA
gtgatgggggagtaccact

SEQ ID NO: 29795 - RNA, 19 nt, synthetic construct
  source 1..19: mol_type = other RNA
tgtgatgtgggtggtgccc

SEQ ID NO: 29796 - RNA, 19 nt, synthetic construct
  source 1..19: mol_type = other RNA
gggtgtggtggttgtgctg

SEQ ID NO: 29797 - RNA, 19 nt, synthetic construct
  source 1..19: mol_type = other RNA
gtgatgggggagtaccact

SEQ ID NO: 29798 - RNA, 19 nt, synthetic construct
  source 1..19: mol_type = other RNA
tgtgatgtgggtggtgccc

SEQ ID NO: 29799 - RNA, 19 nt, synthetic construct
  source 1..19: mol_type = other RNA
ggtcagcactttgagggtg

SEQ ID NO: 29800 - RNA, 19 nt, synthetic construct
  source 1..19: mol_type = other RNA
gggtgtggtggttgtgctg

SEQ ID NO: 29801 - RNA, 19 nt, synthetic construct
  source 1..19: mol_type = other RNA
aggagggggtcaccgtgga

SEQ ID NO: 29802 - RNA, 19 nt, synthetic construct
  source 1..19: mol_type = other RNA
gtgatgggggagtaccact

SEQ ID NO: 29803 - RNA, 19 nt, synthetic construct
  source 1..19: mol_type = other RNA
tgtgatgtgggtggtgccc

SEQ ID NO: 29804 - RNA, 19 nt, synthetic construct
  source 1..19: mol_type = other RNA
gggtgtggtggttgtgctg

SEQ ID NO: 29805 - RNA, 19 nt, synthetic construct
  source 1..19: mol_type = other RNA
aggagggggtcaccgtgga

SEQ ID NO: 29806 - RNA, 19 nt, synthetic construct
  source 1..19: mol_type = other RNA
gtgatgggggagtaccact

SEQ ID NO: 29807 - RNA, 19 nt, synthetic construct
  source 1..19: mol_type = other RNA
tgtgatgtgggtggtgccc

SEQ ID NO: 29808 - RNA, 19 nt, synthetic construct
  source 1..19: mol_type = other RNA
aggagggggtggacgtgga

SEQ ID NO: 29809 - RNA, 19 nt, synthetic construct
  source 1..19: mol_type = other RNA
gggtgtggtggttgtgctg

SEQ ID NO: 29810 - RNA, 19 nt, synthetic construct
  source 1..19: mol_type = other RNA
aggagggggtcaccgtgga

SEQ ID NO: 29811 - RNA, 19 nt, synthetic construct
  source 1..19: mol_type = other RNA
gtgatgggggagtaccact

SEQ ID NO: 29812 - RNA, 19 nt, synthetic construct
  source 1..19: mol_type = other RNA
ttgtggtcagctcagtgag

SEQ ID NO: 29813 - RNA, 19 nt, synthetic construct
  source 1..19: mol_type = other RNA
ctttgggggtgtgagctgt

SEQ ID NO: 29814 - RNA, 19 nt, synthetic construct
  source 1..19: mol_type = other RNA
aggtgggacaggcgccctg

SEQ ID NO: 29815 - RNA, 19 nt, synthetic construct
  source 1..19: mol_type = other RNA
cacagggctggctcgggtc

SEQ ID NO: 29816 - RNA, 19 nt, synthetic construct
  source 1..19: mol_type = other RNA
gcagaagcagccctccgcc

SEQ ID NO: 29817 - RNA, 19 nt, synthetic construct
  source 1..19: mol_type = other RNA
tggtcctcagggcagaagc

SEQ ID NO: 29818 - RNA, 19 nt, synthetic construct
  source 1..19: mol_type = other RNA
gaagaggatctggtcctca

SEQ ID NO: 29819 - RNA, 19 nt, synthetic construct
  source 1..19: mol_type = other RNA
acaggtcctgggcgcaggc

SEQ ID NO: 29820 - RNA, 19 nt, synthetic construct
  source 1..19: mol_type = other RNA
agggggcaggtccgggggc

SEQ ID NO: 29821 - RNA, 19 nt, synthetic construct
  source 1..19: mol_type = other RNA
tctgcaccacgatgaagaa

SEQ ID NO: 29822 - RNA, 19 nt, synthetic construct
  source 1..19: mol_type = other RNA
ggctcccaggcagcttagc

SEQ ID NO: 29823 - RNA, 19 nt, synthetic construct
  source 1..19: mol_type = other RNA
ttgtggctggagttccagg

SEQ ID NO: 29824 - RNA, 19 nt, synthetic construct
  source 1..19: mol_type = other RNA
ccgggagggccgggcttgt

SEQ ID NO: 29825 - RNA, 19 nt, synthetic construct
  source 1..19: mol_type = other RNA
ctgttctcagggtggaggt

SEQ ID NO: 29826 - RNA, 19 nt, synthetic construct
  source 1..19: mol_type = other RNA
gtccaggtggtgcccaggg

SEQ ID NO: 29827 - RNA, 19 nt, synthetic construct
  source 1..19: mol_type = other RNA
gcactgtggaggtgtgggc

SEQ ID NO: 29828 - RNA, 19 nt, synthetic construct
  source 1..19: mol_type = other RNA
cccacctgctcacggttcc

SEQ ID NO: 29829 - RNA, 19 nt, synthetic construct
  source 1..19: mol_type = other RNA
gtccaggtggtgcccaggg

SEQ ID NO: 29830 - RNA, 19 nt, synthetic construct
  source 1..19: mol_type = other RNA
cccacctgctcacggttcc

SEQ ID NO: 29831 - RNA, 19 nt, synthetic construct
  source 1..19: mol_type = other RNA
cccacctgctcacggttcc

SEQ ID NO: 29832 - RNA, 19 nt, synthetic construct
  source 1..19: mol_type = other RNA
gtccaggtggtgcccaggg

SEQ ID NO: 29833 - RNA, 19 nt, synthetic construct
  source 1..19: mol_type = other RNA
gcactgtggaggtgtgggc

SEQ ID NO: 29834 - RNA, 19 nt, synthetic construct
  source 1..19: mol_type = other RNA
cccacctgctcacggttcc

SEQ ID NO: 29835 - RNA, 19 nt, synthetic construct
  source 1..19: mol_type = other RNA
gtccaggtggtgcccaggg

SEQ ID NO: 29836 - RNA, 19 nt, synthetic construct
  source 1..19: mol_type = other RNA
gttgtggtcagctcagtga

SEQ ID NO: 29837 - RNA, 19 nt, synthetic construct
  source 1..19: mol_type = other RNA
agcctcacagaggtacacg

SEQ ID NO: 29838 - RNA, 19 nt, synthetic construct
  source 1..19: mol_type = other RNA
cgcagtgctgtccaccagt

SEQ ID NO: 29839 - RNA, 19 nt, synthetic construct
  source 1..19: mol_type = other RNA
agttccgcggctggccccc

SEQ ID NO: 29840 - RNA, 19 nt, synthetic construct
  source 1..19: mol_type = other RNA
ggcaagtgggctggcaggc

SEQ ID NO: 29841 - RNA, 19 nt, synthetic construct
  source 1..19: mol_type = other RNA
ggcactcctgggcgggcac

SEQ ID NO: 29842 - RNA, 19 nt, synthetic construct
  source 1..19: mol_type = other RNA
tcctcctcggcaatgcagc

SEQ ID NO: 29843 - RNA, 19 nt, synthetic construct
  source 1..19: mol_type = other RNA
atggtctctccaggcttgt

SEQ ID NO: 29844 - RNA, 19 nt, synthetic construct
  source 1..19: mol_type = other RNA
cgtgggtggtgttgtcccc

SEQ ID NO: 29845 - RNA, 19 nt, synthetic construct
  source 1..19: mol_type = other RNA
tcggggtggccgtggatcc

SEQ ID NO: 29846 - RNA, 19 nt, synthetic construct
  source 1..19: mol_type = other RNA
gtggtggttgtgctgatcc

SEQ ID NO: 29847 - RNA, 19 nt, synthetic construct
  source 1..19: mol_type = other RNA
aacttccccacctgctcac

SEQ ID NO: 29848 - RNA, 19 nt, synthetic construct
  source 1..19: mol_type = other RNA
acggggtggccgtggatcc

SEQ ID NO: 29849 - RNA, 19 nt, synthetic construct
  source 1..19: mol_type = other RNA
cgtggccgtggtgctcaca

SEQ ID NO: 29850 - RNA, 19 nt, synthetic construct
  source 1..19: mol_type = other RNA
gaggggatggctgtaaagc

SEQ ID NO: 29851 - RNA, 19 nt, synthetic construct
  source 1..19: mol_type = other RNA
gtggtggttgtgctgatcc

SEQ ID NO: 29852 - RNA, 19 nt, synthetic construct
  source 1..19: mol_type = other RNA
ggggtgtgggtggtccccg

SEQ ID NO: 29853 - RNA, 19 nt, synthetic construct
  source 1..19: mol_type = other RNA
ggtggttgctgctggggtg

SEQ ID NO: 29854 - RNA, 19 nt, synthetic construct
  source 1..19: mol_type = other RNA
ggccctggtgtggcccggg

SEQ ID NO: 29855 - RNA, 19 nt, synthetic construct
  source 1..19: mol_type = other RNA
aacttccccacctgctcac

SEQ ID NO: 29856 - RNA, 19 nt, synthetic construct
  source 1..19: mol_type = other RNA
gtggacatggaactggtgg

SEQ ID NO: 29857 - RNA, 19 nt, synthetic construct
  source 1..19: mol_type = other RNA
gtggtggttgtgctgatcc

SEQ ID NO: 29858 - RNA, 19 nt, synthetic construct
  source 1..19: mol_type = other RNA
ggtggttgctgctggggtg

SEQ ID NO: 29859 - RNA, 19 nt, synthetic construct
  source 1..19: mol_type = other RNA
aacttccccacctgctcac

SEQ ID NO: 29860 - RNA, 19 nt, synthetic construct
  source 1..19: mol_type = other RNA
acggggtggccgtggatcc

SEQ ID NO: 29861 - RNA, 19 nt, synthetic construct
  source 1..19: mol_type = other RNA
cgtggccgtggtgctcaca

SEQ ID NO: 29862 - RNA, 19 nt, synthetic construct
  source 1..19: mol_type = other RNA
gaggggatggctgtaaagc

SEQ ID NO: 29863 - RNA, 19 nt, synthetic construct
  source 1..19: mol_type = other RNA
gtggtggttgtgctgatcc

SEQ ID NO: 29864 - RNA, 19 nt, synthetic construct
  source 1..19: mol_type = other RNA
ggggtgtgggtggtccccg

SEQ ID NO: 29865 - RNA, 19 nt, synthetic construct
  source 1..19: mol_type = other RNA
ggtggttgctgctggggtg

SEQ ID NO: 29866 - RNA, 19 nt, synthetic construct
  source 1..19: mol_type = other RNA
aacttccccacctgctcac

SEQ ID NO: 29867 - RNA, 19 nt, synthetic construct
  source 1..19: mol_type = other RNA
acggggtggccgtggatcc

SEQ ID NO: 29868 - RNA, 19 nt, synthetic construct
  source 1..19: mol_type = other RNA
acggggtggccgtggatcc

SEQ ID NO: 29869 - RNA, 19 nt, synthetic construct
  source 1..19: mol_type = other RNA
cgtggccgtggtgctcaca

SEQ ID NO: 29870 - RNA, 19 nt, synthetic construct
  source 1..19: mol_type = other RNA
gaggggatggctgtaaagc

SEQ ID NO: 29871 - RNA, 19 nt, synthetic construct
  source 1..19: mol_type = other RNA
gtggtggttgtgctgatcc

SEQ ID NO: 29872 - RNA, 19 nt, synthetic construct
  source 1..19: mol_type = other RNA
tggtcagctcagtgaggat

SEQ ID NO: 29873 - RNA, 19 nt, synthetic construct
  source 1..19: mol_type = other RNA
acagggtggccgtggatcc

SEQ ID NO: 29874 - RNA, 19 nt, synthetic construct
  source 1..19: mol_type = other RNA
tgcaggggtgcgggtggtc

SEQ ID NO: 29875 - RNA, 19 nt, synthetic construct
  source 1..19: mol_type = other RNA
cggaaggtgtaagaggtgc

SEQ ID NO: 29876 - RNA, 19 nt, synthetic construct
  source 1..19: mol_type = other RNA
ccggaaggtgtaagaggtg

SEQ ID NO: 29877 - RNA, 19 nt, synthetic construct
  source 1..19: mol_type = other RNA
ctgatgcaggcgttgaaga

SEQ ID NO: 29878 - RNA, 19 nt, synthetic construct
  source 1..19: mol_type = other RNA
gtgcagatggactcctgcc

SEQ ID NO: 29879 - RNA, 19 nt, synthetic construct
  source 1..19: mol_type = other RNA
gggtgcagatggactcctg

SEQ ID NO: 29880 - RNA, 19 nt, synthetic construct
  source 1..19: mol_type = other RNA
ccccacagcactgcccggc

SEQ ID NO: 29881 - RNA, 19 nt, synthetic construct
  source 1..19: mol_type = other RNA
atggactccaccctcagcc

SEQ ID NO: 29882 - RNA, 19 nt, synthetic construct
  source 1..19: mol_type = other RNA
tgtgtgggggagccatggg

SEQ ID NO: 29883 - RNA, 19 nt, synthetic construct
  source 1..19: mol_type = other RNA
ggaggcagaacgttctcag

SEQ ID NO: 29884 - RNA, 19 nt, synthetic construct
  source 1..19: mol_type = other RNA
tgctgcgcgggcgctccgg

SEQ ID NO: 29885 - RNA, 19 nt, synthetic construct
  source 1..19: mol_type = other RNA
acccatcctgggggctggc

SEQ ID NO: 29886 - RNA, 19 nt, synthetic construct
  source 1..19: mol_type = other RNA
agttgcaaaggccagggaa

SEQ ID NO: 29887 - RNA, 19 nt, synthetic construct
  source 1..19: mol_type = other RNA
tgctgaccttgatgtagtc

SEQ ID NO: 29888 - RNA, 19 nt, synthetic construct
  source 1..19: mol_type = other RNA
gggtgcggtggcagatgcc

SEQ ID NO: 29889 - RNA, 19 nt, synthetic construct
  source 1..19: mol_type = other RNA
cgcggctggccccccgcgt

SEQ ID NO: 29890 - RNA, 19 nt, synthetic construct
  source 1..19: mol_type = other RNA
cactcctggtgctgcatgt

SEQ ID NO: 29891 - RNA, 19 nt, synthetic construct
  source 1..19: mol_type = other RNA
gggttggagcaggtgtccg

SEQ ID NO: 29892 - RNA, 19 nt, synthetic construct
  source 1..19: mol_type = other RNA
gggcagaagcagccgtcca

SEQ ID NO: 29893 - RNA, 19 nt, synthetic construct
  source 1..19: mol_type = other RNA
gtgcccgggctgtaggtgc

SEQ ID NO: 29894 - RNA, 19 nt, synthetic construct
  source 1..19: mol_type = other RNA
gcacggtgaagctgctgtc

SEQ ID NO: 29895 - RNA, 19 nt, synthetic construct
  source 1..19: mol_type = other RNA
gcagcctgggccttccagg

SEQ ID NO: 29896 - RNA, 19 nt, synthetic construct
  source 1..19: mol_type = other RNA
tccacaggcacgaaggaaa

SEQ ID NO: 29897 - RNA, 19 nt, synthetic construct
  source 1..19: mol_type = other RNA
gtgcccgcggggcaggtgc

SEQ ID NO: 29898 - RNA, 19 nt, synthetic construct
  source 1..19: mol_type = other RNA
ggggcactcctgggcgggc

SEQ ID NO: 29899 - RNA, 19 nt, synthetic construct
  source 1..19: mol_type = other RNA
agcccccactcccatccga

SEQ ID NO: 29900 - RNA, 19 nt, synthetic construct
  source 1..19: mol_type = other RNA
acaggggcagtcctcctcg

SEQ ID NO: 29901 - RNA, 19 nt, synthetic construct
  source 1..19: mol_type = other RNA
aggtggcctcgttgtgcac

SEQ ID NO: 29902 - RNA, 19 nt, synthetic construct
  source 1..19: mol_type = other RNA
agtcgaccctgatggtctc

SEQ ID NO: 29903 - RNA, 19 nt, synthetic construct
  source 1..19: mol_type = other RNA
gcagctgccttcaaagctg

SEQ ID NO: 29904 - RNA, 19 nt, synthetic construct
  source 1..19: mol_type = other RNA
ccctcttggaggatcagct

SEQ ID NO: 29905 - RNA, 19 nt, synthetic construct
  source 1..19: mol_type = other RNA
tgcaggggtccttgggtgc

SEQ ID NO: 29906 - RNA, 19 nt, synthetic construct
  source 1..19: mol_type = other RNA
tcacagcccccatgtgggt

SEQ ID NO: 29907 - RNA, 19 nt, synthetic construct
  source 1..19: mol_type = other RNA
atgccactgggtgtgcagt

SEQ ID NO: 29908 - RNA, 19 nt, synthetic construct
  source 1..19: mol_type = other RNA
gtggctggagttccaggac

SEQ ID NO: 29909 - RNA, 19 nt, synthetic construct
  source 1..19: mol_type = other RNA
tgtggctggagttccagga

SEQ ID NO: 29910 - RNA, 19 nt, synthetic construct
  source 1..19: mol_type = other RNA
gaagctgcgccgcccggca

SEQ ID NO: 29911 - RNA, 19 nt, synthetic construct
  source 1..19: mol_type = other RNA
gtggtctgggttggggtag

SEQ ID NO: 29912 - RNA, 19 nt, synthetic construct
  source 1..19: mol_type = other RNA
tgtggtctgggttggggta

SEQ ID NO: 29913 - RNA, 19 nt, synthetic construct
  source 1..19: mol_type = other RNA
tgccagggtccagttgggg

SEQ ID NO: 29914 - RNA, 19 nt, synthetic construct
  source 1..19: mol_type = other RNA
tgcaccttctgccccacct

SEQ ID NO: 29915 - RNA, 19 nt, synthetic construct
  source 1..19: mol_type = other RNA
agtgcaccttctgccccac

SEQ ID NO: 29916 - RNA, 19 nt, synthetic construct
  source 1..19: mol_type = other RNA
ccctgcagtggtcgtcact

SEQ ID NO: 29917 - RNA, 19 nt, synthetic construct
  source 1..19: mol_type = other RNA
tggtgctggccgggggagc

SEQ ID NO: 29918 - RNA, 19 nt, synthetic construct
  source 1..19: mol_type = other RNA
gggtggccgtggatccagt

SEQ ID NO: 29919 - RNA, 19 nt, synthetic construct
  source 1..19: mol_type = other RNA
ggggtggccgtggatccag

SEQ ID NO: 29920 - RNA, 19 nt, synthetic construct
  source 1..19: mol_type = other RNA
cggggtggccgtggatcca

SEQ ID NO: 29921 - RNA, 19 nt, synthetic construct
  source 1..19: mol_type = other RNA
gtgtaacgctggtagctgt

SEQ ID NO: 29922 - RNA, 19 nt, synthetic construct
  source 1..19: mol_type = other RNA
ggtgtgggcagtctctgga

SEQ ID NO: 29923 - RNA, 19 nt, synthetic construct
  source 1..19: mol_type = other RNA
aagcactgtggaggtgtgg

SEQ ID NO: 29924 - RNA, 19 nt, synthetic construct
  source 1..19: mol_type = other RNA
acagagccggtggccccag

SEQ ID NO: 29925 - RNA, 19 nt, synthetic construct
  source 1..19: mol_type = other RNA
ttgtgggtgtggtggttgt

SEQ ID NO: 29926 - RNA, 19 nt, synthetic construct
  source 1..19: mol_type = other RNA
tggtccccgggatggagga

SEQ ID NO: 29927 - RNA, 19 nt, synthetic construct
  source 1..19: mol_type = other RNA
gtggtggtggtcagcactg

SEQ ID NO: 29928 - RNA, 19 nt, synthetic construct
  source 1..19: mol_type = other RNA
tggccacagttgtggtggt

SEQ ID NO: 29929 - RNA, 19 nt, synthetic construct
  source 1..19: mol_type = other RNA
accactggtctgtgtgcta

SEQ ID NO: 29930 - RNA, 19 nt, synthetic construct
  source 1..19: mol_type = other RNA
gtggagccggtggccgtga

SEQ ID NO: 29931 - RNA, 19 nt, synthetic construct
  source 1..19: mol_type = other RNA
cccaggagttgaggagggg

SEQ ID NO: 29932 - RNA, 19 nt, synthetic construct
  source 1..19: mol_type = other RNA
gagggagtcactgtgttgc

SEQ ID NO: 29933 - RNA, 19 nt, synthetic construct
  source 1..19: mol_type = other RNA
agaggagggagtcactgtg

SEQ ID NO: 29934 - RNA, 19 nt, synthetic construct
  source 1..19: mol_type = other RNA
gtggaaggctctgtgatgt

SEQ ID NO: 29935 - RNA, 19 nt, synthetic construct
  source 1..19: mol_type = other RNA
gtgtggccgtggctgtggt

SEQ ID NO: 29936 - RNA, 19 nt, synthetic construct
  source 1..19: mol_type = other RNA
tgcgggtcttgctgggtgt

SEQ ID NO: 29937 - RNA, 19 nt, synthetic construct
  source 1..19: mol_type = other RNA
ctctgaccaggcacactgg

SEQ ID NO: 29938 - RNA, 19 nt, synthetic construct
  source 1..19: mol_type = other RNA
ccgccagagggccccggca

SEQ ID NO: 29939 - RNA, 19 nt, synthetic construct
  source 1..19: mol_type = other RNA
cccgccagagggccccggc

SEQ ID NO: 29940 - RNA, 19 nt, synthetic construct
  source 1..19: mol_type = other RNA
ccccgccagagggccccgg

SEQ ID NO: 29941 - RNA, 19 nt, synthetic construct
  source 1..19: mol_type = other RNA
gccaaagtccaggctgcat

SEQ ID NO: 29942 - RNA, 19 nt, synthetic construct
  source 1..19: mol_type = other RNA
ggccaaagtccaggctgca

SEQ ID NO: 29943 - RNA, 19 nt, synthetic construct
  source 1..19: mol_type = other RNA
gggtggccgtggatccagt

SEQ ID NO: 29944 - RNA, 19 nt, synthetic construct
  source 1..19: mol_type = other RNA
ggggtggccgtggatccag

SEQ ID NO: 29945 - RNA, 19 nt, synthetic construct
  source 1..19: mol_type = other RNA
cggggtggccgtggatcca

SEQ ID NO: 29946 - RNA, 19 nt, synthetic construct
  source 1..19: mol_type = other RNA
ctggggtggaggacggggt

SEQ ID NO: 29947 - RNA, 19 nt, synthetic construct
  source 1..19: mol_type = other RNA
cagcagttgcctgggtgga

SEQ ID NO: 29948 - RNA, 19 nt, synthetic construct
  source 1..19: mol_type = other RNA
aggaggaggggatggctgt

SEQ ID NO: 29949 - RNA, 19 nt, synthetic construct
  source 1..19: mol_type = other RNA
gacagtctctggagtggag

SEQ ID NO: 29950 - RNA, 19 nt, synthetic construct
  source 1..19: mol_type = other RNA
ttgtgggtgtggtggttgt

SEQ ID NO: 29951 - RNA, 19 nt, synthetic construct
  source 1..19: mol_type = other RNA
tggtccccgggatggagga

SEQ ID NO: 29952 - RNA, 19 nt, synthetic construct
  source 1..19: mol_type = other RNA
gtggtggtggtcagcactg

SEQ ID NO: 29953 - RNA, 19 nt, synthetic construct
  source 1..19: mol_type = other RNA
tggccacagttgtggtggt

SEQ ID NO: 29954 - RNA, 19 nt, synthetic construct
  source 1..19: mol_type = other RNA
accactggtctgtgtgcta

SEQ ID NO: 29955 - RNA, 19 nt, synthetic construct
  source 1..19: mol_type = other RNA
gtggagccggtggccgtga

SEQ ID NO: 29956 - RNA, 19 nt, synthetic construct
  source 1..19: mol_type = other RNA
gtggaaggctctgtgatgt

SEQ ID NO: 29957 - RNA, 19 nt, synthetic construct
  source 1..19: mol_type = other RNA
gggtgagggctggacaggg

SEQ ID NO: 29958 - RNA, 19 nt, synthetic construct
  source 1..19: mol_type = other RNA
tgcgggtcttgctgggtgt

SEQ ID NO: 29959 - RNA, 19 nt, synthetic construct
  source 1..19: mol_type = other RNA
ctctgaccaggcacactgg

SEQ ID NO: 29960 - RNA, 19 nt, synthetic construct
  source 1..19: mol_type = other RNA
ccgccagagggccccggca

SEQ ID NO: 29961 - RNA, 19 nt, synthetic construct
  source 1..19: mol_type = other RNA
cccgccagagggccccggc

SEQ ID NO: 29962 - RNA, 19 nt, synthetic construct
  source 1..19: mol_type = other RNA
ccccgccagagggccccgg

SEQ ID NO: 29963 - RNA, 19 nt, synthetic construct
  source 1..19: mol_type = other RNA
gccaaagtccaggctgcat

SEQ ID NO: 29964 - RNA, 19 nt, synthetic construct
  source 1..19: mol_type = other RNA
ggccaaagtccaggctgca

SEQ ID NO: 29965 - RNA, 19 nt, synthetic construct
  source 1..19: mol_type = other RNA
cccggggtggaggacggga

SEQ ID NO: 29966 - RNA, 19 nt, synthetic construct
  source 1..19: mol_type = other RNA
tcccggggtggaggacggg

SEQ ID NO: 29967 - RNA, 19 nt, synthetic construct
  source 1..19: mol_type = other RNA
gtggtggccgtgctggtca

SEQ ID NO: 29968 - RNA, 19 nt, synthetic construct
  source 1..19: mol_type = other RNA
gctgtggatttggtggctg

SEQ ID NO: 29969 - RNA, 19 nt, synthetic construct
  source 1..19: mol_type = other RNA
aggaggggatgggtgtaaa

SEQ ID NO: 29970 - RNA, 19 nt, synthetic construct
  source 1..19: mol_type = other RNA
gggtgaaggaggggatggg

SEQ ID NO: 29971 - RNA, 19 nt, synthetic construct
  source 1..19: mol_type = other RNA
gagggtcccggtggtccca

SEQ ID NO: 29972 - RNA, 19 nt, synthetic construct
  source 1..19: mol_type = other RNA
gttctgggagggtcccggt

SEQ ID NO: 29973 - RNA, 19 nt, synthetic construct
  source 1..19: mol_type = other RNA
tggaggaggggtggattgt

SEQ ID NO: 29974 - RNA, 19 nt, synthetic construct
  source 1..19: mol_type = other RNA
ggagtggaggaggggtgga

SEQ ID NO: 29975 - RNA, 19 nt, synthetic construct
  source 1..19: mol_type = other RNA
cagcactgtggaggtgtgg

SEQ ID NO: 29976 - RNA, 19 nt, synthetic construct
  source 1..19: mol_type = other RNA
ggccgtggggccagtggct

SEQ ID NO: 29977 - RNA, 19 nt, synthetic construct
  source 1..19: mol_type = other RNA
ctggggtggaggacggggt

SEQ ID NO: 29978 - RNA, 19 nt, synthetic construct
  source 1..19: mol_type = other RNA
gtggtggccgtgctggtca

SEQ ID NO: 29979 - RNA, 19 nt, synthetic construct
  source 1..19: mol_type = other RNA
gtggctctggagctgatga

SEQ ID NO: 29980 - RNA, 19 nt, synthetic construct
  source 1..19: mol_type = other RNA
ctgtaacgctggtagctgt

SEQ ID NO: 29981 - RNA, 19 nt, synthetic construct
  source 1..19: mol_type = other RNA
agtagaggagggtgtggct

SEQ ID NO: 29982 - RNA, 19 nt, synthetic construct
  source 1..19: mol_type = other RNA
ttgtgggtgtggtggttgt

SEQ ID NO: 29983 - RNA, 19 nt, synthetic construct
  source 1..19: mol_type = other RNA
tggtccccgggatggagga

SEQ ID NO: 29984 - RNA, 19 nt, synthetic construct
  source 1..19: mol_type = other RNA
gtggtggtggtcagcactg

SEQ ID NO: 29985 - RNA, 19 nt, synthetic construct
  source 1..19: mol_type = other RNA
tggccacagttgtggtggt

SEQ ID NO: 29986 - RNA, 19 nt, synthetic construct
  source 1..19: mol_type = other RNA
accactggtctgtgtgcta

SEQ ID NO: 29987 - RNA, 19 nt, synthetic construct
  source 1..19: mol_type = other RNA
gtggaaggctctgtgatgt

SEQ ID NO: 29988 - RNA, 19 nt, synthetic construct
  source 1..19: mol_type = other RNA
tgctggggtgtgggaagtc

SEQ ID NO: 29989 - RNA, 19 nt, synthetic construct
  source 1..19: mol_type = other RNA
gtgctgggtggtactggtg

SEQ ID NO: 29990 - RNA, 19 nt, synthetic construct
  source 1..19: mol_type = other RNA
agtgctgggtggtactggt

SEQ ID NO: 29991 - RNA, 19 nt, synthetic construct
  source 1..19: mol_type = other RNA
gggtgagggctggacaggg

SEQ ID NO: 29992 - RNA, 19 nt, synthetic construct
  source 1..19: mol_type = other RNA
tgcgggtcttgctgggtgt

SEQ ID NO: 29993 - RNA, 19 nt, synthetic construct
  source 1..19: mol_type = other RNA
ctctgaccaggcacactgg

SEQ ID NO: 29994 - RNA, 19 nt, synthetic construct
  source 1..19: mol_type = other RNA
ccgccagagggccccggca

SEQ ID NO: 29995 - RNA, 19 nt, synthetic construct
  source 1..19: mol_type = other RNA
cccgccagagggccccggc

SEQ ID NO: 29996 - RNA, 19 nt, synthetic construct
  source 1..19: mol_type = other RNA
ccccgccagagggccccgg

SEQ ID NO: 29997 - RNA, 19 nt, synthetic construct
  source 1..19: mol_type = other RNA
gccaaagtccaggctgcat

SEQ ID NO: 29998 - RNA, 19 nt, synthetic construct
  source 1..19: mol_type = other RNA
ggccaaagtccaggctgca

SEQ ID NO: 29999 - RNA, 19 nt, synthetic construct
  source 1..19: mol_type = other RNA
gtcagctttgtgaggatcc

SEQ ID NO: 30000 - RNA, 19 nt, synthetic construct
  source 1..19: mol_type = other RNA
ggtcagctttgtgaggatc

SEQ ID NO: 30001 - RNA, 19 nt, synthetic construct
  source 1..19: mol_type = other RNA
gggtggccgtggatccagt

SEQ ID NO: 30002 - RNA, 19 nt, synthetic construct
  source 1..19: mol_type = other RNA
ggggtggccgtggatccag

SEQ ID NO: 30003 - RNA, 19 nt, synthetic construct
  source 1..19: mol_type = other RNA
cggggtggccgtggatcca

SEQ ID NO: 30004 - RNA, 19 nt, synthetic construct
  source 1..19: mol_type = other RNA
ctggggtggaggacggggt

SEQ ID NO: 30005 - RNA, 19 nt, synthetic construct
  source 1..19: mol_type = other RNA
cagcagttgcctgggtgga

SEQ ID NO: 30006 - RNA, 19 nt, synthetic construct
  source 1..19: mol_type = other RNA
aggaggaggggatggctgt

SEQ ID NO: 30007 - RNA, 19 nt, synthetic construct
  source 1..19: mol_type = other RNA
ggtgtgggcagtctctgga

SEQ ID NO: 30008 - RNA, 19 nt, synthetic construct
  source 1..19: mol_type = other RNA
aagcactgtggaggtgtgg

SEQ ID NO: 30009 - RNA, 19 nt, synthetic construct
  source 1..19: mol_type = other RNA
ttgtgggtgtggtggttgt

SEQ ID NO: 30010 - RNA, 19 nt, synthetic construct
  source 1..19: mol_type = other RNA
ggacggaggagggggtcac

SEQ ID NO: 30011 - RNA, 19 nt, synthetic construct
  source 1..19: mol_type = other RNA
gtggtggtggtcagcactg

SEQ ID NO: 30012 - RNA, 19 nt, synthetic construct
  source 1..19: mol_type = other RNA
tggccacagttgtggtggt

SEQ ID NO: 30013 - RNA, 19 nt, synthetic construct
  source 1..19: mol_type = other RNA
accactggtctgtgtgcta

SEQ ID NO: 30014 - RNA, 19 nt, synthetic construct
  source 1..19: mol_type = other RNA
gtggagccggtggccgtga

SEQ ID NO: 30015 - RNA, 19 nt, synthetic construct
  source 1..19: mol_type = other RNA
gtggaaggctctgtgatgt

SEQ ID NO: 30016 - RNA, 19 nt, synthetic construct
  source 1..19: mol_type = other RNA
gggtgagggctggacaggg

SEQ ID NO: 30017 - RNA, 19 nt, synthetic construct
  source 1..19: mol_type = other RNA
gggtggtcgtccctgggga

SEQ ID NO: 30018 - RNA, 19 nt, synthetic construct
  source 1..19: mol_type = other RNA
tgcgggtcttgctgggtgt

SEQ ID NO: 30019 - RNA, 19 nt, synthetic construct
  source 1..19: mol_type = other RNA
ctctgaccaggcacactgg

SEQ ID NO: 30020 - RNA, 19 nt, synthetic construct
  source 1..19: mol_type = other RNA
ccgccagagggccccggca

SEQ ID NO: 30021 - RNA, 19 nt, synthetic construct
  source 1..19: mol_type = other RNA
cccgccagagggccccggc

SEQ ID NO: 30022 - RNA, 19 nt, synthetic construct
  source 1..19: mol_type = other RNA
ccccgccagagggccccgg

SEQ ID NO: 30023 - RNA, 19 nt, synthetic construct
  source 1..19: mol_type = other RNA
gccaaagtccaggctgcat

SEQ ID NO: 30024 - RNA, 19 nt, synthetic construct
  source 1..19: mol_type = other RNA
ggccaaagtccaggctgca

SEQ ID NO: 30025 - RNA, 19 nt, synthetic construct
  source 1..19: mol_type = other RNA
ccgtggatccagtggatgc

SEQ ID NO: 30026 - RNA, 19 nt, synthetic construct
  source 1..19: mol_type = other RNA
gggtggccgtggatccagt

SEQ ID NO: 30027 - RNA, 19 nt, synthetic construct
  source 1..19: mol_type = other RNA
ggggtggccgtggatccag

SEQ ID NO: 30028 - RNA, 19 nt, synthetic construct
  source 1..19: mol_type = other RNA
cggggtggccgtggatcca

SEQ ID NO: 30029 - RNA, 19 nt, synthetic construct
  source 1..19: mol_type = other RNA
ccggggtggaggacggggt

SEQ ID NO: 30030 - RNA, 19 nt, synthetic construct
  source 1..19: mol_type = other RNA
gctgtggatttggtggctg

SEQ ID NO: 30031 - RNA, 19 nt, synthetic construct
  source 1..19: mol_type = other RNA
gtgtaacgctggtagctgt

SEQ ID NO: 30032 - RNA, 19 nt, synthetic construct
  source 1..19: mol_type = other RNA
gtggtcccaagggtggagg

SEQ ID NO: 30033 - RNA, 19 nt, synthetic construct
  source 1..19: mol_type = other RNA
gagggtcccggtggtccca

SEQ ID NO: 30034 - RNA, 19 nt, synthetic construct
  source 1..19: mol_type = other RNA
gttctgggagggtcccggt

SEQ ID NO: 30035 - RNA, 19 nt, synthetic construct
  source 1..19: mol_type = other RNA
tggaggaggggtggattgt

SEQ ID NO: 30036 - RNA, 19 nt, synthetic construct
  source 1..19: mol_type = other RNA
ggagtggaggaggggtgga

SEQ ID NO: 30037 - RNA, 19 nt, synthetic construct
  source 1..19: mol_type = other RNA
cagcactgtggaggtgtgg

SEQ ID NO: 30038 - RNA, 19 nt, synthetic construct
  source 1..19: mol_type = other RNA
ggccgtggggccagtggct

SEQ ID NO: 30039 - RNA, 19 nt, synthetic construct
  source 1..19: mol_type = other RNA
ctggggtggaggacggggt

SEQ ID NO: 30040 - RNA, 19 nt, synthetic construct
  source 1..19: mol_type = other RNA
gggtggccgtggatccagt

SEQ ID NO: 30041 - RNA, 19 nt, synthetic construct
  source 1..19: mol_type = other RNA
ggggtggccgtggatccag

SEQ ID NO: 30042 - RNA, 19 nt, synthetic construct
  source 1..19: mol_type = other RNA
cggggtggccgtggatcca

SEQ ID NO: 30043 - RNA, 19 nt, synthetic construct
  source 1..19: mol_type = other RNA
ctggggtggaggacggggt

SEQ ID NO: 30044 - RNA, 19 nt, synthetic construct
  source 1..19: mol_type = other RNA
cagcagttgcctgggtgga

SEQ ID NO: 30045 - RNA, 19 nt, synthetic construct
  source 1..19: mol_type = other RNA
aggaggaggggatggctgt

SEQ ID NO: 30046 - RNA, 19 nt, synthetic construct
  source 1..19: mol_type = other RNA
gacagtctctggagtggag

SEQ ID NO: 30047 - RNA, 19 nt, synthetic construct
  source 1..19: mol_type = other RNA
ttgtgggtgtggtggttgt

SEQ ID NO: 30048 - RNA, 19 nt, synthetic construct
  source 1..19: mol_type = other RNA
tggtccccgggatggagga

SEQ ID NO: 30049 - RNA, 19 nt, synthetic construct
  source 1..19: mol_type = other RNA
tggccacagttgtggtggt

SEQ ID NO: 30050 - RNA, 19 nt, synthetic construct
  source 1..19: mol_type = other RNA
accactggtctgtgtgcta

SEQ ID NO: 30051 - RNA, 19 nt, synthetic construct
  source 1..19: mol_type = other RNA
gtggagccggtggccgtga

SEQ ID NO: 30052 - RNA, 19 nt, synthetic construct
  source 1..19: mol_type = other RNA
gtggtggccgtgctggtca

SEQ ID NO: 30053 - RNA, 19 nt, synthetic construct
  source 1..19: mol_type = other RNA
tggtggctgcgggtgtggt

SEQ ID NO: 30054 - RNA, 19 nt, synthetic construct
  source 1..19: mol_type = other RNA
ggagctggtggctgcgggt

SEQ ID NO: 30055 - RNA, 19 nt, synthetic construct
  source 1..19: mol_type = other RNA
ctgtggattttgtggctgt

SEQ ID NO: 30056 - RNA, 19 nt, synthetic construct
  source 1..19: mol_type = other RNA
aggaggggatgggtgtaaa

SEQ ID NO: 30057 - RNA, 19 nt, synthetic construct
  source 1..19: mol_type = other RNA
cagcactgtggaggtgtgg

SEQ ID NO: 30058 - RNA, 19 nt, synthetic construct
  source 1..19: mol_type = other RNA
cagttgtagtggctgttgt

SEQ ID NO: 30059 - RNA, 19 nt, synthetic construct
  source 1..19: mol_type = other RNA
gcagttgtagtggctgttg

SEQ ID NO: 30060 - RNA, 19 nt, synthetic construct
  source 1..19: mol_type = other RNA
gggtggccgtggatccagt

SEQ ID NO: 30061 - RNA, 19 nt, synthetic construct
  source 1..19: mol_type = other RNA
agggtggccgtggatccag

SEQ ID NO: 30062 - RNA, 19 nt, synthetic construct
  source 1..19: mol_type = other RNA
tggccatggtggtcaccac

SEQ ID NO: 30063 - RNA, 19 nt, synthetic construct
  source 1..19: mol_type = other RNA
gcaggggtgcgggtggtcc

SEQ ID NO: 30064 - RNA, 19 nt, synthetic construct
  source 1..19: mol_type = other RNA
aggtgacgttggccacagg

SEQ ID NO: 30065 - RNA, 19 nt, synthetic construct
  source 1..19: mol_type = other RNA
cagcggcagtggcagaggc

SEQ ID NO: 30066 - RNA, 19 nt, synthetic construct
  source 1..19: mol_type = other RNA
gccctcctccttcccatgc

SEQ ID NO: 30067 - RNA, 19 nt, synthetic construct
  source 1..19: mol_type = other RNA
ggtggtccccagcacagac

SEQ ID NO: 30068 - RNA, 19 nt, synthetic construct
  source 1..19: mol_type = other RNA
agacttggccattgaaggt

SEQ ID NO: 30069 - RNA, 19 nt, synthetic construct
  source 1..19: mol_type = other RNA
gcctggaagacttggccat

SEQ ID NO: 30070 - RNA, 19 nt, synthetic construct
  source 1..19: mol_type = other RNA
tgctgtcggggaccagcca

SEQ ID NO: 30071 - RNA, 19 nt, synthetic construct
  source 1..19: mol_type = other RNA
gcagccatcctttctgctg

SEQ ID NO: 30072 - RNA, 19 nt, synthetic construct
  source 1..19: mol_type = other RNA
gcggctgtggtgggcatgg

SEQ ID NO: 30073 - RNA, 19 nt, synthetic construct
  source 1..19: mol_type = other RNA
gatgcaggcgttgaagaat

SEQ ID NO: 30074 - RNA, 19 nt, synthetic construct
  source 1..19: mol_type = other RNA
ccacgcaggggcaggcctg

SEQ ID NO: 30075 - RNA, 19 nt, synthetic construct
  source 1..19: mol_type = other RNA
ggggcaggtggttgtgttg

SEQ ID NO: 30076 - RNA, 19 nt, synthetic construct
  source 1..19: mol_type = other RNA
cagatggactcctgccctg

SEQ ID NO: 30077 - RNA, 19 nt, synthetic construct
  source 1..19: mol_type = other RNA
tacgaacacagctgaggtc

SEQ ID NO: 30078 - RNA, 19 nt, synthetic construct
  source 1..19: mol_type = other RNA
ccagagaggcaggtacaca

SEQ ID NO: 30079 - RNA, 19 nt, synthetic construct
  source 1..19: mol_type = other RNA
tattgttgcaggcatcctc

SEQ ID NO: 30080 - RNA, 19 nt, synthetic construct
  source 1..19: mol_type = other RNA
ctgcccggccactctcttg

SEQ ID NO: 30081 - RNA, 19 nt, synthetic construct
  source 1..19: mol_type = other RNA
cccacagcactgcccggcc

SEQ ID NO: 30082 - RNA, 19 nt, synthetic construct
  source 1..19: mol_type = other RNA
ggctgtggggtcagcaaat

SEQ ID NO: 30083 - RNA, 19 nt, synthetic construct
  source 1..19: mol_type = other RNA
gtggcctcctgggccggga

SEQ ID NO: 30084 - RNA, 19 nt, synthetic construct
  source 1..19: mol_type = other RNA
aacgttctcagacagcagt

SEQ ID NO: 30085 - RNA, 19 nt, synthetic construct
  source 1..19: mol_type = other RNA
cgtgctgcgcgggcgctcc

SEQ ID NO: 30086 - RNA, 19 nt, synthetic construct
  source 1..19: mol_type = other RNA
agcagctggccttgcctgg

SEQ ID NO: 30087 - RNA, 19 nt, synthetic construct
  source 1..19: mol_type = other RNA
ggtttatttgcaaaactgg

SEQ ID NO: 30088 - RNA, 19 nt, synthetic construct
  source 1..19: mol_type = other RNA
atgctcagggtttatttgc

SEQ ID NO: 30089 - RNA, 19 nt, synthetic construct
  source 1..19: mol_type = other RNA
aatgctcagggtttatttg

SEQ ID NO: 30090 - RNA, 19 nt, synthetic construct
  source 1..19: mol_type = other RNA
gtgcagttgtccacatggc

SEQ ID NO: 30091 - RNA, 19 nt, synthetic construct
  source 1..19: mol_type = other RNA
cccagagtggaggaggcgg

SEQ ID NO: 30092 - RNA, 19 nt, synthetic construct
  source 1..19: mol_type = other RNA
ggggctttgggatgctgac

SEQ ID NO: 30093 - RNA, 19 nt, synthetic construct
  source 1..19: mol_type = other RNA
agggggtggccacagagcc

SEQ ID NO: 30094 - RNA, 19 nt, synthetic construct
  source 1..19: mol_type = other RNA
agggggtggccacagagcc

SEQ ID NO: 30095 - RNA, 19 nt, synthetic construct
  source 1..19: mol_type = other RNA
agggggtggccacagagcc

SEQ ID NO: 30096 - RNA, 19 nt, synthetic construct
  source 1..19: mol_type = other RNA
agggggtggccacagagcc

SEQ ID NO: 30097 - RNA, 19 nt, synthetic construct
  source 1..19: mol_type = other RNA
agggggtggccacagagcc

SEQ ID NO: 30098 - RNA, 19 nt, synthetic construct
  source 1..19: mol_type = other RNA
gggtgggggtgggtgtgct

SEQ ID NO: 30099 - RNA, 19 nt, synthetic construct
  source 1..19: mol_type = other RNA
agcactttgggagggggag

SEQ ID NO: 30100 - RNA, 19 nt, synthetic construct
  source 1..19: mol_type = other RNA
gagggggtggccacagagc

SEQ ID NO: 30101 - RNA, 19 nt, synthetic construct
  source 1..19: mol_type = other RNA
gagggggtggccacagagc

SEQ ID NO: 30102 - RNA, 19 nt, synthetic construct
  source 1..19: mol_type = other RNA
agcactttgggagggggag

SEQ ID NO: 30103 - RNA, 19 nt, synthetic construct
  source 1..19: mol_type = other RNA
gagggggtggccacagagc

SEQ ID NO: 30104 - RNA, 19 nt, synthetic construct
  source 1..19: mol_type = other RNA
gagggggtggccacagagc

SEQ ID NO: 30105 - RNA, 19 nt, synthetic construct
  source 1..19: mol_type = other RNA
agcactttgggagggggag

SEQ ID NO: 30106 - RNA, 19 nt, synthetic construct
  source 1..19: mol_type = other RNA
gagggggtggccacagagc

SEQ ID NO: 30107 - RNA, 19 nt, synthetic construct
  source 1..19: mol_type = other RNA
gttgaagtcctcgtaggcg

SEQ ID NO: 30108 - RNA, 19 nt, synthetic construct
  source 1..19: mol_type = other RNA
gtgcagaaacactcgcagt

SEQ ID NO: 30109 - RNA, 19 nt, synthetic construct
  source 1..19: mol_type = other RNA
gctgcacaccctgtgcttt

SEQ ID NO: 30110 - RNA, 19 nt, synthetic construct
  source 1..19: mol_type = other RNA
ggctgcacaccctgtgctt

SEQ ID NO: 30111 - RNA, 19 nt, synthetic construct
  source 1..19: mol_type = other RNA
gaagtggctttggaactgg

SEQ ID NO: 30112 - RNA, 19 nt, synthetic construct
  source 1..19: mol_type = other RNA
gaagtggctttggaactgg

SEQ ID NO: 30113 - RNA, 19 nt, synthetic construct
  source 1..19: mol_type = other RNA
gggcactcctgggcgggca

SEQ ID NO: 30114 - RNA, 19 nt, synthetic construct
  source 1..19: mol_type = other RNA
ggtggccctggtgtggccc

SEQ ID NO: 30115 - RNA, 19 nt, synthetic construct
  source 1..19: mol_type = other RNA
tggaccagcctgtctgccc

SEQ ID NO: 30116 - RNA, 19 nt, synthetic construct
  source 1..19: mol_type = other RNA
tagacaccggggctgcggg

SEQ ID NO: 30117 - RNA, 19 nt, synthetic construct
  source 1..19: mol_type = other RNA
ggtggtggtgttagtcaag

SEQ ID NO: 30118 - RNA, 19 nt, synthetic construct
  source 1..19: mol_type = other RNA
ggtgagggctggaaagggc

SEQ ID NO: 30119 - RNA, 19 nt, synthetic construct
  source 1..19: mol_type = other RNA
ttcaaacgtctcaaagtct

SEQ ID NO: 30120 - RNA, 19 nt, synthetic construct
  source 1..19: mol_type = other RNA
ctcctccagcggcatgtcg

SEQ ID NO: 30121 - RNA, 19 nt, synthetic construct
  source 1..19: mol_type = other RNA
ctggtggtggtgttagtca

SEQ ID NO: 30122 - RNA, 19 nt, synthetic construct
  source 1..19: mol_type = other RNA
ggtcttgtagtggaagtca

SEQ ID NO: 30123 - RNA, 19 nt, synthetic construct
  source 1..19: mol_type = other RNA
ccacacagtggtcctcgca

SEQ ID NO: 30124 - RNA, 19 nt, synthetic construct
  source 1..19: mol_type = other RNA
aagcggtgctggctgtgcc

SEQ ID NO: 30125 - RNA, 19 nt, synthetic construct
  source 1..19: mol_type = other RNA
ccctggctggtggtggtgt

SEQ ID NO: 30126 - RNA, 19 nt, synthetic construct
  source 1..19: mol_type = other RNA
ggggtggctgtgaagcccg

SEQ ID NO: 30127 - RNA, 19 nt, synthetic construct
  source 1..19: mol_type = other RNA
gggggtggctgtgaagccc

SEQ ID NO: 30128 - RNA, 19 nt, synthetic construct
  source 1..19: mol_type = other RNA
gggtgagggctggaaaggg

SEQ ID NO: 30129 - RNA, 19 nt, synthetic construct
  source 1..19: mol_type = other RNA
ggggtggctgtgaagcccg

SEQ ID NO: 30130 - RNA, 19 nt, synthetic construct
  source 1..19: mol_type = other RNA
gggggtggctgtgaagccc

SEQ ID NO: 30131 - RNA, 19 nt, synthetic construct
  source 1..19: mol_type = other RNA
ggggtggctgtgaagcccg

SEQ ID NO: 30132 - RNA, 19 nt, synthetic construct
  source 1..19: mol_type = other RNA
gggggtggctgtgaagccc

SEQ ID NO: 30133 - RNA, 19 nt, synthetic construct
  source 1..19: mol_type = other RNA
ggggtggctgtgaagcccg

SEQ ID NO: 30134 - RNA, 19 nt, synthetic construct
  source 1..19: mol_type = other RNA
gggggtggctgtgaagccc

SEQ ID NO: 30135 - RNA, 19 nt, synthetic construct
  source 1..19: mol_type = other RNA
tcacgcccagggcaggaat

SEQ ID NO: 30136 - RNA, 19 nt, synthetic construct
  source 1..19: mol_type = other RNA
ccacaggctctcccagggt

SEQ ID NO: 30137 - RNA, 19 nt, synthetic construct
  source 1..19: mol_type = other RNA
tcgtcactgcagcagagga

SEQ ID NO: 30138 - RNA, 19 nt, synthetic construct
  source 1..19: mol_type = other RNA
cattgtcgtctctgtcctg

SEQ ID NO: 30139 - RNA, 19 nt, synthetic construct
  source 1..19: mol_type = other RNA
tcgtagtggccgtggtggt

SEQ ID NO: 30140 - RNA, 19 nt, synthetic construct
  source 1..19: mol_type = other RNA
tcgtagtggccgtggtggt

SEQ ID NO: 30141 - RNA, 19 nt, synthetic construct
  source 1..19: mol_type = other RNA
tcgtagtggccgtggtggt

SEQ ID NO: 30142 - RNA, 19 nt, synthetic construct
  source 1..19: mol_type = other RNA
tcgtagtggccgtggtggt

SEQ ID NO: 30143 - RNA, 19 nt, synthetic construct
  source 1..19: mol_type = other RNA
tggattgtggacatggtgg

SEQ ID NO: 30144 - RNA, 19 nt, synthetic construct
  source 1..19: mol_type = other RNA
gaaccggtgggcaccatca

SEQ ID NO: 30145 - RNA, 19 nt, synthetic construct
  source 1..19: mol_type = other RNA
gctgattgcacactgcgta

SEQ ID NO: 30146 - RNA, 19 nt, synthetic construct
  source 1..19: mol_type = other RNA
agtattgttgcaggcatcc

SEQ ID NO: 30147 - RNA, 19 nt, synthetic construct
  source 1..19: mol_type = other RNA
cgctccccgggaaatttag

SEQ ID NO: 30148 - RNA, 19 nt, synthetic construct
  source 1..19: mol_type = other RNA
gcgtaagcctccaggctct

SEQ ID NO: 30149 - RNA, 19 nt, synthetic construct
  source 1..19: mol_type = other RNA
gcccgtgtgtggtggccgt

SEQ ID NO: 30150 - RNA, 19 nt, synthetic construct
  source 1..19: mol_type = other RNA
gcccgtgtgtggtggccgt

SEQ ID NO: 30151 - RNA, 19 nt, synthetic construct
  source 1..19: mol_type = other RNA
gcccgtgtgtggtggccgt

SEQ ID NO: 30152 - RNA, 19 nt, synthetic construct
  source 1..19: mol_type = other RNA
gtggcagggacacataggc

SEQ ID NO: 30153 - RNA, 19 nt, synthetic construct
  source 1..19: mol_type = other RNA
cctgccctggcgggcacac

SEQ ID NO: 30154 - RNA, 19 nt, synthetic construct
  source 1..19: mol_type = other RNA
agtagtcctgggccaagat

SEQ ID NO: 30155 - RNA, 19 nt, synthetic construct
  source 1..19: mol_type = other RNA
cgtcctggtagctgtaggt

SEQ ID NO: 30156 - RNA, 19 nt, synthetic construct
  source 1..19: mol_type = other RNA
tcccaggagttgaggaggg

SEQ ID NO: 30157 - RNA, 19 nt, synthetic construct
  source 1..19: mol_type = other RNA
ggagcacggagcgcggggt

SEQ ID NO: 30158 - RNA, 19 nt, synthetic construct
  source 1..19: mol_type = other RNA
gtggtggtcagtgatgggg

SEQ ID NO: 30159 - RNA, 19 nt, synthetic construct
  source 1..19: mol_type = other RNA
gtggtggtcagtgatgggg

SEQ ID NO: 30160 - RNA, 19 nt, synthetic construct
  source 1..19: mol_type = other RNA
gtggtggtcagtgatgggg

SEQ ID NO: 30161 - RNA, 19 nt, synthetic construct
  source 1..19: mol_type = other RNA
gtggtggtcagtgatgggg

SEQ ID NO: 30162 - RNA, 19 nt, synthetic construct
  source 1..19: mol_type = other RNA
cgggtgggcgaggacgtcg

SEQ ID NO: 30163 - RNA, 19 nt, synthetic construct
  source 1..19: mol_type = other RNA
cccgcgtcgtggcaggcct

SEQ ID NO: 30164 - RNA, 19 nt, synthetic construct
  source 1..19: mol_type = other RNA
cagaacaaggggcaggtgt

SEQ ID NO: 30165 - RNA, 19 nt, synthetic construct
  source 1..19: mol_type = other RNA
gtcgggaagctgcgccgcc

SEQ ID NO: 30166 - RNA, 19 nt, synthetic construct
  source 1..19: mol_type = other RNA
gttgtcccaggagttgagg

SEQ ID NO: 30167 - RNA, 19 nt, synthetic construct
  source 1..19: mol_type = other RNA
ctcagggtttatttgcaaa

SEQ ID NO: 30168 - RNA, 19 nt, synthetic construct
  source 1..19: mol_type = other RNA
gggtgggcgaggacgtcgg

SEQ ID NO: 30169 - RNA, 19 nt, synthetic construct
  source 1..19: mol_type = other RNA
ggtcctggcactgccatag

SEQ ID NO: 30170 - RNA, 19 nt, synthetic construct
  source 1..19: mol_type = other RNA
gtagtcctgggccaagatg

SEQ ID NO: 30171 - RNA, 19 nt, synthetic construct
  source 1..19: mol_type = other RNA
tgcccctggtgtggcccgg

SEQ ID NO: 30172 - RNA, 19 nt, synthetic construct
  source 1..19: mol_type = other RNA
tggggacaggtagtattgt

SEQ ID NO: 30173 - RNA, 19 nt, synthetic construct
  source 1..19: mol_type = other RNA
agttggcactttggtagtg

SEQ ID NO: 30174 - RNA, 19 nt, synthetic construct
  source 1..19: mol_type = other RNA
aggtggtgttgaaggaggt

SEQ ID NO: 30175 - RNA, 19 nt, synthetic construct
  source 1..19: mol_type = other RNA
agccactctgaccaggcac

SEQ ID NO: 30176 - RNA, 19 nt, synthetic construct
  source 1..19: mol_type = other RNA
agccactctgaccaggcac

SEQ ID NO: 30177 - RNA, 19 nt, synthetic construct
  source 1..19: mol_type = other RNA
tggaggtgcccctggtgtg

SEQ ID NO: 30178 - RNA, 19 nt, synthetic construct
  source 1..19: mol_type = other RNA
agccactctgaccaggcac

SEQ ID NO: 30179 - RNA, 19 nt, synthetic construct
  source 1..19: mol_type = other RNA
agccactctgaccaggcac

SEQ ID NO: 30180 - RNA, 19 nt, synthetic construct
  source 1..19: mol_type = other RNA
catggatctctctcatgag

SEQ ID NO: 30181 - RNA, 19 nt, synthetic construct
  source 1..19: mol_type = other RNA
gtacgcagtgctgtccacc

SEQ ID NO: 30182 - RNA, 19 nt, synthetic construct
  source 1..19: mol_type = other RNA
cttcccacccgtacatgaa

SEQ ID NO: 30183 - RNA, 19 nt, synthetic construct
  source 1..19: mol_type = other RNA
gaggggatggctgtaacgc

SEQ ID NO: 30184 - RNA, 19 nt, synthetic construct
  source 1..19: mol_type = other RNA
ccatgtccttgcaactggc

SEQ ID NO: 30185 - RNA, 19 nt, synthetic construct
  source 1..19: mol_type = other RNA
ggtgctgcatgttgagggg

SEQ ID NO: 30186 - RNA, 19 nt, synthetic construct
  source 1..19: mol_type = other RNA
aaagtccaggctgcattcc

SEQ ID NO: 30187 - RNA, 19 nt, synthetic construct
  source 1..19: mol_type = other RNA
aaagtccaggctgcattcc

SEQ ID NO: 30188 - RNA, 19 nt, synthetic construct
  source 1..19: mol_type = other RNA
aaagtccaggctgcattcc

SEQ ID NO: 30189 - RNA, 19 nt, synthetic construct
  source 1..19: mol_type = other RNA
aaagtccaggctgcattcc

SEQ ID NO: 30190 - RNA, 19 nt, synthetic construct
  source 1..19: mol_type = other RNA
ggctttggaactggtggct

SEQ ID NO: 30191 - RNA, 19 nt, synthetic construct
  source 1..19: mol_type = other RNA
ggctttggaactggtggct

SEQ ID NO: 30192 - RNA, 19 nt, synthetic construct
  source 1..19: mol_type = other RNA
ccagttccgcggctggccc

SEQ ID NO: 30193 - RNA, 19 nt, synthetic construct
  source 1..19: mol_type = other RNA
ctccgctgtggggaccctt

SEQ ID NO: 30194 - RNA, 19 nt, synthetic construct
  source 1..19: mol_type = other RNA
tttgggagggggagctgtt

SEQ ID NO: 30195 - RNA, 19 nt, synthetic construct
  source 1..19: mol_type = other RNA
tgaacttccccacctgctc

SEQ ID NO: 30196 - RNA, 19 nt, synthetic construct
  source 1..19: mol_type = other RNA
tgaacttccccacctgctc

SEQ ID NO: 30197 - RNA, 19 nt, synthetic construct
  source 1..19: mol_type = other RNA
tttgggagggggagctgtt

SEQ ID NO: 30198 - RNA, 19 nt, synthetic construct
  source 1..19: mol_type = other RNA
tggagtagaggagggtgtg

SEQ ID NO: 30199 - RNA, 19 nt, synthetic construct
  source 1..19: mol_type = other RNA
tgaacttccccacctgctc

SEQ ID NO: 30200 - RNA, 19 nt, synthetic construct
  source 1..19: mol_type = other RNA
gtggtcagctttgtgagga

SEQ ID NO: 30201 - RNA, 19 nt, synthetic construct
  source 1..19: mol_type = other RNA
tgaacttccccacctgctc

SEQ ID NO: 30202 - RNA, 19 nt, synthetic construct
  source 1..19: mol_type = other RNA
tttgggagggggagctgtt

SEQ ID NO: 30203 - RNA, 19 nt, synthetic construct
  source 1..19: mol_type = other RNA
catgtccttgcaactggcg

SEQ ID NO: 30204 - RNA, 19 nt, synthetic construct
  source 1..19: mol_type = other RNA
gaaccagtggccacagttg

SEQ ID NO: 30205 - RNA, 19 nt, synthetic construct
  source 1..19: mol_type = other RNA
gaaccagtggccacagttg

SEQ ID NO: 30206 - RNA, 19 nt, synthetic construct
  source 1..19: mol_type = other RNA
gaaccagtggccacagttg

SEQ ID NO: 30207 - RNA, 19 nt, synthetic construct
  source 1..19: mol_type = other RNA
gaaccagtggccacagttg

SEQ ID NO: 30208 - RNA, 19 nt, synthetic construct
  source 1..19: mol_type = other RNA
gaaccagtggccacagttg

SEQ ID NO: 30209 - RNA, 19 nt, synthetic construct
  source 1..19: mol_type = other RNA
gtgttgtccctggagttga

SEQ ID NO: 30210 - RNA, 19 nt, synthetic construct
  source 1..19: mol_type = other RNA
gtgttgtccctggagttga

SEQ ID NO: 30211 - RNA, 19 nt, synthetic construct
  source 1..19: mol_type = other RNA
gtgttgtccctggagttga

SEQ ID NO: 30212 - RNA, 19 nt, synthetic construct
  source 1..19: mol_type = other RNA
gccatgtccttgcaactgg

SEQ ID NO: 30213 - RNA, 19 nt, synthetic construct
  source 1..19: mol_type = other RNA
ctagggtgtgggaagtcac

SEQ ID NO: 30214 - RNA, 19 nt, synthetic construct
  source 1..19: mol_type = other RNA
ggaggagggcgtggccgta

SEQ ID NO: 30215 - RNA, 19 nt, synthetic construct
  source 1..19: mol_type = other RNA
tgaggagggcgtggccgta

SEQ ID NO: 30216 - RNA, 19 nt, synthetic construct
  source 1..19: mol_type = other RNA
tcccacctccggttcctgc

SEQ ID NO: 30217 - RNA, 19 nt, synthetic construct
  source 1..19: mol_type = other RNA
cagggtgcggtggcagatg

SEQ ID NO: 30218 - RNA, 19 nt, synthetic construct
  source 1..19: mol_type = other RNA
cagctggacacatctgggc

SEQ ID NO: 30219 - RNA, 19 nt, synthetic construct
  source 1..19: mol_type = other RNA
tccgctgtggggacccttg

SEQ ID NO: 30220 - RNA, 19 nt, synthetic construct
  source 1..19: mol_type = other RNA
ggtgtgggtggtctccgga

SEQ ID NO: 30221 - RNA, 19 nt, synthetic construct
  source 1..19: mol_type = other RNA
ggtgtgggtggtctccgga

SEQ ID NO: 30222 - RNA, 19 nt, synthetic construct
  source 1..19: mol_type = other RNA
gacatggtggccacgggtg

SEQ ID NO: 30223 - RNA, 19 nt, synthetic construct
  source 1..19: mol_type = other RNA
ttctgagagggtggggact

SEQ ID NO: 30224 - RNA, 19 nt, synthetic construct
  source 1..19: mol_type = other RNA
cacagagccggtggccctg

SEQ ID NO: 30225 - RNA, 19 nt, synthetic construct
  source 1..19: mol_type = other RNA
cacagagccggtggccctg

SEQ ID NO: 30226 - RNA, 19 nt, synthetic construct
  source 1..19: mol_type = other RNA
ggtctcagggtggtgagga

SEQ ID NO: 30227 - RNA, 19 nt, synthetic construct
  source 1..19: mol_type = other RNA
agagggatggcattgtcac

SEQ ID NO: 30228 - RNA, 19 nt, synthetic construct
  source 1..19: mol_type = other RNA
gggaagggcgcctgggaag

SEQ ID NO: 30229 - RNA, 19 nt, synthetic construct
  source 1..19: mol_type = other RNA
tgcaccacctctccaggag

SEQ ID NO: 30230 - RNA, 19 nt, synthetic construct
  source 1..19: mol_type = other RNA
ctcggcctgagaggtggac

SEQ ID NO: 30231 - RNA, 19 nt, synthetic construct
  source 1..19: mol_type = other RNA
cacagagccggtggccccg

SEQ ID NO: 30232 - RNA, 19 nt, synthetic construct
  source 1..19: mol_type = other RNA
ggaggacgggatggccgtg

SEQ ID NO: 30233 - RNA, 19 nt, synthetic construct
  source 1..19: mol_type = other RNA
tgccagcagttgcccgggt

SEQ ID NO: 30234 - RNA, 19 nt, synthetic construct
  source 1..19: mol_type = other RNA
gtccaggcggtgcccaggg

SEQ ID NO: 30235 - RNA, 19 nt, synthetic construct
  source 1..19: mol_type = other RNA
cacagagccggtggccccg

SEQ ID NO: 30236 - RNA, 19 nt, synthetic construct
  source 1..19: mol_type = other RNA
gccgtggaattggtggccc

SEQ ID NO: 30237 - RNA, 19 nt, synthetic construct
  source 1..19: mol_type = other RNA
ccgggggcacaaggttgtg

SEQ ID NO: 30238 - RNA, 19 nt, synthetic construct
  source 1..19: mol_type = other RNA
gaaggttgcaccaaccccg

SEQ ID NO: 30239 - RNA, 19 nt, synthetic construct
  source 1..19: mol_type = other RNA
cacatgtggcagggaaggg

SEQ ID NO: 30240 - RNA, 19 nt, synthetic construct
  source 1..19: mol_type = other RNA
ggacaggcggccgccttgc

SEQ ID NO: 30241 - RNA, 19 nt, synthetic construct
  source 1..19: mol_type = other RNA
tgcgacctcagccctgagt

SEQ ID NO: 30242 - RNA, 19 nt, synthetic construct
  source 1..19: mol_type = other RNA
tacgcagtgctgtccacca

SEQ ID NO: 30243 - RNA, 19 nt, synthetic construct
  source 1..19: mol_type = other RNA
tggtgttgaaggaggtgcc

SEQ ID NO: 30244 - RNA, 19 nt, synthetic construct
  source 1..19: mol_type = other RNA
tgcaggtgtggtggcggtg

SEQ ID NO: 30245 - RNA, 19 nt, synthetic construct
  source 1..19: mol_type = other RNA
tgcaggtgtggtggcggtg

SEQ ID NO: 30246 - RNA, 19 nt, synthetic construct
  source 1..19: mol_type = other RNA
tgcaggtgtggtggcggtg

SEQ ID NO: 30247 - RNA, 19 nt, synthetic construct
  source 1..19: mol_type = other RNA
tgcaggtgtggtggcggtg

SEQ ID NO: 30248 - RNA, 19 nt, synthetic construct
  source 1..19: mol_type = other RNA
aggcatcctcctgacattg

SEQ ID NO: 30249 - RNA, 19 nt, synthetic construct
  source 1..19: mol_type = other RNA
cgccgggttcagggggctc

SEQ ID NO: 30250 - RNA, 19 nt, synthetic construct
  source 1..19: mol_type = other RNA
caccatgcaggtcgtagag

SEQ ID NO: 30251 - RNA, 19 nt, synthetic construct
  source 1..19: mol_type = other RNA
gtacctggggccgaggggg

SEQ ID NO: 30252 - RNA, 19 nt, synthetic construct
  source 1..19: mol_type = other RNA
acgacctggcccaactccc

SEQ ID NO: 30253 - RNA, 19 nt, synthetic construct
  source 1..19: mol_type = other RNA
ggcctctgctgagtacttg

SEQ ID NO: 30254 - RNA, 19 nt, synthetic construct
  source 1..19: mol_type = other RNA
tccctccagtcgctgagct

SEQ ID NO: 30255 - RNA, 19 nt, synthetic construct
  source 1..19: mol_type = other RNA
gtgggggacccaggcggtg

SEQ ID NO: 30256 - RNA, 19 nt, synthetic construct
  source 1..19: mol_type = other RNA
ggaggacggggtggccgtg

SEQ ID NO: 30257 - RNA, 19 nt, synthetic construct
  source 1..19: mol_type = other RNA
ggaggacggggtggccgtg

SEQ ID NO: 30258 - RNA, 19 nt, synthetic construct
  source 1..19: mol_type = other RNA
ggaggacggggtggccgtg

SEQ ID NO: 30259 - RNA, 19 nt, synthetic construct
  source 1..19: mol_type = other RNA
ggaggacggggtggccgtg

SEQ ID NO: 30260 - RNA, 19 nt, synthetic construct
  source 1..19: mol_type = other RNA
ggaggacggggtggccgtg

SEQ ID NO: 30261 - RNA, 19 nt, synthetic construct
  source 1..19: mol_type = other RNA
ggaggacggggtggccgtg

SEQ ID NO: 30262 - RNA, 19 nt, synthetic construct
  source 1..19: mol_type = other RNA
gccgggcctggaagacttg

SEQ ID NO: 30263 - RNA, 19 nt, synthetic construct
  source 1..19: mol_type = other RNA
tggtgtgccctgcattctc

SEQ ID NO: 30264 - RNA, 19 nt, synthetic construct
  source 1..19: mol_type = other RNA
ccatccatggtgtgccctg

SEQ ID NO: 30265 - RNA, 19 nt, synthetic construct
  source 1..19: mol_type = other RNA
ccgtgcagggtgagccaca

SEQ ID NO: 30266 - RNA, 19 nt, synthetic construct
  source 1..19: mol_type = other RNA
cctcgcagagctgcgcgcg

SEQ ID NO: 30267 - RNA, 19 nt, synthetic construct
  source 1..19: mol_type = other RNA
tgttgaaggaggtgcccgg

SEQ ID NO: 30268 - RNA, 19 nt, synthetic construct
  source 1..19: mol_type = other RNA
tggagatgtgggccccgcc

SEQ ID NO: 30269 - RNA, 19 nt, synthetic construct
  source 1..19: mol_type = other RNA
gttgatgatggagtggcag

SEQ ID NO: 30270 - RNA, 19 nt, synthetic construct
  source 1..19: mol_type = other RNA
ggccctctcgccaccgcct

SEQ ID NO: 30271 - RNA, 19 nt, synthetic construct
  source 1..19: mol_type = other RNA
ggtgggtccccacccggcc

SEQ ID NO: 30272 - RNA, 19 nt, synthetic construct
  source 1..19: mol_type = other RNA
acggggcctgagctggacc

SEQ ID NO: 30273 - RNA, 19 nt, synthetic construct
  source 1..19: mol_type = other RNA
ggttctgtggagcctgcag

SEQ ID NO: 30274 - RNA, 19 nt, synthetic construct
  source 1..19: mol_type = other RNA
ctctgtcctgggcgtgctg

SEQ ID NO: 30275 - RNA, 19 nt, synthetic construct
  source 1..19: mol_type = other RNA
ggggagctgttctcagggt

SEQ ID NO: 30276 - RNA, 19 nt, synthetic construct
  source 1..19: mol_type = other RNA
cacagagccggtggcccca

SEQ ID NO: 30277 - RNA, 19 nt, synthetic construct
  source 1..19: mol_type = other RNA
gggggtcaccgtggagcct

SEQ ID NO: 30278 - RNA, 19 nt, synthetic construct
  source 1..19: mol_type = other RNA
atcgtagtggccgtggtgg

SEQ ID NO: 30279 - RNA, 19 nt, synthetic construct
  source 1..19: mol_type = other RNA
actggggggatgggagttg

SEQ ID NO: 30280 - RNA, 19 nt, synthetic construct
  source 1..19: mol_type = other RNA
gccgaagtccaggctgtgc

SEQ ID NO: 30281 - RNA, 19 nt, synthetic construct
  source 1..19: mol_type = other RNA
gctgctagggtgagggctg

SEQ ID NO: 30282 - RNA, 19 nt, synthetic construct
  source 1..19: mol_type = other RNA
cacatgtggggtgccagca

SEQ ID NO: 30283 - RNA, 19 nt, synthetic construct
  source 1..19: mol_type = other RNA
atcgtagtggccgtggtgg

SEQ ID NO: 30284 - RNA, 19 nt, synthetic construct
  source 1..19: mol_type = other RNA
ggagtcactgtgctgctgg

SEQ ID NO: 30285 - RNA, 19 nt, synthetic construct
  source 1..19: mol_type = other RNA
gccgaagtccaggctgtgc

SEQ ID NO: 30286 - RNA, 19 nt, synthetic construct
  source 1..19: mol_type = other RNA
ccaaggtgcctgaggtggc

SEQ ID NO: 30287 - RNA, 19 nt, synthetic construct
  source 1..19: mol_type = other RNA
gctgctagggtgagggctg

SEQ ID NO: 30288 - RNA, 19 nt, synthetic construct
  source 1..19: mol_type = other RNA
gcgtggccgtagagctggt

SEQ ID NO: 30289 - RNA, 19 nt, synthetic construct
  source 1..19: mol_type = other RNA
tcgtagtggctgctgtggt

SEQ ID NO: 30290 - RNA, 19 nt, synthetic construct
  source 1..19: mol_type = other RNA
gctggtagctgtggatttg

SEQ ID NO: 30291 - RNA, 19 nt, synthetic construct
  source 1..19: mol_type = other RNA
gttgcccgggtggaggagg

SEQ ID NO: 30292 - RNA, 19 nt, synthetic construct
  source 1..19: mol_type = other RNA
agagccggtggccctggtt

SEQ ID NO: 30293 - RNA, 19 nt, synthetic construct
  source 1..19: mol_type = other RNA
gggggtcaccgtggagcct

SEQ ID NO: 30294 - RNA, 19 nt, synthetic construct
  source 1..19: mol_type = other RNA
atcgtagtggccgtggtgg

SEQ ID NO: 30295 - RNA, 19 nt, synthetic construct
  source 1..19: mol_type = other RNA
actggggggatgggagttg

SEQ ID NO: 30296 - RNA, 19 nt, synthetic construct
  source 1..19: mol_type = other RNA
ggagtcactgtgctgctgg

SEQ ID NO: 30297 - RNA, 19 nt, synthetic construct
  source 1..19: mol_type = other RNA
gccgaagtccaggctgtgc

SEQ ID NO: 30298 - RNA, 19 nt, synthetic construct
  source 1..19: mol_type = other RNA
gctgctagggtgagggctg

SEQ ID NO: 30299 - RNA, 19 nt, synthetic construct
  source 1..19: mol_type = other RNA
gcgtggccgtagagctggt

SEQ ID NO: 30300 - RNA, 19 nt, synthetic construct
  source 1..19: mol_type = other RNA
cacatgtggggtgccagca

SEQ ID NO: 30301 - RNA, 19 nt, synthetic construct
  source 1..19: mol_type = other RNA
agagccggtggccctggtt

SEQ ID NO: 30302 - RNA, 19 nt, synthetic construct
  source 1..19: mol_type = other RNA
atcgtagtggccgtggtga

SEQ ID NO: 30303 - RNA, 19 nt, synthetic construct
  source 1..19: mol_type = other RNA
ggagtcactgtgctgctgg

SEQ ID NO: 30304 - RNA, 19 nt, synthetic construct
  source 1..19: mol_type = other RNA
gccgaagtccaggctgtgc

SEQ ID NO: 30305 - RNA, 19 nt, synthetic construct
  source 1..19: mol_type = other RNA
ccaaggtgcctgaggtggc

SEQ ID NO: 30306 - RNA, 19 nt, synthetic construct
  source 1..19: mol_type = other RNA
gctgctagggtgagggctg

SEQ ID NO: 30307 - RNA, 19 nt, synthetic construct
  source 1..19: mol_type = other RNA
gtcgtccctggggaagggg

SEQ ID NO: 30308 - RNA, 19 nt, synthetic construct
  source 1..19: mol_type = other RNA
ggtcgtccctggggaaggg

SEQ ID NO: 30309 - RNA, 19 nt, synthetic construct
  source 1..19: mol_type = other RNA
gctggtagctgtggatttg

SEQ ID NO: 30310 - RNA, 19 nt, synthetic construct
  source 1..19: mol_type = other RNA
cacatgtggggtgccagca

SEQ ID NO: 30311 - RNA, 19 nt, synthetic construct
  source 1..19: mol_type = other RNA
agtgctggaagggcagttg

SEQ ID NO: 30312 - RNA, 19 nt, synthetic construct
  source 1..19: mol_type = other RNA
atcgtagtggccgtggtgg

SEQ ID NO: 30313 - RNA, 19 nt, synthetic construct
  source 1..19: mol_type = other RNA
ggtccacagggtggaggag

SEQ ID NO: 30314 - RNA, 19 nt, synthetic construct
  source 1..19: mol_type = other RNA
ggacatgggtgtggtggtc

SEQ ID NO: 30315 - RNA, 19 nt, synthetic construct
  source 1..19: mol_type = other RNA
ggaggacactggcggtggg

SEQ ID NO: 30316 - RNA, 19 nt, synthetic construct
  source 1..19: mol_type = other RNA
gccgccccacatgctgcag

SEQ ID NO: 30317 - RNA, 19 nt, synthetic construct
  source 1..19: mol_type = other RNA
gtagaggctgagattccca

SEQ ID NO: 30318 - RNA, 19 nt, synthetic construct
  source 1..19: mol_type = other RNA
cagtagtggttgtccaggt

SEQ ID NO: 30319 - RNA, 19 nt, synthetic construct
  source 1..19: mol_type = other RNA
agccgggcctggaagactt

SEQ ID NO: 30320 - RNA, 19 nt, synthetic construct
  source 1..19: mol_type = other RNA
ggccatgtccttgcaactg

SEQ ID NO: 30321 - RNA, 19 nt, synthetic construct
  source 1..19: mol_type = other RNA
gtgtgccagtcggggccca

SEQ ID NO: 30322 - RNA, 19 nt, synthetic construct
  source 1..19: mol_type = other RNA
tcacagagcggctgtggtg

SEQ ID NO: 30323 - RNA, 19 nt, synthetic construct
  source 1..19: mol_type = other RNA
agatcacagagcggctgtg

SEQ ID NO: 30324 - RNA, 19 nt, synthetic construct
  source 1..19: mol_type = other RNA
tctggcagggcacctcaag

SEQ ID NO: 30325 - RNA, 19 nt, synthetic construct
  source 1..19: mol_type = other RNA
gcagatggactcctgccct

SEQ ID NO: 30326 - RNA, 19 nt, synthetic construct
  source 1..19: mol_type = other RNA
ctcaaagccctggggacag

SEQ ID NO: 30327 - RNA, 19 nt, synthetic construct
  source 1..19: mol_type = other RNA
atcgggcgtgaggcaggcg

SEQ ID NO: 30328 - RNA, 19 nt, synthetic construct
  source 1..19: mol_type = other RNA
ggcccaaggttttcatgat

SEQ ID NO: 30329 - RNA, 19 nt, synthetic construct
  source 1..19: mol_type = other RNA
cccagggtaggactcctga

SEQ ID NO: 30330 - RNA, 19 nt, synthetic construct
  source 1..19: mol_type = other RNA
cgttgcgacctcagccctg

SEQ ID NO: 30331 - RNA, 19 nt, synthetic construct
  source 1..19: mol_type = other RNA
ctgcgcgcgctgggggttg

SEQ ID NO: 30332 - RNA, 19 nt, synthetic construct
  source 1..19: mol_type = other RNA
gtggtggccttcgtggtca

SEQ ID NO: 30333 - RNA, 19 nt, synthetic construct
  source 1..19: mol_type = other RNA
gtggtggccttcgtggtca

SEQ ID NO: 30334 - RNA, 19 nt, synthetic construct
  source 1..19: mol_type = other RNA
gtggtggtcagcactctgg

SEQ ID NO: 30335 - RNA, 19 nt, synthetic construct
  source 1..19: mol_type = other RNA
gaagggagtggctttggag

SEQ ID NO: 30336 - RNA, 19 nt, synthetic construct
  source 1..19: mol_type = other RNA
gaagggagtggctttggag

SEQ ID NO: 30337 - RNA, 19 nt, synthetic construct
  source 1..19: mol_type = other RNA
gggtggtgttgtccccaca

SEQ ID NO: 30338 - RNA, 19 nt, synthetic construct
  source 1..19: mol_type = other RNA
gtagagctggtggccgggg

SEQ ID NO: 30339 - RNA, 19 nt, synthetic construct
  source 1..19: mol_type = other RNA
gtagagctggtggccgggg

SEQ ID NO: 30340 - RNA, 19 nt, synthetic construct
  source 1..19: mol_type = other RNA
gtagagctggtggccgggg

SEQ ID NO: 30341 - RNA, 19 nt, synthetic construct
  source 1..19: mol_type = other RNA
acggaggagggggtcaccg

SEQ ID NO: 30342 - RNA, 19 nt, synthetic construct
  source 1..19: mol_type = other RNA
gtagagctggtggccgggg

SEQ ID NO: 30343 - RNA, 19 nt, synthetic construct
  source 1..19: mol_type = other RNA
ggtggtggtcagcactctg

SEQ ID NO: 30344 - RNA, 19 nt, synthetic construct
  source 1..19: mol_type = other RNA
gccgtgggtgtggtggtct

SEQ ID NO: 30345 - RNA, 19 nt, synthetic construct
  source 1..19: mol_type = other RNA
tgctgctagggtgagggct

SEQ ID NO: 30346 - RNA, 19 nt, synthetic construct
  source 1..19: mol_type = other RNA
gccgtgggtgtggtggtct

SEQ ID NO: 30347 - RNA, 19 nt, synthetic construct
  source 1..19: mol_type = other RNA
tgctgctagggtgagggct

SEQ ID NO: 30348 - RNA, 19 nt, synthetic construct
  source 1..19: mol_type = other RNA
cggtcgtagtggctgctgt

SEQ ID NO: 30349 - RNA, 19 nt, synthetic construct
  source 1..19: mol_type = other RNA
tggctttggaactggtggc

SEQ ID NO: 30350 - RNA, 19 nt, synthetic construct
  source 1..19: mol_type = other RNA
gccgtgggtgtggtggtct

SEQ ID NO: 30351 - RNA, 19 nt, synthetic construct
  source 1..19: mol_type = other RNA
ggacagtctctggagtaga

SEQ ID NO: 30352 - RNA, 19 nt, synthetic construct
  source 1..19: mol_type = other RNA
tgctgctagggtgagggct

SEQ ID NO: 30353 - RNA, 19 nt, synthetic construct
  source 1..19: mol_type = other RNA
gccgtgggtgtggtggtct

SEQ ID NO: 30354 - RNA, 19 nt, synthetic construct
  source 1..19: mol_type = other RNA
tgctgctagggtgagggct

SEQ ID NO: 30355 - RNA, 19 nt, synthetic construct
  source 1..19: mol_type = other RNA
tggctttggaactggtggc

SEQ ID NO: 30356 - RNA, 19 nt, synthetic construct
  source 1..19: mol_type = other RNA
gccgtgggtgtggtggtct

SEQ ID NO: 30357 - RNA, 19 nt, synthetic construct
  source 1..19: mol_type = other RNA
cccagcagccatcctttct

SEQ ID NO: 30358 - RNA, 19 nt, synthetic construct
  source 1..19: mol_type = other RNA
tgcagatggactcctgccc

SEQ ID NO: 30359 - RNA, 19 nt, synthetic construct
  source 1..19: mol_type = other RNA
acccaggtttcattcagct

SEQ ID NO: 30360 - RNA, 19 nt, synthetic construct
  source 1..19: mol_type = other RNA
gagcggggtcagcctggcg

SEQ ID NO: 30361 - RNA, 19 nt, synthetic construct
  source 1..19: mol_type = other RNA
gtccagccactctgaccag

SEQ ID NO: 30362 - RNA, 19 nt, synthetic construct
  source 1..19: mol_type = other RNA
gtccagccactctgaccag

SEQ ID NO: 30363 - RNA, 19 nt, synthetic construct
  source 1..19: mol_type = other RNA
gtccagccactctgaccag

SEQ ID NO: 30364 - RNA, 19 nt, synthetic construct
  source 1..19: mol_type = other RNA
gtccagccactctgaccag

SEQ ID NO: 30365 - RNA, 19 nt, synthetic construct
  source 1..19: mol_type = other RNA
agccctccgccatcccctc

SEQ ID NO: 30366 - RNA, 19 nt, synthetic construct
  source 1..19: mol_type = other RNA
ccacctccggttcctgcag

SEQ ID NO: 30367 - RNA, 19 nt, synthetic construct
  source 1..19: mol_type = other RNA
acagaacaaggggcaggtg

SEQ ID NO: 30368 - RNA, 19 nt, synthetic construct
  source 1..19: mol_type = other RNA
aaagtctccgcctcccagg

SEQ ID NO: 30369 - RNA, 19 nt, synthetic construct
  source 1..19: mol_type = other RNA
gagaagggagtggctttgg

SEQ ID NO: 30370 - RNA, 19 nt, synthetic construct
  source 1..19: mol_type = other RNA
tgtggacatggtggccatg

SEQ ID NO: 30371 - RNA, 19 nt, synthetic construct
  source 1..19: mol_type = other RNA
gagaagggagtggctttgg

SEQ ID NO: 30372 - RNA, 19 nt, synthetic construct
  source 1..19: mol_type = other RNA
gcaccatggtgacagtgag

SEQ ID NO: 30373 - RNA, 19 nt, synthetic construct
  source 1..19: mol_type = other RNA
cttgacaggagtcctcctc

SEQ ID NO: 30374 - RNA, 19 nt, synthetic construct
  source 1..19: mol_type = other RNA
agctggccttgcctggacc

SEQ ID NO: 30375 - RNA, 19 nt, synthetic construct
  source 1..19: mol_type = other RNA
caaaggccagggaagcgga

SEQ ID NO: 30376 - RNA, 19 nt, synthetic construct
  source 1..19: mol_type = other RNA
tgactgtgggtgtggtggc

SEQ ID NO: 30377 - RNA, 19 nt, synthetic construct
  source 1..19: mol_type = other RNA
cgtggagcctctggttgtg

SEQ ID NO: 30378 - RNA, 19 nt, synthetic construct
  source 1..19: mol_type = other RNA
ccactctgaccaggcacac

SEQ ID NO: 30379 - RNA, 19 nt, synthetic construct
  source 1..19: mol_type = other RNA
gtgcgtgccgtccctgggc

SEQ ID NO: 30380 - RNA, 19 nt, synthetic construct
  source 1..19: mol_type = other RNA
ccactctgaccaggcacac

SEQ ID NO: 30381 - RNA, 19 nt, synthetic construct
  source 1..19: mol_type = other RNA
cgtgctggtcagcactttg

SEQ ID NO: 30382 - RNA, 19 nt, synthetic construct
  source 1..19: mol_type = other RNA
ccgtgctggtcagcacttt

SEQ ID NO: 30383 - RNA, 19 nt, synthetic construct
  source 1..19: mol_type = other RNA
ccgtgctggtcagcacttt

SEQ ID NO: 30384 - RNA, 19 nt, synthetic construct
  source 1..19: mol_type = other RNA
tgactgtgggtgtggtggc

SEQ ID NO: 30385 - RNA, 19 nt, synthetic construct
  source 1..19: mol_type = other RNA
cgtggagcctctggttgtg

SEQ ID NO: 30386 - RNA, 19 nt, synthetic construct
  source 1..19: mol_type = other RNA
ccactctgaccaggcacac

SEQ ID NO: 30387 - RNA, 19 nt, synthetic construct
  source 1..19: mol_type = other RNA
gtgcgtgccgtccctgggc

SEQ ID NO: 30388 - RNA, 19 nt, synthetic construct
  source 1..19: mol_type = other RNA
ccactctgaccaggcacac

SEQ ID NO: 30389 - RNA, 19 nt, synthetic construct
  source 1..19: mol_type = other RNA
gggaggtgggacaggcgcc

SEQ ID NO: 30390 - RNA, 19 nt, synthetic construct
  source 1..19: mol_type = other RNA
gcaggcatcctcctgacat

SEQ ID NO: 30391 - RNA, 19 nt, synthetic construct
  source 1..19: mol_type = other RNA
gagttaccctgcagcaggc

SEQ ID NO: 30392 - RNA, 19 nt, synthetic construct
  source 1..19: mol_type = other RNA
cgtggtggctgtaccaagg

SEQ ID NO: 30393 - RNA, 19 nt, synthetic construct
  source 1..19: mol_type = other RNA
ccgtgtgtggtggccatgg

SEQ ID NO: 30394 - RNA, 19 nt, synthetic construct
  source 1..19: mol_type = other RNA
gtggatccagtggactcag

SEQ ID NO: 30395 - RNA, 19 nt, synthetic construct
  source 1..19: mol_type = other RNA
gtggatccagtggactcag

SEQ ID NO: 30396 - RNA, 19 nt, synthetic construct
  source 1..19: mol_type = other RNA
ccccagcggccggacgtgg

SEQ ID NO: 30397 - RNA, 19 nt, synthetic construct
  source 1..19: mol_type = other RNA
tcccagctcggctccacag

SEQ ID NO: 30398 - RNA, 19 nt, synthetic construct
  source 1..19: mol_type = other RNA
tgccctgcattctcccagc

SEQ ID NO: 30399 - RNA, 19 nt, synthetic construct
  source 1..19: mol_type = other RNA
cagagctgcgcgcgctggg

SEQ ID NO: 30400 - RNA, 19 nt, synthetic construct
  source 1..19: mol_type = other RNA
cgccgagctgttgctgcag

SEQ ID NO: 30401 - RNA, 19 nt, synthetic construct
  source 1..19: mol_type = other RNA
gaaggtcccgtgggtggtg

SEQ ID NO: 30402 - RNA, 19 nt, synthetic construct
  source 1..19: mol_type = other RNA
caaagtctccgcctcccag

SEQ ID NO: 30403 - RNA, 19 nt, synthetic construct
  source 1..19: mol_type = other RNA
agaggacccggatcctgta

SEQ ID NO: 30404 - RNA, 19 nt, synthetic construct
  source 1..19: mol_type = other RNA
aacgctggtagctgtgggt

SEQ ID NO: 30405 - RNA, 19 nt, synthetic construct
  source 1..19: mol_type = other RNA
catggtggccgtgggtgtg

SEQ ID NO: 30406 - RNA, 19 nt, synthetic construct
  source 1..19: mol_type = other RNA
cgtggcggtaagcactgtg

SEQ ID NO: 30407 - RNA, 19 nt, synthetic construct
  source 1..19: mol_type = other RNA
ggagtcactgtgttgctgg

SEQ ID NO: 30408 - RNA, 19 nt, synthetic construct
  source 1..19: mol_type = other RNA
aggctctgtgatgtgggtg

SEQ ID NO: 30409 - RNA, 19 nt, synthetic construct
  source 1..19: mol_type = other RNA
gccagagggccccggcatg

SEQ ID NO: 30410 - RNA, 19 nt, synthetic construct
  source 1..19: mol_type = other RNA
catggtggccgtgggtgtg

SEQ ID NO: 30411 - RNA, 19 nt, synthetic construct
  source 1..19: mol_type = other RNA
tgcgtgccgtccctgggct

SEQ ID NO: 30412 - RNA, 19 nt, synthetic construct
  source 1..19: mol_type = other RNA
aacctctggttgtgggtgt

SEQ ID NO: 30413 - RNA, 19 nt, synthetic construct
  source 1..19: mol_type = other RNA
gtgcccaaggtgcctgagg

SEQ ID NO: 30414 - RNA, 19 nt, synthetic construct
  source 1..19: mol_type = other RNA
aggctctgtgatgtgggtg

SEQ ID NO: 30415 - RNA, 19 nt, synthetic construct
  source 1..19: mol_type = other RNA
gccagagggccccggcatg

SEQ ID NO: 30416 - RNA, 19 nt, synthetic construct
  source 1..19: mol_type = other RNA
gagggggagctgttcccgg

SEQ ID NO: 30417 - RNA, 19 nt, synthetic construct
  source 1..19: mol_type = other RNA
gacatggtggccatgggtg

SEQ ID NO: 30418 - RNA, 19 nt, synthetic construct
  source 1..19: mol_type = other RNA
catggaactggtggccctt

SEQ ID NO: 30419 - RNA, 19 nt, synthetic construct
  source 1..19: mol_type = other RNA
aacgctggtagctgtgggt

SEQ ID NO: 30420 - RNA, 19 nt, synthetic construct
  source 1..19: mol_type = other RNA
catggtggccgtgggtgtg

SEQ ID NO: 30421 - RNA, 19 nt, synthetic construct
  source 1..19: mol_type = other RNA
gtctctggagtagaggagg

SEQ ID NO: 30422 - RNA, 19 nt, synthetic construct
  source 1..19: mol_type = other RNA
aggctctgtgatgtgggtg

SEQ ID NO: 30423 - RNA, 19 nt, synthetic construct
  source 1..19: mol_type = other RNA
gccagagggccccggcatg

SEQ ID NO: 30424 - RNA, 19 nt, synthetic construct
  source 1..19: mol_type = other RNA
catggtggccgtgggtgtg

SEQ ID NO: 30425 - RNA, 19 nt, synthetic construct
  source 1..19: mol_type = other RNA
tgcgtgccgtccctgggct

SEQ ID NO: 30426 - RNA, 19 nt, synthetic construct
  source 1..19: mol_type = other RNA
gtgcccaaggtgcctgagg

SEQ ID NO: 30427 - RNA, 19 nt, synthetic construct
  source 1..19: mol_type = other RNA
aggctctgtgatgtgggtg

SEQ ID NO: 30428 - RNA, 19 nt, synthetic construct
  source 1..19: mol_type = other RNA
gccagagggccccggcatg

SEQ ID NO: 30429 - RNA, 19 nt, synthetic construct
  source 1..19: mol_type = other RNA
gagggggagctgttcccgg

SEQ ID NO: 30430 - RNA, 19 nt, synthetic construct
  source 1..19: mol_type = other RNA
catggtggccgtgggtgtg

SEQ ID NO: 30431 - RNA, 19 nt, synthetic construct
  source 1..19: mol_type = other RNA
cgtggcggtaagcactgtg

SEQ ID NO: 30432 - RNA, 19 nt, synthetic construct
  source 1..19: mol_type = other RNA
agttgtagtggctgttgtg

SEQ ID NO: 30433 - RNA, 19 nt, synthetic construct
  source 1..19: mol_type = other RNA
ccagtgggtctcagggtgg

SEQ ID NO: 30434 - RNA, 19 nt, synthetic construct
  source 1..19: mol_type = other RNA
agcggggcggaggacactg

SEQ ID NO: 30435 - RNA, 19 nt, synthetic construct
  source 1..19: mol_type = other RNA
ctgtcggggaccagccacg

SEQ ID NO: 30436 - RNA, 19 nt, synthetic construct
  source 1..19: mol_type = other RNA
ggaagggcgcctgggaagg

SEQ ID NO: 30437 - RNA, 19 nt, synthetic construct
  source 1..19: mol_type = other RNA
gcagctggacacatctggg

SEQ ID NO: 30438 - RNA, 19 nt, synthetic construct
  source 1..19: mol_type = other RNA
ctgacccctctctgacctg

SEQ ID NO: 30439 - RNA, 19 nt, synthetic construct
  source 1..19: mol_type = other RNA
tactcaatgctcagggttt

SEQ ID NO: 30440 - RNA, 19 nt, synthetic construct
  source 1..19: mol_type = other RNA
aaaggccagggaagcggaa

SEQ ID NO: 30441 - RNA, 19 nt, synthetic construct
  source 1..19: mol_type = other RNA
gccggccccagcagggtgc

SEQ ID NO: 30442 - RNA, 19 nt, synthetic construct
  source 1..19: mol_type = other RNA
caggcagccagagtgcgtg

SEQ ID NO: 30443 - RNA, 19 nt, synthetic construct
  source 1..19: mol_type = other RNA
ggcctcactcaggccgcgg

SEQ ID NO: 30444 - RNA, 19 nt, synthetic construct
  source 1..19: mol_type = other RNA
ccgacaccagccccggggg

SEQ ID NO: 30445 - RNA, 19 nt, synthetic construct
  source 1..19: mol_type = other RNA
tcggcaatgcagcccccac

SEQ ID NO: 30446 - RNA, 19 nt, synthetic construct
  source 1..19: mol_type = other RNA
aagtcattgatggcattgt

SEQ ID NO: 30447 - RNA, 19 nt, synthetic construct
  source 1..19: mol_type = other RNA
gtagaagtcacagaacaag

SEQ ID NO: 30448 - RNA, 19 nt, synthetic construct
  source 1..19: mol_type = other RNA
cggggcctgagctggaccc

SEQ ID NO: 30449 - RNA, 19 nt, synthetic construct
  source 1..19: mol_type = other RNA
ggtacctggggccgagggg

SEQ ID NO: 30450 - RNA, 19 nt, synthetic construct
  source 1..19: mol_type = other RNA
aagtgccctccagcggccc

SEQ ID NO: 30451 - RNA, 19 nt, synthetic construct
  source 1..19: mol_type = other RNA
gtcactgcagcagaggacc

SEQ ID NO: 30452 - RNA, 19 nt, synthetic construct
  source 1..19: mol_type = other RNA
gtcagccccgggctactcg

SEQ ID NO: 30453 - RNA, 19 nt, synthetic construct
  source 1..19: mol_type = other RNA
ccgtcgtccctggaagggc

SEQ ID NO: 30454 - RNA, 19 nt, synthetic construct
  source 1..19: mol_type = other RNA
tgttgttggggccagcgtg

SEQ ID NO: 30455 - RNA, 19 nt, synthetic construct
  source 1..19: mol_type = other RNA
gctggtgactgtgggtgtg

SEQ ID NO: 30456 - RNA, 19 nt, synthetic construct
  source 1..19: mol_type = other RNA
tgctggaagggcggttgca

SEQ ID NO: 30457 - RNA, 19 nt, synthetic construct
  source 1..19: mol_type = other RNA
tctcagtgctggaagggcg

SEQ ID NO: 30458 - RNA, 19 nt, synthetic construct
  source 1..19: mol_type = other RNA
gcctctggttgtgggtgtg

SEQ ID NO: 30459 - RNA, 19 nt, synthetic construct
  source 1..19: mol_type = other RNA
tgctggaagggcggttgca

SEQ ID NO: 30460 - RNA, 19 nt, synthetic construct
  source 1..19: mol_type = other RNA
tctcagtgctggaagggcg

SEQ ID NO: 30461 - RNA, 19 nt, synthetic construct
  source 1..19: mol_type = other RNA
acctctggttgtgggtgtg

SEQ ID NO: 30462 - RNA, 19 nt, synthetic construct
  source 1..19: mol_type = other RNA
gaggacgggatggccgtgg

SEQ ID NO: 30463 - RNA, 19 nt, synthetic construct
  source 1..19: mol_type = other RNA
tggaggacgggatggccgt

SEQ ID NO: 30464 - RNA, 19 nt, synthetic construct
  source 1..19: mol_type = other RNA
atttggtggctgtgcttgt

SEQ ID NO: 30465 - RNA, 19 nt, synthetic construct
  source 1..19: mol_type = other RNA
cccaagggtgaaggagggg

SEQ ID NO: 30466 - RNA, 19 nt, synthetic construct
  source 1..19: mol_type = other RNA
tgctggaagggcggttgca

SEQ ID NO: 30467 - RNA, 19 nt, synthetic construct
  source 1..19: mol_type = other RNA
tctcagtgctggaagggcg

SEQ ID NO: 30468 - RNA, 19 nt, synthetic construct
  source 1..19: mol_type = other RNA
gcctctggttgtgggtgtg

SEQ ID NO: 30469 - RNA, 19 nt, synthetic construct
  source 1..19: mol_type = other RNA
tgctggaagggcggttgca

SEQ ID NO: 30470 - RNA, 19 nt, synthetic construct
  source 1..19: mol_type = other RNA
tctcagtgctggaagggcg

SEQ ID NO: 30471 - RNA, 19 nt, synthetic construct
  source 1..19: mol_type = other RNA
ctgtgggtgtggtggccgg

SEQ ID NO: 30472 - RNA, 19 nt, synthetic construct
  source 1..19: mol_type = other RNA
atttggtggctgtgcttgt

SEQ ID NO: 30473 - RNA, 19 nt, synthetic construct
  source 1..19: mol_type = other RNA
attttgtggctgtgcttgt

SEQ ID NO: 30474 - RNA, 19 nt, synthetic construct
  source 1..19: mol_type = other RNA
ggatccagtggctgcagtt

SEQ ID NO: 30475 - RNA, 19 nt, synthetic construct
  source 1..19: mol_type = other RNA
gtagaaatggcagccggct

SEQ ID NO: 30476 - RNA, 19 nt, synthetic construct
  source 1..19: mol_type = other RNA
gcggtggggaggtgggaca

SEQ ID NO: 30477 - RNA, 19 nt, synthetic construct
  source 1..19: mol_type = other RNA
ggatgctgagggcgcgggg

SEQ ID NO: 30478 - RNA, 19 nt, synthetic construct
  source 1..19: mol_type = other RNA
ttgtagtggatgctgaggg

SEQ ID NO: 30479 - RNA, 19 nt, synthetic construct
  source 1..19: mol_type = other RNA
caccatggtgacagtgagg

SEQ ID NO: 30480 - RNA, 19 nt, synthetic construct
  source 1..19: mol_type = other RNA
tccttcccatgcaccatgg

SEQ ID NO: 30481 - RNA, 19 nt, synthetic construct
  source 1..19: mol_type = other RNA
ggcctggaagacttggcca

SEQ ID NO: 30482 - RNA, 19 nt, synthetic construct
  source 1..19: mol_type = other RNA
ggcggcagtggttccgtcc

SEQ ID NO: 30483 - RNA, 19 nt, synthetic construct
  source 1..19: mol_type = other RNA
tggcactcagcaaagacct

SEQ ID NO: 30484 - RNA, 19 nt, synthetic construct
  source 1..19: mol_type = other RNA
gggctgaccctgggcgtca

SEQ ID NO: 30485 - RNA, 19 nt, synthetic construct
  source 1..19: mol_type = other RNA
gcccggggcctggtcacgg

SEQ ID NO: 30486 - RNA, 19 nt, synthetic construct
  source 1..19: mol_type = other RNA
aaggttgcaccaaccccgt

SEQ ID NO: 30487 - RNA, 19 nt, synthetic construct
  source 1..19: mol_type = other RNA
catgtggcagggaagggcg

SEQ ID NO: 30488 - RNA, 19 nt, synthetic construct
  source 1..19: mol_type = other RNA
ctggccatcgggcgtgagg

SEQ ID NO: 30489 - RNA, 19 nt, synthetic construct
  source 1..19: mol_type = other RNA
ttgacaggagtcctcctca

SEQ ID NO: 30490 - RNA, 19 nt, synthetic construct
  source 1..19: mol_type = other RNA
tcagacaatgcacatcctg

SEQ ID NO: 30491 - RNA, 19 nt, synthetic construct
  source 1..19: mol_type = other RNA
ccaaggttttcatgatcag

SEQ ID NO: 30492 - RNA, 19 nt, synthetic construct
  source 1..19: mol_type = other RNA
cacacacaggccggggggc

SEQ ID NO: 30493 - RNA, 19 nt, synthetic construct
  source 1..19: mol_type = other RNA
gatggagtggcagcgcgag

SEQ ID NO: 30494 - RNA, 19 nt, synthetic construct
  source 1..19: mol_type = other RNA
agcagaggacccggatcct

SEQ ID NO: 30495 - RNA, 19 nt, synthetic construct
  source 1..19: mol_type = other RNA
gttgagaacagggcctggg

SEQ ID NO: 30496 - RNA, 19 nt, synthetic construct
  source 1..19: mol_type = other RNA
ttgctgctagggtgtggga

SEQ ID NO: 30497 - RNA, 19 nt, synthetic construct
  source 1..19: mol_type = other RNA
cagcagggtcgaggtgcgg

SEQ ID NO: 30498 - RNA, 19 nt, synthetic construct
  source 1..19: mol_type = other RNA
cagcagggtcgaggtgcgg

SEQ ID NO: 30499 - RNA, 19 nt, synthetic construct
  source 1..19: mol_type = other RNA
cagcagggtcgaggtgcgg

SEQ ID NO: 30500 - RNA, 19 nt, synthetic construct
  source 1..19: mol_type = other RNA
cagcagggtcgaggtgcgg

SEQ ID NO: 30501 - RNA, 19 nt, synthetic construct
  source 1..19: mol_type = other RNA
ggcgagaaaaactgtccaa

SEQ ID NO: 30502 - RNA, 19 nt, synthetic construct
  source 1..19: mol_type = other RNA
gcaggcctgcacgcagatg

SEQ ID NO: 30503 - RNA, 19 nt, synthetic construct
  source 1..19: mol_type = other RNA
cgtggtgtggcccggggtg

SEQ ID NO: 30504 - RNA, 19 nt, synthetic construct
  source 1..19: mol_type = other RNA
cgtggtgtggcccggggtg

SEQ ID NO: 30505 - RNA, 19 nt, synthetic construct
  source 1..19: mol_type = other RNA
gcgtgaggcaggcggtctg

SEQ ID NO: 30506 - RNA, 19 nt, synthetic construct
  source 1..19: mol_type = other RNA
ccacatggctgttgaccca

SEQ ID NO: 30507 - RNA, 19 nt, synthetic construct
  source 1..19: mol_type = other RNA
cggacttgacaggagtcct

SEQ ID NO: 30508 - RNA, 19 nt, synthetic construct
  source 1..19: mol_type = other RNA
accatgcaggtcgtagagt

SEQ ID NO: 30509 - RNA, 19 nt, synthetic construct
  source 1..19: mol_type = other RNA
gcggcaggcggcgaaggtg

SEQ ID NO: 30510 - RNA, 19 nt, synthetic construct
  source 1..19: mol_type = other RNA
cacggtggagaccgggagg

SEQ ID NO: 30511 - RNA, 19 nt, synthetic construct
  source 1..19: mol_type = other RNA
tcacccatagggtggtctt

SEQ ID NO: 30512 - RNA, 19 nt, synthetic construct
  source 1..19: mol_type = other RNA
ctcgtggtcagcggctctt

SEQ ID NO: 30513 - RNA, 19 nt, synthetic construct
  source 1..19: mol_type = other RNA
ggtcaccgtggagcctctg

SEQ ID NO: 30514 - RNA, 19 nt, synthetic construct
  source 1..19: mol_type = other RNA
cactggtctgtgtgctaga

SEQ ID NO: 30515 - RNA, 19 nt, synthetic construct
  source 1..19: mol_type = other RNA
cacctgctcacggttcctg

SEQ ID NO: 30516 - RNA, 19 nt, synthetic construct
  source 1..19: mol_type = other RNA
cactggtctgtgtgctaga

SEQ ID NO: 30517 - RNA, 19 nt, synthetic construct
  source 1..19: mol_type = other RNA
cacctgctcacggttcctg

SEQ ID NO: 30518 - RNA, 19 nt, synthetic construct
  source 1..19: mol_type = other RNA
ttgtggacatggtggccat

SEQ ID NO: 30519 - RNA, 19 nt, synthetic construct
  source 1..19: mol_type = other RNA
ggtcaccgtggagcctctg

SEQ ID NO: 30520 - RNA, 19 nt, synthetic construct
  source 1..19: mol_type = other RNA
cactggtctgtgtgctaga

SEQ ID NO: 30521 - RNA, 19 nt, synthetic construct
  source 1..19: mol_type = other RNA
cctggaggtgcccctggtg

SEQ ID NO: 30522 - RNA, 19 nt, synthetic construct
  source 1..19: mol_type = other RNA
cacctgctcacggttcctg

SEQ ID NO: 30523 - RNA, 19 nt, synthetic construct
  source 1..19: mol_type = other RNA
cactggtctgtgtgctaga

SEQ ID NO: 30524 - RNA, 19 nt, synthetic construct
  source 1..19: mol_type = other RNA
cacctgctcacggttcctg

SEQ ID NO: 30525 - RNA, 19 nt, synthetic construct
  source 1..19: mol_type = other RNA
cggtggtcccaagggtgga

SEQ ID NO: 30526 - RNA, 19 nt, synthetic construct
  source 1..19: mol_type = other RNA
cactggtctgtgtgctaga

SEQ ID NO: 30527 - RNA, 19 nt, synthetic construct
  source 1..19: mol_type = other RNA
cgccctggaagcggtcaat

SEQ ID NO: 30528 - RNA, 19 nt, synthetic construct
  source 1..19: mol_type = other RNA
ttggccatgtccttgcaac

SEQ ID NO: 30529 - RNA, 19 nt, synthetic construct
  source 1..19: mol_type = other RNA
cacagagcggctgtggtgg

SEQ ID NO: 30530 - RNA, 19 nt, synthetic construct
  source 1..19: mol_type = other RNA
ggcactcagcaaagacctg

SEQ ID NO: 30531 - RNA, 19 nt, synthetic construct
  source 1..19: mol_type = other RNA
gccagctggaatccgtgct

SEQ ID NO: 30532 - RNA, 19 nt, synthetic construct
  source 1..19: mol_type = other RNA
agcggccggacgtggccag

SEQ ID NO: 30533 - RNA, 19 nt, synthetic construct
  source 1..19: mol_type = other RNA
cggctccacagggccctgg

SEQ ID NO: 30534 - RNA, 19 nt, synthetic construct
  source 1..19: mol_type = other RNA
gttgcaaaggccagggaag

SEQ ID NO: 30535 - RNA, 19 nt, synthetic construct
  source 1..19: mol_type = other RNA
caggaatgtcagcaccagc

SEQ ID NO: 30536 - RNA, 19 nt, synthetic construct
  source 1..19: mol_type = other RNA
gttgaaggaggtgcccggg

SEQ ID NO: 30537 - RNA, 19 nt, synthetic construct
  source 1..19: mol_type = other RNA
gcactgccatagccccccg

SEQ ID NO: 30538 - RNA, 19 nt, synthetic construct
  source 1..19: mol_type = other RNA
gtcctggcactgccatagc

SEQ ID NO: 30539 - RNA, 19 nt, synthetic construct
  source 1..19: mol_type = other RNA
gtccaggtacaccatgggg

SEQ ID NO: 30540 - RNA, 19 nt, synthetic construct
  source 1..19: mol_type = other RNA
tgtagggtgggtccccacc

SEQ ID NO: 30541 - RNA, 19 nt, synthetic construct
  source 1..19: mol_type = other RNA
gcacagggcatacctggta

SEQ ID NO: 30542 - RNA, 19 nt, synthetic construct
  source 1..19: mol_type = other RNA
tgtcgggaagctgcgccgc

SEQ ID NO: 30543 - RNA, 19 nt, synthetic construct
  source 1..19: mol_type = other RNA
taagtgccctccagcggcc

SEQ ID NO: 30544 - RNA, 19 nt, synthetic construct
  source 1..19: mol_type = other RNA
agccctggtcagccccggg

SEQ ID NO: 30545 - RNA, 19 nt, synthetic construct
  source 1..19: mol_type = other RNA
cgggggagccctggtcagc

SEQ ID NO: 30546 - RNA, 19 nt, synthetic construct
  source 1..19: mol_type = other RNA
gaagggtggatgtggccac

SEQ ID NO: 30547 - RNA, 19 nt, synthetic construct
  source 1..19: mol_type = other RNA
gttggaagggtggatgtgg

SEQ ID NO: 30548 - RNA, 19 nt, synthetic construct
  source 1..19: mol_type = other RNA
ccatgtgcccaagctcccc

SEQ ID NO: 30549 - RNA, 19 nt, synthetic construct
  source 1..19: mol_type = other RNA
tctgtcctgggcgtgctgg

SEQ ID NO: 30550 - RNA, 19 nt, synthetic construct
  source 1..19: mol_type = other RNA
attgtcgtctctgtcctgg

SEQ ID NO: 30551 - RNA, 19 nt, synthetic construct
  source 1..19: mol_type = other RNA
ctgtgggtgtggtggccgt

SEQ ID NO: 30552 - RNA, 19 nt, synthetic construct
  source 1..19: mol_type = other RNA
actgtgggtgtggtggccg

SEQ ID NO: 30553 - RNA, 19 nt, synthetic construct
  source 1..19: mol_type = other RNA
aggagggagtggctttgga

SEQ ID NO: 30554 - RNA, 19 nt, synthetic construct
  source 1..19: mol_type = other RNA
tgcttctcagtgctggaag

SEQ ID NO: 30555 - RNA, 19 nt, synthetic construct
  source 1..19: mol_type = other RNA
gaggtgtgggcagtctctg

SEQ ID NO: 30556 - RNA, 19 nt, synthetic construct
  source 1..19: mol_type = other RNA
ccacagagccggtggcccc

SEQ ID NO: 30557 - RNA, 19 nt, synthetic construct
  source 1..19: mol_type = other RNA
gccacagagccggtggccc

SEQ ID NO: 30558 - RNA, 19 nt, synthetic construct
  source 1..19: mol_type = other RNA
ggtgtgggtggtccccggg

SEQ ID NO: 30559 - RNA, 19 nt, synthetic construct
  source 1..19: mol_type = other RNA
catagaaccagtggccaca

SEQ ID NO: 30560 - RNA, 19 nt, synthetic construct
  source 1..19: mol_type = other RNA
caggagttgaggaggggtt

SEQ ID NO: 30561 - RNA, 19 nt, synthetic construct
  source 1..19: mol_type = other RNA
ttgtcccaggagttgagga

SEQ ID NO: 30562 - RNA, 19 nt, synthetic construct
  source 1..19: mol_type = other RNA
agcactggggggatgggag

SEQ ID NO: 30563 - RNA, 19 nt, synthetic construct
  source 1..19: mol_type = other RNA
accgtgtggggactgctgg

SEQ ID NO: 30564 - RNA, 19 nt, synthetic construct
  source 1..19: mol_type = other RNA
agggctggagtcgagtgct

SEQ ID NO: 30565 - RNA, 19 nt, synthetic construct
  source 1..19: mol_type = other RNA
gcccatggtcaccaccgtg

SEQ ID NO: 30566 - RNA, 19 nt, synthetic construct
  source 1..19: mol_type = other RNA
actctgaccaggcacactg

SEQ ID NO: 30567 - RNA, 19 nt, synthetic construct
  source 1..19: mol_type = other RNA
ttcctgcagaccaggccaa

SEQ ID NO: 30568 - RNA, 19 nt, synthetic construct
  source 1..19: mol_type = other RNA
ctgtagtgctcggctctgt

SEQ ID NO: 30569 - RNA, 19 nt, synthetic construct
  source 1..19: mol_type = other RNA
cagtccctggactggagaa

SEQ ID NO: 30570 - RNA, 19 nt, synthetic construct
  source 1..19: mol_type = other RNA
gcagtccctggactggaga

SEQ ID NO: 30571 - RNA, 19 nt, synthetic construct
  source 1..19: mol_type = other RNA
tgcttctcagtgctggaag

SEQ ID NO: 30572 - RNA, 19 nt, synthetic construct
  source 1..19: mol_type = other RNA
gccacagagccggtggccc

SEQ ID NO: 30573 - RNA, 19 nt, synthetic construct
  source 1..19: mol_type = other RNA
cgtgcgtgccgtccctggg

SEQ ID NO: 30574 - RNA, 19 nt, synthetic construct
  source 1..19: mol_type = other RNA
ggtgtgggtggtccccggg

SEQ ID NO: 30575 - RNA, 19 nt, synthetic construct
  source 1..19: mol_type = other RNA
catagaaccagtggccaca

SEQ ID NO: 30576 - RNA, 19 nt, synthetic construct
  source 1..19: mol_type = other RNA
gataggtgttgtccctgga

SEQ ID NO: 30577 - RNA, 19 nt, synthetic construct
  source 1..19: mol_type = other RNA
tcactgtgctgctggtggc

SEQ ID NO: 30578 - RNA, 19 nt, synthetic construct
  source 1..19: mol_type = other RNA
gagtcactgtgctgctggt

SEQ ID NO: 30579 - RNA, 19 nt, synthetic construct
  source 1..19: mol_type = other RNA
accgtgtggggactgctgg

SEQ ID NO: 30580 - RNA, 19 nt, synthetic construct
  source 1..19: mol_type = other RNA
gtggtgcccaaggtgcctg

SEQ ID NO: 30581 - RNA, 19 nt, synthetic construct
  source 1..19: mol_type = other RNA
gtgggaagtccccgtggaa

SEQ ID NO: 30582 - RNA, 19 nt, synthetic construct
  source 1..19: mol_type = other RNA
agggctggagtcgagtgct

SEQ ID NO: 30583 - RNA, 19 nt, synthetic construct
  source 1..19: mol_type = other RNA
ctcggtggtcctgctgcta

SEQ ID NO: 30584 - RNA, 19 nt, synthetic construct
  source 1..19: mol_type = other RNA
gcccatggtcaccaccgtg

SEQ ID NO: 30585 - RNA, 19 nt, synthetic construct
  source 1..19: mol_type = other RNA
actctgaccaggcacactg

SEQ ID NO: 30586 - RNA, 19 nt, synthetic construct
  source 1..19: mol_type = other RNA
ttcctgcagaccaggccaa

SEQ ID NO: 30587 - RNA, 19 nt, synthetic construct
  source 1..19: mol_type = other RNA
gtagtggctgctgtggtct

SEQ ID NO: 30588 - RNA, 19 nt, synthetic construct
  source 1..19: mol_type = other RNA
ctgtgggtgtggtggccgt

SEQ ID NO: 30589 - RNA, 19 nt, synthetic construct
  source 1..19: mol_type = other RNA
gctgtgggtgtggtggccg

SEQ ID NO: 30590 - RNA, 19 nt, synthetic construct
  source 1..19: mol_type = other RNA
ggtagctgtggatttggtg

SEQ ID NO: 30591 - RNA, 19 nt, synthetic construct
  source 1..19: mol_type = other RNA
tggtagctgtggatttggt

SEQ ID NO: 30592 - RNA, 19 nt, synthetic construct
  source 1..19: mol_type = other RNA
tccccggagtggaggaggg

SEQ ID NO: 30593 - RNA, 19 nt, synthetic construct
  source 1..19: mol_type = other RNA
ctgtgggtgtggtggccgt

SEQ ID NO: 30594 - RNA, 19 nt, synthetic construct
  source 1..19: mol_type = other RNA
actgtgggtgtggtggccg

SEQ ID NO: 30595 - RNA, 19 nt, synthetic construct
  source 1..19: mol_type = other RNA
tggctctggagctgatgac

SEQ ID NO: 30596 - RNA, 19 nt, synthetic construct
  source 1..19: mol_type = other RNA
agtggctctggagctgatg

SEQ ID NO: 30597 - RNA, 19 nt, synthetic construct
  source 1..19: mol_type = other RNA
gagtggctctggagctgat

SEQ ID NO: 30598 - RNA, 19 nt, synthetic construct
  source 1..19: mol_type = other RNA
tgcttctcagtgctggaag

SEQ ID NO: 30599 - RNA, 19 nt, synthetic construct
  source 1..19: mol_type = other RNA
ggagtagaggagggtgtgg

SEQ ID NO: 30600 - RNA, 19 nt, synthetic construct
  source 1..19: mol_type = other RNA
ccacagagccggtggccct

SEQ ID NO: 30601 - RNA, 19 nt, synthetic construct
  source 1..19: mol_type = other RNA
gtggttgtggtagtcggca

SEQ ID NO: 30602 - RNA, 19 nt, synthetic construct
  source 1..19: mol_type = other RNA
ggtgtgggtggtccccggg

SEQ ID NO: 30603 - RNA, 19 nt, synthetic construct
  source 1..19: mol_type = other RNA
catagaaccagtggccaca

SEQ ID NO: 30604 - RNA, 19 nt, synthetic construct
  source 1..19: mol_type = other RNA
agcactggggggatgggag

SEQ ID NO: 30605 - RNA, 19 nt, synthetic construct
  source 1..19: mol_type = other RNA
tcactgtgctgctggtggc

SEQ ID NO: 30606 - RNA, 19 nt, synthetic construct
  source 1..19: mol_type = other RNA
gagtcactgtgctgctggt

SEQ ID NO: 30607 - RNA, 19 nt, synthetic construct
  source 1..19: mol_type = other RNA
accgtgtggggactgctgg

SEQ ID NO: 30608 - RNA, 19 nt, synthetic construct
  source 1..19: mol_type = other RNA
tactggtggttgctgctgg

SEQ ID NO: 30609 - RNA, 19 nt, synthetic construct
  source 1..19: mol_type = other RNA
agggctggagtcgagtgct

SEQ ID NO: 30610 - RNA, 19 nt, synthetic construct
  source 1..19: mol_type = other RNA
ctcggtggtcctgctgcta

SEQ ID NO: 30611 - RNA, 19 nt, synthetic construct
  source 1..19: mol_type = other RNA
actctgaccaggcacactg

SEQ ID NO: 30612 - RNA, 19 nt, synthetic construct
  source 1..19: mol_type = other RNA
ttcctgcagaccaggccaa

SEQ ID NO: 30613 - RNA, 19 nt, synthetic construct
  source 1..19: mol_type = other RNA
ctgtagtgctcggctctgt

SEQ ID NO: 30614 - RNA, 19 nt, synthetic construct
  source 1..19: mol_type = other RNA
cagtccctggactggagaa

SEQ ID NO: 30615 - RNA, 19 nt, synthetic construct
  source 1..19: mol_type = other RNA
gcagtccctggactggaga

SEQ ID NO: 30616 - RNA, 19 nt, synthetic construct
  source 1..19: mol_type = other RNA
tgcttctcagtgctggaag

SEQ ID NO: 30617 - RNA, 19 nt, synthetic construct
  source 1..19: mol_type = other RNA
gaggtgtgggcagtctctg

SEQ ID NO: 30618 - RNA, 19 nt, synthetic construct
  source 1..19: mol_type = other RNA
ccacagagccggtggccct

SEQ ID NO: 30619 - RNA, 19 nt, synthetic construct
  source 1..19: mol_type = other RNA
gtggttgtggtagtcggca

SEQ ID NO: 30620 - RNA, 19 nt, synthetic construct
  source 1..19: mol_type = other RNA
cgtgcgtgccgtccctggg

SEQ ID NO: 30621 - RNA, 19 nt, synthetic construct
  source 1..19: mol_type = other RNA
ggtgtgggtggtccccggg

SEQ ID NO: 30622 - RNA, 19 nt, synthetic construct
  source 1..19: mol_type = other RNA
catagaaccagtggccaca

SEQ ID NO: 30623 - RNA, 19 nt, synthetic construct
  source 1..19: mol_type = other RNA
gtggccgtggtgatcagtg

SEQ ID NO: 30624 - RNA, 19 nt, synthetic construct
  source 1..19: mol_type = other RNA
gataggtgttgtccctgga

SEQ ID NO: 30625 - RNA, 19 nt, synthetic construct
  source 1..19: mol_type = other RNA
tcactgtgctgctggtggc

SEQ ID NO: 30626 - RNA, 19 nt, synthetic construct
  source 1..19: mol_type = other RNA
gagtcactgtgctgctggt

SEQ ID NO: 30627 - RNA, 19 nt, synthetic construct
  source 1..19: mol_type = other RNA
accgtgtggggactgctgg

SEQ ID NO: 30628 - RNA, 19 nt, synthetic construct
  source 1..19: mol_type = other RNA
gtggtgcccaaggtgcctg

SEQ ID NO: 30629 - RNA, 19 nt, synthetic construct
  source 1..19: mol_type = other RNA
gtgggaagtccccgtggaa

SEQ ID NO: 30630 - RNA, 19 nt, synthetic construct
  source 1..19: mol_type = other RNA
agggctggagtcgagtgct

SEQ ID NO: 30631 - RNA, 19 nt, synthetic construct
  source 1..19: mol_type = other RNA
ctcggtggtcctgctgcta

SEQ ID NO: 30632 - RNA, 19 nt, synthetic construct
  source 1..19: mol_type = other RNA
actctgaccaggcacactg

SEQ ID NO: 30633 - RNA, 19 nt, synthetic construct
  source 1..19: mol_type = other RNA
cccccagggggacaccagg

SEQ ID NO: 30634 - RNA, 19 nt, synthetic construct
  source 1..19: mol_type = other RNA
acctggcccaactccccca

SEQ ID NO: 30635 - RNA, 19 nt, synthetic construct
  source 1..19: mol_type = other RNA
ttcctgcagaccaggccaa

SEQ ID NO: 30636 - RNA, 19 nt, synthetic construct
  source 1..19: mol_type = other RNA
tggtggccgggctggtcag

SEQ ID NO: 30637 - RNA, 19 nt, synthetic construct
  source 1..19: mol_type = other RNA
ggtgtggtggccgggctgg

SEQ ID NO: 30638 - RNA, 19 nt, synthetic construct
  source 1..19: mol_type = other RNA
gctgtgggtgtggtggccg

SEQ ID NO: 30639 - RNA, 19 nt, synthetic construct
  source 1..19: mol_type = other RNA
ggtagctgtggatttggtg

SEQ ID NO: 30640 - RNA, 19 nt, synthetic construct
  source 1..19: mol_type = other RNA
tggtagctgtggatttggt

SEQ ID NO: 30641 - RNA, 19 nt, synthetic construct
  source 1..19: mol_type = other RNA
tccccggagtggaggaggg

SEQ ID NO: 30642 - RNA, 19 nt, synthetic construct
  source 1..19: mol_type = other RNA
ctgtagtgctcggctctgt

SEQ ID NO: 30643 - RNA, 19 nt, synthetic construct
  source 1..19: mol_type = other RNA
aggagggagtggctttgga

SEQ ID NO: 30644 - RNA, 19 nt, synthetic construct
  source 1..19: mol_type = other RNA
tctcagtgctggaagggca

SEQ ID NO: 30645 - RNA, 19 nt, synthetic construct
  source 1..19: mol_type = other RNA
tgcttctcagtgctggaag

SEQ ID NO: 30646 - RNA, 19 nt, synthetic construct
  source 1..19: mol_type = other RNA
gccacagagccggtggccc

SEQ ID NO: 30647 - RNA, 19 nt, synthetic construct
  source 1..19: mol_type = other RNA
gtggttgtggtagtcggca

SEQ ID NO: 30648 - RNA, 19 nt, synthetic construct
  source 1..19: mol_type = other RNA
ggtgtgggtggtccccggg

SEQ ID NO: 30649 - RNA, 19 nt, synthetic construct
  source 1..19: mol_type = other RNA
catagaaccagtggccaca

SEQ ID NO: 30650 - RNA, 19 nt, synthetic construct
  source 1..19: mol_type = other RNA
ggattttgtggctgtgctt

SEQ ID NO: 30651 - RNA, 19 nt, synthetic construct
  source 1..19: mol_type = other RNA
gtccacagggtggaggagg

SEQ ID NO: 30652 - RNA, 19 nt, synthetic construct
  source 1..19: mol_type = other RNA
ggaaccgtggaggcagtgg

SEQ ID NO: 30653 - RNA, 19 nt, synthetic construct
  source 1..19: mol_type = other RNA
ccacaggctttgggtccag

SEQ ID NO: 30654 - RNA, 19 nt, synthetic construct
  source 1..19: mol_type = other RNA
agtggcagaggccgtgcag

SEQ ID NO: 30655 - RNA, 19 nt, synthetic construct
  source 1..19: mol_type = other RNA
cagtggcagaggccgtgca

SEQ ID NO: 30656 - RNA, 19 nt, synthetic construct
  source 1..19: mol_type = other RNA
gatgctgagggcgcggggg

SEQ ID NO: 30657 - RNA, 19 nt, synthetic construct
  source 1..19: mol_type = other RNA
acttgtagtggatgctgag

SEQ ID NO: 30658 - RNA, 19 nt, synthetic construct
  source 1..19: mol_type = other RNA
gcccagggcaggaatgtcc

SEQ ID NO: 30659 - RNA, 19 nt, synthetic construct
  source 1..19: mol_type = other RNA
ggaagacttggccattgaa

SEQ ID NO: 30660 - RNA, 19 nt, synthetic construct
  source 1..19: mol_type = other RNA
gggcctggaagacttggcc

SEQ ID NO: 30661 - RNA, 19 nt, synthetic construct
  source 1..19: mol_type = other RNA
gggtgggtgtgctagacac

SEQ ID NO: 30662 - RNA, 19 nt, synthetic construct
  source 1..19: mol_type = other RNA
gcacacaggcaggctctgg

SEQ ID NO: 30663 - RNA, 19 nt, synthetic construct
  source 1..19: mol_type = other RNA
ctcctgacattgcaccgtt

SEQ ID NO: 30664 - RNA, 19 nt, synthetic construct
  source 1..19: mol_type = other RNA
tagtattgttgcaggcatc

SEQ ID NO: 30665 - RNA, 19 nt, synthetic construct
  source 1..19: mol_type = other RNA
aatggactccaccctcagc

SEQ ID NO: 30666 - RNA, 19 nt, synthetic construct
  source 1..19: mol_type = other RNA
aaatggactccaccctcag

SEQ ID NO: 30667 - RNA, 19 nt, synthetic construct
  source 1..19: mol_type = other RNA
ggtgtgtgggggagccatg

SEQ ID NO: 30668 - RNA, 19 nt, synthetic construct
  source 1..19: mol_type = other RNA
tcagacagcagtggcctcc

SEQ ID NO: 30669 - RNA, 19 nt, synthetic construct
  source 1..19: mol_type = other RNA
aatgcacatcctggctcca

SEQ ID NO: 30670 - RNA, 19 nt, synthetic construct
  source 1..19: mol_type = other RNA
cccaaggttttcatgatca

SEQ ID NO: 30671 - RNA, 19 nt, synthetic construct
  source 1..19: mol_type = other RNA
acacaggccggggggctcc

SEQ ID NO: 30672 - RNA, 19 nt, synthetic construct
  source 1..19: mol_type = other RNA
gtgggcagcaggagcacgg

SEQ ID NO: 30673 - RNA, 19 nt, synthetic construct
  source 1..19: mol_type = other RNA
gcccctcacccttctgggg

SEQ ID NO: 30674 - RNA, 19 nt, synthetic construct
  source 1..19: mol_type = other RNA
ccgaaaggggtcctgctgg

SEQ ID NO: 30675 - RNA, 19 nt, synthetic construct
  source 1..19: mol_type = other RNA
actcctgagtggcgccctc

SEQ ID NO: 30676 - RNA, 19 nt, synthetic construct
  source 1..19: mol_type = other RNA
tggcagggacacataggcc

SEQ ID NO: 30677 - RNA, 19 nt, synthetic construct
  source 1..19: mol_type = other RNA
ttgcctgtcgcagcttcct

SEQ ID NO: 30678 - RNA, 19 nt, synthetic construct
  source 1..19: mol_type = other RNA
cagggtttatttgcaaaac

SEQ ID NO: 30679 - RNA, 19 nt, synthetic construct
  source 1..19: mol_type = other RNA
tggaggagggcgtggccgt

SEQ ID NO: 30680 - RNA, 19 nt, synthetic construct
  source 1..19: mol_type = other RNA
ttgaggagggcgtggccgt

SEQ ID NO: 30681 - RNA, 19 nt, synthetic construct
  source 1..19: mol_type = other RNA
cccttctggggccggtttc

SEQ ID NO: 30682 - RNA, 19 nt, synthetic construct
  source 1..19: mol_type = other RNA
ggcccctgcagtggtcgct

SEQ ID NO: 30683 - RNA, 19 nt, synthetic construct
  source 1..19: mol_type = other RNA
cattctcccagctcggctc

SEQ ID NO: 30684 - RNA, 19 nt, synthetic construct
  source 1..19: mol_type = other RNA
gccagggtccagttgggga

SEQ ID NO: 30685 - RNA, 19 nt, synthetic construct
  source 1..19: mol_type = other RNA
agccagtgggtctcagggt

SEQ ID NO: 30686 - RNA, 19 nt, synthetic construct
  source 1..19: mol_type = other RNA
ctccggagtggaggagggg

SEQ ID NO: 30687 - RNA, 19 nt, synthetic construct
  source 1..19: mol_type = other RNA
ctccggagtggaggagggg

SEQ ID NO: 30688 - RNA, 19 nt, synthetic construct
  source 1..19: mol_type = other RNA
gggcgtcacagggcagggg

SEQ ID NO: 30689 - RNA, 19 nt, synthetic construct
  source 1..19: mol_type = other RNA
agaaaaactgtccaaatgc

SEQ ID NO: 30690 - RNA, 19 nt, synthetic construct
  source 1..19: mol_type = other RNA
catcctgggggctggcacg

SEQ ID NO: 30691 - RNA, 19 nt, synthetic construct
  source 1..19: mol_type = other RNA
tgacagagcgggggactct

SEQ ID NO: 30692 - RNA, 19 nt, synthetic construct
  source 1..19: mol_type = other RNA
ttaccctgcagcaggcatg

SEQ ID NO: 30693 - RNA, 19 nt, synthetic construct
  source 1..19: mol_type = other RNA
ggggtgactcggtggtcct

SEQ ID NO: 30694 - RNA, 19 nt, synthetic construct
  source 1..19: mol_type = other RNA
ggggtgactcggtggtcct

SEQ ID NO: 30695 - RNA, 19 nt, synthetic construct
  source 1..19: mol_type = other RNA
ggggtgactcggtggtcct

SEQ ID NO: 30696 - RNA, 19 nt, synthetic construct
  source 1..19: mol_type = other RNA
ctggcagggcacctcaagg

SEQ ID NO: 30697 - RNA, 19 nt, synthetic construct
  source 1..19: mol_type = other RNA
gccactgggtgtgcagtta

SEQ ID NO: 30698 - RNA, 19 nt, synthetic construct
  source 1..19: mol_type = other RNA
cggatgctgaccttgatgt

SEQ ID NO: 30699 - RNA, 19 nt, synthetic construct
  source 1..19: mol_type = other RNA
tgggggctggcacgggtgg

SEQ ID NO: 30700 - RNA, 19 nt, synthetic construct
  source 1..19: mol_type = other RNA
aagtcacagaacaaggggc

SEQ ID NO: 30701 - RNA, 19 nt, synthetic construct
  source 1..19: mol_type = other RNA
ctcggtggttctgctgcta

SEQ ID NO: 30702 - RNA, 19 nt, synthetic construct
  source 1..19: mol_type = other RNA
cggggcggaggacactggc

SEQ ID NO: 30703 - RNA, 19 nt, synthetic construct
  source 1..19: mol_type = other RNA
agcagccctccgccatccc

SEQ ID NO: 30704 - RNA, 19 nt, synthetic construct
  source 1..19: mol_type = other RNA
agttgtcccaggagttgag

SEQ ID NO: 30705 - RNA, 19 nt, synthetic construct
  source 1..19: mol_type = other RNA
ggacggggtggccgtggat

SEQ ID NO: 30706 - RNA, 19 nt, synthetic construct
  source 1..19: mol_type = other RNA
ggacggggtggccgtggat

SEQ ID NO: 30707 - RNA, 19 nt, synthetic construct
  source 1..19: mol_type = other RNA
ggacggggtggccgtggat

SEQ ID NO: 30708 - RNA, 19 nt, synthetic construct
  source 1..19: mol_type = other RNA
ggacggggtggccgtggat

SEQ ID NO: 30709 - RNA, 19 nt, synthetic construct
  source 1..19: mol_type = other RNA
gcggggtgccacacacagg

SEQ ID NO: 30710 - RNA, 19 nt, synthetic construct
  source 1..19: mol_type = other RNA
aaggccagggaagcggaag

SEQ ID NO: 30711 - RNA, 19 nt, synthetic construct
  source 1..19: mol_type = other RNA
ggaagcggtgctggctgtg

SEQ ID NO: 30712 - RNA, 19 nt, synthetic construct
  source 1..19: mol_type = other RNA
tagtcaaggggctcattgt

SEQ ID NO: 30713 - RNA, 19 nt, synthetic construct
  source 1..19: mol_type = other RNA
agtaccactggtctgtgtg

SEQ ID NO: 30714 - RNA, 19 nt, synthetic construct
  source 1..19: mol_type = other RNA
agtaccactggtctgtgtg

SEQ ID NO: 30715 - RNA, 19 nt, synthetic construct
  source 1..19: mol_type = other RNA
tggacatggaactggtggc

SEQ ID NO: 30716 - RNA, 19 nt, synthetic construct
  source 1..19: mol_type = other RNA
gaggacggggtggccgtgg

SEQ ID NO: 30717 - RNA, 19 nt, synthetic construct
  source 1..19: mol_type = other RNA
agtaccactggtctgtgtg

SEQ ID NO: 30718 - RNA, 19 nt, synthetic construct
  source 1..19: mol_type = other RNA
agtaccactggtctgtgtg

SEQ ID NO: 30719 - RNA, 19 nt, synthetic construct
  source 1..19: mol_type = other RNA
gaggacggggtggccgtgg

SEQ ID NO: 30720 - RNA, 19 nt, synthetic construct
  source 1..19: mol_type = other RNA
agtaccactggtctgtgtg

SEQ ID NO: 30721 - RNA, 19 nt, synthetic construct
  source 1..19: mol_type = other RNA
ggctttggagctggtggct

SEQ ID NO: 30722 - RNA, 19 nt, synthetic construct
  source 1..19: mol_type = other RNA
ggtcagctcagtgaggatc

SEQ ID NO: 30723 - RNA, 19 nt, synthetic construct
  source 1..19: mol_type = other RNA
gggagcactgcaggggtgc

SEQ ID NO: 30724 - RNA, 19 nt, synthetic construct
  source 1..19: mol_type = other RNA
tccacacgcatggtggtgg

SEQ ID NO: 30725 - RNA, 19 nt, synthetic construct
  source 1..19: mol_type = other RNA
tctggtcctcagggcagaa

SEQ ID NO: 30726 - RNA, 19 nt, synthetic construct
  source 1..19: mol_type = other RNA
aggtgcccgggctgtaggt

SEQ ID NO: 30727 - RNA, 19 nt, synthetic construct
  source 1..19: mol_type = other RNA
cctgggcgggcacacaggc

SEQ ID NO: 30728 - RNA, 19 nt, synthetic construct
  source 1..19: mol_type = other RNA
gtgcaccttctgccccacc

SEQ ID NO: 30729 - RNA, 19 nt, synthetic construct
  source 1..19: mol_type = other RNA
cagttgcctgggtggagga

SEQ ID NO: 30730 - RNA, 19 nt, synthetic construct
  source 1..19: mol_type = other RNA
cagttgcctgggtggagga

SEQ ID NO: 30731 - RNA, 19 nt, synthetic construct
  source 1..19: mol_type = other RNA
atggtggccacgggtgtgg

SEQ ID NO: 30732 - RNA, 19 nt, synthetic construct
  source 1..19: mol_type = other RNA
cagttgcctgggtggagga

SEQ ID NO: 30733 - RNA, 19 nt, synthetic construct
  source 1..19: mol_type = other RNA
gcctgtcgcagcttcctgg

SEQ ID NO: 30734 - RNA, 19 nt, synthetic construct
  source 1..19: mol_type = other RNA
gcaccagccggatgctgac

SEQ ID NO: 30735 - RNA, 19 nt, synthetic construct
  source 1..19: mol_type = other RNA
ctgagagggtggggactgc

SEQ ID NO: 30736 - RNA, 19 nt, synthetic construct
  source 1..19: mol_type = other RNA
tggtggagccggtggccgt

SEQ ID NO: 30737 - RNA, 19 nt, synthetic construct
  source 1..19: mol_type = other RNA
tggtggagccggtggccgt

SEQ ID NO: 30738 - RNA, 19 nt, synthetic construct
  source 1..19: mol_type = other RNA
tggtggagccggtggccgt

SEQ ID NO: 30739 - RNA, 19 nt, synthetic construct
  source 1..19: mol_type = other RNA
tggtggagccggtggccgt

SEQ ID NO: 30740 - RNA, 19 nt, synthetic construct
  source 1..19: mol_type = other RNA
cccttgtcatggtggctgt

SEQ ID NO: 30741 - RNA, 19 nt, synthetic construct
  source 1..19: mol_type = other RNA
gtgtgggggagccatgggc

SEQ ID NO: 30742 - RNA, 19 nt, synthetic construct
  source 1..19: mol_type = other RNA
cccctctctgacctggccg

SEQ ID NO: 30743 - RNA, 19 nt, synthetic construct
  source 1..19: mol_type = other RNA
ccaccaccccgctgagggc

SEQ ID NO: 30744 - RNA, 19 nt, synthetic construct
  source 1..19: mol_type = other RNA
ctgttgctgcagtccaggt

SEQ ID NO: 30745 - RNA, 19 nt, synthetic construct
  source 1..19: mol_type = other RNA
aggtcctggcactgccata

SEQ ID NO: 30746 - RNA, 19 nt, synthetic construct
  source 1..19: mol_type = other RNA
gcgtgggtggctgtgaggg

SEQ ID NO: 30747 - RNA, 19 nt, synthetic construct
  source 1..19: mol_type = other RNA
gggggacccaggcggtggt

SEQ ID NO: 30748 - RNA, 19 nt, synthetic construct
  source 1..19: mol_type = other RNA
tggtcgtccctggagaagg

SEQ ID NO: 30749 - RNA, 19 nt, synthetic construct
  source 1..19: mol_type = other RNA
tggtcgtccctggagaagg

SEQ ID NO: 30750 - RNA, 19 nt, synthetic construct
  source 1..19: mol_type = other RNA
tggtcgtccctggagaagg

SEQ ID NO: 30751 - RNA, 19 nt, synthetic construct
  source 1..19: mol_type = other RNA
gacctggcccaactccccc

SEQ ID NO: 30752 - RNA, 19 nt, synthetic construct
  source 1..19: mol_type = other RNA
tgtgagctgttcccagagt

SEQ ID NO: 30753 - RNA, 19 nt, synthetic construct
  source 1..19: mol_type = other RNA
aggacactggcggtgggga

SEQ ID NO: 30754 - RNA, 19 nt, synthetic construct
  source 1..19: mol_type = other RNA
agtggttgtccaggtagag

SEQ ID NO: 30755 - RNA, 19 nt, synthetic construct
  source 1..19: mol_type = other RNA
tagtggttgtccaggtaga

SEQ ID NO: 30756 - RNA, 19 nt, synthetic construct
  source 1..19: mol_type = other RNA
ctccccgggcgcggcagag

SEQ ID NO: 30757 - RNA, 19 nt, synthetic construct
  source 1..19: mol_type = other RNA
gtccacaggcacgaaggaa

SEQ ID NO: 30758 - RNA, 19 nt, synthetic construct
  source 1..19: mol_type = other RNA
gaggaagaggggatgggtg

SEQ ID NO: 30759 - RNA, 19 nt, synthetic construct
  source 1..19: mol_type = other RNA
tggtggccgtgggtgtggt

SEQ ID NO: 30760 - RNA, 19 nt, synthetic construct
  source 1..19: mol_type = other RNA
agggagtcactgtgttgct

SEQ ID NO: 30761 - RNA, 19 nt, synthetic construct
  source 1..19: mol_type = other RNA
tggtggccgtgggtgtggt

SEQ ID NO: 30762 - RNA, 19 nt, synthetic construct
  source 1..19: mol_type = other RNA
tggagctgatgactgtggg

SEQ ID NO: 30763 - RNA, 19 nt, synthetic construct
  source 1..19: mol_type = other RNA
tggtggccgtgggtgtggt

SEQ ID NO: 30764 - RNA, 19 nt, synthetic construct
  source 1..19: mol_type = other RNA
tggtggccgtgggtgtggt

SEQ ID NO: 30765 - RNA, 19 nt, synthetic construct
  source 1..19: mol_type = other RNA
tggtggccgtgggtgtggt

SEQ ID NO: 30766 - RNA, 19 nt, synthetic construct
  source 1..19: mol_type = other RNA
tgggtgtggtggttgtggg

SEQ ID NO: 30767 - RNA, 19 nt, synthetic construct
  source 1..19: mol_type = other RNA
cactggggtgatgggtgtt

SEQ ID NO: 30768 - RNA, 19 nt, synthetic construct
  source 1..19: mol_type = other RNA
gctgtgggctctggttcct

SEQ ID NO: 30769 - RNA, 19 nt, synthetic construct
  source 1..19: mol_type = other RNA
tgggtgtaggtgtgcagga

SEQ ID NO: 30770 - RNA, 19 nt, synthetic construct
  source 1..19: mol_type = other RNA
ggtcggggtggccgtggat

SEQ ID NO: 30771 - RNA, 19 nt, synthetic construct
  source 1..19: mol_type = other RNA
ctggaggagggagtggctt

SEQ ID NO: 30772 - RNA, 19 nt, synthetic construct
  source 1..19: mol_type = other RNA
ctggaggagggagtggctt

SEQ ID NO: 30773 - RNA, 19 nt, synthetic construct
  source 1..19: mol_type = other RNA
cgttgaagaggatctggtc

SEQ ID NO: 30774 - RNA, 19 nt, synthetic construct
  source 1..19: mol_type = other RNA
ttgtccccacagtagtcct

SEQ ID NO: 30775 - RNA, 19 nt, synthetic construct
  source 1..19: mol_type = other RNA
gccgggaggccgttgaagt

SEQ ID NO: 30776 - RNA, 19 nt, synthetic construct
  source 1..19: mol_type = other RNA
gaagtcacagaacaagggg

SEQ ID NO: 30777 - RNA, 19 nt, synthetic construct
  source 1..19: mol_type = other RNA
ggtggccccagttgtggtg

SEQ ID NO: 30778 - RNA, 19 nt, synthetic construct
  source 1..19: mol_type = other RNA
atccaggtggtccctgggg

SEQ ID NO: 30779 - RNA, 19 nt, synthetic construct
  source 1..19: mol_type = other RNA
agggggtggacatggaact

SEQ ID NO: 30780 - RNA, 19 nt, synthetic construct
  source 1..19: mol_type = other RNA
atccaggtggtccctgggg

SEQ ID NO: 30781 - RNA, 19 nt, synthetic construct
  source 1..19: mol_type = other RNA
agtctctggagtagaggag

SEQ ID NO: 30782 - RNA, 19 nt, synthetic construct
  source 1..19: mol_type = other RNA
atccaggtggtccctgggg

SEQ ID NO: 30783 - RNA, 19 nt, synthetic construct
  source 1..19: mol_type = other RNA
atccaggtggtccctgggg

SEQ ID NO: 30784 - RNA, 19 nt, synthetic construct
  source 1..19: mol_type = other RNA
atccaggtggtccctgggg

SEQ ID NO: 30785 - RNA, 19 nt, synthetic construct
  source 1..19: mol_type = other RNA
ggtctctggagtagaggag

SEQ ID NO: 30786 - RNA, 19 nt, synthetic construct
  source 1..19: mol_type = other RNA
atccaggtggtccctgggg

SEQ ID NO: 30787 - RNA, 19 nt, synthetic construct
  source 1..19: mol_type = other RNA
tgtccaggtagaggctgag

SEQ ID NO: 30788 - RNA, 19 nt, synthetic construct
  source 1..19: mol_type = other RNA
ttgtccaggtagaggctga

SEQ ID NO: 30789 - RNA, 19 nt, synthetic construct
  source 1..19: mol_type = other RNA
acaggcaggctctgggggc

SEQ ID NO: 30790 - RNA, 19 nt, synthetic construct
  source 1..19: mol_type = other RNA
gggctggcacgggtggggg

SEQ ID NO: 30791 - RNA, 19 nt, synthetic construct
  source 1..19: mol_type = other RNA
tgctccaccaggaggccag

SEQ ID NO: 30792 - RNA, 19 nt, synthetic construct
  source 1..19: mol_type = other RNA
cgggaggccgttgaagtcc

SEQ ID NO: 30793 - RNA, 19 nt, synthetic construct
  source 1..19: mol_type = other RNA
gtccttgggtgccagggcg

SEQ ID NO: 30794 - RNA, 19 nt, synthetic construct
  source 1..19: mol_type = other RNA
gggtccttgggtgccaggg

SEQ ID NO: 30795 - RNA, 19 nt, synthetic construct
  source 1..19: mol_type = other RNA
ggccgggctctgggcggtg

SEQ ID NO: 30796 - RNA, 19 nt, synthetic construct
  source 1..19: mol_type = other RNA
tctgcctcaggttttcaaa

SEQ ID NO: 30797 - RNA, 19 nt, synthetic construct
  source 1..19: mol_type = other RNA
gtgttggaagggtggatgt

SEQ ID NO: 30798 - RNA, 19 nt, synthetic construct
  source 1..19: mol_type = other RNA
gtccctggaagggctgagc

SEQ ID NO: 30799 - RNA, 19 nt, synthetic construct
  source 1..19: mol_type = other RNA
gtgccgtccctgggctgga

SEQ ID NO: 30800 - RNA, 19 nt, synthetic construct
  source 1..19: mol_type = other RNA
actgggggtgtgtgggtgg

SEQ ID NO: 30801 - RNA, 19 nt, synthetic construct
  source 1..19: mol_type = other RNA
gatgtgggtggtgcccaag

SEQ ID NO: 30802 - RNA, 19 nt, synthetic construct
  source 1..19: mol_type = other RNA
gggaagtcaccgtggaagg

SEQ ID NO: 30803 - RNA, 19 nt, synthetic construct
  source 1..19: mol_type = other RNA
tgggaagtcaccgtggaag

SEQ ID NO: 30804 - RNA, 19 nt, synthetic construct
  source 1..19: mol_type = other RNA
ggtccctggggtggaggac

SEQ ID NO: 30805 - RNA, 19 nt, synthetic construct
  source 1..19: mol_type = other RNA
gtgccgtccctgggctgga

SEQ ID NO: 30806 - RNA, 19 nt, synthetic construct
  source 1..19: mol_type = other RNA
gtgggggtgtgggtggtcc

SEQ ID NO: 30807 - RNA, 19 nt, synthetic construct
  source 1..19: mol_type = other RNA
actgggggtgtgtgggtgg

SEQ ID NO: 30808 - RNA, 19 nt, synthetic construct
  source 1..19: mol_type = other RNA
gtgaaggaggggatgggtg

SEQ ID NO: 30809 - RNA, 19 nt, synthetic construct
  source 1..19: mol_type = other RNA
ggtccctggggtggaggac

SEQ ID NO: 30810 - RNA, 19 nt, synthetic construct
  source 1..19: mol_type = other RNA
gtgccgtccctgggctgga

SEQ ID NO: 30811 - RNA, 19 nt, synthetic construct
  source 1..19: mol_type = other RNA
actgggggtgtgtgggtgg

SEQ ID NO: 30812 - RNA, 19 nt, synthetic construct
  source 1..19: mol_type = other RNA
gatgtgggtggtgcccaag

SEQ ID NO: 30813 - RNA, 19 nt, synthetic construct
  source 1..19: mol_type = other RNA
gggaagtcaccgtggaagg

SEQ ID NO: 30814 - RNA, 19 nt, synthetic construct
  source 1..19: mol_type = other RNA
tgggaagtcaccgtggaag

SEQ ID NO: 30815 - RNA, 19 nt, synthetic construct
  source 1..19: mol_type = other RNA
tggtcagctttgtgaggat

SEQ ID NO: 30816 - RNA, 19 nt, synthetic construct
  source 1..19: mol_type = other RNA
ggtccctggggtggaggac

SEQ ID NO: 30817 - RNA, 19 nt, synthetic construct
  source 1..19: mol_type = other RNA
gtgccgtccctgggctgga

SEQ ID NO: 30818 - RNA, 19 nt, synthetic construct
  source 1..19: mol_type = other RNA
gtgggggtgtgggtggtcc

SEQ ID NO: 30819 - RNA, 19 nt, synthetic construct
  source 1..19: mol_type = other RNA
actgggggtgtgtgggtgg

SEQ ID NO: 30820 - RNA, 19 nt, synthetic construct
  source 1..19: mol_type = other RNA
ggtccctggggtggaggac

SEQ ID NO: 30821 - RNA, 19 nt, synthetic construct
  source 1..19: mol_type = other RNA
ggtccctggggtggaggac

SEQ ID NO: 30822 - RNA, 19 nt, synthetic construct
  source 1..19: mol_type = other RNA
gtgccgtccctgggctgga

SEQ ID NO: 30823 - RNA, 19 nt, synthetic construct
  source 1..19: mol_type = other RNA
gcactggggtgatgggtgt

SEQ ID NO: 30824 - RNA, 19 nt, synthetic construct
  source 1..19: mol_type = other RNA
tggtggacatgggtgtggt

SEQ ID NO: 30825 - RNA, 19 nt, synthetic construct
  source 1..19: mol_type = other RNA
atggtggacatgggtgtgg

SEQ ID NO: 30826 - RNA, 19 nt, synthetic construct
  source 1..19: mol_type = other RNA
gtggggaggtgggacaggc

SEQ ID NO: 30827 - RNA, 19 nt, synthetic construct
  source 1..19: mol_type = other RNA
tcctccttcccatgcacca

SEQ ID NO: 30828 - RNA, 19 nt, synthetic construct
  source 1..19: mol_type = other RNA
tggtgggtgggcaggtgag

SEQ ID NO: 30829 - RNA, 19 nt, synthetic construct
  source 1..19: mol_type = other RNA
gcaggctctgggggcaggt

SEQ ID NO: 30830 - RNA, 19 nt, synthetic construct
  source 1..19: mol_type = other RNA
gtctgcagcggaaggtggg

SEQ ID NO: 30831 - RNA, 19 nt, synthetic construct
  source 1..19: mol_type = other RNA
tggcccctcacccttctgg

SEQ ID NO: 30832 - RNA, 19 nt, synthetic construct
  source 1..19: mol_type = other RNA
tcgtgcaccacctctccag

SEQ ID NO: 30833 - RNA, 19 nt, synthetic construct
  source 1..19: mol_type = other RNA
ggcgtcacagggcaggggc

SEQ ID NO: 30834 - RNA, 19 nt, synthetic construct
  source 1..19: mol_type = other RNA
agggcacctccagttccgc

SEQ ID NO: 30835 - RNA, 19 nt, synthetic construct
  source 1..19: mol_type = other RNA
gaaaaactgtccaaatgcc

SEQ ID NO: 30836 - RNA, 19 nt, synthetic construct
  source 1..19: mol_type = other RNA
tcccagtgacatcagggag

SEQ ID NO: 30837 - RNA, 19 nt, synthetic construct
  source 1..19: mol_type = other RNA
gaggttgccattgttgttg

SEQ ID NO: 30838 - RNA, 19 nt, synthetic construct
  source 1..19: mol_type = other RNA
cgttgtggctggagttcca

SEQ ID NO: 30839 - RNA, 19 nt, synthetic construct
  source 1..19: mol_type = other RNA
gttgtggctggagttccag

SEQ ID NO: 30840 - RNA, 19 nt, synthetic construct
  source 1..19: mol_type = other RNA
gagtcactgtgttgctggt

SEQ ID NO: 30841 - RNA, 19 nt, synthetic construct
  source 1..19: mol_type = other RNA
gcagaggagggagtcactg

SEQ ID NO: 30842 - RNA, 19 nt, synthetic construct
  source 1..19: mol_type = other RNA
gcagaggagggagtcactg

SEQ ID NO: 30843 - RNA, 19 nt, synthetic construct
  source 1..19: mol_type = other RNA
gcagaggagggagtcactg

SEQ ID NO: 30844 - RNA, 19 nt, synthetic construct
  source 1..19: mol_type = other RNA
tgagctgttcctggggtgg

SEQ ID NO: 30845 - RNA, 19 nt, synthetic construct
  source 1..19: mol_type = other RNA
gcagaggagggagtcactg

SEQ ID NO: 30846 - RNA, 19 nt, synthetic construct
  source 1..19: mol_type = other RNA
ccccacggtggacgagctg

SEQ ID NO: 30847 - RNA, 19 nt, synthetic construct
  source 1..19: mol_type = other RNA
gccagtgggtctcagggtg

SEQ ID NO: 30848 - RNA, 19 nt, synthetic construct
  source 1..19: mol_type = other RNA
agatggactcctgccctgg

SEQ ID NO: 30849 - RNA, 19 nt, synthetic construct
  source 1..19: mol_type = other RNA
cggtgaagctgctgtcggc

SEQ ID NO: 30850 - RNA, 19 nt, synthetic construct
  source 1..19: mol_type = other RNA
gctgttcctggggtggaag

SEQ ID NO: 30851 - RNA, 19 nt, synthetic construct
  source 1..19: mol_type = other RNA
tgatcagtgatgggggagt

SEQ ID NO: 30852 - RNA, 19 nt, synthetic construct
  source 1..19: mol_type = other RNA
agtagtggttgtccaggta

SEQ ID NO: 30853 - RNA, 19 nt, synthetic construct
  source 1..19: mol_type = other RNA
gcagccctggtgccacagg

SEQ ID NO: 30854 - RNA, 19 nt, synthetic construct
  source 1..19: mol_type = other RNA
tgccggccggcaagggcag

SEQ ID NO: 30855 - RNA, 19 nt, synthetic construct
  source 1..19: mol_type = other RNA
tcattgtcgtctctgtcct

SEQ ID NO: 30856 - RNA, 19 nt, synthetic construct
  source 1..19: mol_type = other RNA
tggctttggagctggtgac

SEQ ID NO: 30857 - RNA, 19 nt, synthetic construct
  source 1..19: mol_type = other RNA
tggctttggagctggtgac

SEQ ID NO: 30858 - RNA, 19 nt, synthetic construct
  source 1..19: mol_type = other RNA
tggctttggagctggtgac

SEQ ID NO: 30859 - RNA, 19 nt, synthetic construct
  source 1..19: mol_type = other RNA
tggctttggagctggtgac

SEQ ID NO: 30860 - RNA, 19 nt, synthetic construct
  source 1..19: mol_type = other RNA
cacactcctggtgctgcat

SEQ ID NO: 30861 - RNA, 19 nt, synthetic construct
  source 1..19: mol_type = other RNA
acccggccctctcgccacc

SEQ ID NO: 30862 - RNA, 19 nt, synthetic construct
  source 1..19: mol_type = other RNA
cttgtcgtagcagccacac

SEQ ID NO: 30863 - RNA, 19 nt, synthetic construct
  source 1..19: mol_type = other RNA
ttgtcgtctctgtcctggg

SEQ ID NO: 30864 - RNA, 19 nt, synthetic construct
  source 1..19: mol_type = other RNA
ctttgggagggggagctgt

SEQ ID NO: 30865 - RNA, 19 nt, synthetic construct
  source 1..19: mol_type = other RNA
ggctttggagctggtgact

SEQ ID NO: 30866 - RNA, 19 nt, synthetic construct
  source 1..19: mol_type = other RNA
gtgtggtggctgtgcttct

SEQ ID NO: 30867 - RNA, 19 nt, synthetic construct
  source 1..19: mol_type = other RNA
tgggtggtgcccaagatgc

SEQ ID NO: 30868 - RNA, 19 nt, synthetic construct
  source 1..19: mol_type = other RNA
ggctttggagctggtgact

SEQ ID NO: 30869 - RNA, 19 nt, synthetic construct
  source 1..19: mol_type = other RNA
gtgtggtggctgtgcttct

SEQ ID NO: 30870 - RNA, 19 nt, synthetic construct
  source 1..19: mol_type = other RNA
gcgtgccgtccctgggctg

SEQ ID NO: 30871 - RNA, 19 nt, synthetic construct
  source 1..19: mol_type = other RNA
ctttgggagggggagctgt

SEQ ID NO: 30872 - RNA, 19 nt, synthetic construct
  source 1..19: mol_type = other RNA
ggtggattgtggacatggt

SEQ ID NO: 30873 - RNA, 19 nt, synthetic construct
  source 1..19: mol_type = other RNA
gtgtggtggctgtgcttct

SEQ ID NO: 30874 - RNA, 19 nt, synthetic construct
  source 1..19: mol_type = other RNA
aagaggggatggctgtaac

SEQ ID NO: 30875 - RNA, 19 nt, synthetic construct
  source 1..19: mol_type = other RNA
tgggtggtgcccaagatgc

SEQ ID NO: 30876 - RNA, 19 nt, synthetic construct
  source 1..19: mol_type = other RNA
ggctttggagctggtgact

SEQ ID NO: 30877 - RNA, 19 nt, synthetic construct
  source 1..19: mol_type = other RNA
gtgtggtggctgtgcttct

SEQ ID NO: 30878 - RNA, 19 nt, synthetic construct
  source 1..19: mol_type = other RNA
gcgtgccgtccctgggctg

SEQ ID NO: 30879 - RNA, 19 nt, synthetic construct
  source 1..19: mol_type = other RNA
ctttgggagggggagctgt

SEQ ID NO: 30880 - RNA, 19 nt, synthetic construct
  source 1..19: mol_type = other RNA
ggtggattgtggacatggt

SEQ ID NO: 30881 - RNA, 19 nt, synthetic construct
  source 1..19: mol_type = other RNA
gggtggacgtggaactggt

SEQ ID NO: 30882 - RNA, 19 nt, synthetic construct
  source 1..19: mol_type = other RNA
ggctttggagctggtgact

SEQ ID NO: 30883 - RNA, 19 nt, synthetic construct
  source 1..19: mol_type = other RNA
gtgtggtggctgtgcttct

SEQ ID NO: 30884 - RNA, 19 nt, synthetic construct
  source 1..19: mol_type = other RNA
tgtggattgtggacatggt

SEQ ID NO: 30885 - RNA, 19 nt, synthetic construct
  source 1..19: mol_type = other RNA
cactttgggggtgtgagct

SEQ ID NO: 30886 - RNA, 19 nt, synthetic construct
  source 1..19: mol_type = other RNA
acttggccattgaaggtga

SEQ ID NO: 30887 - RNA, 19 nt, synthetic construct
  source 1..19: mol_type = other RNA
agagcggctgtggtgggca

SEQ ID NO: 30888 - RNA, 19 nt, synthetic construct
  source 1..19: mol_type = other RNA
tacacatgtggcagggaag

SEQ ID NO: 30889 - RNA, 19 nt, synthetic construct
  source 1..19: mol_type = other RNA
cccacccggccctctcgcc

SEQ ID NO: 30890 - RNA, 19 nt, synthetic construct
  source 1..19: mol_type = other RNA
atacctggtaccctctctg

SEQ ID NO: 30891 - RNA, 19 nt, synthetic construct
  source 1..19: mol_type = other RNA
gacggggacgggcagggag

SEQ ID NO: 30892 - RNA, 19 nt, synthetic construct
  source 1..19: mol_type = other RNA
agaacaaggggcaggtgtc

SEQ ID NO: 30893 - RNA, 19 nt, synthetic construct
  source 1..19: mol_type = other RNA
gcgggtcttgctgggtgtg

SEQ ID NO: 30894 - RNA, 19 nt, synthetic construct
  source 1..19: mol_type = other RNA
gcgggtcttgctgggtgtg

SEQ ID NO: 30895 - RNA, 19 nt, synthetic construct
  source 1..19: mol_type = other RNA
gcgggtcttgctgggtgtg

SEQ ID NO: 30896 - RNA, 19 nt, synthetic construct
  source 1..19: mol_type = other RNA
gccctggttgtggtggccg

SEQ ID NO: 30897 - RNA, 19 nt, synthetic construct
  source 1..19: mol_type = other RNA
gcgggtcttgctgggtgtg

SEQ ID NO: 30898 - RNA, 19 nt, synthetic construct
  source 1..19: mol_type = other RNA
cacagggtggaggagggga

SEQ ID NO: 30899 - RNA, 19 nt, synthetic construct
  source 1..19: mol_type = other RNA
tcttgctgggtgtggccgt

SEQ ID NO: 30900 - RNA, 19 nt, synthetic construct
  source 1..19: mol_type = other RNA
tcttgctgggtgtggccgt

SEQ ID NO: 30901 - RNA, 19 nt, synthetic construct
  source 1..19: mol_type = other RNA
cgtagtggctgctgtggtc

SEQ ID NO: 30902 - RNA, 19 nt, synthetic construct
  source 1..19: mol_type = other RNA
tcttgctgggtgtggccgt

SEQ ID NO: 30903 - RNA, 19 nt, synthetic construct
  source 1..19: mol_type = other RNA
caggggagggcgaggacag

SEQ ID NO: 30904 - RNA, 19 nt, synthetic construct
  source 1..19: mol_type = other RNA
tgtagtggctgctgtggtc

SEQ ID NO: 30905 - RNA, 19 nt, synthetic construct
  source 1..19: mol_type = other RNA
ggaggagggagtggctctg

SEQ ID NO: 30906 - RNA, 19 nt, synthetic construct
  source 1..19: mol_type = other RNA
gcagggaccgcccgtgtgt

SEQ ID NO: 30907 - RNA, 19 nt, synthetic construct
  source 1..19: mol_type = other RNA
tgtagtggctgctgtggtc

SEQ ID NO: 30908 - RNA, 19 nt, synthetic construct
  source 1..19: mol_type = other RNA
ggagccctggtcagccccg

SEQ ID NO: 30909 - RNA, 19 nt, synthetic construct
  source 1..19: mol_type = other RNA
tccagccactctgaccagg

SEQ ID NO: 30910 - RNA, 19 nt, synthetic construct
  source 1..19: mol_type = other RNA
tccagccactctgaccagg

SEQ ID NO: 30911 - RNA, 19 nt, synthetic construct
  source 1..19: mol_type = other RNA
tccagccactctgaccagg

SEQ ID NO: 30912 - RNA, 19 nt, synthetic construct
  source 1..19: mol_type = other RNA
tccagccactctgaccagg

SEQ ID NO: 30913 - RNA, 19 nt, synthetic construct
  source 1..19: mol_type = other RNA
agagctgcgcgcgctgggg

SEQ ID NO: 30914 - RNA, 19 nt, synthetic construct
  source 1..19: mol_type = other RNA
aggtggagatgtgggcccc

SEQ ID NO: 30915 - RNA, 19 nt, synthetic construct
  source 1..19: mol_type = other RNA
gcaccacgatgaagaagct

SEQ ID NO: 30916 - RNA, 19 nt, synthetic construct
  source 1..19: mol_type = other RNA
gagccctggtcagccccgg

SEQ ID NO: 30917 - RNA, 19 nt, synthetic construct
  source 1..19: mol_type = other RNA
ctctggttgtgggtgtggt

SEQ ID NO: 30918 - RNA, 19 nt, synthetic construct
  source 1..19: mol_type = other RNA
accagtggccacagttgtg

SEQ ID NO: 30919 - RNA, 19 nt, synthetic construct
  source 1..19: mol_type = other RNA
gaggtggccgtggtgtggc

SEQ ID NO: 30920 - RNA, 19 nt, synthetic construct
  source 1..19: mol_type = other RNA
ctctggttgtgggtgtggt

SEQ ID NO: 30921 - RNA, 19 nt, synthetic construct
  source 1..19: mol_type = other RNA
accagtggccacagttgtg

SEQ ID NO: 30922 - RNA, 19 nt, synthetic construct
  source 1..19: mol_type = other RNA
aggagggagtcactgtgct

SEQ ID NO: 30923 - RNA, 19 nt, synthetic construct
  source 1..19: mol_type = other RNA
gtggtctgctctgtgagga

SEQ ID NO: 30924 - RNA, 19 nt, synthetic construct
  source 1..19: mol_type = other RNA
ctctggttgtgggtgtggt

SEQ ID NO: 30925 - RNA, 19 nt, synthetic construct
  source 1..19: mol_type = other RNA
accagtggccacagttgtg

SEQ ID NO: 30926 - RNA, 19 nt, synthetic construct
  source 1..19: mol_type = other RNA
aggagggagtcactgtgct

SEQ ID NO: 30927 - RNA, 19 nt, synthetic construct
  source 1..19: mol_type = other RNA
accagtggccacagttgtg

SEQ ID NO: 30928 - RNA, 19 nt, synthetic construct
  source 1..19: mol_type = other RNA
aggagggagtcactgtgct

SEQ ID NO: 30929 - RNA, 19 nt, synthetic construct
  source 1..19: mol_type = other RNA
gaggtggccgtggtgtggc

SEQ ID NO: 30930 - RNA, 19 nt, synthetic construct
  source 1..19: mol_type = other RNA
accagtggccacagttgtg

SEQ ID NO: 30931 - RNA, 19 nt, synthetic construct
  source 1..19: mol_type = other RNA
tggactccaccctcagcct

SEQ ID NO: 30932 - RNA, 19 nt, synthetic construct
  source 1..19: mol_type = other RNA
ggacccgcctctcctggca

SEQ ID NO: 30933 - RNA, 19 nt, synthetic construct
  source 1..19: mol_type = other RNA
gacagcagtggcctcctgg

SEQ ID NO: 30934 - RNA, 19 nt, synthetic construct
  source 1..19: mol_type = other RNA
cacccacggggtgggcagc

SEQ ID NO: 30935 - RNA, 19 nt, synthetic construct
  source 1..19: mol_type = other RNA
ggctttgggatgctgaccc

SEQ ID NO: 30936 - RNA, 19 nt, synthetic construct
  source 1..19: mol_type = other RNA
gctcctcccgctgcccatt

SEQ ID NO: 30937 - RNA, 19 nt, synthetic construct
  source 1..19: mol_type = other RNA
caccaggaggccagtgcgg

SEQ ID NO: 30938 - RNA, 19 nt, synthetic construct
  source 1..19: mol_type = other RNA
gatgctgaccttgatgtag

SEQ ID NO: 30939 - RNA, 19 nt, synthetic construct
  source 1..19: mol_type = other RNA
ggctgggtgggcacttcgg

SEQ ID NO: 30940 - RNA, 19 nt, synthetic construct
  source 1..19: mol_type = other RNA
tgagctggacccagtctgc

SEQ ID NO: 30941 - RNA, 19 nt, synthetic construct
  source 1..19: mol_type = other RNA
gggtgtggctgtggacatg

SEQ ID NO: 30942 - RNA, 19 nt, synthetic construct
  source 1..19: mol_type = other RNA
tgggtgtggtggttgtgct

SEQ ID NO: 30943 - RNA, 19 nt, synthetic construct
  source 1..19: mol_type = other RNA
cccatggtcaccaccgtgg

SEQ ID NO: 30944 - RNA, 19 nt, synthetic construct
  source 1..19: mol_type = other RNA
gttcctgcagaccaggcca

SEQ ID NO: 30945 - RNA, 19 nt, synthetic construct
  source 1..19: mol_type = other RNA
gcagttgcctgggtggagg

SEQ ID NO: 30946 - RNA, 19 nt, synthetic construct
  source 1..19: mol_type = other RNA
gggtgtggctgtggacatg

SEQ ID NO: 30947 - RNA, 19 nt, synthetic construct
  source 1..19: mol_type = other RNA
tgggtgtggtggttgtgct

SEQ ID NO: 30948 - RNA, 19 nt, synthetic construct
  source 1..19: mol_type = other RNA
cccatggtcaccaccgtgg

SEQ ID NO: 30949 - RNA, 19 nt, synthetic construct
  source 1..19: mol_type = other RNA
gttcctgcagaccaggcca

SEQ ID NO: 30950 - RNA, 19 nt, synthetic construct
  source 1..19: mol_type = other RNA
gggtgtggctgtggacatg

SEQ ID NO: 30951 - RNA, 19 nt, synthetic construct
  source 1..19: mol_type = other RNA
tgggtgtggtggttgtgct

SEQ ID NO: 30952 - RNA, 19 nt, synthetic construct
  source 1..19: mol_type = other RNA
gttcctgcagaccaggcca

SEQ ID NO: 30953 - RNA, 19 nt, synthetic construct
  source 1..19: mol_type = other RNA
gcagttgcctgggtggagg

SEQ ID NO: 30954 - RNA, 19 nt, synthetic construct
  source 1..19: mol_type = other RNA
gggtgtggctgtggacatg

SEQ ID NO: 30955 - RNA, 19 nt, synthetic construct
  source 1..19: mol_type = other RNA
tgggtgtggtggttgtgct

SEQ ID NO: 30956 - RNA, 19 nt, synthetic construct
  source 1..19: mol_type = other RNA
gttcctgcagaccaggcca

SEQ ID NO: 30957 - RNA, 19 nt, synthetic construct
  source 1..19: mol_type = other RNA
gcagttgcctgggtggagg

SEQ ID NO: 30958 - RNA, 19 nt, synthetic construct
  source 1..19: mol_type = other RNA
gggtgtggctgtggacatg

SEQ ID NO: 30959 - RNA, 19 nt, synthetic construct
  source 1..19: mol_type = other RNA
tgggtgtggtggttgtgct

SEQ ID NO: 30960 - RNA, 19 nt, synthetic construct
  source 1..19: mol_type = other RNA
agtagaggaggtgtggatt

SEQ ID NO: 30961 - RNA, 19 nt, synthetic construct
  source 1..19: mol_type = other RNA
ccctgcagctggacacatc

SEQ ID NO: 30962 - RNA, 19 nt, synthetic construct
  source 1..19: mol_type = other RNA
ctggcagtggggggtgtgc

SEQ ID NO: 30963 - RNA, 19 nt, synthetic construct
  source 1..19: mol_type = other RNA
gttaccctgcagcaggcat

SEQ ID NO: 30964 - RNA, 19 nt, synthetic construct
  source 1..19: mol_type = other RNA
tgcattctcccagctcggc

SEQ ID NO: 30965 - RNA, 19 nt, synthetic construct
  source 1..19: mol_type = other RNA
agcggcaggcggcgaaggt

SEQ ID NO: 30966 - RNA, 19 nt, synthetic construct
  source 1..19: mol_type = other RNA
caggtgtggtggcggtggt

SEQ ID NO: 30967 - RNA, 19 nt, synthetic construct
  source 1..19: mol_type = other RNA
gtgggaagtcaccgtggaa

SEQ ID NO: 30968 - RNA, 19 nt, synthetic construct
  source 1..19: mol_type = other RNA
caggtgtggtggcggtggt

SEQ ID NO: 30969 - RNA, 19 nt, synthetic construct
  source 1..19: mol_type = other RNA
gatttggtggctgtgcttg

SEQ ID NO: 30970 - RNA, 19 nt, synthetic construct
  source 1..19: mol_type = other RNA
caggtgtggtggcggtggt

SEQ ID NO: 30971 - RNA, 19 nt, synthetic construct
  source 1..19: mol_type = other RNA
gtgggaagtcaccgtggaa

SEQ ID NO: 30972 - RNA, 19 nt, synthetic construct
  source 1..19: mol_type = other RNA
caggtgtggtggcggtggt

SEQ ID NO: 30973 - RNA, 19 nt, synthetic construct
  source 1..19: mol_type = other RNA
gatttggtggctgtgcttg

SEQ ID NO: 30974 - RNA, 19 nt, synthetic construct
  source 1..19: mol_type = other RNA
cagaagcagccctccgcca

SEQ ID NO: 30975 - RNA, 19 nt, synthetic construct
  source 1..19: mol_type = other RNA
ctcccacctccggttcctg

SEQ ID NO: 30976 - RNA, 19 nt, synthetic construct
  source 1..19: mol_type = other RNA
cgtgtggggactgctgggg

SEQ ID NO: 30977 - RNA, 19 nt, synthetic construct
  source 1..19: mol_type = other RNA
cgtgtggggactgctgggg

SEQ ID NO: 30978 - RNA, 19 nt, synthetic construct
  source 1..19: mol_type = other RNA
cgtgtggggactgctgggg

SEQ ID NO: 30979 - RNA, 19 nt, synthetic construct
  source 1..19: mol_type = other RNA
cgtgtggggactgctgggg

SEQ ID NO: 30980 - RNA, 19 nt, synthetic construct
  source 1..19: mol_type = other RNA
gcgggtgtggtggccgtgc

SEQ ID NO: 30981 - RNA, 19 nt, synthetic construct
  source 1..19: mol_type = other RNA
cacgtggtccacagggtgg

SEQ ID NO: 30982 - RNA, 19 nt, synthetic construct
  source 1..19: mol_type = other RNA
ggcacacaggcaggctctg

SEQ ID NO: 30983 - RNA, 19 nt, synthetic construct
  source 1..19: mol_type = other RNA
tgaaggccgggaggccgtt

SEQ ID NO: 30984 - RNA, 19 nt, synthetic construct
  source 1..19: mol_type = other RNA
cgcagagctgcgcgcgctg

SEQ ID NO: 30985 - RNA, 19 nt, synthetic construct
  source 1..19: mol_type = other RNA
ccccgccctgcacagagca

SEQ ID NO: 30986 - RNA, 19 nt, synthetic construct
  source 1..19: mol_type = other RNA
gaggctcccaggcagctta

SEQ ID NO: 30987 - RNA, 19 nt, synthetic construct
  source 1..19: mol_type = other RNA
agctgttgctgcagtccag

SEQ ID NO: 30988 - RNA, 19 nt, synthetic construct
  source 1..19: mol_type = other RNA
aaggtcccctcttggagga

SEQ ID NO: 30989 - RNA, 19 nt, synthetic construct
  source 1..19: mol_type = other RNA
gacagagcgggggactctg

SEQ ID NO: 30990 - RNA, 19 nt, synthetic construct
  source 1..19: mol_type = other RNA
ctgagctggacccagtctg

SEQ ID NO: 30991 - RNA, 19 nt, synthetic construct
  source 1..19: mol_type = other RNA
tctgtggagcctgcaggcg

SEQ ID NO: 30992 - RNA, 19 nt, synthetic construct
  source 1..19: mol_type = other RNA
cagcgtgggtggctgtgag

SEQ ID NO: 30993 - RNA, 19 nt, synthetic construct
  source 1..19: mol_type = other RNA
gggagctgttctcagggtg

SEQ ID NO: 30994 - RNA, 19 nt, synthetic construct
  source 1..19: mol_type = other RNA
tgggtgtggtggccgtggt

SEQ ID NO: 30995 - RNA, 19 nt, synthetic construct
  source 1..19: mol_type = other RNA
tgtggtggctgtgcttctc

SEQ ID NO: 30996 - RNA, 19 nt, synthetic construct
  source 1..19: mol_type = other RNA
tccaggtggtgcccaggga

SEQ ID NO: 30997 - RNA, 19 nt, synthetic construct
  source 1..19: mol_type = other RNA
ggagggtgtggctgtggac

SEQ ID NO: 30998 - RNA, 19 nt, synthetic construct
  source 1..19: mol_type = other RNA
ctctggagtggaggagggt

SEQ ID NO: 30999 - RNA, 19 nt, synthetic construct
  source 1..19: mol_type = other RNA
ggccacagagccggtggcc

SEQ ID NO: 31000 - RNA, 19 nt, synthetic construct
  source 1..19: mol_type = other RNA
gttgtgctgatccacactg

SEQ ID NO: 31001 - RNA, 19 nt, synthetic construct
  source 1..19: mol_type = other RNA
tctggttgtgggtgtggtg

SEQ ID NO: 31002 - RNA, 19 nt, synthetic construct
  source 1..19: mol_type = other RNA
actgtgttgctggtggctg

SEQ ID NO: 31003 - RNA, 19 nt, synthetic construct
  source 1..19: mol_type = other RNA
gggggtgtgtgggtggtcc

SEQ ID NO: 31004 - RNA, 19 nt, synthetic construct
  source 1..19: mol_type = other RNA
aagtcaccgtggaaggctc

SEQ ID NO: 31005 - RNA, 19 nt, synthetic construct
  source 1..19: mol_type = other RNA
tgcagaccaggccaaagtc

SEQ ID NO: 31006 - RNA, 19 nt, synthetic construct
  source 1..19: mol_type = other RNA
tgtggtggctgtgcttctc

SEQ ID NO: 31007 - RNA, 19 nt, synthetic construct
  source 1..19: mol_type = other RNA
tccaggtggtgcccaggga

SEQ ID NO: 31008 - RNA, 19 nt, synthetic construct
  source 1..19: mol_type = other RNA
ggagggtgtggctgtggac

SEQ ID NO: 31009 - RNA, 19 nt, synthetic construct
  source 1..19: mol_type = other RNA
ctctggagtggaggagggt

SEQ ID NO: 31010 - RNA, 19 nt, synthetic construct
  source 1..19: mol_type = other RNA
ggccacagagccggtggcc

SEQ ID NO: 31011 - RNA, 19 nt, synthetic construct
  source 1..19: mol_type = other RNA
gttgtgctgatccacactg

SEQ ID NO: 31012 - RNA, 19 nt, synthetic construct
  source 1..19: mol_type = other RNA
tctggttgtgggtgtggtg

SEQ ID NO: 31013 - RNA, 19 nt, synthetic construct
  source 1..19: mol_type = other RNA
gggggtgtgtgggtggtcc

SEQ ID NO: 31014 - RNA, 19 nt, synthetic construct
  source 1..19: mol_type = other RNA
tgcagaccaggccaaagtc

SEQ ID NO: 31015 - RNA, 19 nt, synthetic construct
  source 1..19: mol_type = other RNA
cttggactggaggaggaag

SEQ ID NO: 31016 - RNA, 19 nt, synthetic construct
  source 1..19: mol_type = other RNA
ttggtggctgtgcttgtca

SEQ ID NO: 31017 - RNA, 19 nt, synthetic construct
  source 1..19: mol_type = other RNA
aagggtgaaggaggggatg

SEQ ID NO: 31018 - RNA, 19 nt, synthetic construct
  source 1..19: mol_type = other RNA
gtggattgtggacatggtg

SEQ ID NO: 31019 - RNA, 19 nt, synthetic construct
  source 1..19: mol_type = other RNA
tggtcagcactgtggaggt

SEQ ID NO: 31020 - RNA, 19 nt, synthetic construct
  source 1..19: mol_type = other RNA
tggggccagtggctgcagt

SEQ ID NO: 31021 - RNA, 19 nt, synthetic construct
  source 1..19: mol_type = other RNA
agttgcccgggtggaggag

SEQ ID NO: 31022 - RNA, 19 nt, synthetic construct
  source 1..19: mol_type = other RNA
tgtggtggctgtgcttctc

SEQ ID NO: 31023 - RNA, 19 nt, synthetic construct
  source 1..19: mol_type = other RNA
ggagggtgtggctgtggac

SEQ ID NO: 31024 - RNA, 19 nt, synthetic construct
  source 1..19: mol_type = other RNA
ggccacagagccggtggcc

SEQ ID NO: 31025 - RNA, 19 nt, synthetic construct
  source 1..19: mol_type = other RNA
gttgtgctgatccacactg

SEQ ID NO: 31026 - RNA, 19 nt, synthetic construct
  source 1..19: mol_type = other RNA
tctggttgtgggtgtggtg

SEQ ID NO: 31027 - RNA, 19 nt, synthetic construct
  source 1..19: mol_type = other RNA
gggggtgtgtgggtggtcc

SEQ ID NO: 31028 - RNA, 19 nt, synthetic construct
  source 1..19: mol_type = other RNA
aagtcaccgtggaaggctc

SEQ ID NO: 31029 - RNA, 19 nt, synthetic construct
  source 1..19: mol_type = other RNA
tgcagaccaggccaaagtc

SEQ ID NO: 31030 - RNA, 19 nt, synthetic construct
  source 1..19: mol_type = other RNA
tgtggtggctgtgcttctc

SEQ ID NO: 31031 - RNA, 19 nt, synthetic construct
  source 1..19: mol_type = other RNA
tccaggtggtgcccaggga

SEQ ID NO: 31032 - RNA, 19 nt, synthetic construct
  source 1..19: mol_type = other RNA
ggagggtgtggctgtggac

SEQ ID NO: 31033 - RNA, 19 nt, synthetic construct
  source 1..19: mol_type = other RNA
ctctggagtggaggagggt

SEQ ID NO: 31034 - RNA, 19 nt, synthetic construct
  source 1..19: mol_type = other RNA
ggccacagagccggtggcc

SEQ ID NO: 31035 - RNA, 19 nt, synthetic construct
  source 1..19: mol_type = other RNA
gttgtgctgatccacactg

SEQ ID NO: 31036 - RNA, 19 nt, synthetic construct
  source 1..19: mol_type = other RNA
actggttgtgggtgtggtg

SEQ ID NO: 31037 - RNA, 19 nt, synthetic construct
  source 1..19: mol_type = other RNA
gggggtgtgtgggtggtcc

SEQ ID NO: 31038 - RNA, 19 nt, synthetic construct
  source 1..19: mol_type = other RNA
tgcagaccaggccaaagtc

SEQ ID NO: 31039 - RNA, 19 nt, synthetic construct
  source 1..19: mol_type = other RNA
gggtgtggtggccgggctg

SEQ ID NO: 31040 - RNA, 19 nt, synthetic construct
  source 1..19: mol_type = other RNA
cttggactggaggaggaag

SEQ ID NO: 31041 - RNA, 19 nt, synthetic construct
  source 1..19: mol_type = other RNA
ttggtggctgtgcttgtca

SEQ ID NO: 31042 - RNA, 19 nt, synthetic construct
  source 1..19: mol_type = other RNA
gtcccaagggtggaggagg

SEQ ID NO: 31043 - RNA, 19 nt, synthetic construct
  source 1..19: mol_type = other RNA
gtggattgtggacatggtg

SEQ ID NO: 31044 - RNA, 19 nt, synthetic construct
  source 1..19: mol_type = other RNA
tggtcagcactgtggaggt

SEQ ID NO: 31045 - RNA, 19 nt, synthetic construct
  source 1..19: mol_type = other RNA
tggggccagtggctgcagt

SEQ ID NO: 31046 - RNA, 19 nt, synthetic construct
  source 1..19: mol_type = other RNA
tgtggtggctgtgcttctc

SEQ ID NO: 31047 - RNA, 19 nt, synthetic construct
  source 1..19: mol_type = other RNA
tccaggtggtgcccaggga

SEQ ID NO: 31048 - RNA, 19 nt, synthetic construct
  source 1..19: mol_type = other RNA
ggagggtgtggctgtggac

SEQ ID NO: 31049 - RNA, 19 nt, synthetic construct
  source 1..19: mol_type = other RNA
ctctggagtggaggagggt

SEQ ID NO: 31050 - RNA, 19 nt, synthetic construct
  source 1..19: mol_type = other RNA
ggccacagagccggtggcc

SEQ ID NO: 31051 - RNA, 19 nt, synthetic construct
  source 1..19: mol_type = other RNA
gttgtgctgatccacactg

SEQ ID NO: 31052 - RNA, 19 nt, synthetic construct
  source 1..19: mol_type = other RNA
actggttgtgggtgtggtg

SEQ ID NO: 31053 - RNA, 19 nt, synthetic construct
  source 1..19: mol_type = other RNA
cttggactggaggaggaag

SEQ ID NO: 31054 - RNA, 19 nt, synthetic construct
  source 1..19: mol_type = other RNA
cgtggtccacagggtggag

SEQ ID NO: 31055 - RNA, 19 nt, synthetic construct
  source 1..19: mol_type = other RNA
acgtggtccacagggtgga

SEQ ID NO: 31056 - RNA, 19 nt, synthetic construct
  source 1..19: mol_type = other RNA
gtggattgtggacatggtg

SEQ ID NO: 31057 - RNA, 19 nt, synthetic construct
  source 1..19: mol_type = other RNA
tggtcagcactgtggaggt

SEQ ID NO: 31058 - RNA, 19 nt, synthetic construct
  source 1..19: mol_type = other RNA
gagaaaaactgtccaaatg

SEQ ID NO: 31059 - RNA, 19 nt, synthetic construct
  source 1..19: mol_type = other RNA
ggccacaggctttgggtcc

SEQ ID NO: 31060 - RNA, 19 nt, synthetic construct
  source 1..19: mol_type = other RNA
gccccacatgctgcagatg

SEQ ID NO: 31061 - RNA, 19 nt, synthetic construct
  source 1..19: mol_type = other RNA
catggtgacagtgaggacg

SEQ ID NO: 31062 - RNA, 19 nt, synthetic construct
  source 1..19: mol_type = other RNA
gagttgcaggtggcaggct

SEQ ID NO: 31063 - RNA, 19 nt, synthetic construct
  source 1..19: mol_type = other RNA
tcacccacggggtgggcag

SEQ ID NO: 31064 - RNA, 19 nt, synthetic construct
  source 1..19: mol_type = other RNA
atcagggaggggcaaggcc

SEQ ID NO: 31065 - RNA, 19 nt, synthetic construct
  source 1..19: mol_type = other RNA
gctgacccctctctgacct

SEQ ID NO: 31066 - RNA, 19 nt, synthetic construct
  source 1..19: mol_type = other RNA
gggctttgggatgctgacc

SEQ ID NO: 31067 - RNA, 19 nt, synthetic construct
  source 1..19: mol_type = other RNA
gggtttatttgcaaaactg

SEQ ID NO: 31068 - RNA, 19 nt, synthetic construct
  source 1..19: mol_type = other RNA
catccatggtgtgccctgc

SEQ ID NO: 31069 - RNA, 19 nt, synthetic construct
  source 1..19: mol_type = other RNA
ggactggcagttgctgacc

SEQ ID NO: 31070 - RNA, 19 nt, synthetic construct
  source 1..19: mol_type = other RNA
gctggggtgtgggaagtcc

SEQ ID NO: 31071 - RNA, 19 nt, synthetic construct
  source 1..19: mol_type = other RNA
gctggggtgtgggaagtcc

SEQ ID NO: 31072 - RNA, 19 nt, synthetic construct
  source 1..19: mol_type = other RNA
gaggagggggtgactgtga

SEQ ID NO: 31073 - RNA, 19 nt, synthetic construct
  source 1..19: mol_type = other RNA
ggtcagcactggggggatg

SEQ ID NO: 31074 - RNA, 19 nt, synthetic construct
  source 1..19: mol_type = other RNA
ggtcagcactggggggatg

SEQ ID NO: 31075 - RNA, 19 nt, synthetic construct
  source 1..19: mol_type = other RNA
gcaggggtccttgggtgcc

SEQ ID NO: 31076 - RNA, 19 nt, synthetic construct
  source 1..19: mol_type = other RNA
gtggccacagagccggtgg

SEQ ID NO: 31077 - RNA, 19 nt, synthetic construct
  source 1..19: mol_type = other RNA
gtggccacagagccggtgg

SEQ ID NO: 31078 - RNA, 19 nt, synthetic construct
  source 1..19: mol_type = other RNA
gtggccacagagccggtgg

SEQ ID NO: 31079 - RNA, 19 nt, synthetic construct
  source 1..19: mol_type = other RNA
gtggccacagagccggtgg

SEQ ID NO: 31080 - RNA, 19 nt, synthetic construct
  source 1..19: mol_type = other RNA
gtggccacagagccggtgg

SEQ ID NO: 31081 - RNA, 19 nt, synthetic construct
  source 1..19: mol_type = other RNA
gcacggagcgcggggtgcc

SEQ ID NO: 31082 - RNA, 19 nt, synthetic construct
  source 1..19: mol_type = other RNA
ctggtgctgcatgttgagg

SEQ ID NO: 31083 - RNA, 19 nt, synthetic construct
  source 1..19: mol_type = other RNA
cgtggatccagtggactca

SEQ ID NO: 31084 - RNA, 19 nt, synthetic construct
  source 1..19: mol_type = other RNA
ctgttgtggtcagctttgt

SEQ ID NO: 31085 - RNA, 19 nt, synthetic construct
  source 1..19: mol_type = other RNA
cgtggatccagtggactca

SEQ ID NO: 31086 - RNA, 19 nt, synthetic construct
  source 1..19: mol_type = other RNA
cgccatccatggtgtgccc

SEQ ID NO: 31087 - RNA, 19 nt, synthetic construct
  source 1..19: mol_type = other RNA
cgcgcgctgggggttggag

SEQ ID NO: 31088 - RNA, 19 nt, synthetic construct
  source 1..19: mol_type = other RNA
ggagggagtcactgtgttg

SEQ ID NO: 31089 - RNA, 19 nt, synthetic construct
  source 1..19: mol_type = other RNA
actggtggcccttgtcgtg

SEQ ID NO: 31090 - RNA, 19 nt, synthetic construct
  source 1..19: mol_type = other RNA
actggtggcccttgtcgtg

SEQ ID NO: 31091 - RNA, 19 nt, synthetic construct
  source 1..19: mol_type = other RNA
tggattttgtggctgtgct

SEQ ID NO: 31092 - RNA, 19 nt, synthetic construct
  source 1..19: mol_type = other RNA
cccatgcaccatggtgaca

SEQ ID NO: 31093 - RNA, 19 nt, synthetic construct
  source 1..19: mol_type = other RNA
ccacgggtgtgtgggggag

SEQ ID NO: 31094 - RNA, 19 nt, synthetic construct
  source 1..19: mol_type = other RNA
gtgctgcgcgggcgctccg

SEQ ID NO: 31095 - RNA, 19 nt, synthetic construct
  source 1..19: mol_type = other RNA
cgacctcagccctgagtta

SEQ ID NO: 31096 - RNA, 19 nt, synthetic construct
  source 1..19: mol_type = other RNA
tctggagtagaggaggtgt

SEQ ID NO: 31097 - RNA, 19 nt, synthetic construct
  source 1..19: mol_type = other RNA
acacaggccacaggtctgg

SEQ ID NO: 31098 - RNA, 19 nt, synthetic construct
  source 1..19: mol_type = other RNA
ggtggccgaagtccaggct

SEQ ID NO: 31099 - RNA, 19 nt, synthetic construct
  source 1..19: mol_type = other RNA
gtgggtggtgcccaagatg

SEQ ID NO: 31100 - RNA, 19 nt, synthetic construct
  source 1..19: mol_type = other RNA
ggtggccgaagtccaggct

SEQ ID NO: 31101 - RNA, 19 nt, synthetic construct
  source 1..19: mol_type = other RNA
ggtggccgaagtccaggct

SEQ ID NO: 31102 - RNA, 19 nt, synthetic construct
  source 1..19: mol_type = other RNA
gtgggtggtgcccaagatg

SEQ ID NO: 31103 - RNA, 19 nt, synthetic construct
  source 1..19: mol_type = other RNA
ggtggccgaagtccaggct

SEQ ID NO: 31104 - RNA, 19 nt, synthetic construct
  source 1..19: mol_type = other RNA
cagtgacatcagggagggg

SEQ ID NO: 31105 - RNA, 19 nt, synthetic construct
  source 1..19: mol_type = other RNA
gcggcagtgctcagagaac

SEQ ID NO: 31106 - RNA, 19 nt, synthetic construct
  source 1..19: mol_type = other RNA
ctcgatgtcagccagcaca

SEQ ID NO: 31107 - RNA, 19 nt, synthetic construct
  source 1..19: mol_type = other RNA
aggtggtggtacctggggc

SEQ ID NO: 31108 - RNA, 19 nt, synthetic construct
  source 1..19: mol_type = other RNA
agtggaggaggggtggatt

SEQ ID NO: 31109 - RNA, 19 nt, synthetic construct
  source 1..19: mol_type = other RNA
agtggaggaggggtggatt

SEQ ID NO: 31110 - RNA, 19 nt, synthetic construct
  source 1..19: mol_type = other RNA
ggtgtggctgtggacatgg

SEQ ID NO: 31111 - RNA, 19 nt, synthetic construct
  source 1..19: mol_type = other RNA
ggtgtggctgtggacatgg

SEQ ID NO: 31112 - RNA, 19 nt, synthetic construct
  source 1..19: mol_type = other RNA
ggtgtggctgtggacatgg

SEQ ID NO: 31113 - RNA, 19 nt, synthetic construct
  source 1..19: mol_type = other RNA
ggtgtggctgtggacatgg

SEQ ID NO: 31114 - RNA, 19 nt, synthetic construct
  source 1..19: mol_type = other RNA
ggtgtggctgtggacatgg

SEQ ID NO: 31115 - RNA, 19 nt, synthetic construct
  source 1..19: mol_type = other RNA
agcatggccgccagagcca

SEQ ID NO: 31116 - RNA, 19 nt, synthetic construct
  source 1..19: mol_type = other RNA
agtgggctggcaggcatcc

SEQ ID NO: 31117 - RNA, 19 nt, synthetic construct
  source 1..19: mol_type = other RNA
ccgtcacggggcctgagct

SEQ ID NO: 31118 - RNA, 19 nt, synthetic construct
  source 1..19: mol_type = other RNA
tctcggcctgagaggtgga

SEQ ID NO: 31119 - RNA, 19 nt, synthetic construct
  source 1..19: mol_type = other RNA
tggtggccgtgctggtcag

SEQ ID NO: 31120 - RNA, 19 nt, synthetic construct
  source 1..19: mol_type = other RNA
tggtggccgtgctggtcag

SEQ ID NO: 31121 - RNA, 19 nt, synthetic construct
  source 1..19: mol_type = other RNA
tggtggccgtgctggtcag

SEQ ID NO: 31122 - RNA, 19 nt, synthetic construct
  source 1..19: mol_type = other RNA
ccgccatcccctccagctg

SEQ ID NO: 31123 - RNA, 19 nt, synthetic construct
  source 1..19: mol_type = other RNA
ccagtgacatcagggaggg

SEQ ID NO: 31124 - RNA, 19 nt, synthetic construct
  source 1..19: mol_type = other RNA
gccggcaagggcagcgggt

SEQ ID NO: 31125 - RNA, 19 nt, synthetic construct
  source 1..19: mol_type = other RNA
ggcctccaccaccccgctg

SEQ ID NO: 31126 - RNA, 19 nt, synthetic construct
  source 1..19: mol_type = other RNA
ggatgccactgggtgtgca

SEQ ID NO: 31127 - RNA, 19 nt, synthetic construct
  source 1..19: mol_type = other RNA
gccttcctgatgatggtgc

SEQ ID NO: 31128 - RNA, 19 nt, synthetic construct
  source 1..19: mol_type = other RNA
gtctccgcctcccaggccg

SEQ ID NO: 31129 - RNA, 19 nt, synthetic construct
  source 1..19: mol_type = other RNA
acctggggccgagggggtg

SEQ ID NO: 31130 - RNA, 19 nt, synthetic construct
  source 1..19: mol_type = other RNA
ggctgctgtggtctgctct

SEQ ID NO: 31131 - RNA, 19 nt, synthetic construct
  source 1..19: mol_type = other RNA
tcagcactgtggaggtgtg

SEQ ID NO: 31132 - RNA, 19 nt, synthetic construct
  source 1..19: mol_type = other RNA
gagttgtccctggagttga

SEQ ID NO: 31133 - RNA, 19 nt, synthetic construct
  source 1..19: mol_type = other RNA
tcagcactgtggaggtgtg

SEQ ID NO: 31134 - RNA, 19 nt, synthetic construct
  source 1..19: mol_type = other RNA
tcagcactgtggaggtgtg

SEQ ID NO: 31135 - RNA, 19 nt, synthetic construct
  source 1..19: mol_type = other RNA
atgctgcagatgcactcgc

SEQ ID NO: 31136 - RNA, 19 nt, synthetic construct
  source 1..19: mol_type = other RNA
ggcagccgggcctggaaga

SEQ ID NO: 31137 - RNA, 19 nt, synthetic construct
  source 1..19: mol_type = other RNA
gactggcagttgctgaccc

SEQ ID NO: 31138 - RNA, 19 nt, synthetic construct
  source 1..19: mol_type = other RNA
tgtaggtgtgcaggatggc

SEQ ID NO: 31139 - RNA, 19 nt, synthetic construct
  source 1..19: mol_type = other RNA
gcggctctttggaagcggt

SEQ ID NO: 31140 - RNA, 19 nt, synthetic construct
  source 1..19: mol_type = other RNA
gctgctcacagactgcccc

SEQ ID NO: 31141 - RNA, 19 nt, synthetic construct
  source 1..19: mol_type = other RNA
gtgacatcagggaggggca

SEQ ID NO: 31142 - RNA, 19 nt, synthetic construct
  source 1..19: mol_type = other RNA
agatgccctcctcgtccgt

SEQ ID NO: 31143 - RNA, 19 nt, synthetic construct
  source 1..19: mol_type = other RNA
cggcaagtgggctggcagg

SEQ ID NO: 31144 - RNA, 19 nt, synthetic construct
  source 1..19: mol_type = other RNA
tcccggggtggaggacggg

SEQ ID NO: 31145 - RNA, 19 nt, synthetic construct
  source 1..19: mol_type = other RNA
gaggagggggtggacgtgg

SEQ ID NO: 31146 - RNA, 19 nt, synthetic construct
  source 1..19: mol_type = other RNA
gggttgatgatggagtggc

SEQ ID NO: 31147 - RNA, 19 nt, synthetic construct
  source 1..19: mol_type = other RNA
actggatgccactgggtgt

SEQ ID NO: 31148 - RNA, 19 nt, synthetic construct
  source 1..19: mol_type = other RNA
ggttgctgctagggtgtgg

SEQ ID NO: 31149 - RNA, 19 nt, synthetic construct
  source 1..19: mol_type = other RNA
ggtggtggagccggtggct

SEQ ID NO: 31150 - RNA, 19 nt, synthetic construct
  source 1..19: mol_type = other RNA
gctggtggctgcgggtgtg

SEQ ID NO: 31151 - RNA, 19 nt, synthetic construct
  source 1..19: mol_type = other RNA
gagcactgcaggggtgcgg

SEQ ID NO: 31152 - RNA, 19 nt, synthetic construct
  source 1..19: mol_type = other RNA
cggaggacactggcggtgg

SEQ ID NO: 31153 - RNA, 19 nt, synthetic construct
  source 1..19: mol_type = other RNA
gacagcagtcgccctcctc

SEQ ID NO: 31154 - RNA, 19 nt, synthetic construct
  source 1..19: mol_type = other RNA
ggggggacggggacgggca

SEQ ID NO: 31155 - RNA, 19 nt, synthetic construct
  source 1..19: mol_type = other RNA
gggtggggggacggggacg

SEQ ID NO: 31156 - RNA, 19 nt, synthetic construct
  source 1..19: mol_type = other RNA
gctccaccaggaggccagt

SEQ ID NO: 31157 - RNA, 19 nt, synthetic construct
  source 1..19: mol_type = other RNA
gcagggtgcggtggcagat

SEQ ID NO: 31158 - RNA, 19 nt, synthetic construct
  source 1..19: mol_type = other RNA
gcccgcggggcaggtgcag

SEQ ID NO: 31159 - RNA, 19 nt, synthetic construct
  source 1..19: mol_type = other RNA
cagtccaggtacaccatgg

SEQ ID NO: 31160 - RNA, 19 nt, synthetic construct
  source 1..19: mol_type = other RNA
ggtggcctcgttgtgcaca

SEQ ID NO: 31161 - RNA, 19 nt, synthetic construct
  source 1..19: mol_type = other RNA
gttcctgcaggtgcaggtg

SEQ ID NO: 31162 - RNA, 19 nt, synthetic construct
  source 1..19: mol_type = other RNA
gcggaaggtcccgtgggtg

SEQ ID NO: 31163 - RNA, 19 nt, synthetic construct
  source 1..19: mol_type = other RNA
caggggtccttgggtgcca

SEQ ID NO: 31164 - RNA, 19 nt, synthetic construct
  source 1..19: mol_type = other RNA
tcttgaagacgccctcctg

SEQ ID NO: 31165 - RNA, 19 nt, synthetic construct
  source 1..19: mol_type = other RNA
tccctggaagggctgagcg

SEQ ID NO: 31166 - RNA, 19 nt, synthetic construct
  source 1..19: mol_type = other RNA
cgtccctggaagggctgag

SEQ ID NO: 31167 - RNA, 19 nt, synthetic construct
  source 1..19: mol_type = other RNA
ttggggccagcgtgggtgg

SEQ ID NO: 31168 - RNA, 19 nt, synthetic construct
  source 1..19: mol_type = other RNA
tggccgtggatccagtgga

SEQ ID NO: 31169 - RNA, 19 nt, synthetic construct
  source 1..19: mol_type = other RNA
ggagtggctttggagctgg

SEQ ID NO: 31170 - RNA, 19 nt, synthetic construct
  source 1..19: mol_type = other RNA
caggtggtgcccagggagg

SEQ ID NO: 31171 - RNA, 19 nt, synthetic construct
  source 1..19: mol_type = other RNA
gtccccgggatggaggagg

SEQ ID NO: 31172 - RNA, 19 nt, synthetic construct
  source 1..19: mol_type = other RNA
gggcagaggagggagtcac

SEQ ID NO: 31173 - RNA, 19 nt, synthetic construct
  source 1..19: mol_type = other RNA
tggaaggctctgtgatgtg

SEQ ID NO: 31174 - RNA, 19 nt, synthetic construct
  source 1..19: mol_type = other RNA
gggctggaaagggctggag

SEQ ID NO: 31175 - RNA, 19 nt, synthetic construct
  source 1..19: mol_type = other RNA
ggcccctccggccgcacgg

SEQ ID NO: 31176 - RNA, 19 nt, synthetic construct
  source 1..19: mol_type = other RNA
tggccgtggatccagtgga

SEQ ID NO: 31177 - RNA, 19 nt, synthetic construct
  source 1..19: mol_type = other RNA
ggagtggctttggagctgg

SEQ ID NO: 31178 - RNA, 19 nt, synthetic construct
  source 1..19: mol_type = other RNA
tggagaagggagtggcttt

SEQ ID NO: 31179 - RNA, 19 nt, synthetic construct
  source 1..19: mol_type = other RNA
caggtggtgcccagggagg

SEQ ID NO: 31180 - RNA, 19 nt, synthetic construct
  source 1..19: mol_type = other RNA
gtccccgggatggaggagg

SEQ ID NO: 31181 - RNA, 19 nt, synthetic construct
  source 1..19: mol_type = other RNA
gggcagaggagggagtcac

SEQ ID NO: 31182 - RNA, 19 nt, synthetic construct
  source 1..19: mol_type = other RNA
tggaaggctctgtgatgtg

SEQ ID NO: 31183 - RNA, 19 nt, synthetic construct
  source 1..19: mol_type = other RNA
cctggaggtggccctggtg

SEQ ID NO: 31184 - RNA, 19 nt, synthetic construct
  source 1..19: mol_type = other RNA
ggcccctccggccgcacgg

SEQ ID NO: 31185 - RNA, 19 nt, synthetic construct
  source 1..19: mol_type = other RNA
ccctggttgtggtggtcgt

SEQ ID NO: 31186 - RNA, 19 nt, synthetic construct
  source 1..19: mol_type = other RNA
gtccccgggatggaggagg

SEQ ID NO: 31187 - RNA, 19 nt, synthetic construct
  source 1..19: mol_type = other RNA
gggcagaggagggagtcac

SEQ ID NO: 31188 - RNA, 19 nt, synthetic construct
  source 1..19: mol_type = other RNA
tggaaggctctgtgatgtg

SEQ ID NO: 31189 - RNA, 19 nt, synthetic construct
  source 1..19: mol_type = other RNA
tgcccctccggccgcacgg

SEQ ID NO: 31190 - RNA, 19 nt, synthetic construct
  source 1..19: mol_type = other RNA
tggccgtggatccagtgga

SEQ ID NO: 31191 - RNA, 19 nt, synthetic construct
  source 1..19: mol_type = other RNA
ggagtggctttggagctgg

SEQ ID NO: 31192 - RNA, 19 nt, synthetic construct
  source 1..19: mol_type = other RNA
tggagaagggagtggcttt

SEQ ID NO: 31193 - RNA, 19 nt, synthetic construct
  source 1..19: mol_type = other RNA
caggtggtgcccagggagg

SEQ ID NO: 31194 - RNA, 19 nt, synthetic construct
  source 1..19: mol_type = other RNA
gagctgttcctggggtgga

SEQ ID NO: 31195 - RNA, 19 nt, synthetic construct
  source 1..19: mol_type = other RNA
gggcagaggagggagtcac

SEQ ID NO: 31196 - RNA, 19 nt, synthetic construct
  source 1..19: mol_type = other RNA
tggaaggctctgtgatgtg

SEQ ID NO: 31197 - RNA, 19 nt, synthetic construct
  source 1..19: mol_type = other RNA
ggcccctccggccgcacgg

SEQ ID NO: 31198 - RNA, 19 nt, synthetic construct
  source 1..19: mol_type = other RNA
tggccgtggatccagtgga

SEQ ID NO: 31199 - RNA, 19 nt, synthetic construct
  source 1..19: mol_type = other RNA
ggagtggctttggagctgg

SEQ ID NO: 31200 - RNA, 19 nt, synthetic construct
  source 1..19: mol_type = other RNA
caggtggtgcccagggagg

SEQ ID NO: 31201 - RNA, 19 nt, synthetic construct
  source 1..19: mol_type = other RNA
gtccccgggatggaggagg

SEQ ID NO: 31202 - RNA, 19 nt, synthetic construct
  source 1..19: mol_type = other RNA
gaagtggctttggagctgg

SEQ ID NO: 31203 - RNA, 19 nt, synthetic construct
  source 1..19: mol_type = other RNA
tgttgtggtcagctcagtg

SEQ ID NO: 31204 - RNA, 19 nt, synthetic construct
  source 1..19: mol_type = other RNA
tggctgttgtggtcagctc

SEQ ID NO: 31205 - RNA, 19 nt, synthetic construct
  source 1..19: mol_type = other RNA
ggaggcggtggccgtggaa

SEQ ID NO: 31206 - RNA, 19 nt, synthetic construct
  source 1..19: mol_type = other RNA
catagtggccatggtggtc

SEQ ID NO: 31207 - RNA, 19 nt, synthetic construct
  source 1..19: mol_type = other RNA
tgcgggtggtccccacggt

SEQ ID NO: 31208 - RNA, 19 nt, synthetic construct
  source 1..19: mol_type = other RNA
aggtctcattcacctgccg

SEQ ID NO: 31209 - RNA, 19 nt, synthetic construct
  source 1..19: mol_type = other RNA
tgctgagggcgcgggggca

SEQ ID NO: 31210 - RNA, 19 nt, synthetic construct
  source 1..19: mol_type = other RNA
caggatcaggccctcctcc

SEQ ID NO: 31211 - RNA, 19 nt, synthetic construct
  source 1..19: mol_type = other RNA
gggcagccgggcctggaag

SEQ ID NO: 31212 - RNA, 19 nt, synthetic construct
  source 1..19: mol_type = other RNA
ggggctggcagtggggggt

SEQ ID NO: 31213 - RNA, 19 nt, synthetic construct
  source 1..19: mol_type = other RNA
ccctccgccatcccctcca

SEQ ID NO: 31214 - RNA, 19 nt, synthetic construct
  source 1..19: mol_type = other RNA
cacgcaggggcaggcctgc

SEQ ID NO: 31215 - RNA, 19 nt, synthetic construct
  source 1..19: mol_type = other RNA
gtcccacgcaggggcaggc

SEQ ID NO: 31216 - RNA, 19 nt, synthetic construct
  source 1..19: mol_type = other RNA
ttgttgcaggcatcctcct

SEQ ID NO: 31217 - RNA, 19 nt, synthetic construct
  source 1..19: mol_type = other RNA
attgttgcaggcatcctcc

SEQ ID NO: 31218 - RNA, 19 nt, synthetic construct
  source 1..19: mol_type = other RNA
ggggtgactcggtggttct

SEQ ID NO: 31219 - RNA, 19 nt, synthetic construct
  source 1..19: mol_type = other RNA
aacaccagcgtccggcacg

SEQ ID NO: 31220 - RNA, 19 nt, synthetic construct
  source 1..19: mol_type = other RNA
ggcgtatttgggatccagc

SEQ ID NO: 31221 - RNA, 19 nt, synthetic construct
  source 1..19: mol_type = other RNA
atccatggtgtgccctgca

SEQ ID NO: 31222 - RNA, 19 nt, synthetic construct
  source 1..19: mol_type = other RNA
cgtggcaggcctgggcgta

SEQ ID NO: 31223 - RNA, 19 nt, synthetic construct
  source 1..19: mol_type = other RNA
ctcagcatcagatcacaga

SEQ ID NO: 31224 - RNA, 19 nt, synthetic construct
  source 1..19: mol_type = other RNA
agtgggggacccaggcggt

SEQ ID NO: 31225 - RNA, 19 nt, synthetic construct
  source 1..19: mol_type = other RNA
ctgagaggtggacagctcg

SEQ ID NO: 31226 - RNA, 19 nt, synthetic construct
  source 1..19: mol_type = other RNA
aggactcctgagtggcgcc

SEQ ID NO: 31227 - RNA, 19 nt, synthetic construct
  source 1..19: mol_type = other RNA
ggtggggggacggggacgg

SEQ ID NO: 31228 - RNA, 19 nt, synthetic construct
  source 1..19: mol_type = other RNA
ccggccggcaagggcagcg

SEQ ID NO: 31229 - RNA, 19 nt, synthetic construct
  source 1..19: mol_type = other RNA
gccggccggcaagggcagc

SEQ ID NO: 31230 - RNA, 19 nt, synthetic construct
  source 1..19: mol_type = other RNA
ggccgcacttccgcagctc

SEQ ID NO: 31231 - RNA, 19 nt, synthetic construct
  source 1..19: mol_type = other RNA
actcgcagtcgccacccga

SEQ ID NO: 31232 - RNA, 19 nt, synthetic construct
  source 1..19: mol_type = other RNA
acactcgcagtcgccaccc

SEQ ID NO: 31233 - RNA, 19 nt, synthetic construct
  source 1..19: mol_type = other RNA
ataggcgggtccaggtggt

SEQ ID NO: 31234 - RNA, 19 nt, synthetic construct
  source 1..19: mol_type = other RNA
gagtgccgtccctgggctg

SEQ ID NO: 31235 - RNA, 19 nt, synthetic construct
  source 1..19: mol_type = other RNA
cctagggcagaggagggag

SEQ ID NO: 31236 - RNA, 19 nt, synthetic construct
  source 1..19: mol_type = other RNA
gtgtggcccggggtggtcg

SEQ ID NO: 31237 - RNA, 19 nt, synthetic construct
  source 1..19: mol_type = other RNA
ataggcgggtccaggtggt

SEQ ID NO: 31238 - RNA, 19 nt, synthetic construct
  source 1..19: mol_type = other RNA
cctagggcagaggagggag

SEQ ID NO: 31239 - RNA, 19 nt, synthetic construct
  source 1..19: mol_type = other RNA
ggggactgctgggggacag

SEQ ID NO: 31240 - RNA, 19 nt, synthetic construct
  source 1..19: mol_type = other RNA
gtgtggcccggggtggtcg

SEQ ID NO: 31241 - RNA, 19 nt, synthetic construct
  source 1..19: mol_type = other RNA
attgtggacatggtggcca

SEQ ID NO: 31242 - RNA, 19 nt, synthetic construct
  source 1..19: mol_type = other RNA
gagtgccgtccctgggctg

SEQ ID NO: 31243 - RNA, 19 nt, synthetic construct
  source 1..19: mol_type = other RNA
cctagggcagaggagggag

SEQ ID NO: 31244 - RNA, 19 nt, synthetic construct
  source 1..19: mol_type = other RNA
gtgtggcccggggtggtcg

SEQ ID NO: 31245 - RNA, 19 nt, synthetic construct
  source 1..19: mol_type = other RNA
ataggcgggtccaggtggt

SEQ ID NO: 31246 - RNA, 19 nt, synthetic construct
  source 1..19: mol_type = other RNA
gacggaggagggggtcacc

SEQ ID NO: 31247 - RNA, 19 nt, synthetic construct
  source 1..19: mol_type = other RNA
gccgtggtgatcagtgatg

SEQ ID NO: 31248 - RNA, 19 nt, synthetic construct
  source 1..19: mol_type = other RNA
cctagggcagaggagggag

SEQ ID NO: 31249 - RNA, 19 nt, synthetic construct
  source 1..19: mol_type = other RNA
ggggactgctgggggacag

SEQ ID NO: 31250 - RNA, 19 nt, synthetic construct
  source 1..19: mol_type = other RNA
gtgtggcccggggtggtcg

SEQ ID NO: 31251 - RNA, 19 nt, synthetic construct
  source 1..19: mol_type = other RNA
ataggcgggtccaggtggt

SEQ ID NO: 31252 - RNA, 19 nt, synthetic construct
  source 1..19: mol_type = other RNA
gagtgccgtccctgggctg

SEQ ID NO: 31253 - RNA, 19 nt, synthetic construct
  source 1..19: mol_type = other RNA
cacacaggccggggggctc

SEQ ID NO: 31254 - RNA, 19 nt, synthetic construct
  source 1..19: mol_type = other RNA
ggaccagcctgtctgcccc

SEQ ID NO: 31255 - RNA, 19 nt, synthetic construct
  source 1..19: mol_type = other RNA
ggtggtaagcactgtggag

SEQ ID NO: 31256 - RNA, 19 nt, synthetic construct
  source 1..19: mol_type = other RNA
ggtggtaagcactgtggag

SEQ ID NO: 31257 - RNA, 19 nt, synthetic construct
  source 1..19: mol_type = other RNA
ggtggtaagcactgtggag

SEQ ID NO: 31258 - RNA, 19 nt, synthetic construct
  source 1..19: mol_type = other RNA
ttctcagacagcagtggcc

SEQ ID NO: 31259 - RNA, 19 nt, synthetic construct
  source 1..19: mol_type = other RNA
aagcaggcgccaagcccat

SEQ ID NO: 31260 - RNA, 19 nt, synthetic construct
  source 1..19: mol_type = other RNA
ggccatgggtgtggtggtc

SEQ ID NO: 31261 - RNA, 19 nt, synthetic construct
  source 1..19: mol_type = other RNA
gacaccggggctgcggggc

SEQ ID NO: 31262 - RNA, 19 nt, synthetic construct
  source 1..19: mol_type = other RNA
gctgtgcttgtcagcactg

SEQ ID NO: 31263 - RNA, 19 nt, synthetic construct
  source 1..19: mol_type = other RNA
gctgtgcttgtcagcactg

SEQ ID NO: 31264 - RNA, 19 nt, synthetic construct
  source 1..19: mol_type = other RNA
gctgtgcttgtcagcactg

SEQ ID NO: 31265 - RNA, 19 nt, synthetic construct
  source 1..19: mol_type = other RNA
tcagcctggcgttgtgggc

SEQ ID NO: 31266 - RNA, 19 nt, synthetic construct
  source 1..19: mol_type = other RNA
gtggtggccatggtgttcg

SEQ ID NO: 31267 - RNA, 19 nt, synthetic construct
  source 1..19: mol_type = other RNA
ggccagtggctgcagttgt

SEQ ID NO: 31268 - RNA, 19 nt, synthetic construct
  source 1..19: mol_type = other RNA
ggccagtggctgcagttgt

SEQ ID NO: 31269 - RNA, 19 nt, synthetic construct
  source 1..19: mol_type = other RNA
gtgatgttgacctcggtct

SEQ ID NO: 31270 - RNA, 19 nt, synthetic construct
  source 1..19: mol_type = other RNA
aggaggcccaaggttttca

SEQ ID NO: 31271 - RNA, 19 nt, synthetic construct
  source 1..19: mol_type = other RNA
cggcaatgcagcccccact

SEQ ID NO: 31272 - RNA, 19 nt, synthetic construct
  source 1..19: mol_type = other RNA
tgtggctgtggacatggtg

SEQ ID NO: 31273 - RNA, 19 nt, synthetic construct
  source 1..19: mol_type = other RNA
tgtggctgtggacatggtg

SEQ ID NO: 31274 - RNA, 19 nt, synthetic construct
  source 1..19: mol_type = other RNA
tgggggtgtgggtggtccc

SEQ ID NO: 31275 - RNA, 19 nt, synthetic construct
  source 1..19: mol_type = other RNA
ccgtggggccagtggctgc

SEQ ID NO: 31276 - RNA, 19 nt, synthetic construct
  source 1..19: mol_type = other RNA
tgtggctgtggacatggtg

SEQ ID NO: 31277 - RNA, 19 nt, synthetic construct
  source 1..19: mol_type = other RNA
gggggcagggaccgcccgt

SEQ ID NO: 31278 - RNA, 19 nt, synthetic construct
  source 1..19: mol_type = other RNA
ggggggcagggaccgcccg

SEQ ID NO: 31279 - RNA, 19 nt, synthetic construct
  source 1..19: mol_type = other RNA
tgtggctgtggacatggtg

SEQ ID NO: 31280 - RNA, 19 nt, synthetic construct
  source 1..19: mol_type = other RNA
tgggggtgtgggtggtccc

SEQ ID NO: 31281 - RNA, 19 nt, synthetic construct
  source 1..19: mol_type = other RNA
ccgtggggccagtggctgc

SEQ ID NO: 31282 - RNA, 19 nt, synthetic construct
  source 1..19: mol_type = other RNA
tgtggctgtggacatggtg

SEQ ID NO: 31283 - RNA, 19 nt, synthetic construct
  source 1..19: mol_type = other RNA
agtggctgtgggcatagtg

SEQ ID NO: 31284 - RNA, 19 nt, synthetic construct
  source 1..19: mol_type = other RNA
gcactgcaggggtgcgggt

SEQ ID NO: 31285 - RNA, 19 nt, synthetic construct
  source 1..19: mol_type = other RNA
agctcagccagcacggtga

SEQ ID NO: 31286 - RNA, 19 nt, synthetic construct
  source 1..19: mol_type = other RNA
gaggtgcgggtcttgctgg

SEQ ID NO: 31287 - RNA, 19 nt, synthetic construct
  source 1..19: mol_type = other RNA
gaggtgcgggtcttgctgg

SEQ ID NO: 31288 - RNA, 19 nt, synthetic construct
  source 1..19: mol_type = other RNA
gaggtgcgggtcttgctgg

SEQ ID NO: 31289 - RNA, 19 nt, synthetic construct
  source 1..19: mol_type = other RNA
gaggtgcgggtcttgctgg

SEQ ID NO: 31290 - RNA, 19 nt, synthetic construct
  source 1..19: mol_type = other RNA
tcaatgtcacagtgctgat

SEQ ID NO: 31291 - RNA, 19 nt, synthetic construct
  source 1..19: mol_type = other RNA
agcacagacacaagcacgc

SEQ ID NO: 31292 - RNA, 19 nt, synthetic construct
  source 1..19: mol_type = other RNA
cggccggcaagggcagcgg

SEQ ID NO: 31293 - RNA, 19 nt, synthetic construct
  source 1..19: mol_type = other RNA
gtgccactcacagccccca

SEQ ID NO: 31294 - RNA, 19 nt, synthetic construct
  source 1..19: mol_type = other RNA
ccacctgctcacggttcct

SEQ ID NO: 31295 - RNA, 19 nt, synthetic construct
  source 1..19: mol_type = other RNA
ccacctgctcacggttcct

SEQ ID NO: 31296 - RNA, 19 nt, synthetic construct
  source 1..19: mol_type = other RNA
ccacctgctcacggttcct

SEQ ID NO: 31297 - RNA, 19 nt, synthetic construct
  source 1..19: mol_type = other RNA
ccacctgctcacggttcct

SEQ ID NO: 31298 - RNA, 19 nt, synthetic construct
  source 1..19: mol_type = other RNA
catggtggccacgggtgtg

SEQ ID NO: 31299 - RNA, 19 nt, synthetic construct
  source 1..19: mol_type = other RNA
ggatgctgaccttgatgta

SEQ ID NO: 31300 - RNA, 19 nt, synthetic construct
  source 1..19: mol_type = other RNA
gggggttggagcaggtgtc

SEQ ID NO: 31301 - RNA, 19 nt, synthetic construct
  source 1..19: mol_type = other RNA
agcgctgggacttggggca

SEQ ID NO: 31302 - RNA, 19 nt, synthetic construct
  source 1..19: mol_type = other RNA
tgcagccgtccacaggcac

SEQ ID NO: 31303 - RNA, 19 nt, synthetic construct
  source 1..19: mol_type = other RNA
gcaatgcagcccccactcc

SEQ ID NO: 31304 - RNA, 19 nt, synthetic construct
  source 1..19: mol_type = other RNA
cgtccgggcaggaggggga

SEQ ID NO: 31305 - RNA, 19 nt, synthetic construct
  source 1..19: mol_type = other RNA
ctccgcctcccaggccggg

SEQ ID NO: 31306 - RNA, 19 nt, synthetic construct
  source 1..19: mol_type = other RNA
tgtgaggggcgccatgtgc

SEQ ID NO: 31307 - RNA, 19 nt, synthetic construct
  source 1..19: mol_type = other RNA
gaggagggagtggctttgg

SEQ ID NO: 31308 - RNA, 19 nt, synthetic construct
  source 1..19: mol_type = other RNA
tggccacagagccggtggc

SEQ ID NO: 31309 - RNA, 19 nt, synthetic construct
  source 1..19: mol_type = other RNA
tggaggagggggtcaccgt

SEQ ID NO: 31310 - RNA, 19 nt, synthetic construct
  source 1..19: mol_type = other RNA
cactgggggtgtgtgggtg

SEQ ID NO: 31311 - RNA, 19 nt, synthetic construct
  source 1..19: mol_type = other RNA
cacactggggctcacagcc

SEQ ID NO: 31312 - RNA, 19 nt, synthetic construct
  source 1..19: mol_type = other RNA
tggccacagagccggtggc

SEQ ID NO: 31313 - RNA, 19 nt, synthetic construct
  source 1..19: mol_type = other RNA
tggaggagggggtcaccgt

SEQ ID NO: 31314 - RNA, 19 nt, synthetic construct
  source 1..19: mol_type = other RNA
cactgggggtgtgtgggtg

SEQ ID NO: 31315 - RNA, 19 nt, synthetic construct
  source 1..19: mol_type = other RNA
cacactggggctcacagcc

SEQ ID NO: 31316 - RNA, 19 nt, synthetic construct
  source 1..19: mol_type = other RNA
agtggctttggaactggtg

SEQ ID NO: 31317 - RNA, 19 nt, synthetic construct
  source 1..19: mol_type = other RNA
aggaggaagtggctttgga

SEQ ID NO: 31318 - RNA, 19 nt, synthetic construct
  source 1..19: mol_type = other RNA
ttgtcagcactggaagggt

SEQ ID NO: 31319 - RNA, 19 nt, synthetic construct
  source 1..19: mol_type = other RNA
ctgctgtggtcagctctgt

SEQ ID NO: 31320 - RNA, 19 nt, synthetic construct
  source 1..19: mol_type = other RNA
gctgctgtggtcagctctg

SEQ ID NO: 31321 - RNA, 19 nt, synthetic construct
  source 1..19: mol_type = other RNA
ggctgctgtggtcagctct

SEQ ID NO: 31322 - RNA, 19 nt, synthetic construct
  source 1..19: mol_type = other RNA
gtggggccagtggctgcag

SEQ ID NO: 31323 - RNA, 19 nt, synthetic construct
  source 1..19: mol_type = other RNA
gctgatgactgtgggtgtg

SEQ ID NO: 31324 - RNA, 19 nt, synthetic construct
  source 1..19: mol_type = other RNA
tggccacagagccggtggc

SEQ ID NO: 31325 - RNA, 19 nt, synthetic construct
  source 1..19: mol_type = other RNA
tggaggagggggtcaccgt

SEQ ID NO: 31326 - RNA, 19 nt, synthetic construct
  source 1..19: mol_type = other RNA
cactgggggtgtgtgggtg

SEQ ID NO: 31327 - RNA, 19 nt, synthetic construct
  source 1..19: mol_type = other RNA
gtcttgctgggtgtggctg

SEQ ID NO: 31328 - RNA, 19 nt, synthetic construct
  source 1..19: mol_type = other RNA
tggccacagagccggtggc

SEQ ID NO: 31329 - RNA, 19 nt, synthetic construct
  source 1..19: mol_type = other RNA
ccactggttgtgggtgtgg

SEQ ID NO: 31330 - RNA, 19 nt, synthetic construct
  source 1..19: mol_type = other RNA
cggaggagggggtcaccgt

SEQ ID NO: 31331 - RNA, 19 nt, synthetic construct
  source 1..19: mol_type = other RNA
cactgggggtgtgtgggtg

SEQ ID NO: 31332 - RNA, 19 nt, synthetic construct
  source 1..19: mol_type = other RNA
agtggctttggaactggtg

SEQ ID NO: 31333 - RNA, 19 nt, synthetic construct
  source 1..19: mol_type = other RNA
aggaggaagtggctttgga

SEQ ID NO: 31334 - RNA, 19 nt, synthetic construct
  source 1..19: mol_type = other RNA
ttgtcagcactggaagggt

SEQ ID NO: 31335 - RNA, 19 nt, synthetic construct
  source 1..19: mol_type = other RNA
ctgctgtggtcagctctgt

SEQ ID NO: 31336 - RNA, 19 nt, synthetic construct
  source 1..19: mol_type = other RNA
gctgctgtggtcagctctg

SEQ ID NO: 31337 - RNA, 19 nt, synthetic construct
  source 1..19: mol_type = other RNA
ggctgctgtggtcagctct

SEQ ID NO: 31338 - RNA, 19 nt, synthetic construct
  source 1..19: mol_type = other RNA
gtggggccagtggctgcag

SEQ ID NO: 31339 - RNA, 19 nt, synthetic construct
  source 1..19: mol_type = other RNA
gaggagggagtggctttgg

SEQ ID NO: 31340 - RNA, 19 nt, synthetic construct
  source 1..19: mol_type = other RNA
tggccacagagccggtggc

SEQ ID NO: 31341 - RNA, 19 nt, synthetic construct
  source 1..19: mol_type = other RNA
ccactggttgtgggtgtgg

SEQ ID NO: 31342 - RNA, 19 nt, synthetic construct
  source 1..19: mol_type = other RNA
tggaggagggggtcaccgt

SEQ ID NO: 31343 - RNA, 19 nt, synthetic construct
  source 1..19: mol_type = other RNA
aggaagtggctttggagct

SEQ ID NO: 31344 - RNA, 19 nt, synthetic construct
  source 1..19: mol_type = other RNA
aggaggaagtggctttgga

SEQ ID NO: 31345 - RNA, 19 nt, synthetic construct
  source 1..19: mol_type = other RNA
ttgtcagcactggaagggt

SEQ ID NO: 31346 - RNA, 19 nt, synthetic construct
  source 1..19: mol_type = other RNA
tggatccagtggctgcagt

SEQ ID NO: 31347 - RNA, 19 nt, synthetic construct
  source 1..19: mol_type = other RNA
gtgggtctcagggtggtga

SEQ ID NO: 31348 - RNA, 19 nt, synthetic construct
  source 1..19: mol_type = other RNA
gtcaatgtcacagtgctga

SEQ ID NO: 31349 - RNA, 19 nt, synthetic construct
  source 1..19: mol_type = other RNA
gctggcagtggggggtgtg

SEQ ID NO: 31350 - RNA, 19 nt, synthetic construct
  source 1..19: mol_type = other RNA
cagcaaagacctggctcag

SEQ ID NO: 31351 - RNA, 19 nt, synthetic construct
  source 1..19: mol_type = other RNA
cgtctcggggcagcagggg

SEQ ID NO: 31352 - RNA, 19 nt, synthetic construct
  source 1..19: mol_type = other RNA
ccctggcgggcacacaggc

SEQ ID NO: 31353 - RNA, 19 nt, synthetic construct
  source 1..19: mol_type = other RNA
aggctgtggggtcagcaaa

SEQ ID NO: 31354 - RNA, 19 nt, synthetic construct
  source 1..19: mol_type = other RNA
cccgcctctcctggcagca

SEQ ID NO: 31355 - RNA, 19 nt, synthetic construct
  source 1..19: mol_type = other RNA
gtgcagccacactcatcca

SEQ ID NO: 31356 - RNA, 19 nt, synthetic construct
  source 1..19: mol_type = other RNA
gtgtgtgggggagccatgg

SEQ ID NO: 31357 - RNA, 19 nt, synthetic construct
  source 1..19: mol_type = other RNA
ctcagacagcagtggcctc

SEQ ID NO: 31358 - RNA, 19 nt, synthetic construct
  source 1..19: mol_type = other RNA
tctcagacagcagtggcct

SEQ ID NO: 31359 - RNA, 19 nt, synthetic construct
  source 1..19: mol_type = other RNA
ctgcgcgggcgctccggcc

SEQ ID NO: 31360 - RNA, 19 nt, synthetic construct
  source 1..19: mol_type = other RNA
ggaagtcaccccaggtgct

SEQ ID NO: 31361 - RNA, 19 nt, synthetic construct
  source 1..19: mol_type = other RNA
cagccggatgctgaccttg

SEQ ID NO: 31362 - RNA, 19 nt, synthetic construct
  source 1..19: mol_type = other RNA
ccggccccagcagggtgcg

SEQ ID NO: 31363 - RNA, 19 nt, synthetic construct
  source 1..19: mol_type = other RNA
gttgagggggcaggtccgg

SEQ ID NO: 31364 - RNA, 19 nt, synthetic construct
  source 1..19: mol_type = other RNA
tgatgtcatccagcaccgt

SEQ ID NO: 31365 - RNA, 19 nt, synthetic construct
  source 1..19: mol_type = other RNA
tgatggagtggcagcgcga

SEQ ID NO: 31366 - RNA, 19 nt, synthetic construct
  source 1..19: mol_type = other RNA
gtgcacacaggggcagtcc

SEQ ID NO: 31367 - RNA, 19 nt, synthetic construct
  source 1..19: mol_type = other RNA
tcgtggagtgggggaccca

SEQ ID NO: 31368 - RNA, 19 nt, synthetic construct
  source 1..19: mol_type = other RNA
agcgggtcgtgccctggct

SEQ ID NO: 31369 - RNA, 19 nt, synthetic construct
  source 1..19: mol_type = other RNA
ggtggctgtgcttctcagt

SEQ ID NO: 31370 - RNA, 19 nt, synthetic construct
  source 1..19: mol_type = other RNA
gggtggccacagagccggt

SEQ ID NO: 31371 - RNA, 19 nt, synthetic construct
  source 1..19: mol_type = other RNA
tagtgtgagctgttcctgg

SEQ ID NO: 31372 - RNA, 19 nt, synthetic construct
  source 1..19: mol_type = other RNA
gtcaccgtggaaggctctg

SEQ ID NO: 31373 - RNA, 19 nt, synthetic construct
  source 1..19: mol_type = other RNA
acagcccatggtcaccacc

SEQ ID NO: 31374 - RNA, 19 nt, synthetic construct
  source 1..19: mol_type = other RNA
cgtcacggtggctgtagtg

SEQ ID NO: 31375 - RNA, 19 nt, synthetic construct
  source 1..19: mol_type = other RNA
ggtggctgtgcttctcagt

SEQ ID NO: 31376 - RNA, 19 nt, synthetic construct
  source 1..19: mol_type = other RNA
gggtggccacagagccggt

SEQ ID NO: 31377 - RNA, 19 nt, synthetic construct
  source 1..19: mol_type = other RNA
tagtgtgagctgttcctgg

SEQ ID NO: 31378 - RNA, 19 nt, synthetic construct
  source 1..19: mol_type = other RNA
tgtgggtggtgcccaaggt

SEQ ID NO: 31379 - RNA, 19 nt, synthetic construct
  source 1..19: mol_type = other RNA
acagcccatggtcaccacc

SEQ ID NO: 31380 - RNA, 19 nt, synthetic construct
  source 1..19: mol_type = other RNA
tgttctgggagggtcccgg

SEQ ID NO: 31381 - RNA, 19 nt, synthetic construct
  source 1..19: mol_type = other RNA
cgtcacggtggctgtagtg

SEQ ID NO: 31382 - RNA, 19 nt, synthetic construct
  source 1..19: mol_type = other RNA
agctgatgactgtgggtgt

SEQ ID NO: 31383 - RNA, 19 nt, synthetic construct
  source 1..19: mol_type = other RNA
gagctgatgactgtgggtg

SEQ ID NO: 31384 - RNA, 19 nt, synthetic construct
  source 1..19: mol_type = other RNA
ggtggctgtgcttctcagt

SEQ ID NO: 31385 - RNA, 19 nt, synthetic construct
  source 1..19: mol_type = other RNA
gggtggccacagagccggt

SEQ ID NO: 31386 - RNA, 19 nt, synthetic construct
  source 1..19: mol_type = other RNA
tagtgtgagctgttcctgg

SEQ ID NO: 31387 - RNA, 19 nt, synthetic construct
  source 1..19: mol_type = other RNA
gtcaccgtggaaggctctg

SEQ ID NO: 31388 - RNA, 19 nt, synthetic construct
  source 1..19: mol_type = other RNA
cgtcacggtggctgtagtg

SEQ ID NO: 31389 - RNA, 19 nt, synthetic construct
  source 1..19: mol_type = other RNA
ggtggctgtgcttctcagt

SEQ ID NO: 31390 - RNA, 19 nt, synthetic construct
  source 1..19: mol_type = other RNA
gggtggccacagagccggt

SEQ ID NO: 31391 - RNA, 19 nt, synthetic construct
  source 1..19: mol_type = other RNA
ctgttcctggggtggaaga

SEQ ID NO: 31392 - RNA, 19 nt, synthetic construct
  source 1..19: mol_type = other RNA
tagtgtgagctgttcctgg

SEQ ID NO: 31393 - RNA, 19 nt, synthetic construct
  source 1..19: mol_type = other RNA
tgggtggtccccgggacgg

SEQ ID NO: 31394 - RNA, 19 nt, synthetic construct
  source 1..19: mol_type = other RNA
tgtgggtggtgcccaaggt

SEQ ID NO: 31395 - RNA, 19 nt, synthetic construct
  source 1..19: mol_type = other RNA
cgggctggtcagcactttg

SEQ ID NO: 31396 - RNA, 19 nt, synthetic construct
  source 1..19: mol_type = other RNA
tggccgggctggtcagcac

SEQ ID NO: 31397 - RNA, 19 nt, synthetic construct
  source 1..19: mol_type = other RNA
tgttctgggagggtcccgg

SEQ ID NO: 31398 - RNA, 19 nt, synthetic construct
  source 1..19: mol_type = other RNA
cgtcacggtggctgtagtg

SEQ ID NO: 31399 - RNA, 19 nt, synthetic construct
  source 1..19: mol_type = other RNA
ggtggctgtgcttctcagt

SEQ ID NO: 31400 - RNA, 19 nt, synthetic construct
  source 1..19: mol_type = other RNA
gggtggccacagagccggt

SEQ ID NO: 31401 - RNA, 19 nt, synthetic construct
  source 1..19: mol_type = other RNA
tagtgtgagctgttcctgg

SEQ ID NO: 31402 - RNA, 19 nt, synthetic construct
  source 1..19: mol_type = other RNA
attggtggcccttgtcatg

SEQ ID NO: 31403 - RNA, 19 nt, synthetic construct
  source 1..19: mol_type = other RNA
gggggtgtgagctgttccc

SEQ ID NO: 31404 - RNA, 19 nt, synthetic construct
  source 1..19: mol_type = other RNA
ccatgcaccatggtgacag

SEQ ID NO: 31405 - RNA, 19 nt, synthetic construct
  source 1..19: mol_type = other RNA
gggcttgcactgcaccgac

SEQ ID NO: 31406 - RNA, 19 nt, synthetic construct
  source 1..19: mol_type = other RNA
gggggctgaccctgggcgt

SEQ ID NO: 31407 - RNA, 19 nt, synthetic construct
  source 1..19: mol_type = other RNA
tgtggcagggaagggcgcc

SEQ ID NO: 31408 - RNA, 19 nt, synthetic construct
  source 1..19: mol_type = other RNA
acggtgcagttgtccacat

SEQ ID NO: 31409 - RNA, 19 nt, synthetic construct
  source 1..19: mol_type = other RNA
gacccgcctctcctggcag

SEQ ID NO: 31410 - RNA, 19 nt, synthetic construct
  source 1..19: mol_type = other RNA
gggtgtaggtgtgcaggat

SEQ ID NO: 31411 - RNA, 19 nt, synthetic construct
  source 1..19: mol_type = other RNA
acgggtgtgtgggggagcc

SEQ ID NO: 31412 - RNA, 19 nt, synthetic construct
  source 1..19: mol_type = other RNA
ccatcctgggggctggcac

SEQ ID NO: 31413 - RNA, 19 nt, synthetic construct
  source 1..19: mol_type = other RNA
gagatgtgggccccgccct

SEQ ID NO: 31414 - RNA, 19 nt, synthetic construct
  source 1..19: mol_type = other RNA
gcactcctgggcgggcaca

SEQ ID NO: 31415 - RNA, 19 nt, synthetic construct
  source 1..19: mol_type = other RNA
gtggctgtgcttctcagtg

SEQ ID NO: 31416 - RNA, 19 nt, synthetic construct
  source 1..19: mol_type = other RNA
gtggctgtgcttctcagtg

SEQ ID NO: 31417 - RNA, 19 nt, synthetic construct
  source 1..19: mol_type = other RNA
gtggtcctggaggtggccc

SEQ ID NO: 31418 - RNA, 19 nt, synthetic construct
  source 1..19: mol_type = other RNA
gtggctgtgcttctcagtg

SEQ ID NO: 31419 - RNA, 19 nt, synthetic construct
  source 1..19: mol_type = other RNA
ccggtggccctggttgtgg

SEQ ID NO: 31420 - RNA, 19 nt, synthetic construct
  source 1..19: mol_type = other RNA
gtggctgtgcttctcagtg

SEQ ID NO: 31421 - RNA, 19 nt, synthetic construct
  source 1..19: mol_type = other RNA
ccggtggccctggttgtgg

SEQ ID NO: 31422 - RNA, 19 nt, synthetic construct
  source 1..19: mol_type = other RNA
gtggctgtgcttctcagtg

SEQ ID NO: 31423 - RNA, 19 nt, synthetic construct
  source 1..19: mol_type = other RNA
gggaagccagtgggtctca

SEQ ID NO: 31424 - RNA, 19 nt, synthetic construct
  source 1..19: mol_type = other RNA
tggcagggaagggcgcctg

SEQ ID NO: 31425 - RNA, 19 nt, synthetic construct
  source 1..19: mol_type = other RNA
taggtgtgcaggatggctg

SEQ ID NO: 31426 - RNA, 19 nt, synthetic construct
  source 1..19: mol_type = other RNA
agtggcctcctgggccggg

SEQ ID NO: 31427 - RNA, 19 nt, synthetic construct
  source 1..19: mol_type = other RNA
gagggggagctgttctcag

SEQ ID NO: 31428 - RNA, 19 nt, synthetic construct
  source 1..19: mol_type = other RNA
tggtggttgtgctgatcca

SEQ ID NO: 31429 - RNA, 19 nt, synthetic construct
  source 1..19: mol_type = other RNA
ttggtggtggagccggtgg

SEQ ID NO: 31430 - RNA, 19 nt, synthetic construct
  source 1..19: mol_type = other RNA
tggtggttgtgctgatcca

SEQ ID NO: 31431 - RNA, 19 nt, synthetic construct
  source 1..19: mol_type = other RNA
tggaacctctggttgtggg

SEQ ID NO: 31432 - RNA, 19 nt, synthetic construct
  source 1..19: mol_type = other RNA
ttggtggtggagccggtgg

SEQ ID NO: 31433 - RNA, 19 nt, synthetic construct
  source 1..19: mol_type = other RNA
ggtggccatgggtgtggtg

SEQ ID NO: 31434 - RNA, 19 nt, synthetic construct
  source 1..19: mol_type = other RNA
tggtggccttcgtggtcag

SEQ ID NO: 31435 - RNA, 19 nt, synthetic construct
  source 1..19: mol_type = other RNA
tggtggttgtgctgatcca

SEQ ID NO: 31436 - RNA, 19 nt, synthetic construct
  source 1..19: mol_type = other RNA
ttggtggtggagccggtgg

SEQ ID NO: 31437 - RNA, 19 nt, synthetic construct
  source 1..19: mol_type = other RNA
tggtggttgtgctgatcca

SEQ ID NO: 31438 - RNA, 19 nt, synthetic construct
  source 1..19: mol_type = other RNA
ttggtggtggagccggtgg

SEQ ID NO: 31439 - RNA, 19 nt, synthetic construct
  source 1..19: mol_type = other RNA
tggtggccttcgtggtcag

SEQ ID NO: 31440 - RNA, 19 nt, synthetic construct
  source 1..19: mol_type = other RNA
tggtggttgtgctgatcca

SEQ ID NO: 31441 - RNA, 19 nt, synthetic construct
  source 1..19: mol_type = other RNA
ttggtggtggagccggtgg

SEQ ID NO: 31442 - RNA, 19 nt, synthetic construct
  source 1..19: mol_type = other RNA
gtggcagaggccgtgcagt

SEQ ID NO: 31443 - RNA, 19 nt, synthetic construct
  source 1..19: mol_type = other RNA
aggtgtgcaggatggctga

SEQ ID NO: 31444 - RNA, 19 nt, synthetic construct
  source 1..19: mol_type = other RNA
tcaatgctcagggtttatt

SEQ ID NO: 31445 - RNA, 19 nt, synthetic construct
  source 1..19: mol_type = other RNA
gggcacccatcctgggggc

SEQ ID NO: 31446 - RNA, 19 nt, synthetic construct
  source 1..19: mol_type = other RNA
ttgatgaggacggagccgt

SEQ ID NO: 31447 - RNA, 19 nt, synthetic construct
  source 1..19: mol_type = other RNA
gcggtggcagatgccctcc

SEQ ID NO: 31448 - RNA, 19 nt, synthetic construct
  source 1..19: mol_type = other RNA
acttcgggtagcagccttc

SEQ ID NO: 31449 - RNA, 19 nt, synthetic construct
  source 1..19: mol_type = other RNA
cacttcgggtagcagcctt

SEQ ID NO: 31450 - RNA, 19 nt, synthetic construct
  source 1..19: mol_type = other RNA
gtggcacgtcccctgcagt

SEQ ID NO: 31451 - RNA, 19 nt, synthetic construct
  source 1..19: mol_type = other RNA
aagggtgcttgtgtatctg

SEQ ID NO: 31452 - RNA, 19 nt, synthetic construct
  source 1..19: mol_type = other RNA
tcgtctctgtcctgggcgt

SEQ ID NO: 31453 - RNA, 19 nt, synthetic construct
  source 1..19: mol_type = other RNA
gccggtggccccagttgtg

SEQ ID NO: 31454 - RNA, 19 nt, synthetic construct
  source 1..19: mol_type = other RNA
ctgcagaccaggccaaagt

SEQ ID NO: 31455 - RNA, 19 nt, synthetic construct
  source 1..19: mol_type = other RNA
gactggagaagggagtggc

SEQ ID NO: 31456 - RNA, 19 nt, synthetic construct
  source 1..19: mol_type = other RNA
cctggagttgaggaggggt

SEQ ID NO: 31457 - RNA, 19 nt, synthetic construct
  source 1..19: mol_type = other RNA
ctgcagaccaggccaaagt

SEQ ID NO: 31458 - RNA, 19 nt, synthetic construct
  source 1..19: mol_type = other RNA
aaagctggtagctgtggat

SEQ ID NO: 31459 - RNA, 19 nt, synthetic construct
  source 1..19: mol_type = other RNA
ggtccaggcggtgcccagg

SEQ ID NO: 31460 - RNA, 19 nt, synthetic construct
  source 1..19: mol_type = other RNA
cctggagttgaggaggggt

SEQ ID NO: 31461 - RNA, 19 nt, synthetic construct
  source 1..19: mol_type = other RNA
ctgcagaccaggccaaagt

SEQ ID NO: 31462 - RNA, 19 nt, synthetic construct
  source 1..19: mol_type = other RNA
gactggagaagggagtggc

SEQ ID NO: 31463 - RNA, 19 nt, synthetic construct
  source 1..19: mol_type = other RNA
cctggagttgaggaggggt

SEQ ID NO: 31464 - RNA, 19 nt, synthetic construct
  source 1..19: mol_type = other RNA
ctgcagaccaggccaaagt

SEQ ID NO: 31465 - RNA, 19 nt, synthetic construct
  source 1..19: mol_type = other RNA
gcagttgcagtccctggac

SEQ ID NO: 31466 - RNA, 19 nt, synthetic construct
  source 1..19: mol_type = other RNA
cctggagttgaggaggggt

SEQ ID NO: 31467 - RNA, 19 nt, synthetic construct
  source 1..19: mol_type = other RNA
gtggattttgtggctgtgc

SEQ ID NO: 31468 - RNA, 19 nt, synthetic construct
  source 1..19: mol_type = other RNA
aaagctggtagctgtggat

SEQ ID NO: 31469 - RNA, 19 nt, synthetic construct
  source 1..19: mol_type = other RNA
gacggtccacgtggtccac

SEQ ID NO: 31470 - RNA, 19 nt, synthetic construct
  source 1..19: mol_type = other RNA
ttgtggacatggtggacat

SEQ ID NO: 31471 - RNA, 19 nt, synthetic construct
  source 1..19: mol_type = other RNA
tgtggccgtggaattggtg

SEQ ID NO: 31472 - RNA, 19 nt, synthetic construct
  source 1..19: mol_type = other RNA
gagccgccccacatgctgc

SEQ ID NO: 31473 - RNA, 19 nt, synthetic construct
  source 1..19: mol_type = other RNA
gtggggggacggggacggg

SEQ ID NO: 31474 - RNA, 19 nt, synthetic construct
  source 1..19: mol_type = other RNA
tcaccccaggtgctgcaca

SEQ ID NO: 31475 - RNA, 19 nt, synthetic construct
  source 1..19: mol_type = other RNA
gacgcctccagcaccagcc

SEQ ID NO: 31476 - RNA, 19 nt, synthetic construct
  source 1..19: mol_type = other RNA
cgttggacgcctccagcac

SEQ ID NO: 31477 - RNA, 19 nt, synthetic construct
  source 1..19: mol_type = other RNA
gggatccagctccagcagg

SEQ ID NO: 31478 - RNA, 19 nt, synthetic construct
  source 1..19: mol_type = other RNA
ctggagcggggtcagcctg

SEQ ID NO: 31479 - RNA, 19 nt, synthetic construct
  source 1..19: mol_type = other RNA
gatgccctcctcgtccgtg

SEQ ID NO: 31480 - RNA, 19 nt, synthetic construct
  source 1..19: mol_type = other RNA
ggcagatgccctcctcgtc

SEQ ID NO: 31481 - RNA, 19 nt, synthetic construct
  source 1..19: mol_type = other RNA
cagagctcagggcacctcc

SEQ ID NO: 31482 - RNA, 19 nt, synthetic construct
  source 1..19: mol_type = other RNA
gttggagcaggtgtccgtg

SEQ ID NO: 31483 - RNA, 19 nt, synthetic construct
  source 1..19: mol_type = other RNA
gtcctcgcagagctgcgcg

SEQ ID NO: 31484 - RNA, 19 nt, synthetic construct
  source 1..19: mol_type = other RNA
cagtggtcctcgcagagct

SEQ ID NO: 31485 - RNA, 19 nt, synthetic construct
  source 1..19: mol_type = other RNA
caaagctgttcctggcatt

SEQ ID NO: 31486 - RNA, 19 nt, synthetic construct
  source 1..19: mol_type = other RNA
tgatgatggagtggcagcg

SEQ ID NO: 31487 - RNA, 19 nt, synthetic construct
  source 1..19: mol_type = other RNA
tagcgctgggacttggggc

SEQ ID NO: 31488 - RNA, 19 nt, synthetic construct
  source 1..19: mol_type = other RNA
gcggcaagtgggctggcag

SEQ ID NO: 31489 - RNA, 19 nt, synthetic construct
  source 1..19: mol_type = other RNA
gccgtccacaggcacgaag

SEQ ID NO: 31490 - RNA, 19 nt, synthetic construct
  source 1..19: mol_type = other RNA
ccgcggggcaggtgcagcc

SEQ ID NO: 31491 - RNA, 19 nt, synthetic construct
  source 1..19: mol_type = other RNA
cccgcggggcaggtgcagc

SEQ ID NO: 31492 - RNA, 19 nt, synthetic construct
  source 1..19: mol_type = other RNA
cacctctccaggagccagc

SEQ ID NO: 31493 - RNA, 19 nt, synthetic construct
  source 1..19: mol_type = other RNA
ccacctctccaggagccag

SEQ ID NO: 31494 - RNA, 19 nt, synthetic construct
  source 1..19: mol_type = other RNA
ggtacaccatgggggctgc

SEQ ID NO: 31495 - RNA, 19 nt, synthetic construct
  source 1..19: mol_type = other RNA
ggttcctgcaggtgcaggt

SEQ ID NO: 31496 - RNA, 19 nt, synthetic construct
  source 1..19: mol_type = other RNA
cctccggttcctgcaggtg

SEQ ID NO: 31497 - RNA, 19 nt, synthetic construct
  source 1..19: mol_type = other RNA
tcgcagctgccttcaaagc

SEQ ID NO: 31498 - RNA, 19 nt, synthetic construct
  source 1..19: mol_type = other RNA
atgtactcgcagctgcctt

SEQ ID NO: 31499 - RNA, 19 nt, synthetic construct
  source 1..19: mol_type = other RNA
gtcccctcttggaggatca

SEQ ID NO: 31500 - RNA, 19 nt, synthetic construct
  source 1..19: mol_type = other RNA
gggtgggtccccacccggc

SEQ ID NO: 31501 - RNA, 19 nt, synthetic construct
  source 1..19: mol_type = other RNA
cagggcgtccgggcaggag

SEQ ID NO: 31502 - RNA, 19 nt, synthetic construct
  source 1..19: mol_type = other RNA
agtcacagaacaaggggca

SEQ ID NO: 31503 - RNA, 19 nt, synthetic construct
  source 1..19: mol_type = other RNA
tagtgccactcacagcccc

SEQ ID NO: 31504 - RNA, 19 nt, synthetic construct
  source 1..19: mol_type = other RNA
ttcgggtagcagccttcca

SEQ ID NO: 31505 - RNA, 19 nt, synthetic construct
  source 1..19: mol_type = other RNA
cttcgggtagcagccttcc

SEQ ID NO: 31506 - RNA, 19 nt, synthetic construct
  source 1..19: mol_type = other RNA
cagccttcctgatgatggt

SEQ ID NO: 31507 - RNA, 19 nt, synthetic construct
  source 1..19: mol_type = other RNA
cacagccttcctgatgatg

SEQ ID NO: 31508 - RNA, 19 nt, synthetic construct
  source 1..19: mol_type = other RNA
catgccacagccttcctga

SEQ ID NO: 31509 - RNA, 19 nt, synthetic construct
  source 1..19: mol_type = other RNA
gcggtggtgaaggtgaatg

SEQ ID NO: 31510 - RNA, 19 nt, synthetic construct
  source 1..19: mol_type = other RNA
cgcctcccaggccgggctc

SEQ ID NO: 31511 - RNA, 19 nt, synthetic construct
  source 1..19: mol_type = other RNA
agcacagggcatacctggt

SEQ ID NO: 31512 - RNA, 19 nt, synthetic construct
  source 1..19: mol_type = other RNA
tgtcagccagcacagggca

SEQ ID NO: 31513 - RNA, 19 nt, synthetic construct
  source 1..19: mol_type = other RNA
tcagcccccgcatgcggtc

SEQ ID NO: 31514 - RNA, 19 nt, synthetic construct
  source 1..19: mol_type = other RNA
ggactctgttggctgttgg

SEQ ID NO: 31515 - RNA, 19 nt, synthetic construct
  source 1..19: mol_type = other RNA
cacggggcctgagctggac

SEQ ID NO: 31516 - RNA, 19 nt, synthetic construct
  source 1..19: mol_type = other RNA
agtgccctccagcggccct

SEQ ID NO: 31517 - RNA, 19 nt, synthetic construct
  source 1..19: mol_type = other RNA
atgtccttaggctgctggc

SEQ ID NO: 31518 - RNA, 19 nt, synthetic construct
  source 1..19: mol_type = other RNA
cttctgccccacctgtgcc

SEQ ID NO: 31519 - RNA, 19 nt, synthetic construct
  source 1..19: mol_type = other RNA
agacgccctcctgctccca

SEQ ID NO: 31520 - RNA, 19 nt, synthetic construct
  source 1..19: mol_type = other RNA
ctgctgtggtgctggccgg

SEQ ID NO: 31521 - RNA, 19 nt, synthetic construct
  source 1..19: mol_type = other RNA
aagggtggatgtggccacc

SEQ ID NO: 31522 - RNA, 19 nt, synthetic construct
  source 1..19: mol_type = other RNA
gaagcggtgctggctgtgc

SEQ ID NO: 31523 - RNA, 19 nt, synthetic construct
  source 1..19: mol_type = other RNA
gtcctgggcgtgctggtct

SEQ ID NO: 31524 - RNA, 19 nt, synthetic construct
  source 1..19: mol_type = other RNA
tcgtgccctggctggtggt

SEQ ID NO: 31525 - RNA, 19 nt, synthetic construct
  source 1..19: mol_type = other RNA
gagctgttctcagggtgga

SEQ ID NO: 31526 - RNA, 19 nt, synthetic construct
  source 1..19: mol_type = other RNA
gagggagtggctttggagc

SEQ ID NO: 31527 - RNA, 19 nt, synthetic construct
  source 1..19: mol_type = other RNA
tgtgcttctcagtgctgga

SEQ ID NO: 31528 - RNA, 19 nt, synthetic construct
  source 1..19: mol_type = other RNA
ccagttgtggtggccgtgg

SEQ ID NO: 31529 - RNA, 19 nt, synthetic construct
  source 1..19: mol_type = other RNA
gtaccactggtctgtgtgc

SEQ ID NO: 31530 - RNA, 19 nt, synthetic construct
  source 1..19: mol_type = other RNA
gccgtggtggtcagtgatg

SEQ ID NO: 31531 - RNA, 19 nt, synthetic construct
  source 1..19: mol_type = other RNA
ctagggcagaggagggagt

SEQ ID NO: 31532 - RNA, 19 nt, synthetic construct
  source 1..19: mol_type = other RNA
ggactgctggggggcaggg

SEQ ID NO: 31533 - RNA, 19 nt, synthetic construct
  source 1..19: mol_type = other RNA
ctgtggtcctggaggtggc

SEQ ID NO: 31534 - RNA, 19 nt, synthetic construct
  source 1..19: mol_type = other RNA
cgtggctgtggtcctggag

SEQ ID NO: 31535 - RNA, 19 nt, synthetic construct
  source 1..19: mol_type = other RNA
gccactctgaccaggcaca

SEQ ID NO: 31536 - RNA, 19 nt, synthetic construct
  source 1..19: mol_type = other RNA
ccctggggtggaggacggg

SEQ ID NO: 31537 - RNA, 19 nt, synthetic construct
  source 1..19: mol_type = other RNA
aagggagtggctttggagc

SEQ ID NO: 31538 - RNA, 19 nt, synthetic construct
  source 1..19: mol_type = other RNA
gtccctggactggagaagg

SEQ ID NO: 31539 - RNA, 19 nt, synthetic construct
  source 1..19: mol_type = other RNA
tgtgcttctcagtgctgga

SEQ ID NO: 31540 - RNA, 19 nt, synthetic construct
  source 1..19: mol_type = other RNA
actgtggaggtgtggacag

SEQ ID NO: 31541 - RNA, 19 nt, synthetic construct
  source 1..19: mol_type = other RNA
ccggttgtggtggccgtgg

SEQ ID NO: 31542 - RNA, 19 nt, synthetic construct
  source 1..19: mol_type = other RNA
gtaccactggtctgtgtgc

SEQ ID NO: 31543 - RNA, 19 nt, synthetic construct
  source 1..19: mol_type = other RNA
gccgtggtggtcagtgatg

SEQ ID NO: 31544 - RNA, 19 nt, synthetic construct
  source 1..19: mol_type = other RNA
ttgtccctggagttgagga

SEQ ID NO: 31545 - RNA, 19 nt, synthetic construct
  source 1..19: mol_type = other RNA
ctagggcagaggagggagt

SEQ ID NO: 31546 - RNA, 19 nt, synthetic construct
  source 1..19: mol_type = other RNA
ggactgctgggggacaggg

SEQ ID NO: 31547 - RNA, 19 nt, synthetic construct
  source 1..19: mol_type = other RNA
gtggggactgctgggggac

SEQ ID NO: 31548 - RNA, 19 nt, synthetic construct
  source 1..19: mol_type = other RNA
taccggtggttgctgctgg

SEQ ID NO: 31549 - RNA, 19 nt, synthetic construct
  source 1..19: mol_type = other RNA
gccactctgaccaggcaca

SEQ ID NO: 31550 - RNA, 19 nt, synthetic construct
  source 1..19: mol_type = other RNA
gtgcttgtcagcactggaa

SEQ ID NO: 31551 - RNA, 19 nt, synthetic construct
  source 1..19: mol_type = other RNA
tcgtggtcagcactgtgga

SEQ ID NO: 31552 - RNA, 19 nt, synthetic construct
  source 1..19: mol_type = other RNA
gtccccggagtggaggagg

SEQ ID NO: 31553 - RNA, 19 nt, synthetic construct
  source 1..19: mol_type = other RNA
agttgtagtggctgctgtg

SEQ ID NO: 31554 - RNA, 19 nt, synthetic construct
  source 1..19: mol_type = other RNA
ccctggggtggaggacggg

SEQ ID NO: 31555 - RNA, 19 nt, synthetic construct
  source 1..19: mol_type = other RNA
tgtgcttctcagtgctgga

SEQ ID NO: 31556 - RNA, 19 nt, synthetic construct
  source 1..19: mol_type = other RNA
gggtccaggcggtgcccag

SEQ ID NO: 31557 - RNA, 19 nt, synthetic construct
  source 1..19: mol_type = other RNA
actgtggaggtgtggacag

SEQ ID NO: 31558 - RNA, 19 nt, synthetic construct
  source 1..19: mol_type = other RNA
gtaccactggtctgtgtgc

SEQ ID NO: 31559 - RNA, 19 nt, synthetic construct
  source 1..19: mol_type = other RNA
gccgtggtggtcagtgatg

SEQ ID NO: 31560 - RNA, 19 nt, synthetic construct
  source 1..19: mol_type = other RNA
ttgtccctggagttgagga

SEQ ID NO: 31561 - RNA, 19 nt, synthetic construct
  source 1..19: mol_type = other RNA
ctagggcagaggagggagt

SEQ ID NO: 31562 - RNA, 19 nt, synthetic construct
  source 1..19: mol_type = other RNA
ggactgctggggggcaggg

SEQ ID NO: 31563 - RNA, 19 nt, synthetic construct
  source 1..19: mol_type = other RNA
tgtggctgtggtcctggag

SEQ ID NO: 31564 - RNA, 19 nt, synthetic construct
  source 1..19: mol_type = other RNA
gccactctgaccaggcaca

SEQ ID NO: 31565 - RNA, 19 nt, synthetic construct
  source 1..19: mol_type = other RNA
ccctggggtggaggacggg

SEQ ID NO: 31566 - RNA, 19 nt, synthetic construct
  source 1..19: mol_type = other RNA
aagggagtggctttggagc

SEQ ID NO: 31567 - RNA, 19 nt, synthetic construct
  source 1..19: mol_type = other RNA
gtccctggactggagaagg

SEQ ID NO: 31568 - RNA, 19 nt, synthetic construct
  source 1..19: mol_type = other RNA
tgtgcttctcagtgctgga

SEQ ID NO: 31569 - RNA, 19 nt, synthetic construct
  source 1..19: mol_type = other RNA
cctggttgtggtggccgtg

SEQ ID NO: 31570 - RNA, 19 nt, synthetic construct
  source 1..19: mol_type = other RNA
gctggaggagggggtgact

SEQ ID NO: 31571 - RNA, 19 nt, synthetic construct
  source 1..19: mol_type = other RNA
tccccgggacggaggaggg

SEQ ID NO: 31572 - RNA, 19 nt, synthetic construct
  source 1..19: mol_type = other RNA
gtaccactggtctgtgtgc

SEQ ID NO: 31573 - RNA, 19 nt, synthetic construct
  source 1..19: mol_type = other RNA
ttgtccctggagttgagga

SEQ ID NO: 31574 - RNA, 19 nt, synthetic construct
  source 1..19: mol_type = other RNA
ctagggcagaggagggagt

SEQ ID NO: 31575 - RNA, 19 nt, synthetic construct
  source 1..19: mol_type = other RNA
ggactgctgggggacaggg

SEQ ID NO: 31576 - RNA, 19 nt, synthetic construct
  source 1..19: mol_type = other RNA
gtggggactgctgggggac

SEQ ID NO: 31577 - RNA, 19 nt, synthetic construct
  source 1..19: mol_type = other RNA
taccggtggttgctgctgg

SEQ ID NO: 31578 - RNA, 19 nt, synthetic construct
  source 1..19: mol_type = other RNA
gccactctgaccaggcaca

SEQ ID NO: 31579 - RNA, 19 nt, synthetic construct
  source 1..19: mol_type = other RNA
gtgtggtggccgggctggt

SEQ ID NO: 31580 - RNA, 19 nt, synthetic construct
  source 1..19: mol_type = other RNA
gtgcttgtcagcactggaa

SEQ ID NO: 31581 - RNA, 19 nt, synthetic construct
  source 1..19: mol_type = other RNA
tcgtggtcagcactgtgga

SEQ ID NO: 31582 - RNA, 19 nt, synthetic construct
  source 1..19: mol_type = other RNA
gtccccggagtggaggagg

SEQ ID NO: 31583 - RNA, 19 nt, synthetic construct
  source 1..19: mol_type = other RNA
agttgtagtggctgctgtg

SEQ ID NO: 31584 - RNA, 19 nt, synthetic construct
  source 1..19: mol_type = other RNA
ccctggggtggaggacggg

SEQ ID NO: 31585 - RNA, 19 nt, synthetic construct
  source 1..19: mol_type = other RNA
ccctggggtggaggacggg

SEQ ID NO: 31586 - RNA, 19 nt, synthetic construct
  source 1..19: mol_type = other RNA
gagggagtggctttggagc

SEQ ID NO: 31587 - RNA, 19 nt, synthetic construct
  source 1..19: mol_type = other RNA
tgtgcttctcagtgctgga

SEQ ID NO: 31588 - RNA, 19 nt, synthetic construct
  source 1..19: mol_type = other RNA
actgtggaggtgtggacag

SEQ ID NO: 31589 - RNA, 19 nt, synthetic construct
  source 1..19: mol_type = other RNA
ccggttgtggtggccgtgg

SEQ ID NO: 31590 - RNA, 19 nt, synthetic construct
  source 1..19: mol_type = other RNA
tgtgggtgtggtggttgtg

SEQ ID NO: 31591 - RNA, 19 nt, synthetic construct
  source 1..19: mol_type = other RNA
gtaccactggtctgtgtgc

SEQ ID NO: 31592 - RNA, 19 nt, synthetic construct
  source 1..19: mol_type = other RNA
gccgtggtggtcagtgatg

SEQ ID NO: 31593 - RNA, 19 nt, synthetic construct
  source 1..19: mol_type = other RNA
ttgtccctggagttgagga

SEQ ID NO: 31594 - RNA, 19 nt, synthetic construct
  source 1..19: mol_type = other RNA
cgtgctggtcagcactggg

SEQ ID NO: 31595 - RNA, 19 nt, synthetic construct
  source 1..19: mol_type = other RNA
ctgcgggtgtggtggccgt

SEQ ID NO: 31596 - RNA, 19 nt, synthetic construct
  source 1..19: mol_type = other RNA
gctgcgggtgtggtggccg

SEQ ID NO: 31597 - RNA, 19 nt, synthetic construct
  source 1..19: mol_type = other RNA
gtgcttgtcagcactggaa

SEQ ID NO: 31598 - RNA, 19 nt, synthetic construct
  source 1..19: mol_type = other RNA
ctggtagctgtggattttg

SEQ ID NO: 31599 - RNA, 19 nt, synthetic construct
  source 1..19: mol_type = other RNA
gtggacatgggtgtggtgg

SEQ ID NO: 31600 - RNA, 19 nt, synthetic construct
  source 1..19: mol_type = other RNA
ggacatggtggacatgggt

SEQ ID NO: 31601 - RNA, 19 nt, synthetic construct
  source 1..19: mol_type = other RNA
tgtggacatggtggacatg

SEQ ID NO: 31602 - RNA, 19 nt, synthetic construct
  source 1..19: mol_type = other RNA
tggcccttgtcatggtggc

SEQ ID NO: 31603 - RNA, 19 nt, synthetic construct
  source 1..19: mol_type = other RNA
tggccgtggaattggtggc

SEQ ID NO: 31604 - RNA, 19 nt, synthetic construct
  source 1..19: mol_type = other RNA
ccgtggaggcagtggctgt

SEQ ID NO: 31605 - RNA, 19 nt, synthetic construct
  source 1..19: mol_type = other RNA
cacgctgaaggttggcagg

SEQ ID NO: 31606 - RNA, 19 nt, synthetic construct
  source 1..19: mol_type = other RNA
cccacatgctgcagatgca

SEQ ID NO: 31607 - RNA, 19 nt, synthetic construct
  source 1..19: mol_type = other RNA
gtgcagttgccccggaagg

SEQ ID NO: 31608 - RNA, 19 nt, synthetic construct
  source 1..19: mol_type = other RNA
gtagtggatgctgagggcg

SEQ ID NO: 31609 - RNA, 19 nt, synthetic construct
  source 1..19: mol_type = other RNA
cggggcccagcagccatcc

SEQ ID NO: 31610 - RNA, 19 nt, synthetic construct
  source 1..19: mol_type = other RNA
acagagcggctgtggtggg

SEQ ID NO: 31611 - RNA, 19 nt, synthetic construct
  source 1..19: mol_type = other RNA
gcgttgaagaggatctggt

SEQ ID NO: 31612 - RNA, 19 nt, synthetic construct
  source 1..19: mol_type = other RNA
cgggggctgaccctgggcg

SEQ ID NO: 31613 - RNA, 19 nt, synthetic construct
  source 1..19: mol_type = other RNA
ttctcggcccggggcctgg

SEQ ID NO: 31614 - RNA, 19 nt, synthetic construct
  source 1..19: mol_type = other RNA
gttctcggcccggggcctg

SEQ ID NO: 31615 - RNA, 19 nt, synthetic construct
  source 1..19: mol_type = other RNA
ggactcctgccctggcggg

SEQ ID NO: 31616 - RNA, 19 nt, synthetic construct
  source 1..19: mol_type = other RNA
agtcgccctcctcctgggt

SEQ ID NO: 31617 - RNA, 19 nt, synthetic construct
  source 1..19: mol_type = other RNA
gttgcaggcatcctcctga

SEQ ID NO: 31618 - RNA, 19 nt, synthetic construct
  source 1..19: mol_type = other RNA
gcagttgtccacatggctg

SEQ ID NO: 31619 - RNA, 19 nt, synthetic construct
  source 1..19: mol_type = other RNA
catctgggcaggatgcagg

SEQ ID NO: 31620 - RNA, 19 nt, synthetic construct
  source 1..19: mol_type = other RNA
tcgcagccctggtgccaca

SEQ ID NO: 31621 - RNA, 19 nt, synthetic construct
  source 1..19: mol_type = other RNA
gcaggagccctcgcagaag

SEQ ID NO: 31622 - RNA, 19 nt, synthetic construct
  source 1..19: mol_type = other RNA
aagccacgggtgtgtgggg

SEQ ID NO: 31623 - RNA, 19 nt, synthetic construct
  source 1..19: mol_type = other RNA
cacaggccggggggctccg

SEQ ID NO: 31624 - RNA, 19 nt, synthetic construct
  source 1..19: mol_type = other RNA
cacggggtgggcagcagga

SEQ ID NO: 31625 - RNA, 19 nt, synthetic construct
  source 1..19: mol_type = other RNA
ccacggggtgggcagcagg

SEQ ID NO: 31626 - RNA, 19 nt, synthetic construct
  source 1..19: mol_type = other RNA
gcctgtctgccccagcggc

SEQ ID NO: 31627 - RNA, 19 nt, synthetic construct
  source 1..19: mol_type = other RNA
cagctggccttgcctggac

SEQ ID NO: 31628 - RNA, 19 nt, synthetic construct
  source 1..19: mol_type = other RNA
tgtcgcagcttcctggcag

SEQ ID NO: 31629 - RNA, 19 nt, synthetic construct
  source 1..19: mol_type = other RNA
ctgtcgcagcttcctggca

SEQ ID NO: 31630 - RNA, 19 nt, synthetic construct
  source 1..19: mol_type = other RNA
gcgacctcagccctgagtt

SEQ ID NO: 31631 - RNA, 19 nt, synthetic construct
  source 1..19: mol_type = other RNA
cgaggtggccgaagtccag

SEQ ID NO: 31632 - RNA, 19 nt, synthetic construct
  source 1..19: mol_type = other RNA
ggtggtgcccaagatgccc

SEQ ID NO: 31633 - RNA, 19 nt, synthetic construct
  source 1..19: mol_type = other RNA
tgttgtccctggagttgag

SEQ ID NO: 31634 - RNA, 19 nt, synthetic construct
  source 1..19: mol_type = other RNA
tgaggtggccgaagtccag

SEQ ID NO: 31635 - RNA, 19 nt, synthetic construct
  source 1..19: mol_type = other RNA
ggatccaggtcgtccctgg

SEQ ID NO: 31636 - RNA, 19 nt, synthetic construct
  source 1..19: mol_type = other RNA
atggtggccatgggtgtgg

SEQ ID NO: 31637 - RNA, 19 nt, synthetic construct
  source 1..19: mol_type = other RNA
agttgtccctggagttgag

SEQ ID NO: 31638 - RNA, 19 nt, synthetic construct
  source 1..19: mol_type = other RNA
cgaggtggccgaagtccag

SEQ ID NO: 31639 - RNA, 19 nt, synthetic construct
  source 1..19: mol_type = other RNA
ggtggtgcccaagatgccc

SEQ ID NO: 31640 - RNA, 19 nt, synthetic construct
  source 1..19: mol_type = other RNA
tgttgtccctggagttgag

SEQ ID NO: 31641 - RNA, 19 nt, synthetic construct
  source 1..19: mol_type = other RNA
tgaggtggccgaagtccag

SEQ ID NO: 31642 - RNA, 19 nt, synthetic construct
  source 1..19: mol_type = other RNA
tgttgtccctggagttgag

SEQ ID NO: 31643 - RNA, 19 nt, synthetic construct
  source 1..19: mol_type = other RNA
ctggcagttgctgacccac

SEQ ID NO: 31644 - RNA, 19 nt, synthetic construct
  source 1..19: mol_type = other RNA
gtgctggaagggcggttgc

SEQ ID NO: 31645 - RNA, 19 nt, synthetic construct
  source 1..19: mol_type = other RNA
gtgctggaagggcggttgc

SEQ ID NO: 31646 - RNA, 19 nt, synthetic construct
  source 1..19: mol_type = other RNA
cgtggtcctggaggtggcc

SEQ ID NO: 31647 - RNA, 19 nt, synthetic construct
  source 1..19: mol_type = other RNA
gtgctggaagggcggttgc

SEQ ID NO: 31648 - RNA, 19 nt, synthetic construct
  source 1..19: mol_type = other RNA
gtgctggaagggcggttgc

SEQ ID NO: 31649 - RNA, 19 nt, synthetic construct
  source 1..19: mol_type = other RNA
aggcagcctgggccttcca

SEQ ID NO: 31650 - RNA, 19 nt, synthetic construct
  source 1..19: mol_type = other RNA
ggtgagggctggacagggc

SEQ ID NO: 31651 - RNA, 19 nt, synthetic construct
  source 1..19: mol_type = other RNA
ggtgagggctggacagggc

SEQ ID NO: 31652 - RNA, 19 nt, synthetic construct
  source 1..19: mol_type = other RNA
ggtgagggctggacagggc

SEQ ID NO: 31653 - RNA, 19 nt, synthetic construct
  source 1..19: mol_type = other RNA
gccctccgccatcccctcc

SEQ ID NO: 31654 - RNA, 19 nt, synthetic construct
  source 1..19: mol_type = other RNA
gactccaccctcagcctca

SEQ ID NO: 31655 - RNA, 19 nt, synthetic construct
  source 1..19: mol_type = other RNA
agtgctcagagaacacgta

SEQ ID NO: 31656 - RNA, 19 nt, synthetic construct
  source 1..19: mol_type = other RNA
agcggggtcagcctggcgt

SEQ ID NO: 31657 - RNA, 19 nt, synthetic construct
  source 1..19: mol_type = other RNA
ccgggggcagagctcaggg

SEQ ID NO: 31658 - RNA, 19 nt, synthetic construct
  source 1..19: mol_type = other RNA
acagccttcctgatgatgg

SEQ ID NO: 31659 - RNA, 19 nt, synthetic construct
  source 1..19: mol_type = other RNA
cgtggagtgggggacccag

SEQ ID NO: 31660 - RNA, 19 nt, synthetic construct
  source 1..19: mol_type = other RNA
ctgggcgtgctggtctcgg

SEQ ID NO: 31661 - RNA, 19 nt, synthetic construct
  source 1..19: mol_type = other RNA
taggcgggtccaggtggtg

SEQ ID NO: 31662 - RNA, 19 nt, synthetic construct
  source 1..19: mol_type = other RNA
tgtggtcctggaggtggcc

SEQ ID NO: 31663 - RNA, 19 nt, synthetic construct
  source 1..19: mol_type = other RNA
gtggccgtggctgtggtcc

SEQ ID NO: 31664 - RNA, 19 nt, synthetic construct
  source 1..19: mol_type = other RNA
cacagcccatggtcaccac

SEQ ID NO: 31665 - RNA, 19 nt, synthetic construct
  source 1..19: mol_type = other RNA
ttgaacttccccacctgct

SEQ ID NO: 31666 - RNA, 19 nt, synthetic construct
  source 1..19: mol_type = other RNA
taggcgggtccaggtggtg

SEQ ID NO: 31667 - RNA, 19 nt, synthetic construct
  source 1..19: mol_type = other RNA
cacagcccatggtcaccac

SEQ ID NO: 31668 - RNA, 19 nt, synthetic construct
  source 1..19: mol_type = other RNA
ttgaacttccccacctgct

SEQ ID NO: 31669 - RNA, 19 nt, synthetic construct
  source 1..19: mol_type = other RNA
gtggccatgggtgtggtgg

SEQ ID NO: 31670 - RNA, 19 nt, synthetic construct
  source 1..19: mol_type = other RNA
gcccgggtggaggaggcgg

SEQ ID NO: 31671 - RNA, 19 nt, synthetic construct
  source 1..19: mol_type = other RNA
aggagggagtggctctgga

SEQ ID NO: 31672 - RNA, 19 nt, synthetic construct
  source 1..19: mol_type = other RNA
ttgaacttccccacctgct

SEQ ID NO: 31673 - RNA, 19 nt, synthetic construct
  source 1..19: mol_type = other RNA
taggcgggtccaggtggtg

SEQ ID NO: 31674 - RNA, 19 nt, synthetic construct
  source 1..19: mol_type = other RNA
ccgtggagccactggttgt

SEQ ID NO: 31675 - RNA, 19 nt, synthetic construct
  source 1..19: mol_type = other RNA
cccgggacggaggaggggg

SEQ ID NO: 31676 - RNA, 19 nt, synthetic construct
  source 1..19: mol_type = other RNA
ccccgggacggaggagggg

SEQ ID NO: 31677 - RNA, 19 nt, synthetic construct
  source 1..19: mol_type = other RNA
ccagggggacaccaggctg

SEQ ID NO: 31678 - RNA, 19 nt, synthetic construct
  source 1..19: mol_type = other RNA
ttgaacttccccacctgct

SEQ ID NO: 31679 - RNA, 19 nt, synthetic construct
  source 1..19: mol_type = other RNA
taggcgggtccaggtggtg

SEQ ID NO: 31680 - RNA, 19 nt, synthetic construct
  source 1..19: mol_type = other RNA
ccgtggagccactggttgt

SEQ ID NO: 31681 - RNA, 19 nt, synthetic construct
  source 1..19: mol_type = other RNA
tggctgcgggtgtggtggc

SEQ ID NO: 31682 - RNA, 19 nt, synthetic construct
  source 1..19: mol_type = other RNA
ccacagggtggaggagggg

SEQ ID NO: 31683 - RNA, 19 nt, synthetic construct
  source 1..19: mol_type = other RNA
ccttgtcatggtggctgtg

SEQ ID NO: 31684 - RNA, 19 nt, synthetic construct
  source 1..19: mol_type = other RNA
tgttcccagagtggaggag

SEQ ID NO: 31685 - RNA, 19 nt, synthetic construct
  source 1..19: mol_type = other RNA
gatcaggccctcctccttc

SEQ ID NO: 31686 - RNA, 19 nt, synthetic construct
  source 1..19: mol_type = other RNA
catggtggtggtccccagc

SEQ ID NO: 31687 - RNA, 19 nt, synthetic construct
  source 1..19: mol_type = other RNA
cgccatcccctccagctgt

SEQ ID NO: 31688 - RNA, 19 nt, synthetic construct
  source 1..19: mol_type = other RNA
cctggcactgccatagccc

SEQ ID NO: 31689 - RNA, 19 nt, synthetic construct
  source 1..19: mol_type = other RNA
cgtaggcgtagcgctggga

SEQ ID NO: 31690 - RNA, 19 nt, synthetic construct
  source 1..19: mol_type = other RNA
gttgctgcagtccaggtac

SEQ ID NO: 31691 - RNA, 19 nt, synthetic construct
  source 1..19: mol_type = other RNA
agtgctggaagggcggttg

SEQ ID NO: 31692 - RNA, 19 nt, synthetic construct
  source 1..19: mol_type = other RNA
gtagtggccgtggtggtca

SEQ ID NO: 31693 - RNA, 19 nt, synthetic construct
  source 1..19: mol_type = other RNA
gagttgaggaggggttggt

SEQ ID NO: 31694 - RNA, 19 nt, synthetic construct
  source 1..19: mol_type = other RNA
accggtggttgctgctagg

SEQ ID NO: 31695 - RNA, 19 nt, synthetic construct
  source 1..19: mol_type = other RNA
agtgctggaagggcggttg

SEQ ID NO: 31696 - RNA, 19 nt, synthetic construct
  source 1..19: mol_type = other RNA
gtagtggccgtggtggtca

SEQ ID NO: 31697 - RNA, 19 nt, synthetic construct
  source 1..19: mol_type = other RNA
gagttgaggaggggttggt

SEQ ID NO: 31698 - RNA, 19 nt, synthetic construct
  source 1..19: mol_type = other RNA
tggtggccgtggtgttcgg

SEQ ID NO: 31699 - RNA, 19 nt, synthetic construct
  source 1..19: mol_type = other RNA
gggactgctgggggacagg

SEQ ID NO: 31700 - RNA, 19 nt, synthetic construct
  source 1..19: mol_type = other RNA
ctggggtgtgggaagtccc

SEQ ID NO: 31701 - RNA, 19 nt, synthetic construct
  source 1..19: mol_type = other RNA
tgctgggctctgtgaggat

SEQ ID NO: 31702 - RNA, 19 nt, synthetic construct
  source 1..19: mol_type = other RNA
agtgctggaagggcggttg

SEQ ID NO: 31703 - RNA, 19 nt, synthetic construct
  source 1..19: mol_type = other RNA
gtagtggccgtggtggtca

SEQ ID NO: 31704 - RNA, 19 nt, synthetic construct
  source 1..19: mol_type = other RNA
gagttgaggaggggttggt

SEQ ID NO: 31705 - RNA, 19 nt, synthetic construct
  source 1..19: mol_type = other RNA
tggtggccgtggtgttcgg

SEQ ID NO: 31706 - RNA, 19 nt, synthetic construct
  source 1..19: mol_type = other RNA
agtgctggaagggcggttg

SEQ ID NO: 31707 - RNA, 19 nt, synthetic construct
  source 1..19: mol_type = other RNA
gagttgaggaggggttggt

SEQ ID NO: 31708 - RNA, 19 nt, synthetic construct
  source 1..19: mol_type = other RNA
tggtggccgtggtgttcgg

SEQ ID NO: 31709 - RNA, 19 nt, synthetic construct
  source 1..19: mol_type = other RNA
gggactgctgggggacagg

SEQ ID NO: 31710 - RNA, 19 nt, synthetic construct
  source 1..19: mol_type = other RNA
ctggggtgtgggaagtccc

SEQ ID NO: 31711 - RNA, 19 nt, synthetic construct
  source 1..19: mol_type = other RNA
gtagtggccgtggtggtca

SEQ ID NO: 31712 - RNA, 19 nt, synthetic construct
  source 1..19: mol_type = other RNA
gagttgaggaggggttggt

SEQ ID NO: 31713 - RNA, 19 nt, synthetic construct
  source 1..19: mol_type = other RNA
tgtcggggaccagccacgt

SEQ ID NO: 31714 - RNA, 19 nt, synthetic construct
  source 1..19: mol_type = other RNA
tgccagggcgtccgggcag

SEQ ID NO: 31715 - RNA, 19 nt, synthetic construct
  source 1..19: mol_type = other RNA
gcctgcacgcagatgccca

SEQ ID NO: 31716 - RNA, 19 nt, synthetic construct
  source 1..19: mol_type = other RNA
ctgggcgcaggcggccagg

SEQ ID NO: 31717 - RNA, 19 nt, synthetic construct
  source 1..19: mol_type = other RNA
ccagggcgtccgggcagga

SEQ ID NO: 31718 - RNA, 19 nt, synthetic construct
  source 1..19: mol_type = other RNA
tggctggagttccaggaca

SEQ ID NO: 31719 - RNA, 19 nt, synthetic construct
  source 1..19: mol_type = other RNA
aagctccccgtcgtccctg

SEQ ID NO: 31720 - RNA, 19 nt, synthetic construct
  source 1..19: mol_type = other RNA
actgtggcggtgtgggtgg

SEQ ID NO: 31721 - RNA, 19 nt, synthetic construct
  source 1..19: mol_type = other RNA
actgtggcggtgtgggtgg

SEQ ID NO: 31722 - RNA, 19 nt, synthetic construct
  source 1..19: mol_type = other RNA
aacgctggtagctgtggat

SEQ ID NO: 31723 - RNA, 19 nt, synthetic construct
  source 1..19: mol_type = other RNA
gcaggagcacggagcgcgg

SEQ ID NO: 31724 - RNA, 19 nt, synthetic construct
  source 1..19: mol_type = other RNA
cccagctcggctccacagg

SEQ ID NO: 31725 - RNA, 19 nt, synthetic construct
  source 1..19: mol_type = other RNA
cggtggcagatgccctcct

SEQ ID NO: 31726 - RNA, 19 nt, synthetic construct
  source 1..19: mol_type = other RNA
cctgggcgcaggcggccag

SEQ ID NO: 31727 - RNA, 19 nt, synthetic construct
  source 1..19: mol_type = other RNA
ccgtccacacagtggtcct

SEQ ID NO: 31728 - RNA, 19 nt, synthetic construct
  source 1..19: mol_type = other RNA
gagtggcaccagctgcacc

SEQ ID NO: 31729 - RNA, 19 nt, synthetic construct
  source 1..19: mol_type = other RNA
ttggaggatcagctcgtag

SEQ ID NO: 31730 - RNA, 19 nt, synthetic construct
  source 1..19: mol_type = other RNA
ccattgtaccagctggacc

SEQ ID NO: 31731 - RNA, 19 nt, synthetic construct
  source 1..19: mol_type = other RNA
ccgggctctgggcggtgcc

SEQ ID NO: 31732 - RNA, 19 nt, synthetic construct
  source 1..19: mol_type = other RNA
ggtggctgtaccaagggtg

SEQ ID NO: 31733 - RNA, 19 nt, synthetic construct
  source 1..19: mol_type = other RNA
gtcagcactggggggatgg

SEQ ID NO: 31734 - RNA, 19 nt, synthetic construct
  source 1..19: mol_type = other RNA
agtccctggactggagaag

SEQ ID NO: 31735 - RNA, 19 nt, synthetic construct
  source 1..19: mol_type = other RNA
ttggggccgatgtggggct

SEQ ID NO: 31736 - RNA, 19 nt, synthetic construct
  source 1..19: mol_type = other RNA
ggtggacatggaactggtg

SEQ ID NO: 31737 - RNA, 19 nt, synthetic construct
  source 1..19: mol_type = other RNA
ggtgccagcagttgcccgg

SEQ ID NO: 31738 - RNA, 19 nt, synthetic construct
  source 1..19: mol_type = other RNA
gtcagcactggggggatgg

SEQ ID NO: 31739 - RNA, 19 nt, synthetic construct
  source 1..19: mol_type = other RNA
agtccctggactggagaag

SEQ ID NO: 31740 - RNA, 19 nt, synthetic construct
  source 1..19: mol_type = other RNA
ggccctggttgtggtggcc

SEQ ID NO: 31741 - RNA, 19 nt, synthetic construct
  source 1..19: mol_type = other RNA
gtggctgcgggtgtggtgg

SEQ ID NO: 31742 - RNA, 19 nt, synthetic construct
  source 1..19: mol_type = other RNA
ttgtggctgtgcttgtcag

SEQ ID NO: 31743 - RNA, 19 nt, synthetic construct
  source 1..19: mol_type = other RNA
tttgtggctgtgcttgtca

SEQ ID NO: 31744 - RNA, 19 nt, synthetic construct
  source 1..19: mol_type = other RNA
tggggtggaggacagggtg

SEQ ID NO: 31745 - RNA, 19 nt, synthetic construct
  source 1..19: mol_type = other RNA
tcacctgccggagagggat

SEQ ID NO: 31746 - RNA, 19 nt, synthetic construct
  source 1..19: mol_type = other RNA
ggtggtggtccccagcaca

SEQ ID NO: 31747 - RNA, 19 nt, synthetic construct
  source 1..19: mol_type = other RNA
taggtggagatgtgggccc

SEQ ID NO: 31748 - RNA, 19 nt, synthetic construct
  source 1..19: mol_type = other RNA
tccgcagctcagccagcac

SEQ ID NO: 31749 - RNA, 19 nt, synthetic construct
  source 1..19: mol_type = other RNA
tgctgtggtgctggccggg

SEQ ID NO: 31750 - RNA, 19 nt, synthetic construct
  source 1..19: mol_type = other RNA
agaggtggacagctcgctc

SEQ ID NO: 31751 - RNA, 19 nt, synthetic construct
  source 1..19: mol_type = other RNA
gtgtggtggttgtgctgat

SEQ ID NO: 31752 - RNA, 19 nt, synthetic construct
  source 1..19: mol_type = other RNA
gaggaggggttggtggtgg

SEQ ID NO: 31753 - RNA, 19 nt, synthetic construct
  source 1..19: mol_type = other RNA
gtcgtggccgtggtgctca

SEQ ID NO: 31754 - RNA, 19 nt, synthetic construct
  source 1..19: mol_type = other RNA
tgggtgtcgtggccgtggt

SEQ ID NO: 31755 - RNA, 19 nt, synthetic construct
  source 1..19: mol_type = other RNA
gtgtggtggttgtgctgat

SEQ ID NO: 31756 - RNA, 19 nt, synthetic construct
  source 1..19: mol_type = other RNA
gaggaggggttggtggtgg

SEQ ID NO: 31757 - RNA, 19 nt, synthetic construct
  source 1..19: mol_type = other RNA
tcagcactggaagggtggt

SEQ ID NO: 31758 - RNA, 19 nt, synthetic construct
  source 1..19: mol_type = other RNA
tggtggccatgggtgtggt

SEQ ID NO: 31759 - RNA, 19 nt, synthetic construct
  source 1..19: mol_type = other RNA
tggctgtagtgctgggctc

SEQ ID NO: 31760 - RNA, 19 nt, synthetic construct
  source 1..19: mol_type = other RNA
tggccctggttgtggtggt

SEQ ID NO: 31761 - RNA, 19 nt, synthetic construct
  source 1..19: mol_type = other RNA
gtgtggtggttgtgctgat

SEQ ID NO: 31762 - RNA, 19 nt, synthetic construct
  source 1..19: mol_type = other RNA
gaggaggggttggtggtgg

SEQ ID NO: 31763 - RNA, 19 nt, synthetic construct
  source 1..19: mol_type = other RNA
gtcgtggccgtggtgctca

SEQ ID NO: 31764 - RNA, 19 nt, synthetic construct
  source 1..19: mol_type = other RNA
tgggtgtcgtggccgtggt

SEQ ID NO: 31765 - RNA, 19 nt, synthetic construct
  source 1..19: mol_type = other RNA
gtgtggtggttgtgctgat

SEQ ID NO: 31766 - RNA, 19 nt, synthetic construct
  source 1..19: mol_type = other RNA
gaggaggggttggtggtgg

SEQ ID NO: 31767 - RNA, 19 nt, synthetic construct
  source 1..19: mol_type = other RNA
tcagcactggaagggtggt

SEQ ID NO: 31768 - RNA, 19 nt, synthetic construct
  source 1..19: mol_type = other RNA
gtcgtggccgtggtgctca

SEQ ID NO: 31769 - RNA, 19 nt, synthetic construct
  source 1..19: mol_type = other RNA
tgggtgtcgtggccgtggt

SEQ ID NO: 31770 - RNA, 19 nt, synthetic construct
  source 1..19: mol_type = other RNA
aagggcagttgcagtccct

SEQ ID NO: 31771 - RNA, 19 nt, synthetic construct
  source 1..19: mol_type = other RNA
gtgtggtggttgtgctgat

SEQ ID NO: 31772 - RNA, 19 nt, synthetic construct
  source 1..19: mol_type = other RNA
gaggaggggttggtggtgg

SEQ ID NO: 31773 - RNA, 19 nt, synthetic construct
  source 1..19: mol_type = other RNA
tcagcactggaagggtggt

SEQ ID NO: 31774 - RNA, 19 nt, synthetic construct
  source 1..19: mol_type = other RNA
gtggtggtccccagcacag

SEQ ID NO: 31775 - RNA, 19 nt, synthetic construct
  source 1..19: mol_type = other RNA
aggggcaggcctgcacgca

SEQ ID NO: 31776 - RNA, 19 nt, synthetic construct
  source 1..19: mol_type = other RNA
atgtggcagggaagggcgc

SEQ ID NO: 31777 - RNA, 19 nt, synthetic construct
  source 1..19: mol_type = other RNA
gggctccgcagaggaggcc

SEQ ID NO: 31778 - RNA, 19 nt, synthetic construct
  source 1..19: mol_type = other RNA
gggggctccgcagaggagg

SEQ ID NO: 31779 - RNA, 19 nt, synthetic construct
  source 1..19: mol_type = other RNA
gtggagcctctggttgtgg

SEQ ID NO: 31780 - RNA, 19 nt, synthetic construct
  source 1..19: mol_type = other RNA
gtggagcctctggttgtgg

SEQ ID NO: 31781 - RNA, 19 nt, synthetic construct
  source 1..19: mol_type = other RNA
ggctggcacgggtgggggg

SEQ ID NO: 31782 - RNA, 19 nt, synthetic construct
  source 1..19: mol_type = other RNA
ggttgacagcgggtcgtgc

SEQ ID NO: 31783 - RNA, 19 nt, synthetic construct
  source 1..19: mol_type = other RNA
ggtggaggacggggtggcc

SEQ ID NO: 31784 - RNA, 19 nt, synthetic construct
  source 1..19: mol_type = other RNA
ggtggaggacggggtggcc

SEQ ID NO: 31785 - RNA, 19 nt, synthetic construct
  source 1..19: mol_type = other RNA
ggtggaggacggggtggcc

SEQ ID NO: 31786 - RNA, 19 nt, synthetic construct
  source 1..19: mol_type = other RNA
ggtggaggacggggtggcc

SEQ ID NO: 31787 - RNA, 19 nt, synthetic construct
  source 1..19: mol_type = other RNA
ggtggaggacggggtggcc

SEQ ID NO: 31788 - RNA, 19 nt, synthetic construct
  source 1..19: mol_type = other RNA
ggtggaggacggggtggcc

SEQ ID NO: 31789 - RNA, 19 nt, synthetic construct
  source 1..19: mol_type = other RNA
ggggtggaggacagggtgg

SEQ ID NO: 31790 - RNA, 19 nt, synthetic construct
  source 1..19: mol_type = other RNA
agctcctcccgctgcccat

SEQ ID NO: 31791 - RNA, 19 nt, synthetic construct
  source 1..19: mol_type = other RNA
gccctgcacagagcaggtg

SEQ ID NO: 31792 - RNA, 19 nt, synthetic construct
  source 1..19: mol_type = other RNA
gccagggcgtccgggcagg

SEQ ID NO: 31793 - RNA, 19 nt, synthetic construct
  source 1..19: mol_type = other RNA
accttctgccccacctgtg

SEQ ID NO: 31794 - RNA, 19 nt, synthetic construct
  source 1..19: mol_type = other RNA
gcggttgcagtccctggac

SEQ ID NO: 31795 - RNA, 19 nt, synthetic construct
  source 1..19: mol_type = other RNA
ggtgtggtggttgtgctga

SEQ ID NO: 31796 - RNA, 19 nt, synthetic construct
  source 1..19: mol_type = other RNA
gcggttgcagtccctggac

SEQ ID NO: 31797 - RNA, 19 nt, synthetic construct
  source 1..19: mol_type = other RNA
ggtgtggtggttgtgctga

SEQ ID NO: 31798 - RNA, 19 nt, synthetic construct
  source 1..19: mol_type = other RNA
gtgggtgtggtggccgtgc

SEQ ID NO: 31799 - RNA, 19 nt, synthetic construct
  source 1..19: mol_type = other RNA
gcactttgagggtgccagc

SEQ ID NO: 31800 - RNA, 19 nt, synthetic construct
  source 1..19: mol_type = other RNA
gtgggtgtggtggccgtgc

SEQ ID NO: 31801 - RNA, 19 nt, synthetic construct
  source 1..19: mol_type = other RNA
gcggttgcagtccctggac

SEQ ID NO: 31802 - RNA, 19 nt, synthetic construct
  source 1..19: mol_type = other RNA
ggtgtggtggttgtgctga

SEQ ID NO: 31803 - RNA, 19 nt, synthetic construct
  source 1..19: mol_type = other RNA
gcggttgcagtccctggac

SEQ ID NO: 31804 - RNA, 19 nt, synthetic construct
  source 1..19: mol_type = other RNA
ctggaggagggggtgactg

SEQ ID NO: 31805 - RNA, 19 nt, synthetic construct
  source 1..19: mol_type = other RNA
ggtgtggtggttgtgctga

SEQ ID NO: 31806 - RNA, 19 nt, synthetic construct
  source 1..19: mol_type = other RNA
ggtgtggtggttgtgctga

SEQ ID NO: 31807 - RNA, 19 nt, synthetic construct
  source 1..19: mol_type = other RNA
ggggtgtgagctgttccca

SEQ ID NO: 31808 - RNA, 19 nt, synthetic construct
  source 1..19: mol_type = other RNA
gcaggggagggcgaggaca

SEQ ID NO: 31809 - RNA, 19 nt, synthetic construct
  source 1..19: mol_type = other RNA
cggggaccagccacgtctt

SEQ ID NO: 31810 - RNA, 19 nt, synthetic construct
  source 1..19: mol_type = other RNA
gcccagcagccatcctttc

SEQ ID NO: 31811 - RNA, 19 nt, synthetic construct
  source 1..19: mol_type = other RNA
caggggttctcggcccggg

SEQ ID NO: 31812 - RNA, 19 nt, synthetic construct
  source 1..19: mol_type = other RNA
gggcaggtggttgtgttgc

SEQ ID NO: 31813 - RNA, 19 nt, synthetic construct
  source 1..19: mol_type = other RNA
acacacaggccggggggct

SEQ ID NO: 31814 - RNA, 19 nt, synthetic construct
  source 1..19: mol_type = other RNA
catcagggaggggcaaggc

SEQ ID NO: 31815 - RNA, 19 nt, synthetic construct
  source 1..19: mol_type = other RNA
cgctccggccgtggcaggg

SEQ ID NO: 31816 - RNA, 19 nt, synthetic construct
  source 1..19: mol_type = other RNA
cacccatcctgggggctgg

SEQ ID NO: 31817 - RNA, 19 nt, synthetic construct
  source 1..19: mol_type = other RNA
ctcggggcacccatcctgg

SEQ ID NO: 31818 - RNA, 19 nt, synthetic construct
  source 1..19: mol_type = other RNA
ctcggctccacagggccct

SEQ ID NO: 31819 - RNA, 19 nt, synthetic construct
  source 1..19: mol_type = other RNA
ctcccagctcggctccaca

SEQ ID NO: 31820 - RNA, 19 nt, synthetic construct
  source 1..19: mol_type = other RNA
cttgtagtggaagtcaccc

SEQ ID NO: 31821 - RNA, 19 nt, synthetic construct
  source 1..19: mol_type = other RNA
ggacgcctccagcaccagc

SEQ ID NO: 31822 - RNA, 19 nt, synthetic construct
  source 1..19: mol_type = other RNA
ccgctgcccattgatgagg

SEQ ID NO: 31823 - RNA, 19 nt, synthetic construct
  source 1..19: mol_type = other RNA
tggagcggggtcagcctgg

SEQ ID NO: 31824 - RNA, 19 nt, synthetic construct
  source 1..19: mol_type = other RNA
ggtcctgggcgcaggcggc

SEQ ID NO: 31825 - RNA, 19 nt, synthetic construct
  source 1..19: mol_type = other RNA
ggtggcacacgggcaggtg

SEQ ID NO: 31826 - RNA, 19 nt, synthetic construct
  source 1..19: mol_type = other RNA
ccccggagcaggtgcagga

SEQ ID NO: 31827 - RNA, 19 nt, synthetic construct
  source 1..19: mol_type = other RNA
gtgggccccgccctgcaca

SEQ ID NO: 31828 - RNA, 19 nt, synthetic construct
  source 1..19: mol_type = other RNA
gccccaggcctgtctgcac

SEQ ID NO: 31829 - RNA, 19 nt, synthetic construct
  source 1..19: mol_type = other RNA
ggcagcctgggccttccag

SEQ ID NO: 31830 - RNA, 19 nt, synthetic construct
  source 1..19: mol_type = other RNA
cgagcaccagtgccgggcg

SEQ ID NO: 31831 - RNA, 19 nt, synthetic construct
  source 1..19: mol_type = other RNA
agtggcagcgcgagaaggc

SEQ ID NO: 31832 - RNA, 19 nt, synthetic construct
  source 1..19: mol_type = other RNA
cgcggcaagtgggctggca

SEQ ID NO: 31833 - RNA, 19 nt, synthetic construct
  source 1..19: mol_type = other RNA
gccgagctgttgctgcagt

SEQ ID NO: 31834 - RNA, 19 nt, synthetic construct
  source 1..19: mol_type = other RNA
acctccggttcctgcaggt

SEQ ID NO: 31835 - RNA, 19 nt, synthetic construct
  source 1..19: mol_type = other RNA
cccaggacacggccatccc

SEQ ID NO: 31836 - RNA, 19 nt, synthetic construct
  source 1..19: mol_type = other RNA
gaaacactcgcagtcgcca

SEQ ID NO: 31837 - RNA, 19 nt, synthetic construct
  source 1..19: mol_type = other RNA
actgggtgtgcagttacag

SEQ ID NO: 31838 - RNA, 19 nt, synthetic construct
  source 1..19: mol_type = other RNA
ctcccaggccgggctctgg

SEQ ID NO: 31839 - RNA, 19 nt, synthetic construct
  source 1..19: mol_type = other RNA
ctgagggagggctgagggc

SEQ ID NO: 31840 - RNA, 19 nt, synthetic construct
  source 1..19: mol_type = other RNA
cacccatagggtggtcttt

SEQ ID NO: 31841 - RNA, 19 nt, synthetic construct
  source 1..19: mol_type = other RNA
ggtgctggccgggggagcc

SEQ ID NO: 31842 - RNA, 19 nt, synthetic construct
  source 1..19: mol_type = other RNA
gtgggtgtggtggccgtgg

SEQ ID NO: 31843 - RNA, 19 nt, synthetic construct
  source 1..19: mol_type = other RNA
ggtggccacagagccggtg

SEQ ID NO: 31844 - RNA, 19 nt, synthetic construct
  source 1..19: mol_type = other RNA
ctgttcctggggtggagga

SEQ ID NO: 31845 - RNA, 19 nt, synthetic construct
  source 1..19: mol_type = other RNA
gtagtgtgagctgttcctg

SEQ ID NO: 31846 - RNA, 19 nt, synthetic construct
  source 1..19: mol_type = other RNA
agcctctggttgtgggtgt

SEQ ID NO: 31847 - RNA, 19 nt, synthetic construct
  source 1..19: mol_type = other RNA
gtctgtgtgctagaggagg

SEQ ID NO: 31848 - RNA, 19 nt, synthetic construct
  source 1..19: mol_type = other RNA
cgtagtggccgtggtggtc

SEQ ID NO: 31849 - RNA, 19 nt, synthetic construct
  source 1..19: mol_type = other RNA
gggagtcactgtgttgctg

SEQ ID NO: 31850 - RNA, 19 nt, synthetic construct
  source 1..19: mol_type = other RNA
gtggggactgctggggggc

SEQ ID NO: 31851 - RNA, 19 nt, synthetic construct
  source 1..19: mol_type = other RNA
ctgtgatgtgggtggtgcc

SEQ ID NO: 31852 - RNA, 19 nt, synthetic construct
  source 1..19: mol_type = other RNA
ccatggtcaccaccgtggt

SEQ ID NO: 31853 - RNA, 19 nt, synthetic construct
  source 1..19: mol_type = other RNA
tcacagcccatggtcacca

SEQ ID NO: 31854 - RNA, 19 nt, synthetic construct
  source 1..19: mol_type = other RNA
tagctgtagtccagccact

SEQ ID NO: 31855 - RNA, 19 nt, synthetic construct
  source 1..19: mol_type = other RNA
ccaggccaaagtccaggct

SEQ ID NO: 31856 - RNA, 19 nt, synthetic construct
  source 1..19: mol_type = other RNA
ggtggccacagagccggtg

SEQ ID NO: 31857 - RNA, 19 nt, synthetic construct
  source 1..19: mol_type = other RNA
ctgttcctggggtggagga

SEQ ID NO: 31858 - RNA, 19 nt, synthetic construct
  source 1..19: mol_type = other RNA
gtagtgtgagctgttcctg

SEQ ID NO: 31859 - RNA, 19 nt, synthetic construct
  source 1..19: mol_type = other RNA
gtctgtgtgctagaggagg

SEQ ID NO: 31860 - RNA, 19 nt, synthetic construct
  source 1..19: mol_type = other RNA
cgtagtggccgtggtggtc

SEQ ID NO: 31861 - RNA, 19 nt, synthetic construct
  source 1..19: mol_type = other RNA
ggtggtgcccaaggtgcct

SEQ ID NO: 31862 - RNA, 19 nt, synthetic construct
  source 1..19: mol_type = other RNA
ctgtgatgtgggtggtgcc

SEQ ID NO: 31863 - RNA, 19 nt, synthetic construct
  source 1..19: mol_type = other RNA
gtggttgctgctggggtgt

SEQ ID NO: 31864 - RNA, 19 nt, synthetic construct
  source 1..19: mol_type = other RNA
ccatggtcaccaccgtggt

SEQ ID NO: 31865 - RNA, 19 nt, synthetic construct
  source 1..19: mol_type = other RNA
tcacagcccatggtcacca

SEQ ID NO: 31866 - RNA, 19 nt, synthetic construct
  source 1..19: mol_type = other RNA
tagctgtagtccagccact

SEQ ID NO: 31867 - RNA, 19 nt, synthetic construct
  source 1..19: mol_type = other RNA
ccaggccaaagtccaggct

SEQ ID NO: 31868 - RNA, 19 nt, synthetic construct
  source 1..19: mol_type = other RNA
agctgttcccggggtggag

SEQ ID NO: 31869 - RNA, 19 nt, synthetic construct
  source 1..19: mol_type = other RNA
tggccatgggtgtggtggt

SEQ ID NO: 31870 - RNA, 19 nt, synthetic construct
  source 1..19: mol_type = other RNA
tggtctccggagtggagga

SEQ ID NO: 31871 - RNA, 19 nt, synthetic construct
  source 1..19: mol_type = other RNA
gacatggaactggtggccc

SEQ ID NO: 31872 - RNA, 19 nt, synthetic construct
  source 1..19: mol_type = other RNA
ggggtggacatggaactgg

SEQ ID NO: 31873 - RNA, 19 nt, synthetic construct
  source 1..19: mol_type = other RNA
ttgtagtggctgctgtggt

SEQ ID NO: 31874 - RNA, 19 nt, synthetic construct
  source 1..19: mol_type = other RNA
gttgtagtggctgctgtgg

SEQ ID NO: 31875 - RNA, 19 nt, synthetic construct
  source 1..19: mol_type = other RNA
gcagttgtagtggctgctg

SEQ ID NO: 31876 - RNA, 19 nt, synthetic construct
  source 1..19: mol_type = other RNA
gggtgccagcagttgcccg

SEQ ID NO: 31877 - RNA, 19 nt, synthetic construct
  source 1..19: mol_type = other RNA
caggcggtgcccagggagg

SEQ ID NO: 31878 - RNA, 19 nt, synthetic construct
  source 1..19: mol_type = other RNA
ccaggcggtgcccagggag

SEQ ID NO: 31879 - RNA, 19 nt, synthetic construct
  source 1..19: mol_type = other RNA
gccctggttgtggtggtcg

SEQ ID NO: 31880 - RNA, 19 nt, synthetic construct
  source 1..19: mol_type = other RNA
ggtggccacagagccggtg

SEQ ID NO: 31881 - RNA, 19 nt, synthetic construct
  source 1..19: mol_type = other RNA
ctgttcctggggtggagga

SEQ ID NO: 31882 - RNA, 19 nt, synthetic construct
  source 1..19: mol_type = other RNA
gtagtgtgagctgttcctg

SEQ ID NO: 31883 - RNA, 19 nt, synthetic construct
  source 1..19: mol_type = other RNA
agcctctggttgtgggtgt

SEQ ID NO: 31884 - RNA, 19 nt, synthetic construct
  source 1..19: mol_type = other RNA
gtctgtgtgctagaggagg

SEQ ID NO: 31885 - RNA, 19 nt, synthetic construct
  source 1..19: mol_type = other RNA
cgtagtggccgtggtggtc

SEQ ID NO: 31886 - RNA, 19 nt, synthetic construct
  source 1..19: mol_type = other RNA
gtggggactgctggggggc

SEQ ID NO: 31887 - RNA, 19 nt, synthetic construct
  source 1..19: mol_type = other RNA
ctgtgatgtgggtggtgcc

SEQ ID NO: 31888 - RNA, 19 nt, synthetic construct
  source 1..19: mol_type = other RNA
gtggttgctgctggggtgt

SEQ ID NO: 31889 - RNA, 19 nt, synthetic construct
  source 1..19: mol_type = other RNA
tagctgtagtccagccact

SEQ ID NO: 31890 - RNA, 19 nt, synthetic construct
  source 1..19: mol_type = other RNA
ccaggccaaagtccaggct

SEQ ID NO: 31891 - RNA, 19 nt, synthetic construct
  source 1..19: mol_type = other RNA
ggtggccacagagccggtg

SEQ ID NO: 31892 - RNA, 19 nt, synthetic construct
  source 1..19: mol_type = other RNA
gtagtgtgagctgttcctg

SEQ ID NO: 31893 - RNA, 19 nt, synthetic construct
  source 1..19: mol_type = other RNA
gtctgtgtgctagaggagg

SEQ ID NO: 31894 - RNA, 19 nt, synthetic construct
  source 1..19: mol_type = other RNA
ggtggtgcccaaggtgcct

SEQ ID NO: 31895 - RNA, 19 nt, synthetic construct
  source 1..19: mol_type = other RNA
ctgtgatgtgggtggtgcc

SEQ ID NO: 31896 - RNA, 19 nt, synthetic construct
  source 1..19: mol_type = other RNA
gtggttgctgctggggtgt

SEQ ID NO: 31897 - RNA, 19 nt, synthetic construct
  source 1..19: mol_type = other RNA
cggggtggtcgtccctggg

SEQ ID NO: 31898 - RNA, 19 nt, synthetic construct
  source 1..19: mol_type = other RNA
tagctgtagtccagccact

SEQ ID NO: 31899 - RNA, 19 nt, synthetic construct
  source 1..19: mol_type = other RNA
ccaggccaaagtccaggct

SEQ ID NO: 31900 - RNA, 19 nt, synthetic construct
  source 1..19: mol_type = other RNA
agctgttcccggggtggag

SEQ ID NO: 31901 - RNA, 19 nt, synthetic construct
  source 1..19: mol_type = other RNA
tgtggtggccgggctggtc

SEQ ID NO: 31902 - RNA, 19 nt, synthetic construct
  source 1..19: mol_type = other RNA
tggtctccggagtggagga

SEQ ID NO: 31903 - RNA, 19 nt, synthetic construct
  source 1..19: mol_type = other RNA
cgtggaactggtggccctt

SEQ ID NO: 31904 - RNA, 19 nt, synthetic construct
  source 1..19: mol_type = other RNA
ggggtggacgtggaactgg

SEQ ID NO: 31905 - RNA, 19 nt, synthetic construct
  source 1..19: mol_type = other RNA
ttgtagtggctgctgtggt

SEQ ID NO: 31906 - RNA, 19 nt, synthetic construct
  source 1..19: mol_type = other RNA
gttgtagtggctgctgtgg

SEQ ID NO: 31907 - RNA, 19 nt, synthetic construct
  source 1..19: mol_type = other RNA
gcagttgtagtggctgctg

SEQ ID NO: 31908 - RNA, 19 nt, synthetic construct
  source 1..19: mol_type = other RNA
ggcagttgcagtccctgga

SEQ ID NO: 31909 - RNA, 19 nt, synthetic construct
  source 1..19: mol_type = other RNA
ggtggccacagagccggtg

SEQ ID NO: 31910 - RNA, 19 nt, synthetic construct
  source 1..19: mol_type = other RNA
ctgttcctggggtggagga

SEQ ID NO: 31911 - RNA, 19 nt, synthetic construct
  source 1..19: mol_type = other RNA
gtagtgtgagctgttcctg

SEQ ID NO: 31912 - RNA, 19 nt, synthetic construct
  source 1..19: mol_type = other RNA
gtctgtgtgctagaggagg

SEQ ID NO: 31913 - RNA, 19 nt, synthetic construct
  source 1..19: mol_type = other RNA
cgtagtggccgtggtggtc

SEQ ID NO: 31914 - RNA, 19 nt, synthetic construct
  source 1..19: mol_type = other RNA
gtcagcactggggtgatgg

SEQ ID NO: 31915 - RNA, 19 nt, synthetic construct
  source 1..19: mol_type = other RNA
gtggctttggagctggtgg

SEQ ID NO: 31916 - RNA, 19 nt, synthetic construct
  source 1..19: mol_type = other RNA
agtggctttggagctggtg

SEQ ID NO: 31917 - RNA, 19 nt, synthetic construct
  source 1..19: mol_type = other RNA
attgtggacatggtggaca

SEQ ID NO: 31918 - RNA, 19 nt, synthetic construct
  source 1..19: mol_type = other RNA
gaggtgtggattgtggaca

SEQ ID NO: 31919 - RNA, 19 nt, synthetic construct
  source 1..19: mol_type = other RNA
cgctgaaggttggcaggct

SEQ ID NO: 31920 - RNA, 19 nt, synthetic construct
  source 1..19: mol_type = other RNA
ggggagggcgaggacagcg

SEQ ID NO: 31921 - RNA, 19 nt, synthetic construct
  source 1..19: mol_type = other RNA
cgccccacatgctgcagat

SEQ ID NO: 31922 - RNA, 19 nt, synthetic construct
  source 1..19: mol_type = other RNA
atcaggccctcctccttcc

SEQ ID NO: 31923 - RNA, 19 nt, synthetic construct
  source 1..19: mol_type = other RNA
ggatcaggccctcctcctt

SEQ ID NO: 31924 - RNA, 19 nt, synthetic construct
  source 1..19: mol_type = other RNA
aggatcaggccctcctcct

SEQ ID NO: 31925 - RNA, 19 nt, synthetic construct
  source 1..19: mol_type = other RNA
aggtgacgctcacgcccag

SEQ ID NO: 31926 - RNA, 19 nt, synthetic construct
  source 1..19: mol_type = other RNA
gatctggtcctcagggcag

SEQ ID NO: 31927 - RNA, 19 nt, synthetic construct
  source 1..19: mol_type = other RNA
ggtgcagatggactcctgc

SEQ ID NO: 31928 - RNA, 19 nt, synthetic construct
  source 1..19: mol_type = other RNA
ctcctcctgggtgcagatg

SEQ ID NO: 31929 - RNA, 19 nt, synthetic construct
  source 1..19: mol_type = other RNA
agctggactggctggccat

SEQ ID NO: 31930 - RNA, 19 nt, synthetic construct
  source 1..19: mol_type = other RNA
ttcagctggactggctggc

SEQ ID NO: 31931 - RNA, 19 nt, synthetic construct
  source 1..19: mol_type = other RNA
accctcagcctcacagagg

SEQ ID NO: 31932 - RNA, 19 nt, synthetic construct
  source 1..19: mol_type = other RNA
tctcgcagccctggtgcca

SEQ ID NO: 31933 - RNA, 19 nt, synthetic construct
  source 1..19: mol_type = other RNA
tggacccgcctctcctggc

SEQ ID NO: 31934 - RNA, 19 nt, synthetic construct
  source 1..19: mol_type = other RNA
ggaggcccaaggttttcat

SEQ ID NO: 31935 - RNA, 19 nt, synthetic construct
  source 1..19: mol_type = other RNA
gctgcgcgggcgctccggc

SEQ ID NO: 31936 - RNA, 19 nt, synthetic construct
  source 1..19: mol_type = other RNA
ggggacggggacgggcagg

SEQ ID NO: 31937 - RNA, 19 nt, synthetic construct
  source 1..19: mol_type = other RNA
ggcctggagcccactaggc

SEQ ID NO: 31938 - RNA, 19 nt, synthetic construct
  source 1..19: mol_type = other RNA
aggcctggagcccactagg

SEQ ID NO: 31939 - RNA, 19 nt, synthetic construct
  source 1..19: mol_type = other RNA
caggcctggagcccactag

SEQ ID NO: 31940 - RNA, 19 nt, synthetic construct
  source 1..19: mol_type = other RNA
acaggcctggagcccacta

SEQ ID NO: 31941 - RNA, 19 nt, synthetic construct
  source 1..19: mol_type = other RNA
ccaccaggaggccagtgcg

SEQ ID NO: 31942 - RNA, 19 nt, synthetic construct
  source 1..19: mol_type = other RNA
tccaccaggaggccagtgc

SEQ ID NO: 31943 - RNA, 19 nt, synthetic construct
  source 1..19: mol_type = other RNA
tagtccccgctctgctcca

SEQ ID NO: 31944 - RNA, 19 nt, synthetic construct
  source 1..19: mol_type = other RNA
agccggatgctgaccttga

SEQ ID NO: 31945 - RNA, 19 nt, synthetic construct
  source 1..19: mol_type = other RNA
gttgaagtccccacacagg

SEQ ID NO: 31946 - RNA, 19 nt, synthetic construct
  source 1..19: mol_type = other RNA
cgttgaagtccccacacag

SEQ ID NO: 31947 - RNA, 19 nt, synthetic construct
  source 1..19: mol_type = other RNA
ggcagagctcagggcacct

SEQ ID NO: 31948 - RNA, 19 nt, synthetic construct
  source 1..19: mol_type = other RNA
ggcagaagcagccgtccac

SEQ ID NO: 31949 - RNA, 19 nt, synthetic construct
  source 1..19: mol_type = other RNA
tcctggcattggcacaggc

SEQ ID NO: 31950 - RNA, 19 nt, synthetic construct
  source 1..19: mol_type = other RNA
gatgatggagtggcagcgc

SEQ ID NO: 31951 - RNA, 19 nt, synthetic construct
  source 1..19: mol_type = other RNA
ggggttgatgatggagtgg

SEQ ID NO: 31952 - RNA, 19 nt, synthetic construct
  source 1..19: mol_type = other RNA
cgcggggcaggtgcagccg

SEQ ID NO: 31953 - RNA, 19 nt, synthetic construct
  source 1..19: mol_type = other RNA
gaggaaggtgcccgcgggg

SEQ ID NO: 31954 - RNA, 19 nt, synthetic construct
  source 1..19: mol_type = other RNA
gcaggggcactcctgggcg

SEQ ID NO: 31955 - RNA, 19 nt, synthetic construct
  source 1..19: mol_type = other RNA
cggcgccctcgtcgtgcac

SEQ ID NO: 31956 - RNA, 19 nt, synthetic construct
  source 1..19: mol_type = other RNA
cgagctgttgctgcagtcc

SEQ ID NO: 31957 - RNA, 19 nt, synthetic construct
  source 1..19: mol_type = other RNA
agatgtactcgcagctgcc

SEQ ID NO: 31958 - RNA, 19 nt, synthetic construct
  source 1..19: mol_type = other RNA
gtgttgtccccacagtagt

SEQ ID NO: 31959 - RNA, 19 nt, synthetic construct
  source 1..19: mol_type = other RNA
aggtcccgtgggtggtgtt

SEQ ID NO: 31960 - RNA, 19 nt, synthetic construct
  source 1..19: mol_type = other RNA
ccgggcaggagggggagag

SEQ ID NO: 31961 - RNA, 19 nt, synthetic construct
  source 1..19: mol_type = other RNA
gtccgggcaggagggggag

SEQ ID NO: 31962 - RNA, 19 nt, synthetic construct
  source 1..19: mol_type = other RNA
aggcctgggcgtaggcagc

SEQ ID NO: 31963 - RNA, 19 nt, synthetic construct
  source 1..19: mol_type = other RNA
caggcctgggcgtaggcag

SEQ ID NO: 31964 - RNA, 19 nt, synthetic construct
  source 1..19: mol_type = other RNA
tcgtggcaggcctgggcgt

SEQ ID NO: 31965 - RNA, 19 nt, synthetic construct
  source 1..19: mol_type = other RNA
aaggggcaggtgtccggag

SEQ ID NO: 31966 - RNA, 19 nt, synthetic construct
  source 1..19: mol_type = other RNA
ccttcctgatgatggtgcc

SEQ ID NO: 31967 - RNA, 19 nt, synthetic construct
  source 1..19: mol_type = other RNA
ggagtgggggacccaggcg

SEQ ID NO: 31968 - RNA, 19 nt, synthetic construct
  source 1..19: mol_type = other RNA
tgcccattgtaccagctgg

SEQ ID NO: 31969 - RNA, 19 nt, synthetic construct
  source 1..19: mol_type = other RNA
aggccgggctctgggcggt

SEQ ID NO: 31970 - RNA, 19 nt, synthetic construct
  source 1..19: mol_type = other RNA
gatgtcagccagcacaggg

SEQ ID NO: 31971 - RNA, 19 nt, synthetic construct
  source 1..19: mol_type = other RNA
ctggtgcctggggccgggg

SEQ ID NO: 31972 - RNA, 19 nt, synthetic construct
  source 1..19: mol_type = other RNA
ggctgagggctggtgcctg

SEQ ID NO: 31973 - RNA, 19 nt, synthetic construct
  source 1..19: mol_type = other RNA
ggtctgggttggggtaggc

SEQ ID NO: 31974 - RNA, 19 nt, synthetic construct
  source 1..19: mol_type = other RNA
ctgtgccagggtccagttg

SEQ ID NO: 31975 - RNA, 19 nt, synthetic construct
  source 1..19: mol_type = other RNA
ccccacctgtgccagggtc

SEQ ID NO: 31976 - RNA, 19 nt, synthetic construct
  source 1..19: mol_type = other RNA
gactgctgtggtgctggcc

SEQ ID NO: 31977 - RNA, 19 nt, synthetic construct
  source 1..19: mol_type = other RNA
ggtggctgtgaggggcgcc

SEQ ID NO: 31978 - RNA, 19 nt, synthetic construct
  source 1..19: mol_type = other RNA
ctgtcctgggcgtgctggt

SEQ ID NO: 31979 - RNA, 19 nt, synthetic construct
  source 1..19: mol_type = other RNA
tggctggtggtggtgttag

SEQ ID NO: 31980 - RNA, 19 nt, synthetic construct
  source 1..19: mol_type = other RNA
ctggctggtggtggtgtta

SEQ ID NO: 31981 - RNA, 19 nt, synthetic construct
  source 1..19: mol_type = other RNA
gtcgtgccctggctggtgg

SEQ ID NO: 31982 - RNA, 19 nt, synthetic construct
  source 1..19: mol_type = other RNA
ctggactggaggagggagt

SEQ ID NO: 31983 - RNA, 19 nt, synthetic construct
  source 1..19: mol_type = other RNA
gggtgtggtggctgtgctt

SEQ ID NO: 31984 - RNA, 19 nt, synthetic construct
  source 1..19: mol_type = other RNA
gggtccaggtggtgcccag

SEQ ID NO: 31985 - RNA, 19 nt, synthetic construct
  source 1..19: mol_type = other RNA
atggtggccgtgggtgtgg

SEQ ID NO: 31986 - RNA, 19 nt, synthetic construct
  source 1..19: mol_type = other RNA
tggacatggtggccgtggg

SEQ ID NO: 31987 - RNA, 19 nt, synthetic construct
  source 1..19: mol_type = other RNA
cagttgtggtggccgtggc

SEQ ID NO: 31988 - RNA, 19 nt, synthetic construct
  source 1..19: mol_type = other RNA
ggggtggccacagagccgg

SEQ ID NO: 31989 - RNA, 19 nt, synthetic construct
  source 1..19: mol_type = other RNA
gggggtggccacagagccg

SEQ ID NO: 31990 - RNA, 19 nt, synthetic construct
  source 1..19: mol_type = other RNA
gtggtccccgggatggagg

SEQ ID NO: 31991 - RNA, 19 nt, synthetic construct
  source 1..19: mol_type = other RNA
ggtggtccccgggatggag

SEQ ID NO: 31992 - RNA, 19 nt, synthetic construct
  source 1..19: mol_type = other RNA
ggtggtcagcactgtggcg

SEQ ID NO: 31993 - RNA, 19 nt, synthetic construct
  source 1..19: mol_type = other RNA
gtggccacagttgtggtgg

SEQ ID NO: 31994 - RNA, 19 nt, synthetic construct
  source 1..19: mol_type = other RNA
ccactggtctgtgtgctag

SEQ ID NO: 31995 - RNA, 19 nt, synthetic construct
  source 1..19: mol_type = other RNA
agtggccgtggtggtcagt

SEQ ID NO: 31996 - RNA, 19 nt, synthetic construct
  source 1..19: mol_type = other RNA
gggttggtggtggagccgg

SEQ ID NO: 31997 - RNA, 19 nt, synthetic construct
  source 1..19: mol_type = other RNA
ggtggtcagcactgggggg

SEQ ID NO: 31998 - RNA, 19 nt, synthetic construct
  source 1..19: mol_type = other RNA
tggtggtcagcactggggg

SEQ ID NO: 31999 - RNA, 19 nt, synthetic construct
  source 1..19: mol_type = other RNA
agggcagaggagggagtca

SEQ ID NO: 32000 - RNA, 19 nt, synthetic construct
  source 1..19: mol_type = other RNA
actgctggggggcagggat

SEQ ID NO: 32001 - RNA, 19 nt, synthetic construct
  source 1..19: mol_type = other RNA
cccgaggtggccgaagtcc

SEQ ID NO: 32002 - RNA, 19 nt, synthetic construct
  source 1..19: mol_type = other RNA
ggctggaaagggctggagt

SEQ ID NO: 32003 - RNA, 19 nt, synthetic construct
  source 1..19: mol_type = other RNA
gctagggtgagggctggaa

SEQ ID NO: 32004 - RNA, 19 nt, synthetic construct
  source 1..19: mol_type = other RNA
gtggctgtggtcctggagg

SEQ ID NO: 32005 - RNA, 19 nt, synthetic construct
  source 1..19: mol_type = other RNA
cagcccatggtcaccaccg

SEQ ID NO: 32006 - RNA, 19 nt, synthetic construct
  source 1..19: mol_type = other RNA
ggctgggcctgggcacggc

SEQ ID NO: 32007 - RNA, 19 nt, synthetic construct
  source 1..19: mol_type = other RNA
caggctgggcctgggcacg

SEQ ID NO: 32008 - RNA, 19 nt, synthetic construct
  source 1..19: mol_type = other RNA
ccgtcacggtggctgtagt

SEQ ID NO: 32009 - RNA, 19 nt, synthetic construct
  source 1..19: mol_type = other RNA
aggaggcggtggccgtgga

SEQ ID NO: 32010 - RNA, 19 nt, synthetic construct
  source 1..19: mol_type = other RNA
ctggtgactgtgggtgtcg

SEQ ID NO: 32011 - RNA, 19 nt, synthetic construct
  source 1..19: mol_type = other RNA
tgcagtccctggactggag

SEQ ID NO: 32012 - RNA, 19 nt, synthetic construct
  source 1..19: mol_type = other RNA
gggtgtggtggctgtgctt

SEQ ID NO: 32013 - RNA, 19 nt, synthetic construct
  source 1..19: mol_type = other RNA
gggtccaggtggtgcccag

SEQ ID NO: 32014 - RNA, 19 nt, synthetic construct
  source 1..19: mol_type = other RNA
atggtggccgtgggtgtgg

SEQ ID NO: 32015 - RNA, 19 nt, synthetic construct
  source 1..19: mol_type = other RNA
tggacatggtggccgtggg

SEQ ID NO: 32016 - RNA, 19 nt, synthetic construct
  source 1..19: mol_type = other RNA
ggggtggccacagagccgg

SEQ ID NO: 32017 - RNA, 19 nt, synthetic construct
  source 1..19: mol_type = other RNA
gggggtggccacagagccg

SEQ ID NO: 32018 - RNA, 19 nt, synthetic construct
  source 1..19: mol_type = other RNA
accgtggaacctctggttg

SEQ ID NO: 32019 - RNA, 19 nt, synthetic construct
  source 1..19: mol_type = other RNA
gtggtccccgggatggagg

SEQ ID NO: 32020 - RNA, 19 nt, synthetic construct
  source 1..19: mol_type = other RNA
ggtggtccccgggatggag

SEQ ID NO: 32021 - RNA, 19 nt, synthetic construct
  source 1..19: mol_type = other RNA
gtggccacagttgtggtgg

SEQ ID NO: 32022 - RNA, 19 nt, synthetic construct
  source 1..19: mol_type = other RNA
ccactggtctgtgtgctag

SEQ ID NO: 32023 - RNA, 19 nt, synthetic construct
  source 1..19: mol_type = other RNA
agtggccgtggtggtcagt

SEQ ID NO: 32024 - RNA, 19 nt, synthetic construct
  source 1..19: mol_type = other RNA
gggttggtggtggagccgg

SEQ ID NO: 32025 - RNA, 19 nt, synthetic construct
  source 1..19: mol_type = other RNA
ggtggtcagcactgggggg

SEQ ID NO: 32026 - RNA, 19 nt, synthetic construct
  source 1..19: mol_type = other RNA
tggtggtcagcactggggg

SEQ ID NO: 32027 - RNA, 19 nt, synthetic construct
  source 1..19: mol_type = other RNA
agggcagaggagggagtca

SEQ ID NO: 32028 - RNA, 19 nt, synthetic construct
  source 1..19: mol_type = other RNA
gctgggggacagggatcgc

SEQ ID NO: 32029 - RNA, 19 nt, synthetic construct
  source 1..19: mol_type = other RNA
cagcccatggtcaccaccg

SEQ ID NO: 32030 - RNA, 19 nt, synthetic construct
  source 1..19: mol_type = other RNA
ggctgggcctgggcacggc

SEQ ID NO: 32031 - RNA, 19 nt, synthetic construct
  source 1..19: mol_type = other RNA
caggctgggcctgggcacg

SEQ ID NO: 32032 - RNA, 19 nt, synthetic construct
  source 1..19: mol_type = other RNA
gaggatccaggtcgtccct

SEQ ID NO: 32033 - RNA, 19 nt, synthetic construct
  source 1..19: mol_type = other RNA
tggctgctgtggtctgctc

SEQ ID NO: 32034 - RNA, 19 nt, synthetic construct
  source 1..19: mol_type = other RNA
gtggccgtgctggtcagca

SEQ ID NO: 32035 - RNA, 19 nt, synthetic construct
  source 1..19: mol_type = other RNA
tggctgtgggtgtggtggc

SEQ ID NO: 32036 - RNA, 19 nt, synthetic construct
  source 1..19: mol_type = other RNA
ggatttggtggctgtgctt

SEQ ID NO: 32037 - RNA, 19 nt, synthetic construct
  source 1..19: mol_type = other RNA
agctgtggatttggtggct

SEQ ID NO: 32038 - RNA, 19 nt, synthetic construct
  source 1..19: mol_type = other RNA
actgtggaggtgtgggtgg

SEQ ID NO: 32039 - RNA, 19 nt, synthetic construct
  source 1..19: mol_type = other RNA
gcactgtggaggtgtgggt

SEQ ID NO: 32040 - RNA, 19 nt, synthetic construct
  source 1..19: mol_type = other RNA
gtggtcagcactgtggagg

SEQ ID NO: 32041 - RNA, 19 nt, synthetic construct
  source 1..19: mol_type = other RNA
aggagggggtggacatgga

SEQ ID NO: 32042 - RNA, 19 nt, synthetic construct
  source 1..19: mol_type = other RNA
gccagtggctgcagttgta

SEQ ID NO: 32043 - RNA, 19 nt, synthetic construct
  source 1..19: mol_type = other RNA
ggggtggccgtggggccag

SEQ ID NO: 32044 - RNA, 19 nt, synthetic construct
  source 1..19: mol_type = other RNA
tagtgctgggctctgtgag

SEQ ID NO: 32045 - RNA, 19 nt, synthetic construct
  source 1..19: mol_type = other RNA
ccgtcacggtggctgtagt

SEQ ID NO: 32046 - RNA, 19 nt, synthetic construct
  source 1..19: mol_type = other RNA
aggaggcggtggccgtgga

SEQ ID NO: 32047 - RNA, 19 nt, synthetic construct
  source 1..19: mol_type = other RNA
gtggccgtgctggtcagca

SEQ ID NO: 32048 - RNA, 19 nt, synthetic construct
  source 1..19: mol_type = other RNA
ctggactggaggagggagt

SEQ ID NO: 32049 - RNA, 19 nt, synthetic construct
  source 1..19: mol_type = other RNA
gggtgtggtggctgtgctt

SEQ ID NO: 32050 - RNA, 19 nt, synthetic construct
  source 1..19: mol_type = other RNA
atggtggccgtgggtgtgg

SEQ ID NO: 32051 - RNA, 19 nt, synthetic construct
  source 1..19: mol_type = other RNA
tggacatggtggccgtggg

SEQ ID NO: 32052 - RNA, 19 nt, synthetic construct
  source 1..19: mol_type = other RNA
ggggtggccacagagccgg

SEQ ID NO: 32053 - RNA, 19 nt, synthetic construct
  source 1..19: mol_type = other RNA
gggggtggccacagagccg

SEQ ID NO: 32054 - RNA, 19 nt, synthetic construct
  source 1..19: mol_type = other RNA
gtggtccccgggatggagg

SEQ ID NO: 32055 - RNA, 19 nt, synthetic construct
  source 1..19: mol_type = other RNA
ggtggtccccgggatggag

SEQ ID NO: 32056 - RNA, 19 nt, synthetic construct
  source 1..19: mol_type = other RNA
ggtggtcagcactgtggcg

SEQ ID NO: 32057 - RNA, 19 nt, synthetic construct
  source 1..19: mol_type = other RNA
gtggccacagttgtggtgg

SEQ ID NO: 32058 - RNA, 19 nt, synthetic construct
  source 1..19: mol_type = other RNA
ccactggtctgtgtgctag

SEQ ID NO: 32059 - RNA, 19 nt, synthetic construct
  source 1..19: mol_type = other RNA
agtggccgtggtggtcagt

SEQ ID NO: 32060 - RNA, 19 nt, synthetic construct
  source 1..19: mol_type = other RNA
gggttggtggtggagccgg

SEQ ID NO: 32061 - RNA, 19 nt, synthetic construct
  source 1..19: mol_type = other RNA
ggtggtcagcactgggggg

SEQ ID NO: 32062 - RNA, 19 nt, synthetic construct
  source 1..19: mol_type = other RNA
tggtggtcagcactggggg

SEQ ID NO: 32063 - RNA, 19 nt, synthetic construct
  source 1..19: mol_type = other RNA
agggcagaggagggagtca

SEQ ID NO: 32064 - RNA, 19 nt, synthetic construct
  source 1..19: mol_type = other RNA
cccgaggtggccgaagtcc

SEQ ID NO: 32065 - RNA, 19 nt, synthetic construct
  source 1..19: mol_type = other RNA
gtggctgtggtcctggagg

SEQ ID NO: 32066 - RNA, 19 nt, synthetic construct
  source 1..19: mol_type = other RNA
ggctgggcctgggcacggc

SEQ ID NO: 32067 - RNA, 19 nt, synthetic construct
  source 1..19: mol_type = other RNA
caggctgggcctgggcacg

SEQ ID NO: 32068 - RNA, 19 nt, synthetic construct
  source 1..19: mol_type = other RNA
ccgtcacggtggctgtagt

SEQ ID NO: 32069 - RNA, 19 nt, synthetic construct
  source 1..19: mol_type = other RNA
aggaggcggtggccgtgga

SEQ ID NO: 32070 - RNA, 19 nt, synthetic construct
  source 1..19: mol_type = other RNA
ctggtgactgtgggtgtcg

SEQ ID NO: 32071 - RNA, 19 nt, synthetic construct
  source 1..19: mol_type = other RNA
tgcagtccctggactggag

SEQ ID NO: 32072 - RNA, 19 nt, synthetic construct
  source 1..19: mol_type = other RNA
gggtgtggtggctgtgctt

SEQ ID NO: 32073 - RNA, 19 nt, synthetic construct
  source 1..19: mol_type = other RNA
gggtccaggtggtgcccag

SEQ ID NO: 32074 - RNA, 19 nt, synthetic construct
  source 1..19: mol_type = other RNA
atggtggccgtgggtgtgg

SEQ ID NO: 32075 - RNA, 19 nt, synthetic construct
  source 1..19: mol_type = other RNA
tggacatggtggccgtggg

SEQ ID NO: 32076 - RNA, 19 nt, synthetic construct
  source 1..19: mol_type = other RNA
ggggtggccacagagccgg

SEQ ID NO: 32077 - RNA, 19 nt, synthetic construct
  source 1..19: mol_type = other RNA
gggggtggccacagagccg

SEQ ID NO: 32078 - RNA, 19 nt, synthetic construct
  source 1..19: mol_type = other RNA
gtggaagagggggtggcca

SEQ ID NO: 32079 - RNA, 19 nt, synthetic construct
  source 1..19: mol_type = other RNA
tcctggggtggaagagggg

SEQ ID NO: 32080 - RNA, 19 nt, synthetic construct
  source 1..19: mol_type = other RNA
atccacactggaggcgtgc

SEQ ID NO: 32081 - RNA, 19 nt, synthetic construct
  source 1..19: mol_type = other RNA
ccgggacggaggagggggt

SEQ ID NO: 32082 - RNA, 19 nt, synthetic construct
  source 1..19: mol_type = other RNA
gtggccacagttgtggtgg

SEQ ID NO: 32083 - RNA, 19 nt, synthetic construct
  source 1..19: mol_type = other RNA
ccactggtctgtgtgctag

SEQ ID NO: 32084 - RNA, 19 nt, synthetic construct
  source 1..19: mol_type = other RNA
gggttggtggtggagccgg

SEQ ID NO: 32085 - RNA, 19 nt, synthetic construct
  source 1..19: mol_type = other RNA
ggtggtcagcactgggggg

SEQ ID NO: 32086 - RNA, 19 nt, synthetic construct
  source 1..19: mol_type = other RNA
tggtggtcagcactggggg

SEQ ID NO: 32087 - RNA, 19 nt, synthetic construct
  source 1..19: mol_type = other RNA
agggcagaggagggagtca

SEQ ID NO: 32088 - RNA, 19 nt, synthetic construct
  source 1..19: mol_type = other RNA
gctgggggacagggatcgc

SEQ ID NO: 32089 - RNA, 19 nt, synthetic construct
  source 1..19: mol_type = other RNA
ggctgggcctgggcacggc

SEQ ID NO: 32090 - RNA, 19 nt, synthetic construct
  source 1..19: mol_type = other RNA
caggctgggcctgggcacg

SEQ ID NO: 32091 - RNA, 19 nt, synthetic construct
  source 1..19: mol_type = other RNA
aactcccccagggggacac

SEQ ID NO: 32092 - RNA, 19 nt, synthetic construct
  source 1..19: mol_type = other RNA
gggctggtcagcactttgg

SEQ ID NO: 32093 - RNA, 19 nt, synthetic construct
  source 1..19: mol_type = other RNA
tggctgtgggtgtggtggc

SEQ ID NO: 32094 - RNA, 19 nt, synthetic construct
  source 1..19: mol_type = other RNA
ggatttggtggctgtgctt

SEQ ID NO: 32095 - RNA, 19 nt, synthetic construct
  source 1..19: mol_type = other RNA
agctgtggatttggtggct

SEQ ID NO: 32096 - RNA, 19 nt, synthetic construct
  source 1..19: mol_type = other RNA
ccacgggtgtggtggtctg

SEQ ID NO: 32097 - RNA, 19 nt, synthetic construct
  source 1..19: mol_type = other RNA
actgtggaggtgtgggtgg

SEQ ID NO: 32098 - RNA, 19 nt, synthetic construct
  source 1..19: mol_type = other RNA
gcactgtggaggtgtgggt

SEQ ID NO: 32099 - RNA, 19 nt, synthetic construct
  source 1..19: mol_type = other RNA
gtggtcagcactgtggagg

SEQ ID NO: 32100 - RNA, 19 nt, synthetic construct
  source 1..19: mol_type = other RNA
gccagtggctgcagttgta

SEQ ID NO: 32101 - RNA, 19 nt, synthetic construct
  source 1..19: mol_type = other RNA
ggggtggccgtggggccag

SEQ ID NO: 32102 - RNA, 19 nt, synthetic construct
  source 1..19: mol_type = other RNA
ccgtcacggtggctgtagt

SEQ ID NO: 32103 - RNA, 19 nt, synthetic construct
  source 1..19: mol_type = other RNA
aggaggcggtggccgtgga

SEQ ID NO: 32104 - RNA, 19 nt, synthetic construct
  source 1..19: mol_type = other RNA
ctggtgactgtgggtgtcg

SEQ ID NO: 32105 - RNA, 19 nt, synthetic construct
  source 1..19: mol_type = other RNA
ctggactggaggagggagt

SEQ ID NO: 32106 - RNA, 19 nt, synthetic construct
  source 1..19: mol_type = other RNA
gggtgtggtggctgtgctt

SEQ ID NO: 32107 - RNA, 19 nt, synthetic construct
  source 1..19: mol_type = other RNA
gggtccaggtggtgcccag

SEQ ID NO: 32108 - RNA, 19 nt, synthetic construct
  source 1..19: mol_type = other RNA
atggtggccgtgggtgtgg

SEQ ID NO: 32109 - RNA, 19 nt, synthetic construct
  source 1..19: mol_type = other RNA
tggacatggtggccgtggg

SEQ ID NO: 32110 - RNA, 19 nt, synthetic construct
  source 1..19: mol_type = other RNA
cggttgtggtggccgtggc

SEQ ID NO: 32111 - RNA, 19 nt, synthetic construct
  source 1..19: mol_type = other RNA
ggggtggccacagagccgg

SEQ ID NO: 32112 - RNA, 19 nt, synthetic construct
  source 1..19: mol_type = other RNA
gggggtggccacagagccg

SEQ ID NO: 32113 - RNA, 19 nt, synthetic construct
  source 1..19: mol_type = other RNA
gtggtccccgggatggagg

SEQ ID NO: 32114 - RNA, 19 nt, synthetic construct
  source 1..19: mol_type = other RNA
ggtggtccccgggatggag

SEQ ID NO: 32115 - RNA, 19 nt, synthetic construct
  source 1..19: mol_type = other RNA
gtggccacagttgtggtgg

SEQ ID NO: 32116 - RNA, 19 nt, synthetic construct
  source 1..19: mol_type = other RNA
ccactggtctgtgtgctag

SEQ ID NO: 32117 - RNA, 19 nt, synthetic construct
  source 1..19: mol_type = other RNA
agtggccgtggtggtcagt

SEQ ID NO: 32118 - RNA, 19 nt, synthetic construct
  source 1..19: mol_type = other RNA
gggttggtggtggagccgg

SEQ ID NO: 32119 - RNA, 19 nt, synthetic construct
  source 1..19: mol_type = other RNA
gtggccgtgctggtcagca

SEQ ID NO: 32120 - RNA, 19 nt, synthetic construct
  source 1..19: mol_type = other RNA
ctggtggctgcgggtgtgg

SEQ ID NO: 32121 - RNA, 19 nt, synthetic construct
  source 1..19: mol_type = other RNA
tggagctggtggctgcggg

SEQ ID NO: 32122 - RNA, 19 nt, synthetic construct
  source 1..19: mol_type = other RNA
ggaggaagtggctttggag

SEQ ID NO: 32123 - RNA, 19 nt, synthetic construct
  source 1..19: mol_type = other RNA
gggtgtggtggtctgtgct

SEQ ID NO: 32124 - RNA, 19 nt, synthetic construct
  source 1..19: mol_type = other RNA
ggtggacatgggtgtggtg

SEQ ID NO: 32125 - RNA, 19 nt, synthetic construct
  source 1..19: mol_type = other RNA
actgtggaggtgtgggtgg

SEQ ID NO: 32126 - RNA, 19 nt, synthetic construct
  source 1..19: mol_type = other RNA
gcactgtggaggtgtgggt

SEQ ID NO: 32127 - RNA, 19 nt, synthetic construct
  source 1..19: mol_type = other RNA
gtggtcagcactgtggagg

SEQ ID NO: 32128 - RNA, 19 nt, synthetic construct
  source 1..19: mol_type = other RNA
aggagggtgtggccgtgga

SEQ ID NO: 32129 - RNA, 19 nt, synthetic construct
  source 1..19: mol_type = other RNA
tccagtggctgcagttgta

SEQ ID NO: 32130 - RNA, 19 nt, synthetic construct
  source 1..19: mol_type = other RNA
tggaggacagggtggccgt

SEQ ID NO: 32131 - RNA, 19 nt, synthetic construct
  source 1..19: mol_type = other RNA
gaggcagtggctgtgggca

SEQ ID NO: 32132 - RNA, 19 nt, synthetic construct
  source 1..19: mol_type = other RNA
aggttggcaggctgctggg

SEQ ID NO: 32133 - RNA, 19 nt, synthetic construct
  source 1..19: mol_type = other RNA
agctggggaagccagtggg

SEQ ID NO: 32134 - RNA, 19 nt, synthetic construct
  source 1..19: mol_type = other RNA
ggggaggtgggacaggcgc

SEQ ID NO: 32135 - RNA, 19 nt, synthetic construct
  source 1..19: mol_type = other RNA
ggcggtggggaggtgggac

SEQ ID NO: 32136 - RNA, 19 nt, synthetic construct
  source 1..19: mol_type = other RNA
cactggcggtggggaggtg

SEQ ID NO: 32137 - RNA, 19 nt, synthetic construct
  source 1..19: mol_type = other RNA
ggggcggaggacactggcg

SEQ ID NO: 32138 - RNA, 19 nt, synthetic construct
  source 1..19: mol_type = other RNA
ggagggcgaggacagcggg

SEQ ID NO: 32139 - RNA, 19 nt, synthetic construct
  source 1..19: mol_type = other RNA
gggagggcgaggacagcgg

SEQ ID NO: 32140 - RNA, 19 nt, synthetic construct
  source 1..19: mol_type = other RNA
gggcaggggagggcgagga

SEQ ID NO: 32141 - RNA, 19 nt, synthetic construct
  source 1..19: mol_type = other RNA
ggcagtggcagaggccgtg

SEQ ID NO: 32142 - RNA, 19 nt, synthetic construct
  source 1..19: mol_type = other RNA
ccatggtgacagtgaggac

SEQ ID NO: 32143 - RNA, 19 nt, synthetic construct
  source 1..19: mol_type = other RNA
ccagcacagacacaagcac

SEQ ID NO: 32144 - RNA, 19 nt, synthetic construct
  source 1..19: mol_type = other RNA
ccccagcacagacacaagc

SEQ ID NO: 32145 - RNA, 19 nt, synthetic construct
  source 1..19: mol_type = other RNA
tccccagcacagacacaag

SEQ ID NO: 32146 - RNA, 19 nt, synthetic construct
  source 1..19: mol_type = other RNA
gtcggggcccagcagccat

SEQ ID NO: 32147 - RNA, 19 nt, synthetic construct
  source 1..19: mol_type = other RNA
cccgggggcacaaggttgt

SEQ ID NO: 32148 - RNA, 19 nt, synthetic construct
  source 1..19: mol_type = other RNA
tcagggcagaagcagccct

SEQ ID NO: 32149 - RNA, 19 nt, synthetic construct
  source 1..19: mol_type = other RNA
ggggctgaccctgggcgtc

SEQ ID NO: 32150 - RNA, 19 nt, synthetic construct
  source 1..19: mol_type = other RNA
tctcggggcagcaggggtt

SEQ ID NO: 32151 - RNA, 19 nt, synthetic construct
  source 1..19: mol_type = other RNA
gggggcaggtggttgtgtt

SEQ ID NO: 32152 - RNA, 19 nt, synthetic construct
  source 1..19: mol_type = other RNA
ctgggggcaggtggttgtg

SEQ ID NO: 32153 - RNA, 19 nt, synthetic construct
  source 1..19: mol_type = other RNA
gaacacagctgaggtctgc

SEQ ID NO: 32154 - RNA, 19 nt, synthetic construct
  source 1..19: mol_type = other RNA
gagaggcaggtacacatgt

SEQ ID NO: 32155 - RNA, 19 nt, synthetic construct
  source 1..19: mol_type = other RNA
aaagccctggggacaggta

SEQ ID NO: 32156 - RNA, 19 nt, synthetic construct
  source 1..19: mol_type = other RNA
ggactggctggccatcggg

SEQ ID NO: 32157 - RNA, 19 nt, synthetic construct
  source 1..19: mol_type = other RNA
tcattcagctggactggct

SEQ ID NO: 32158 - RNA, 19 nt, synthetic construct
  source 1..19: mol_type = other RNA
tgtccacatggctgttgac

SEQ ID NO: 32159 - RNA, 19 nt, synthetic construct
  source 1..19: mol_type = other RNA
atctgggcaggatgcaggc

SEQ ID NO: 32160 - RNA, 19 nt, synthetic construct
  source 1..19: mol_type = other RNA
gcagaaggtgatgttgacc

SEQ ID NO: 32161 - RNA, 19 nt, synthetic construct
  source 1..19: mol_type = other RNA
cgcagaaggtgatgttgac

SEQ ID NO: 32162 - RNA, 19 nt, synthetic construct
  source 1..19: mol_type = other RNA
ggcaggagccctcgcagaa

SEQ ID NO: 32163 - RNA, 19 nt, synthetic construct
  source 1..19: mol_type = other RNA
gggcaggagccctcgcaga

SEQ ID NO: 32164 - RNA, 19 nt, synthetic construct
  source 1..19: mol_type = other RNA
tgcagccacactcatccac

SEQ ID NO: 32165 - RNA, 19 nt, synthetic construct
  source 1..19: mol_type = other RNA
tgggggagccatgggcgca

SEQ ID NO: 32166 - RNA, 19 nt, synthetic construct
  source 1..19: mol_type = other RNA
gcagtggcctcctgggccg

SEQ ID NO: 32167 - RNA, 19 nt, synthetic construct
  source 1..19: mol_type = other RNA
agcagtggcctcctgggcc

SEQ ID NO: 32168 - RNA, 19 nt, synthetic construct
  source 1..19: mol_type = other RNA
cagacaatgcacatcctgg

SEQ ID NO: 32169 - RNA, 19 nt, synthetic construct
  source 1..19: mol_type = other RNA
tgggcagcaggagcacgga

SEQ ID NO: 32170 - RNA, 19 nt, synthetic construct
  source 1..19: mol_type = other RNA
ggggtgggcagcaggagca

SEQ ID NO: 32171 - RNA, 19 nt, synthetic construct
  source 1..19: mol_type = other RNA
cggggtgggcagcaggagc

SEQ ID NO: 32172 - RNA, 19 nt, synthetic construct
  source 1..19: mol_type = other RNA
gtctgccccagcggccgga

SEQ ID NO: 32173 - RNA, 19 nt, synthetic construct
  source 1..19: mol_type = other RNA
ccagcctgtctgccccagc

SEQ ID NO: 32174 - RNA, 19 nt, synthetic construct
  source 1..19: mol_type = other RNA
gggggacggggacgggcag

SEQ ID NO: 32175 - RNA, 19 nt, synthetic construct
  source 1..19: mol_type = other RNA
gccctgcattctcccagct

SEQ ID NO: 32176 - RNA, 19 nt, synthetic construct
  source 1..19: mol_type = other RNA
tgtcatccagcaccgtgcc

SEQ ID NO: 32177 - RNA, 19 nt, synthetic construct
  source 1..19: mol_type = other RNA
gcgtgatgtcatccagcac

SEQ ID NO: 32178 - RNA, 19 nt, synthetic construct
  source 1..19: mol_type = other RNA
aggaaggtgcccgcggggc

SEQ ID NO: 32179 - RNA, 19 nt, synthetic construct
  source 1..19: mol_type = other RNA
tgtagaagtcacagaacaa

SEQ ID NO: 32180 - RNA, 19 nt, synthetic construct
  source 1..19: mol_type = other RNA
ccttctgccccacctgtgc

SEQ ID NO: 32181 - RNA, 19 nt, synthetic construct
  source 1..19: mol_type = other RNA
tgtggtgctggccggggga

SEQ ID NO: 32182 - RNA, 19 nt, synthetic construct
  source 1..19: mol_type = other RNA
aagggctgagcgtgttgga

SEQ ID NO: 32183 - RNA, 19 nt, synthetic construct
  source 1..19: mol_type = other RNA
ggacatggtggccgtgggt

SEQ ID NO: 32184 - RNA, 19 nt, synthetic construct
  source 1..19: mol_type = other RNA
gcaggtgtggtggcggtgg

SEQ ID NO: 32185 - RNA, 19 nt, synthetic construct
  source 1..19: mol_type = other RNA
ccctagggcagaggaggga

SEQ ID NO: 32186 - RNA, 19 nt, synthetic construct
  source 1..19: mol_type = other RNA
gtggtgcccaagatgcccg

SEQ ID NO: 32187 - RNA, 19 nt, synthetic construct
  source 1..19: mol_type = other RNA
aggctgggcctgggcacgg

SEQ ID NO: 32188 - RNA, 19 nt, synthetic construct
  source 1..19: mol_type = other RNA
tagagctggtggccggggt

SEQ ID NO: 32189 - RNA, 19 nt, synthetic construct
  source 1..19: mol_type = other RNA
ctggactggagaagggagt

SEQ ID NO: 32190 - RNA, 19 nt, synthetic construct
  source 1..19: mol_type = other RNA
ggacatggtggccgtgggt

SEQ ID NO: 32191 - RNA, 19 nt, synthetic construct
  source 1..19: mol_type = other RNA
gggggtgtgggtggtcccc

SEQ ID NO: 32192 - RNA, 19 nt, synthetic construct
  source 1..19: mol_type = other RNA
gcaggtgtggtggcggtgg

SEQ ID NO: 32193 - RNA, 19 nt, synthetic construct
  source 1..19: mol_type = other RNA
ccctagggcagaggaggga

SEQ ID NO: 32194 - RNA, 19 nt, synthetic construct
  source 1..19: mol_type = other RNA
aggctgggcctgggcacgg

SEQ ID NO: 32195 - RNA, 19 nt, synthetic construct
  source 1..19: mol_type = other RNA
tagagctggtggccggggt

SEQ ID NO: 32196 - RNA, 19 nt, synthetic construct
  source 1..19: mol_type = other RNA
tttggtggctgtgcttgtc

SEQ ID NO: 32197 - RNA, 19 nt, synthetic construct
  source 1..19: mol_type = other RNA
ggacatggtggccatgggt

SEQ ID NO: 32198 - RNA, 19 nt, synthetic construct
  source 1..19: mol_type = other RNA
ggacatggtggccgtgggt

SEQ ID NO: 32199 - RNA, 19 nt, synthetic construct
  source 1..19: mol_type = other RNA
gcaggtgtggtggcggtgg

SEQ ID NO: 32200 - RNA, 19 nt, synthetic construct
  source 1..19: mol_type = other RNA
ccctagggcagaggaggga

SEQ ID NO: 32201 - RNA, 19 nt, synthetic construct
  source 1..19: mol_type = other RNA
gtggtgcccaagatgcccg

SEQ ID NO: 32202 - RNA, 19 nt, synthetic construct
  source 1..19: mol_type = other RNA
aggctgggcctgggcacgg

SEQ ID NO: 32203 - RNA, 19 nt, synthetic construct
  source 1..19: mol_type = other RNA
tagagctggtggccggggt

SEQ ID NO: 32204 - RNA, 19 nt, synthetic construct
  source 1..19: mol_type = other RNA
ctggactggagaagggagt

SEQ ID NO: 32205 - RNA, 19 nt, synthetic construct
  source 1..19: mol_type = other RNA
ggacatggtggccgtgggt

SEQ ID NO: 32206 - RNA, 19 nt, synthetic construct
  source 1..19: mol_type = other RNA
ggaagagggggtggccaca

SEQ ID NO: 32207 - RNA, 19 nt, synthetic construct
  source 1..19: mol_type = other RNA
tccacactggaggcgtgcg

SEQ ID NO: 32208 - RNA, 19 nt, synthetic construct
  source 1..19: mol_type = other RNA
gggggtgtgggtggtcccc

SEQ ID NO: 32209 - RNA, 19 nt, synthetic construct
  source 1..19: mol_type = other RNA
gcaggtgtggtggcggtgg

SEQ ID NO: 32210 - RNA, 19 nt, synthetic construct
  source 1..19: mol_type = other RNA
ccctagggcagaggaggga

SEQ ID NO: 32211 - RNA, 19 nt, synthetic construct
  source 1..19: mol_type = other RNA
aggctgggcctgggcacgg

SEQ ID NO: 32212 - RNA, 19 nt, synthetic construct
  source 1..19: mol_type = other RNA
tagagctggtggccggggt

SEQ ID NO: 32213 - RNA, 19 nt, synthetic construct
  source 1..19: mol_type = other RNA
tttggtggctgtgcttgtc

SEQ ID NO: 32214 - RNA, 19 nt, synthetic construct
  source 1..19: mol_type = other RNA
gtggaggaggggatgggtg

SEQ ID NO: 32215 - RNA, 19 nt, synthetic construct
  source 1..19: mol_type = other RNA
ggacatggtggccgtgggt

SEQ ID NO: 32216 - RNA, 19 nt, synthetic construct
  source 1..19: mol_type = other RNA
gagctggtggctgcgggtg

SEQ ID NO: 32217 - RNA, 19 nt, synthetic construct
  source 1..19: mol_type = other RNA
gtggaggaggggatgggtg

SEQ ID NO: 32218 - RNA, 19 nt, synthetic construct
  source 1..19: mol_type = other RNA
gtggatccagtggctgcag

SEQ ID NO: 32219 - RNA, 19 nt, synthetic construct
  source 1..19: mol_type = other RNA
ggtgcgggtggtccccacg

SEQ ID NO: 32220 - RNA, 19 nt, synthetic construct
  source 1..19: mol_type = other RNA
tggtcaaacaggatcaggc

SEQ ID NO: 32221 - RNA, 19 nt, synthetic construct
  source 1..19: mol_type = other RNA
cccagcacagacacaagca

SEQ ID NO: 32222 - RNA, 19 nt, synthetic construct
  source 1..19: mol_type = other RNA
ggtccccagcacagacaca

SEQ ID NO: 32223 - RNA, 19 nt, synthetic construct
  source 1..19: mol_type = other RNA
cagatcacagagcggctgt

SEQ ID NO: 32224 - RNA, 19 nt, synthetic construct
  source 1..19: mol_type = other RNA
gtgggtgggcaggtgaggt

SEQ ID NO: 32225 - RNA, 19 nt, synthetic construct
  source 1..19: mol_type = other RNA
gccctcctcctgggtgcag

SEQ ID NO: 32226 - RNA, 19 nt, synthetic construct
  source 1..19: mol_type = other RNA
tccacatggctgttgaccc

SEQ ID NO: 32227 - RNA, 19 nt, synthetic construct
  source 1..19: mol_type = other RNA
ctccccctgcagctggaca

SEQ ID NO: 32228 - RNA, 19 nt, synthetic construct
  source 1..19: mol_type = other RNA
acaggcggccgccttgcct

SEQ ID NO: 32229 - RNA, 19 nt, synthetic construct
  source 1..19: mol_type = other RNA
agtccccgctctgctccac

SEQ ID NO: 32230 - RNA, 19 nt, synthetic construct
  source 1..19: mol_type = other RNA
cggccccagcagggtgcgg

SEQ ID NO: 32231 - RNA, 19 nt, synthetic construct
  source 1..19: mol_type = other RNA
ctgcaggtggtgttgaagg

SEQ ID NO: 32232 - RNA, 19 nt, synthetic construct
  source 1..19: mol_type = other RNA
tggtctctccaggcttgta

SEQ ID NO: 32233 - RNA, 19 nt, synthetic construct
  source 1..19: mol_type = other RNA
cccaggccgggctctgggc

SEQ ID NO: 32234 - RNA, 19 nt, synthetic construct
  source 1..19: mol_type = other RNA
tctgggttggggtaggcac

SEQ ID NO: 32235 - RNA, 19 nt, synthetic construct
  source 1..19: mol_type = other RNA
cggttgctgtggtctgggt

SEQ ID NO: 32236 - RNA, 19 nt, synthetic construct
  source 1..19: mol_type = other RNA
tcggtggcggggttgtggc

SEQ ID NO: 32237 - RNA, 19 nt, synthetic construct
  source 1..19: mol_type = other RNA
gggggagccctggtcagcc

SEQ ID NO: 32238 - RNA, 19 nt, synthetic construct
  source 1..19: mol_type = other RNA
gtggtgctggccgggggag

SEQ ID NO: 32239 - RNA, 19 nt, synthetic construct
  source 1..19: mol_type = other RNA
ctcattgtcgtctctgtcc

SEQ ID NO: 32240 - RNA, 19 nt, synthetic construct
  source 1..19: mol_type = other RNA
tgtggtggttgtgctgatc

SEQ ID NO: 32241 - RNA, 19 nt, synthetic construct
  source 1..19: mol_type = other RNA
gaggggttggtggtggagc

SEQ ID NO: 32242 - RNA, 19 nt, synthetic construct
  source 1..19: mol_type = other RNA
tggggactgctggggggca

SEQ ID NO: 32243 - RNA, 19 nt, synthetic construct
  source 1..19: mol_type = other RNA
agagctggtggccggggtg

SEQ ID NO: 32244 - RNA, 19 nt, synthetic construct
  source 1..19: mol_type = other RNA
aagcactgtggaggtgtgg

SEQ ID NO: 32245 - RNA, 19 nt, synthetic construct
  source 1..19: mol_type = other RNA
tgtggtggttgtgctgatc

SEQ ID NO: 32246 - RNA, 19 nt, synthetic construct
  source 1..19: mol_type = other RNA
gaggggttggtggtggagc

SEQ ID NO: 32247 - RNA, 19 nt, synthetic construct
  source 1..19: mol_type = other RNA
tgctgggggacagggatcg

SEQ ID NO: 32248 - RNA, 19 nt, synthetic construct
  source 1..19: mol_type = other RNA
tgggtggtgcccaaggtgc

SEQ ID NO: 32249 - RNA, 19 nt, synthetic construct
  source 1..19: mol_type = other RNA
gctgctggggtgtgggaag

SEQ ID NO: 32250 - RNA, 19 nt, synthetic construct
  source 1..19: mol_type = other RNA
agagctggtggccggggtg

SEQ ID NO: 32251 - RNA, 19 nt, synthetic construct
  source 1..19: mol_type = other RNA
agtccttggactggaggag

SEQ ID NO: 32252 - RNA, 19 nt, synthetic construct
  source 1..19: mol_type = other RNA
gagtggaggagggggtgga

SEQ ID NO: 32253 - RNA, 19 nt, synthetic construct
  source 1..19: mol_type = other RNA
aagcactgtggaggtgtgg

SEQ ID NO: 32254 - RNA, 19 nt, synthetic construct
  source 1..19: mol_type = other RNA
tgtggtggttgtgctgatc

SEQ ID NO: 32255 - RNA, 19 nt, synthetic construct
  source 1..19: mol_type = other RNA
gaggggttggtggtggagc

SEQ ID NO: 32256 - RNA, 19 nt, synthetic construct
  source 1..19: mol_type = other RNA
tggggactgctggggggca

SEQ ID NO: 32257 - RNA, 19 nt, synthetic construct
  source 1..19: mol_type = other RNA
gctgctggggtgtgggaag

SEQ ID NO: 32258 - RNA, 19 nt, synthetic construct
  source 1..19: mol_type = other RNA
agagctggtggccggggtg

SEQ ID NO: 32259 - RNA, 19 nt, synthetic construct
  source 1..19: mol_type = other RNA
gtggctgttgtggtcagct

SEQ ID NO: 32260 - RNA, 19 nt, synthetic construct
  source 1..19: mol_type = other RNA
tgtggtggttgtgctgatc

SEQ ID NO: 32261 - RNA, 19 nt, synthetic construct
  source 1..19: mol_type = other RNA
gaggggttggtggtggagc

SEQ ID NO: 32262 - RNA, 19 nt, synthetic construct
  source 1..19: mol_type = other RNA
tgctgggggacagggatcg

SEQ ID NO: 32263 - RNA, 19 nt, synthetic construct
  source 1..19: mol_type = other RNA
tgggtggtgcccaaggtgc

SEQ ID NO: 32264 - RNA, 19 nt, synthetic construct
  source 1..19: mol_type = other RNA
gctgctggggtgtgggaag

SEQ ID NO: 32265 - RNA, 19 nt, synthetic construct
  source 1..19: mol_type = other RNA
agagctggtggccggggtg

SEQ ID NO: 32266 - RNA, 19 nt, synthetic construct
  source 1..19: mol_type = other RNA
agtccttggactggaggag

SEQ ID NO: 32267 - RNA, 19 nt, synthetic construct
  source 1..19: mol_type = other RNA
tggtcccaagggtggagga

SEQ ID NO: 32268 - RNA, 19 nt, synthetic construct
  source 1..19: mol_type = other RNA
gagtggaggagggggtgga

SEQ ID NO: 32269 - RNA, 19 nt, synthetic construct
  source 1..19: mol_type = other RNA
aagcactgtggaggtgtgg

SEQ ID NO: 32270 - RNA, 19 nt, synthetic construct
  source 1..19: mol_type = other RNA
tgtggtggttgtgctgatc

SEQ ID NO: 32271 - RNA, 19 nt, synthetic construct
  source 1..19: mol_type = other RNA
gaggggttggtggtggagc

SEQ ID NO: 32272 - RNA, 19 nt, synthetic construct
  source 1..19: mol_type = other RNA
agtccttggactggaggag

SEQ ID NO: 32273 - RNA, 19 nt, synthetic construct
  source 1..19: mol_type = other RNA
tggtctctggagtagagga

SEQ ID NO: 32274 - RNA, 19 nt, synthetic construct
  source 1..19: mol_type = other RNA
tgggggtgtgagctgttcc

SEQ ID NO: 32275 - RNA, 19 nt, synthetic construct
  source 1..19: mol_type = other RNA
ggcggaggacactggcggt

SEQ ID NO: 32276 - RNA, 19 nt, synthetic construct
  source 1..19: mol_type = other RNA
ggcaggggagggcgaggac

SEQ ID NO: 32277 - RNA, 19 nt, synthetic construct
  source 1..19: mol_type = other RNA
gtccccagcacagacacaa

SEQ ID NO: 32278 - RNA, 19 nt, synthetic construct
  source 1..19: mol_type = other RNA
cgaacacagctgaggtctg

SEQ ID NO: 32279 - RNA, 19 nt, synthetic construct
  source 1..19: mol_type = other RNA
ggcagggaagggcgcctgg

SEQ ID NO: 32280 - RNA, 19 nt, synthetic construct
  source 1..19: mol_type = other RNA
gacccaggtttcattcagc

SEQ ID NO: 32281 - RNA, 19 nt, synthetic construct
  source 1..19: mol_type = other RNA
gggaggggcaaggccaagg

SEQ ID NO: 32282 - RNA, 19 nt, synthetic construct
  source 1..19: mol_type = other RNA
tgcctggaccagcctgtct

SEQ ID NO: 32283 - RNA, 19 nt, synthetic construct
  source 1..19: mol_type = other RNA
ctgcagcaggcatggacag

SEQ ID NO: 32284 - RNA, 19 nt, synthetic construct
  source 1..19: mol_type = other RNA
cgagcatggccgccagagc

SEQ ID NO: 32285 - RNA, 19 nt, synthetic construct
  source 1..19: mol_type = other RNA
tgcaaaggccagggaagcg

SEQ ID NO: 32286 - RNA, 19 nt, synthetic construct
  source 1..19: mol_type = other RNA
tatttgggatccagctcca

SEQ ID NO: 32287 - RNA, 19 nt, synthetic construct
  source 1..19: mol_type = other RNA
tccccacacaggccacagg

SEQ ID NO: 32288 - RNA, 19 nt, synthetic construct
  source 1..19: mol_type = other RNA
ggggtcagcctggcgttgt

SEQ ID NO: 32289 - RNA, 19 nt, synthetic construct
  source 1..19: mol_type = other RNA
tgccctcctcgtccgtgca

SEQ ID NO: 32290 - RNA, 19 nt, synthetic construct
  source 1..19: mol_type = other RNA
aaggtggcacacgggcagg

SEQ ID NO: 32291 - RNA, 19 nt, synthetic construct
  source 1..19: mol_type = other RNA
gggggcaggtccgggggca

SEQ ID NO: 32292 - RNA, 19 nt, synthetic construct
  source 1..19: mol_type = other RNA
acactcctggtgctgcatg

SEQ ID NO: 32293 - RNA, 19 nt, synthetic construct
  source 1..19: mol_type = other RNA
ggagcaggtgtccgtgcag

SEQ ID NO: 32294 - RNA, 19 nt, synthetic construct
  source 1..19: mol_type = other RNA
agaagcagccgtccacaca

SEQ ID NO: 32295 - RNA, 19 nt, synthetic construct
  source 1..19: mol_type = other RNA
caggtcctggcactgccat

SEQ ID NO: 32296 - RNA, 19 nt, synthetic construct
  source 1..19: mol_type = other RNA
cagccccaggcctgtctgc

SEQ ID NO: 32297 - RNA, 19 nt, synthetic construct
  source 1..19: mol_type = other RNA
gcctccaccaccccgctga

SEQ ID NO: 32298 - RNA, 19 nt, synthetic construct
  source 1..19: mol_type = other RNA
tggcacaggcagcctgggc

SEQ ID NO: 32299 - RNA, 19 nt, synthetic construct
  source 1..19: mol_type = other RNA
gcgagcaccagtgccgggc

SEQ ID NO: 32300 - RNA, 19 nt, synthetic construct
  source 1..19: mol_type = other RNA
cgtccctccagtcgctgag

SEQ ID NO: 32301 - RNA, 19 nt, synthetic construct
  source 1..19: mol_type = other RNA
ccggccctctcgccaccgc

SEQ ID NO: 32302 - RNA, 19 nt, synthetic construct
  source 1..19: mol_type = other RNA
tcacagaacaaggggcagg

SEQ ID NO: 32303 - RNA, 19 nt, synthetic construct
  source 1..19: mol_type = other RNA
ccactcacagcccccatgt

SEQ ID NO: 32304 - RNA, 19 nt, synthetic construct
  source 1..19: mol_type = other RNA
ccacagccttcctgatgat

SEQ ID NO: 32305 - RNA, 19 nt, synthetic construct
  source 1..19: mol_type = other RNA
ggggacccaggcggtggtg

SEQ ID NO: 32306 - RNA, 19 nt, synthetic construct
  source 1..19: mol_type = other RNA
gcctcccaggccgggctct

SEQ ID NO: 32307 - RNA, 19 nt, synthetic construct
  source 1..19: mol_type = other RNA
agggctgagggctggtgcc

SEQ ID NO: 32308 - RNA, 19 nt, synthetic construct
  source 1..19: mol_type = other RNA
ggcactgagggagggctga

SEQ ID NO: 32309 - RNA, 19 nt, synthetic construct
  source 1..19: mol_type = other RNA
cagggtccagttggggaag

SEQ ID NO: 32310 - RNA, 19 nt, synthetic construct
  source 1..19: mol_type = other RNA
gctctgtggtcggtggcgg

SEQ ID NO: 32311 - RNA, 19 nt, synthetic construct
  source 1..19: mol_type = other RNA
ccagctctgtggtcggtgg

SEQ ID NO: 32312 - RNA, 19 nt, synthetic construct
  source 1..19: mol_type = other RNA
ccgtctccagctctgtggt

SEQ ID NO: 32313 - RNA, 19 nt, synthetic construct
  source 1..19: mol_type = other RNA
agcgtgggtggctgtgagg

SEQ ID NO: 32314 - RNA, 19 nt, synthetic construct
  source 1..19: mol_type = other RNA
tggggccagcgtgggtggc

SEQ ID NO: 32315 - RNA, 19 nt, synthetic construct
  source 1..19: mol_type = other RNA
tgtcctgggcgtgctggtc

SEQ ID NO: 32316 - RNA, 19 nt, synthetic construct
  source 1..19: mol_type = other RNA
cagggtggaggtcggggtg

SEQ ID NO: 32317 - RNA, 19 nt, synthetic construct
  source 1..19: mol_type = other RNA
tggagctggtgactgtggg

SEQ ID NO: 32318 - RNA, 19 nt, synthetic construct
  source 1..19: mol_type = other RNA
actggaggagggagtggct

SEQ ID NO: 32319 - RNA, 19 nt, synthetic construct
  source 1..19: mol_type = other RNA
gactggaggagggagtggc

SEQ ID NO: 32320 - RNA, 19 nt, synthetic construct
  source 1..19: mol_type = other RNA
atggaggagggggtcaccg

SEQ ID NO: 32321 - RNA, 19 nt, synthetic construct
  source 1..19: mol_type = other RNA
tgaggaggggttggtggtg

SEQ ID NO: 32322 - RNA, 19 nt, synthetic construct
  source 1..19: mol_type = other RNA
ccaggagttgaggaggggt

SEQ ID NO: 32323 - RNA, 19 nt, synthetic construct
  source 1..19: mol_type = other RNA
ttgctggtggctgcaggtg

SEQ ID NO: 32324 - RNA, 19 nt, synthetic construct
  source 1..19: mol_type = other RNA
ggttctgctgctagggtga

SEQ ID NO: 32325 - RNA, 19 nt, synthetic construct
  source 1..19: mol_type = other RNA
ggtgtggcccggggtggtc

SEQ ID NO: 32326 - RNA, 19 nt, synthetic construct
  source 1..19: mol_type = other RNA
ggctgtggtcctggaggtg

SEQ ID NO: 32327 - RNA, 19 nt, synthetic construct
  source 1..19: mol_type = other RNA
ggaggcggtggccgtggat

SEQ ID NO: 32328 - RNA, 19 nt, synthetic construct
  source 1..19: mol_type = other RNA
tggagctggtgactgtggg

SEQ ID NO: 32329 - RNA, 19 nt, synthetic construct
  source 1..19: mol_type = other RNA
gcactgtggaggtgtggac

SEQ ID NO: 32330 - RNA, 19 nt, synthetic construct
  source 1..19: mol_type = other RNA
agcactgtggaggtgtgga

SEQ ID NO: 32331 - RNA, 19 nt, synthetic construct
  source 1..19: mol_type = other RNA
atggaggagggggtcaccg

SEQ ID NO: 32332 - RNA, 19 nt, synthetic construct
  source 1..19: mol_type = other RNA
tgaggaggggttggtggtg

SEQ ID NO: 32333 - RNA, 19 nt, synthetic construct
  source 1..19: mol_type = other RNA
ctgctggtggctgcaggtg

SEQ ID NO: 32334 - RNA, 19 nt, synthetic construct
  source 1..19: mol_type = other RNA
atgtgggtggtgcccaagg

SEQ ID NO: 32335 - RNA, 19 nt, synthetic construct
  source 1..19: mol_type = other RNA
ggtgtggcccggggtggtc

SEQ ID NO: 32336 - RNA, 19 nt, synthetic construct
  source 1..19: mol_type = other RNA
gtggctgcagttgtagtgg

SEQ ID NO: 32337 - RNA, 19 nt, synthetic construct
  source 1..19: mol_type = other RNA
agtggctgcagttgtagtg

SEQ ID NO: 32338 - RNA, 19 nt, synthetic construct
  source 1..19: mol_type = other RNA
ggaggcggtggccgtggat

SEQ ID NO: 32339 - RNA, 19 nt, synthetic construct
  source 1..19: mol_type = other RNA
gactggaggagggagtggc

SEQ ID NO: 32340 - RNA, 19 nt, synthetic construct
  source 1..19: mol_type = other RNA
gtagaggagggtgtggctg

SEQ ID NO: 32341 - RNA, 19 nt, synthetic construct
  source 1..19: mol_type = other RNA
gcactgtggaggtgtggac

SEQ ID NO: 32342 - RNA, 19 nt, synthetic construct
  source 1..19: mol_type = other RNA
agcactgtggaggtgtgga

SEQ ID NO: 32343 - RNA, 19 nt, synthetic construct
  source 1..19: mol_type = other RNA
cggtggccctggttgtggt

SEQ ID NO: 32344 - RNA, 19 nt, synthetic construct
  source 1..19: mol_type = other RNA
atggaggagggggtcaccg

SEQ ID NO: 32345 - RNA, 19 nt, synthetic construct
  source 1..19: mol_type = other RNA
tgaggaggggttggtggtg

SEQ ID NO: 32346 - RNA, 19 nt, synthetic construct
  source 1..19: mol_type = other RNA
ctgctggtggctgcaggtg

SEQ ID NO: 32347 - RNA, 19 nt, synthetic construct
  source 1..19: mol_type = other RNA
ggtgtggcccggggtggtc

SEQ ID NO: 32348 - RNA, 19 nt, synthetic construct
  source 1..19: mol_type = other RNA
tggctgtggctgtggtcct

SEQ ID NO: 32349 - RNA, 19 nt, synthetic construct
  source 1..19: mol_type = other RNA
ggaggcggtggccgtggat

SEQ ID NO: 32350 - RNA, 19 nt, synthetic construct
  source 1..19: mol_type = other RNA
tggagctggtgactgtggg

SEQ ID NO: 32351 - RNA, 19 nt, synthetic construct
  source 1..19: mol_type = other RNA
cggtggccctggttgtggt

SEQ ID NO: 32352 - RNA, 19 nt, synthetic construct
  source 1..19: mol_type = other RNA
agctgttcctggggtggaa

SEQ ID NO: 32353 - RNA, 19 nt, synthetic construct
  source 1..19: mol_type = other RNA
tgaggaggggttggtggtg

SEQ ID NO: 32354 - RNA, 19 nt, synthetic construct
  source 1..19: mol_type = other RNA
ctgctggtggctgcaggtg

SEQ ID NO: 32355 - RNA, 19 nt, synthetic construct
  source 1..19: mol_type = other RNA
atgtgggtggtgcccaagg

SEQ ID NO: 32356 - RNA, 19 nt, synthetic construct
  source 1..19: mol_type = other RNA
ggtgtggcccggggtggtc

SEQ ID NO: 32357 - RNA, 19 nt, synthetic construct
  source 1..19: mol_type = other RNA
tcccccagggggacaccag

SEQ ID NO: 32358 - RNA, 19 nt, synthetic construct
  source 1..19: mol_type = other RNA
gtaacgctggtagctgtgg

SEQ ID NO: 32359 - RNA, 19 nt, synthetic construct
  source 1..19: mol_type = other RNA
acatggtggccacgggtgt

SEQ ID NO: 32360 - RNA, 19 nt, synthetic construct
  source 1..19: mol_type = other RNA
gtggctgcagttgtagtgg

SEQ ID NO: 32361 - RNA, 19 nt, synthetic construct
  source 1..19: mol_type = other RNA
agtggctgcagttgtagtg

SEQ ID NO: 32362 - RNA, 19 nt, synthetic construct
  source 1..19: mol_type = other RNA
ggaggcggtggccgtggat

SEQ ID NO: 32363 - RNA, 19 nt, synthetic construct
  source 1..19: mol_type = other RNA
tggagctggtgactgtggg

SEQ ID NO: 32364 - RNA, 19 nt, synthetic construct
  source 1..19: mol_type = other RNA
actggaggagggagtggct

SEQ ID NO: 32365 - RNA, 19 nt, synthetic construct
  source 1..19: mol_type = other RNA
gactggaggagggagtggc

SEQ ID NO: 32366 - RNA, 19 nt, synthetic construct
  source 1..19: mol_type = other RNA
gcactgtggaggtgtggac

SEQ ID NO: 32367 - RNA, 19 nt, synthetic construct
  source 1..19: mol_type = other RNA
agcactgtggaggtgtgga

SEQ ID NO: 32368 - RNA, 19 nt, synthetic construct
  source 1..19: mol_type = other RNA
gggtgtggtggttgtgggt

SEQ ID NO: 32369 - RNA, 19 nt, synthetic construct
  source 1..19: mol_type = other RNA
atggaggagggggtcaccg

SEQ ID NO: 32370 - RNA, 19 nt, synthetic construct
  source 1..19: mol_type = other RNA
tgaggaggggttggtggtg

SEQ ID NO: 32371 - RNA, 19 nt, synthetic construct
  source 1..19: mol_type = other RNA
ggtggctgcgggtgtggtg

SEQ ID NO: 32372 - RNA, 19 nt, synthetic construct
  source 1..19: mol_type = other RNA
ttggagctggtggctgcgg

SEQ ID NO: 32373 - RNA, 19 nt, synthetic construct
  source 1..19: mol_type = other RNA
gtggctgtggtggtcagca

SEQ ID NO: 32374 - RNA, 19 nt, synthetic construct
  source 1..19: mol_type = other RNA
tggtggctgtggtggtcag

SEQ ID NO: 32375 - RNA, 19 nt, synthetic construct
  source 1..19: mol_type = other RNA
atggtggctgtggtggtca

SEQ ID NO: 32376 - RNA, 19 nt, synthetic construct
  source 1..19: mol_type = other RNA
gtggctgcagttgtagtgg

SEQ ID NO: 32377 - RNA, 19 nt, synthetic construct
  source 1..19: mol_type = other RNA
agtggctgcagttgtagtg

SEQ ID NO: 32378 - RNA, 19 nt, synthetic construct
  source 1..19: mol_type = other RNA
tggggaagccagtgggtct

SEQ ID NO: 32379 - RNA, 19 nt, synthetic construct
  source 1..19: mol_type = other RNA
gagggcgaggacagcgggg

SEQ ID NO: 32380 - RNA, 19 nt, synthetic construct
  source 1..19: mol_type = other RNA
acaggatcaggccctcctc

SEQ ID NO: 32381 - RNA, 19 nt, synthetic construct
  source 1..19: mol_type = other RNA
ccagtcggggcccagcagc

SEQ ID NO: 32382 - RNA, 19 nt, synthetic construct
  source 1..19: mol_type = other RNA
gggctggcagtggggggtg

SEQ ID NO: 32383 - RNA, 19 nt, synthetic construct
  source 1..19: mol_type = other RNA
catcccctccagctgtggg

SEQ ID NO: 32384 - RNA, 19 nt, synthetic construct
  source 1..19: mol_type = other RNA
tgggtgcagatggactcct

SEQ ID NO: 32385 - RNA, 19 nt, synthetic construct
  source 1..19: mol_type = other RNA
ctcctgggtgcagatggac

SEQ ID NO: 32386 - RNA, 19 nt, synthetic construct
  source 1..19: mol_type = other RNA
cagcagtcgccctcctcct

SEQ ID NO: 32387 - RNA, 19 nt, synthetic construct
  source 1..19: mol_type = other RNA
gcagggaagggcgcctggg

SEQ ID NO: 32388 - RNA, 19 nt, synthetic construct
  source 1..19: mol_type = other RNA
cctggggacaggtagtatt

SEQ ID NO: 32389 - RNA, 19 nt, synthetic construct
  source 1..19: mol_type = other RNA
attcagctggactggctgg

SEQ ID NO: 32390 - RNA, 19 nt, synthetic construct
  source 1..19: mol_type = other RNA
ccaccctcagcctcacaga

SEQ ID NO: 32391 - RNA, 19 nt, synthetic construct
  source 1..19: mol_type = other RNA
cctcctgggccgggaagcc

SEQ ID NO: 32392 - RNA, 19 nt, synthetic construct
  source 1..19: mol_type = other RNA
gcctcctgggccgggaagc

SEQ ID NO: 32393 - RNA, 19 nt, synthetic construct
  source 1..19: mol_type = other RNA
gctggcccctcacccttct

SEQ ID NO: 32394 - RNA, 19 nt, synthetic construct
  source 1..19: mol_type = other RNA
tcctggcagcagctggcct

SEQ ID NO: 32395 - RNA, 19 nt, synthetic construct
  source 1..19: mol_type = other RNA
gctcagggtttatttgcaa

SEQ ID NO: 32396 - RNA, 19 nt, synthetic construct
  source 1..19: mol_type = other RNA
cagggagggagccgggccg

SEQ ID NO: 32397 - RNA, 19 nt, synthetic construct
  source 1..19: mol_type = other RNA
ggcagggagggagccgggc

SEQ ID NO: 32398 - RNA, 19 nt, synthetic construct
  source 1..19: mol_type = other RNA
gggcagggagggagccggg

SEQ ID NO: 32399 - RNA, 19 nt, synthetic construct
  source 1..19: mol_type = other RNA
cgggcagggagggagccgg

SEQ ID NO: 32400 - RNA, 19 nt, synthetic construct
  source 1..19: mol_type = other RNA
acgggcagggagggagccg

SEQ ID NO: 32401 - RNA, 19 nt, synthetic construct
  source 1..19: mol_type = other RNA
gacgggcagggagggagcc

SEQ ID NO: 32402 - RNA, 19 nt, synthetic construct
  source 1..19: mol_type = other RNA
ggggacgggcagggaggga

SEQ ID NO: 32403 - RNA, 19 nt, synthetic construct
  source 1..19: mol_type = other RNA
cggggacgggcagggaggg

SEQ ID NO: 32404 - RNA, 19 nt, synthetic construct
  source 1..19: mol_type = other RNA
acggggacgggcagggagg

SEQ ID NO: 32405 - RNA, 19 nt, synthetic construct
  source 1..19: mol_type = other RNA
ggacggggacgggcaggga

SEQ ID NO: 32406 - RNA, 19 nt, synthetic construct
  source 1..19: mol_type = other RNA
acgggtggggggacgggga

SEQ ID NO: 32407 - RNA, 19 nt, synthetic construct
  source 1..19: mol_type = other RNA
gcacgggtggggggacggg

SEQ ID NO: 32408 - RNA, 19 nt, synthetic construct
  source 1..19: mol_type = other RNA
ggggctggcacgggtgggg

SEQ ID NO: 32409 - RNA, 19 nt, synthetic construct
  source 1..19: mol_type = other RNA
ctgggggctggcacgggtg

SEQ ID NO: 32410 - RNA, 19 nt, synthetic construct
  source 1..19: mol_type = other RNA
cctgggggctggcacgggt

SEQ ID NO: 32411 - RNA, 19 nt, synthetic construct
  source 1..19: mol_type = other RNA
atcctgggggctggcacgg

SEQ ID NO: 32412 - RNA, 19 nt, synthetic construct
  source 1..19: mol_type = other RNA
cggggcacccatcctgggg

SEQ ID NO: 32413 - RNA, 19 nt, synthetic construct
  source 1..19: mol_type = other RNA
tctctgcctgcggcaccac

SEQ ID NO: 32414 - RNA, 19 nt, synthetic construct
  source 1..19: mol_type = other RNA
gtctctgcctgcggcacca

SEQ ID NO: 32415 - RNA, 19 nt, synthetic construct
  source 1..19: mol_type = other RNA
acagggccctgggtctctg

SEQ ID NO: 32416 - RNA, 19 nt, synthetic construct
  source 1..19: mol_type = other RNA
cacagggccctgggtctct

SEQ ID NO: 32417 - RNA, 19 nt, synthetic construct
  source 1..19: mol_type = other RNA
tccacagggccctgggtct

SEQ ID NO: 32418 - RNA, 19 nt, synthetic construct
  source 1..19: mol_type = other RNA
gctccacagggccctgggt

SEQ ID NO: 32419 - RNA, 19 nt, synthetic construct
  source 1..19: mol_type = other RNA
tcggctccacagggccctg

SEQ ID NO: 32420 - RNA, 19 nt, synthetic construct
  source 1..19: mol_type = other RNA
gctcggctccacagggccc

SEQ ID NO: 32421 - RNA, 19 nt, synthetic construct
  source 1..19: mol_type = other RNA
ttctcccagctcggctcca

SEQ ID NO: 32422 - RNA, 19 nt, synthetic construct
  source 1..19: mol_type = other RNA
cgcgccgggtgggcgagga

SEQ ID NO: 32423 - RNA, 19 nt, synthetic construct
  source 1..19: mol_type = other RNA
caccccaggtgctgcacac

SEQ ID NO: 32424 - RNA, 19 nt, synthetic construct
  source 1..19: mol_type = other RNA
gtcaccccaggtgctgcac

SEQ ID NO: 32425 - RNA, 19 nt, synthetic construct
  source 1..19: mol_type = other RNA
ccacaggcctggagcccac

SEQ ID NO: 32426 - RNA, 19 nt, synthetic construct
  source 1..19: mol_type = other RNA
accacaggcctggagccca

SEQ ID NO: 32427 - RNA, 19 nt, synthetic construct
  source 1..19: mol_type = other RNA
cagctcctcccgctgccca

SEQ ID NO: 32428 - RNA, 19 nt, synthetic construct
  source 1..19: mol_type = other RNA
ctccaccaggaggccagtg

SEQ ID NO: 32429 - RNA, 19 nt, synthetic construct
  source 1..19: mol_type = other RNA
gctctgctccaccaggagg

SEQ ID NO: 32430 - RNA, 19 nt, synthetic construct
  source 1..19: mol_type = other RNA
cgctctgctccaccaggag

SEQ ID NO: 32431 - RNA, 19 nt, synthetic construct
  source 1..19: mol_type = other RNA
ccgctctgctccaccagga

SEQ ID NO: 32432 - RNA, 19 nt, synthetic construct
  source 1..19: mol_type = other RNA
ccccgctctgctccaccag

SEQ ID NO: 32433 - RNA, 19 nt, synthetic construct
  source 1..19: mol_type = other RNA
tccccgctctgctccacca

SEQ ID NO: 32434 - RNA, 19 nt, synthetic construct
  source 1..19: mol_type = other RNA
gtccccgctctgctccacc

SEQ ID NO: 32435 - RNA, 19 nt, synthetic construct
  source 1..19: mol_type = other RNA
ggatccagctccagcaggg

SEQ ID NO: 32436 - RNA, 19 nt, synthetic construct
  source 1..19: mol_type = other RNA
tttgggatccagctccagc

SEQ ID NO: 32437 - RNA, 19 nt, synthetic construct
  source 1..19: mol_type = other RNA
gtatttgggatccagctcc

SEQ ID NO: 32438 - RNA, 19 nt, synthetic construct
  source 1..19: mol_type = other RNA
cacacaggccacaggtctg

SEQ ID NO: 32439 - RNA, 19 nt, synthetic construct
  source 1..19: mol_type = other RNA
ccacacaggccacaggtct

SEQ ID NO: 32440 - RNA, 19 nt, synthetic construct
  source 1..19: mol_type = other RNA
aagtccccacacaggccac

SEQ ID NO: 32441 - RNA, 19 nt, synthetic construct
  source 1..19: mol_type = other RNA
actggagcggggtcagcct

SEQ ID NO: 32442 - RNA, 19 nt, synthetic construct
  source 1..19: mol_type = other RNA
agggtgcggtggcagatgc

SEQ ID NO: 32443 - RNA, 19 nt, synthetic construct
  source 1..19: mol_type = other RNA
cccagcagggtgcggtggc

SEQ ID NO: 32444 - RNA, 19 nt, synthetic construct
  source 1..19: mol_type = other RNA
ggccccagcagggtgcggt

SEQ ID NO: 32445 - RNA, 19 nt, synthetic construct
  source 1..19: mol_type = other RNA
ggccggccccagcagggtg

SEQ ID NO: 32446 - RNA, 19 nt, synthetic construct
  source 1..19: mol_type = other RNA
aggccggccccagcagggt

SEQ ID NO: 32447 - RNA, 19 nt, synthetic construct
  source 1..19: mol_type = other RNA
cagtgctgtccaccagtgc

SEQ ID NO: 32448 - RNA, 19 nt, synthetic construct
  source 1..19: mol_type = other RNA
aggtggcacacgggcaggt

SEQ ID NO: 32449 - RNA, 19 nt, synthetic construct
  source 1..19: mol_type = other RNA
ttccgcggctggccccccg

SEQ ID NO: 32450 - RNA, 19 nt, synthetic construct
  source 1..19: mol_type = other RNA
cagggcacctccagttccg

SEQ ID NO: 32451 - RNA, 19 nt, synthetic construct
  source 1..19: mol_type = other RNA
gagctcagggcacctccag

SEQ ID NO: 32452 - RNA, 19 nt, synthetic construct
  source 1..19: mol_type = other RNA
gcagagctcagggcacctc

SEQ ID NO: 32453 - RNA, 19 nt, synthetic construct
  source 1..19: mol_type = other RNA
gggggcagagctcagggca

SEQ ID NO: 32454 - RNA, 19 nt, synthetic construct
  source 1..19: mol_type = other RNA
gagggggcaggtccggggg

SEQ ID NO: 32455 - RNA, 19 nt, synthetic construct
  source 1..19: mol_type = other RNA
gtgagccacactcctggtg

SEQ ID NO: 32456 - RNA, 19 nt, synthetic construct
  source 1..19: mol_type = other RNA
ggtgagccacactcctggt

SEQ ID NO: 32457 - RNA, 19 nt, synthetic construct
  source 1..19: mol_type = other RNA
gggtgagccacactcctgg

SEQ ID NO: 32458 - RNA, 19 nt, synthetic construct
  source 1..19: mol_type = other RNA
ggttggagcaggtgtccgt

SEQ ID NO: 32459 - RNA, 19 nt, synthetic construct
  source 1..19: mol_type = other RNA
tcgcagagctgcgcgcgct

SEQ ID NO: 32460 - RNA, 19 nt, synthetic construct
  source 1..19: mol_type = other RNA
agtggtcctcgcagagctg

SEQ ID NO: 32461 - RNA, 19 nt, synthetic construct
  source 1..19: mol_type = other RNA
tgaaggaggtgcccgggct

SEQ ID NO: 32462 - RNA, 19 nt, synthetic construct
  source 1..19: mol_type = other RNA
tgcaggtggtgttgaagga

SEQ ID NO: 32463 - RNA, 19 nt, synthetic construct
  source 1..19: mol_type = other RNA
cccccggagcaggtgcagg

SEQ ID NO: 32464 - RNA, 19 nt, synthetic construct
  source 1..19: mol_type = other RNA
agagcaggtgccagggcac

SEQ ID NO: 32465 - RNA, 19 nt, synthetic construct
  source 1..19: mol_type = other RNA
cagagcaggtgccagggca

SEQ ID NO: 32466 - RNA, 19 nt, synthetic construct
  source 1..19: mol_type = other RNA
cacagagcaggtgccaggg

SEQ ID NO: 32467 - RNA, 19 nt, synthetic construct
  source 1..19: mol_type = other RNA
tgcacagagcaggtgccag

SEQ ID NO: 32468 - RNA, 19 nt, synthetic construct
  source 1..19: mol_type = other RNA
ctgcacagagcaggtgcca

SEQ ID NO: 32469 - RNA, 19 nt, synthetic construct
  source 1..19: mol_type = other RNA
cgccctgcacagagcaggt

SEQ ID NO: 32470 - RNA, 19 nt, synthetic construct
  source 1..19: mol_type = other RNA
gggccccgccctgcacaga

SEQ ID NO: 32471 - RNA, 19 nt, synthetic construct
  source 1..19: mol_type = other RNA
atgtgggccccgccctgca

SEQ ID NO: 32472 - RNA, 19 nt, synthetic construct
  source 1..19: mol_type = other RNA
cagcacggtgaagctgctg

SEQ ID NO: 32473 - RNA, 19 nt, synthetic construct
  source 1..19: mol_type = other RNA
ccgcagctcagccagcacg

SEQ ID NO: 32474 - RNA, 19 nt, synthetic construct
  source 1..19: mol_type = other RNA
ttccgcagctcagccagca

SEQ ID NO: 32475 - RNA, 19 nt, synthetic construct
  source 1..19: mol_type = other RNA
cttccgcagctcagccagc

SEQ ID NO: 32476 - RNA, 19 nt, synthetic construct
  source 1..19: mol_type = other RNA
acttccgcagctcagccag

SEQ ID NO: 32477 - RNA, 19 nt, synthetic construct
  source 1..19: mol_type = other RNA
tgtctgcaccacgatgaag

SEQ ID NO: 32478 - RNA, 19 nt, synthetic construct
  source 1..19: mol_type = other RNA
cccaggcctgtctgcacca

SEQ ID NO: 32479 - RNA, 19 nt, synthetic construct
  source 1..19: mol_type = other RNA
ccccaggcctgtctgcacc

SEQ ID NO: 32480 - RNA, 19 nt, synthetic construct
  source 1..19: mol_type = other RNA
agccccaggcctgtctgca

SEQ ID NO: 32481 - RNA, 19 nt, synthetic construct
  source 1..19: mol_type = other RNA
gcagccccaggcctgtctg

SEQ ID NO: 32482 - RNA, 19 nt, synthetic construct
  source 1..19: mol_type = other RNA
ctgcagccccaggcctgtc

SEQ ID NO: 32483 - RNA, 19 nt, synthetic construct
  source 1..19: mol_type = other RNA
gcaccagcagctgcagccc

SEQ ID NO: 32484 - RNA, 19 nt, synthetic construct
  source 1..19: mol_type = other RNA
ctccaccaccccgctgagg

SEQ ID NO: 32485 - RNA, 19 nt, synthetic construct
  source 1..19: mol_type = other RNA
cctccaccaccccgctgag

SEQ ID NO: 32486 - RNA, 19 nt, synthetic construct
  source 1..19: mol_type = other RNA
gtggcctccaccaccccgc

SEQ ID NO: 32487 - RNA, 19 nt, synthetic construct
  source 1..19: mol_type = other RNA
tgcgcccgtggcctccacc

SEQ ID NO: 32488 - RNA, 19 nt, synthetic construct
  source 1..19: mol_type = other RNA
agcctgggccttccaggtg

SEQ ID NO: 32489 - RNA, 19 nt, synthetic construct
  source 1..19: mol_type = other RNA
cagcctgggccttccaggt

SEQ ID NO: 32490 - RNA, 19 nt, synthetic construct
  source 1..19: mol_type = other RNA
acaggcagcctgggccttc

SEQ ID NO: 32491 - RNA, 19 nt, synthetic construct
  source 1..19: mol_type = other RNA
cacaggcagcctgggcctt

SEQ ID NO: 32492 - RNA, 19 nt, synthetic construct
  source 1..19: mol_type = other RNA
ggcacaggcagcctgggcc

SEQ ID NO: 32493 - RNA, 19 nt, synthetic construct
  source 1..19: mol_type = other RNA
ggcattggcacaggcagcc

SEQ ID NO: 32494 - RNA, 19 nt, synthetic construct
  source 1..19: mol_type = other RNA
cgagaaggcactgttggga

SEQ ID NO: 32495 - RNA, 19 nt, synthetic construct
  source 1..19: mol_type = other RNA
ggttgatgatggagtggca

SEQ ID NO: 32496 - RNA, 19 nt, synthetic construct
  source 1..19: mol_type = other RNA
ggcttggggttgatgatgg

SEQ ID NO: 32497 - RNA, 19 nt, synthetic construct
  source 1..19: mol_type = other RNA
gggcttggggttgatgatg

SEQ ID NO: 32498 - RNA, 19 nt, synthetic construct
  source 1..19: mol_type = other RNA
aaacatgcagttcgagtgg

SEQ ID NO: 32499 - RNA, 19 nt, synthetic construct
  source 1..19: mol_type = other RNA
gcagccgtccacaggcacg

SEQ ID NO: 32500 - RNA, 19 nt, synthetic construct
  source 1..19: mol_type = other RNA
gcggggcaggtgcagccgt

SEQ ID NO: 32501 - RNA, 19 nt, synthetic construct
  source 1..19: mol_type = other RNA
tagcaggggcactcctggg

SEQ ID NO: 32502 - RNA, 19 nt, synthetic construct
  source 1..19: mol_type = other RNA
gcaccacctctccaggagc

SEQ ID NO: 32503 - RNA, 19 nt, synthetic construct
  source 1..19: mol_type = other RNA
agaggctcccaggcagctt

SEQ ID NO: 32504 - RNA, 19 nt, synthetic construct
  source 1..19: mol_type = other RNA
gcacaccctgtgcttttct

SEQ ID NO: 32505 - RNA, 19 nt, synthetic construct
  source 1..19: mol_type = other RNA
gctgttgctgcagtccagg

SEQ ID NO: 32506 - RNA, 19 nt, synthetic construct
  source 1..19: mol_type = other RNA
gcagcccccactcccatcc

SEQ ID NO: 32507 - RNA, 19 nt, synthetic construct
  source 1..19: mol_type = other RNA
aatgcagcccccactccca

SEQ ID NO: 32508 - RNA, 19 nt, synthetic construct
  source 1..19: mol_type = other RNA
tcctgcaggtgcaggtgtt

SEQ ID NO: 32509 - RNA, 19 nt, synthetic construct
  source 1..19: mol_type = other RNA
ttcctgcaggtgcaggtgt

SEQ ID NO: 32510 - RNA, 19 nt, synthetic construct
  source 1..19: mol_type = other RNA
gtggtgttgtccccacagt

SEQ ID NO: 32511 - RNA, 19 nt, synthetic construct
  source 1..19: mol_type = other RNA
cggccctctcgccaccgcc

SEQ ID NO: 32512 - RNA, 19 nt, synthetic construct
  source 1..19: mol_type = other RNA
gggtccccacccggccctc

SEQ ID NO: 32513 - RNA, 19 nt, synthetic construct
  source 1..19: mol_type = other RNA
tccgggcaggagggggaga

SEQ ID NO: 32514 - RNA, 19 nt, synthetic construct
  source 1..19: mol_type = other RNA
gtgcaggggtccttgggtg

SEQ ID NO: 32515 - RNA, 19 nt, synthetic construct
  source 1..19: mol_type = other RNA
aggggcaggtgtccggagt

SEQ ID NO: 32516 - RNA, 19 nt, synthetic construct
  source 1..19: mol_type = other RNA
cacagaacaaggggcaggt

SEQ ID NO: 32517 - RNA, 19 nt, synthetic construct
  source 1..19: mol_type = other RNA
tgccactcacagcccccat

SEQ ID NO: 32518 - RNA, 19 nt, synthetic construct
  source 1..19: mol_type = other RNA
agtgccactcacagccccc

SEQ ID NO: 32519 - RNA, 19 nt, synthetic construct
  source 1..19: mol_type = other RNA
gggctggctgggtgggcac

SEQ ID NO: 32520 - RNA, 19 nt, synthetic construct
  source 1..19: mol_type = other RNA
agggctggctgggtgggca

SEQ ID NO: 32521 - RNA, 19 nt, synthetic construct
  source 1..19: mol_type = other RNA
atgccacagccttcctgat

SEQ ID NO: 32522 - RNA, 19 nt, synthetic construct
  source 1..19: mol_type = other RNA
acatgccacagccttcctg

SEQ ID NO: 32523 - RNA, 19 nt, synthetic construct
  source 1..19: mol_type = other RNA
ggctggagttccaggacat

SEQ ID NO: 32524 - RNA, 19 nt, synthetic construct
  source 1..19: mol_type = other RNA
ggcggtggtgaaggtgaat

SEQ ID NO: 32525 - RNA, 19 nt, synthetic construct
  source 1..19: mol_type = other RNA
ccaggcggtggtgaaggtg

SEQ ID NO: 32526 - RNA, 19 nt, synthetic construct
  source 1..19: mol_type = other RNA
cccaggcggtggtgaaggt

SEQ ID NO: 32527 - RNA, 19 nt, synthetic construct
  source 1..19: mol_type = other RNA
gtggagtgggggacccagg

SEQ ID NO: 32528 - RNA, 19 nt, synthetic construct
  source 1..19: mol_type = other RNA
cggtggagaccgggagggc

SEQ ID NO: 32529 - RNA, 19 nt, synthetic construct
  source 1..19: mol_type = other RNA
acggtggagaccgggaggg

SEQ ID NO: 32530 - RNA, 19 nt, synthetic construct
  source 1..19: mol_type = other RNA
gtgcccattgtaccagctg

SEQ ID NO: 32531 - RNA, 19 nt, synthetic construct
  source 1..19: mol_type = other RNA
cggtgcccattgtaccagc

SEQ ID NO: 32532 - RNA, 19 nt, synthetic construct
  source 1..19: mol_type = other RNA
tcccaggccgggctctggg

SEQ ID NO: 32533 - RNA, 19 nt, synthetic construct
  source 1..19: mol_type = other RNA
ccgcctcccaggccgggct

SEQ ID NO: 32534 - RNA, 19 nt, synthetic construct
  source 1..19: mol_type = other RNA
tccgcctcccaggccgggc

SEQ ID NO: 32535 - RNA, 19 nt, synthetic construct
  source 1..19: mol_type = other RNA
tctccgcctcccaggccgg

SEQ ID NO: 32536 - RNA, 19 nt, synthetic construct
  source 1..19: mol_type = other RNA
gctggcccagctcctccag

SEQ ID NO: 32537 - RNA, 19 nt, synthetic construct
  source 1..19: mol_type = other RNA
ccacctgctggcccagctc

SEQ ID NO: 32538 - RNA, 19 nt, synthetic construct
  source 1..19: mol_type = other RNA
ggggaggggccacagggca

SEQ ID NO: 32539 - RNA, 19 nt, synthetic construct
  source 1..19: mol_type = other RNA
ccggggaggggccacaggg

SEQ ID NO: 32540 - RNA, 19 nt, synthetic construct
  source 1..19: mol_type = other RNA
gccggggaggggccacagg

SEQ ID NO: 32541 - RNA, 19 nt, synthetic construct
  source 1..19: mol_type = other RNA
ggccggggaggggccacag

SEQ ID NO: 32542 - RNA, 19 nt, synthetic construct
  source 1..19: mol_type = other RNA
gggccggggaggggccaca

SEQ ID NO: 32543 - RNA, 19 nt, synthetic construct
  source 1..19: mol_type = other RNA
gtgcctggggccggggagg

SEQ ID NO: 32544 - RNA, 19 nt, synthetic construct
  source 1..19: mol_type = other RNA
tgagggctggtgcctgggg

SEQ ID NO: 32545 - RNA, 19 nt, synthetic construct
  source 1..19: mol_type = other RNA
ctgagggctggtgcctggg

SEQ ID NO: 32546 - RNA, 19 nt, synthetic construct
  source 1..19: mol_type = other RNA
gctgagggctggtgcctgg

SEQ ID NO: 32547 - RNA, 19 nt, synthetic construct
  source 1..19: mol_type = other RNA
gggctgagggctggtgcct

SEQ ID NO: 32548 - RNA, 19 nt, synthetic construct
  source 1..19: mol_type = other RNA
gagggagggctgagggctg

SEQ ID NO: 32549 - RNA, 19 nt, synthetic construct
  source 1..19: mol_type = other RNA
cactgagggagggctgagg

SEQ ID NO: 32550 - RNA, 19 nt, synthetic construct
  source 1..19: mol_type = other RNA
ctggcactgagggagggct

SEQ ID NO: 32551 - RNA, 19 nt, synthetic construct
  source 1..19: mol_type = other RNA
ggttgctgtggtctgggtt

SEQ ID NO: 32552 - RNA, 19 nt, synthetic construct
  source 1..19: mol_type = other RNA
gtcacggggcctgagctgg

SEQ ID NO: 32553 - RNA, 19 nt, synthetic construct
  source 1..19: mol_type = other RNA
tacctggggccgagggggt

SEQ ID NO: 32554 - RNA, 19 nt, synthetic construct
  source 1..19: mol_type = other RNA
tgccctccagcggccctga

SEQ ID NO: 32555 - RNA, 19 nt, synthetic construct
  source 1..19: mol_type = other RNA
ctgcagcagaggacccgga

SEQ ID NO: 32556 - RNA, 19 nt, synthetic construct
  source 1..19: mol_type = other RNA
ctccagctctgtggtcggt

SEQ ID NO: 32557 - RNA, 19 nt, synthetic construct
  source 1..19: mol_type = other RNA
ggccgtctccagctctgtg

SEQ ID NO: 32558 - RNA, 19 nt, synthetic construct
  source 1..19: mol_type = other RNA
tggccgtctccagctctgt

SEQ ID NO: 32559 - RNA, 19 nt, synthetic construct
  source 1..19: mol_type = other RNA
ggcctgggtggtggtggtg

SEQ ID NO: 32560 - RNA, 19 nt, synthetic construct
  source 1..19: mol_type = other RNA
gggcctgggtggtggtggt

SEQ ID NO: 32561 - RNA, 19 nt, synthetic construct
  source 1..19: mol_type = other RNA
cagggcctgggtggtggtg

SEQ ID NO: 32562 - RNA, 19 nt, synthetic construct
  source 1..19: mol_type = other RNA
agaacagggcctgggtggt

SEQ ID NO: 32563 - RNA, 19 nt, synthetic construct
  source 1..19: mol_type = other RNA
gagaacagggcctgggtgg

SEQ ID NO: 32564 - RNA, 19 nt, synthetic construct
  source 1..19: mol_type = other RNA
ttgagaacagggcctgggt

SEQ ID NO: 32565 - RNA, 19 nt, synthetic construct
  source 1..19: mol_type = other RNA
gccctggtcagccccgggc

SEQ ID NO: 32566 - RNA, 19 nt, synthetic construct
  source 1..19: mol_type = other RNA
gggagccctggtcagcccc

SEQ ID NO: 32567 - RNA, 19 nt, synthetic construct
  source 1..19: mol_type = other RNA
tggccgggggagccctggt

SEQ ID NO: 32568 - RNA, 19 nt, synthetic construct
  source 1..19: mol_type = other RNA
gctggccgggggagccctg

SEQ ID NO: 32569 - RNA, 19 nt, synthetic construct
  source 1..19: mol_type = other RNA
gtgctggccgggggagccc

SEQ ID NO: 32570 - RNA, 19 nt, synthetic construct
  source 1..19: mol_type = other RNA
ggggatgtcagtccttctg

SEQ ID NO: 32571 - RNA, 19 nt, synthetic construct
  source 1..19: mol_type = other RNA
gttctgtggagcctgcagg

SEQ ID NO: 32572 - RNA, 19 nt, synthetic construct
  source 1..19: mol_type = other RNA
cctggaagggctgagcgtg

SEQ ID NO: 32573 - RNA, 19 nt, synthetic construct
  source 1..19: mol_type = other RNA
ccctggaagggctgagcgt

SEQ ID NO: 32574 - RNA, 19 nt, synthetic construct
  source 1..19: mol_type = other RNA
tggctgtgaggggcgccat

SEQ ID NO: 32575 - RNA, 19 nt, synthetic construct
  source 1..19: mol_type = other RNA
gggtggctgtgaggggcgc

SEQ ID NO: 32576 - RNA, 19 nt, synthetic construct
  source 1..19: mol_type = other RNA
cgtgggtggctgtgagggg

SEQ ID NO: 32577 - RNA, 19 nt, synthetic construct
  source 1..19: mol_type = other RNA
tgctggctgtgcctgtcgg

SEQ ID NO: 32578 - RNA, 19 nt, synthetic construct
  source 1..19: mol_type = other RNA
gtgctggctgtgcctgtcg

SEQ ID NO: 32579 - RNA, 19 nt, synthetic construct
  source 1..19: mol_type = other RNA
cggtgctggctgtgcctgt

SEQ ID NO: 32580 - RNA, 19 nt, synthetic construct
  source 1..19: mol_type = other RNA
gcggtgctggctgtgcctg

SEQ ID NO: 32581 - RNA, 19 nt, synthetic construct
  source 1..19: mol_type = other RNA
cggcctgagaggtggacag

SEQ ID NO: 32582 - RNA, 19 nt, synthetic construct
  source 1..19: mol_type = other RNA
gctggtggtggtgttagtc

SEQ ID NO: 32583 - RNA, 19 nt, synthetic construct
  source 1..19: mol_type = other RNA
tgccctggctggtggtggt

SEQ ID NO: 32584 - RNA, 19 nt, synthetic construct
  source 1..19: mol_type = other RNA
cgtgccctggctggtggtg

SEQ ID NO: 32585 - RNA, 19 nt, synthetic construct
  source 1..19: mol_type = other RNA
gggtcgtgccctggctggt

SEQ ID NO: 32586 - RNA, 19 nt, synthetic construct
  source 1..19: mol_type = other RNA
gggtggaggtcggggtggc

SEQ ID NO: 32587 - RNA, 19 nt, synthetic construct
  source 1..19: mol_type = other RNA
agggtggaggtcggggtgg

SEQ ID NO: 32588 - RNA, 19 nt, synthetic construct
  source 1..19: mol_type = other RNA
tcagggtggaggtcggggt

SEQ ID NO: 32589 - RNA, 19 nt, synthetic construct
  source 1..19: mol_type = other RNA
ttgggagggggagctgttc

SEQ ID NO: 32590 - RNA, 19 nt, synthetic construct
  source 1..19: mol_type = other RNA
tgtgggtgtggtggccgtg

SEQ ID NO: 32591 - RNA, 19 nt, synthetic construct
  source 1..19: mol_type = other RNA
gactgtgggtgtggtggcc

SEQ ID NO: 32592 - RNA, 19 nt, synthetic construct
  source 1..19: mol_type = other RNA
gtgactgtgggtgtggtgg

SEQ ID NO: 32593 - RNA, 19 nt, synthetic construct
  source 1..19: mol_type = other RNA
tggtgactgtgggtgtggt

SEQ ID NO: 32594 - RNA, 19 nt, synthetic construct
  source 1..19: mol_type = other RNA
ggagctggtgactgtgggt

SEQ ID NO: 32595 - RNA, 19 nt, synthetic construct
  source 1..19: mol_type = other RNA
ttggagctggtgactgtgg

SEQ ID NO: 32596 - RNA, 19 nt, synthetic construct
  source 1..19: mol_type = other RNA
tttggagctggtgactgtg

SEQ ID NO: 32597 - RNA, 19 nt, synthetic construct
  source 1..19: mol_type = other RNA
gagtggctttggagctggt

SEQ ID NO: 32598 - RNA, 19 nt, synthetic construct
  source 1..19: mol_type = other RNA
ggaggagggagtggctttg

SEQ ID NO: 32599 - RNA, 19 nt, synthetic construct
  source 1..19: mol_type = other RNA
tggaggagggagtggcttt

SEQ ID NO: 32600 - RNA, 19 nt, synthetic construct
  source 1..19: mol_type = other RNA
ggactggaggagggagtgg

SEQ ID NO: 32601 - RNA, 19 nt, synthetic construct
  source 1..19: mol_type = other RNA
ccctggactggaggaggga

SEQ ID NO: 32602 - RNA, 19 nt, synthetic construct
  source 1..19: mol_type = other RNA
agggaggaagaggggatgg

SEQ ID NO: 32603 - RNA, 19 nt, synthetic construct
  source 1..19: mol_type = other RNA
tgcccagggaggaagaggg

SEQ ID NO: 32604 - RNA, 19 nt, synthetic construct
  source 1..19: mol_type = other RNA
ggtgcccagggaggaagag

SEQ ID NO: 32605 - RNA, 19 nt, synthetic construct
  source 1..19: mol_type = other RNA
tggtgcccagggaggaaga

SEQ ID NO: 32606 - RNA, 19 nt, synthetic construct
  source 1..19: mol_type = other RNA
gtggtgcccagggaggaag

SEQ ID NO: 32607 - RNA, 19 nt, synthetic construct
  source 1..19: mol_type = other RNA
ggtggtgcccagggaggaa

SEQ ID NO: 32608 - RNA, 19 nt, synthetic construct
  source 1..19: mol_type = other RNA
ccaggtggtgcccagggag

SEQ ID NO: 32609 - RNA, 19 nt, synthetic construct
  source 1..19: mol_type = other RNA
ggtccaggtggtgcccagg

SEQ ID NO: 32610 - RNA, 19 nt, synthetic construct
  source 1..19: mol_type = other RNA
cgggtccaggtggtgccca

SEQ ID NO: 32611 - RNA, 19 nt, synthetic construct
  source 1..19: mol_type = other RNA
gcgggtccaggtggtgccc

SEQ ID NO: 32612 - RNA, 19 nt, synthetic construct
  source 1..19: mol_type = other RNA
ggcgggtccaggtggtgcc

SEQ ID NO: 32613 - RNA, 19 nt, synthetic construct
  source 1..19: mol_type = other RNA
aggcgggtccaggtggtgc

SEQ ID NO: 32614 - RNA, 19 nt, synthetic construct
  source 1..19: mol_type = other RNA
tgggtgtggtggtctgtga

SEQ ID NO: 32615 - RNA, 19 nt, synthetic construct
  source 1..19: mol_type = other RNA
tggctgtggacatggtggc

SEQ ID NO: 32616 - RNA, 19 nt, synthetic construct
  source 1..19: mol_type = other RNA
gtgtggctgtggacatggt

SEQ ID NO: 32617 - RNA, 19 nt, synthetic construct
  source 1..19: mol_type = other RNA
agggtgtggctgtggacat

SEQ ID NO: 32618 - RNA, 19 nt, synthetic construct
  source 1..19: mol_type = other RNA
tctggagtggaggagggtg

SEQ ID NO: 32619 - RNA, 19 nt, synthetic construct
  source 1..19: mol_type = other RNA
cactgtggaggtgtgggca

SEQ ID NO: 32620 - RNA, 19 nt, synthetic construct
  source 1..19: mol_type = other RNA
gttgtggtggccgtggcgg

SEQ ID NO: 32621 - RNA, 19 nt, synthetic construct
  source 1..19: mol_type = other RNA
aggagggggtggccacaga

SEQ ID NO: 32622 - RNA, 19 nt, synthetic construct
  source 1..19: mol_type = other RNA
gaggagggggtggccacag

SEQ ID NO: 32623 - RNA, 19 nt, synthetic construct
  source 1..19: mol_type = other RNA
ggaggagggggtggccaca

SEQ ID NO: 32624 - RNA, 19 nt, synthetic construct
  source 1..19: mol_type = other RNA
tggaggagggggtggccac

SEQ ID NO: 32625 - RNA, 19 nt, synthetic construct
  source 1..19: mol_type = other RNA
gtggaggagggggtggcca

SEQ ID NO: 32626 - RNA, 19 nt, synthetic construct
  source 1..19: mol_type = other RNA
tcctggggtggaggagggg

SEQ ID NO: 32627 - RNA, 19 nt, synthetic construct
  source 1..19: mol_type = other RNA
tgttcctggggtggaggag

SEQ ID NO: 32628 - RNA, 19 nt, synthetic construct
  source 1..19: mol_type = other RNA
gggtggctgtgaagcccgt

SEQ ID NO: 32629 - RNA, 19 nt, synthetic construct
  source 1..19: mol_type = other RNA
aggagggggtggctgtgaa

SEQ ID NO: 32630 - RNA, 19 nt, synthetic construct
  source 1..19: mol_type = other RNA
tggaggagggggtggctgt

SEQ ID NO: 32631 - RNA, 19 nt, synthetic construct
  source 1..19: mol_type = other RNA
gccgtccctgggctggagg

SEQ ID NO: 32632 - RNA, 19 nt, synthetic construct
  source 1..19: mol_type = other RNA
tgccgtccctgggctggag

SEQ ID NO: 32633 - RNA, 19 nt, synthetic construct
  source 1..19: mol_type = other RNA
tgtgctgatccacactgga

SEQ ID NO: 32634 - RNA, 19 nt, synthetic construct
  source 1..19: mol_type = other RNA
gatggaggagggggtcacc

SEQ ID NO: 32635 - RNA, 19 nt, synthetic construct
  source 1..19: mol_type = other RNA
cgggatggaggagggggtc

SEQ ID NO: 32636 - RNA, 19 nt, synthetic construct
  source 1..19: mol_type = other RNA
cccgggatggaggaggggg

SEQ ID NO: 32637 - RNA, 19 nt, synthetic construct
  source 1..19: mol_type = other RNA
tccccgggatggaggaggg

SEQ ID NO: 32638 - RNA, 19 nt, synthetic construct
  source 1..19: mol_type = other RNA
ggtccccgggatggaggag

SEQ ID NO: 32639 - RNA, 19 nt, synthetic construct
  source 1..19: mol_type = other RNA
ggtggtggtcagcactgtg

SEQ ID NO: 32640 - RNA, 19 nt, synthetic construct
  source 1..19: mol_type = other RNA
ttgtggtggtggtggtcag

SEQ ID NO: 32641 - RNA, 19 nt, synthetic construct
  source 1..19: mol_type = other RNA
gttgtggtggtggtggtca

SEQ ID NO: 32642 - RNA, 19 nt, synthetic construct
  source 1..19: mol_type = other RNA
cacagttgtggtggtggtg

SEQ ID NO: 32643 - RNA, 19 nt, synthetic construct
  source 1..19: mol_type = other RNA
cagtggccacagttgtggt

SEQ ID NO: 32644 - RNA, 19 nt, synthetic construct
  source 1..19: mol_type = other RNA
tgccatagaaccagtggcc

SEQ ID NO: 32645 - RNA, 19 nt, synthetic construct
  source 1..19: mol_type = other RNA
tagtggccgtggtggtcag

SEQ ID NO: 32646 - RNA, 19 nt, synthetic construct
  source 1..19: mol_type = other RNA
ggtggtggagccggtggcc

SEQ ID NO: 32647 - RNA, 19 nt, synthetic construct
  source 1..19: mol_type = other RNA
ggttggtggtggagccggt

SEQ ID NO: 32648 - RNA, 19 nt, synthetic construct
  source 1..19: mol_type = other RNA
ttgaggaggggttggtggt

SEQ ID NO: 32649 - RNA, 19 nt, synthetic construct
  source 1..19: mol_type = other RNA
agttgaggaggggttggtg

SEQ ID NO: 32650 - RNA, 19 nt, synthetic construct
  source 1..19: mol_type = other RNA
aggagttgaggaggggttg

SEQ ID NO: 32651 - RNA, 19 nt, synthetic construct
  source 1..19: mol_type = other RNA
ctggggggatgggagttgt

SEQ ID NO: 32652 - RNA, 19 nt, synthetic construct
  source 1..19: mol_type = other RNA
cactggggggatgggagtt

SEQ ID NO: 32653 - RNA, 19 nt, synthetic construct
  source 1..19: mol_type = other RNA
tcagcactggggggatggg

SEQ ID NO: 32654 - RNA, 19 nt, synthetic construct
  source 1..19: mol_type = other RNA
gtggtggtcagcactgggg

SEQ ID NO: 32655 - RNA, 19 nt, synthetic construct
  source 1..19: mol_type = other RNA
cggtggtggtcagcactgg

SEQ ID NO: 32656 - RNA, 19 nt, synthetic construct
  source 1..19: mol_type = other RNA
gtggtggcggtggtggtca

SEQ ID NO: 32657 - RNA, 19 nt, synthetic construct
  source 1..19: mol_type = other RNA
aggtgtggtggcggtggtg

SEQ ID NO: 32658 - RNA, 19 nt, synthetic construct
  source 1..19: mol_type = other RNA
ctgcaggtgtggtggcggt

SEQ ID NO: 32659 - RNA, 19 nt, synthetic construct
  source 1..19: mol_type = other RNA
ggctgcaggtgtggtggcg

SEQ ID NO: 32660 - RNA, 19 nt, synthetic construct
  source 1..19: mol_type = other RNA
tggctgcaggtgtggtggc

SEQ ID NO: 32661 - RNA, 19 nt, synthetic construct
  source 1..19: mol_type = other RNA
gttgctggtggctgcaggt

SEQ ID NO: 32662 - RNA, 19 nt, synthetic construct
  source 1..19: mol_type = other RNA
gtgttgctggtggctgcag

SEQ ID NO: 32663 - RNA, 19 nt, synthetic construct
  source 1..19: mol_type = other RNA
ctgtgttgctggtggctgc

SEQ ID NO: 32664 - RNA, 19 nt, synthetic construct
  source 1..19: mol_type = other RNA
tcactgtgttgctggtggc

SEQ ID NO: 32665 - RNA, 19 nt, synthetic construct
  source 1..19: mol_type = other RNA
agtcactgtgttgctggtg

SEQ ID NO: 32666 - RNA, 19 nt, synthetic construct
  source 1..19: mol_type = other RNA
tagggcagaggagggagtc

SEQ ID NO: 32667 - RNA, 19 nt, synthetic construct
  source 1..19: mol_type = other RNA
cggcactgggggtgtgtgg

SEQ ID NO: 32668 - RNA, 19 nt, synthetic construct
  source 1..19: mol_type = other RNA
ttcggcactgggggtgtgt

SEQ ID NO: 32669 - RNA, 19 nt, synthetic construct
  source 1..19: mol_type = other RNA
tgtgtggtggccatggtgt

SEQ ID NO: 32670 - RNA, 19 nt, synthetic construct
  source 1..19: mol_type = other RNA
gactgctggggggcaggga

SEQ ID NO: 32671 - RNA, 19 nt, synthetic construct
  source 1..19: mol_type = other RNA
gggactgctggggggcagg

SEQ ID NO: 32672 - RNA, 19 nt, synthetic construct
  source 1..19: mol_type = other RNA
ggggactgctggggggcag

SEQ ID NO: 32673 - RNA, 19 nt, synthetic construct
  source 1..19: mol_type = other RNA
tgtggggactgctgggggg

SEQ ID NO: 32674 - RNA, 19 nt, synthetic construct
  source 1..19: mol_type = other RNA
agggctggaaagggctgga

SEQ ID NO: 32675 - RNA, 19 nt, synthetic construct
  source 1..19: mol_type = other RNA
gagggctggaaagggctgg

SEQ ID NO: 32676 - RNA, 19 nt, synthetic construct
  source 1..19: mol_type = other RNA
tccctggagaagggggtga

SEQ ID NO: 32677 - RNA, 19 nt, synthetic construct
  source 1..19: mol_type = other RNA
gtccctggagaagggggtg

SEQ ID NO: 32678 - RNA, 19 nt, synthetic construct
  source 1..19: mol_type = other RNA
cgtccctggagaagggggt

SEQ ID NO: 32679 - RNA, 19 nt, synthetic construct
  source 1..19: mol_type = other RNA
tcgtccctggagaaggggg

SEQ ID NO: 32680 - RNA, 19 nt, synthetic construct
  source 1..19: mol_type = other RNA
ggtcgtccctggagaaggg

SEQ ID NO: 32681 - RNA, 19 nt, synthetic construct
  source 1..19: mol_type = other RNA
ggtggtcgtccctggagaa

SEQ ID NO: 32682 - RNA, 19 nt, synthetic construct
  source 1..19: mol_type = other RNA
tggtgtggcccggggtggt

SEQ ID NO: 32683 - RNA, 19 nt, synthetic construct
  source 1..19: mol_type = other RNA
aggtggccgtggtgtggcc

SEQ ID NO: 32684 - RNA, 19 nt, synthetic construct
  source 1..19: mol_type = other RNA
cctggaggtggccgtggtg

SEQ ID NO: 32685 - RNA, 19 nt, synthetic construct
  source 1..19: mol_type = other RNA
tggctgtggtcctggaggt

SEQ ID NO: 32686 - RNA, 19 nt, synthetic construct
  source 1..19: mol_type = other RNA
ccgtggctgtggtcctgga

SEQ ID NO: 32687 - RNA, 19 nt, synthetic construct
  source 1..19: mol_type = other RNA
tgtggccgtggctgtggtc

SEQ ID NO: 32688 - RNA, 19 nt, synthetic construct
  source 1..19: mol_type = other RNA
ggtgtggccgtggctgtgg

SEQ ID NO: 32689 - RNA, 19 nt, synthetic construct
  source 1..19: mol_type = other RNA
gggtgtggccgtggctgtg

SEQ ID NO: 32690 - RNA, 19 nt, synthetic construct
  source 1..19: mol_type = other RNA
ctgggtgtggccgtggctg

SEQ ID NO: 32691 - RNA, 19 nt, synthetic construct
  source 1..19: mol_type = other RNA
gctgggtgtggccgtggct

SEQ ID NO: 32692 - RNA, 19 nt, synthetic construct
  source 1..19: mol_type = other RNA
tgctgggtgtggccgtggc

SEQ ID NO: 32693 - RNA, 19 nt, synthetic construct
  source 1..19: mol_type = other RNA
ttgctgggtgtggccgtgg

SEQ ID NO: 32694 - RNA, 19 nt, synthetic construct
  source 1..19: mol_type = other RNA
cttgctgggtgtggccgtg

SEQ ID NO: 32695 - RNA, 19 nt, synthetic construct
  source 1..19: mol_type = other RNA
acactggggctcacagccc

SEQ ID NO: 32696 - RNA, 19 nt, synthetic construct
  source 1..19: mol_type = other RNA
gtagtccagccactctgac

SEQ ID NO: 32697 - RNA, 19 nt, synthetic construct
  source 1..19: mol_type = other RNA
agacggcccctccggccgc

SEQ ID NO: 32698 - RNA, 19 nt, synthetic construct
  source 1..19: mol_type = other RNA
ccaggctgggcctgggcac

SEQ ID NO: 32699 - RNA, 19 nt, synthetic construct
  source 1..19: mol_type = other RNA
aggccaaagtccaggctgc

SEQ ID NO: 32700 - RNA, 19 nt, synthetic construct
  source 1..19: mol_type = other RNA
caggccaaagtccaggctg

SEQ ID NO: 32701 - RNA, 19 nt, synthetic construct
  source 1..19: mol_type = other RNA
gaccaggccaaagtccagg

SEQ ID NO: 32702 - RNA, 19 nt, synthetic construct
  source 1..19: mol_type = other RNA
acggttcctgcagaccagg

SEQ ID NO: 32703 - RNA, 19 nt, synthetic construct
  source 1..19: mol_type = other RNA
gtggaggagggcatggccg

SEQ ID NO: 32704 - RNA, 19 nt, synthetic construct
  source 1..19: mol_type = other RNA
ggagtggaggagggcatgg

SEQ ID NO: 32705 - RNA, 19 nt, synthetic construct
  source 1..19: mol_type = other RNA
tggatccagtggactcagt

SEQ ID NO: 32706 - RNA, 19 nt, synthetic construct
  source 1..19: mol_type = other RNA
tccctggggtggaggacgg

SEQ ID NO: 32707 - RNA, 19 nt, synthetic construct
  source 1..19: mol_type = other RNA
gtccctggggtggaggacg

SEQ ID NO: 32708 - RNA, 19 nt, synthetic construct
  source 1..19: mol_type = other RNA
tggtccctggggtggagga

SEQ ID NO: 32709 - RNA, 19 nt, synthetic construct
  source 1..19: mol_type = other RNA
gtggtccctggggtggagg

SEQ ID NO: 32710 - RNA, 19 nt, synthetic construct
  source 1..19: mol_type = other RNA
aggtggtccctggggtgga

SEQ ID NO: 32711 - RNA, 19 nt, synthetic construct
  source 1..19: mol_type = other RNA
caggtggtccctggggtgg

SEQ ID NO: 32712 - RNA, 19 nt, synthetic construct
  source 1..19: mol_type = other RNA
ccaggtggtccctggggtg

SEQ ID NO: 32713 - RNA, 19 nt, synthetic construct
  source 1..19: mol_type = other RNA
tccaggtggtccctggggt

SEQ ID NO: 32714 - RNA, 19 nt, synthetic construct
  source 1..19: mol_type = other RNA
cctgggtggaggaggcggt

SEQ ID NO: 32715 - RNA, 19 nt, synthetic construct
  source 1..19: mol_type = other RNA
agcagttgcctgggtggag

SEQ ID NO: 32716 - RNA, 19 nt, synthetic construct
  source 1..19: mol_type = other RNA
ggagctggtgactgtgggt

SEQ ID NO: 32717 - RNA, 19 nt, synthetic construct
  source 1..19: mol_type = other RNA
ttggagctggtgactgtgg

SEQ ID NO: 32718 - RNA, 19 nt, synthetic construct
  source 1..19: mol_type = other RNA
tttggagctggtgactgtg

SEQ ID NO: 32719 - RNA, 19 nt, synthetic construct
  source 1..19: mol_type = other RNA
gagtggctttggagctggt

SEQ ID NO: 32720 - RNA, 19 nt, synthetic construct
  source 1..19: mol_type = other RNA
agaagggagtggctttgga

SEQ ID NO: 32721 - RNA, 19 nt, synthetic construct
  source 1..19: mol_type = other RNA
ggagaagggagtggctttg

SEQ ID NO: 32722 - RNA, 19 nt, synthetic construct
  source 1..19: mol_type = other RNA
gaggaggaggggatggctg

SEQ ID NO: 32723 - RNA, 19 nt, synthetic construct
  source 1..19: mol_type = other RNA
ggaggaggaggggatggct

SEQ ID NO: 32724 - RNA, 19 nt, synthetic construct
  source 1..19: mol_type = other RNA
tggtgcccagggaggagga

SEQ ID NO: 32725 - RNA, 19 nt, synthetic construct
  source 1..19: mol_type = other RNA
ccaggtggtgcccagggag

SEQ ID NO: 32726 - RNA, 19 nt, synthetic construct
  source 1..19: mol_type = other RNA
ggtccaggtggtgcccagg

SEQ ID NO: 32727 - RNA, 19 nt, synthetic construct
  source 1..19: mol_type = other RNA
cgggtccaggtggtgccca

SEQ ID NO: 32728 - RNA, 19 nt, synthetic construct
  source 1..19: mol_type = other RNA
gcgggtccaggtggtgccc

SEQ ID NO: 32729 - RNA, 19 nt, synthetic construct
  source 1..19: mol_type = other RNA
ggcgggtccaggtggtgcc

SEQ ID NO: 32730 - RNA, 19 nt, synthetic construct
  source 1..19: mol_type = other RNA
aggcgggtccaggtggtgc

SEQ ID NO: 32731 - RNA, 19 nt, synthetic construct
  source 1..19: mol_type = other RNA
tgggtgtggtggtctgtga

SEQ ID NO: 32732 - RNA, 19 nt, synthetic construct
  source 1..19: mol_type = other RNA
tggctgtggacatggtggc

SEQ ID NO: 32733 - RNA, 19 nt, synthetic construct
  source 1..19: mol_type = other RNA
gtgtggctgtggacatggt

SEQ ID NO: 32734 - RNA, 19 nt, synthetic construct
  source 1..19: mol_type = other RNA
agggtgtggctgtggacat

SEQ ID NO: 32735 - RNA, 19 nt, synthetic construct
  source 1..19: mol_type = other RNA
tctggagtggaggagggtg

SEQ ID NO: 32736 - RNA, 19 nt, synthetic construct
  source 1..19: mol_type = other RNA
aggagggggtggccacaga

SEQ ID NO: 32737 - RNA, 19 nt, synthetic construct
  source 1..19: mol_type = other RNA
gaggagggggtggccacag

SEQ ID NO: 32738 - RNA, 19 nt, synthetic construct
  source 1..19: mol_type = other RNA
ggaggagggggtggccaca

SEQ ID NO: 32739 - RNA, 19 nt, synthetic construct
  source 1..19: mol_type = other RNA
tggaggagggggtggccac

SEQ ID NO: 32740 - RNA, 19 nt, synthetic construct
  source 1..19: mol_type = other RNA
gtggaggagggggtggcca

SEQ ID NO: 32741 - RNA, 19 nt, synthetic construct
  source 1..19: mol_type = other RNA
tcctggggtggaggagggg

SEQ ID NO: 32742 - RNA, 19 nt, synthetic construct
  source 1..19: mol_type = other RNA
tgttcctggggtggaggag

SEQ ID NO: 32743 - RNA, 19 nt, synthetic construct
  source 1..19: mol_type = other RNA
gggtggctgtgaagcccgt

SEQ ID NO: 32744 - RNA, 19 nt, synthetic construct
  source 1..19: mol_type = other RNA
aggagggggtggctgtgaa

SEQ ID NO: 32745 - RNA, 19 nt, synthetic construct
  source 1..19: mol_type = other RNA
tggaggagggggtggctgt

SEQ ID NO: 32746 - RNA, 19 nt, synthetic construct
  source 1..19: mol_type = other RNA
gccgtccctgggctggagg

SEQ ID NO: 32747 - RNA, 19 nt, synthetic construct
  source 1..19: mol_type = other RNA
tgccgtccctgggctggag

SEQ ID NO: 32748 - RNA, 19 nt, synthetic construct
  source 1..19: mol_type = other RNA
gtggaacctctggttgtgg

SEQ ID NO: 32749 - RNA, 19 nt, synthetic construct
  source 1..19: mol_type = other RNA
cgtggaacctctggttgtg

SEQ ID NO: 32750 - RNA, 19 nt, synthetic construct
  source 1..19: mol_type = other RNA
gatggaggagggggtcacc

SEQ ID NO: 32751 - RNA, 19 nt, synthetic construct
  source 1..19: mol_type = other RNA
cgggatggaggagggggtc

SEQ ID NO: 32752 - RNA, 19 nt, synthetic construct
  source 1..19: mol_type = other RNA
cccgggatggaggaggggg

SEQ ID NO: 32753 - RNA, 19 nt, synthetic construct
  source 1..19: mol_type = other RNA
tccccgggatggaggaggg

SEQ ID NO: 32754 - RNA, 19 nt, synthetic construct
  source 1..19: mol_type = other RNA
ggtccccgggatggaggag

SEQ ID NO: 32755 - RNA, 19 nt, synthetic construct
  source 1..19: mol_type = other RNA
tggtggtcagcactgtggg

SEQ ID NO: 32756 - RNA, 19 nt, synthetic construct
  source 1..19: mol_type = other RNA
gtggtggtcagcactgtgg

SEQ ID NO: 32757 - RNA, 19 nt, synthetic construct
  source 1..19: mol_type = other RNA
ggtggtggtcagcactgtg

SEQ ID NO: 32758 - RNA, 19 nt, synthetic construct
  source 1..19: mol_type = other RNA
ttgtggtggtggtggtcag

SEQ ID NO: 32759 - RNA, 19 nt, synthetic construct
  source 1..19: mol_type = other RNA
gttgtggtggtggtggtca

SEQ ID NO: 32760 - RNA, 19 nt, synthetic construct
  source 1..19: mol_type = other RNA
cacagttgtggtggtggtg

SEQ ID NO: 32761 - RNA, 19 nt, synthetic construct
  source 1..19: mol_type = other RNA
cagtggccacagttgtggt

SEQ ID NO: 32762 - RNA, 19 nt, synthetic construct
  source 1..19: mol_type = other RNA
tgccatagaaccagtggcc

SEQ ID NO: 32763 - RNA, 19 nt, synthetic construct
  source 1..19: mol_type = other RNA
tagtggccgtggtggtcag

SEQ ID NO: 32764 - RNA, 19 nt, synthetic construct
  source 1..19: mol_type = other RNA
ggtggtggagccggtggcc

SEQ ID NO: 32765 - RNA, 19 nt, synthetic construct
  source 1..19: mol_type = other RNA
ggttggtggtggagccggt

SEQ ID NO: 32766 - RNA, 19 nt, synthetic construct
  source 1..19: mol_type = other RNA
ttgaggaggggttggtggt

SEQ ID NO: 32767 - RNA, 19 nt, synthetic construct
  source 1..19: mol_type = other RNA
agttgaggaggggttggtg

SEQ ID NO: 32768 - RNA, 19 nt, synthetic construct
  source 1..19: mol_type = other RNA
tggagttgaggaggggttg

SEQ ID NO: 32769 - RNA, 19 nt, synthetic construct
  source 1..19: mol_type = other RNA
ctggagttgaggaggggtt

SEQ ID NO: 32770 - RNA, 19 nt, synthetic construct
  source 1..19: mol_type = other RNA
tccctggagttgaggaggg

SEQ ID NO: 32771 - RNA, 19 nt, synthetic construct
  source 1..19: mol_type = other RNA
tgtccctggagttgaggag

SEQ ID NO: 32772 - RNA, 19 nt, synthetic construct
  source 1..19: mol_type = other RNA
gttgtccctggagttgagg

SEQ ID NO: 32773 - RNA, 19 nt, synthetic construct
  source 1..19: mol_type = other RNA
gtggtggtcagcactgggg

SEQ ID NO: 32774 - RNA, 19 nt, synthetic construct
  source 1..19: mol_type = other RNA
cggtggtggtcagcactgg

SEQ ID NO: 32775 - RNA, 19 nt, synthetic construct
  source 1..19: mol_type = other RNA
gtggtggcggtggtggtca

SEQ ID NO: 32776 - RNA, 19 nt, synthetic construct
  source 1..19: mol_type = other RNA
aggtgtggtggcggtggtg

SEQ ID NO: 32777 - RNA, 19 nt, synthetic construct
  source 1..19: mol_type = other RNA
ctgcaggtgtggtggcggt

SEQ ID NO: 32778 - RNA, 19 nt, synthetic construct
  source 1..19: mol_type = other RNA
ggctgcaggtgtggtggcg

SEQ ID NO: 32779 - RNA, 19 nt, synthetic construct
  source 1..19: mol_type = other RNA
tggctgcaggtgtggtggc

SEQ ID NO: 32780 - RNA, 19 nt, synthetic construct
  source 1..19: mol_type = other RNA
gctgctggtggctgcaggt

SEQ ID NO: 32781 - RNA, 19 nt, synthetic construct
  source 1..19: mol_type = other RNA
actgtgctgctggtggctg

SEQ ID NO: 32782 - RNA, 19 nt, synthetic construct
  source 1..19: mol_type = other RNA
gtcactgtgctgctggtgg

SEQ ID NO: 32783 - RNA, 19 nt, synthetic construct
  source 1..19: mol_type = other RNA
gaggagggagtcactgtgc

SEQ ID NO: 32784 - RNA, 19 nt, synthetic construct
  source 1..19: mol_type = other RNA
agaggagggagtcactgtg

SEQ ID NO: 32785 - RNA, 19 nt, synthetic construct
  source 1..19: mol_type = other RNA
tagggcagaggagggagtc

SEQ ID NO: 32786 - RNA, 19 nt, synthetic construct
  source 1..19: mol_type = other RNA
cggcactgggggtgtgtgg

SEQ ID NO: 32787 - RNA, 19 nt, synthetic construct
  source 1..19: mol_type = other RNA
ttcggcactgggggtgtgt

SEQ ID NO: 32788 - RNA, 19 nt, synthetic construct
  source 1..19: mol_type = other RNA
tgtgtggtggccgtggtgt

SEQ ID NO: 32789 - RNA, 19 nt, synthetic construct
  source 1..19: mol_type = other RNA
tgtggggactgctggggga

SEQ ID NO: 32790 - RNA, 19 nt, synthetic construct
  source 1..19: mol_type = other RNA
aaggtgcctgaggtggccg

SEQ ID NO: 32791 - RNA, 19 nt, synthetic construct
  source 1..19: mol_type = other RNA
cccaaggtgcctgaggtgg

SEQ ID NO: 32792 - RNA, 19 nt, synthetic construct
  source 1..19: mol_type = other RNA
tggtgcccaaggtgcctga

SEQ ID NO: 32793 - RNA, 19 nt, synthetic construct
  source 1..19: mol_type = other RNA
gtgggtggtgcccaaggtg

SEQ ID NO: 32794 - RNA, 19 nt, synthetic construct
  source 1..19: mol_type = other RNA
tgctggggtgtgggaagtc

SEQ ID NO: 32795 - RNA, 19 nt, synthetic construct
  source 1..19: mol_type = other RNA
gttgctgctggggtgtggg

SEQ ID NO: 32796 - RNA, 19 nt, synthetic construct
  source 1..19: mol_type = other RNA
gctagggtgagggctggac

SEQ ID NO: 32797 - RNA, 19 nt, synthetic construct
  source 1..19: mol_type = other RNA
tccctggagaagggggtga

SEQ ID NO: 32798 - RNA, 19 nt, synthetic construct
  source 1..19: mol_type = other RNA
gtccctggagaagggggtg

SEQ ID NO: 32799 - RNA, 19 nt, synthetic construct
  source 1..19: mol_type = other RNA
cgtccctggagaagggggt

SEQ ID NO: 32800 - RNA, 19 nt, synthetic construct
  source 1..19: mol_type = other RNA
tcgtccctggagaaggggg

SEQ ID NO: 32801 - RNA, 19 nt, synthetic construct
  source 1..19: mol_type = other RNA
ggtcgtccctggagaaggg

SEQ ID NO: 32802 - RNA, 19 nt, synthetic construct
  source 1..19: mol_type = other RNA
ggtggtcgtccctggagaa

SEQ ID NO: 32803 - RNA, 19 nt, synthetic construct
  source 1..19: mol_type = other RNA
tggtgtggcccggggtggt

SEQ ID NO: 32804 - RNA, 19 nt, synthetic construct
  source 1..19: mol_type = other RNA
ggaggtggccctggtgtgg

SEQ ID NO: 32805 - RNA, 19 nt, synthetic construct
  source 1..19: mol_type = other RNA
tggaggtggccctggtgtg

SEQ ID NO: 32806 - RNA, 19 nt, synthetic construct
  source 1..19: mol_type = other RNA
ctggaggtggccctggtgt

SEQ ID NO: 32807 - RNA, 19 nt, synthetic construct
  source 1..19: mol_type = other RNA
tcctggaggtggccctggt

SEQ ID NO: 32808 - RNA, 19 nt, synthetic construct
  source 1..19: mol_type = other RNA
gtcctggaggtggccctgg

SEQ ID NO: 32809 - RNA, 19 nt, synthetic construct
  source 1..19: mol_type = other RNA
ggtcctggaggtggccctg

SEQ ID NO: 32810 - RNA, 19 nt, synthetic construct
  source 1..19: mol_type = other RNA
tggtcctggaggtggccct

SEQ ID NO: 32811 - RNA, 19 nt, synthetic construct
  source 1..19: mol_type = other RNA
ccgtggtcctggaggtggc

SEQ ID NO: 32812 - RNA, 19 nt, synthetic construct
  source 1..19: mol_type = other RNA
tgggtgtggccgtggccgt

SEQ ID NO: 32813 - RNA, 19 nt, synthetic construct
  source 1..19: mol_type = other RNA
ctgggtgtggccgtggccg

SEQ ID NO: 32814 - RNA, 19 nt, synthetic construct
  source 1..19: mol_type = other RNA
gctgggtgtggccgtggcc

SEQ ID NO: 32815 - RNA, 19 nt, synthetic construct
  source 1..19: mol_type = other RNA
ttgctgggtgtggccgtgg

SEQ ID NO: 32816 - RNA, 19 nt, synthetic construct
  source 1..19: mol_type = other RNA
cttgctgggtgtggccgtg

SEQ ID NO: 32817 - RNA, 19 nt, synthetic construct
  source 1..19: mol_type = other RNA
acactggggctcacagccc

SEQ ID NO: 32818 - RNA, 19 nt, synthetic construct
  source 1..19: mol_type = other RNA
gtagtccagccactctgac

SEQ ID NO: 32819 - RNA, 19 nt, synthetic construct
  source 1..19: mol_type = other RNA
agacggcccctccggccgc

SEQ ID NO: 32820 - RNA, 19 nt, synthetic construct
  source 1..19: mol_type = other RNA
ccaggctgggcctgggcac

SEQ ID NO: 32821 - RNA, 19 nt, synthetic construct
  source 1..19: mol_type = other RNA
aggccaaagtccaggctgc

SEQ ID NO: 32822 - RNA, 19 nt, synthetic construct
  source 1..19: mol_type = other RNA
caggccaaagtccaggctg

SEQ ID NO: 32823 - RNA, 19 nt, synthetic construct
  source 1..19: mol_type = other RNA
gaccaggccaaagtccagg

SEQ ID NO: 32824 - RNA, 19 nt, synthetic construct
  source 1..19: mol_type = other RNA
acggttcctgcagaccagg

SEQ ID NO: 32825 - RNA, 19 nt, synthetic construct
  source 1..19: mol_type = other RNA
cgtggccgtagagctggtg

SEQ ID NO: 32826 - RNA, 19 nt, synthetic construct
  source 1..19: mol_type = other RNA
gatccaggtcgtccctgga

SEQ ID NO: 32827 - RNA, 19 nt, synthetic construct
  source 1..19: mol_type = other RNA
gtggctgctgtggtctgct

SEQ ID NO: 32828 - RNA, 19 nt, synthetic construct
  source 1..19: mol_type = other RNA
tagtggctgctgtggtctg

SEQ ID NO: 32829 - RNA, 19 nt, synthetic construct
  source 1..19: mol_type = other RNA
ttgggagggggagctgttc

SEQ ID NO: 32830 - RNA, 19 nt, synthetic construct
  source 1..19: mol_type = other RNA
tgtggtggccgtgctggtc

SEQ ID NO: 32831 - RNA, 19 nt, synthetic construct
  source 1..19: mol_type = other RNA
tgggtgtggtggccgtgct

SEQ ID NO: 32832 - RNA, 19 nt, synthetic construct
  source 1..19: mol_type = other RNA
tgtgggtgtggtggccgtg

SEQ ID NO: 32833 - RNA, 19 nt, synthetic construct
  source 1..19: mol_type = other RNA
gaggaggaagtggctttgg

SEQ ID NO: 32834 - RNA, 19 nt, synthetic construct
  source 1..19: mol_type = other RNA
actggaggaggaagtggct

SEQ ID NO: 32835 - RNA, 19 nt, synthetic construct
  source 1..19: mol_type = other RNA
ggactggaggaggaagtgg

SEQ ID NO: 32836 - RNA, 19 nt, synthetic construct
  source 1..19: mol_type = other RNA
tggactggaggaggaagtg

SEQ ID NO: 32837 - RNA, 19 nt, synthetic construct
  source 1..19: mol_type = other RNA
ttggactggaggaggaagt

SEQ ID NO: 32838 - RNA, 19 nt, synthetic construct
  source 1..19: mol_type = other RNA
ccttggactggaggaggaa

SEQ ID NO: 32839 - RNA, 19 nt, synthetic construct
  source 1..19: mol_type = other RNA
gtccttggactggaggagg

SEQ ID NO: 32840 - RNA, 19 nt, synthetic construct
  source 1..19: mol_type = other RNA
agggtgaaggaggggatgg

SEQ ID NO: 32841 - RNA, 19 nt, synthetic construct
  source 1..19: mol_type = other RNA
ggtcccaagggtgaaggag

SEQ ID NO: 32842 - RNA, 19 nt, synthetic construct
  source 1..19: mol_type = other RNA
gtggtcccaagggtgaagg

SEQ ID NO: 32843 - RNA, 19 nt, synthetic construct
  source 1..19: mol_type = other RNA
ctgttctgggagggtcccg

SEQ ID NO: 32844 - RNA, 19 nt, synthetic construct
  source 1..19: mol_type = other RNA
gccatgggtgtggtggtct

SEQ ID NO: 32845 - RNA, 19 nt, synthetic construct
  source 1..19: mol_type = other RNA
gtggacatggtggccatgg

SEQ ID NO: 32846 - RNA, 19 nt, synthetic construct
  source 1..19: mol_type = other RNA
tctccggagtggaggaggg

SEQ ID NO: 32847 - RNA, 19 nt, synthetic construct
  source 1..19: mol_type = other RNA
cactgtggaggtgtgggtg

SEQ ID NO: 32848 - RNA, 19 nt, synthetic construct
  source 1..19: mol_type = other RNA
cgtggtggccttcgtggtc

SEQ ID NO: 32849 - RNA, 19 nt, synthetic construct
  source 1..19: mol_type = other RNA
ggacatggaactggtggcc

SEQ ID NO: 32850 - RNA, 19 nt, synthetic construct
  source 1..19: mol_type = other RNA
ggaggagggggtggacatg

SEQ ID NO: 32851 - RNA, 19 nt, synthetic construct
  source 1..19: mol_type = other RNA
tggaggagggggtggacat

SEQ ID NO: 32852 - RNA, 19 nt, synthetic construct
  source 1..19: mol_type = other RNA
gtggaggagggggtggaca

SEQ ID NO: 32853 - RNA, 19 nt, synthetic construct
  source 1..19: mol_type = other RNA
ccggagtggaggagggggt

SEQ ID NO: 32854 - RNA, 19 nt, synthetic construct
  source 1..19: mol_type = other RNA
ggctgcagttgtagtggct

SEQ ID NO: 32855 - RNA, 19 nt, synthetic construct
  source 1..19: mol_type = other RNA
tggctgcagttgtagtggc

SEQ ID NO: 32856 - RNA, 19 nt, synthetic construct
  source 1..19: mol_type = other RNA
gggccagtggctgcagttg

SEQ ID NO: 32857 - RNA, 19 nt, synthetic construct
  source 1..19: mol_type = other RNA
ggggccagtggctgcagtt

SEQ ID NO: 32858 - RNA, 19 nt, synthetic construct
  source 1..19: mol_type = other RNA
gccgtggggccagtggctg

SEQ ID NO: 32859 - RNA, 19 nt, synthetic construct
  source 1..19: mol_type = other RNA
ggtggccgtggggccagtg

SEQ ID NO: 32860 - RNA, 19 nt, synthetic construct
  source 1..19: mol_type = other RNA
gacggggtggccgtggggc

SEQ ID NO: 32861 - RNA, 19 nt, synthetic construct
  source 1..19: mol_type = other RNA
tccctggggtggaggacgg

SEQ ID NO: 32862 - RNA, 19 nt, synthetic construct
  source 1..19: mol_type = other RNA
gtccctggggtggaggacg

SEQ ID NO: 32863 - RNA, 19 nt, synthetic construct
  source 1..19: mol_type = other RNA
tggtccctggggtggagga

SEQ ID NO: 32864 - RNA, 19 nt, synthetic construct
  source 1..19: mol_type = other RNA
gtggtccctggggtggagg

SEQ ID NO: 32865 - RNA, 19 nt, synthetic construct
  source 1..19: mol_type = other RNA
aggtggtccctggggtgga

SEQ ID NO: 32866 - RNA, 19 nt, synthetic construct
  source 1..19: mol_type = other RNA
caggtggtccctggggtgg

SEQ ID NO: 32867 - RNA, 19 nt, synthetic construct
  source 1..19: mol_type = other RNA
ccaggtggtccctggggtg

SEQ ID NO: 32868 - RNA, 19 nt, synthetic construct
  source 1..19: mol_type = other RNA
tccaggtggtccctggggt

SEQ ID NO: 32869 - RNA, 19 nt, synthetic construct
  source 1..19: mol_type = other RNA
cggtggctgtagtgctggg

SEQ ID NO: 32870 - RNA, 19 nt, synthetic construct
  source 1..19: mol_type = other RNA
cccgggtggaggaggcggt

SEQ ID NO: 32871 - RNA, 19 nt, synthetic construct
  source 1..19: mol_type = other RNA
tgcccgggtggaggaggcg

SEQ ID NO: 32872 - RNA, 19 nt, synthetic construct
  source 1..19: mol_type = other RNA
ttgcccgggtggaggaggc

SEQ ID NO: 32873 - RNA, 19 nt, synthetic construct
  source 1..19: mol_type = other RNA
tgtggtggccgtgctggtc

SEQ ID NO: 32874 - RNA, 19 nt, synthetic construct
  source 1..19: mol_type = other RNA
tgggtgtggtggccgtgct

SEQ ID NO: 32875 - RNA, 19 nt, synthetic construct
  source 1..19: mol_type = other RNA
tgtgggtgtggtggccgtg

SEQ ID NO: 32876 - RNA, 19 nt, synthetic construct
  source 1..19: mol_type = other RNA
gactgtgggtgtggtggcc

SEQ ID NO: 32877 - RNA, 19 nt, synthetic construct
  source 1..19: mol_type = other RNA
atgactgtgggtgtggtgg

SEQ ID NO: 32878 - RNA, 19 nt, synthetic construct
  source 1..19: mol_type = other RNA
ggagctgatgactgtgggt

SEQ ID NO: 32879 - RNA, 19 nt, synthetic construct
  source 1..19: mol_type = other RNA
ctggagctgatgactgtgg

SEQ ID NO: 32880 - RNA, 19 nt, synthetic construct
  source 1..19: mol_type = other RNA
tctggagctgatgactgtg

SEQ ID NO: 32881 - RNA, 19 nt, synthetic construct
  source 1..19: mol_type = other RNA
ggctctggagctgatgact

SEQ ID NO: 32882 - RNA, 19 nt, synthetic construct
  source 1..19: mol_type = other RNA
gagggagtggctctggagc

SEQ ID NO: 32883 - RNA, 19 nt, synthetic construct
  source 1..19: mol_type = other RNA
tggaggagggagtggctct

SEQ ID NO: 32884 - RNA, 19 nt, synthetic construct
  source 1..19: mol_type = other RNA
ctggaggagggagtggctc

SEQ ID NO: 32885 - RNA, 19 nt, synthetic construct
  source 1..19: mol_type = other RNA
ggactggaggagggagtgg

SEQ ID NO: 32886 - RNA, 19 nt, synthetic construct
  source 1..19: mol_type = other RNA
ccctggactggaggaggga

SEQ ID NO: 32887 - RNA, 19 nt, synthetic construct
  source 1..19: mol_type = other RNA
ggaagaggggatggctgta

SEQ ID NO: 32888 - RNA, 19 nt, synthetic construct
  source 1..19: mol_type = other RNA
tgcccagggaggaagaggg

SEQ ID NO: 32889 - RNA, 19 nt, synthetic construct
  source 1..19: mol_type = other RNA
ggtgcccagggaggaagag

SEQ ID NO: 32890 - RNA, 19 nt, synthetic construct
  source 1..19: mol_type = other RNA
cggtgcccagggaggaaga

SEQ ID NO: 32891 - RNA, 19 nt, synthetic construct
  source 1..19: mol_type = other RNA
gcggtgcccagggaggaag

SEQ ID NO: 32892 - RNA, 19 nt, synthetic construct
  source 1..19: mol_type = other RNA
ggcggtgcccagggaggaa

SEQ ID NO: 32893 - RNA, 19 nt, synthetic construct
  source 1..19: mol_type = other RNA
aggcggtgcccagggagga

SEQ ID NO: 32894 - RNA, 19 nt, synthetic construct
  source 1..19: mol_type = other RNA
tccaggcggtgcccaggga

SEQ ID NO: 32895 - RNA, 19 nt, synthetic construct
  source 1..19: mol_type = other RNA
tgggtgtggtggtctgtga

SEQ ID NO: 32896 - RNA, 19 nt, synthetic construct
  source 1..19: mol_type = other RNA
tggctgtggacatggtggc

SEQ ID NO: 32897 - RNA, 19 nt, synthetic construct
  source 1..19: mol_type = other RNA
gtgtggctgtggacatggt

SEQ ID NO: 32898 - RNA, 19 nt, synthetic construct
  source 1..19: mol_type = other RNA
agggtgtggctgtggacat

SEQ ID NO: 32899 - RNA, 19 nt, synthetic construct
  source 1..19: mol_type = other RNA
tagaggagggtgtggctgt

SEQ ID NO: 32900 - RNA, 19 nt, synthetic construct
  source 1..19: mol_type = other RNA
gagtagaggagggtgtggc

SEQ ID NO: 32901 - RNA, 19 nt, synthetic construct
  source 1..19: mol_type = other RNA
ctggagtagaggagggtgt

SEQ ID NO: 32902 - RNA, 19 nt, synthetic construct
  source 1..19: mol_type = other RNA
gttgtggtggtcgtggtgg

SEQ ID NO: 32903 - RNA, 19 nt, synthetic construct
  source 1..19: mol_type = other RNA
ggttgtggtggtcgtggtg

SEQ ID NO: 32904 - RNA, 19 nt, synthetic construct
  source 1..19: mol_type = other RNA
tggttgtggtggtcgtggt

SEQ ID NO: 32905 - RNA, 19 nt, synthetic construct
  source 1..19: mol_type = other RNA
ctggttgtggtggtcgtgg

SEQ ID NO: 32906 - RNA, 19 nt, synthetic construct
  source 1..19: mol_type = other RNA
cctggttgtggtggtcgtg

SEQ ID NO: 32907 - RNA, 19 nt, synthetic construct
  source 1..19: mol_type = other RNA
ggtggccctggttgtggtg

SEQ ID NO: 32908 - RNA, 19 nt, synthetic construct
  source 1..19: mol_type = other RNA
cagagccggtggccctggt

SEQ ID NO: 32909 - RNA, 19 nt, synthetic construct
  source 1..19: mol_type = other RNA
acagagccggtggccctgg

SEQ ID NO: 32910 - RNA, 19 nt, synthetic construct
  source 1..19: mol_type = other RNA
aggagggggtggccacaga

SEQ ID NO: 32911 - RNA, 19 nt, synthetic construct
  source 1..19: mol_type = other RNA
gaggagggggtggccacag

SEQ ID NO: 32912 - RNA, 19 nt, synthetic construct
  source 1..19: mol_type = other RNA
ggaggagggggtggccaca

SEQ ID NO: 32913 - RNA, 19 nt, synthetic construct
  source 1..19: mol_type = other RNA
tggaggagggggtggccac

SEQ ID NO: 32914 - RNA, 19 nt, synthetic construct
  source 1..19: mol_type = other RNA
gtggaggagggggtggcca

SEQ ID NO: 32915 - RNA, 19 nt, synthetic construct
  source 1..19: mol_type = other RNA
tcctggggtggaggagggg

SEQ ID NO: 32916 - RNA, 19 nt, synthetic construct
  source 1..19: mol_type = other RNA
tgttcctggggtggaggag

SEQ ID NO: 32917 - RNA, 19 nt, synthetic construct
  source 1..19: mol_type = other RNA
tggttgtggtagtcggcac

SEQ ID NO: 32918 - RNA, 19 nt, synthetic construct
  source 1..19: mol_type = other RNA
gggtggctgtgaagcccgt

SEQ ID NO: 32919 - RNA, 19 nt, synthetic construct
  source 1..19: mol_type = other RNA
aggagggggtggctgtgaa

SEQ ID NO: 32920 - RNA, 19 nt, synthetic construct
  source 1..19: mol_type = other RNA
tggaggagggggtggctgt

SEQ ID NO: 32921 - RNA, 19 nt, synthetic construct
  source 1..19: mol_type = other RNA
gccgtccctgggctggagg

SEQ ID NO: 32922 - RNA, 19 nt, synthetic construct
  source 1..19: mol_type = other RNA
tgccgtccctgggctggag

SEQ ID NO: 32923 - RNA, 19 nt, synthetic construct
  source 1..19: mol_type = other RNA
tgtgctgatccacactgga

SEQ ID NO: 32924 - RNA, 19 nt, synthetic construct
  source 1..19: mol_type = other RNA
gatggaggagggggtcacc

SEQ ID NO: 32925 - RNA, 19 nt, synthetic construct
  source 1..19: mol_type = other RNA
cgggatggaggagggggtc

SEQ ID NO: 32926 - RNA, 19 nt, synthetic construct
  source 1..19: mol_type = other RNA
cccgggatggaggaggggg

SEQ ID NO: 32927 - RNA, 19 nt, synthetic construct
  source 1..19: mol_type = other RNA
tccccgggatggaggaggg

SEQ ID NO: 32928 - RNA, 19 nt, synthetic construct
  source 1..19: mol_type = other RNA
ggtccccgggatggaggag

SEQ ID NO: 32929 - RNA, 19 nt, synthetic construct
  source 1..19: mol_type = other RNA
ggtggtggtcagcactgtg

SEQ ID NO: 32930 - RNA, 19 nt, synthetic construct
  source 1..19: mol_type = other RNA
ttgtggtggtggtggtcag

SEQ ID NO: 32931 - RNA, 19 nt, synthetic construct
  source 1..19: mol_type = other RNA
gttgtggtggtggtggtca

SEQ ID NO: 32932 - RNA, 19 nt, synthetic construct
  source 1..19: mol_type = other RNA
cacagttgtggtggtggtg

SEQ ID NO: 32933 - RNA, 19 nt, synthetic construct
  source 1..19: mol_type = other RNA
cagtggccacagttgtggt

SEQ ID NO: 32934 - RNA, 19 nt, synthetic construct
  source 1..19: mol_type = other RNA
tgccatagaaccagtggcc

SEQ ID NO: 32935 - RNA, 19 nt, synthetic construct
  source 1..19: mol_type = other RNA
tagtggccgtggtggtcag

SEQ ID NO: 32936 - RNA, 19 nt, synthetic construct
  source 1..19: mol_type = other RNA
ggttggtggtggagccggt

SEQ ID NO: 32937 - RNA, 19 nt, synthetic construct
  source 1..19: mol_type = other RNA
ttgaggaggggttggtggt

SEQ ID NO: 32938 - RNA, 19 nt, synthetic construct
  source 1..19: mol_type = other RNA
agttgaggaggggttggtg

SEQ ID NO: 32939 - RNA, 19 nt, synthetic construct
  source 1..19: mol_type = other RNA
tggagttgaggaggggttg

SEQ ID NO: 32940 - RNA, 19 nt, synthetic construct
  source 1..19: mol_type = other RNA
ctggagttgaggaggggtt

SEQ ID NO: 32941 - RNA, 19 nt, synthetic construct
  source 1..19: mol_type = other RNA
tccctggagttgaggaggg

SEQ ID NO: 32942 - RNA, 19 nt, synthetic construct
  source 1..19: mol_type = other RNA
tgtccctggagttgaggag

SEQ ID NO: 32943 - RNA, 19 nt, synthetic construct
  source 1..19: mol_type = other RNA
gttgtccctggagttgagg

SEQ ID NO: 32944 - RNA, 19 nt, synthetic construct
  source 1..19: mol_type = other RNA
ctggggggatgggagttgt

SEQ ID NO: 32945 - RNA, 19 nt, synthetic construct
  source 1..19: mol_type = other RNA
cactggggggatgggagtt

SEQ ID NO: 32946 - RNA, 19 nt, synthetic construct
  source 1..19: mol_type = other RNA
tcagcactggggggatggg

SEQ ID NO: 32947 - RNA, 19 nt, synthetic construct
  source 1..19: mol_type = other RNA
gtggtggtcagcactgggg

SEQ ID NO: 32948 - RNA, 19 nt, synthetic construct
  source 1..19: mol_type = other RNA
cggtggtggtcagcactgg

SEQ ID NO: 32949 - RNA, 19 nt, synthetic construct
  source 1..19: mol_type = other RNA
gtggtggcggtggtggtca

SEQ ID NO: 32950 - RNA, 19 nt, synthetic construct
  source 1..19: mol_type = other RNA
aggtgtggtggcggtggtg

SEQ ID NO: 32951 - RNA, 19 nt, synthetic construct
  source 1..19: mol_type = other RNA
ctgcaggtgtggtggcggt

SEQ ID NO: 32952 - RNA, 19 nt, synthetic construct
  source 1..19: mol_type = other RNA
ggctgcaggtgtggtggcg

SEQ ID NO: 32953 - RNA, 19 nt, synthetic construct
  source 1..19: mol_type = other RNA
tggctgcaggtgtggtggc

SEQ ID NO: 32954 - RNA, 19 nt, synthetic construct
  source 1..19: mol_type = other RNA
gctgctggtggctgcaggt

SEQ ID NO: 32955 - RNA, 19 nt, synthetic construct
  source 1..19: mol_type = other RNA
actgtgctgctggtggctg

SEQ ID NO: 32956 - RNA, 19 nt, synthetic construct
  source 1..19: mol_type = other RNA
gtcactgtgctgctggtgg

SEQ ID NO: 32957 - RNA, 19 nt, synthetic construct
  source 1..19: mol_type = other RNA
gaggagggagtcactgtgc

SEQ ID NO: 32958 - RNA, 19 nt, synthetic construct
  source 1..19: mol_type = other RNA
agaggagggagtcactgtg

SEQ ID NO: 32959 - RNA, 19 nt, synthetic construct
  source 1..19: mol_type = other RNA
tagggcagaggagggagtc

SEQ ID NO: 32960 - RNA, 19 nt, synthetic construct
  source 1..19: mol_type = other RNA
cggcactgggggtgtgtgg

SEQ ID NO: 32961 - RNA, 19 nt, synthetic construct
  source 1..19: mol_type = other RNA
ttcggcactgggggtgtgt

SEQ ID NO: 32962 - RNA, 19 nt, synthetic construct
  source 1..19: mol_type = other RNA
tgtgtggtggccgtggtgt

SEQ ID NO: 32963 - RNA, 19 nt, synthetic construct
  source 1..19: mol_type = other RNA
accgcccgtgtgtggtggc

SEQ ID NO: 32964 - RNA, 19 nt, synthetic construct
  source 1..19: mol_type = other RNA
actgctggggggcagggac

SEQ ID NO: 32965 - RNA, 19 nt, synthetic construct
  source 1..19: mol_type = other RNA
gactgctggggggcaggga

SEQ ID NO: 32966 - RNA, 19 nt, synthetic construct
  source 1..19: mol_type = other RNA
gggactgctggggggcagg

SEQ ID NO: 32967 - RNA, 19 nt, synthetic construct
  source 1..19: mol_type = other RNA
ggggactgctggggggcag

SEQ ID NO: 32968 - RNA, 19 nt, synthetic construct
  source 1..19: mol_type = other RNA
tgtggggactgctgggggg

SEQ ID NO: 32969 - RNA, 19 nt, synthetic construct
  source 1..19: mol_type = other RNA
gttgctgctggggtgtggg

SEQ ID NO: 32970 - RNA, 19 nt, synthetic construct
  source 1..19: mol_type = other RNA
actggtggttgctgctggg

SEQ ID NO: 32971 - RNA, 19 nt, synthetic construct
  source 1..19: mol_type = other RNA
ggtggtactggtggttgct

SEQ ID NO: 32972 - RNA, 19 nt, synthetic construct
  source 1..19: mol_type = other RNA
gctagggtgagggctggac

SEQ ID NO: 32973 - RNA, 19 nt, synthetic construct
  source 1..19: mol_type = other RNA
tccctggagaagggggtga

SEQ ID NO: 32974 - RNA, 19 nt, synthetic construct
  source 1..19: mol_type = other RNA
gtccctggagaagggggtg

SEQ ID NO: 32975 - RNA, 19 nt, synthetic construct
  source 1..19: mol_type = other RNA
cgtccctggagaagggggt

SEQ ID NO: 32976 - RNA, 19 nt, synthetic construct
  source 1..19: mol_type = other RNA
tcgtccctggagaaggggg

SEQ ID NO: 32977 - RNA, 19 nt, synthetic construct
  source 1..19: mol_type = other RNA
ggtcgtccctggagaaggg

SEQ ID NO: 32978 - RNA, 19 nt, synthetic construct
  source 1..19: mol_type = other RNA
ggtggtcgtccctggagaa

SEQ ID NO: 32979 - RNA, 19 nt, synthetic construct
  source 1..19: mol_type = other RNA
tggtgtggcccggggtggt

SEQ ID NO: 32980 - RNA, 19 nt, synthetic construct
  source 1..19: mol_type = other RNA
tcctggaggtgcccctggt

SEQ ID NO: 32981 - RNA, 19 nt, synthetic construct
  source 1..19: mol_type = other RNA
gtcctggaggtgcccctgg

SEQ ID NO: 32982 - RNA, 19 nt, synthetic construct
  source 1..19: mol_type = other RNA
tgtggtcctggaggtgccc

SEQ ID NO: 32983 - RNA, 19 nt, synthetic construct
  source 1..19: mol_type = other RNA
gctgtggtcctggaggtgc

SEQ ID NO: 32984 - RNA, 19 nt, synthetic construct
  source 1..19: mol_type = other RNA
ggctgtggtcctggaggtg

SEQ ID NO: 32985 - RNA, 19 nt, synthetic construct
  source 1..19: mol_type = other RNA
tggctgtggtcctggaggt

SEQ ID NO: 32986 - RNA, 19 nt, synthetic construct
  source 1..19: mol_type = other RNA
ctgtggctgtggtcctgga

SEQ ID NO: 32987 - RNA, 19 nt, synthetic construct
  source 1..19: mol_type = other RNA
gtggctgtggctgtggtcc

SEQ ID NO: 32988 - RNA, 19 nt, synthetic construct
  source 1..19: mol_type = other RNA
tcacagcccgtggtcacca

SEQ ID NO: 32989 - RNA, 19 nt, synthetic construct
  source 1..19: mol_type = other RNA
gtagtccagccactctgac

SEQ ID NO: 32990 - RNA, 19 nt, synthetic construct
  source 1..19: mol_type = other RNA
caggggctgctcacagact

SEQ ID NO: 32991 - RNA, 19 nt, synthetic construct
  source 1..19: mol_type = other RNA
ccaggctgggcctgggcac

SEQ ID NO: 32992 - RNA, 19 nt, synthetic construct
  source 1..19: mol_type = other RNA
aggccaaagtccaggctgc

SEQ ID NO: 32993 - RNA, 19 nt, synthetic construct
  source 1..19: mol_type = other RNA
caggccaaagtccaggctg

SEQ ID NO: 32994 - RNA, 19 nt, synthetic construct
  source 1..19: mol_type = other RNA
gaccaggccaaagtccagg

SEQ ID NO: 32995 - RNA, 19 nt, synthetic construct
  source 1..19: mol_type = other RNA
acggttcctgcagaccagg

SEQ ID NO: 32996 - RNA, 19 nt, synthetic construct
  source 1..19: mol_type = other RNA
cgtggccgtagagctggtg

SEQ ID NO: 32997 - RNA, 19 nt, synthetic construct
  source 1..19: mol_type = other RNA
tggctgttgtggtcagctt

SEQ ID NO: 32998 - RNA, 19 nt, synthetic construct
  source 1..19: mol_type = other RNA
tggatccagtggactcagt

SEQ ID NO: 32999 - RNA, 19 nt, synthetic construct
  source 1..19: mol_type = other RNA
tccctggggtggaggacgg

SEQ ID NO: 33000 - RNA, 19 nt, synthetic construct
  source 1..19: mol_type = other RNA
gtccctggggtggaggacg

SEQ ID NO: 33001 - RNA, 19 nt, synthetic construct
  source 1..19: mol_type = other RNA
tggtccctggggtggagga

SEQ ID NO: 33002 - RNA, 19 nt, synthetic construct
  source 1..19: mol_type = other RNA
gtggtccctggggtggagg

SEQ ID NO: 33003 - RNA, 19 nt, synthetic construct
  source 1..19: mol_type = other RNA
aggtggtccctggggtgga

SEQ ID NO: 33004 - RNA, 19 nt, synthetic construct
  source 1..19: mol_type = other RNA
caggtggtccctggggtgg

SEQ ID NO: 33005 - RNA, 19 nt, synthetic construct
  source 1..19: mol_type = other RNA
ccaggtggtccctggggtg

SEQ ID NO: 33006 - RNA, 19 nt, synthetic construct
  source 1..19: mol_type = other RNA
tccaggtggtccctggggt

SEQ ID NO: 33007 - RNA, 19 nt, synthetic construct
  source 1..19: mol_type = other RNA
cctgggtggaggaggcggt

SEQ ID NO: 33008 - RNA, 19 nt, synthetic construct
  source 1..19: mol_type = other RNA
agcagttgcctgggtggag

SEQ ID NO: 33009 - RNA, 19 nt, synthetic construct
  source 1..19: mol_type = other RNA
ggagctggtgactgtgggt

SEQ ID NO: 33010 - RNA, 19 nt, synthetic construct
  source 1..19: mol_type = other RNA
ttggagctggtgactgtgg

SEQ ID NO: 33011 - RNA, 19 nt, synthetic construct
  source 1..19: mol_type = other RNA
tttggagctggtgactgtg

SEQ ID NO: 33012 - RNA, 19 nt, synthetic construct
  source 1..19: mol_type = other RNA
gagtggctttggagctggt

SEQ ID NO: 33013 - RNA, 19 nt, synthetic construct
  source 1..19: mol_type = other RNA
agaagggagtggctttgga

SEQ ID NO: 33014 - RNA, 19 nt, synthetic construct
  source 1..19: mol_type = other RNA
ggagaagggagtggctttg

SEQ ID NO: 33015 - RNA, 19 nt, synthetic construct
  source 1..19: mol_type = other RNA
gaggaggaggggatggctg

SEQ ID NO: 33016 - RNA, 19 nt, synthetic construct
  source 1..19: mol_type = other RNA
ggaggaggaggggatggct

SEQ ID NO: 33017 - RNA, 19 nt, synthetic construct
  source 1..19: mol_type = other RNA
tggtgcccagggaggagga

SEQ ID NO: 33018 - RNA, 19 nt, synthetic construct
  source 1..19: mol_type = other RNA
ccaggtggtgcccagggag

SEQ ID NO: 33019 - RNA, 19 nt, synthetic construct
  source 1..19: mol_type = other RNA
ggtccaggtggtgcccagg

SEQ ID NO: 33020 - RNA, 19 nt, synthetic construct
  source 1..19: mol_type = other RNA
cgggtccaggtggtgccca

SEQ ID NO: 33021 - RNA, 19 nt, synthetic construct
  source 1..19: mol_type = other RNA
gcgggtccaggtggtgccc

SEQ ID NO: 33022 - RNA, 19 nt, synthetic construct
  source 1..19: mol_type = other RNA
ggcgggtccaggtggtgcc

SEQ ID NO: 33023 - RNA, 19 nt, synthetic construct
  source 1..19: mol_type = other RNA
aggcgggtccaggtggtgc

SEQ ID NO: 33024 - RNA, 19 nt, synthetic construct
  source 1..19: mol_type = other RNA
tgggtgtggtggtctgtga

SEQ ID NO: 33025 - RNA, 19 nt, synthetic construct
  source 1..19: mol_type = other RNA
tggctgtggacatggtggc

SEQ ID NO: 33026 - RNA, 19 nt, synthetic construct
  source 1..19: mol_type = other RNA
gtgtggctgtggacatggt

SEQ ID NO: 33027 - RNA, 19 nt, synthetic construct
  source 1..19: mol_type = other RNA
agggtgtggctgtggacat

SEQ ID NO: 33028 - RNA, 19 nt, synthetic construct
  source 1..19: mol_type = other RNA
tctggagtggaggagggtg

SEQ ID NO: 33029 - RNA, 19 nt, synthetic construct
  source 1..19: mol_type = other RNA
cactgtggaggtgtgggca

SEQ ID NO: 33030 - RNA, 19 nt, synthetic construct
  source 1..19: mol_type = other RNA
ctggttgtggtggccgtgg

SEQ ID NO: 33031 - RNA, 19 nt, synthetic construct
  source 1..19: mol_type = other RNA
ggtggccctggttgtggtg

SEQ ID NO: 33032 - RNA, 19 nt, synthetic construct
  source 1..19: mol_type = other RNA
cagagccggtggccctggt

SEQ ID NO: 33033 - RNA, 19 nt, synthetic construct
  source 1..19: mol_type = other RNA
acagagccggtggccctgg

SEQ ID NO: 33034 - RNA, 19 nt, synthetic construct
  source 1..19: mol_type = other RNA
ggtggaagagggggtggcc

SEQ ID NO: 33035 - RNA, 19 nt, synthetic construct
  source 1..19: mol_type = other RNA
gggtggaagagggggtggc

SEQ ID NO: 33036 - RNA, 19 nt, synthetic construct
  source 1..19: mol_type = other RNA
ggggtggaagagggggtgg

SEQ ID NO: 33037 - RNA, 19 nt, synthetic construct
  source 1..19: mol_type = other RNA
tggttgtggtagtcggcac

SEQ ID NO: 33038 - RNA, 19 nt, synthetic construct
  source 1..19: mol_type = other RNA
aggagggggtgactgtgaa

SEQ ID NO: 33039 - RNA, 19 nt, synthetic construct
  source 1..19: mol_type = other RNA
ctgggctggaggagggggt

SEQ ID NO: 33040 - RNA, 19 nt, synthetic construct
  source 1..19: mol_type = other RNA
gccgtccctgggctggagg

SEQ ID NO: 33041 - RNA, 19 nt, synthetic construct
  source 1..19: mol_type = other RNA
tgccgtccctgggctggag

SEQ ID NO: 33042 - RNA, 19 nt, synthetic construct
  source 1..19: mol_type = other RNA
tgtgctgatccacactgga

SEQ ID NO: 33043 - RNA, 19 nt, synthetic construct
  source 1..19: mol_type = other RNA
cactggttgtgggtgtggt

SEQ ID NO: 33044 - RNA, 19 nt, synthetic construct
  source 1..19: mol_type = other RNA
tcaccgtggagccactggt

SEQ ID NO: 33045 - RNA, 19 nt, synthetic construct
  source 1..19: mol_type = other RNA
gtgtgggtggtccccggga

SEQ ID NO: 33046 - RNA, 19 nt, synthetic construct
  source 1..19: mol_type = other RNA
tggtggtcagcactgtggg

SEQ ID NO: 33047 - RNA, 19 nt, synthetic construct
  source 1..19: mol_type = other RNA
gtggtggtcagcactgtgg

SEQ ID NO: 33048 - RNA, 19 nt, synthetic construct
  source 1..19: mol_type = other RNA
ggtggtggtcagcactgtg

SEQ ID NO: 33049 - RNA, 19 nt, synthetic construct
  source 1..19: mol_type = other RNA
ttgtggtggtggtggtcag

SEQ ID NO: 33050 - RNA, 19 nt, synthetic construct
  source 1..19: mol_type = other RNA
gttgtggtggtggtggtca

SEQ ID NO: 33051 - RNA, 19 nt, synthetic construct
  source 1..19: mol_type = other RNA
cacagttgtggtggtggtg

SEQ ID NO: 33052 - RNA, 19 nt, synthetic construct
  source 1..19: mol_type = other RNA
cagtggccacagttgtggt

SEQ ID NO: 33053 - RNA, 19 nt, synthetic construct
  source 1..19: mol_type = other RNA
tgccatagaaccagtggcc

SEQ ID NO: 33054 - RNA, 19 nt, synthetic construct
  source 1..19: mol_type = other RNA
ggtggtggagccggtggcc

SEQ ID NO: 33055 - RNA, 19 nt, synthetic construct
  source 1..19: mol_type = other RNA
ggttggtggtggagccggt

SEQ ID NO: 33056 - RNA, 19 nt, synthetic construct
  source 1..19: mol_type = other RNA
ttgaggaggggttggtggt

SEQ ID NO: 33057 - RNA, 19 nt, synthetic construct
  source 1..19: mol_type = other RNA
agttgaggaggggttggtg

SEQ ID NO: 33058 - RNA, 19 nt, synthetic construct
  source 1..19: mol_type = other RNA
tggagttgaggaggggttg

SEQ ID NO: 33059 - RNA, 19 nt, synthetic construct
  source 1..19: mol_type = other RNA
ctggagttgaggaggggtt

SEQ ID NO: 33060 - RNA, 19 nt, synthetic construct
  source 1..19: mol_type = other RNA
tccctggagttgaggaggg

SEQ ID NO: 33061 - RNA, 19 nt, synthetic construct
  source 1..19: mol_type = other RNA
tgtccctggagttgaggag

SEQ ID NO: 33062 - RNA, 19 nt, synthetic construct
  source 1..19: mol_type = other RNA
gttgtccctggagttgagg

SEQ ID NO: 33063 - RNA, 19 nt, synthetic construct
  source 1..19: mol_type = other RNA
gtggtggtcagcactgggg

SEQ ID NO: 33064 - RNA, 19 nt, synthetic construct
  source 1..19: mol_type = other RNA
cggtggtggtcagcactgg

SEQ ID NO: 33065 - RNA, 19 nt, synthetic construct
  source 1..19: mol_type = other RNA
gtggtggcggtggtggtca

SEQ ID NO: 33066 - RNA, 19 nt, synthetic construct
  source 1..19: mol_type = other RNA
aggtgtggtggcggtggtg

SEQ ID NO: 33067 - RNA, 19 nt, synthetic construct
  source 1..19: mol_type = other RNA
ctgcaggtgtggtggcggt

SEQ ID NO: 33068 - RNA, 19 nt, synthetic construct
  source 1..19: mol_type = other RNA
ggctgcaggtgtggtggcg

SEQ ID NO: 33069 - RNA, 19 nt, synthetic construct
  source 1..19: mol_type = other RNA
tggctgcaggtgtggtggc

SEQ ID NO: 33070 - RNA, 19 nt, synthetic construct
  source 1..19: mol_type = other RNA
gctgctggtggctgcaggt

SEQ ID NO: 33071 - RNA, 19 nt, synthetic construct
  source 1..19: mol_type = other RNA
actgtgctgctggtggctg

SEQ ID NO: 33072 - RNA, 19 nt, synthetic construct
  source 1..19: mol_type = other RNA
gtcactgtgctgctggtgg

SEQ ID NO: 33073 - RNA, 19 nt, synthetic construct
  source 1..19: mol_type = other RNA
gaggagggagtcactgtgc

SEQ ID NO: 33074 - RNA, 19 nt, synthetic construct
  source 1..19: mol_type = other RNA
agaggagggagtcactgtg

SEQ ID NO: 33075 - RNA, 19 nt, synthetic construct
  source 1..19: mol_type = other RNA
tagggcagaggagggagtc

SEQ ID NO: 33076 - RNA, 19 nt, synthetic construct
  source 1..19: mol_type = other RNA
cggcactgggggtgtgtgg

SEQ ID NO: 33077 - RNA, 19 nt, synthetic construct
  source 1..19: mol_type = other RNA
ttcggcactgggggtgtgt

SEQ ID NO: 33078 - RNA, 19 nt, synthetic construct
  source 1..19: mol_type = other RNA
tgtgtggtggccgtggtgt

SEQ ID NO: 33079 - RNA, 19 nt, synthetic construct
  source 1..19: mol_type = other RNA
tgtggggactgctggggga

SEQ ID NO: 33080 - RNA, 19 nt, synthetic construct
  source 1..19: mol_type = other RNA
aaggtgcctgaggtggccg

SEQ ID NO: 33081 - RNA, 19 nt, synthetic construct
  source 1..19: mol_type = other RNA
cccaaggtgcctgaggtgg

SEQ ID NO: 33082 - RNA, 19 nt, synthetic construct
  source 1..19: mol_type = other RNA
tggtgcccaaggtgcctga

SEQ ID NO: 33083 - RNA, 19 nt, synthetic construct
  source 1..19: mol_type = other RNA
gtgggtggtgcccaaggtg

SEQ ID NO: 33084 - RNA, 19 nt, synthetic construct
  source 1..19: mol_type = other RNA
tgctggggtgtgggaagtc

SEQ ID NO: 33085 - RNA, 19 nt, synthetic construct
  source 1..19: mol_type = other RNA
gttgctgctggggtgtggg

SEQ ID NO: 33086 - RNA, 19 nt, synthetic construct
  source 1..19: mol_type = other RNA
gctagggtgagggctggac

SEQ ID NO: 33087 - RNA, 19 nt, synthetic construct
  source 1..19: mol_type = other RNA
tggtgtggcccggggtggt

SEQ ID NO: 33088 - RNA, 19 nt, synthetic construct
  source 1..19: mol_type = other RNA
aggtggccgtggtgtggcc

SEQ ID NO: 33089 - RNA, 19 nt, synthetic construct
  source 1..19: mol_type = other RNA
cctggaggtggccgtggtg

SEQ ID NO: 33090 - RNA, 19 nt, synthetic construct
  source 1..19: mol_type = other RNA
tgggtgtggccgtggccgt

SEQ ID NO: 33091 - RNA, 19 nt, synthetic construct
  source 1..19: mol_type = other RNA
ctgggtgtggccgtggccg

SEQ ID NO: 33092 - RNA, 19 nt, synthetic construct
  source 1..19: mol_type = other RNA
gctgggtgtggccgtggcc

SEQ ID NO: 33093 - RNA, 19 nt, synthetic construct
  source 1..19: mol_type = other RNA
ttgctgggtgtggccgtgg

SEQ ID NO: 33094 - RNA, 19 nt, synthetic construct
  source 1..19: mol_type = other RNA
cttgctgggtgtggccgtg

SEQ ID NO: 33095 - RNA, 19 nt, synthetic construct
  source 1..19: mol_type = other RNA
tcacagcccgtggtcacca

SEQ ID NO: 33096 - RNA, 19 nt, synthetic construct
  source 1..19: mol_type = other RNA
gtagtccagccactctgac

SEQ ID NO: 33097 - RNA, 19 nt, synthetic construct
  source 1..19: mol_type = other RNA
agacggcccctccggccgc

SEQ ID NO: 33098 - RNA, 19 nt, synthetic construct
  source 1..19: mol_type = other RNA
ccaggctgggcctgggcac

SEQ ID NO: 33099 - RNA, 19 nt, synthetic construct
  source 1..19: mol_type = other RNA
actcccccagggggacacc

SEQ ID NO: 33100 - RNA, 19 nt, synthetic construct
  source 1..19: mol_type = other RNA
aggccaaagtccaggctgc

SEQ ID NO: 33101 - RNA, 19 nt, synthetic construct
  source 1..19: mol_type = other RNA
caggccaaagtccaggctg

SEQ ID NO: 33102 - RNA, 19 nt, synthetic construct
  source 1..19: mol_type = other RNA
gaccaggccaaagtccagg

SEQ ID NO: 33103 - RNA, 19 nt, synthetic construct
  source 1..19: mol_type = other RNA
acggttcctgcagaccagg

SEQ ID NO: 33104 - RNA, 19 nt, synthetic construct
  source 1..19: mol_type = other RNA
gtggaggagggcatggccg

SEQ ID NO: 33105 - RNA, 19 nt, synthetic construct
  source 1..19: mol_type = other RNA
ggagtggaggagggcatgg

SEQ ID NO: 33106 - RNA, 19 nt, synthetic construct
  source 1..19: mol_type = other RNA
cccggggtggaggacgggg

SEQ ID NO: 33107 - RNA, 19 nt, synthetic construct
  source 1..19: mol_type = other RNA
ttgggagggggagctgttc

SEQ ID NO: 33108 - RNA, 19 nt, synthetic construct
  source 1..19: mol_type = other RNA
tgtgggtgtggtggccggg

SEQ ID NO: 33109 - RNA, 19 nt, synthetic construct
  source 1..19: mol_type = other RNA
gaggaggaagtggctttgg

SEQ ID NO: 33110 - RNA, 19 nt, synthetic construct
  source 1..19: mol_type = other RNA
actggaggaggaagtggct

SEQ ID NO: 33111 - RNA, 19 nt, synthetic construct
  source 1..19: mol_type = other RNA
ggactggaggaggaagtgg

SEQ ID NO: 33112 - RNA, 19 nt, synthetic construct
  source 1..19: mol_type = other RNA
tggactggaggaggaagtg

SEQ ID NO: 33113 - RNA, 19 nt, synthetic construct
  source 1..19: mol_type = other RNA
ttggactggaggaggaagt

SEQ ID NO: 33114 - RNA, 19 nt, synthetic construct
  source 1..19: mol_type = other RNA
ccttggactggaggaggaa

SEQ ID NO: 33115 - RNA, 19 nt, synthetic construct
  source 1..19: mol_type = other RNA
gtccttggactggaggagg

SEQ ID NO: 33116 - RNA, 19 nt, synthetic construct
  source 1..19: mol_type = other RNA
ggtggaggaggggatgggt

SEQ ID NO: 33117 - RNA, 19 nt, synthetic construct
  source 1..19: mol_type = other RNA
tcccaagggtggaggaggg

SEQ ID NO: 33118 - RNA, 19 nt, synthetic construct
  source 1..19: mol_type = other RNA
ggtggtcccaagggtggag

SEQ ID NO: 33119 - RNA, 19 nt, synthetic construct
  source 1..19: mol_type = other RNA
ctgttctgggagggtcccg

SEQ ID NO: 33120 - RNA, 19 nt, synthetic construct
  source 1..19: mol_type = other RNA
tgtggacatggtggccacg

SEQ ID NO: 33121 - RNA, 19 nt, synthetic construct
  source 1..19: mol_type = other RNA
tctccggagtggaggaggg

SEQ ID NO: 33122 - RNA, 19 nt, synthetic construct
  source 1..19: mol_type = other RNA
cactgtggaggtgtgggtg

SEQ ID NO: 33123 - RNA, 19 nt, synthetic construct
  source 1..19: mol_type = other RNA
cgtggtggccttcgtggtc

SEQ ID NO: 33124 - RNA, 19 nt, synthetic construct
  source 1..19: mol_type = other RNA
ggaggagggggtggacgtg

SEQ ID NO: 33125 - RNA, 19 nt, synthetic construct
  source 1..19: mol_type = other RNA
tggaggagggggtggacgt

SEQ ID NO: 33126 - RNA, 19 nt, synthetic construct
  source 1..19: mol_type = other RNA
gtggaggagggggtggacg

SEQ ID NO: 33127 - RNA, 19 nt, synthetic construct
  source 1..19: mol_type = other RNA
ccggagtggaggagggggt

SEQ ID NO: 33128 - RNA, 19 nt, synthetic construct
  source 1..19: mol_type = other RNA
ggctgcagttgtagtggct

SEQ ID NO: 33129 - RNA, 19 nt, synthetic construct
  source 1..19: mol_type = other RNA
tggctgcagttgtagtggc

SEQ ID NO: 33130 - RNA, 19 nt, synthetic construct
  source 1..19: mol_type = other RNA
gggccagtggctgcagttg

SEQ ID NO: 33131 - RNA, 19 nt, synthetic construct
  source 1..19: mol_type = other RNA
ggggccagtggctgcagtt

SEQ ID NO: 33132 - RNA, 19 nt, synthetic construct
  source 1..19: mol_type = other RNA
gccgtggggccagtggctg

SEQ ID NO: 33133 - RNA, 19 nt, synthetic construct
  source 1..19: mol_type = other RNA
ggtggccgtggggccagtg

SEQ ID NO: 33134 - RNA, 19 nt, synthetic construct
  source 1..19: mol_type = other RNA
gacggggtggccgtggggc

SEQ ID NO: 33135 - RNA, 19 nt, synthetic construct
  source 1..19: mol_type = other RNA
tccctggggtggaggacgg

SEQ ID NO: 33136 - RNA, 19 nt, synthetic construct
  source 1..19: mol_type = other RNA
gtccctggggtggaggacg

SEQ ID NO: 33137 - RNA, 19 nt, synthetic construct
  source 1..19: mol_type = other RNA
tggtccctggggtggagga

SEQ ID NO: 33138 - RNA, 19 nt, synthetic construct
  source 1..19: mol_type = other RNA
gtggtccctggggtggagg

SEQ ID NO: 33139 - RNA, 19 nt, synthetic construct
  source 1..19: mol_type = other RNA
aggtggtccctggggtgga

SEQ ID NO: 33140 - RNA, 19 nt, synthetic construct
  source 1..19: mol_type = other RNA
caggtggtccctggggtgg

SEQ ID NO: 33141 - RNA, 19 nt, synthetic construct
  source 1..19: mol_type = other RNA
ccaggtggtccctggggtg

SEQ ID NO: 33142 - RNA, 19 nt, synthetic construct
  source 1..19: mol_type = other RNA
tccaggtggtccctggggt

SEQ ID NO: 33143 - RNA, 19 nt, synthetic construct
  source 1..19: mol_type = other RNA
tccctggggtggaggacgg

SEQ ID NO: 33144 - RNA, 19 nt, synthetic construct
  source 1..19: mol_type = other RNA
gtccctggggtggaggacg

SEQ ID NO: 33145 - RNA, 19 nt, synthetic construct
  source 1..19: mol_type = other RNA
tggtccctggggtggagga

SEQ ID NO: 33146 - RNA, 19 nt, synthetic construct
  source 1..19: mol_type = other RNA
gtggtccctggggtggagg

SEQ ID NO: 33147 - RNA, 19 nt, synthetic construct
  source 1..19: mol_type = other RNA
aggtggtccctggggtgga

SEQ ID NO: 33148 - RNA, 19 nt, synthetic construct
  source 1..19: mol_type = other RNA
caggtggtccctggggtgg

SEQ ID NO: 33149 - RNA, 19 nt, synthetic construct
  source 1..19: mol_type = other RNA
ccaggtggtccctggggtg

SEQ ID NO: 33150 - RNA, 19 nt, synthetic construct
  source 1..19: mol_type = other RNA
tccaggtggtccctggggt

SEQ ID NO: 33151 - RNA, 19 nt, synthetic construct
  source 1..19: mol_type = other RNA
cctgggtggaggaggcggt

SEQ ID NO: 33152 - RNA, 19 nt, synthetic construct
  source 1..19: mol_type = other RNA
agcagttgcctgggtggag

SEQ ID NO: 33153 - RNA, 19 nt, synthetic construct
  source 1..19: mol_type = other RNA
ggagctggtgactgtgggt

SEQ ID NO: 33154 - RNA, 19 nt, synthetic construct
  source 1..19: mol_type = other RNA
ttggagctggtgactgtgg

SEQ ID NO: 33155 - RNA, 19 nt, synthetic construct
  source 1..19: mol_type = other RNA
tttggagctggtgactgtg

SEQ ID NO: 33156 - RNA, 19 nt, synthetic construct
  source 1..19: mol_type = other RNA
gagtggctttggagctggt

SEQ ID NO: 33157 - RNA, 19 nt, synthetic construct
  source 1..19: mol_type = other RNA
ggaggagggagtggctttg

SEQ ID NO: 33158 - RNA, 19 nt, synthetic construct
  source 1..19: mol_type = other RNA
tggaggagggagtggcttt

SEQ ID NO: 33159 - RNA, 19 nt, synthetic construct
  source 1..19: mol_type = other RNA
ggactggaggagggagtgg

SEQ ID NO: 33160 - RNA, 19 nt, synthetic construct
  source 1..19: mol_type = other RNA
ccctggactggaggaggga

SEQ ID NO: 33161 - RNA, 19 nt, synthetic construct
  source 1..19: mol_type = other RNA
gaggaggaggggatggctg

SEQ ID NO: 33162 - RNA, 19 nt, synthetic construct
  source 1..19: mol_type = other RNA
ggaggaggaggggatggct

SEQ ID NO: 33163 - RNA, 19 nt, synthetic construct
  source 1..19: mol_type = other RNA
tggtgcccagggaggagga

SEQ ID NO: 33164 - RNA, 19 nt, synthetic construct
  source 1..19: mol_type = other RNA
ccaggtggtgcccagggag

SEQ ID NO: 33165 - RNA, 19 nt, synthetic construct
  source 1..19: mol_type = other RNA
ggtccaggtggtgcccagg

SEQ ID NO: 33166 - RNA, 19 nt, synthetic construct
  source 1..19: mol_type = other RNA
cgggtccaggtggtgccca

SEQ ID NO: 33167 - RNA, 19 nt, synthetic construct
  source 1..19: mol_type = other RNA
gcgggtccaggtggtgccc

SEQ ID NO: 33168 - RNA, 19 nt, synthetic construct
  source 1..19: mol_type = other RNA
ggcgggtccaggtggtgcc

SEQ ID NO: 33169 - RNA, 19 nt, synthetic construct
  source 1..19: mol_type = other RNA
aggcgggtccaggtggtgc

SEQ ID NO: 33170 - RNA, 19 nt, synthetic construct
  source 1..19: mol_type = other RNA
tgggtgtggtggtctgtga

SEQ ID NO: 33171 - RNA, 19 nt, synthetic construct
  source 1..19: mol_type = other RNA
tggctgtggacatggtggc

SEQ ID NO: 33172 - RNA, 19 nt, synthetic construct
  source 1..19: mol_type = other RNA
gtgtggctgtggacatggt

SEQ ID NO: 33173 - RNA, 19 nt, synthetic construct
  source 1..19: mol_type = other RNA
agggtgtggctgtggacat

SEQ ID NO: 33174 - RNA, 19 nt, synthetic construct
  source 1..19: mol_type = other RNA
tctggagtggaggagggtg

SEQ ID NO: 33175 - RNA, 19 nt, synthetic construct
  source 1..19: mol_type = other RNA
gttgtggtggccgtggcgg

SEQ ID NO: 33176 - RNA, 19 nt, synthetic construct
  source 1..19: mol_type = other RNA
aggagggggtggccacaga

SEQ ID NO: 33177 - RNA, 19 nt, synthetic construct
  source 1..19: mol_type = other RNA
gaggagggggtggccacag

SEQ ID NO: 33178 - RNA, 19 nt, synthetic construct
  source 1..19: mol_type = other RNA
ggaggagggggtggccaca

SEQ ID NO: 33179 - RNA, 19 nt, synthetic construct
  source 1..19: mol_type = other RNA
tggaggagggggtggccac

SEQ ID NO: 33180 - RNA, 19 nt, synthetic construct
  source 1..19: mol_type = other RNA
gtggaggagggggtggcca

SEQ ID NO: 33181 - RNA, 19 nt, synthetic construct
  source 1..19: mol_type = other RNA
tcctggggtggaggagggg

SEQ ID NO: 33182 - RNA, 19 nt, synthetic construct
  source 1..19: mol_type = other RNA
tgttcctggggtggaggag

SEQ ID NO: 33183 - RNA, 19 nt, synthetic construct
  source 1..19: mol_type = other RNA
tggttgtggtagtcggcac

SEQ ID NO: 33184 - RNA, 19 nt, synthetic construct
  source 1..19: mol_type = other RNA
gggtggctgtgaagcccgt

SEQ ID NO: 33185 - RNA, 19 nt, synthetic construct
  source 1..19: mol_type = other RNA
aggagggggtggctgtgaa

SEQ ID NO: 33186 - RNA, 19 nt, synthetic construct
  source 1..19: mol_type = other RNA
tggaggagggggtggctgt

SEQ ID NO: 33187 - RNA, 19 nt, synthetic construct
  source 1..19: mol_type = other RNA
gccgtccctgggctggagg

SEQ ID NO: 33188 - RNA, 19 nt, synthetic construct
  source 1..19: mol_type = other RNA
tgccgtccctgggctggag

SEQ ID NO: 33189 - RNA, 19 nt, synthetic construct
  source 1..19: mol_type = other RNA
tgtgctgatccacactgga

SEQ ID NO: 33190 - RNA, 19 nt, synthetic construct
  source 1..19: mol_type = other RNA
gtggttgtgggtgtggtgg

SEQ ID NO: 33191 - RNA, 19 nt, synthetic construct
  source 1..19: mol_type = other RNA
ggtggttgtgggtgtggtg

SEQ ID NO: 33192 - RNA, 19 nt, synthetic construct
  source 1..19: mol_type = other RNA
tggtggttgtgggtgtggt

SEQ ID NO: 33193 - RNA, 19 nt, synthetic construct
  source 1..19: mol_type = other RNA
gtggtggttgtgggtgtgg

SEQ ID NO: 33194 - RNA, 19 nt, synthetic construct
  source 1..19: mol_type = other RNA
tgtggtggttgtgggtgtg

SEQ ID NO: 33195 - RNA, 19 nt, synthetic construct
  source 1..19: mol_type = other RNA
gtgtggtggttgtgggtgt

SEQ ID NO: 33196 - RNA, 19 nt, synthetic construct
  source 1..19: mol_type = other RNA
ggtgtggtggttgtgggtg

SEQ ID NO: 33197 - RNA, 19 nt, synthetic construct
  source 1..19: mol_type = other RNA
gtgggtgtggtggttgtgg

SEQ ID NO: 33198 - RNA, 19 nt, synthetic construct
  source 1..19: mol_type = other RNA
cactggttgtgggtgtggt

SEQ ID NO: 33199 - RNA, 19 nt, synthetic construct
  source 1..19: mol_type = other RNA
tcaccgtggagccactggt

SEQ ID NO: 33200 - RNA, 19 nt, synthetic construct
  source 1..19: mol_type = other RNA
gatggaggagggggtcacc

SEQ ID NO: 33201 - RNA, 19 nt, synthetic construct
  source 1..19: mol_type = other RNA
cgggatggaggagggggtc

SEQ ID NO: 33202 - RNA, 19 nt, synthetic construct
  source 1..19: mol_type = other RNA
cccgggatggaggaggggg

SEQ ID NO: 33203 - RNA, 19 nt, synthetic construct
  source 1..19: mol_type = other RNA
tccccgggatggaggaggg

SEQ ID NO: 33204 - RNA, 19 nt, synthetic construct
  source 1..19: mol_type = other RNA
ggtccccgggatggaggag

SEQ ID NO: 33205 - RNA, 19 nt, synthetic construct
  source 1..19: mol_type = other RNA
gtggtggtggtcagcactc

SEQ ID NO: 33206 - RNA, 19 nt, synthetic construct
  source 1..19: mol_type = other RNA
ttgtggtggtggtggtcag

SEQ ID NO: 33207 - RNA, 19 nt, synthetic construct
  source 1..19: mol_type = other RNA
gttgtggtggtggtggtca

SEQ ID NO: 33208 - RNA, 19 nt, synthetic construct
  source 1..19: mol_type = other RNA
cacagttgtggtggtggtg

SEQ ID NO: 33209 - RNA, 19 nt, synthetic construct
  source 1..19: mol_type = other RNA
cagtggccacagttgtggt

SEQ ID NO: 33210 - RNA, 19 nt, synthetic construct
  source 1..19: mol_type = other RNA
tgccatagaaccagtggcc

SEQ ID NO: 33211 - RNA, 19 nt, synthetic construct
  source 1..19: mol_type = other RNA
tagtggccgtggtggtcag

SEQ ID NO: 33212 - RNA, 19 nt, synthetic construct
  source 1..19: mol_type = other RNA
ggtggtggagccggtggcc

SEQ ID NO: 33213 - RNA, 19 nt, synthetic construct
  source 1..19: mol_type = other RNA
ggttggtggtggagccggt

SEQ ID NO: 33214 - RNA, 19 nt, synthetic construct
  source 1..19: mol_type = other RNA
ttgaggaggggttggtggt

SEQ ID NO: 33215 - RNA, 19 nt, synthetic construct
  source 1..19: mol_type = other RNA
agttgaggaggggttggtg

SEQ ID NO: 33216 - RNA, 19 nt, synthetic construct
  source 1..19: mol_type = other RNA
tggagttgaggaggggttg

SEQ ID NO: 33217 - RNA, 19 nt, synthetic construct
  source 1..19: mol_type = other RNA
ctggagttgaggaggggtt

SEQ ID NO: 33218 - RNA, 19 nt, synthetic construct
  source 1..19: mol_type = other RNA
tccctggagttgaggaggg

SEQ ID NO: 33219 - RNA, 19 nt, synthetic construct
  source 1..19: mol_type = other RNA
tgtccctggagttgaggag

SEQ ID NO: 33220 - RNA, 19 nt, synthetic construct
  source 1..19: mol_type = other RNA
gttgtccctggagttgagg

SEQ ID NO: 33221 - RNA, 19 nt, synthetic construct
  source 1..19: mol_type = other RNA
agcactggggtgatgggtg

SEQ ID NO: 33222 - RNA, 19 nt, synthetic construct
  source 1..19: mol_type = other RNA
ggtcagcactggggtgatg

SEQ ID NO: 33223 - RNA, 19 nt, synthetic construct
  source 1..19: mol_type = other RNA
tggtcagcactggggtgat

SEQ ID NO: 33224 - RNA, 19 nt, synthetic construct
  source 1..19: mol_type = other RNA
tgtggtggccgtgctggtc

SEQ ID NO: 33225 - RNA, 19 nt, synthetic construct
  source 1..19: mol_type = other RNA
cgggtgtggtggccgtgct

SEQ ID NO: 33226 - RNA, 19 nt, synthetic construct
  source 1..19: mol_type = other RNA
ctttggagctggtggctgc

SEQ ID NO: 33227 - RNA, 19 nt, synthetic construct
  source 1..19: mol_type = other RNA
aagtggctttggagctggt

SEQ ID NO: 33228 - RNA, 19 nt, synthetic construct
  source 1..19: mol_type = other RNA
gaggaagtggctttggagc

SEQ ID NO: 33229 - RNA, 19 nt, synthetic construct
  source 1..19: mol_type = other RNA
gaggaggaagtggctttgg

SEQ ID NO: 33230 - RNA, 19 nt, synthetic construct
  source 1..19: mol_type = other RNA
actggaggaggaagtggct

SEQ ID NO: 33231 - RNA, 19 nt, synthetic construct
  source 1..19: mol_type = other RNA
ggactggaggaggaagtgg

SEQ ID NO: 33232 - RNA, 19 nt, synthetic construct
  source 1..19: mol_type = other RNA
tggactggaggaggaagtg

SEQ ID NO: 33233 - RNA, 19 nt, synthetic construct
  source 1..19: mol_type = other RNA
ttggactggaggaggaagt

SEQ ID NO: 33234 - RNA, 19 nt, synthetic construct
  source 1..19: mol_type = other RNA
ccttggactggaggaggaa

SEQ ID NO: 33235 - RNA, 19 nt, synthetic construct
  source 1..19: mol_type = other RNA
gtccttggactggaggagg

SEQ ID NO: 33236 - RNA, 19 nt, synthetic construct
  source 1..19: mol_type = other RNA
ggtggaggaggggatgggt

SEQ ID NO: 33237 - RNA, 19 nt, synthetic construct
  source 1..19: mol_type = other RNA
tccacagggtggaggaggg

SEQ ID NO: 33238 - RNA, 19 nt, synthetic construct
  source 1..19: mol_type = other RNA
gtggtccacagggtggagg

SEQ ID NO: 33239 - RNA, 19 nt, synthetic construct
  source 1..19: mol_type = other RNA
gtgtggtggtctgtgctgg

SEQ ID NO: 33240 - RNA, 19 nt, synthetic construct
  source 1..19: mol_type = other RNA
ggtgtggtggtctgtgctg

SEQ ID NO: 33241 - RNA, 19 nt, synthetic construct
  source 1..19: mol_type = other RNA
catggtggacatgggtgtg

SEQ ID NO: 33242 - RNA, 19 nt, synthetic construct
  source 1..19: mol_type = other RNA
acatggtggacatgggtgt

SEQ ID NO: 33243 - RNA, 19 nt, synthetic construct
  source 1..19: mol_type = other RNA
gtggacatggtggacatgg

SEQ ID NO: 33244 - RNA, 19 nt, synthetic construct
  source 1..19: mol_type = other RNA
cactgtggaggtgtgggtg

SEQ ID NO: 33245 - RNA, 19 nt, synthetic construct
  source 1..19: mol_type = other RNA
tggtggtcagcactgtgga

SEQ ID NO: 33246 - RNA, 19 nt, synthetic construct
  source 1..19: mol_type = other RNA
gtggtggtcagcactgtgg

SEQ ID NO: 33247 - RNA, 19 nt, synthetic construct
  source 1..19: mol_type = other RNA
tgtggtggtcagcactgtg

SEQ ID NO: 33248 - RNA, 19 nt, synthetic construct
  source 1..19: mol_type = other RNA
tggctgtggtggtcagcac

SEQ ID NO: 33249 - RNA, 19 nt, synthetic construct
  source 1..19: mol_type = other RNA
gctgttgtggtcagctcag

SEQ ID NO: 33250 - RNA, 19 nt, synthetic construct
  source 1..19: mol_type = other RNA
ggctgcagttgtagtggct

SEQ ID NO: 33251 - RNA, 19 nt, synthetic construct
  source 1..19: mol_type = other RNA
tggctgcagttgtagtggc

SEQ ID NO: 33252 - RNA, 19 nt, synthetic construct
  source 1..19: mol_type = other RNA
gaggacagggtggccgtgg

SEQ ID NO: 33253 - RNA, 19 nt, synthetic construct
  source 1..19: mol_type = other RNA
ggtggaggacagggtggcc

SEQ ID NO: 33254 - RNA, 19 nt, synthetic construct
  source 1..19: mol_type = other RNA
gggtggaggacagggtggc

SEQ ID NO: 33255 - RNA, 19 nt, synthetic construct
  source 1..19: mol_type = other RNA
ctggggtggaggacagggt

SEQ ID NO: 33256 - RNA, 19 nt, synthetic construct
  source 1..19: mol_type = other RNA
ccctggggtggaggacagg

SEQ ID NO: 33257 - RNA, 19 nt, synthetic construct
  source 1..19: mol_type = other RNA
tccctggggtggaggacag

SEQ ID NO: 33258 - RNA, 19 nt, synthetic construct
  source 1..19: mol_type = other RNA
tggtccctggggtggagga

SEQ ID NO: 33259 - RNA, 19 nt, synthetic construct
  source 1..19: mol_type = other RNA
gtggtccctggggtggagg

SEQ ID NO: 33260 - RNA, 19 nt, synthetic construct
  source 1..19: mol_type = other RNA
aggtggtccctggggtgga

SEQ ID NO: 33261 - RNA, 19 nt, synthetic construct
  source 1..19: mol_type = other RNA
caggtggtccctggggtgg

SEQ ID NO: 33262 - RNA, 19 nt, synthetic construct
  source 1..19: mol_type = other RNA
ccaggtggtccctggggtg

SEQ ID NO: 33263 - RNA, 19 nt, synthetic construct
  source 1..19: mol_type = other RNA
tccaggtggtccctggggt

SEQ ID NO: 33264 - RNA, 19 nt, synthetic construct
  source 1..19: mol_type = other RNA
aggaggcggtggccgtgga

SEQ ID NO: 33265 - RNA, 19 nt, synthetic construct
  source 1..19: mol_type = other RNA
gagtggaggaggcggtggc

SEQ ID NO: 33266 - RNA, 19 nt, synthetic construct
  source 1..19: mol_type = other RNA
ccagagtggaggaggcggt

SEQ ID NO: 33267 - RNA, 19 nt, synthetic construct
  source 1..19: mol_type = other RNA
tcccagagtggaggaggcg

SEQ ID NO: 33268 - RNA, 19 nt, synthetic construct
  source 1..19: mol_type = other RNA
ttcccagagtggaggaggc

SEQ ID NO: 33269 - RNA, 19 nt, synthetic construct
  source 1..19: mol_type = other RNA
atagtggccatggtggtca

SEQ ID NO: 33270 - RNA, 19 nt, synthetic construct
  source 1..19: mol_type = other RNA
ctgtgggcatagtggccat

SEQ ID NO: 33271 - RNA, 19 nt, synthetic construct
  source 1..19: mol_type = other RNA
cagtggctgtgggcatagt

SEQ ID NO: 33272 - RNA, 19 nt, synthetic construct
  source 1..19: mol_type = other RNA
ggaggcagtggctgtgggc

SEQ ID NO: 33273 - RNA, 19 nt, synthetic construct
  source 1..19: mol_type = other RNA
tggaggcagtggctgtggg

SEQ ID NO: 33274 - RNA, 19 nt, synthetic construct
  source 1..19: mol_type = other RNA
gtggaggcagtggctgtgg

SEQ ID NO: 33275 - RNA, 19 nt, synthetic construct
  source 1..19: mol_type = other RNA
accgtggaggcagtggctg

SEQ ID NO: 33276 - RNA, 19 nt, synthetic construct
  source 1..19: mol_type = other RNA
aaccgtggaggcagtggct

SEQ ID NO: 33277 - RNA, 19 nt, synthetic construct
  source 1..19: mol_type = other RNA
tggggagcactgcaggggt

SEQ ID NO: 33278 - RNA, 19 nt, synthetic construct
  source 1..19: mol_type = other RNA
ggttggcaggctgctgggg

SEQ ID NO: 33279 - RNA, 19 nt, synthetic construct
  source 1..19: mol_type = other RNA
agtgggtctcagggtggtg

SEQ ID NO: 33280 - RNA, 19 nt, synthetic construct
  source 1..19: mol_type = other RNA
tgggagctggggaagccag

SEQ ID NO: 33281 - RNA, 19 nt, synthetic construct
  source 1..19: mol_type = other RNA
agtgggagctggggaagcc

SEQ ID NO: 33282 - RNA, 19 nt, synthetic construct
  source 1..19: mol_type = other RNA
aagtgggagctggggaagc

SEQ ID NO: 33283 - RNA, 19 nt, synthetic construct
  source 1..19: mol_type = other RNA
gaagtgggagctggggaag

SEQ ID NO: 33284 - RNA, 19 nt, synthetic construct
  source 1..19: mol_type = other RNA
agaagtgggagctggggaa

SEQ ID NO: 33285 - RNA, 19 nt, synthetic construct
  source 1..19: mol_type = other RNA
aatgtcacagtgctgattg

SEQ ID NO: 33286 - RNA, 19 nt, synthetic construct
  source 1..19: mol_type = other RNA
ggtggggaggtgggacagg

SEQ ID NO: 33287 - RNA, 19 nt, synthetic construct
  source 1..19: mol_type = other RNA
cggtggggaggtgggacag

SEQ ID NO: 33288 - RNA, 19 nt, synthetic construct
  source 1..19: mol_type = other RNA
tggcggtggggaggtggga

SEQ ID NO: 33289 - RNA, 19 nt, synthetic construct
  source 1..19: mol_type = other RNA
ctggcggtggggaggtggg

SEQ ID NO: 33290 - RNA, 19 nt, synthetic construct
  source 1..19: mol_type = other RNA
actggcggtggggaggtgg

SEQ ID NO: 33291 - RNA, 19 nt, synthetic construct
  source 1..19: mol_type = other RNA
acactggcggtggggaggt

SEQ ID NO: 33292 - RNA, 19 nt, synthetic construct
  source 1..19: mol_type = other RNA
aggacagcggggcggagga

SEQ ID NO: 33293 - RNA, 19 nt, synthetic construct
  source 1..19: mol_type = other RNA
agggcgaggacagcggggc

SEQ ID NO: 33294 - RNA, 19 nt, synthetic construct
  source 1..19: mol_type = other RNA
aggggagggcgaggacagc

SEQ ID NO: 33295 - RNA, 19 nt, synthetic construct
  source 1..19: mol_type = other RNA
ggggcaggggagggcgagg

SEQ ID NO: 33296 - RNA, 19 nt, synthetic construct
  source 1..19: mol_type = other RNA
aggggcaggggagggcgag

SEQ ID NO: 33297 - RNA, 19 nt, synthetic construct
  source 1..19: mol_type = other RNA
gtccaggtagaggctgaga

SEQ ID NO: 33298 - RNA, 19 nt, synthetic construct
  source 1..19: mol_type = other RNA
tgcagtagtggttgtccag

SEQ ID NO: 33299 - RNA, 19 nt, synthetic construct
  source 1..19: mol_type = other RNA
agcggcagtggcagaggcc

SEQ ID NO: 33300 - RNA, 19 nt, synthetic construct
  source 1..19: mol_type = other RNA
gcagcggcagtggcagagg

SEQ ID NO: 33301 - RNA, 19 nt, synthetic construct
  source 1..19: mol_type = other RNA
ggcagcggcagtggcagag

SEQ ID NO: 33302 - RNA, 19 nt, synthetic construct
  source 1..19: mol_type = other RNA
ggcagcgggcggcagcggc

SEQ ID NO: 33303 - RNA, 19 nt, synthetic construct
  source 1..19: mol_type = other RNA
gggggcagcgggcggcagc

SEQ ID NO: 33304 - RNA, 19 nt, synthetic construct
  source 1..19: mol_type = other RNA
gagggcgcgggggcagcgg

SEQ ID NO: 33305 - RNA, 19 nt, synthetic construct
  source 1..19: mol_type = other RNA
ctgagggcgcgggggcagc

SEQ ID NO: 33306 - RNA, 19 nt, synthetic construct
  source 1..19: mol_type = other RNA
ggccctcctccttcccatg

SEQ ID NO: 33307 - RNA, 19 nt, synthetic construct
  source 1..19: mol_type = other RNA
aggccctcctccttcccat

SEQ ID NO: 33308 - RNA, 19 nt, synthetic construct
  source 1..19: mol_type = other RNA
caggccctcctccttccca

SEQ ID NO: 33309 - RNA, 19 nt, synthetic construct
  source 1..19: mol_type = other RNA
tcaggccctcctccttccc

SEQ ID NO: 33310 - RNA, 19 nt, synthetic construct
  source 1..19: mol_type = other RNA
cagcacagacacaagcacg

SEQ ID NO: 33311 - RNA, 19 nt, synthetic construct
  source 1..19: mol_type = other RNA
cgcatggtggtggtcccca

SEQ ID NO: 33312 - RNA, 19 nt, synthetic construct
  source 1..19: mol_type = other RNA
agggcaggaatgtccacac

SEQ ID NO: 33313 - RNA, 19 nt, synthetic construct
  source 1..19: mol_type = other RNA
cgggcctggaagacttggc

SEQ ID NO: 33314 - RNA, 19 nt, synthetic construct
  source 1..19: mol_type = other RNA
cagccgggcctggaagact

SEQ ID NO: 33315 - RNA, 19 nt, synthetic construct
  source 1..19: mol_type = other RNA
tgtgccagtcggggcccag

SEQ ID NO: 33316 - RNA, 19 nt, synthetic construct
  source 1..19: mol_type = other RNA
ggctggcagtggggggtgt

SEQ ID NO: 33317 - RNA, 19 nt, synthetic construct
  source 1..19: mol_type = other RNA
gcggggctggcagtggggg

SEQ ID NO: 33318 - RNA, 19 nt, synthetic construct
  source 1..19: mol_type = other RNA
ctgcggggctggcagtggg

SEQ ID NO: 33319 - RNA, 19 nt, synthetic construct
  source 1..19: mol_type = other RNA
ggcatggggtgggggtggg

SEQ ID NO: 33320 - RNA, 19 nt, synthetic construct
  source 1..19: mol_type = other RNA
tgggcatggggtgggggtg

SEQ ID NO: 33321 - RNA, 19 nt, synthetic construct
  source 1..19: mol_type = other RNA
gctgtggtgggcatggggt

SEQ ID NO: 33322 - RNA, 19 nt, synthetic construct
  source 1..19: mol_type = other RNA
agcggctgtggtgggcatg

SEQ ID NO: 33323 - RNA, 19 nt, synthetic construct
  source 1..19: mol_type = other RNA
gagcggctgtggtgggcat

SEQ ID NO: 33324 - RNA, 19 nt, synthetic construct
  source 1..19: mol_type = other RNA
cactcagcaaagacctggc

SEQ ID NO: 33325 - RNA, 19 nt, synthetic construct
  source 1..19: mol_type = other RNA
gcactcagcaaagacctgg

SEQ ID NO: 33326 - RNA, 19 nt, synthetic construct
  source 1..19: mol_type = other RNA
agcctccaggctctggcag

SEQ ID NO: 33327 - RNA, 19 nt, synthetic construct
  source 1..19: mol_type = other RNA
ccagctgtgggctctggtt

SEQ ID NO: 33328 - RNA, 19 nt, synthetic construct
  source 1..19: mol_type = other RNA
tccagctgtgggctctggt

SEQ ID NO: 33329 - RNA, 19 nt, synthetic construct
  source 1..19: mol_type = other RNA
ctccagctgtgggctctgg

SEQ ID NO: 33330 - RNA, 19 nt, synthetic construct
  source 1..19: mol_type = other RNA
cctccagctgtgggctctg

SEQ ID NO: 33331 - RNA, 19 nt, synthetic construct
  source 1..19: mol_type = other RNA
tccgccatcccctccagct

SEQ ID NO: 33332 - RNA, 19 nt, synthetic construct
  source 1..19: mol_type = other RNA
cctccgccatcccctccag

SEQ ID NO: 33333 - RNA, 19 nt, synthetic construct
  source 1..19: mol_type = other RNA
ggtcctcagggcagaagca

SEQ ID NO: 33334 - RNA, 19 nt, synthetic construct
  source 1..19: mol_type = other RNA
atctggtcctcagggcaga

SEQ ID NO: 33335 - RNA, 19 nt, synthetic construct
  source 1..19: mol_type = other RNA
ggatctggtcctcagggca

SEQ ID NO: 33336 - RNA, 19 nt, synthetic construct
  source 1..19: mol_type = other RNA
tcccacgcaggggcaggcc

SEQ ID NO: 33337 - RNA, 19 nt, synthetic construct
  source 1..19: mol_type = other RNA
ggtcccacgcaggggcagg

SEQ ID NO: 33338 - RNA, 19 nt, synthetic construct
  source 1..19: mol_type = other RNA
gcaggactggcagttgctg

SEQ ID NO: 33339 - RNA, 19 nt, synthetic construct
  source 1..19: mol_type = other RNA
gcgggggctgaccctgggc

SEQ ID NO: 33340 - RNA, 19 nt, synthetic construct
  source 1..19: mol_type = other RNA
tctcggcccggggcctggt

SEQ ID NO: 33341 - RNA, 19 nt, synthetic construct
  source 1..19: mol_type = other RNA
tgggggcaggtggttgtgt

SEQ ID NO: 33342 - RNA, 19 nt, synthetic construct
  source 1..19: mol_type = other RNA
ggctctgggggcaggtggt

SEQ ID NO: 33343 - RNA, 19 nt, synthetic construct
  source 1..19: mol_type = other RNA
aggctctgggggcaggtgg

SEQ ID NO: 33344 - RNA, 19 nt, synthetic construct
  source 1..19: mol_type = other RNA
ggcaggctctgggggcagg

SEQ ID NO: 33345 - RNA, 19 nt, synthetic construct
  source 1..19: mol_type = other RNA
caggcaggctctgggggca

SEQ ID NO: 33346 - RNA, 19 nt, synthetic construct
  source 1..19: mol_type = other RNA
cacaggcaggctctggggg

SEQ ID NO: 33347 - RNA, 19 nt, synthetic construct
  source 1..19: mol_type = other RNA
gactcctgccctggcgggc

SEQ ID NO: 33348 - RNA, 19 nt, synthetic construct
  source 1..19: mol_type = other RNA
tggactcctgccctggcgg

SEQ ID NO: 33349 - RNA, 19 nt, synthetic construct
  source 1..19: mol_type = other RNA
cctcctgggtgcagatgga

SEQ ID NO: 33350 - RNA, 19 nt, synthetic construct
  source 1..19: mol_type = other RNA
tcctcctgggtgcagatgg

SEQ ID NO: 33351 - RNA, 19 nt, synthetic construct
  source 1..19: mol_type = other RNA
cctcctcctgggtgcagat

SEQ ID NO: 33352 - RNA, 19 nt, synthetic construct
  source 1..19: mol_type = other RNA
cgccctcctcctgggtgca

SEQ ID NO: 33353 - RNA, 19 nt, synthetic construct
  source 1..19: mol_type = other RNA
gtcgccctcctcctgggtg

SEQ ID NO: 33354 - RNA, 19 nt, synthetic construct
  source 1..19: mol_type = other RNA
cacagctgaggtctgcagc

SEQ ID NO: 33355 - RNA, 19 nt, synthetic construct
  source 1..19: mol_type = other RNA
acacagctgaggtctgcag

SEQ ID NO: 33356 - RNA, 19 nt, synthetic construct
  source 1..19: mol_type = other RNA
agggaagggcgcctgggaa

SEQ ID NO: 33357 - RNA, 19 nt, synthetic construct
  source 1..19: mol_type = other RNA
caaagccctggggacaggt

SEQ ID NO: 33358 - RNA, 19 nt, synthetic construct
  source 1..19: mol_type = other RNA
tactcaaagccctggggac

SEQ ID NO: 33359 - RNA, 19 nt, synthetic construct
  source 1..19: mol_type = other RNA
tcagctggactggctggcc

SEQ ID NO: 33360 - RNA, 19 nt, synthetic construct
  source 1..19: mol_type = other RNA
agttgtccacatggctgtt

SEQ ID NO: 33361 - RNA, 19 nt, synthetic construct
  source 1..19: mol_type = other RNA
caccctcagcctcacagag

SEQ ID NO: 33362 - RNA, 19 nt, synthetic construct
  source 1..19: mol_type = other RNA
tccaccctcagcctcacag

SEQ ID NO: 33363 - RNA, 19 nt, synthetic construct
  source 1..19: mol_type = other RNA
ctccaccctcagcctcaca

SEQ ID NO: 33364 - RNA, 19 nt, synthetic construct
  source 1..19: mol_type = other RNA
actccaccctcagcctcac

SEQ ID NO: 33365 - RNA, 19 nt, synthetic construct
  source 1..19: mol_type = other RNA
cacatctgggcaggatgca

SEQ ID NO: 33366 - RNA, 19 nt, synthetic construct
  source 1..19: mol_type = other RNA
tccccctgcagctggacac

SEQ ID NO: 33367 - RNA, 19 nt, synthetic construct
  source 1..19: mol_type = other RNA
tgacctcggtctcgcagcc

SEQ ID NO: 33368 - RNA, 19 nt, synthetic construct
  source 1..19: mol_type = other RNA
tccggggcaggagccctcg

SEQ ID NO: 33369 - RNA, 19 nt, synthetic construct
  source 1..19: mol_type = other RNA
ctccggggcaggagccctc

SEQ ID NO: 33370 - RNA, 19 nt, synthetic construct
  source 1..19: mol_type = other RNA
ggcctgggcctctgctgag

SEQ ID NO: 33371 - RNA, 19 nt, synthetic construct
  source 1..19: mol_type = other RNA
cctctcctggcagcaggtg

SEQ ID NO: 33372 - RNA, 19 nt, synthetic construct
  source 1..19: mol_type = other RNA
acccgcctctcctggcagc

SEQ ID NO: 33373 - RNA, 19 nt, synthetic construct
  source 1..19: mol_type = other RNA
gggccgggaagccacgggt

SEQ ID NO: 33374 - RNA, 19 nt, synthetic construct
  source 1..19: mol_type = other RNA
ctcctgggccgggaagcca

SEQ ID NO: 33375 - RNA, 19 nt, synthetic construct
  source 1..19: mol_type = other RNA
ggcctcctgggccgggaag

SEQ ID NO: 33376 - RNA, 19 nt, synthetic construct
  source 1..19: mol_type = other RNA
tggcctcctgggccgggaa

SEQ ID NO: 33377 - RNA, 19 nt, synthetic construct
  source 1..19: mol_type = other RNA
cagcagtggcctcctgggc

SEQ ID NO: 33378 - RNA, 19 nt, synthetic construct
  source 1..19: mol_type = other RNA
cagacagcagtggcctcct

SEQ ID NO: 33379 - RNA, 19 nt, synthetic construct
  source 1..19: mol_type = other RNA
catggggatggaggcagaa

SEQ ID NO: 33380 - RNA, 19 nt, synthetic construct
  source 1..19: mol_type = other RNA
acatcctggctccaggtgg

SEQ ID NO: 33381 - RNA, 19 nt, synthetic construct
  source 1..19: mol_type = other RNA
gttttcatgatcagacaat

SEQ ID NO: 33382 - RNA, 19 nt, synthetic construct
  source 1..19: mol_type = other RNA
ggttttcatgatcagacaa

SEQ ID NO: 33383 - RNA, 19 nt, synthetic construct
  source 1..19: mol_type = other RNA
ggggctccgcagaggaggc

SEQ ID NO: 33384 - RNA, 19 nt, synthetic construct
  source 1..19: mol_type = other RNA
cggggggctccgcagagga

SEQ ID NO: 33385 - RNA, 19 nt, synthetic construct
  source 1..19: mol_type = other RNA
aggccggggggctccgcag

SEQ ID NO: 33386 - RNA, 19 nt, synthetic construct
  source 1..19: mol_type = other RNA
caggccggggggctccgca

SEQ ID NO: 33387 - RNA, 19 nt, synthetic construct
  source 1..19: mol_type = other RNA
tgccacacacaggccgggg

SEQ ID NO: 33388 - RNA, 19 nt, synthetic construct
  source 1..19: mol_type = other RNA
cccctcacccttctggggc

SEQ ID NO: 33389 - RNA, 19 nt, synthetic construct
  source 1..19: mol_type = other RNA
ctgctggcccctcaccctt

SEQ ID NO: 33390 - RNA, 19 nt, synthetic construct
  source 1..19: mol_type = other RNA
cgaaaggggtcctgctggc

SEQ ID NO: 33391 - RNA, 19 nt, synthetic construct
  source 1..19: mol_type = other RNA
cagggaggggcaaggccaa

SEQ ID NO: 33392 - RNA, 19 nt, synthetic construct
  source 1..19: mol_type = other RNA
tcagggaggggcaaggcca

SEQ ID NO: 33393 - RNA, 19 nt, synthetic construct
  source 1..19: mol_type = other RNA
tgcgcgggcgctccggccg

SEQ ID NO: 33394 - RNA, 19 nt, synthetic construct
  source 1..19: mol_type = other RNA
tggccttgcctggaccagc

SEQ ID NO: 33395 - RNA, 19 nt, synthetic construct
  source 1..19: mol_type = other RNA
gcagctggccttgcctgga

SEQ ID NO: 33396 - RNA, 19 nt, synthetic construct
  source 1..19: mol_type = other RNA
ctggcagcagctggccttg

SEQ ID NO: 33397 - RNA, 19 nt, synthetic construct
  source 1..19: mol_type = other RNA
cctggcagcagctggcctt

SEQ ID NO: 33398 - RNA, 19 nt, synthetic construct
  source 1..19: mol_type = other RNA
ttcctggcagcagctggcc

SEQ ID NO: 33399 - RNA, 19 nt, synthetic construct
  source 1..19: mol_type = other RNA
agcttcctggcagcagctg

SEQ ID NO: 33400 - RNA, 19 nt, synthetic construct
  source 1..19: mol_type = other RNA
cgcagcttcctggcagcag

SEQ ID NO: 33401 - RNA, 19 nt, synthetic construct
  source 1..19: mol_type = other RNA
gtcgcagcttcctggcagc

SEQ ID NO: 33402 - RNA, 19 nt, synthetic construct
  source 1..19: mol_type = other RNA
ccttgcctgtcgcagcttc

SEQ ID NO: 33403 - RNA, 19 nt, synthetic construct
  source 1..19: mol_type = other RNA
tgctgacccctctctgacc

SEQ ID NO: 33404 - RNA, 19 nt, synthetic construct
  source 1..19: mol_type = other RNA
tgggatgctgacccctctc

SEQ ID NO: 33405 - RNA, 19 nt, synthetic construct
  source 1..19: mol_type = other RNA
caatgctcagggtttattt

SEQ ID NO: 33406 - RNA, 19 nt, synthetic construct
  source 1..19: mol_type = other RNA
tgcagttgtccacatggct

SEQ ID NO: 33407 - RNA, 19 nt, synthetic construct
  source 1..19: mol_type = other RNA
ggctgcgcccgtggcctcc

SEQ ID NO: 33408 - RNA, 19 nt, synthetic construct
  source 1..19: mol_type = other RNA
gcactttgggagggggagc

SEQ ID NO: 33409 - RNA, 19 nt, synthetic construct
  source 1..19: mol_type = other RNA
gcactttgggagggggagc

SEQ ID NO: 33410 - RNA, 19 nt, synthetic construct
  source 1..19: mol_type = other RNA
gcactttgggagggggagc

SEQ ID NO: 33411 - RNA, 19 nt, synthetic construct
  source 1..19: mol_type = other RNA
ggttttcaaacgtctcaaa

SEQ ID NO: 33412 - RNA, 19 nt, synthetic construct
  source 1..19: mol_type = other RNA
cctccttcccatgcaccat

SEQ ID NO: 33413 - RNA, 19 nt, synthetic construct
  source 1..19: mol_type = other RNA
cgccgggtgggcgaggacg

SEQ ID NO: 33414 - RNA, 19 nt, synthetic construct
  source 1..19: mol_type = other RNA
gtgtgcagttacagctctg

SEQ ID NO: 33415 - RNA, 19 nt, synthetic construct
  source 1..19: mol_type = other RNA
ggatgggagttgtccctgg

SEQ ID NO: 33416 - RNA, 19 nt, synthetic construct
  source 1..19: mol_type = other RNA
gagaggctcccaggcagct

SEQ ID NO: 33417 - RNA, 19 nt, synthetic construct
  source 1..19: mol_type = other RNA
gctggtcagcactggggtg

SEQ ID NO: 33418 - RNA, 19 nt, synthetic construct
  source 1..19: mol_type = other RNA
ccaggaggccagtgcggct

SEQ ID NO: 33419 - RNA, 19 nt, synthetic construct
  source 1..19: mol_type = other RNA
gggggctttgggatgctga

SEQ ID NO: 33420 - RNA, 19 nt, synthetic construct
  source 1..19: mol_type = other RNA
gctgtggtgctggccgggg

SEQ ID NO: 33421 - RNA, 19 nt, synthetic construct
  source 1..19: mol_type = other RNA
aagagggggtggccacaga

SEQ ID NO: 33422 - RNA, 19 nt, synthetic construct
  source 1..19: mol_type = other RNA
gtgctggtcagcactgggg

SEQ ID NO: 33423 - RNA, 19 nt, synthetic construct
  source 1..19: mol_type = other RNA
aggaggccagtgcggctgt

SEQ ID NO: 33424 - RNA, 19 nt, synthetic construct
  source 1..19: mol_type = other RNA
ggggccagcgtgggtggct

SEQ ID NO: 33425 - RNA, 19 nt, synthetic construct
  source 1..19: mol_type = other RNA
acaggccggggggctccgc

SEQ ID NO: 33426 - RNA, 19 nt, synthetic construct
  source 1..19: mol_type = other RNA
accaggaggccagtgcggc

SEQ ID NO: 33427 - RNA, 19 nt, synthetic construct
  source 1..19: mol_type = other RNA
acacgggcaggtggggcag

SEQ ID NO: 33428 - RNA, 19 nt, synthetic construct
  source 1..19: mol_type = other RNA
ttggcacaggcagcctggg

SEQ ID NO: 33429 - RNA, 19 nt, synthetic construct
  source 1..19: mol_type = other RNA
tccacctgctggcccagct

SEQ ID NO: 33430 - RNA, 19 nt, synthetic construct
  source 1..19: mol_type = other RNA
gggctggtgcctggggccg

SEQ ID NO: 33431 - RNA, 19 nt, synthetic construct
  source 1..19: mol_type = other RNA
acagggcctgggtggtggt

SEQ ID NO: 33432 - RNA, 19 nt, synthetic construct
  source 1..19: mol_type = other RNA
agggagtggctctggagct

SEQ ID NO: 33433 - RNA, 19 nt, synthetic construct
  source 1..19: mol_type = other RNA
tgtggctgtggctgtggtc

SEQ ID NO: 33434 - RNA, 19 nt, synthetic construct
  source 1..19: mol_type = other RNA
cagggcagaagcagccctc

SEQ ID NO: 33435 - RNA, 19 nt, synthetic construct
  source 1..19: mol_type = other RNA
ggagggctgagggctggtg

SEQ ID NO: 33436 - RNA, 19 nt, synthetic construct
  source 1..19: mol_type = other RNA
cagggaagggcgcctggga

SEQ ID NO: 33437 - RNA, 19 nt, synthetic construct
  source 1..19: mol_type = other RNA
tggggggcagggaccgccc

SEQ ID NO: 33438 - RNA, 19 nt, synthetic construct
  source 1..19: mol_type = other RNA
ctggggggcagggaccgcc

SEQ ID NO: 33439 - RNA, 19 nt, synthetic construct
  source 1..19: mol_type = other RNA
gggatgctgacccctctct

SEQ ID NO: 33440 - RNA, 19 nt, synthetic construct
  source 1..19: mol_type = other RNA
gccacgggtgtgtggggga

SEQ ID NO: 33441 - RNA, 19 nt, synthetic construct
  source 1..19: mol_type = other RNA
agccacgggtgtgtggggg

SEQ ID NO: 33442 - RNA, 19 nt, synthetic construct
  source 1..19: mol_type = other RNA
gctggggaagccagtgggt

SEQ ID NO: 33443 - RNA, 19 nt, synthetic construct
  source 1..19: mol_type = other RNA
ctggaccagcctgtctgcc

SEQ ID NO: 33444 - RNA, 19 nt, synthetic construct
  source 1..19: mol_type = other RNA
gtgtggtggcggtggtggt

SEQ ID NO: 33445 - RNA, 19 nt, synthetic construct
  source 1..19: mol_type = other RNA
gtgtggtggcggtggtggt

SEQ ID NO: 33446 - RNA, 19 nt, synthetic construct
  source 1..19: mol_type = other RNA
gtgtggtggcggtggtggt

SEQ ID NO: 33447 - RNA, 19 nt, synthetic construct
  source 1..19: mol_type = other RNA
gtgtggtggcggtggtggt

SEQ ID NO: 33448 - RNA, 19 nt, synthetic construct
  source 1..19: mol_type = other RNA
gctggggggcagggaccgc

SEQ ID NO: 33449 - RNA, 19 nt, synthetic construct
  source 1..19: mol_type = other RNA
ccctggggaagggggtgac

SEQ ID NO: 33450 - RNA, 19 nt, synthetic construct
  source 1..19: mol_type = other RNA
gtccctggggaagggggtg

SEQ ID NO: 33451 - RNA, 19 nt, synthetic construct
  source 1..19: mol_type = other RNA
gagggctgagggctggtgc

SEQ ID NO: 33452 - RNA, 19 nt, synthetic construct
  source 1..19: mol_type = other RNA
cctggggaagggggtgact

SEQ ID NO: 33453 - RNA, 19 nt, synthetic construct
  source 1..19: mol_type = other RNA
agggagggagccgggccgg

SEQ ID NO: 33454 - RNA, 19 nt, synthetic construct
  source 1..19: mol_type = other RNA
gaggagggggtggctgtga

SEQ ID NO: 33455 - RNA, 19 nt, synthetic construct
  source 1..19: mol_type = other RNA
gaggagggggtggctgtga

SEQ ID NO: 33456 - RNA, 19 nt, synthetic construct
  source 1..19: mol_type = other RNA
gaggagggggtggctgtga

SEQ ID NO: 33457 - RNA, 19 nt, synthetic construct
  source 1..19: mol_type = other RNA
gaggagggggtggctgtga

SEQ ID NO: 33458 - RNA, 19 nt, synthetic construct
  source 1..19: mol_type = other RNA
ctggggaagccagtgggtc

SEQ ID NO: 33459 - RNA, 19 nt, synthetic construct
  source 1..19: mol_type = other RNA
gggcagcgggcggcagcgg

SEQ ID NO: 33460 - RNA, 19 nt, synthetic construct
  source 1..19: mol_type = other RNA
gtcttggccatgtccttgc

SEQ ID NO: 33461 - RNA, 19 nt, synthetic construct
  source 1..19: mol_type = other RNA
ccggggctgcggggctggc

SEQ ID NO: 33462 - RNA, 19 nt, synthetic construct
  source 1..19: mol_type = other RNA
agacaccggggctgcgggg

SEQ ID NO: 33463 - RNA, 19 nt, synthetic construct
  source 1..19: mol_type = other RNA
cgtcacggggcctgagctg

SEQ ID NO: 33464 - RNA, 19 nt, synthetic construct
  source 1..19: mol_type = other RNA
accggtggttgctgctggg

SEQ ID NO: 33465 - RNA, 19 nt, synthetic construct
  source 1..19: mol_type = other RNA
accggtggttgctgctggg

SEQ ID NO: 33466 - RNA, 19 nt, synthetic construct
  source 1..19: mol_type = other RNA
aaggttggcaggctgctgg

SEQ ID NO: 33467 - RNA, 19 nt, synthetic construct
  source 1..19: mol_type = other RNA
tagggtgagggctggaaag

SEQ ID NO: 33468 - RNA, 19 nt, synthetic construct
  source 1..19: mol_type = other RNA
ggctgcggggctggcagtg

SEQ ID NO: 33469 - RNA, 19 nt, synthetic construct
  source 1..19: mol_type = other RNA
ctccacagggccctgggtc

SEQ ID NO: 33470 - RNA, 19 nt, synthetic construct
  source 1..19: mol_type = other RNA
ctgtggtgctggccggggg

SEQ ID NO: 33471 - RNA, 19 nt, synthetic construct
  source 1..19: mol_type = other RNA
aggaggggttggtggtgga

SEQ ID NO: 33472 - RNA, 19 nt, synthetic construct
  source 1..19: mol_type = other RNA
aggaggggttggtggtgga

SEQ ID NO: 33473 - RNA, 19 nt, synthetic construct
  source 1..19: mol_type = other RNA
aggaggggttggtggtgga

SEQ ID NO: 33474 - RNA, 19 nt, synthetic construct
  source 1..19: mol_type = other RNA
aggaggggttggtggtgga

SEQ ID NO: 33475 - RNA, 19 nt, synthetic construct
  source 1..19: mol_type = other RNA
aggaggggttggtggtgga

SEQ ID NO: 33476 - RNA, 19 nt, synthetic construct
  source 1..19: mol_type = other RNA
ccggggcaggagccctcgc

SEQ ID NO: 33477 - RNA, 19 nt, synthetic construct
  source 1..19: mol_type = other RNA
ggacagggtggccgtggat

SEQ ID NO: 33478 - RNA, 19 nt, synthetic construct
  source 1..19: mol_type = other RNA
ccctccagctgtgggctct

SEQ ID NO: 33479 - RNA, 19 nt, synthetic construct
  source 1..19: mol_type = other RNA
tcggggcccagcagccatc

SEQ ID NO: 33480 - RNA, 19 nt, synthetic construct
  source 1..19: mol_type = other RNA
gtccccacacaggccacag

SEQ ID NO: 33481 - RNA, 19 nt, synthetic construct
  source 1..19: mol_type = other RNA
ggtcctcgcagagctgcgc

SEQ ID NO: 33482 - RNA, 19 nt, synthetic construct
  source 1..19: mol_type = other RNA
cggttcctgcaggtgcagg

SEQ ID NO: 33483 - RNA, 19 nt, synthetic construct
  source 1..19: mol_type = other RNA
gggagggctgagggctggt

SEQ ID NO: 33484 - RNA, 19 nt, synthetic construct
  source 1..19: mol_type = other RNA
actgctgtggtgctggccg

SEQ ID NO: 33485 - RNA, 19 nt, synthetic construct
  source 1..19: mol_type = other RNA
gccctggctggtggtggtg

SEQ ID NO: 33486 - RNA, 19 nt, synthetic construct
  source 1..19: mol_type = other RNA
ctgtggaggtgtgggcagt

SEQ ID NO: 33487 - RNA, 19 nt, synthetic construct
  source 1..19: mol_type = other RNA
actgtggaggtgtgggcag

SEQ ID NO: 33488 - RNA, 19 nt, synthetic construct
  source 1..19: mol_type = other RNA
ttcctggggtggaggaggg

SEQ ID NO: 33489 - RNA, 19 nt, synthetic construct
  source 1..19: mol_type = other RNA
ctagggtgagggctggaaa

SEQ ID NO: 33490 - RNA, 19 nt, synthetic construct
  source 1..19: mol_type = other RNA
ctggaggtggccgtggtgt

SEQ ID NO: 33491 - RNA, 19 nt, synthetic construct
  source 1..19: mol_type = other RNA
tggccgtggctgtggtcct

SEQ ID NO: 33492 - RNA, 19 nt, synthetic construct
  source 1..19: mol_type = other RNA
agggaggaggaggggatgg

SEQ ID NO: 33493 - RNA, 19 nt, synthetic construct
  source 1..19: mol_type = other RNA
cagggaggaggaggggatg

SEQ ID NO: 33494 - RNA, 19 nt, synthetic construct
  source 1..19: mol_type = other RNA
acagtctctggagtggagg

SEQ ID NO: 33495 - RNA, 19 nt, synthetic construct
  source 1..19: mol_type = other RNA
ttcctggggtggaggaggg

SEQ ID NO: 33496 - RNA, 19 nt, synthetic construct
  source 1..19: mol_type = other RNA
gactgctgggggacaggga

SEQ ID NO: 33497 - RNA, 19 nt, synthetic construct
  source 1..19: mol_type = other RNA
gggtggccgtggggccagt

SEQ ID NO: 33498 - RNA, 19 nt, synthetic construct
  source 1..19: mol_type = other RNA
ttcctggggtggaggaggg

SEQ ID NO: 33499 - RNA, 19 nt, synthetic construct
  source 1..19: mol_type = other RNA
agggaggaggaggggatgg

SEQ ID NO: 33500 - RNA, 19 nt, synthetic construct
  source 1..19: mol_type = other RNA
cagggaggaggaggggatg

SEQ ID NO: 33501 - RNA, 19 nt, synthetic construct
  source 1..19: mol_type = other RNA
ctgtggaggtgtgggcagt

SEQ ID NO: 33502 - RNA, 19 nt, synthetic construct
  source 1..19: mol_type = other RNA
actgtggaggtgtgggcag

SEQ ID NO: 33503 - RNA, 19 nt, synthetic construct
  source 1..19: mol_type = other RNA
gactgctgggggacaggga

SEQ ID NO: 33504 - RNA, 19 nt, synthetic construct
  source 1..19: mol_type = other RNA
ctggaggtggccgtggtgt

SEQ ID NO: 33505 - RNA, 19 nt, synthetic construct
  source 1..19: mol_type = other RNA
ccaagggtggaggagggga

SEQ ID NO: 33506 - RNA, 19 nt, synthetic construct
  source 1..19: mol_type = other RNA
gggtggccgtggggccagt

SEQ ID NO: 33507 - RNA, 19 nt, synthetic construct
  source 1..19: mol_type = other RNA
agggaggaggaggggatgg

SEQ ID NO: 33508 - RNA, 19 nt, synthetic construct
  source 1..19: mol_type = other RNA
cagggaggaggaggggatg

SEQ ID NO: 33509 - RNA, 19 nt, synthetic construct
  source 1..19: mol_type = other RNA
acagtctctggagtggagg

SEQ ID NO: 33510 - RNA, 19 nt, synthetic construct
  source 1..19: mol_type = other RNA
ttcctggggtggaggaggg

SEQ ID NO: 33511 - RNA, 19 nt, synthetic construct
  source 1..19: mol_type = other RNA
ggggcagcgggcggcagcg

SEQ ID NO: 33512 - RNA, 19 nt, synthetic construct
  source 1..19: mol_type = other RNA
gctgcggggctggcagtgg

SEQ ID NO: 33513 - RNA, 19 nt, synthetic construct
  source 1..19: mol_type = other RNA
gggctgcggggctggcagt

SEQ ID NO: 33514 - RNA, 19 nt, synthetic construct
  source 1..19: mol_type = other RNA
ggggctgcggggctggcag

SEQ ID NO: 33515 - RNA, 19 nt, synthetic construct
  source 1..19: mol_type = other RNA
cccctccagctgtgggctc

SEQ ID NO: 33516 - RNA, 19 nt, synthetic construct
  source 1..19: mol_type = other RNA
tcccctccagctgtgggct

SEQ ID NO: 33517 - RNA, 19 nt, synthetic construct
  source 1..19: mol_type = other RNA
aggcaggctctgggggcag

SEQ ID NO: 33518 - RNA, 19 nt, synthetic construct
  source 1..19: mol_type = other RNA
cgtgcagggtgagccacac

SEQ ID NO: 33519 - RNA, 19 nt, synthetic construct
  source 1..19: mol_type = other RNA
ggtgactgtgggtgtggtg

SEQ ID NO: 33520 - RNA, 19 nt, synthetic construct
  source 1..19: mol_type = other RNA
cgggggactctgttggctg

SEQ ID NO: 33521 - RNA, 19 nt, synthetic construct
  source 1..19: mol_type = other RNA
gttctcagacagcagtggc

SEQ ID NO: 33522 - RNA, 19 nt, synthetic construct
  source 1..19: mol_type = other RNA
cttctgagagggtggggac

SEQ ID NO: 33523 - RNA, 19 nt, synthetic construct
  source 1..19: mol_type = other RNA
cccgtgtgtggtggccatg

SEQ ID NO: 33524 - RNA, 19 nt, synthetic construct
  source 1..19: mol_type = other RNA
ctcagccctgagttaccct

SEQ ID NO: 33525 - RNA, 19 nt, synthetic construct
  source 1..19: mol_type = other RNA
cacaggctttgggtccagc

SEQ ID NO: 33526 - RNA, 19 nt, synthetic construct
  source 1..19: mol_type = other RNA
ctggtgactgtgggtgtgg

SEQ ID NO: 33527 - RNA, 19 nt, synthetic construct
  source 1..19: mol_type = other RNA
cactgtgctgctggtggct

SEQ ID NO: 33528 - RNA, 19 nt, synthetic construct
  source 1..19: mol_type = other RNA
tggggactgctgggggaca

SEQ ID NO: 33529 - RNA, 19 nt, synthetic construct
  source 1..19: mol_type = other RNA
cactgtgctgctggtggct

SEQ ID NO: 33530 - RNA, 19 nt, synthetic construct
  source 1..19: mol_type = other RNA
cactgtgctgctggtggct

SEQ ID NO: 33531 - RNA, 19 nt, synthetic construct
  source 1..19: mol_type = other RNA
tggggactgctgggggaca

SEQ ID NO: 33532 - RNA, 19 nt, synthetic construct
  source 1..19: mol_type = other RNA
gggcacacaggcaggctct

SEQ ID NO: 33533 - RNA, 19 nt, synthetic construct
  source 1..19: mol_type = other RNA
gtggagatgtgggccccgc

SEQ ID NO: 33534 - RNA, 19 nt, synthetic construct
  source 1..19: mol_type = other RNA
gggcggaggacactggcgg

SEQ ID NO: 33535 - RNA, 19 nt, synthetic construct
  source 1..19: mol_type = other RNA
acgctccggggcaggagcc

SEQ ID NO: 33536 - RNA, 19 nt, synthetic construct
  source 1..19: mol_type = other RNA
gccgggctctgggcggtgc

SEQ ID NO: 33537 - RNA, 19 nt, synthetic construct
  source 1..19: mol_type = other RNA
ggtggagatgtgggccccg

SEQ ID NO: 33538 - RNA, 19 nt, synthetic construct
  source 1..19: mol_type = other RNA
ggcgtccgggcaggagggg

SEQ ID NO: 33539 - RNA, 19 nt, synthetic construct
  source 1..19: mol_type = other RNA
gggccacaggctctcccag

SEQ ID NO: 33540 - RNA, 19 nt, synthetic construct
  source 1..19: mol_type = other RNA
tgtggtggtctgtgctggg

SEQ ID NO: 33541 - RNA, 19 nt, synthetic construct
  source 1..19: mol_type = other RNA
ggtcccaagggtggaggag

SEQ ID NO: 33542 - RNA, 19 nt, synthetic construct
  source 1..19: mol_type = other RNA
gatgactgtgggtgtggtg

SEQ ID NO: 33543 - RNA, 19 nt, synthetic construct
  source 1..19: mol_type = other RNA
gacgctccggggcaggagc

SEQ ID NO: 33544 - RNA, 19 nt, synthetic construct
  source 1..19: mol_type = other RNA
agtcactgtgctgctggtg

SEQ ID NO: 33545 - RNA, 19 nt, synthetic construct
  source 1..19: mol_type = other RNA
ccccggagtggaggagggg

SEQ ID NO: 33546 - RNA, 19 nt, synthetic construct
  source 1..19: mol_type = other RNA
agtcactgtgctgctggtg

SEQ ID NO: 33547 - RNA, 19 nt, synthetic construct
  source 1..19: mol_type = other RNA
agtcactgtgctgctggtg

SEQ ID NO: 33548 - RNA, 19 nt, synthetic construct
  source 1..19: mol_type = other RNA
ccccggagtggaggagggg

SEQ ID NO: 33549 - RNA, 19 nt, synthetic construct
  source 1..19: mol_type = other RNA
atgggtgtggtggtctgtt

SEQ ID NO: 33550 - RNA, 19 nt, synthetic construct
  source 1..19: mol_type = other RNA
acgggtgtggtggtctgtt

SEQ ID NO: 33551 - RNA, 19 nt, synthetic construct
  source 1..19: mol_type = other RNA
gcgggcacacaggcaggct

SEQ ID NO: 33552 - RNA, 19 nt, synthetic construct
  source 1..19: mol_type = other RNA
ccatgggggctgcacaccc

SEQ ID NO: 33553 - RNA, 19 nt, synthetic construct
  source 1..19: mol_type = other RNA
atcctggctccaggtggac

SEQ ID NO: 33554 - RNA, 19 nt, synthetic construct
  source 1..19: mol_type = other RNA
cccggagcaggtgcaggag

SEQ ID NO: 33555 - RNA, 19 nt, synthetic construct
  source 1..19: mol_type = other RNA
tgcagccccaggcctgtct

SEQ ID NO: 33556 - RNA, 19 nt, synthetic construct
  source 1..19: mol_type = other RNA
gcctgggtggtggtggtgg

SEQ ID NO: 33557 - RNA, 19 nt, synthetic construct
  source 1..19: mol_type = other RNA
ccccgggatggaggagggg

SEQ ID NO: 33558 - RNA, 19 nt, synthetic construct
  source 1..19: mol_type = other RNA
gctgtggtcctggaggtgg

SEQ ID NO: 33559 - RNA, 19 nt, synthetic construct
  source 1..19: mol_type = other RNA
tgggtgtggccgtggctgt

SEQ ID NO: 33560 - RNA, 19 nt, synthetic construct
  source 1..19: mol_type = other RNA
ccccgggatggaggagggg

SEQ ID NO: 33561 - RNA, 19 nt, synthetic construct
  source 1..19: mol_type = other RNA
ggagtggaggagggggtgg

SEQ ID NO: 33562 - RNA, 19 nt, synthetic construct
  source 1..19: mol_type = other RNA
ccccgggatggaggagggg

SEQ ID NO: 33563 - RNA, 19 nt, synthetic construct
  source 1..19: mol_type = other RNA
ggagtggaggagggggtgg

SEQ ID NO: 33564 - RNA, 19 nt, synthetic construct
  source 1..19: mol_type = other RNA
ccccgggatggaggagggg

SEQ ID NO: 33565 - RNA, 19 nt, synthetic construct
  source 1..19: mol_type = other RNA
accagcctgtctgccccag

SEQ ID NO: 33566 - RNA, 19 nt, synthetic construct
  source 1..19: mol_type = other RNA
cgtagagctggtggccggg

SEQ ID NO: 33567 - RNA, 19 nt, synthetic construct
  source 1..19: mol_type = other RNA
cgtagagctggtggccggg

SEQ ID NO: 33568 - RNA, 19 nt, synthetic construct
  source 1..19: mol_type = other RNA
cgtagagctggtggccggg

SEQ ID NO: 33569 - RNA, 19 nt, synthetic construct
  source 1..19: mol_type = other RNA
cgtagagctggtggccggg

SEQ ID NO: 33570 - RNA, 19 nt, synthetic construct
  source 1..19: mol_type = other RNA
gcactgagggagggctgag

SEQ ID NO: 33571 - RNA, 19 nt, synthetic construct
  source 1..19: mol_type = other RNA
ccgtgggtgtggtggtctg

SEQ ID NO: 33572 - RNA, 19 nt, synthetic construct
  source 1..19: mol_type = other RNA
ccgtgggtgtggtggtctg

SEQ ID NO: 33573 - RNA, 19 nt, synthetic construct
  source 1..19: mol_type = other RNA
ccgtgggtgtggtggtctg

SEQ ID NO: 33574 - RNA, 19 nt, synthetic construct
  source 1..19: mol_type = other RNA
ccgtgggtgtggtggtctg

SEQ ID NO: 33575 - RNA, 19 nt, synthetic construct
  source 1..19: mol_type = other RNA
ccgtgggtgtggtggtctg

SEQ ID NO: 33576 - RNA, 19 nt, synthetic construct
  source 1..19: mol_type = other RNA
tgcagcccccactcccatc

SEQ ID NO: 33577 - RNA, 19 nt, synthetic construct
  source 1..19: mol_type = other RNA
gttgcctgggtggaggagg

SEQ ID NO: 33578 - RNA, 19 nt, synthetic construct
  source 1..19: mol_type = other RNA
gttgcctgggtggaggagg

SEQ ID NO: 33579 - RNA, 19 nt, synthetic construct
  source 1..19: mol_type = other RNA
gttgcctgggtggaggagg

SEQ ID NO: 33580 - RNA, 19 nt, synthetic construct
  source 1..19: mol_type = other RNA
agttgcaggtggcaggctg

SEQ ID NO: 33581 - RNA, 19 nt, synthetic construct
  source 1..19: mol_type = other RNA
gctggccttgcctggacca

SEQ ID NO: 33582 - RNA, 19 nt, synthetic construct
  source 1..19: mol_type = other RNA
ggcctcgttgtgcacacag

SEQ ID NO: 33583 - RNA, 19 nt, synthetic construct
  source 1..19: mol_type = other RNA
tggagcctctggttgtggg

SEQ ID NO: 33584 - RNA, 19 nt, synthetic construct
  source 1..19: mol_type = other RNA
tggagcctctggttgtggg

SEQ ID NO: 33585 - RNA, 19 nt, synthetic construct
  source 1..19: mol_type = other RNA
gcagtggcagaggccgtgc

SEQ ID NO: 33586 - RNA, 19 nt, synthetic construct
  source 1..19: mol_type = other RNA
gaggagggggtggacatgg

SEQ ID NO: 33587 - RNA, 19 nt, synthetic construct
  source 1..19: mol_type = other RNA
tggtcccaagggtgaagga

SEQ ID NO: 33588 - RNA, 19 nt, synthetic construct
  source 1..19: mol_type = other RNA
ggtgcccagggaggaggag

SEQ ID NO: 33589 - RNA, 19 nt, synthetic construct
  source 1..19: mol_type = other RNA
ggtgcccagggaggaggag

SEQ ID NO: 33590 - RNA, 19 nt, synthetic construct
  source 1..19: mol_type = other RNA
ggtgcccagggaggaggag

SEQ ID NO: 33591 - RNA, 19 nt, synthetic construct
  source 1..19: mol_type = other RNA
ccatcccctccagctgtgg

SEQ ID NO: 33592 - RNA, 19 nt, synthetic construct
  source 1..19: mol_type = other RNA
cactgtggaggtgtggaca

SEQ ID NO: 33593 - RNA, 19 nt, synthetic construct
  source 1..19: mol_type = other RNA
cactgtggaggtgtggaca

SEQ ID NO: 33594 - RNA, 19 nt, synthetic construct
  source 1..19: mol_type = other RNA
cactgtggaggtgtggaca

SEQ ID NO: 33595 - RNA, 19 nt, synthetic construct
  source 1..19: mol_type = other RNA
cgttctcagacagcagtgg

SEQ ID NO: 33596 - RNA, 19 nt, synthetic construct
  source 1..19: mol_type = other RNA
ccttctgagagggtgggga

SEQ ID NO: 33597 - RNA, 19 nt, synthetic construct
  source 1..19: mol_type = other RNA
acgcctccagcaccagccc

SEQ ID NO: 33598 - RNA, 19 nt, synthetic construct
  source 1..19: mol_type = other RNA
gctggtgcctggggccggg

SEQ ID NO: 33599 - RNA, 19 nt, synthetic construct
  source 1..19: mol_type = other RNA
tccttctgagagggtgggg

SEQ ID NO: 33600 - RNA, 19 nt, synthetic construct
  source 1..19: mol_type = other RNA
gtccttctgagagggtggg

SEQ ID NO: 33601 - RNA, 19 nt, synthetic construct
  source 1..19: mol_type = other RNA
gttggtggtggagccggtg

SEQ ID NO: 33602 - RNA, 19 nt, synthetic construct
  source 1..19: mol_type = other RNA
gttggtggtggagccggtg

SEQ ID NO: 33603 - RNA, 19 nt, synthetic construct
  source 1..19: mol_type = other RNA
gtgctgggctctgtgagga

SEQ ID NO: 33604 - RNA, 19 nt, synthetic construct
  source 1..19: mol_type = other RNA
actggaggagggagtggct

SEQ ID NO: 33605 - RNA, 19 nt, synthetic construct
  source 1..19: mol_type = other RNA
agggaggaagaggggatgg

SEQ ID NO: 33606 - RNA, 19 nt, synthetic construct
  source 1..19: mol_type = other RNA
gttggtggtggagccggtg

SEQ ID NO: 33607 - RNA, 19 nt, synthetic construct
  source 1..19: mol_type = other RNA
gttggtggtggagccggtg

SEQ ID NO: 33608 - RNA, 19 nt, synthetic construct
  source 1..19: mol_type = other RNA
cccaagggtggaggagggg

SEQ ID NO: 33609 - RNA, 19 nt, synthetic construct
  source 1..19: mol_type = other RNA
gttggtggtggagccggtg

SEQ ID NO: 33610 - RNA, 19 nt, synthetic construct
  source 1..19: mol_type = other RNA
gggcgcgggggcagcgggc

SEQ ID NO: 33611 - RNA, 19 nt, synthetic construct
  source 1..19: mol_type = other RNA
gcagccgggcctggaagac

SEQ ID NO: 33612 - RNA, 19 nt, synthetic construct
  source 1..19: mol_type = other RNA
acacaggcaggctctgggg

SEQ ID NO: 33613 - RNA, 19 nt, synthetic construct
  source 1..19: mol_type = other RNA
ccacgtgggtgtaggtgtg

SEQ ID NO: 33614 - RNA, 19 nt, synthetic construct
  source 1..19: mol_type = other RNA
tggctgtgcttgtcagcac

SEQ ID NO: 33615 - RNA, 19 nt, synthetic construct
  source 1..19: mol_type = other RNA
tggctgtgcttgtcagcac

SEQ ID NO: 33616 - RNA, 19 nt, synthetic construct
  source 1..19: mol_type = other RNA
tggctgtgcttgtcagcac

SEQ ID NO: 33617 - RNA, 19 nt, synthetic construct
  source 1..19: mol_type = other RNA
tgtcccaggagttgaggag

SEQ ID NO: 33618 - RNA, 19 nt, synthetic construct
  source 1..19: mol_type = other RNA
aagggcgcctgggaaggtt

SEQ ID NO: 33619 - RNA, 19 nt, synthetic construct
  source 1..19: mol_type = other RNA
tcaccgtggaaggctctgt

SEQ ID NO: 33620 - RNA, 19 nt, synthetic construct
  source 1..19: mol_type = other RNA
tcaccgtggaaggctctgt

SEQ ID NO: 33621 - RNA, 19 nt, synthetic construct
  source 1..19: mol_type = other RNA
gtacaccatgggggctgca

SEQ ID NO: 33622 - RNA, 19 nt, synthetic construct
  source 1..19: mol_type = other RNA
ggagggagtggctctggag

SEQ ID NO: 33623 - RNA, 19 nt, synthetic construct
  source 1..19: mol_type = other RNA
ctgtctgccccagcggccg

SEQ ID NO: 33624 - RNA, 19 nt, synthetic construct
  source 1..19: mol_type = other RNA
tcggttgctgtggtctggg

SEQ ID NO: 33625 - RNA, 19 nt, synthetic construct
  source 1..19: mol_type = other RNA
ggctggctgggtgggcact

SEQ ID NO: 33626 - RNA, 19 nt, synthetic construct
  source 1..19: mol_type = other RNA
gccgttggacgcctccagc

SEQ ID NO: 33627 - RNA, 19 nt, synthetic construct
  source 1..19: mol_type = other RNA
cgccctcctgctcccagtt

SEQ ID NO: 33628 - RNA, 19 nt, synthetic construct
  source 1..19: mol_type = other RNA
cagtggcctcctgggccgg

SEQ ID NO: 33629 - RNA, 19 nt, synthetic construct
  source 1..19: mol_type = other RNA
tccccgtggaaggctctgt

SEQ ID NO: 33630 - RNA, 19 nt, synthetic construct
  source 1..19: mol_type = other RNA
tccccgtggaaggctctgt

SEQ ID NO: 33631 - RNA, 19 nt, synthetic construct
  source 1..19: mol_type = other RNA
tcttgtagtggaagtcacc

SEQ ID NO: 33632 - RNA, 19 nt, synthetic construct
  source 1..19: mol_type = other RNA
ccggagcaggtgcaggagc

SEQ ID NO: 33633 - RNA, 19 nt, synthetic construct
  source 1..19: mol_type = other RNA
tggcaccagctgcaccagc

SEQ ID NO: 33634 - RNA, 19 nt, synthetic construct
  source 1..19: mol_type = other RNA
ggtgtggtggcggtggtgg

SEQ ID NO: 33635 - RNA, 19 nt, synthetic construct
  source 1..19: mol_type = other RNA
ttgcctgggtggaggaggc

SEQ ID NO: 33636 - RNA, 19 nt, synthetic construct
  source 1..19: mol_type = other RNA
ggtgtggtggcggtggtgg

SEQ ID NO: 33637 - RNA, 19 nt, synthetic construct
  source 1..19: mol_type = other RNA
ggtgtggtggcggtggtgg

SEQ ID NO: 33638 - RNA, 19 nt, synthetic construct
  source 1..19: mol_type = other RNA
ttgcctgggtggaggaggc

SEQ ID NO: 33639 - RNA, 19 nt, synthetic construct
  source 1..19: mol_type = other RNA
ggtgtggtggcggtggtgg

SEQ ID NO: 33640 - RNA, 19 nt, synthetic construct
  source 1..19: mol_type = other RNA
ttgcctgggtggaggaggc

SEQ ID NO: 33641 - RNA, 19 nt, synthetic construct
  source 1..19: mol_type = other RNA
tgggtccccacccggccct

SEQ ID NO: 33642 - RNA, 19 nt, synthetic construct
  source 1..19: mol_type = other RNA
tgaggatccaggtcgtccc

SEQ ID NO: 33643 - RNA, 19 nt, synthetic construct
  source 1..19: mol_type = other RNA
tgcatggcctgggcctctg

SEQ ID NO: 33644 - RNA, 19 nt, synthetic construct
  source 1..19: mol_type = other RNA
tgctgctggggtgtgggaa

SEQ ID NO: 33645 - RNA, 19 nt, synthetic construct
  source 1..19: mol_type = other RNA
tgctgctggggtgtgggaa

SEQ ID NO: 33646 - RNA, 19 nt, synthetic construct
  source 1..19: mol_type = other RNA
tgctgctggggtgtgggaa

SEQ ID NO: 33647 - RNA, 19 nt, synthetic construct
  source 1..19: mol_type = other RNA
ggacgggcagggagggagc

SEQ ID NO: 33648 - RNA, 19 nt, synthetic construct
  source 1..19: mol_type = other RNA
ggggcacccatcctggggg

SEQ ID NO: 33649 - RNA, 19 nt, synthetic construct
  source 1..19: mol_type = other RNA
ttgggatccagctccagca

SEQ ID NO: 33650 - RNA, 19 nt, synthetic construct
  source 1..19: mol_type = other RNA
caccagcagctgcagcccc

SEQ ID NO: 33651 - RNA, 19 nt, synthetic construct
  source 1..19: mol_type = other RNA
atgcagcccccactcccat

SEQ ID NO: 33652 - RNA, 19 nt, synthetic construct
  source 1..19: mol_type = other RNA
ccagggaggaagaggggat

SEQ ID NO: 33653 - RNA, 19 nt, synthetic construct
  source 1..19: mol_type = other RNA
cgtgggtgtggtggtctgt

SEQ ID NO: 33654 - RNA, 19 nt, synthetic construct
  source 1..19: mol_type = other RNA
gtggctgtggacatggtgg

SEQ ID NO: 33655 - RNA, 19 nt, synthetic construct
  source 1..19: mol_type = other RNA
aggagggtgtggctgtgga

SEQ ID NO: 33656 - RNA, 19 nt, synthetic construct
  source 1..19: mol_type = other RNA
gaggagggtgtggctgtgg

SEQ ID NO: 33657 - RNA, 19 nt, synthetic construct
  source 1..19: mol_type = other RNA
accaggctgggcctgggca

SEQ ID NO: 33658 - RNA, 19 nt, synthetic construct
  source 1..19: mol_type = other RNA
gcctgggtggaggaggcgg

SEQ ID NO: 33659 - RNA, 19 nt, synthetic construct
  source 1..19: mol_type = other RNA
cgtgggtgtggtggtctgt

SEQ ID NO: 33660 - RNA, 19 nt, synthetic construct
  source 1..19: mol_type = other RNA
gtggctgtggacatggtgg

SEQ ID NO: 33661 - RNA, 19 nt, synthetic construct
  source 1..19: mol_type = other RNA
aggagggtgtggctgtgga

SEQ ID NO: 33662 - RNA, 19 nt, synthetic construct
  source 1..19: mol_type = other RNA
gaggagggtgtggctgtgg

SEQ ID NO: 33663 - RNA, 19 nt, synthetic construct
  source 1..19: mol_type = other RNA
ttgctgctggggtgtggga

SEQ ID NO: 33664 - RNA, 19 nt, synthetic construct
  source 1..19: mol_type = other RNA
accaggctgggcctgggca

SEQ ID NO: 33665 - RNA, 19 nt, synthetic construct
  source 1..19: mol_type = other RNA
ccagggaggaagaggggat

SEQ ID NO: 33666 - RNA, 19 nt, synthetic construct
  source 1..19: mol_type = other RNA
cgtgggtgtggtggtctgt

SEQ ID NO: 33667 - RNA, 19 nt, synthetic construct
  source 1..19: mol_type = other RNA
gtggctgtggacatggtgg

SEQ ID NO: 33668 - RNA, 19 nt, synthetic construct
  source 1..19: mol_type = other RNA
aggagggtgtggctgtgga

SEQ ID NO: 33669 - RNA, 19 nt, synthetic construct
  source 1..19: mol_type = other RNA
gaggagggtgtggctgtgg

SEQ ID NO: 33670 - RNA, 19 nt, synthetic construct
  source 1..19: mol_type = other RNA
agaggagggtgtggctgtg

SEQ ID NO: 33671 - RNA, 19 nt, synthetic construct
  source 1..19: mol_type = other RNA
ttgctgctggggtgtggga

SEQ ID NO: 33672 - RNA, 19 nt, synthetic construct
  source 1..19: mol_type = other RNA
accaggctgggcctgggca

SEQ ID NO: 33673 - RNA, 19 nt, synthetic construct
  source 1..19: mol_type = other RNA
gcctgggtggaggaggcgg

SEQ ID NO: 33674 - RNA, 19 nt, synthetic construct
  source 1..19: mol_type = other RNA
cgtgggtgtggtggtctgt

SEQ ID NO: 33675 - RNA, 19 nt, synthetic construct
  source 1..19: mol_type = other RNA
gtggctgtggacatggtgg

SEQ ID NO: 33676 - RNA, 19 nt, synthetic construct
  source 1..19: mol_type = other RNA
aggagggtgtggctgtgga

SEQ ID NO: 33677 - RNA, 19 nt, synthetic construct
  source 1..19: mol_type = other RNA
gaggagggtgtggctgtgg

SEQ ID NO: 33678 - RNA, 19 nt, synthetic construct
  source 1..19: mol_type = other RNA
gttcctggggtggaagagg

SEQ ID NO: 33679 - RNA, 19 nt, synthetic construct
  source 1..19: mol_type = other RNA
ttgctgctggggtgtggga

SEQ ID NO: 33680 - RNA, 19 nt, synthetic construct
  source 1..19: mol_type = other RNA
accaggctgggcctgggca

SEQ ID NO: 33681 - RNA, 19 nt, synthetic construct
  source 1..19: mol_type = other RNA
gcctgggtggaggaggcgg

SEQ ID NO: 33682 - RNA, 19 nt, synthetic construct
  source 1..19: mol_type = other RNA
cgtgggtgtggtggtctgt

SEQ ID NO: 33683 - RNA, 19 nt, synthetic construct
  source 1..19: mol_type = other RNA
gtggctgtggacatggtgg

SEQ ID NO: 33684 - RNA, 19 nt, synthetic construct
  source 1..19: mol_type = other RNA
aggagggtgtggctgtgga

SEQ ID NO: 33685 - RNA, 19 nt, synthetic construct
  source 1..19: mol_type = other RNA
gaggagggtgtggctgtgg

SEQ ID NO: 33686 - RNA, 19 nt, synthetic construct
  source 1..19: mol_type = other RNA
catgggtgtggtggtctgt

SEQ ID NO: 33687 - RNA, 19 nt, synthetic construct
  source 1..19: mol_type = other RNA
gggagctggggaagccagt

SEQ ID NO: 33688 - RNA, 19 nt, synthetic construct
  source 1..19: mol_type = other RNA
acaggctttgggtccagca

SEQ ID NO: 33689 - RNA, 19 nt, synthetic construct
  source 1..19: mol_type = other RNA
atggtggtggtccccagca

SEQ ID NO: 33690 - RNA, 19 nt, synthetic construct
  source 1..19: mol_type = other RNA
cggggctgcggggctggca

SEQ ID NO: 33691 - RNA, 19 nt, synthetic construct
  source 1..19: mol_type = other RNA
atggcctgggcctctgctg

SEQ ID NO: 33692 - RNA, 19 nt, synthetic construct
  source 1..19: mol_type = other RNA
actgagggagggctgaggg

SEQ ID NO: 33693 - RNA, 19 nt, synthetic construct
  source 1..19: mol_type = other RNA
gcatggcctgggcctctgc

SEQ ID NO: 33694 - RNA, 19 nt, synthetic construct
  source 1..19: mol_type = other RNA
tgcctgggtggaggaggcg

SEQ ID NO: 33695 - RNA, 19 nt, synthetic construct
  source 1..19: mol_type = other RNA
tgcctgggtggaggaggcg

SEQ ID NO: 33696 - RNA, 19 nt, synthetic construct
  source 1..19: mol_type = other RNA
tccctggggaagggggtga

SEQ ID NO: 33697 - RNA, 19 nt, synthetic construct
  source 1..19: mol_type = other RNA
tgcctgggtggaggaggcg

SEQ ID NO: 33698 - RNA, 19 nt, synthetic construct
  source 1..19: mol_type = other RNA
actgctgggggacagggat

SEQ ID NO: 33699 - RNA, 19 nt, synthetic construct
  source 1..19: mol_type = other RNA
gctgggtgtggctgtggct

SEQ ID NO: 33700 - RNA, 19 nt, synthetic construct
  source 1..19: mol_type = other RNA
tgctgggtgtggctgtggc

SEQ ID NO: 33701 - RNA, 19 nt, synthetic construct
  source 1..19: mol_type = other RNA
actgctgggggacagggat

SEQ ID NO: 33702 - RNA, 19 nt, synthetic construct
  source 1..19: mol_type = other RNA
cgcagaccctgcccttgta

SEQ ID NO: 33703 - RNA, 19 nt, synthetic construct
  source 1..19: mol_type = other RNA
aaccactctgtccactcac

SEQ ID NO: 33704 - RNA, 19 nt, synthetic construct
  source 1..19: mol_type = other RNA
ccgcagaccctgcccttgt

SEQ ID NO: 33705 - RNA, 19 nt, synthetic construct
  source 1..19: mol_type = other RNA
ggggctggcaggtggtggt

SEQ ID NO: 33706 - RNA, 19 nt, synthetic construct
  source 1..19: mol_type = other RNA
ccaggggctgctcacagac

SEQ ID NO: 33707 - RNA, 19 nt, synthetic construct
  source 1..19: mol_type = other RNA
ccaggggctgctcacagac

SEQ ID NO: 33708 - RNA, 19 nt, synthetic construct
  source 1..19: mol_type = other RNA
ccaggggctgctcacagac

SEQ ID NO: 33709 - RNA, 19 nt, synthetic construct
  source 1..19: mol_type = other RNA
ttcacgcaggcctcgtagt

SEQ ID NO: 33710 - RNA, 19 nt, synthetic construct
  source 1..19: mol_type = other RNA
gcaccagcccctgggcctt

SEQ ID NO: 33711 - RNA, 19 nt, synthetic construct
  source 1..19: mol_type = other RNA
gtgcagacgccgtccctcc

SEQ ID NO: 33712 - RNA, 19 nt, synthetic construct
  source 1..19: mol_type = other RNA
gcccaggggctgctcacag

SEQ ID NO: 33713 - RNA, 19 nt, synthetic construct
  source 1..19: mol_type = other RNA
gcccaggggctgctcacag

SEQ ID NO: 33714 - RNA, 19 nt, synthetic construct
  source 1..19: mol_type = other RNA
gcccaggggctgctcacag

SEQ ID NO: 33715 - RNA, 19 nt, synthetic construct
  source 1..19: mol_type = other RNA
gcccaggggctgctcacag

SEQ ID NO: 33716 - RNA, 19 nt, synthetic construct
  source 1..19: mol_type = other RNA
tggggggcagaagcagccg

SEQ ID NO: 33717 - RNA, 19 nt, synthetic construct
  source 1..19: mol_type = other RNA
aggatgctgcactgcttct

SEQ ID NO: 33718 - RNA, 19 nt, synthetic construct
  source 1..19: mol_type = other RNA
gtgctgaaacagcccacgt

SEQ ID NO: 33719 - RNA, 19 nt, synthetic construct
  source 1..19: mol_type = other RNA
gggcagttctgcatgtact

SEQ ID NO: 33720 - RNA, 19 nt, synthetic construct
  source 1..19: mol_type = other RNA
tagcagcagccggttttcc

SEQ ID NO: 33721 - RNA, 19 nt, synthetic construct
  source 1..19: mol_type = other RNA
gggaagacagtgacgggtg

SEQ ID NO: 33722 - RNA, 19 nt, synthetic construct
  source 1..19: mol_type = other RNA
gccggttttcctgaggctc

SEQ ID NO: 33723 - RNA, 19 nt, synthetic construct
  source 1..19: mol_type = other RNA
ccaggacacacacaggccc

SEQ ID NO: 33724 - RNA, 19 nt, synthetic construct
  source 1..19: mol_type = other RNA
cgccaggacacacacaggc

SEQ ID NO: 33725 - RNA, 19 nt, synthetic construct
  source 1..19: mol_type = other RNA
cccaggggctgctcacaga

SEQ ID NO: 33726 - RNA, 19 nt, synthetic construct
  source 1..19: mol_type = other RNA
cccaggggctgctcacaga

SEQ ID NO: 33727 - RNA, 19 nt, synthetic construct
  source 1..19: mol_type = other RNA
cccaggggctgctcacaga

SEQ ID NO: 33728 - RNA, 19 nt, synthetic construct
  source 1..19: mol_type = other RNA
cacaggcagtcctcgctcc

SEQ ID NO: 33729 - RNA, 19 nt, synthetic construct
  source 1..19: mol_type = other RNA
gggttggccgtgcaggggt

SEQ ID NO: 33730 - RNA, 19 nt, synthetic construct
  source 1..19: mol_type = other RNA
aggacttgcggaaggggtt

SEQ ID NO: 33731 - RNA, 19 nt, synthetic construct
  source 1..19: mol_type = other RNA
gcacaggcagtcctcgctc

SEQ ID NO: 33732 - RNA, 19 nt, synthetic construct
  source 1..19: mol_type = other RNA
tgcaggtgcaggtgttgca

SEQ ID NO: 33733 - RNA, 19 nt, synthetic construct
  source 1..19: mol_type = other RNA
cacgaagagcttgatggcc

SEQ ID NO: 33734 - RNA, 19 nt, synthetic construct
  source 1..19: mol_type = other RNA
gcggaaggggttggccgtg

SEQ ID NO: 33735 - RNA, 19 nt, synthetic construct
  source 1..19: mol_type = other RNA
ctgggcccaggacttgcgg

SEQ ID NO: 33736 - RNA, 19 nt, synthetic construct
  source 1..19: mol_type = other RNA
tctgggcccaggacttgcg

SEQ ID NO: 33737 - RNA, 19 nt, synthetic construct
  source 1..19: mol_type = other RNA
gccaggacacacacaggcc

SEQ ID NO: 33738 - RNA, 19 nt, synthetic construct
  source 1..19: mol_type = other RNA
gggtggtgaggactgagga

SEQ ID NO: 33739 - RNA, 19 nt, synthetic construct
  source 1..19: mol_type = other RNA
agggtggtgaggactgagg

SEQ ID NO: 33740 - RNA, 19 nt, synthetic construct
  source 1..19: mol_type = other RNA
tctggccctggtgggcggg

SEQ ID NO: 33741 - RNA, 19 nt, synthetic construct
  source 1..19: mol_type = other RNA
ctctgtgatgtgggtggtg

SEQ ID NO: 33742 - RNA, 19 nt, synthetic construct
  source 1..19: mol_type = other RNA
ctctgtgatgtgggtggtg

SEQ ID NO: 33743 - RNA, 19 nt, synthetic construct
  source 1..19: mol_type = other RNA
ctctgtgatgtgggtggtg

SEQ ID NO: 33744 - RNA, 19 nt, synthetic construct
  source 1..19: mol_type = other RNA
ctctgtgatgtgggtggtg

SEQ ID NO: 33745 - RNA, 19 nt, synthetic construct
  source 1..19: mol_type = other RNA
acgcgtggcaaagtcattg

SEQ ID NO: 33746 - RNA, 19 nt, synthetic construct
  source 1..19: mol_type = other RNA
cacagcaggctccgtgctg

SEQ ID NO: 33747 - RNA, 19 nt, synthetic construct
  source 1..19: mol_type = other RNA
tgtggccacccctgggaca

SEQ ID NO: 33748 - RNA, 19 nt, synthetic construct
  source 1..19: mol_type = other RNA
gcctgagctggacccagtc

SEQ ID NO: 33749 - RNA, 19 nt, synthetic construct
  source 1..19: mol_type = other RNA
ggcctgagctggacccagt

SEQ ID NO: 33750 - RNA, 19 nt, synthetic construct
  source 1..19: mol_type = other RNA
gtgaggactgaggaggaca

SEQ ID NO: 33751 - RNA, 19 nt, synthetic construct
  source 1..19: mol_type = other RNA
ctccccacagcactgcccg

SEQ ID NO: 33752 - RNA, 19 nt, synthetic construct
  source 1..19: mol_type = other RNA
ccctgtgcttttctgcaga

SEQ ID NO: 33753 - RNA, 19 nt, synthetic construct
  source 1..19: mol_type = other RNA
ttggtggagtcaacctggg

SEQ ID NO: 33754 - RNA, 19 nt, synthetic construct
  source 1..19: mol_type = other RNA
cgcaggactggcagttgct

SEQ ID NO: 33755 - RNA, 19 nt, synthetic construct
  source 1..19: mol_type = other RNA
ggagtagagaagtgggagc

SEQ ID NO: 33756 - RNA, 19 nt, synthetic construct
  source 1..19: mol_type = other RNA
cagcagggcactgtcctct

SEQ ID NO: 33757 - RNA, 19 nt, synthetic construct
  source 1..19: mol_type = other RNA
ggccgcagaccctgccctt

SEQ ID NO: 33758 - RNA, 19 nt, synthetic construct
  source 1..19: mol_type = other RNA
gctgtgggtgtggtggctg

SEQ ID NO: 33759 - RNA, 19 nt, synthetic construct
  source 1..19: mol_type = other RNA
gctgtgggtgtggtggctg

SEQ ID NO: 33760 - RNA, 19 nt, synthetic construct
  source 1..19: mol_type = other RNA
gctgtgggtgtggtggctg

SEQ ID NO: 33761 - RNA, 19 nt, synthetic construct
  source 1..19: mol_type = other RNA
gctgtgggtgtggtggctg

SEQ ID NO: 33762 - RNA, 19 nt, synthetic construct
  source 1..19: mol_type = other RNA
gctgtgggtgtggtggctg

SEQ ID NO: 33763 - RNA, 19 nt, synthetic construct
  source 1..19: mol_type = other RNA
accagcccctgggccttga

SEQ ID NO: 33764 - RNA, 19 nt, synthetic construct
  source 1..19: mol_type = other RNA
ggacagcgcggcgcacagg

SEQ ID NO: 33765 - RNA, 19 nt, synthetic construct
  source 1..19: mol_type = other RNA
ccttggcggcacaggcgtg

SEQ ID NO: 33766 - RNA, 19 nt, synthetic construct
  source 1..19: mol_type = other RNA
caggtgcaggtgttgcagt

SEQ ID NO: 33767 - RNA, 19 nt, synthetic construct
  source 1..19: mol_type = other RNA
gcaggtgcaggtgttgcag

SEQ ID NO: 33768 - RNA, 19 nt, synthetic construct
  source 1..19: mol_type = other RNA
tggtccctagggcagagga

SEQ ID NO: 33769 - RNA, 19 nt, synthetic construct
  source 1..19: mol_type = other RNA
tggtccctagggcagagga

SEQ ID NO: 33770 - RNA, 19 nt, synthetic construct
  source 1..19: mol_type = other RNA
tggtccctagggcagagga

SEQ ID NO: 33771 - RNA, 19 nt, synthetic construct
  source 1..19: mol_type = other RNA
tggtccctagggcagagga

SEQ ID NO: 33772 - RNA, 19 nt, synthetic construct
  source 1..19: mol_type = other RNA
ggtgtccccagagaggcag

SEQ ID NO: 33773 - RNA, 19 nt, synthetic construct
  source 1..19: mol_type = other RNA
tggcggcacaggcgtgcac

SEQ ID NO: 33774 - RNA, 19 nt, synthetic construct
  source 1..19: mol_type = other RNA
cgatgaccaggaagatccc

SEQ ID NO: 33775 - RNA, 19 nt, synthetic construct
  source 1..19: mol_type = other RNA
tggttctggttgaagttcc

SEQ ID NO: 33776 - RNA, 19 nt, synthetic construct
  source 1..19: mol_type = other RNA
gcgcggcgcacaggcagtc

SEQ ID NO: 33777 - RNA, 19 nt, synthetic construct
  source 1..19: mol_type = other RNA
accctgtgcttttctgcag

SEQ ID NO: 33778 - RNA, 19 nt, synthetic construct
  source 1..19: mol_type = other RNA
aggccgcagaccctgccct

SEQ ID NO: 33779 - RNA, 19 nt, synthetic construct
  source 1..19: mol_type = other RNA
caggccgcagaccctgccc

SEQ ID NO: 33780 - RNA, 19 nt, synthetic construct
  source 1..19: mol_type = other RNA
gcgtcgttcacgcaggcct

SEQ ID NO: 33781 - RNA, 19 nt, synthetic construct
  source 1..19: mol_type = other RNA
tccaccaggcagtgcccac

SEQ ID NO: 33782 - RNA, 19 nt, synthetic construct
  source 1..19: mol_type = other RNA
gcacagcaggctccgtgct

SEQ ID NO: 33783 - RNA, 19 nt, synthetic construct
  source 1..19: mol_type = other RNA
ctgtgggtgtggtggctgt

SEQ ID NO: 33784 - RNA, 19 nt, synthetic construct
  source 1..19: mol_type = other RNA
ggggctgctgggcagcagg

SEQ ID NO: 33785 - RNA, 19 nt, synthetic construct
  source 1..19: mol_type = other RNA
ggtggccggggtgctgggg

SEQ ID NO: 33786 - RNA, 19 nt, synthetic construct
  source 1..19: mol_type = other RNA
ctgtgggtgtggtggctgt

SEQ ID NO: 33787 - RNA, 19 nt, synthetic construct
  source 1..19: mol_type = other RNA
ggggctgctgggcagcagg

SEQ ID NO: 33788 - RNA, 19 nt, synthetic construct
  source 1..19: mol_type = other RNA
ggtggccggggtgctgggg

SEQ ID NO: 33789 - RNA, 19 nt, synthetic construct
  source 1..19: mol_type = other RNA
tggtggctgtgggtgtggt

SEQ ID NO: 33790 - RNA, 19 nt, synthetic construct
  source 1..19: mol_type = other RNA
ctgtgggtgtggtggctgt

SEQ ID NO: 33791 - RNA, 19 nt, synthetic construct
  source 1..19: mol_type = other RNA
ggggctgctgggcagcagg

SEQ ID NO: 33792 - RNA, 19 nt, synthetic construct
  source 1..19: mol_type = other RNA
ggtggccggggtgctgggg

SEQ ID NO: 33793 - RNA, 19 nt, synthetic construct
  source 1..19: mol_type = other RNA
ctgtgggtgtggtggctgt

SEQ ID NO: 33794 - RNA, 19 nt, synthetic construct
  source 1..19: mol_type = other RNA
ggggctgctgggcagcagg

SEQ ID NO: 33795 - RNA, 19 nt, synthetic construct
  source 1..19: mol_type = other RNA
ggtggccggggtgctgggg

SEQ ID NO: 33796 - RNA, 19 nt, synthetic construct
  source 1..19: mol_type = other RNA
tggtggctgtgggtgtggt

SEQ ID NO: 33797 - RNA, 19 nt, synthetic construct
  source 1..19: mol_type = other RNA
ctgtgggtgtggtggctgt

SEQ ID NO: 33798 - RNA, 19 nt, synthetic construct
  source 1..19: mol_type = other RNA
gtagggcagccgggcctgg

SEQ ID NO: 33799 - RNA, 19 nt, synthetic construct
  source 1..19: mol_type = other RNA
acgcaggactggcagttgc

SEQ ID NO: 33800 - RNA, 19 nt, synthetic construct
  source 1..19: mol_type = other RNA
tgggcaggatgcaggctgt

SEQ ID NO: 33801 - RNA, 19 nt, synthetic construct
  source 1..19: mol_type = other RNA
gctccccctgcagctggac

SEQ ID NO: 33802 - RNA, 19 nt, synthetic construct
  source 1..19: mol_type = other RNA
tgcttctgggcccaggact

SEQ ID NO: 33803 - RNA, 19 nt, synthetic construct
  source 1..19: mol_type = other RNA
aaaggtgatgaagtggcca

SEQ ID NO: 33804 - RNA, 19 nt, synthetic construct
  source 1..19: mol_type = other RNA
cgcacaggcagtcctcgct

SEQ ID NO: 33805 - RNA, 19 nt, synthetic construct
  source 1..19: mol_type = other RNA
caccgtgcagttctccagg

SEQ ID NO: 33806 - RNA, 19 nt, synthetic construct
  source 1..19: mol_type = other RNA
caggcagtcctcgctccgc

SEQ ID NO: 33807 - RNA, 19 nt, synthetic construct
  source 1..19: mol_type = other RNA
acaggcagtcctcgctccg

SEQ ID NO: 33808 - RNA, 19 nt, synthetic construct
  source 1..19: mol_type = other RNA
tgcggaaggggttggccgt

SEQ ID NO: 33809 - RNA, 19 nt, synthetic construct
  source 1..19: mol_type = other RNA
ggacttgcggaaggggttg

SEQ ID NO: 33810 - RNA, 19 nt, synthetic construct
  source 1..19: mol_type = other RNA
gcgcacaggcagtcctcgc

SEQ ID NO: 33811 - RNA, 19 nt, synthetic construct
  source 1..19: mol_type = other RNA
ggcgcacaggcagtcctcg

SEQ ID NO: 33812 - RNA, 19 nt, synthetic construct
  source 1..19: mol_type = other RNA
cggaaggggttggccgtgc

SEQ ID NO: 33813 - RNA, 19 nt, synthetic construct
  source 1..19: mol_type = other RNA
caccagcccctgggccttg

SEQ ID NO: 33814 - RNA, 19 nt, synthetic construct
  source 1..19: mol_type = other RNA
agctggtagctgtgggtgt

SEQ ID NO: 33815 - RNA, 19 nt, synthetic construct
  source 1..19: mol_type = other RNA
agctggtagctgtgggtgt

SEQ ID NO: 33816 - RNA, 19 nt, synthetic construct
  source 1..19: mol_type = other RNA
agctggtagctgtgggtgt

SEQ ID NO: 33817 - RNA, 19 nt, synthetic construct
  source 1..19: mol_type = other RNA
ccagcagggcactgtcctc

SEQ ID NO: 33818 - RNA, 19 nt, synthetic construct
  source 1..19: mol_type = other RNA
cacagttgcaggtgtcaaa

SEQ ID NO: 33819 - RNA, 19 nt, synthetic construct
  source 1..19: mol_type = other RNA
tccgctcacagttgcaggt

SEQ ID NO: 33820 - RNA, 19 nt, synthetic construct
  source 1..19: mol_type = other RNA
taggaggacagcgcggcgc

SEQ ID NO: 33821 - RNA, 19 nt, synthetic construct
  source 1..19: mol_type = other RNA
actctgtccactgacaccg

SEQ ID NO: 33822 - RNA, 19 nt, synthetic construct
  source 1..19: mol_type = other RNA
ccactctgtccactgacac

SEQ ID NO: 33823 - RNA, 19 nt, synthetic construct
  source 1..19: mol_type = other RNA
ccgcagggctggtagtgcc

SEQ ID NO: 33824 - RNA, 19 nt, synthetic construct
  source 1..19: mol_type = other RNA
cgcagggctggtagtgcca

SEQ ID NO: 33825 - RNA, 19 nt, synthetic construct
  source 1..19: mol_type = other RNA
ccgctcacagttgcaggtg

SEQ ID NO: 33826 - RNA, 19 nt, synthetic construct
  source 1..19: mol_type = other RNA
ctccgctcacagttgcagg

SEQ ID NO: 33827 - RNA, 19 nt, synthetic construct
  source 1..19: mol_type = other RNA
gcttctgggcccaggactt

SEQ ID NO: 33828 - RNA, 19 nt, synthetic construct
  source 1..19: mol_type = other RNA
ggaggatgctgcactgctt

SEQ ID NO: 33829 - RNA, 19 nt, synthetic construct
  source 1..19: mol_type = other RNA
cttctgggcccaggacttg

SEQ ID NO: 33830 - RNA, 19 nt, synthetic construct
  source 1..19: mol_type = other RNA
ctgcttctgggcccaggac

SEQ ID NO: 33831 - RNA, 19 nt, synthetic construct
  source 1..19: mol_type = other RNA
actgcttctgggcccagga

SEQ ID NO: 33832 - RNA, 19 nt, synthetic construct
  source 1..19: mol_type = other RNA
ctgcactgcttctgggccc

SEQ ID NO: 33833 - RNA, 19 nt, synthetic construct
  source 1..19: mol_type = other RNA
tgctgcactgcttctgggc

SEQ ID NO: 33834 - RNA, 19 nt, synthetic construct
  source 1..19: mol_type = other RNA
ggatgctgcactgcttctg

SEQ ID NO: 33835 - RNA, 19 nt, synthetic construct
  source 1..19: mol_type = other RNA
ctggccccccgcgtgggcg

SEQ ID NO: 33836 - RNA, 19 nt, synthetic construct
  source 1..19: mol_type = other RNA
acccctgggacagtgggtt

SEQ ID NO: 33837 - RNA, 19 nt, synthetic construct
  source 1..19: mol_type = other RNA
agcagcagccggttttcct

SEQ ID NO: 33838 - RNA, 19 nt, synthetic construct
  source 1..19: mol_type = other RNA
ggaggggccacagggcacg

SEQ ID NO: 33839 - RNA, 19 nt, synthetic construct
  source 1..19: mol_type = other RNA
gtcacagtccacctgctgg

SEQ ID NO: 33840 - RNA, 19 nt, synthetic construct
  source 1..19: mol_type = other RNA
tagcagccacactgggcca

SEQ ID NO: 33841 - RNA, 19 nt, synthetic construct
  source 1..19: mol_type = other RNA
gctcccagttcctgcacac

SEQ ID NO: 33842 - RNA, 19 nt, synthetic construct
  source 1..19: mol_type = other RNA
ctgcattccacgacctggc

SEQ ID NO: 33843 - RNA, 19 nt, synthetic construct
  source 1..19: mol_type = other RNA
ctgcattccacgacctggc

SEQ ID NO: 33844 - RNA, 19 nt, synthetic construct
  source 1..19: mol_type = other RNA
ctgcattccacgacctggc

SEQ ID NO: 33845 - RNA, 19 nt, synthetic construct
  source 1..19: mol_type = other RNA
ctgcattccacgacctggc

SEQ ID NO: 33846 - RNA, 19 nt, synthetic construct
  source 1..19: mol_type = other RNA
gtcacagtgcaccttctgc

SEQ ID NO: 33847 - RNA, 19 nt, synthetic construct
  source 1..19: mol_type = other RNA
ctggccctggtgggcgggg

SEQ ID NO: 33848 - RNA, 19 nt, synthetic construct
  source 1..19: mol_type = other RNA
gaccctgcccttgtagtcc

SEQ ID NO: 33849 - RNA, 19 nt, synthetic construct
  source 1..19: mol_type = other RNA
atgccctgcagaagcaggg

SEQ ID NO: 33850 - RNA, 19 nt, synthetic construct
  source 1..19: mol_type = other RNA
ctgtgcttttctgcagaga

SEQ ID NO: 33851 - RNA, 19 nt, synthetic construct
  source 1..19: mol_type = other RNA
caacctgggagcggcaggc

SEQ ID NO: 33852 - RNA, 19 nt, synthetic construct
  source 1..19: mol_type = other RNA
tcctgctcccagttcctgc

SEQ ID NO: 33853 - RNA, 19 nt, synthetic construct
  source 1..19: mol_type = other RNA
cggagtggaggagggcatg

SEQ ID NO: 33854 - RNA, 19 nt, synthetic construct
  source 1..19: mol_type = other RNA
cggagtggaggagggcatg

SEQ ID NO: 33855 - RNA, 19 nt, synthetic construct
  source 1..19: mol_type = other RNA
caggagctgcaggtggtgt

SEQ ID NO: 33856 - RNA, 19 nt, synthetic construct
  source 1..19: mol_type = other RNA
gccttggagcaggtggtgc

SEQ ID NO: 33857 - RNA, 19 nt, synthetic construct
  source 1..19: mol_type = other RNA
aggcagtgcccactggggt

SEQ ID NO: 33858 - RNA, 19 nt, synthetic construct
  source 1..19: mol_type = other RNA
tagcagccttccaggccag

SEQ ID NO: 33859 - RNA, 19 nt, synthetic construct
  source 1..19: mol_type = other RNA
ctcataggtgcaggtgcag

SEQ ID NO: 33860 - RNA, 19 nt, synthetic construct
  source 1..19: mol_type = other RNA
tcacagtccacctgctggc

SEQ ID NO: 33861 - RNA, 19 nt, synthetic construct
  source 1..19: mol_type = other RNA
acagcaggctccgtgctgg

SEQ ID NO: 33862 - RNA, 19 nt, synthetic construct
  source 1..19: mol_type = other RNA
tgctggtggctgcaggtgt

SEQ ID NO: 33863 - RNA, 19 nt, synthetic construct
  source 1..19: mol_type = other RNA
agctggtggccggggtgct

SEQ ID NO: 33864 - RNA, 19 nt, synthetic construct
  source 1..19: mol_type = other RNA
tgctggtggctgcaggtgt

SEQ ID NO: 33865 - RNA, 19 nt, synthetic construct
  source 1..19: mol_type = other RNA
agctggtggccggggtgct

SEQ ID NO: 33866 - RNA, 19 nt, synthetic construct
  source 1..19: mol_type = other RNA
tggagtggaggagggcgtg

SEQ ID NO: 33867 - RNA, 19 nt, synthetic construct
  source 1..19: mol_type = other RNA
tgctggtggctgcaggtgt

SEQ ID NO: 33868 - RNA, 19 nt, synthetic construct
  source 1..19: mol_type = other RNA
agctggtggccggggtgct

SEQ ID NO: 33869 - RNA, 19 nt, synthetic construct
  source 1..19: mol_type = other RNA
tgctggtggctgcaggtgt

SEQ ID NO: 33870 - RNA, 19 nt, synthetic construct
  source 1..19: mol_type = other RNA
agctggtggccggggtgct

SEQ ID NO: 33871 - RNA, 19 nt, synthetic construct
  source 1..19: mol_type = other RNA
cctgcagaagcagggagta

SEQ ID NO: 33872 - RNA, 19 nt, synthetic construct
  source 1..19: mol_type = other RNA
ggcagcaggtgcactggtg

SEQ ID NO: 33873 - RNA, 19 nt, synthetic construct
  source 1..19: mol_type = other RNA
ccaggacttgcggaagggg

SEQ ID NO: 33874 - RNA, 19 nt, synthetic construct
  source 1..19: mol_type = other RNA
tgctggcactgagggaggg

SEQ ID NO: 33875 - RNA, 19 nt, synthetic construct
  source 1..19: mol_type = other RNA
cacaggagtagcagcagcc

SEQ ID NO: 33876 - RNA, 19 nt, synthetic construct
  source 1..19: mol_type = other RNA
tctcctggcagcaggtgca

SEQ ID NO: 33877 - RNA, 19 nt, synthetic construct
  source 1..19: mol_type = other RNA
ccccaggtgctgcacaccc

SEQ ID NO: 33878 - RNA, 19 nt, synthetic construct
  source 1..19: mol_type = other RNA
gggcaggtggggcagcggc

SEQ ID NO: 33879 - RNA, 19 nt, synthetic construct
  source 1..19: mol_type = other RNA
acttgcggaaggggttggc

SEQ ID NO: 33880 - RNA, 19 nt, synthetic construct
  source 1..19: mol_type = other RNA
cccgcagggctggtagtgc

SEQ ID NO: 33881 - RNA, 19 nt, synthetic construct
  source 1..19: mol_type = other RNA
cacaggccgcagaccctgc

SEQ ID NO: 33882 - RNA, 19 nt, synthetic construct
  source 1..19: mol_type = other RNA
gaaggggttggccgtgcag

SEQ ID NO: 33883 - RNA, 19 nt, synthetic construct
  source 1..19: mol_type = other RNA
tggaggatgctgcactgct

SEQ ID NO: 33884 - RNA, 19 nt, synthetic construct
  source 1..19: mol_type = other RNA
ccaggtgctgcacacccgc

SEQ ID NO: 33885 - RNA, 19 nt, synthetic construct
  source 1..19: mol_type = other RNA
atggccttggagcaggtgg

SEQ ID NO: 33886 - RNA, 19 nt, synthetic construct
  source 1..19: mol_type = other RNA
aaggggttggccgtgcagg

SEQ ID NO: 33887 - RNA, 19 nt, synthetic construct
  source 1..19: mol_type = other RNA
ccgccaggacacacacagg

SEQ ID NO: 33888 - RNA, 19 nt, synthetic construct
  source 1..19: mol_type = other RNA
gggtagcagccttccaggc

SEQ ID NO: 33889 - RNA, 19 nt, synthetic construct
  source 1..19: mol_type = other RNA
tcagggggctcaggctggg

SEQ ID NO: 33890 - RNA, 19 nt, synthetic construct
  source 1..19: mol_type = other RNA
cccaggtgctgcacacccg

SEQ ID NO: 33891 - RNA, 19 nt, synthetic construct
  source 1..19: mol_type = other RNA
ccgtcgaaggtcttgtagt

SEQ ID NO: 33892 - RNA, 19 nt, synthetic construct
  source 1..19: mol_type = other RNA
agctccagcagggcactgt

SEQ ID NO: 33893 - RNA, 19 nt, synthetic construct
  source 1..19: mol_type = other RNA
ctggggggcagaagcagcc

SEQ ID NO: 33894 - RNA, 19 nt, synthetic construct
  source 1..19: mol_type = other RNA
cctggggggcagaagcagc

SEQ ID NO: 33895 - RNA, 19 nt, synthetic construct
  source 1..19: mol_type = other RNA
gctgcaccagcagctgcag

SEQ ID NO: 33896 - RNA, 19 nt, synthetic construct
  source 1..19: mol_type = other RNA
ggcaccagctgcaccagca

SEQ ID NO: 33897 - RNA, 19 nt, synthetic construct
  source 1..19: mol_type = other RNA
ctcacagttgcaggtgtca

SEQ ID NO: 33898 - RNA, 19 nt, synthetic construct
  source 1..19: mol_type = other RNA
gctcacagttgcaggtgtc

SEQ ID NO: 33899 - RNA, 19 nt, synthetic construct
  source 1..19: mol_type = other RNA
cgctcacagttgcaggtgt

SEQ ID NO: 33900 - RNA, 19 nt, synthetic construct
  source 1..19: mol_type = other RNA
agtcctcgctccgctcaca

SEQ ID NO: 33901 - RNA, 19 nt, synthetic construct
  source 1..19: mol_type = other RNA
aggcagtcctcgctccgct

SEQ ID NO: 33902 - RNA, 19 nt, synthetic construct
  source 1..19: mol_type = other RNA
ctgcaggtgcaggtgttgc

SEQ ID NO: 33903 - RNA, 19 nt, synthetic construct
  source 1..19: mol_type = other RNA
gtgcccaggcagagccggt

SEQ ID NO: 33904 - RNA, 19 nt, synthetic construct
  source 1..19: mol_type = other RNA
ccttggagcaggtggtgcc

SEQ ID NO: 33905 - RNA, 19 nt, synthetic construct
  source 1..19: mol_type = other RNA
ggccttggagcaggtggtg

SEQ ID NO: 33906 - RNA, 19 nt, synthetic construct
  source 1..19: mol_type = other RNA
tggccttggagcaggtggt

SEQ ID NO: 33907 - RNA, 19 nt, synthetic construct
  source 1..19: mol_type = other RNA
gatggccttggagcaggtg

SEQ ID NO: 33908 - RNA, 19 nt, synthetic construct
  source 1..19: mol_type = other RNA
tgatggccttggagcaggt

SEQ ID NO: 33909 - RNA, 19 nt, synthetic construct
  source 1..19: mol_type = other RNA
ttgatggccttggagcagg

SEQ ID NO: 33910 - RNA, 19 nt, synthetic construct
  source 1..19: mol_type = other RNA
gcttgatggccttggagca

SEQ ID NO: 33911 - RNA, 19 nt, synthetic construct
  source 1..19: mol_type = other RNA
acaggccgcagaccctgcc

SEQ ID NO: 33912 - RNA, 19 nt, synthetic construct
  source 1..19: mol_type = other RNA
gcacaggccgcagaccctg

SEQ ID NO: 33913 - RNA, 19 nt, synthetic construct
  source 1..19: mol_type = other RNA
ttcccgcacaggccgcaga

SEQ ID NO: 33914 - RNA, 19 nt, synthetic construct
  source 1..19: mol_type = other RNA
gttggccgtgcaggggtcc

SEQ ID NO: 33915 - RNA, 19 nt, synthetic construct
  source 1..19: mol_type = other RNA
ggaaggggttggccgtgca

SEQ ID NO: 33916 - RNA, 19 nt, synthetic construct
  source 1..19: mol_type = other RNA
cccaggacttgcggaaggg

SEQ ID NO: 33917 - RNA, 19 nt, synthetic construct
  source 1..19: mol_type = other RNA
gcccaggacttgcggaagg

SEQ ID NO: 33918 - RNA, 19 nt, synthetic construct
  source 1..19: mol_type = other RNA
ggcccaggacttgcggaag

SEQ ID NO: 33919 - RNA, 19 nt, synthetic construct
  source 1..19: mol_type = other RNA
gggcccaggacttgcggaa

SEQ ID NO: 33920 - RNA, 19 nt, synthetic construct
  source 1..19: mol_type = other RNA
tgcactgcttctgggccca

SEQ ID NO: 33921 - RNA, 19 nt, synthetic construct
  source 1..19: mol_type = other RNA
gtggaggatgctgcactgc

SEQ ID NO: 33922 - RNA, 19 nt, synthetic construct
  source 1..19: mol_type = other RNA
tccgccaggacacacacag

SEQ ID NO: 33923 - RNA, 19 nt, synthetic construct
  source 1..19: mol_type = other RNA
gtccgccaggacacacaca

SEQ ID NO: 33924 - RNA, 19 nt, synthetic construct
  source 1..19: mol_type = other RNA
agtccgccaggacacacac

SEQ ID NO: 33925 - RNA, 19 nt, synthetic construct
  source 1..19: mol_type = other RNA
ggcaggtccaccaggcagt

SEQ ID NO: 33926 - RNA, 19 nt, synthetic construct
  source 1..19: mol_type = other RNA
gtagcagccttccaggcca

SEQ ID NO: 33927 - RNA, 19 nt, synthetic construct
  source 1..19: mol_type = other RNA
ggtagcagccttccaggcc

SEQ ID NO: 33928 - RNA, 19 nt, synthetic construct
  source 1..19: mol_type = other RNA
cgggtagcagccttccagg

SEQ ID NO: 33929 - RNA, 19 nt, synthetic construct
  source 1..19: mol_type = other RNA
gaagggctggctgggtggg

SEQ ID NO: 33930 - RNA, 19 nt, synthetic construct
  source 1..19: mol_type = other RNA
tccctgggctggaggaggg

SEQ ID NO: 33931 - RNA, 19 nt, synthetic construct
  source 1..19: mol_type = other RNA
tccctgggctggaggaggg

SEQ ID NO: 33932 - RNA, 19 nt, synthetic construct
  source 1..19: mol_type = other RNA
tccctgggctggaggaggg

SEQ ID NO: 33933 - RNA, 19 nt, synthetic construct
  source 1..19: mol_type = other RNA
tccctgggctggaggaggg

SEQ ID NO: 33934 - RNA, 19 nt, synthetic construct
  source 1..19: mol_type = other RNA
tccctgggctggaggaggg

SEQ ID NO: 33935 - RNA, 19 nt, synthetic construct
  source 1..19: mol_type = other RNA
ccaggggcaggggagggcg

SEQ ID NO: 33936 - RNA, 19 nt, synthetic construct
  source 1..19: mol_type = other RNA
agttctccagggtccaggt

SEQ ID NO: 33937 - RNA, 19 nt, synthetic construct
  source 1..19: mol_type = other RNA
tagggcagccgggcctgga

SEQ ID NO: 33938 - RNA, 19 nt, synthetic construct
  source 1..19: mol_type = other RNA
tcacaggagtagcagcagc

SEQ ID NO: 33939 - RNA, 19 nt, synthetic construct
  source 1..19: mol_type = other RNA
accagctgcaccagcagct

SEQ ID NO: 33940 - RNA, 19 nt, synthetic construct
  source 1..19: mol_type = other RNA
aagggctggctgggtgggc

SEQ ID NO: 33941 - RNA, 19 nt, synthetic construct
  source 1..19: mol_type = other RNA
ccctcctgctcccagttcc

SEQ ID NO: 33942 - RNA, 19 nt, synthetic construct
  source 1..19: mol_type = other RNA
agaagggctggctgggtgg

SEQ ID NO: 33943 - RNA, 19 nt, synthetic construct
  source 1..19: mol_type = other RNA
actgggctgggttgagcag

SEQ ID NO: 33944 - RNA, 19 nt, synthetic construct
  source 1..19: mol_type = other RNA
ggctctgtgaggatccagg

SEQ ID NO: 33945 - RNA, 19 nt, synthetic construct
  source 1..19: mol_type = other RNA
ggctctgtgaggatccagg

SEQ ID NO: 33946 - RNA, 19 nt, synthetic construct
  source 1..19: mol_type = other RNA
ggctctgtgaggatccagg

SEQ ID NO: 33947 - RNA, 19 nt, synthetic construct
  source 1..19: mol_type = other RNA
ggctctgtgaggatccagg

SEQ ID NO: 33948 - RNA, 19 nt, synthetic construct
  source 1..19: mol_type = other RNA
ggctctgtgaggatccagg

SEQ ID NO: 33949 - RNA, 19 nt, synthetic construct
  source 1..19: mol_type = other RNA
cttgttcacgcaggtgacg

SEQ ID NO: 33950 - RNA, 19 nt, synthetic construct
  source 1..19: mol_type = other RNA
tatttgcaaaactgggctg

SEQ ID NO: 33951 - RNA, 19 nt, synthetic construct
  source 1..19: mol_type = other RNA
tgcaaaactgggctgggtt

SEQ ID NO: 33952 - RNA, 19 nt, synthetic construct
  source 1..19: mol_type = other RNA
tcggcccggggcctggtca

SEQ ID NO: 33953 - RNA, 19 nt, synthetic construct
  source 1..19: mol_type = other RNA
ctggtggctgtgggtgtgg

SEQ ID NO: 33954 - RNA, 19 nt, synthetic construct
  source 1..19: mol_type = other RNA
ctggtggctgtgggtgtgg

SEQ ID NO: 33955 - RNA, 19 nt, synthetic construct
  source 1..19: mol_type = other RNA
aggggcttgcactgcaccg

SEQ ID NO: 33956 - RNA, 19 nt, synthetic construct
  source 1..19: mol_type = other RNA
acacagtggacacgctgaa

SEQ ID NO: 33957 - RNA, 19 nt, synthetic construct
  source 1..19: mol_type = other RNA
ggaactggtggctgtgggt

SEQ ID NO: 33958 - RNA, 19 nt, synthetic construct
  source 1..19: mol_type = other RNA
ggaactggtggctgtgggt

SEQ ID NO: 33959 - RNA, 19 nt, synthetic construct
  source 1..19: mol_type = other RNA
gctttggaactggtggctg

SEQ ID NO: 33960 - RNA, 19 nt, synthetic construct
  source 1..19: mol_type = other RNA
gctttggaactggtggctg

SEQ ID NO: 33961 - RNA, 19 nt, synthetic construct
  source 1..19: mol_type = other RNA
tcctgctggcccctcaccc

SEQ ID NO: 33962 - RNA, 19 nt, synthetic construct
  source 1..19: mol_type = other RNA
tggagtggaggagggtgtg

SEQ ID NO: 33963 - RNA, 19 nt, synthetic construct
  source 1..19: mol_type = other RNA
tggagtggaggagggtgtg

SEQ ID NO: 33964 - RNA, 19 nt, synthetic construct
  source 1..19: mol_type = other RNA
tggagtggaggagggtgtg

SEQ ID NO: 33965 - RNA, 19 nt, synthetic construct
  source 1..19: mol_type = other RNA
tggagtggaggagggtgtg

SEQ ID NO: 33966 - RNA, 19 nt, synthetic construct
  source 1..19: mol_type = other RNA
cctggctccaggtggacag

SEQ ID NO: 33967 - RNA, 19 nt, synthetic construct
  source 1..19: mol_type = other RNA
actttggtgggtgggcagg

SEQ ID NO: 33968 - RNA, 19 nt, synthetic construct
  source 1..19: mol_type = other RNA
ccggaggcactcggcccca

SEQ ID NO: 33969 - RNA, 19 nt, synthetic construct
  source 1..19: mol_type = other RNA
tccggaggcactcggcccc

SEQ ID NO: 33970 - RNA, 19 nt, synthetic construct
  source 1..19: mol_type = other RNA
gtggtggtggtggtggccg

SEQ ID NO: 33971 - RNA, 19 nt, synthetic construct
  source 1..19: mol_type = other RNA
ggtggtggtggtggtggcc

SEQ ID NO: 33972 - RNA, 19 nt, synthetic construct
  source 1..19: mol_type = other RNA
ctggcagttctccgctgtg

SEQ ID NO: 33973 - RNA, 19 nt, synthetic construct
  source 1..19: mol_type = other RNA
cgtcgaaggtcttgtagtg

SEQ ID NO: 33974 - RNA, 19 nt, synthetic construct
  source 1..19: mol_type = other RNA
gctgcaggtgacgtcggcc

SEQ ID NO: 33975 - RNA, 19 nt, synthetic construct
  source 1..19: mol_type = other RNA
gcccctgggccttgatgac

SEQ ID NO: 33976 - RNA, 19 nt, synthetic construct
  source 1..19: mol_type = other RNA
gtggccccagttgtggtgg

SEQ ID NO: 33977 - RNA, 19 nt, synthetic construct
  source 1..19: mol_type = other RNA
tctgcagagaggctcccag

SEQ ID NO: 33978 - RNA, 19 nt, synthetic construct
  source 1..19: mol_type = other RNA
gctctggcagttctccgct

SEQ ID NO: 33979 - RNA, 19 nt, synthetic construct
  source 1..19: mol_type = other RNA
cggaaggtgggacagcagt

SEQ ID NO: 33980 - RNA, 19 nt, synthetic construct
  source 1..19: mol_type = other RNA
tgtggtggccgtggtggta

SEQ ID NO: 33981 - RNA, 19 nt, synthetic construct
  source 1..19: mol_type = other RNA
tgtggtggccgtggtggta

SEQ ID NO: 33982 - RNA, 19 nt, synthetic construct
  source 1..19: mol_type = other RNA
ggctggacagggctggagt

SEQ ID NO: 33983 - RNA, 19 nt, synthetic construct
  source 1..19: mol_type = other RNA
gggctggacagggctggag

SEQ ID NO: 33984 - RNA, 19 nt, synthetic construct
  source 1..19: mol_type = other RNA
ggctggacagggctggagt

SEQ ID NO: 33985 - RNA, 19 nt, synthetic construct
  source 1..19: mol_type = other RNA
gggctggacagggctggag

SEQ ID NO: 33986 - RNA, 19 nt, synthetic construct
  source 1..19: mol_type = other RNA
ggctggacagggctggagt

SEQ ID NO: 33987 - RNA, 19 nt, synthetic construct
  source 1..19: mol_type = other RNA
gggctggacagggctggag

SEQ ID NO: 33988 - RNA, 19 nt, synthetic construct
  source 1..19: mol_type = other RNA
cgtggaggatgctgcactg

SEQ ID NO: 33989 - RNA, 19 nt, synthetic construct
  source 1..19: mol_type = other RNA
gagggctggacagggctgg

SEQ ID NO: 33990 - RNA, 19 nt, synthetic construct
  source 1..19: mol_type = other RNA
gagggctggacagggctgg

SEQ ID NO: 33991 - RNA, 19 nt, synthetic construct
  source 1..19: mol_type = other RNA
gagggctggacagggctgg

SEQ ID NO: 33992 - RNA, 19 nt, synthetic construct
  source 1..19: mol_type = other RNA
agggctggacagggctgga

SEQ ID NO: 33993 - RNA, 19 nt, synthetic construct
  source 1..19: mol_type = other RNA
agggctggacagggctgga

SEQ ID NO: 33994 - RNA, 19 nt, synthetic construct
  source 1..19: mol_type = other RNA
agggctggacagggctgga

SEQ ID NO: 33995 - RNA, 19 nt, synthetic construct
  source 1..19: mol_type = other RNA
gctggacagggctggagtc

SEQ ID NO: 33996 - RNA, 19 nt, synthetic construct
  source 1..19: mol_type = other RNA
aggaagaggggatggctgt

SEQ ID NO: 33997 - RNA, 19 nt, synthetic construct
  source 1..19: mol_type = other RNA
gctggacagggctggagtc

SEQ ID NO: 33998 - RNA, 19 nt, synthetic construct
  source 1..19: mol_type = other RNA
gctggacagggctggagtc

SEQ ID NO: 33999 - RNA, 19 nt, synthetic construct
  source 1..19: mol_type = other RNA
cgaaggtcttgtagtggaa

SEQ ID NO: 34000 - RNA, 19 nt, synthetic construct
  source 1..19: mol_type = other RNA
tggcagttctccgctgtgg

SEQ ID NO: 34001 - RNA, 19 nt, synthetic construct
  source 1..19: mol_type = other RNA
gggcaggtccgggggcaga

SEQ ID NO: 34002 - RNA, 19 nt, synthetic construct
  source 1..19: mol_type = other RNA
ggtcagtgatgggggagta

SEQ ID NO: 34003 - RNA, 19 nt, synthetic construct
  source 1..19: mol_type = other RNA
ggtcagtgatgggggagta

SEQ ID NO: 34004 - RNA, 19 nt, synthetic construct
  source 1..19: mol_type = other RNA
ggtcagtgatgggggagta

SEQ ID NO: 34005 - RNA, 19 nt, synthetic construct
  source 1..19: mol_type = other RNA
ggtcagtgatgggggagta

SEQ ID NO: 34006 - RNA, 19 nt, synthetic construct
  source 1..19: mol_type = other RNA
atgctgaccttgatgtagt

SEQ ID NO: 34007 - RNA, 19 nt, synthetic construct
  source 1..19: mol_type = other RNA
gatggctgtaacgctggta

SEQ ID NO: 34008 - RNA, 19 nt, synthetic construct
  source 1..19: mol_type = other RNA
gaaggtgatgttgacctcg

SEQ ID NO: 34009 - RNA, 19 nt, synthetic construct
  source 1..19: mol_type = other RNA
cggaagacgtcgccgtcga

SEQ ID NO: 34010 - RNA, 19 nt, synthetic construct
  source 1..19: mol_type = other RNA
tcagggtttatttgcaaaa

SEQ ID NO: 34011 - RNA, 19 nt, synthetic construct
  source 1..19: mol_type = other RNA
ctggggacaggtagtattg

SEQ ID NO: 34012 - RNA, 19 nt, synthetic construct
  source 1..19: mol_type = other RNA
cacatcctggctccaggtg

SEQ ID NO: 34013 - RNA, 19 nt, synthetic construct
  source 1..19: mol_type = other RNA
cctgagctggacccagtct

SEQ ID NO: 34014 - RNA, 19 nt, synthetic construct
  source 1..19: mol_type = other RNA
tgtgtgggtggtccctagg

SEQ ID NO: 34015 - RNA, 19 nt, synthetic construct
  source 1..19: mol_type = other RNA
tgtgtgggtggtccctagg

SEQ ID NO: 34016 - RNA, 19 nt, synthetic construct
  source 1..19: mol_type = other RNA
tgtgtgggtggtccctagg

SEQ ID NO: 34017 - RNA, 19 nt, synthetic construct
  source 1..19: mol_type = other RNA
tgtgtgggtggtccctagg

SEQ ID NO: 34018 - RNA, 19 nt, synthetic construct
  source 1..19: mol_type = other RNA
ggtggtgaaggtgaatggc

SEQ ID NO: 34019 - RNA, 19 nt, synthetic construct
  source 1..19: mol_type = other RNA
actggagaagggagtggct

SEQ ID NO: 34020 - RNA, 19 nt, synthetic construct
  source 1..19: mol_type = other RNA
actggagaagggagtggct

SEQ ID NO: 34021 - RNA, 19 nt, synthetic construct
  source 1..19: mol_type = other RNA
cgcagctcagccagcacgg

SEQ ID NO: 34022 - RNA, 19 nt, synthetic construct
  source 1..19: mol_type = other RNA
cttctcagtgctggaaggg

SEQ ID NO: 34023 - RNA, 19 nt, synthetic construct
  source 1..19: mol_type = other RNA
cttctcagtgctggaaggg

SEQ ID NO: 34024 - RNA, 19 nt, synthetic construct
  source 1..19: mol_type = other RNA
cttctcagtgctggaaggg

SEQ ID NO: 34025 - RNA, 19 nt, synthetic construct
  source 1..19: mol_type = other RNA
cttctcagtgctggaaggg

SEQ ID NO: 34026 - RNA, 19 nt, synthetic construct
  source 1..19: mol_type = other RNA
ggccgggctggtcagcact

SEQ ID NO: 34027 - RNA, 19 nt, synthetic construct
  source 1..19: mol_type = other RNA
cttctcagtgctggaaggg

SEQ ID NO: 34028 - RNA, 19 nt, synthetic construct
  source 1..19: mol_type = other RNA
ggtgcggtggcagatgccc

SEQ ID NO: 34029 - RNA, 19 nt, synthetic construct
  source 1..19: mol_type = other RNA
ccctgatggtctctccagg

SEQ ID NO: 34030 - RNA, 19 nt, synthetic construct
  source 1..19: mol_type = other RNA
tggcagggcacctcaaggc

SEQ ID NO: 34031 - RNA, 19 nt, synthetic construct
  source 1..19: mol_type = other RNA
cggcgaaggtggggccgtg

SEQ ID NO: 34032 - RNA, 19 nt, synthetic construct
  source 1..19: mol_type = other RNA
gaccgggagggccgggctt

SEQ ID NO: 34033 - RNA, 19 nt, synthetic construct
  source 1..19: mol_type = other RNA
ctcagggcagaagcagccc

SEQ ID NO: 34034 - RNA, 19 nt, synthetic construct
  source 1..19: mol_type = other RNA
gccctgggtctctgcctgc

SEQ ID NO: 34035 - RNA, 19 nt, synthetic construct
  source 1..19: mol_type = other RNA
gcagctcagccagcacggt

SEQ ID NO: 34036 - RNA, 19 nt, synthetic construct
  source 1..19: mol_type = other RNA
cagacgccgtccctccagt

SEQ ID NO: 34037 - RNA, 19 nt, synthetic construct
  source 1..19: mol_type = other RNA
tgcagacgccgtccctcca

SEQ ID NO: 34038 - RNA, 19 nt, synthetic construct
  source 1..19: mol_type = other RNA
acaccatgggggctgcaca

SEQ ID NO: 34039 - RNA, 19 nt, synthetic construct
  source 1..19: mol_type = other RNA
agctgttcccaaactccag

SEQ ID NO: 34040 - RNA, 19 nt, synthetic construct
  source 1..19: mol_type = other RNA
cggttgcagtccctggact

SEQ ID NO: 34041 - RNA, 19 nt, synthetic construct
  source 1..19: mol_type = other RNA
gctgtgcttctcagtgctg

SEQ ID NO: 34042 - RNA, 19 nt, synthetic construct
  source 1..19: mol_type = other RNA
aggtggtgcccagggagga

SEQ ID NO: 34043 - RNA, 19 nt, synthetic construct
  source 1..19: mol_type = other RNA
gaagtccaggctgtgcgca

SEQ ID NO: 34044 - RNA, 19 nt, synthetic construct
  source 1..19: mol_type = other RNA
agctctgtgaggatccagg

SEQ ID NO: 34045 - RNA, 19 nt, synthetic construct
  source 1..19: mol_type = other RNA
cagctctgtgaggatccag

SEQ ID NO: 34046 - RNA, 19 nt, synthetic construct
  source 1..19: mol_type = other RNA
cggttgcagtccctggact

SEQ ID NO: 34047 - RNA, 19 nt, synthetic construct
  source 1..19: mol_type = other RNA
gctgtgcttctcagtgctg

SEQ ID NO: 34048 - RNA, 19 nt, synthetic construct
  source 1..19: mol_type = other RNA
gaagtccaggctgtgcgca

SEQ ID NO: 34049 - RNA, 19 nt, synthetic construct
  source 1..19: mol_type = other RNA
tgctctgtgaggatccagg

SEQ ID NO: 34050 - RNA, 19 nt, synthetic construct
  source 1..19: mol_type = other RNA
agctctgtgaggatccagg

SEQ ID NO: 34051 - RNA, 19 nt, synthetic construct
  source 1..19: mol_type = other RNA
cagctctgtgaggatccag

SEQ ID NO: 34052 - RNA, 19 nt, synthetic construct
  source 1..19: mol_type = other RNA
cggttgcagtccctggact

SEQ ID NO: 34053 - RNA, 19 nt, synthetic construct
  source 1..19: mol_type = other RNA
gctgtgcttctcagtgctg

SEQ ID NO: 34054 - RNA, 19 nt, synthetic construct
  source 1..19: mol_type = other RNA
gaagtccaggctgtgcgca

SEQ ID NO: 34055 - RNA, 19 nt, synthetic construct
  source 1..19: mol_type = other RNA
cggttgcagtccctggact

SEQ ID NO: 34056 - RNA, 19 nt, synthetic construct
  source 1..19: mol_type = other RNA
gctgtgcttctcagtgctg

SEQ ID NO: 34057 - RNA, 19 nt, synthetic construct
  source 1..19: mol_type = other RNA
gaagtccaggctgtgcgca

SEQ ID NO: 34058 - RNA, 19 nt, synthetic construct
  source 1..19: mol_type = other RNA
agctctgtgaggatccagg

SEQ ID NO: 34059 - RNA, 19 nt, synthetic construct
  source 1..19: mol_type = other RNA
cagctctgtgaggatccag

SEQ ID NO: 34060 - RNA, 19 nt, synthetic construct
  source 1..19: mol_type = other RNA
agctctgtgaggatccagg

SEQ ID NO: 34061 - RNA, 19 nt, synthetic construct
  source 1..19: mol_type = other RNA
cagctctgtgaggatccag

SEQ ID NO: 34062 - RNA, 19 nt, synthetic construct
  source 1..19: mol_type = other RNA
agctctgtgaggatccagg

SEQ ID NO: 34063 - RNA, 19 nt, synthetic construct
  source 1..19: mol_type = other RNA
cagctctgtgaggatccag

SEQ ID NO: 34064 - RNA, 19 nt, synthetic construct
  source 1..19: mol_type = other RNA
gctgtgcttctcagtgctg

SEQ ID NO: 34065 - RNA, 19 nt, synthetic construct
  source 1..19: mol_type = other RNA
gcatggatctctctcatga

SEQ ID NO: 34066 - RNA, 19 nt, synthetic construct
  source 1..19: mol_type = other RNA
tcagtgctggaagggcggt

SEQ ID NO: 34067 - RNA, 19 nt, synthetic construct
  source 1..19: mol_type = other RNA
tcagtgctggaagggcggt

SEQ ID NO: 34068 - RNA, 19 nt, synthetic construct
  source 1..19: mol_type = other RNA
tcagtgctggaagggcggt

SEQ ID NO: 34069 - RNA, 19 nt, synthetic construct
  source 1..19: mol_type = other RNA
tcagtgctggaagggcggt

SEQ ID NO: 34070 - RNA, 19 nt, synthetic construct
  source 1..19: mol_type = other RNA
gattgcacactgcgtagaa

SEQ ID NO: 34071 - RNA, 19 nt, synthetic construct
  source 1..19: mol_type = other RNA
ggaggggatgggtgtaaag

SEQ ID NO: 34072 - RNA, 19 nt, synthetic construct
  source 1..19: mol_type = other RNA
ggaggggatgggtgtaaag

SEQ ID NO: 34073 - RNA, 19 nt, synthetic construct
  source 1..19: mol_type = other RNA
aggcagtggctgtgggcat

SEQ ID NO: 34074 - RNA, 19 nt, synthetic construct
  source 1..19: mol_type = other RNA
caggggcactcctgggcgg

SEQ ID NO: 34075 - RNA, 19 nt, synthetic construct
  source 1..19: mol_type = other RNA
gcgaggacgtcggggcacc

SEQ ID NO: 34076 - RNA, 19 nt, synthetic construct
  source 1..19: mol_type = other RNA
gaaggtgacgctcacgccc

SEQ ID NO: 34077 - RNA, 19 nt, synthetic construct
  source 1..19: mol_type = other RNA
cgaccctgatggtctctcc

SEQ ID NO: 34078 - RNA, 19 nt, synthetic construct
  source 1..19: mol_type = other RNA
gtgtgcgttgaagaggatc

SEQ ID NO: 34079 - RNA, 19 nt, synthetic construct
  source 1..19: mol_type = other RNA
tttgttccagggcgtccca

SEQ ID NO: 34080 - RNA, 19 nt, synthetic construct
  source 1..19: mol_type = other RNA
ccagtgcgtggcactccgc

SEQ ID NO: 34081 - RNA, 19 nt, synthetic construct
  source 1..19: mol_type = other RNA
actcacagcccccatgtgg

SEQ ID NO: 34082 - RNA, 19 nt, synthetic construct
  source 1..19: mol_type = other RNA
gtcacagtgctgattgcac

SEQ ID NO: 34083 - RNA, 19 nt, synthetic construct
  source 1..19: mol_type = other RNA
gtgctgatccacactggaa

SEQ ID NO: 34084 - RNA, 19 nt, synthetic construct
  source 1..19: mol_type = other RNA
ggcagcagggtcgaggtgc

SEQ ID NO: 34085 - RNA, 19 nt, synthetic construct
  source 1..19: mol_type = other RNA
atccagtggactcagtcgt

SEQ ID NO: 34086 - RNA, 19 nt, synthetic construct
  source 1..19: mol_type = other RNA
ggcagcagggtcgaggtgc

SEQ ID NO: 34087 - RNA, 19 nt, synthetic construct
  source 1..19: mol_type = other RNA
ggcagcagggtcgaggtgc

SEQ ID NO: 34088 - RNA, 19 nt, synthetic construct
  source 1..19: mol_type = other RNA
atccagtggactcagtcgt

SEQ ID NO: 34089 - RNA, 19 nt, synthetic construct
  source 1..19: mol_type = other RNA
ggcagcagggtcgaggtgc

SEQ ID NO: 34090 - RNA, 19 nt, synthetic construct
  source 1..19: mol_type = other RNA
tgaccctgggcgtcacagg

SEQ ID NO: 34091 - RNA, 19 nt, synthetic construct
  source 1..19: mol_type = other RNA
tcctgctgctagggtgagg

SEQ ID NO: 34092 - RNA, 19 nt, synthetic construct
  source 1..19: mol_type = other RNA
tcctgctgctagggtgagg

SEQ ID NO: 34093 - RNA, 19 nt, synthetic construct
  source 1..19: mol_type = other RNA
ctcacagcccgtggtcacc

SEQ ID NO: 34094 - RNA, 19 nt, synthetic construct
  source 1..19: mol_type = other RNA
tcctgctgctagggtgagg

SEQ ID NO: 34095 - RNA, 19 nt, synthetic construct
  source 1..19: mol_type = other RNA
ctcacagcccgtggtcacc

SEQ ID NO: 34096 - RNA, 19 nt, synthetic construct
  source 1..19: mol_type = other RNA
cagtgcaagggcaccgtct

SEQ ID NO: 34097 - RNA, 19 nt, synthetic construct
  source 1..19: mol_type = other RNA
acagtgcaagggcaccgtc

SEQ ID NO: 34098 - RNA, 19 nt, synthetic construct
  source 1..19: mol_type = other RNA
atgccctcctcgtccgtgc

SEQ ID NO: 34099 - RNA, 19 nt, synthetic construct
  source 1..19: mol_type = other RNA
acagtagtcctgggccaag

SEQ ID NO: 34100 - RNA, 19 nt, synthetic construct
  source 1..19: mol_type = other RNA
aggacggggtggccgtgga

SEQ ID NO: 34101 - RNA, 19 nt, synthetic construct
  source 1..19: mol_type = other RNA
aggacggggtggccgtgga

SEQ ID NO: 34102 - RNA, 19 nt, synthetic construct
  source 1..19: mol_type = other RNA
aggacggggtggccgtgga

SEQ ID NO: 34103 - RNA, 19 nt, synthetic construct
  source 1..19: mol_type = other RNA
aggacggggtggccgtgga

SEQ ID NO: 34104 - RNA, 19 nt, synthetic construct
  source 1..19: mol_type = other RNA
gaccctgatggtctctcca

SEQ ID NO: 34105 - RNA, 19 nt, synthetic construct
  source 1..19: mol_type = other RNA
gcccctggtgtggcccggg

SEQ ID NO: 34106 - RNA, 19 nt, synthetic construct
  source 1..19: mol_type = other RNA
actttggtagtgtgagctg

SEQ ID NO: 34107 - RNA, 19 nt, synthetic construct
  source 1..19: mol_type = other RNA
actttggtagtgtgagctg

SEQ ID NO: 34108 - RNA, 19 nt, synthetic construct
  source 1..19: mol_type = other RNA
actttggtagtgtgagctg

SEQ ID NO: 34109 - RNA, 19 nt, synthetic construct
  source 1..19: mol_type = other RNA
actttggtagtgtgagctg

SEQ ID NO: 34110 - RNA, 19 nt, synthetic construct
  source 1..19: mol_type = other RNA
actttggtagtgtgagctg

SEQ ID NO: 34111 - RNA, 19 nt, synthetic construct
  source 1..19: mol_type = other RNA
atcacagagcggctgtggt

SEQ ID NO: 34112 - RNA, 19 nt, synthetic construct
  source 1..19: mol_type = other RNA
tgggtctcagggtggtgag

SEQ ID NO: 34113 - RNA, 19 nt, synthetic construct
  source 1..19: mol_type = other RNA
ttgctgacccaccgctccc

SEQ ID NO: 34114 - RNA, 19 nt, synthetic construct
  source 1..19: mol_type = other RNA
ctcacagacggcccctccg

SEQ ID NO: 34115 - RNA, 19 nt, synthetic construct
  source 1..19: mol_type = other RNA
ctcacagacggcccctccg

SEQ ID NO: 34116 - RNA, 19 nt, synthetic construct
  source 1..19: mol_type = other RNA
ctcacagacggcccctccg

SEQ ID NO: 34117 - RNA, 19 nt, synthetic construct
  source 1..19: mol_type = other RNA
ggcagcaggagcacggagc

SEQ ID NO: 34118 - RNA, 19 nt, synthetic construct
  source 1..19: mol_type = other RNA
acacagtggtcctcgcaga

SEQ ID NO: 34119 - RNA, 19 nt, synthetic construct
  source 1..19: mol_type = other RNA
gagctgcaggtggtgttga

SEQ ID NO: 34120 - RNA, 19 nt, synthetic construct
  source 1..19: mol_type = other RNA
ctcacagcccatggtcacc

SEQ ID NO: 34121 - RNA, 19 nt, synthetic construct
  source 1..19: mol_type = other RNA
ctcacagcccatggtcacc

SEQ ID NO: 34122 - RNA, 19 nt, synthetic construct
  source 1..19: mol_type = other RNA
agagggggctttgggatgc

SEQ ID NO: 34123 - RNA, 19 nt, synthetic construct
  source 1..19: mol_type = other RNA
ccacagtagtcctgggcca

SEQ ID NO: 34124 - RNA, 19 nt, synthetic construct
  source 1..19: mol_type = other RNA
ccagtgcgtcccccaccac

SEQ ID NO: 34125 - RNA, 19 nt, synthetic construct
  source 1..19: mol_type = other RNA
tgcagcagaggacccggat

SEQ ID NO: 34126 - RNA, 19 nt, synthetic construct
  source 1..19: mol_type = other RNA
cctgcagtggtcgtcactg

SEQ ID NO: 34127 - RNA, 19 nt, synthetic construct
  source 1..19: mol_type = other RNA
caggtagaggctgagattc

SEQ ID NO: 34128 - RNA, 19 nt, synthetic construct
  source 1..19: mol_type = other RNA
atgctgagggcgcgggggc

SEQ ID NO: 34129 - RNA, 19 nt, synthetic construct
  source 1..19: mol_type = other RNA
agcggaagacgtcgccgtc

SEQ ID NO: 34130 - RNA, 19 nt, synthetic construct
  source 1..19: mol_type = other RNA
tggagtgggggacccaggc

SEQ ID NO: 34131 - RNA, 19 nt, synthetic construct
  source 1..19: mol_type = other RNA
ccagcagttgcctgggtgg

SEQ ID NO: 34132 - RNA, 19 nt, synthetic construct
  source 1..19: mol_type = other RNA
cccaggggctgctcacaga

SEQ ID NO: 34133 - RNA, 19 nt, synthetic construct
  source 1..19: mol_type = other RNA
ccagcagttgcctgggtgg

SEQ ID NO: 34134 - RNA, 19 nt, synthetic construct
  source 1..19: mol_type = other RNA
ccagcagttgcctgggtgg

SEQ ID NO: 34135 - RNA, 19 nt, synthetic construct
  source 1..19: mol_type = other RNA
gctggactggctggccatc

SEQ ID NO: 34136 - RNA, 19 nt, synthetic construct
  source 1..19: mol_type = other RNA
ggtgctgcacacccgccca

SEQ ID NO: 34137 - RNA, 19 nt, synthetic construct
  source 1..19: mol_type = other RNA
gcggaagacgtcgccgtcg

SEQ ID NO: 34138 - RNA, 19 nt, synthetic construct
  source 1..19: mol_type = other RNA
gaagacgtcgccgtcgaag

SEQ ID NO: 34139 - RNA, 19 nt, synthetic construct
  source 1..19: mol_type = other RNA
ggaagacgtcgccgtcgaa

SEQ ID NO: 34140 - RNA, 19 nt, synthetic construct
  source 1..19: mol_type = other RNA
gtgcgggtggtccccacgg

SEQ ID NO: 34141 - RNA, 19 nt, synthetic construct
  source 1..19: mol_type = other RNA
gttgcaggtgtcaaacatg

SEQ ID NO: 34142 - RNA, 19 nt, synthetic construct
  source 1..19: mol_type = other RNA
agttgcaggtgtcaaacat

SEQ ID NO: 34143 - RNA, 19 nt, synthetic construct
  source 1..19: mol_type = other RNA
cgtccacaggcacgaagga

SEQ ID NO: 34144 - RNA, 19 nt, synthetic construct
  source 1..19: mol_type = other RNA
accctgatggtctctccag

SEQ ID NO: 34145 - RNA, 19 nt, synthetic construct
  source 1..19: mol_type = other RNA
gagcttccagctgttccca

SEQ ID NO: 34146 - RNA, 19 nt, synthetic construct
  source 1..19: mol_type = other RNA
gccgtgcaggggtccttgg

SEQ ID NO: 34147 - RNA, 19 nt, synthetic construct
  source 1..19: mol_type = other RNA
ggccgtgcaggggtccttg

SEQ ID NO: 34148 - RNA, 19 nt, synthetic construct
  source 1..19: mol_type = other RNA
gggctcacagcccatggtc

SEQ ID NO: 34149 - RNA, 19 nt, synthetic construct
  source 1..19: mol_type = other RNA
atgttggagtaggtgtcaa

SEQ ID NO: 34150 - RNA, 19 nt, synthetic construct
  source 1..19: mol_type = other RNA
gccagcagttgcctgggtg

SEQ ID NO: 34151 - RNA, 19 nt, synthetic construct
  source 1..19: mol_type = other RNA
gggctcacagcccatggtc

SEQ ID NO: 34152 - RNA, 19 nt, synthetic construct
  source 1..19: mol_type = other RNA
atgttggagtaggtgtcaa

SEQ ID NO: 34153 - RNA, 19 nt, synthetic construct
  source 1..19: mol_type = other RNA
atgttggagtaggtgtcaa

SEQ ID NO: 34154 - RNA, 19 nt, synthetic construct
  source 1..19: mol_type = other RNA
gccagcagttgcctgggtg

SEQ ID NO: 34155 - RNA, 19 nt, synthetic construct
  source 1..19: mol_type = other RNA
atgttggagtaggtgtcaa

SEQ ID NO: 34156 - RNA, 19 nt, synthetic construct
  source 1..19: mol_type = other RNA
gccagcagttgcctgggtg

SEQ ID NO: 34157 - RNA, 19 nt, synthetic construct
  source 1..19: mol_type = other RNA
cagggtggtgaggactgag

SEQ ID NO: 34158 - RNA, 19 nt, synthetic construct
  source 1..19: mol_type = other RNA
tttggtcaaacaggatcag

SEQ ID NO: 34159 - RNA, 19 nt, synthetic construct
  source 1..19: mol_type = other RNA
aggttgtggcactcagcaa

SEQ ID NO: 34160 - RNA, 19 nt, synthetic construct
  source 1..19: mol_type = other RNA
ccccctgcagctggacaca

SEQ ID NO: 34161 - RNA, 19 nt, synthetic construct
  source 1..19: mol_type = other RNA
ccggggggctccgcagagg

SEQ ID NO: 34162 - RNA, 19 nt, synthetic construct
  source 1..19: mol_type = other RNA
gcgcgggcgctccggccgt

SEQ ID NO: 34163 - RNA, 19 nt, synthetic construct
  source 1..19: mol_type = other RNA
tcccaagggtgaaggaggg

SEQ ID NO: 34164 - RNA, 19 nt, synthetic construct
  source 1..19: mol_type = other RNA
cagccctggtgccacagga

SEQ ID NO: 34165 - RNA, 19 nt, synthetic construct
  source 1..19: mol_type = other RNA
gtcccaagggtgaaggagg

SEQ ID NO: 34166 - RNA, 19 nt, synthetic construct
  source 1..19: mol_type = other RNA
tgggtgtggtggccgggct

SEQ ID NO: 34167 - RNA, 19 nt, synthetic construct
  source 1..19: mol_type = other RNA
ttgggggtgtgagctgttc

SEQ ID NO: 34168 - RNA, 19 nt, synthetic construct
  source 1..19: mol_type = other RNA
gccctggtgccacaggatg

SEQ ID NO: 34169 - RNA, 19 nt, synthetic construct
  source 1..19: mol_type = other RNA
gcacatcctggctccaggt

SEQ ID NO: 34170 - RNA, 19 nt, synthetic construct
  source 1..19: mol_type = other RNA
cgtgcaggggtccttgggt

SEQ ID NO: 34171 - RNA, 19 nt, synthetic construct
  source 1..19: mol_type = other RNA
gcagacgccgtccctccag

SEQ ID NO: 34172 - RNA, 19 nt, synthetic construct
  source 1..19: mol_type = other RNA
cactttgggagggggagct

SEQ ID NO: 34173 - RNA, 19 nt, synthetic construct
  source 1..19: mol_type = other RNA
gccacagttgtggtggtgg

SEQ ID NO: 34174 - RNA, 19 nt, synthetic construct
  source 1..19: mol_type = other RNA
gccacagttgtggtggtgg

SEQ ID NO: 34175 - RNA, 19 nt, synthetic construct
  source 1..19: mol_type = other RNA
cactttgggagggggagct

SEQ ID NO: 34176 - RNA, 19 nt, synthetic construct
  source 1..19: mol_type = other RNA
gccacagttgtggtggtgg

SEQ ID NO: 34177 - RNA, 19 nt, synthetic construct
  source 1..19: mol_type = other RNA
ctggaggtgcccctggtgt

SEQ ID NO: 34178 - RNA, 19 nt, synthetic construct
  source 1..19: mol_type = other RNA
gccacagttgtggtggtgg

SEQ ID NO: 34179 - RNA, 19 nt, synthetic construct
  source 1..19: mol_type = other RNA
cactttgggagggggagct

SEQ ID NO: 34180 - RNA, 19 nt, synthetic construct
  source 1..19: mol_type = other RNA
gccacagttgtggtggtgg

SEQ ID NO: 34181 - RNA, 19 nt, synthetic construct
  source 1..19: mol_type = other RNA
gccggggggctccgcagag

SEQ ID NO: 34182 - RNA, 19 nt, synthetic construct
  source 1..19: mol_type = other RNA
ttctgtggagcctgcaggc

SEQ ID NO: 34183 - RNA, 19 nt, synthetic construct
  source 1..19: mol_type = other RNA
gaggacagcggggcggagg

SEQ ID NO: 34184 - RNA, 19 nt, synthetic construct
  source 1..19: mol_type = other RNA
atgcacatcctggctccag

SEQ ID NO: 34185 - RNA, 19 nt, synthetic construct
  source 1..19: mol_type = other RNA
ggacacatctgggcaggat

SEQ ID NO: 34186 - RNA, 19 nt, synthetic construct
  source 1..19: mol_type = other RNA
agtcaccccaggtgctgca

SEQ ID NO: 34187 - RNA, 19 nt, synthetic construct
  source 1..19: mol_type = other RNA
agcggtgctggctgtgcct

SEQ ID NO: 34188 - RNA, 19 nt, synthetic construct
  source 1..19: mol_type = other RNA
ggcagaggagggagtcact

SEQ ID NO: 34189 - RNA, 19 nt, synthetic construct
  source 1..19: mol_type = other RNA
ctggagaagggagtggctt

SEQ ID NO: 34190 - RNA, 19 nt, synthetic construct
  source 1..19: mol_type = other RNA
ggcagaggagggagtcact

SEQ ID NO: 34191 - RNA, 19 nt, synthetic construct
  source 1..19: mol_type = other RNA
gtggctgctgtggtcagct

SEQ ID NO: 34192 - RNA, 19 nt, synthetic construct
  source 1..19: mol_type = other RNA
ggcagaggagggagtcact

SEQ ID NO: 34193 - RNA, 19 nt, synthetic construct
  source 1..19: mol_type = other RNA
ctggagaagggagtggctt

SEQ ID NO: 34194 - RNA, 19 nt, synthetic construct
  source 1..19: mol_type = other RNA
ggcagaggagggagtcact

SEQ ID NO: 34195 - RNA, 19 nt, synthetic construct
  source 1..19: mol_type = other RNA
gtggctgctgtggtcagct

SEQ ID NO: 34196 - RNA, 19 nt, synthetic construct
  source 1..19: mol_type = other RNA
gcagtcgccctcctcctgg

SEQ ID NO: 34197 - RNA, 19 nt, synthetic construct
  source 1..19: mol_type = other RNA
acacatctgggcaggatgc

SEQ ID NO: 34198 - RNA, 19 nt, synthetic construct
  source 1..19: mol_type = other RNA
ctgtggtctgctctgtgag

SEQ ID NO: 34199 - RNA, 19 nt, synthetic construct
  source 1..19: mol_type = other RNA
cgaggacagcggggcggag

SEQ ID NO: 34200 - RNA, 19 nt, synthetic construct
  source 1..19: mol_type = other RNA
tgcacatcctggctccagg

SEQ ID NO: 34201 - RNA, 19 nt, synthetic construct
  source 1..19: mol_type = other RNA
gcacaggcagcctgggcct

SEQ ID NO: 34202 - RNA, 19 nt, synthetic construct
  source 1..19: mol_type = other RNA
ggaggaagaggggatgggt

SEQ ID NO: 34203 - RNA, 19 nt, synthetic construct
  source 1..19: mol_type = other RNA
aagggtggaggaggggatg

SEQ ID NO: 34204 - RNA, 19 nt, synthetic construct
  source 1..19: mol_type = other RNA
cagggtggaggaggggatg

SEQ ID NO: 34205 - RNA, 19 nt, synthetic construct
  source 1..19: mol_type = other RNA
ggctgttgtggtcagctca

SEQ ID NO: 34206 - RNA, 19 nt, synthetic construct
  source 1..19: mol_type = other RNA
tcctcagggcagaagcagc

SEQ ID NO: 34207 - RNA, 19 nt, synthetic construct
  source 1..19: mol_type = other RNA
ggccggggggctccgcaga

SEQ ID NO: 34208 - RNA, 19 nt, synthetic construct
  source 1..19: mol_type = other RNA
attctcccagctcggctcc

SEQ ID NO: 34209 - RNA, 19 nt, synthetic construct
  source 1..19: mol_type = other RNA
tggactggaggagggagtg

SEQ ID NO: 34210 - RNA, 19 nt, synthetic construct
  source 1..19: mol_type = other RNA
tggactggaggagggagtg

SEQ ID NO: 34211 - RNA, 19 nt, synthetic construct
  source 1..19: mol_type = other RNA
tggactggaggagggagtg

SEQ ID NO: 34212 - RNA, 19 nt, synthetic construct
  source 1..19: mol_type = other RNA
cagccatcctttctgctgt

SEQ ID NO: 34213 - RNA, 19 nt, synthetic construct
  source 1..19: mol_type = other RNA
cctgcacagagcaggtgcc

SEQ ID NO: 34214 - RNA, 19 nt, synthetic construct
  source 1..19: mol_type = other RNA
agatgtgggccccgccctg

SEQ ID NO: 34215 - RNA, 19 nt, synthetic construct
  source 1..19: mol_type = other RNA
cagcccccactcccatccg

SEQ ID NO: 34216 - RNA, 19 nt, synthetic construct
  source 1..19: mol_type = other RNA
ccagctgttcccaaactcc

SEQ ID NO: 34217 - RNA, 19 nt, synthetic construct
  source 1..19: mol_type = other RNA
ttccagctgttcccaaact

SEQ ID NO: 34218 - RNA, 19 nt, synthetic construct
  source 1..19: mol_type = other RNA
gcttccagctgttcccaaa

SEQ ID NO: 34219 - RNA, 19 nt, synthetic construct
  source 1..19: mol_type = other RNA
ggcaggagggggagagctt

SEQ ID NO: 34220 - RNA, 19 nt, synthetic construct
  source 1..19: mol_type = other RNA
cgggcaggagggggagagc

SEQ ID NO: 34221 - RNA, 19 nt, synthetic construct
  source 1..19: mol_type = other RNA
cggcaggcggcgaaggtgg

SEQ ID NO: 34222 - RNA, 19 nt, synthetic construct
  source 1..19: mol_type = other RNA
gccacagccttcctgatga

SEQ ID NO: 34223 - RNA, 19 nt, synthetic construct
  source 1..19: mol_type = other RNA
ccaggggctgctcacagac

SEQ ID NO: 34224 - RNA, 19 nt, synthetic construct
  source 1..19: mol_type = other RNA
ggacatggtggccacgggt

SEQ ID NO: 34225 - RNA, 19 nt, synthetic construct
  source 1..19: mol_type = other RNA
tcggggcacccatcctggg

SEQ ID NO: 34226 - RNA, 19 nt, synthetic construct
  source 1..19: mol_type = other RNA
aagtcaccccaggtgctgc

SEQ ID NO: 34227 - RNA, 19 nt, synthetic construct
  source 1..19: mol_type = other RNA
ttggacgcctccagcacca

SEQ ID NO: 34228 - RNA, 19 nt, synthetic construct
  source 1..19: mol_type = other RNA
gttggacgcctccagcacc

SEQ ID NO: 34229 - RNA, 19 nt, synthetic construct
  source 1..19: mol_type = other RNA
cggagcaggtgcaggagct

SEQ ID NO: 34230 - RNA, 19 nt, synthetic construct
  source 1..19: mol_type = other RNA
gcacagagcaggtgccagg

SEQ ID NO: 34231 - RNA, 19 nt, synthetic construct
  source 1..19: mol_type = other RNA
ccctgcacagagcaggtgc

SEQ ID NO: 34232 - RNA, 19 nt, synthetic construct
  source 1..19: mol_type = other RNA
tgcaccagcagctgcagcc

SEQ ID NO: 34233 - RNA, 19 nt, synthetic construct
  source 1..19: mol_type = other RNA
aggctcccaggcagcttag

SEQ ID NO: 34234 - RNA, 19 nt, synthetic construct
  source 1..19: mol_type = other RNA
cgacaccagccccggggga

SEQ ID NO: 34235 - RNA, 19 nt, synthetic construct
  source 1..19: mol_type = other RNA
gctgttcccaaactccagt

SEQ ID NO: 34236 - RNA, 19 nt, synthetic construct
  source 1..19: mol_type = other RNA
cagctgttcccaaactcca

SEQ ID NO: 34237 - RNA, 19 nt, synthetic construct
  source 1..19: mol_type = other RNA
tccagctgttcccaaactc

SEQ ID NO: 34238 - RNA, 19 nt, synthetic construct
  source 1..19: mol_type = other RNA
cttccagctgttcccaaac

SEQ ID NO: 34239 - RNA, 19 nt, synthetic construct
  source 1..19: mol_type = other RNA
agcttccagctgttcccaa

SEQ ID NO: 34240 - RNA, 19 nt, synthetic construct
  source 1..19: mol_type = other RNA
agggggagagcttccagct

SEQ ID NO: 34241 - RNA, 19 nt, synthetic construct
  source 1..19: mol_type = other RNA
gagggggagagcttccagc

SEQ ID NO: 34242 - RNA, 19 nt, synthetic construct
  source 1..19: mol_type = other RNA
aggagggggagagcttcca

SEQ ID NO: 34243 - RNA, 19 nt, synthetic construct
  source 1..19: mol_type = other RNA
gggcaggagggggagagct

SEQ ID NO: 34244 - RNA, 19 nt, synthetic construct
  source 1..19: mol_type = other RNA
gcgaaggtggggccgtgga

SEQ ID NO: 34245 - RNA, 19 nt, synthetic construct
  source 1..19: mol_type = other RNA
ggcgaaggtggggccgtgg

SEQ ID NO: 34246 - RNA, 19 nt, synthetic construct
  source 1..19: mol_type = other RNA
caggcggcgaaggtggggc

SEQ ID NO: 34247 - RNA, 19 nt, synthetic construct
  source 1..19: mol_type = other RNA
gcaggcggcgaaggtgggg

SEQ ID NO: 34248 - RNA, 19 nt, synthetic construct
  source 1..19: mol_type = other RNA
gccactcacagcccccatg

SEQ ID NO: 34249 - RNA, 19 nt, synthetic construct
  source 1..19: mol_type = other RNA
cggtggtgaaggtgaatgg

SEQ ID NO: 34250 - RNA, 19 nt, synthetic construct
  source 1..19: mol_type = other RNA
caggcggtggtgaaggtga

SEQ ID NO: 34251 - RNA, 19 nt, synthetic construct
  source 1..19: mol_type = other RNA
ccaggccgggctctgggcg

SEQ ID NO: 34252 - RNA, 19 nt, synthetic construct
  source 1..19: mol_type = other RNA
aagtctccgcctcccaggc

SEQ ID NO: 34253 - RNA, 19 nt, synthetic construct
  source 1..19: mol_type = other RNA
agggagggctgagggctgg

SEQ ID NO: 34254 - RNA, 19 nt, synthetic construct
  source 1..19: mol_type = other RNA
tgagggagggctgagggct

SEQ ID NO: 34255 - RNA, 19 nt, synthetic construct
  source 1..19: mol_type = other RNA
ttctgccccacctgtgcca

SEQ ID NO: 34256 - RNA, 19 nt, synthetic construct
  source 1..19: mol_type = other RNA
gtggccgtctccagctctg

SEQ ID NO: 34257 - RNA, 19 nt, synthetic construct
  source 1..19: mol_type = other RNA
ggtggccgtctccagctct

SEQ ID NO: 34258 - RNA, 19 nt, synthetic construct
  source 1..19: mol_type = other RNA
agggcctgggtggtggtgg

SEQ ID NO: 34259 - RNA, 19 nt, synthetic construct
  source 1..19: mol_type = other RNA
ggggactgctgtggtgctg

SEQ ID NO: 34260 - RNA, 19 nt, synthetic construct
  source 1..19: mol_type = other RNA
ggctgtgcttctcagtgct

SEQ ID NO: 34261 - RNA, 19 nt, synthetic construct
  source 1..19: mol_type = other RNA
tggctgtgcttctcagtgc

SEQ ID NO: 34262 - RNA, 19 nt, synthetic construct
  source 1..19: mol_type = other RNA
gggaggaagaggggatggg

SEQ ID NO: 34263 - RNA, 19 nt, synthetic construct
  source 1..19: mol_type = other RNA
gcccagggaggaagagggg

SEQ ID NO: 34264 - RNA, 19 nt, synthetic construct
  source 1..19: mol_type = other RNA
gtgcccagggaggaagagg

SEQ ID NO: 34265 - RNA, 19 nt, synthetic construct
  source 1..19: mol_type = other RNA
ggccacagttgtggtggtg

SEQ ID NO: 34266 - RNA, 19 nt, synthetic construct
  source 1..19: mol_type = other RNA
gtgtggggactgctggggg

SEQ ID NO: 34267 - RNA, 19 nt, synthetic construct
  source 1..19: mol_type = other RNA
tcctggaggtggccgtggt

SEQ ID NO: 34268 - RNA, 19 nt, synthetic construct
  source 1..19: mol_type = other RNA
gggtggaggaggcggtggc

SEQ ID NO: 34269 - RNA, 19 nt, synthetic construct
  source 1..19: mol_type = other RNA
ggctgtgcttctcagtgct

SEQ ID NO: 34270 - RNA, 19 nt, synthetic construct
  source 1..19: mol_type = other RNA
tggctgtgcttctcagtgc

SEQ ID NO: 34271 - RNA, 19 nt, synthetic construct
  source 1..19: mol_type = other RNA
tgcccagggaggaggaggg

SEQ ID NO: 34272 - RNA, 19 nt, synthetic construct
  source 1..19: mol_type = other RNA
aggtggtgcccagggagga

SEQ ID NO: 34273 - RNA, 19 nt, synthetic construct
  source 1..19: mol_type = other RNA
ggccacagttgtggtggtg

SEQ ID NO: 34274 - RNA, 19 nt, synthetic construct
  source 1..19: mol_type = other RNA
gtgtggggactgctggggg

SEQ ID NO: 34275 - RNA, 19 nt, synthetic construct
  source 1..19: mol_type = other RNA
gtgtggccgtggccgtggt

SEQ ID NO: 34276 - RNA, 19 nt, synthetic construct
  source 1..19: mol_type = other RNA
ggctgtgggtgtggtggcc

SEQ ID NO: 34277 - RNA, 19 nt, synthetic construct
  source 1..19: mol_type = other RNA
ctggaggaggaagtggctt

SEQ ID NO: 34278 - RNA, 19 nt, synthetic construct
  source 1..19: mol_type = other RNA
ccggagtggaggaggggtg

SEQ ID NO: 34279 - RNA, 19 nt, synthetic construct
  source 1..19: mol_type = other RNA
tggctgctgtggtcagctc

SEQ ID NO: 34280 - RNA, 19 nt, synthetic construct
  source 1..19: mol_type = other RNA
agtggctgctgtggtcagc

SEQ ID NO: 34281 - RNA, 19 nt, synthetic construct
  source 1..19: mol_type = other RNA
gtggccgtggggccagtgg

SEQ ID NO: 34282 - RNA, 19 nt, synthetic construct
  source 1..19: mol_type = other RNA
gggtggaggaggcggtggc

SEQ ID NO: 34283 - RNA, 19 nt, synthetic construct
  source 1..19: mol_type = other RNA
ggctgtgcttctcagtgct

SEQ ID NO: 34284 - RNA, 19 nt, synthetic construct
  source 1..19: mol_type = other RNA
tggctgtgcttctcagtgc

SEQ ID NO: 34285 - RNA, 19 nt, synthetic construct
  source 1..19: mol_type = other RNA
gcccagggaggaagagggg

SEQ ID NO: 34286 - RNA, 19 nt, synthetic construct
  source 1..19: mol_type = other RNA
gtgcccagggaggaagagg

SEQ ID NO: 34287 - RNA, 19 nt, synthetic construct
  source 1..19: mol_type = other RNA
ttgtggtggtcgtggtggt

SEQ ID NO: 34288 - RNA, 19 nt, synthetic construct
  source 1..19: mol_type = other RNA
ggccacagttgtggtggtg

SEQ ID NO: 34289 - RNA, 19 nt, synthetic construct
  source 1..19: mol_type = other RNA
tgctggggggcagggaccg

SEQ ID NO: 34290 - RNA, 19 nt, synthetic construct
  source 1..19: mol_type = other RNA
ctgctggggggcagggacc

SEQ ID NO: 34291 - RNA, 19 nt, synthetic construct
  source 1..19: mol_type = other RNA
gtgtggggactgctggggg

SEQ ID NO: 34292 - RNA, 19 nt, synthetic construct
  source 1..19: mol_type = other RNA
ggctgtggctgtggtcctg

SEQ ID NO: 34293 - RNA, 19 nt, synthetic construct
  source 1..19: mol_type = other RNA
gggtggaggaggcggtggc

SEQ ID NO: 34294 - RNA, 19 nt, synthetic construct
  source 1..19: mol_type = other RNA
ggctgtgcttctcagtgct

SEQ ID NO: 34295 - RNA, 19 nt, synthetic construct
  source 1..19: mol_type = other RNA
tggctgtgcttctcagtgc

SEQ ID NO: 34296 - RNA, 19 nt, synthetic construct
  source 1..19: mol_type = other RNA
tgcccagggaggaggaggg

SEQ ID NO: 34297 - RNA, 19 nt, synthetic construct
  source 1..19: mol_type = other RNA
aggtggtgcccagggagga

SEQ ID NO: 34298 - RNA, 19 nt, synthetic construct
  source 1..19: mol_type = other RNA
cctggggtggaagaggggg

SEQ ID NO: 34299 - RNA, 19 nt, synthetic construct
  source 1..19: mol_type = other RNA
ggccacagttgtggtggtg

SEQ ID NO: 34300 - RNA, 19 nt, synthetic construct
  source 1..19: mol_type = other RNA
gtgtggggactgctggggg

SEQ ID NO: 34301 - RNA, 19 nt, synthetic construct
  source 1..19: mol_type = other RNA
tcctggaggtggccgtggt

SEQ ID NO: 34302 - RNA, 19 nt, synthetic construct
  source 1..19: mol_type = other RNA
gtgtggccgtggccgtggt

SEQ ID NO: 34303 - RNA, 19 nt, synthetic construct
  source 1..19: mol_type = other RNA
gtggtggccgggctggtca

SEQ ID NO: 34304 - RNA, 19 nt, synthetic construct
  source 1..19: mol_type = other RNA
ggctgtgggtgtggtggcc

SEQ ID NO: 34305 - RNA, 19 nt, synthetic construct
  source 1..19: mol_type = other RNA
ctggaggaggaagtggctt

SEQ ID NO: 34306 - RNA, 19 nt, synthetic construct
  source 1..19: mol_type = other RNA
agggtggaggaggggatgg

SEQ ID NO: 34307 - RNA, 19 nt, synthetic construct
  source 1..19: mol_type = other RNA
ccggagtggaggaggggtg

SEQ ID NO: 34308 - RNA, 19 nt, synthetic construct
  source 1..19: mol_type = other RNA
tggctgctgtggtcagctc

SEQ ID NO: 34309 - RNA, 19 nt, synthetic construct
  source 1..19: mol_type = other RNA
agtggctgctgtggtcagc

SEQ ID NO: 34310 - RNA, 19 nt, synthetic construct
  source 1..19: mol_type = other RNA
gtggccgtggggccagtgg

SEQ ID NO: 34311 - RNA, 19 nt, synthetic construct
  source 1..19: mol_type = other RNA
gggtggaggaggcggtggc

SEQ ID NO: 34312 - RNA, 19 nt, synthetic construct
  source 1..19: mol_type = other RNA
tgctggaagggcagttgca

SEQ ID NO: 34313 - RNA, 19 nt, synthetic construct
  source 1..19: mol_type = other RNA
ggctgtgcttctcagtgct

SEQ ID NO: 34314 - RNA, 19 nt, synthetic construct
  source 1..19: mol_type = other RNA
tggctgtgcttctcagtgc

SEQ ID NO: 34315 - RNA, 19 nt, synthetic construct
  source 1..19: mol_type = other RNA
tgcccagggaggaggaggg

SEQ ID NO: 34316 - RNA, 19 nt, synthetic construct
  source 1..19: mol_type = other RNA
aggtggtgcccagggagga

SEQ ID NO: 34317 - RNA, 19 nt, synthetic construct
  source 1..19: mol_type = other RNA
ggccacagttgtggtggtg

SEQ ID NO: 34318 - RNA, 19 nt, synthetic construct
  source 1..19: mol_type = other RNA
tcagcactggggtgatggg

SEQ ID NO: 34319 - RNA, 19 nt, synthetic construct
  source 1..19: mol_type = other RNA
ctggaggaggaagtggctt

SEQ ID NO: 34320 - RNA, 19 nt, synthetic construct
  source 1..19: mol_type = other RNA
gctgtggattttgtggctg

SEQ ID NO: 34321 - RNA, 19 nt, synthetic construct
  source 1..19: mol_type = other RNA
agctgtggattttgtggct

SEQ ID NO: 34322 - RNA, 19 nt, synthetic construct
  source 1..19: mol_type = other RNA
agggtggaggaggggatgg

SEQ ID NO: 34323 - RNA, 19 nt, synthetic construct
  source 1..19: mol_type = other RNA
cggtccacgtggtccacag

SEQ ID NO: 34324 - RNA, 19 nt, synthetic construct
  source 1..19: mol_type = other RNA
tcatggtggctgtggtggt

SEQ ID NO: 34325 - RNA, 19 nt, synthetic construct
  source 1..19: mol_type = other RNA
gtcatggtggctgtggtgg

SEQ ID NO: 34326 - RNA, 19 nt, synthetic construct
  source 1..19: mol_type = other RNA
cgtggaggcagtggctgtg

SEQ ID NO: 34327 - RNA, 19 nt, synthetic construct
  source 1..19: mol_type = other RNA
ccctcctccttcccatgca

SEQ ID NO: 34328 - RNA, 19 nt, synthetic construct
  source 1..19: mol_type = other RNA
aacaggatcaggccctcct

SEQ ID NO: 34329 - RNA, 19 nt, synthetic construct
  source 1..19: mol_type = other RNA
ggcagggcacctcaaggcg

SEQ ID NO: 34330 - RNA, 19 nt, synthetic construct
  source 1..19: mol_type = other RNA
cacacaggcaggctctggg

SEQ ID NO: 34331 - RNA, 19 nt, synthetic construct
  source 1..19: mol_type = other RNA
ctggacacatctgggcagg

SEQ ID NO: 34332 - RNA, 19 nt, synthetic construct
  source 1..19: mol_type = other RNA
agccctggtgccacaggat

SEQ ID NO: 34333 - RNA, 19 nt, synthetic construct
  source 1..19: mol_type = other RNA
gggtgtgtgggggagccat

SEQ ID NO: 34334 - RNA, 19 nt, synthetic construct
  source 1..19: mol_type = other RNA
ggtgggcagcaggagcacg

SEQ ID NO: 34335 - RNA, 19 nt, synthetic construct
  source 1..19: mol_type = other RNA
cttcctggcagcagctggc

SEQ ID NO: 34336 - RNA, 19 nt, synthetic construct
  source 1..19: mol_type = other RNA
gcttcctggcagcagctgg

SEQ ID NO: 34337 - RNA, 19 nt, synthetic construct
  source 1..19: mol_type = other RNA
ccctgggtctctgcctgcg

SEQ ID NO: 34338 - RNA, 19 nt, synthetic construct
  source 1..19: mol_type = other RNA
cagtgcaccttctgcccca

SEQ ID NO: 34339 - RNA, 19 nt, synthetic construct
  source 1..19: mol_type = other RNA
ggagggggtgactgtgaag

SEQ ID NO: 34340 - RNA, 19 nt, synthetic construct
  source 1..19: mol_type = other RNA
gatggcattgtcgtcgaag

SEQ ID NO: 34341 - RNA, 19 nt, synthetic construct
  source 1..19: mol_type = other RNA
gccctgagttaccctgcag

SEQ ID NO: 34342 - RNA, 19 nt, synthetic construct
  source 1..19: mol_type = other RNA
gctgcagttgtagtggctg

SEQ ID NO: 34343 - RNA, 19 nt, synthetic construct
  source 1..19: mol_type = other RNA
tagctgcagtcaccatgca

SEQ ID NO: 34344 - RNA, 19 nt, synthetic construct
  source 1..19: mol_type = other RNA
gaccctgggcgtcacaggg

SEQ ID NO: 34345 - RNA, 19 nt, synthetic construct
  source 1..19: mol_type = other RNA
gtcacagggcaggggcttg

SEQ ID NO: 34346 - RNA, 19 nt, synthetic construct
  source 1..19: mol_type = other RNA
actgcaggggtgcgggtgg

SEQ ID NO: 34347 - RNA, 19 nt, synthetic construct
  source 1..19: mol_type = other RNA
ggagggggtggccacagag

SEQ ID NO: 34348 - RNA, 19 nt, synthetic construct
  source 1..19: mol_type = other RNA
ggagggggtggccacagag

SEQ ID NO: 34349 - RNA, 19 nt, synthetic construct
  source 1..19: mol_type = other RNA
gtggccctggtgtggcccg

SEQ ID NO: 34350 - RNA, 19 nt, synthetic construct
  source 1..19: mol_type = other RNA
ggagggggtggccacagag

SEQ ID NO: 34351 - RNA, 19 nt, synthetic construct
  source 1..19: mol_type = other RNA
agagggggtggccacagag

SEQ ID NO: 34352 - RNA, 19 nt, synthetic construct
  source 1..19: mol_type = other RNA
ggagggggtggccacagag

SEQ ID NO: 34353 - RNA, 19 nt, synthetic construct
  source 1..19: mol_type = other RNA
cctgcagcaggcatggaca

SEQ ID NO: 34354 - RNA, 19 nt, synthetic construct
  source 1..19: mol_type = other RNA
cctgatggtctctccaggc

SEQ ID NO: 34355 - RNA, 19 nt, synthetic construct
  source 1..19: mol_type = other RNA
gtgtgggcagtctctggag

SEQ ID NO: 34356 - RNA, 19 nt, synthetic construct
  source 1..19: mol_type = other RNA
gtgtgggcagtctctggag

SEQ ID NO: 34357 - RNA, 19 nt, synthetic construct
  source 1..19: mol_type = other RNA
ccgtgcaggggtccttggg

SEQ ID NO: 34358 - RNA, 19 nt, synthetic construct
  source 1..19: mol_type = other RNA
gggcgtccgggcaggaggg

SEQ ID NO: 34359 - RNA, 19 nt, synthetic construct
  source 1..19: mol_type = other RNA
cgtcacagggcaggggctt

SEQ ID NO: 34360 - RNA, 19 nt, synthetic construct
  source 1..19: mol_type = other RNA
ccgtggatccagtggctgc

SEQ ID NO: 34361 - RNA, 19 nt, synthetic construct
  source 1..19: mol_type = other RNA
gcagctcctcccgctgccc

SEQ ID NO: 34362 - RNA, 19 nt, synthetic construct
  source 1..19: mol_type = other RNA
tggggtgggggtgggtgtg

SEQ ID NO: 34363 - RNA, 19 nt, synthetic construct
  source 1..19: mol_type = other RNA
ccagcaccagcccctgggc

SEQ ID NO: 34364 - RNA, 19 nt, synthetic construct
  source 1..19: mol_type = other RNA
ggcagctcctcccgctgcc

SEQ ID NO: 34365 - RNA, 19 nt, synthetic construct
  source 1..19: mol_type = other RNA
tggcccagctcctccagcg

SEQ ID NO: 34366 - RNA, 19 nt, synthetic construct
  source 1..19: mol_type = other RNA
ggggtgggggtgggtgtgc

SEQ ID NO: 34367 - RNA, 19 nt, synthetic construct
  source 1..19: mol_type = other RNA
gcatggggtgggggtgggt

SEQ ID NO: 34368 - RNA, 19 nt, synthetic construct
  source 1..19: mol_type = other RNA
tccttgggtgccagggcgt

SEQ ID NO: 34369 - RNA, 19 nt, synthetic construct
  source 1..19: mol_type = other RNA
gctctggagctgatgactg

SEQ ID NO: 34370 - RNA, 19 nt, synthetic construct
  source 1..19: mol_type = other RNA
cgggtcttgctgggtgtgg

SEQ ID NO: 34371 - RNA, 19 nt, synthetic construct
  source 1..19: mol_type = other RNA
cgggtcttgctgggtgtgg

SEQ ID NO: 34372 - RNA, 19 nt, synthetic construct
  source 1..19: mol_type = other RNA
cgggtcttgctgggtgtgg

SEQ ID NO: 34373 - RNA, 19 nt, synthetic construct
  source 1..19: mol_type = other RNA
cgggtcttgctgggtgtgg

SEQ ID NO: 34374 - RNA, 19 nt, synthetic construct
  source 1..19: mol_type = other RNA
tctctggagtagaggaggt

SEQ ID NO: 34375 - RNA, 19 nt, synthetic construct
  source 1..19: mol_type = other RNA
gggacggaggagggggtca

SEQ ID NO: 34376 - RNA, 19 nt, synthetic construct
  source 1..19: mol_type = other RNA
agctggtggctgcgggtgt

SEQ ID NO: 34377 - RNA, 19 nt, synthetic construct
  source 1..19: mol_type = other RNA
cgctggtagctgtgggtgt

SEQ ID NO: 34378 - RNA, 19 nt, synthetic construct
  source 1..19: mol_type = other RNA
cgctggtagctgtgggtgt

SEQ ID NO: 34379 - RNA, 19 nt, synthetic construct
  source 1..19: mol_type = other RNA
actttgggagggggagctg

SEQ ID NO: 34380 - RNA, 19 nt, synthetic construct
  source 1..19: mol_type = other RNA
actttgggagggggagctg

SEQ ID NO: 34381 - RNA, 19 nt, synthetic construct
  source 1..19: mol_type = other RNA
actttgggagggggagctg

SEQ ID NO: 34382 - RNA, 19 nt, synthetic construct
  source 1..19: mol_type = other RNA
acagttgcaggtgtcaaac

SEQ ID NO: 34383 - RNA, 19 nt, synthetic construct
  source 1..19: mol_type = other RNA
gtggggccgtggaggatgc

SEQ ID NO: 34384 - RNA, 19 nt, synthetic construct
  source 1..19: mol_type = other RNA
gctttggagctggtgactg

SEQ ID NO: 34385 - RNA, 19 nt, synthetic construct
  source 1..19: mol_type = other RNA
gctttggagctggtgactg

SEQ ID NO: 34386 - RNA, 19 nt, synthetic construct
  source 1..19: mol_type = other RNA
gctttggagctggtgactg

SEQ ID NO: 34387 - RNA, 19 nt, synthetic construct
  source 1..19: mol_type = other RNA
gctttggagctggtgactg

SEQ ID NO: 34388 - RNA, 19 nt, synthetic construct
  source 1..19: mol_type = other RNA
atcccctccagctgtgggc

SEQ ID NO: 34389 - RNA, 19 nt, synthetic construct
  source 1..19: mol_type = other RNA
gcggaggacactggcggtg

SEQ ID NO: 34390 - RNA, 19 nt, synthetic construct
  source 1..19: mol_type = other RNA
cacaggcctggagcccact

SEQ ID NO: 34391 - RNA, 19 nt, synthetic construct
  source 1..19: mol_type = other RNA
gcaggcctgggcgtaggca

SEQ ID NO: 34392 - RNA, 19 nt, synthetic construct
  source 1..19: mol_type = other RNA
gggtggaggaggggatggg

SEQ ID NO: 34393 - RNA, 19 nt, synthetic construct
  source 1..19: mol_type = other RNA
gggtggaggaggggatggg

SEQ ID NO: 34394 - RNA, 19 nt, synthetic construct
  source 1..19: mol_type = other RNA
cgctccggggcaggagccc

SEQ ID NO: 34395 - RNA, 19 nt, synthetic construct
  source 1..19: mol_type = other RNA
cctggggtggaggacgggg

SEQ ID NO: 34396 - RNA, 19 nt, synthetic construct
  source 1..19: mol_type = other RNA
cctggggtggaggacgggg

SEQ ID NO: 34397 - RNA, 19 nt, synthetic construct
  source 1..19: mol_type = other RNA
cctggggtggaggacgggg

SEQ ID NO: 34398 - RNA, 19 nt, synthetic construct
  source 1..19: mol_type = other RNA
cctggggtggaggacgggg

SEQ ID NO: 34399 - RNA, 19 nt, synthetic construct
  source 1..19: mol_type = other RNA
cctggggtggaggacgggg

SEQ ID NO: 34400 - RNA, 19 nt, synthetic construct
  source 1..19: mol_type = other RNA
cctcagggcagaagcagcc

SEQ ID NO: 34401 - RNA, 19 nt, synthetic construct
  source 1..19: mol_type = other RNA
accggttgcacctcgccag

SEQ ID NO: 34402 - RNA, 19 nt, synthetic construct
  source 1..19: mol_type = other RNA
ggagggggtcaccgtggag

SEQ ID NO: 34403 - RNA, 19 nt, synthetic construct
  source 1..19: mol_type = other RNA
ggagggggtcaccgtggaa

SEQ ID NO: 34404 - RNA, 19 nt, synthetic construct
  source 1..19: mol_type = other RNA
ggagggggtcaccgtggag

SEQ ID NO: 34405 - RNA, 19 nt, synthetic construct
  source 1..19: mol_type = other RNA
ggagggggtcaccgtggag

SEQ ID NO: 34406 - RNA, 19 nt, synthetic construct
  source 1..19: mol_type = other RNA
ggagggggtcaccgtggag

SEQ ID NO: 34407 - RNA, 19 nt, synthetic construct
  source 1..19: mol_type = other RNA
ggtgacagtgaggacgata

SEQ ID NO: 34408 - RNA, 19 nt, synthetic construct
  source 1..19: mol_type = other RNA
aagctgcgccgcccggcac

SEQ ID NO: 34409 - RNA, 19 nt, synthetic construct
  source 1..19: mol_type = other RNA
gtgccctgcattctcccag

SEQ ID NO: 34410 - RNA, 19 nt, synthetic construct
  source 1..19: mol_type = other RNA
cagcaccagccggatgctg

SEQ ID NO: 34411 - RNA, 19 nt, synthetic construct
  source 1..19: mol_type = other RNA
gctgcagtcaccatgcagg

SEQ ID NO: 34412 - RNA, 19 nt, synthetic construct
  source 1..19: mol_type = other RNA
tggagtggcagcgcgagaa

SEQ ID NO: 34413 - RNA, 19 nt, synthetic construct
  source 1..19: mol_type = other RNA
gtgccctccagcggccctg

SEQ ID NO: 34414 - RNA, 19 nt, synthetic construct
  source 1..19: mol_type = other RNA
acagtgcaccttctgcccc

SEQ ID NO: 34415 - RNA, 19 nt, synthetic construct
  source 1..19: mol_type = other RNA
catgtgcccaagctccccg

SEQ ID NO: 34416 - RNA, 19 nt, synthetic construct
  source 1..19: mol_type = other RNA
gctggctgtgcctgtcggg

SEQ ID NO: 34417 - RNA, 19 nt, synthetic construct
  source 1..19: mol_type = other RNA
ggagggggagctgttctca

SEQ ID NO: 34418 - RNA, 19 nt, synthetic construct
  source 1..19: mol_type = other RNA
cccggttgtggtggccgtg

SEQ ID NO: 34419 - RNA, 19 nt, synthetic construct
  source 1..19: mol_type = other RNA
tgctggtcagcactttggg

SEQ ID NO: 34420 - RNA, 19 nt, synthetic construct
  source 1..19: mol_type = other RNA
tgctggtcagcactttgag

SEQ ID NO: 34421 - RNA, 19 nt, synthetic construct
  source 1..19: mol_type = other RNA
ggctggtcagcactttggg

SEQ ID NO: 34422 - RNA, 19 nt, synthetic construct
  source 1..19: mol_type = other RNA
cccggttgtggtggccgtg

SEQ ID NO: 34423 - RNA, 19 nt, synthetic construct
  source 1..19: mol_type = other RNA
tggaagacttggccattga

SEQ ID NO: 34424 - RNA, 19 nt, synthetic construct
  source 1..19: mol_type = other RNA
ccagcagccatcctttctg

SEQ ID NO: 34425 - RNA, 19 nt, synthetic construct
  source 1..19: mol_type = other RNA
aagcagccctccgccatcc

SEQ ID NO: 34426 - RNA, 19 nt, synthetic construct
  source 1..19: mol_type = other RNA
cctggaccagcctgtctgc

SEQ ID NO: 34427 - RNA, 19 nt, synthetic construct
  source 1..19: mol_type = other RNA
atgctgacccctctctgac

SEQ ID NO: 34428 - RNA, 19 nt, synthetic construct
  source 1..19: mol_type = other RNA
aggaatgtcagcaccagcc

SEQ ID NO: 34429 - RNA, 19 nt, synthetic construct
  source 1..19: mol_type = other RNA
ggagatgtgggccccgccc

SEQ ID NO: 34430 - RNA, 19 nt, synthetic construct
  source 1..19: mol_type = other RNA
atcataggtggagatgtgg

SEQ ID NO: 34431 - RNA, 19 nt, synthetic construct
  source 1..19: mol_type = other RNA
gctgcagtccaggtacacc

SEQ ID NO: 34432 - RNA, 19 nt, synthetic construct
  source 1..19: mol_type = other RNA
agaggggatggctgtaacg

SEQ ID NO: 34433 - RNA, 19 nt, synthetic construct
  source 1..19: mol_type = other RNA
gcgccctggaagcggtcaa

SEQ ID NO: 34434 - RNA, 19 nt, synthetic construct
  source 1..19: mol_type = other RNA
gtggcccttgtcatggtgg

SEQ ID NO: 34435 - RNA, 19 nt, synthetic construct
  source 1..19: mol_type = other RNA
gcgaggacagcggggcgga

SEQ ID NO: 34436 - RNA, 19 nt, synthetic construct
  source 1..19: mol_type = other RNA
gcagtagtggttgtccagg

SEQ ID NO: 34437 - RNA, 19 nt, synthetic construct
  source 1..19: mol_type = other RNA
cagcagccatcctttctgc

SEQ ID NO: 34438 - RNA, 19 nt, synthetic construct
  source 1..19: mol_type = other RNA
ggaggggcaaggccaaggt

SEQ ID NO: 34439 - RNA, 19 nt, synthetic construct
  source 1..19: mol_type = other RNA
taccctgcagcaggcatgg

SEQ ID NO: 34440 - RNA, 19 nt, synthetic construct
  source 1..19: mol_type = other RNA
agctggtagctgtggattt

SEQ ID NO: 34441 - RNA, 19 nt, synthetic construct
  source 1..19: mol_type = other RNA
gctgcagttgtagtggctg

SEQ ID NO: 34442 - RNA, 19 nt, synthetic construct
  source 1..19: mol_type = other RNA
cgctggtagctgtggattt

SEQ ID NO: 34443 - RNA, 19 nt, synthetic construct
  source 1..19: mol_type = other RNA
gctgcagttgtagtggctg

SEQ ID NO: 34444 - RNA, 19 nt, synthetic construct
  source 1..19: mol_type = other RNA
agctggtagctgtggattt

SEQ ID NO: 34445 - RNA, 19 nt, synthetic construct
  source 1..19: mol_type = other RNA
tctggacgcactccccaca

SEQ ID NO: 34446 - RNA, 19 nt, synthetic construct
  source 1..19: mol_type = other RNA
gctttgggatgctgacccc

SEQ ID NO: 34447 - RNA, 19 nt, synthetic construct
  source 1..19: mol_type = other RNA
gggacggggacgggcaggg

SEQ ID NO: 34448 - RNA, 19 nt, synthetic construct
  source 1..19: mol_type = other RNA
tgggtctctgcctgcggca

SEQ ID NO: 34449 - RNA, 19 nt, synthetic construct
  source 1..19: mol_type = other RNA
gctgcagatgcactcgcac

SEQ ID NO: 34450 - RNA, 19 nt, synthetic construct
  source 1..19: mol_type = other RNA
tctgcagcggaaggtggga

SEQ ID NO: 34451 - RNA, 19 nt, synthetic construct
  source 1..19: mol_type = other RNA
tggcagtggggggtgtgcc

SEQ ID NO: 34452 - RNA, 19 nt, synthetic construct
  source 1..19: mol_type = other RNA
acgccctcctgctcccagt

SEQ ID NO: 34453 - RNA, 19 nt, synthetic construct
  source 1..19: mol_type = other RNA
tctttggaagcggtgctgg

SEQ ID NO: 34454 - RNA, 19 nt, synthetic construct
  source 1..19: mol_type = other RNA
cctctggttgtgggtgtgg

SEQ ID NO: 34455 - RNA, 19 nt, synthetic construct
  source 1..19: mol_type = other RNA
cctctggttgtgggtgtgg

SEQ ID NO: 34456 - RNA, 19 nt, synthetic construct
  source 1..19: mol_type = other RNA
tctctggagtagaggaggg

SEQ ID NO: 34457 - RNA, 19 nt, synthetic construct
  source 1..19: mol_type = other RNA
cctctggttgtgggtgtgg

SEQ ID NO: 34458 - RNA, 19 nt, synthetic construct
  source 1..19: mol_type = other RNA
actctggcggtgtgggtgg

SEQ ID NO: 34459 - RNA, 19 nt, synthetic construct
  source 1..19: mol_type = other RNA
gcgccctcccgaaaggggt

SEQ ID NO: 34460 - RNA, 19 nt, synthetic construct
  source 1..19: mol_type = other RNA
tgagggggcaggtccgggg

SEQ ID NO: 34461 - RNA, 19 nt, synthetic construct
  source 1..19: mol_type = other RNA
ctcacagcccccatgtggg

SEQ ID NO: 34462 - RNA, 19 nt, synthetic construct
  source 1..19: mol_type = other RNA
gctctggaggttgccattg

SEQ ID NO: 34463 - RNA, 19 nt, synthetic construct
  source 1..19: mol_type = other RNA
ggctggtggtggtgttagt

SEQ ID NO: 34464 - RNA, 19 nt, synthetic construct
  source 1..19: mol_type = other RNA
cctggctggtggtggtgtt

SEQ ID NO: 34465 - RNA, 19 nt, synthetic construct
  source 1..19: mol_type = other RNA
gtgccctggctggtggtgg

SEQ ID NO: 34466 - RNA, 19 nt, synthetic construct
  source 1..19: mol_type = other RNA
gctgcaggtgtggtggcgg

SEQ ID NO: 34467 - RNA, 19 nt, synthetic construct
  source 1..19: mol_type = other RNA
cctggactggagaagggag

SEQ ID NO: 34468 - RNA, 19 nt, synthetic construct
  source 1..19: mol_type = other RNA
gctgcaggtgtggtggcgg

SEQ ID NO: 34469 - RNA, 19 nt, synthetic construct
  source 1..19: mol_type = other RNA
ggagggggtggacatggaa

SEQ ID NO: 34470 - RNA, 19 nt, synthetic construct
  source 1..19: mol_type = other RNA
gctgcaggtgtggtggcgg

SEQ ID NO: 34471 - RNA, 19 nt, synthetic construct
  source 1..19: mol_type = other RNA
cctggactggagaagggag

SEQ ID NO: 34472 - RNA, 19 nt, synthetic construct
  source 1..19: mol_type = other RNA
gctgcaggtgtggtggcgg

SEQ ID NO: 34473 - RNA, 19 nt, synthetic construct
  source 1..19: mol_type = other RNA
ggaggggttggtggtggag

SEQ ID NO: 34474 - RNA, 19 nt, synthetic construct
  source 1..19: mol_type = other RNA
ggaggggttggtggtggag

SEQ ID NO: 34475 - RNA, 19 nt, synthetic construct
  source 1..19: mol_type = other RNA
ggaggggttggtggtggag

SEQ ID NO: 34476 - RNA, 19 nt, synthetic construct
  source 1..19: mol_type = other RNA
ggaggggttggtggtggag

SEQ ID NO: 34477 - RNA, 19 nt, synthetic construct
  source 1..19: mol_type = other RNA
ggaggggttggtggtggag

SEQ ID NO: 34478 - RNA, 19 nt, synthetic construct
  source 1..19: mol_type = other RNA
actcccacctccggttcct

SEQ ID NO: 34479 - RNA, 19 nt, synthetic construct
  source 1..19: mol_type = other RNA
cctgcagctggacacatct

SEQ ID NO: 34480 - RNA, 19 nt, synthetic construct
  source 1..19: mol_type = other RNA
tctcccagctcggctccac

SEQ ID NO: 34481 - RNA, 19 nt, synthetic construct
  source 1..19: mol_type = other RNA
gcagtgctgtccaccagtg

SEQ ID NO: 34482 - RNA, 19 nt, synthetic construct
  source 1..19: mol_type = other RNA
ggagggggtggctgtgaag

SEQ ID NO: 34483 - RNA, 19 nt, synthetic construct
  source 1..19: mol_type = other RNA
ggagggggtggctgtgaag

SEQ ID NO: 34484 - RNA, 19 nt, synthetic construct
  source 1..19: mol_type = other RNA
gtggccctggttgtggtgg

SEQ ID NO: 34485 - RNA, 19 nt, synthetic construct
  source 1..19: mol_type = other RNA
ggagggggtggctgtgaag

SEQ ID NO: 34486 - RNA, 19 nt, synthetic construct
  source 1..19: mol_type = other RNA
gctcacagcccgtggtcac

SEQ ID NO: 34487 - RNA, 19 nt, synthetic construct
  source 1..19: mol_type = other RNA
tggaagagggggtggccac

SEQ ID NO: 34488 - RNA, 19 nt, synthetic construct
  source 1..19: mol_type = other RNA
gctcacagcccgtggtcac

SEQ ID NO: 34489 - RNA, 19 nt, synthetic construct
  source 1..19: mol_type = other RNA
ggagggggtggctgtgaag

SEQ ID NO: 34490 - RNA, 19 nt, synthetic construct
  source 1..19: mol_type = other RNA
atccagtggctgcagttgt

SEQ ID NO: 34491 - RNA, 19 nt, synthetic construct
  source 1..19: mol_type = other RNA
cctgcagtggtcgctgatg

SEQ ID NO: 34492 - RNA, 19 nt, synthetic construct
  source 1..19: mol_type = other RNA
cagcaccagcccctgggcc

SEQ ID NO: 34493 - RNA, 19 nt, synthetic construct
  source 1..19: mol_type = other RNA
ccagcagggtgcggtggca

SEQ ID NO: 34494 - RNA, 19 nt, synthetic construct
  source 1..19: mol_type = other RNA
ccgccctgcacagagcagg

SEQ ID NO: 34495 - RNA, 19 nt, synthetic construct
  source 1..19: mol_type = other RNA
attggcacaggcagcctgg

SEQ ID NO: 34496 - RNA, 19 nt, synthetic construct
  source 1..19: mol_type = other RNA
gaaggtgcccgcggggcag

SEQ ID NO: 34497 - RNA, 19 nt, synthetic construct
  source 1..19: mol_type = other RNA
gctcccaggcagcttagct

SEQ ID NO: 34498 - RNA, 19 nt, synthetic construct
  source 1..19: mol_type = other RNA
cctgcaggtgcaggtgttg

SEQ ID NO: 34499 - RNA, 19 nt, synthetic construct
  source 1..19: mol_type = other RNA
cagctgccttcaaagctgt

SEQ ID NO: 34500 - RNA, 19 nt, synthetic construct
  source 1..19: mol_type = other RNA
cacagtagtcctgggccaa

SEQ ID NO: 34501 - RNA, 19 nt, synthetic construct
  source 1..19: mol_type = other RNA
ggctggtgcctggggccgg

SEQ ID NO: 34502 - RNA, 19 nt, synthetic construct
  source 1..19: mol_type = other RNA
actgcagcagaggacccgg

SEQ ID NO: 34503 - RNA, 19 nt, synthetic construct
  source 1..19: mol_type = other RNA
tgagaacagggcctgggtg

SEQ ID NO: 34504 - RNA, 19 nt, synthetic construct
  source 1..19: mol_type = other RNA
ctgtgcttctcagtgctgg

SEQ ID NO: 34505 - RNA, 19 nt, synthetic construct
  source 1..19: mol_type = other RNA
ctgtgcttctcagtgctgg

SEQ ID NO: 34506 - RNA, 19 nt, synthetic construct
  source 1..19: mol_type = other RNA
ctgtgctgctggtggctgc

SEQ ID NO: 34507 - RNA, 19 nt, synthetic construct
  source 1..19: mol_type = other RNA
caaggtgcctgaggtggcc

SEQ ID NO: 34508 - RNA, 19 nt, synthetic construct
  source 1..19: mol_type = other RNA
ggagggggagctgttcccg

SEQ ID NO: 34509 - RNA, 19 nt, synthetic construct
  source 1..19: mol_type = other RNA
tccttggactggaggagga

SEQ ID NO: 34510 - RNA, 19 nt, synthetic construct
  source 1..19: mol_type = other RNA
cggagtggaggagggggtg

SEQ ID NO: 34511 - RNA, 19 nt, synthetic construct
  source 1..19: mol_type = other RNA
gggagtggctctggagctg

SEQ ID NO: 34512 - RNA, 19 nt, synthetic construct
  source 1..19: mol_type = other RNA
ctgtgcttctcagtgctgg

SEQ ID NO: 34513 - RNA, 19 nt, synthetic construct
  source 1..19: mol_type = other RNA
ctgtgctgctggtggctgc

SEQ ID NO: 34514 - RNA, 19 nt, synthetic construct
  source 1..19: mol_type = other RNA
ctgtgcttctcagtgctgg

SEQ ID NO: 34515 - RNA, 19 nt, synthetic construct
  source 1..19: mol_type = other RNA
gtggccctggttgtggtgg

SEQ ID NO: 34516 - RNA, 19 nt, synthetic construct
  source 1..19: mol_type = other RNA
ctgtgctgctggtggctgc

SEQ ID NO: 34517 - RNA, 19 nt, synthetic construct
  source 1..19: mol_type = other RNA
caaggtgcctgaggtggcc

SEQ ID NO: 34518 - RNA, 19 nt, synthetic construct
  source 1..19: mol_type = other RNA
ggagggggagctgttcccg

SEQ ID NO: 34519 - RNA, 19 nt, synthetic construct
  source 1..19: mol_type = other RNA
tccttggactggaggagga

SEQ ID NO: 34520 - RNA, 19 nt, synthetic construct
  source 1..19: mol_type = other RNA
cggagtggaggagggggtg

SEQ ID NO: 34521 - RNA, 19 nt, synthetic construct
  source 1..19: mol_type = other RNA
gggcagttgcagtccctgg

SEQ ID NO: 34522 - RNA, 19 nt, synthetic construct
  source 1..19: mol_type = other RNA
ctgtgcttctcagtgctgg

SEQ ID NO: 34523 - RNA, 19 nt, synthetic construct
  source 1..19: mol_type = other RNA
tgctggtcagcactggggt

SEQ ID NO: 34524 - RNA, 19 nt, synthetic construct
  source 1..19: mol_type = other RNA
gctttggagctggtggctg

SEQ ID NO: 34525 - RNA, 19 nt, synthetic construct
  source 1..19: mol_type = other RNA
tccttggactggaggagga

SEQ ID NO: 34526 - RNA, 19 nt, synthetic construct
  source 1..19: mol_type = other RNA
actttgggggtgtgagctg

SEQ ID NO: 34527 - RNA, 19 nt, synthetic construct
  source 1..19: mol_type = other RNA
gaaccgtggaggcagtggc

SEQ ID NO: 34528 - RNA, 19 nt, synthetic construct
  source 1..19: mol_type = other RNA
cgagaaaaactgtccaaat

SEQ ID NO: 34529 - RNA, 19 nt, synthetic construct
  source 1..19: mol_type = other RNA
cggcagtggcagaggccgt

SEQ ID NO: 34530 - RNA, 19 nt, synthetic construct
  source 1..19: mol_type = other RNA
gctctgggggcaggtggtt

SEQ ID NO: 34531 - RNA, 19 nt, synthetic construct
  source 1..19: mol_type = other RNA
tcgccctcctcctgggtgc

SEQ ID NO: 34532 - RNA, 19 nt, synthetic construct
  source 1..19: mol_type = other RNA
acagcagtcgccctcctcc

SEQ ID NO: 34533 - RNA, 19 nt, synthetic construct
  source 1..19: mol_type = other RNA
actcaaagccctggggaca

SEQ ID NO: 34534 - RNA, 19 nt, synthetic construct
  source 1..19: mol_type = other RNA
cagcagctggccttgcctg

SEQ ID NO: 34535 - RNA, 19 nt, synthetic construct
  source 1..19: mol_type = other RNA
gcagcagctggccttgcct

SEQ ID NO: 34536 - RNA, 19 nt, synthetic construct
  source 1..19: mol_type = other RNA
ggcagcagctggccttgcc

SEQ ID NO: 34537 - RNA, 19 nt, synthetic construct
  source 1..19: mol_type = other RNA
caggtgctgcacacccgcc

SEQ ID NO: 34538 - RNA, 19 nt, synthetic construct
  source 1..19: mol_type = other RNA
ttgagggggcaggtccggg

SEQ ID NO: 34539 - RNA, 19 nt, synthetic construct
  source 1..19: mol_type = other RNA
gatggtctctccaggcttg

SEQ ID NO: 34540 - RNA, 19 nt, synthetic construct
  source 1..19: mol_type = other RNA
gggggagagcttccagctg

SEQ ID NO: 34541 - RNA, 19 nt, synthetic construct
  source 1..19: mol_type = other RNA
gagaccgggagggccgggc

SEQ ID NO: 34542 - RNA, 19 nt, synthetic construct
  source 1..19: mol_type = other RNA
ccagctcctccagcggcat

SEQ ID NO: 34543 - RNA, 19 nt, synthetic construct
  source 1..19: mol_type = other RNA
cccagctcctccagcggca

SEQ ID NO: 34544 - RNA, 19 nt, synthetic construct
  source 1..19: mol_type = other RNA
cggagtggaggaggggtgg

SEQ ID NO: 34545 - RNA, 19 nt, synthetic construct
  source 1..19: mol_type = other RNA
cggagtggaggaggggtgg

SEQ ID NO: 34546 - RNA, 19 nt, synthetic construct
  source 1..19: mol_type = other RNA
tgtactcaaagccctgggg

SEQ ID NO: 34547 - RNA, 19 nt, synthetic construct
  source 1..19: mol_type = other RNA
ttggccgtgcaggggtcct

SEQ ID NO: 34548 - RNA, 19 nt, synthetic construct
  source 1..19: mol_type = other RNA
tggtgcctggggccgggga

SEQ ID NO: 34549 - RNA, 19 nt, synthetic construct
  source 1..19: mol_type = other RNA
ctgctgggggacagggatc

SEQ ID NO: 34550 - RNA, 19 nt, synthetic construct
  source 1..19: mol_type = other RNA
ttcccggggtggaggacgg

SEQ ID NO: 34551 - RNA, 19 nt, synthetic construct
  source 1..19: mol_type = other RNA
ctgctgggggacagggatc

SEQ ID NO: 34552 - RNA, 19 nt, synthetic construct
  source 1..19: mol_type = other RNA
ttcccggggtggaggacgg

SEQ ID NO: 34553 - RNA, 19 nt, synthetic construct
  source 1..19: mol_type = other RNA
cagttgcaggtgtcaaaca

SEQ ID NO: 34554 - RNA, 19 nt, synthetic construct
  source 1..19: mol_type = other RNA
gggagagcttccagctgtt

SEQ ID NO: 34555 - RNA, 19 nt, synthetic construct
  source 1..19: mol_type = other RNA
tggtggtggagccggtggc

SEQ ID NO: 34556 - RNA, 19 nt, synthetic construct
  source 1..19: mol_type = other RNA
ggggagagcttccagctgt

SEQ ID NO: 34557 - RNA, 19 nt, synthetic construct
  source 1..19: mol_type = other RNA
aaggtggggccgtggagga

SEQ ID NO: 34558 - RNA, 19 nt, synthetic construct
  source 1..19: mol_type = other RNA
tgtgggcagtctctggagt

SEQ ID NO: 34559 - RNA, 19 nt, synthetic construct
  source 1..19: mol_type = other RNA
tggtggtggagccggtggc

SEQ ID NO: 34560 - RNA, 19 nt, synthetic construct
  source 1..19: mol_type = other RNA
gctcacagcccatggtcac

SEQ ID NO: 34561 - RNA, 19 nt, synthetic construct
  source 1..19: mol_type = other RNA
gggaggaggaggggatggc

SEQ ID NO: 34562 - RNA, 19 nt, synthetic construct
  source 1..19: mol_type = other RNA
tggtggtggagccggtggc

SEQ ID NO: 34563 - RNA, 19 nt, synthetic construct
  source 1..19: mol_type = other RNA
gctcacagcccatggtcac

SEQ ID NO: 34564 - RNA, 19 nt, synthetic construct
  source 1..19: mol_type = other RNA
gggaggaggaggggatggc

SEQ ID NO: 34565 - RNA, 19 nt, synthetic construct
  source 1..19: mol_type = other RNA
tgtgggcagtctctggagt

SEQ ID NO: 34566 - RNA, 19 nt, synthetic construct
  source 1..19: mol_type = other RNA
tggtggtggagccggtggc

SEQ ID NO: 34567 - RNA, 19 nt, synthetic construct
  source 1..19: mol_type = other RNA
gggaggaggaggggatggc

SEQ ID NO: 34568 - RNA, 19 nt, synthetic construct
  source 1..19: mol_type = other RNA
tggtggtggagccggtggc

SEQ ID NO: 34569 - RNA, 19 nt, synthetic construct
  source 1..19: mol_type = other RNA
ggttgtggcactcagcaaa

SEQ ID NO: 34570 - RNA, 19 nt, synthetic construct
  source 1..19: mol_type = other RNA
gctggacacatctgggcag

SEQ ID NO: 34571 - RNA, 19 nt, synthetic construct
  source 1..19: mol_type = other RNA
ctgggccgggaagccacgg

SEQ ID NO: 34572 - RNA, 19 nt, synthetic construct
  source 1..19: mol_type = other RNA
aggtgctgcacacccgccc

SEQ ID NO: 34573 - RNA, 19 nt, synthetic construct
  source 1..19: mol_type = other RNA
accccaggtgctgcacacc

SEQ ID NO: 34574 - RNA, 19 nt, synthetic construct
  source 1..19: mol_type = other RNA
aggtcttgtagtggaagtc

SEQ ID NO: 34575 - RNA, 19 nt, synthetic construct
  source 1..19: mol_type = other RNA
gccgtcgaaggtcttgtag

SEQ ID NO: 34576 - RNA, 19 nt, synthetic construct
  source 1..19: mol_type = other RNA
tccagcaccagcccctggg

SEQ ID NO: 34577 - RNA, 19 nt, synthetic construct
  source 1..19: mol_type = other RNA
ctgctccaccaggaggcca

SEQ ID NO: 34578 - RNA, 19 nt, synthetic construct
  source 1..19: mol_type = other RNA
tctgctccaccaggaggcc

SEQ ID NO: 34579 - RNA, 19 nt, synthetic construct
  source 1..19: mol_type = other RNA
atccagctccagcagggca

SEQ ID NO: 34580 - RNA, 19 nt, synthetic construct
  source 1..19: mol_type = other RNA
ccccccggagcaggtgcag

SEQ ID NO: 34581 - RNA, 19 nt, synthetic construct
  source 1..19: mol_type = other RNA
gccccccggagcaggtgca

SEQ ID NO: 34582 - RNA, 19 nt, synthetic construct
  source 1..19: mol_type = other RNA
cagcagctgcagccccagg

SEQ ID NO: 34583 - RNA, 19 nt, synthetic construct
  source 1..19: mol_type = other RNA
ccagcagctgcagccccag

SEQ ID NO: 34584 - RNA, 19 nt, synthetic construct
  source 1..19: mol_type = other RNA
cgtggcctccaccaccccg

SEQ ID NO: 34585 - RNA, 19 nt, synthetic construct
  source 1..19: mol_type = other RNA
cctggcattggcacaggca

SEQ ID NO: 34586 - RNA, 19 nt, synthetic construct
  source 1..19: mol_type = other RNA
aggtgtcaaacatgcagtt

SEQ ID NO: 34587 - RNA, 19 nt, synthetic construct
  source 1..19: mol_type = other RNA
ggaaggtgcccgcggggca

SEQ ID NO: 34588 - RNA, 19 nt, synthetic construct
  source 1..19: mol_type = other RNA
tgcccgccgagctgttgct

SEQ ID NO: 34589 - RNA, 19 nt, synthetic construct
  source 1..19: mol_type = other RNA
ctgatggtctctccaggct

SEQ ID NO: 34590 - RNA, 19 nt, synthetic construct
  source 1..19: mol_type = other RNA
agagcttccagctgttccc

SEQ ID NO: 34591 - RNA, 19 nt, synthetic construct
  source 1..19: mol_type = other RNA
gagagcttccagctgttcc

SEQ ID NO: 34592 - RNA, 19 nt, synthetic construct
  source 1..19: mol_type = other RNA
ggagagcttccagctgttc

SEQ ID NO: 34593 - RNA, 19 nt, synthetic construct
  source 1..19: mol_type = other RNA
ggagggggagagcttccag

SEQ ID NO: 34594 - RNA, 19 nt, synthetic construct
  source 1..19: mol_type = other RNA
agggcgtccgggcaggagg

SEQ ID NO: 34595 - RNA, 19 nt, synthetic construct
  source 1..19: mol_type = other RNA
tggccgtgcaggggtcctt

SEQ ID NO: 34596 - RNA, 19 nt, synthetic construct
  source 1..19: mol_type = other RNA
gggccgtggaggatgctgc

SEQ ID NO: 34597 - RNA, 19 nt, synthetic construct
  source 1..19: mol_type = other RNA
tggggccgtggaggatgct

SEQ ID NO: 34598 - RNA, 19 nt, synthetic construct
  source 1..19: mol_type = other RNA
aggtggggccgtggaggat

SEQ ID NO: 34599 - RNA, 19 nt, synthetic construct
  source 1..19: mol_type = other RNA
gaaggtggggccgtggagg

SEQ ID NO: 34600 - RNA, 19 nt, synthetic construct
  source 1..19: mol_type = other RNA
gtcacagaacaaggggcag

SEQ ID NO: 34601 - RNA, 19 nt, synthetic construct
  source 1..19: mol_type = other RNA
agaccgggagggccgggct

SEQ ID NO: 34602 - RNA, 19 nt, synthetic construct
  source 1..19: mol_type = other RNA
ctggcccagctcctccagc

SEQ ID NO: 34603 - RNA, 19 nt, synthetic construct
  source 1..19: mol_type = other RNA
ctgctggcccagctcctcc

SEQ ID NO: 34604 - RNA, 19 nt, synthetic construct
  source 1..19: mol_type = other RNA
acctgctggcccagctcct

SEQ ID NO: 34605 - RNA, 19 nt, synthetic construct
  source 1..19: mol_type = other RNA
ggtgcctggggccggggag

SEQ ID NO: 34606 - RNA, 19 nt, synthetic construct
  source 1..19: mol_type = other RNA
agggctggtgcctggggcc

SEQ ID NO: 34607 - RNA, 19 nt, synthetic construct
  source 1..19: mol_type = other RNA
gagggctggtgcctggggc

SEQ ID NO: 34608 - RNA, 19 nt, synthetic construct
  source 1..19: mol_type = other RNA
tgctggccgggggagccct

SEQ ID NO: 34609 - RNA, 19 nt, synthetic construct
  source 1..19: mol_type = other RNA
tgggtggctgtgaggggcg

SEQ ID NO: 34610 - RNA, 19 nt, synthetic construct
  source 1..19: mol_type = other RNA
gtggaggtcggggtggccg

SEQ ID NO: 34611 - RNA, 19 nt, synthetic construct
  source 1..19: mol_type = other RNA
agctggtgactgtgggtgt

SEQ ID NO: 34612 - RNA, 19 nt, synthetic construct
  source 1..19: mol_type = other RNA
gggtggaggagggggtggc

SEQ ID NO: 34613 - RNA, 19 nt, synthetic construct
  source 1..19: mol_type = other RNA
ggggtggaggagggggtgg

SEQ ID NO: 34614 - RNA, 19 nt, synthetic construct
  source 1..19: mol_type = other RNA
tggggtggaggagggggtg

SEQ ID NO: 34615 - RNA, 19 nt, synthetic construct
  source 1..19: mol_type = other RNA
agttgtggtggtggtggtc

SEQ ID NO: 34616 - RNA, 19 nt, synthetic construct
  source 1..19: mol_type = other RNA
cagttgtggtggtggtggt

SEQ ID NO: 34617 - RNA, 19 nt, synthetic construct
  source 1..19: mol_type = other RNA
ccacagttgtggtggtggt

SEQ ID NO: 34618 - RNA, 19 nt, synthetic construct
  source 1..19: mol_type = other RNA
tgtggtggcggtggtggtc

SEQ ID NO: 34619 - RNA, 19 nt, synthetic construct
  source 1..19: mol_type = other RNA
agctggtgactgtgggtgt

SEQ ID NO: 34620 - RNA, 19 nt, synthetic construct
  source 1..19: mol_type = other RNA
cccagggaggaggagggga

SEQ ID NO: 34621 - RNA, 19 nt, synthetic construct
  source 1..19: mol_type = other RNA
gggtggaggagggggtggc

SEQ ID NO: 34622 - RNA, 19 nt, synthetic construct
  source 1..19: mol_type = other RNA
ggggtggaggagggggtgg

SEQ ID NO: 34623 - RNA, 19 nt, synthetic construct
  source 1..19: mol_type = other RNA
tggggtggaggagggggtg

SEQ ID NO: 34624 - RNA, 19 nt, synthetic construct
  source 1..19: mol_type = other RNA
agttgtggtggtggtggtc

SEQ ID NO: 34625 - RNA, 19 nt, synthetic construct
  source 1..19: mol_type = other RNA
cagttgtggtggtggtggt

SEQ ID NO: 34626 - RNA, 19 nt, synthetic construct
  source 1..19: mol_type = other RNA
ccacagttgtggtggtggt

SEQ ID NO: 34627 - RNA, 19 nt, synthetic construct
  source 1..19: mol_type = other RNA
tgtggtggcggtggtggtc

SEQ ID NO: 34628 - RNA, 19 nt, synthetic construct
  source 1..19: mol_type = other RNA
ggttgctgctggggtgtgg

SEQ ID NO: 34629 - RNA, 19 nt, synthetic construct
  source 1..19: mol_type = other RNA
gttcccggggtggaggacg

SEQ ID NO: 34630 - RNA, 19 nt, synthetic construct
  source 1..19: mol_type = other RNA
agtggaggagggggtggac

SEQ ID NO: 34631 - RNA, 19 nt, synthetic construct
  source 1..19: mol_type = other RNA
gggtggaggagggggtggc

SEQ ID NO: 34632 - RNA, 19 nt, synthetic construct
  source 1..19: mol_type = other RNA
ggggtggaggagggggtgg

SEQ ID NO: 34633 - RNA, 19 nt, synthetic construct
  source 1..19: mol_type = other RNA
tggggtggaggagggggtg

SEQ ID NO: 34634 - RNA, 19 nt, synthetic construct
  source 1..19: mol_type = other RNA
agttgtggtggtggtggtc

SEQ ID NO: 34635 - RNA, 19 nt, synthetic construct
  source 1..19: mol_type = other RNA
cagttgtggtggtggtggt

SEQ ID NO: 34636 - RNA, 19 nt, synthetic construct
  source 1..19: mol_type = other RNA
ccacagttgtggtggtggt

SEQ ID NO: 34637 - RNA, 19 nt, synthetic construct
  source 1..19: mol_type = other RNA
tgtggtggcggtggtggtc

SEQ ID NO: 34638 - RNA, 19 nt, synthetic construct
  source 1..19: mol_type = other RNA
ggttgctgctggggtgtgg

SEQ ID NO: 34639 - RNA, 19 nt, synthetic construct
  source 1..19: mol_type = other RNA
gtgtggctgtggctgtggt

SEQ ID NO: 34640 - RNA, 19 nt, synthetic construct
  source 1..19: mol_type = other RNA
ggtgtggctgtggctgtgg

SEQ ID NO: 34641 - RNA, 19 nt, synthetic construct
  source 1..19: mol_type = other RNA
agctggtgactgtgggtgt

SEQ ID NO: 34642 - RNA, 19 nt, synthetic construct
  source 1..19: mol_type = other RNA
cccagggaggaggagggga

SEQ ID NO: 34643 - RNA, 19 nt, synthetic construct
  source 1..19: mol_type = other RNA
agttgtggtggtggtggtc

SEQ ID NO: 34644 - RNA, 19 nt, synthetic construct
  source 1..19: mol_type = other RNA
cagttgtggtggtggtggt

SEQ ID NO: 34645 - RNA, 19 nt, synthetic construct
  source 1..19: mol_type = other RNA
ccacagttgtggtggtggt

SEQ ID NO: 34646 - RNA, 19 nt, synthetic construct
  source 1..19: mol_type = other RNA
tgtggtggcggtggtggtc

SEQ ID NO: 34647 - RNA, 19 nt, synthetic construct
  source 1..19: mol_type = other RNA
ggttgctgctggggtgtgg

SEQ ID NO: 34648 - RNA, 19 nt, synthetic construct
  source 1..19: mol_type = other RNA
gttcccggggtggaggacg

SEQ ID NO: 34649 - RNA, 19 nt, synthetic construct
  source 1..19: mol_type = other RNA
gtggacatggtggccacgg

SEQ ID NO: 34650 - RNA, 19 nt, synthetic construct
  source 1..19: mol_type = other RNA
agtggaggagggggtggac

SEQ ID NO: 34651 - RNA, 19 nt, synthetic construct
  source 1..19: mol_type = other RNA
agctggtgactgtgggtgt

SEQ ID NO: 34652 - RNA, 19 nt, synthetic construct
  source 1..19: mol_type = other RNA
cccagggaggaggagggga

SEQ ID NO: 34653 - RNA, 19 nt, synthetic construct
  source 1..19: mol_type = other RNA
gggtggaggagggggtggc

SEQ ID NO: 34654 - RNA, 19 nt, synthetic construct
  source 1..19: mol_type = other RNA
ggggtggaggagggggtgg

SEQ ID NO: 34655 - RNA, 19 nt, synthetic construct
  source 1..19: mol_type = other RNA
tggggtggaggagggggtg

SEQ ID NO: 34656 - RNA, 19 nt, synthetic construct
  source 1..19: mol_type = other RNA
agttgtggtggtggtggtc

SEQ ID NO: 34657 - RNA, 19 nt, synthetic construct
  source 1..19: mol_type = other RNA
cagttgtggtggtggtggt

SEQ ID NO: 34658 - RNA, 19 nt, synthetic construct
  source 1..19: mol_type = other RNA
ccacagttgtggtggtggt

SEQ ID NO: 34659 - RNA, 19 nt, synthetic construct
  source 1..19: mol_type = other RNA
catggtggctgtggtggtc

SEQ ID NO: 34660 - RNA, 19 nt, synthetic construct
  source 1..19: mol_type = other RNA
cggcagcggcagtggcaga

SEQ ID NO: 34661 - RNA, 19 nt, synthetic construct
  source 1..19: mol_type = other RNA
gcggcagcggcagtggcag

SEQ ID NO: 34662 - RNA, 19 nt, synthetic construct
  source 1..19: mol_type = other RNA
agggcgcgggggcagcggg

SEQ ID NO: 34663 - RNA, 19 nt, synthetic construct
  source 1..19: mol_type = other RNA
agggcagaagcagccctcc

SEQ ID NO: 34664 - RNA, 19 nt, synthetic construct
  source 1..19: mol_type = other RNA
gaggatctggtcctcaggg

SEQ ID NO: 34665 - RNA, 19 nt, synthetic construct
  source 1..19: mol_type = other RNA
acagctgaggtctgcagcg

SEQ ID NO: 34666 - RNA, 19 nt, synthetic construct
  source 1..19: mol_type = other RNA
gtactcaaagccctgggga

SEQ ID NO: 34667 - RNA, 19 nt, synthetic construct
  source 1..19: mol_type = other RNA
ttgtactcaaagccctggg

SEQ ID NO: 34668 - RNA, 19 nt, synthetic construct
  source 1..19: mol_type = other RNA
cattcagctggactggctg

SEQ ID NO: 34669 - RNA, 19 nt, synthetic construct
  source 1..19: mol_type = other RNA
cctgggccgggaagccacg

SEQ ID NO: 34670 - RNA, 19 nt, synthetic construct
  source 1..19: mol_type = other RNA
agtgacatcagggaggggc

SEQ ID NO: 34671 - RNA, 19 nt, synthetic construct
  source 1..19: mol_type = other RNA
ggactgctgtggtgctggc

SEQ ID NO: 34672 - RNA, 19 nt, synthetic construct
  source 1..19: mol_type = other RNA
cccggagtggaggaggggg

SEQ ID NO: 34673 - RNA, 19 nt, synthetic construct
  source 1..19: mol_type = other RNA
cccggagtggaggaggggg

SEQ ID NO: 34674 - RNA, 19 nt, synthetic construct
  source 1..19: mol_type = other RNA
tggggggacggggacgggc

SEQ ID NO: 34675 - RNA, 19 nt, synthetic construct
  source 1..19: mol_type = other RNA
caggagggggagagcttcc

SEQ ID NO: 34676 - RNA, 19 nt, synthetic construct
  source 1..19: mol_type = other RNA
cccagggaggaagagggga

SEQ ID NO: 34677 - RNA, 19 nt, synthetic construct
  source 1..19: mol_type = other RNA
gggaggaagaggggatggc

SEQ ID NO: 34678 - RNA, 19 nt, synthetic construct
  source 1..19: mol_type = other RNA
cccagggaggaagagggga

SEQ ID NO: 34679 - RNA, 19 nt, synthetic construct
  source 1..19: mol_type = other RNA
gcaggagggggagagcttc

SEQ ID NO: 34680 - RNA, 19 nt, synthetic construct
  source 1..19: mol_type = other RNA
agctgcagccccaggcctg

SEQ ID NO: 34681 - RNA, 19 nt, synthetic construct
  source 1..19: mol_type = other RNA
caccacctctccaggagcc

SEQ ID NO: 34682 - RNA, 19 nt, synthetic construct
  source 1..19: mol_type = other RNA
cgaaggtggggccgtggag

SEQ ID NO: 34683 - RNA, 19 nt, synthetic construct
  source 1..19: mol_type = other RNA
cctggggtggaggaggggg

SEQ ID NO: 34684 - RNA, 19 nt, synthetic construct
  source 1..19: mol_type = other RNA
cctggggtggaggaggggg

SEQ ID NO: 34685 - RNA, 19 nt, synthetic construct
  source 1..19: mol_type = other RNA
cctggggtggaggaggggg

SEQ ID NO: 34686 - RNA, 19 nt, synthetic construct
  source 1..19: mol_type = other RNA
cctggggtggaggaggggg

SEQ ID NO: 34687 - RNA, 19 nt, synthetic construct
  source 1..19: mol_type = other RNA
atggggtgggggtgggtgt

SEQ ID NO: 34688 - RNA, 19 nt, synthetic construct
  source 1..19: mol_type = other RNA
acagcagtggcctcctggg

SEQ ID NO: 34689 - RNA, 19 nt, synthetic construct
  source 1..19: mol_type = other RNA
agttgtggtggccgtggcg

SEQ ID NO: 34690 - RNA, 19 nt, synthetic construct
  source 1..19: mol_type = other RNA
ggttgtggtggccgtggcg

SEQ ID NO: 34691 - RNA, 19 nt, synthetic construct
  source 1..19: mol_type = other RNA
agtgctgggctctgtgagg

SEQ ID NO: 34692 - RNA, 19 nt, synthetic construct
  source 1..19: mol_type = other RNA
ggggttggtggtggagccg

SEQ ID NO: 34693 - RNA, 19 nt, synthetic construct
  source 1..19: mol_type = other RNA
ggggttggtggtggagccg

SEQ ID NO: 34694 - RNA, 19 nt, synthetic construct
  source 1..19: mol_type = other RNA
ggggttggtggtggagccg

SEQ ID NO: 34695 - RNA, 19 nt, synthetic construct
  source 1..19: mol_type = other RNA
ggggttggtggtggagccg

SEQ ID NO: 34696 - RNA, 19 nt, synthetic construct
  source 1..19: mol_type = other RNA
ggggttggtggtggagccg

SEQ ID NO: 34697 - RNA, 19 nt, synthetic construct
  source 1..19: mol_type = other RNA
tggcagttgctgacccacc

SEQ ID NO: 34698 - RNA, 19 nt, synthetic construct
  source 1..19: mol_type = other RNA
gctgcagccccaggcctgt

SEQ ID NO: 34699 - RNA, 19 nt, synthetic construct
  source 1..19: mol_type = other RNA
cctcccaggccgggctctg

SEQ ID NO: 34700 - RNA, 19 nt, synthetic construct
  source 1..19: mol_type = other RNA
accagcagctgcagcccca

SEQ ID NO: 34701 - RNA, 19 nt, synthetic construct
  source 1..19: mol_type = other RNA
ccagggaggaggaggggat

SEQ ID NO: 34702 - RNA, 19 nt, synthetic construct
  source 1..19: mol_type = other RNA
ccagggaggaggaggggat

SEQ ID NO: 34703 - RNA, 19 nt, synthetic construct
  source 1..19: mol_type = other RNA
ccagggaggaggaggggat

SEQ ID NO: 34704 - RNA, 19 nt, synthetic construct
  source 1..19: mol_type = other RNA
ccggcactctatgctcttt

SEQ ID NO: 34705 - RNA, 19 nt, synthetic construct
  source 1..19: mol_type = other RNA
ccgcccggcactctatgct

SEQ ID NO: 34706 - RNA, 19 nt, synthetic construct
  source 1..19: mol_type = other RNA
ggcgcactggcgtgagtat

SEQ ID NO: 34707 - RNA, 19 nt, synthetic construct
  source 1..19: mol_type = other RNA
tgcttacctcggggtagtt

SEQ ID NO: 34708 - RNA, 19 nt, synthetic construct
  source 1..19: mol_type = other RNA
gcttacctcggggtagttc

SEQ ID NO: 34709 - RNA, 19 nt, synthetic construct
  source 1..19: mol_type = other RNA
tgtgcgttgaagaggatct

SEQ ID NO: 34710 - RNA, 19 nt, synthetic construct
  source 1..19: mol_type = other RNA
tcggctttgtgaggatcca

SEQ ID NO: 34711 - RNA, 19 nt, synthetic construct
  source 1..19: mol_type = other RNA
tcgtgttgatgcggacttg

SEQ ID NO: 34712 - RNA, 19 nt, synthetic construct
  source 1..19: mol_type = other RNA
catcgggtcccacgcaggg

SEQ ID NO: 34713 - RNA, 19 nt, synthetic construct
  source 1..19: mol_type = other RNA
gttacgaagccgggacggt

SEQ ID NO: 34714 - RNA, 19 nt, synthetic construct
  source 1..19: mol_type = other RNA
ccgcatggcttgtacactt

SEQ ID NO: 34715 - RNA, 19 nt, synthetic construct
  source 1..19: mol_type = other RNA
agccggctcggtcggtctt

SEQ ID NO: 34716 - RNA, 19 nt, synthetic construct
  source 1..19: mol_type = other RNA
gatccgggtcgtccccaga

SEQ ID NO: 34717 - RNA, 19 nt, synthetic construct
  source 1..19: mol_type = other RNA
accgctttcaggcagttct

SEQ ID NO: 34718 - RNA, 19 nt, synthetic construct
  source 1..19: mol_type = other RNA
acctcggggtagttctccg

SEQ ID NO: 34719 - RNA, 19 nt, synthetic construct
  source 1..19: mol_type = other RNA
tgaagtggccatccccgta

SEQ ID NO: 34720 - RNA, 19 nt, synthetic construct
  source 1..19: mol_type = other RNA
tcggggtagttctccgccc

SEQ ID NO: 34721 - RNA, 19 nt, synthetic construct
  source 1..19: mol_type = other RNA
tagttctccgcccggcact

SEQ ID NO: 34722 - RNA, 19 nt, synthetic construct
  source 1..19: mol_type = other RNA
gcccggcactctatgctct

SEQ ID NO: 34723 - RNA, 19 nt, synthetic construct
  source 1..19: mol_type = other RNA
gggtagttctccgcccggc

SEQ ID NO: 34724 - RNA, 19 nt, synthetic construct
  source 1..19: mol_type = other RNA
ggggtagttctccgcccgg

SEQ ID NO: 34725 - RNA, 19 nt, synthetic construct
  source 1..19: mol_type = other RNA
cccggcactctatgctctt

SEQ ID NO: 34726 - RNA, 19 nt, synthetic construct
  source 1..19: mol_type = other RNA
cggggtagttctccgcccg

SEQ ID NO: 34727 - RNA, 19 nt, synthetic construct
  source 1..19: mol_type = other RNA
ctccgcccggcactctatg

SEQ ID NO: 34728 - RNA, 19 nt, synthetic construct
  source 1..19: mol_type = other RNA
ctcggggtagttctccgcc

SEQ ID NO: 34729 - RNA, 19 nt, synthetic construct
  source 1..19: mol_type = other RNA
tgtagttgaagcacatgtt

SEQ ID NO: 34730 - RNA, 19 nt, synthetic construct
  source 1..19: mol_type = other RNA
gagcgcactggatgccact

SEQ ID NO: 34731 - RNA, 19 nt, synthetic construct
  source 1..19: mol_type = other RNA
aaagtttccatgtccccgc

SEQ ID NO: 34732 - RNA, 19 nt, synthetic construct
  source 1..19: mol_type = other RNA
gcactctatgctctttggt

SEQ ID NO: 34733 - RNA, 19 nt, synthetic construct
  source 1..19: mol_type = other RNA
cgcccggcactctatgctc

SEQ ID NO: 34734 - RNA, 19 nt, synthetic construct
  source 1..19: mol_type = other RNA
tccgcccggcactctatgc

SEQ ID NO: 34735 - RNA, 19 nt, synthetic construct
  source 1..19: mol_type = other RNA
gtagttctccgcccggcac

SEQ ID NO: 34736 - RNA, 19 nt, synthetic construct
  source 1..19: mol_type = other RNA
ggtagttctccgcccggca

SEQ ID NO: 34737 - RNA, 19 nt, synthetic construct
  source 1..19: mol_type = other RNA
tgttgaacctgcctgtctg

SEQ ID NO: 34738 - RNA, 19 nt, synthetic construct
  source 1..19: mol_type = other RNA
aagcacatgttgaacctgc

SEQ ID NO: 34739 - RNA, 19 nt, synthetic construct
  source 1..19: mol_type = other RNA
ttgtagttgaagcacatgt

SEQ ID NO: 34740 - RNA, 19 nt, synthetic construct
  source 1..19: mol_type = other RNA
gtggctgtagtcgtcacag

SEQ ID NO: 34741 - RNA, 19 nt, synthetic construct
  source 1..19: mol_type = other RNA
cagtggctgtagtcgtcac

SEQ ID NO: 34742 - RNA, 19 nt, synthetic construct
  source 1..19: mol_type = other RNA
ggggcagtggctgtagtcg

SEQ ID NO: 34743 - RNA, 19 nt, synthetic construct
  source 1..19: mol_type = other RNA
ctctatgctctttggtgcc

SEQ ID NO: 34744 - RNA, 19 nt, synthetic construct
  source 1..19: mol_type = other RNA
tggtgcccagcacatcttg

SEQ ID NO: 34745 - RNA, 19 nt, synthetic construct
  source 1..19: mol_type = other RNA
actctatgctctttggtgc

SEQ ID NO: 34746 - RNA, 19 nt, synthetic construct
  source 1..19: mol_type = other RNA
actgacaccggggctggca

SEQ ID NO: 34747 - RNA, 19 nt, synthetic construct
  source 1..19: mol_type = other RNA
gttgaacctgcctgtctgg

SEQ ID NO: 34748 - RNA, 19 nt, synthetic construct
  source 1..19: mol_type = other RNA
cagcacatcttgcccccag

SEQ ID NO: 34749 - RNA, 19 nt, synthetic construct
  source 1..19: mol_type = other RNA
ggtgcccagcacatcttgc

SEQ ID NO: 34750 - RNA, 19 nt, synthetic construct
  source 1..19: mol_type = other RNA
gcacatcttgcccccagca

SEQ ID NO: 34751 - RNA, 19 nt, synthetic construct
  source 1..19: mol_type = other RNA
agcacatcttgcccccagc

SEQ ID NO: 34752 - RNA, 19 nt, synthetic construct
  source 1..19: mol_type = other RNA
agtggctgtagtcgtcaca

SEQ ID NO: 34753 - RNA, 19 nt, synthetic construct
  source 1..19: mol_type = other RNA
gcagtggctgtagtcgtca

SEQ ID NO: 34754 - RNA, 19 nt, synthetic construct
  source 1..19: mol_type = other RNA
acgcagtgtgtgctgaaac

SEQ ID NO: 34755 - RNA, 19 nt, synthetic construct
  source 1..19: mol_type = other RNA
tcgtagcagccacactggg

SEQ ID NO: 34756 - RNA, 19 nt, synthetic construct
  source 1..19: mol_type = other RNA
aagtttccatgtccccgcc

SEQ ID NO: 34757 - RNA, 19 nt, synthetic construct
  source 1..19: mol_type = other RNA
catgttgaacctgcctgtc

SEQ ID NO: 34758 - RNA, 19 nt, synthetic construct
  source 1..19: mol_type = other RNA
cacatgttgaacctgcctg

SEQ ID NO: 34759 - RNA, 19 nt, synthetic construct
  source 1..19: mol_type = other RNA
agcacatgttgaacctgcc

SEQ ID NO: 34760 - RNA, 19 nt, synthetic construct
  source 1..19: mol_type = other RNA
gttgaagcacatgttgaac

SEQ ID NO: 34761 - RNA, 19 nt, synthetic construct
  source 1..19: mol_type = other RNA
tagttgaagcacatgttga

SEQ ID NO: 34762 - RNA, 19 nt, synthetic construct
  source 1..19: mol_type = other RNA
cggcactctatgctctttg

SEQ ID NO: 34763 - RNA, 19 nt, synthetic construct
  source 1..19: mol_type = other RNA
cccagcagccctgatgttt

SEQ ID NO: 34764 - RNA, 19 nt, synthetic construct
  source 1..19: mol_type = other RNA
cactgacaccggggctggc

SEQ ID NO: 34765 - RNA, 19 nt, synthetic construct
  source 1..19: mol_type = other RNA
tgctctttggtgcccagca

SEQ ID NO: 34766 - RNA, 19 nt, synthetic construct
  source 1..19: mol_type = other RNA
gcacatgttgaacctgcct

SEQ ID NO: 34767 - RNA, 19 nt, synthetic construct
  source 1..19: mol_type = other RNA
agttgaagcacatgttgaa

SEQ ID NO: 34768 - RNA, 19 nt, synthetic construct
  source 1..19: mol_type = other RNA
agtgcggctgtaaggcagc

SEQ ID NO: 34769 - RNA, 19 nt, synthetic construct
  source 1..19: mol_type = other RNA
tggacagaacgtagctgca

SEQ ID NO: 34770 - RNA, 19 nt, synthetic construct
  source 1..19: mol_type = other RNA
gtaggactcaacgtcccct

SEQ ID NO: 34771 - RNA, 19 nt, synthetic construct
  source 1..19: mol_type = other RNA
cagtgccgggcgtagttct

SEQ ID NO: 34772 - RNA, 19 nt, synthetic construct
  source 1..19: mol_type = other RNA
ctcgagggtgtgaacaggg

SEQ ID NO: 34773 - RNA, 19 nt, synthetic construct
  source 1..19: mol_type = other RNA
gcacgccgttcttgctgaa

SEQ ID NO: 34774 - RNA, 19 nt, synthetic construct
  source 1..19: mol_type = other RNA
aaggctgtgagcgcactgg

SEQ ID NO: 34775 - RNA, 19 nt, synthetic construct
  source 1..19: mol_type = other RNA
gacagtgacgggtggaaca

SEQ ID NO: 34776 - RNA, 19 nt, synthetic construct
  source 1..19: mol_type = other RNA
ccgtgggtgcaggggcact

SEQ ID NO: 34777 - RNA, 19 nt, synthetic construct
  source 1..19: mol_type = other RNA
atgttggctgccgacaggg

SEQ ID NO: 34778 - RNA, 19 nt, synthetic construct
  source 1..19: mol_type = other RNA
ctgctcacagacggcccct

SEQ ID NO: 34779 - RNA, 19 nt, synthetic construct
  source 1..19: mol_type = other RNA
ctgctcacagacggcccct

SEQ ID NO: 34780 - RNA, 19 nt, synthetic construct
  source 1..19: mol_type = other RNA
ctgctcacagacggcccct

SEQ ID NO: 34781 - RNA, 19 nt, synthetic construct
  source 1..19: mol_type = other RNA
ccatccaacttctgcaggt

SEQ ID NO: 34782 - RNA, 19 nt, synthetic construct
  source 1..19: mol_type = other RNA
ggcagcgggtccgggcact

SEQ ID NO: 34783 - RNA, 19 nt, synthetic construct
  source 1..19: mol_type = other RNA
atcctgtagttgtagcaca

SEQ ID NO: 34784 - RNA, 19 nt, synthetic construct
  source 1..19: mol_type = other RNA
gcggctgtaaggcagctcc

SEQ ID NO: 34785 - RNA, 19 nt, synthetic construct
  source 1..19: mol_type = other RNA
ttacagctctggcagttct

SEQ ID NO: 34786 - RNA, 19 nt, synthetic construct
  source 1..19: mol_type = other RNA
caccgtgcctggggggcag

SEQ ID NO: 34787 - RNA, 19 nt, synthetic construct
  source 1..19: mol_type = other RNA
gtagttgaagcacatgttg

SEQ ID NO: 34788 - RNA, 19 nt, synthetic construct
  source 1..19: mol_type = other RNA
gtcccacaggggatgttct

SEQ ID NO: 34789 - RNA, 19 nt, synthetic construct
  source 1..19: mol_type = other RNA
gtagcagccacactgggcc

SEQ ID NO: 34790 - RNA, 19 nt, synthetic construct
  source 1..19: mol_type = other RNA
ccctggtgggcggggtcca

SEQ ID NO: 34791 - RNA, 19 nt, synthetic construct
  source 1..19: mol_type = other RNA
caaaggccggccccagcag

SEQ ID NO: 34792 - RNA, 19 nt, synthetic construct
  source 1..19: mol_type = other RNA
ggcatagaactcgttgaag

SEQ ID NO: 34793 - RNA, 19 nt, synthetic construct
  source 1..19: mol_type = other RNA
acacgcagtgtgtgctgaa

SEQ ID NO: 34794 - RNA, 19 nt, synthetic construct
  source 1..19: mol_type = other RNA
ccccccgcgtgggcgcact

SEQ ID NO: 34795 - RNA, 19 nt, synthetic construct
  source 1..19: mol_type = other RNA
actgtccaaatgccctgca

SEQ ID NO: 34796 - RNA, 19 nt, synthetic construct
  source 1..19: mol_type = other RNA
aaaccactctgtccactga

SEQ ID NO: 34797 - RNA, 19 nt, synthetic construct
  source 1..19: mol_type = other RNA
tgtcgtggagtgggggacc

SEQ ID NO: 34798 - RNA, 19 nt, synthetic construct
  source 1..19: mol_type = other RNA
tggtcgatgcttacctcgg

SEQ ID NO: 34799 - RNA, 19 nt, synthetic construct
  source 1..19: mol_type = other RNA
cgatgcttacctcggggta

SEQ ID NO: 34800 - RNA, 19 nt, synthetic construct
  source 1..19: mol_type = other RNA
tcgatgcttacctcggggt

SEQ ID NO: 34801 - RNA, 19 nt, synthetic construct
  source 1..19: mol_type = other RNA
ggtcgatgcttacctcggg

SEQ ID NO: 34802 - RNA, 19 nt, synthetic construct
  source 1..19: mol_type = other RNA
gacagtcgtccctctggtt

SEQ ID NO: 34803 - RNA, 19 nt, synthetic construct
  source 1..19: mol_type = other RNA
gatgcttacctcggggtag

SEQ ID NO: 34804 - RNA, 19 nt, synthetic construct
  source 1..19: mol_type = other RNA
tacctcggggtagttctcc

SEQ ID NO: 34805 - RNA, 19 nt, synthetic construct
  source 1..19: mol_type = other RNA
ttacctcggggtagttctc

SEQ ID NO: 34806 - RNA, 19 nt, synthetic construct
  source 1..19: mol_type = other RNA
atgcttacctcggggtagt

SEQ ID NO: 34807 - RNA, 19 nt, synthetic construct
  source 1..19: mol_type = other RNA
ccccgtctccaggctgcag

SEQ ID NO: 34808 - RNA, 19 nt, synthetic construct
  source 1..19: mol_type = other RNA
ctggtcgatgcttacctcg

SEQ ID NO: 34809 - RNA, 19 nt, synthetic construct
  source 1..19: mol_type = other RNA
tgtgaggatccaggtcgtc

SEQ ID NO: 34810 - RNA, 19 nt, synthetic construct
  source 1..19: mol_type = other RNA
tgtgaggatccaggtcgtc

SEQ ID NO: 34811 - RNA, 19 nt, synthetic construct
  source 1..19: mol_type = other RNA
tgtgaggatccaggtcgtc

SEQ ID NO: 34812 - RNA, 19 nt, synthetic construct
  source 1..19: mol_type = other RNA
tgtgaggatccaggtcgtc

SEQ ID NO: 34813 - RNA, 19 nt, synthetic construct
  source 1..19: mol_type = other RNA
tgtgaggatccaggtcgtc

SEQ ID NO: 34814 - RNA, 19 nt, synthetic construct
  source 1..19: mol_type = other RNA
tgtgaggatccaggtcgtc

SEQ ID NO: 34815 - RNA, 19 nt, synthetic construct
  source 1..19: mol_type = other RNA
tgtgaggatccaggtcgtc

SEQ ID NO: 34816 - RNA, 19 nt, synthetic construct
  source 1..19: mol_type = other RNA
aaaactgggctgggttgag

SEQ ID NO: 34817 - RNA, 19 nt, synthetic construct
  source 1..19: mol_type = other RNA
gtcgatgcttacctcgggg

SEQ ID NO: 34818 - RNA, 19 nt, synthetic construct
  source 1..19: mol_type = other RNA
ctttggaactggtggctgt

SEQ ID NO: 34819 - RNA, 19 nt, synthetic construct
  source 1..19: mol_type = other RNA
ctttggaactggtggctgt

SEQ ID NO: 34820 - RNA, 19 nt, synthetic construct
  source 1..19: mol_type = other RNA
gttccagggcgtcccagtg

SEQ ID NO: 34821 - RNA, 19 nt, synthetic construct
  source 1..19: mol_type = other RNA
cttacctcggggtagttct

SEQ ID NO: 34822 - RNA, 19 nt, synthetic construct
  source 1..19: mol_type = other RNA
tggctcgggtccgacactt

SEQ ID NO: 34823 - RNA, 19 nt, synthetic construct
  source 1..19: mol_type = other RNA
gtgaggatccaggtcgtcc

SEQ ID NO: 34824 - RNA, 19 nt, synthetic construct
  source 1..19: mol_type = other RNA
gtgaggatccaggtcgtcc

SEQ ID NO: 34825 - RNA, 19 nt, synthetic construct
  source 1..19: mol_type = other RNA
gtgaggatccaggtcgtcc

SEQ ID NO: 34826 - RNA, 19 nt, synthetic construct
  source 1..19: mol_type = other RNA
gtgaggatccaggtcgtcc

SEQ ID NO: 34827 - RNA, 19 nt, synthetic construct
  source 1..19: mol_type = other RNA
gtgaggatccaggtcgtcc

SEQ ID NO: 34828 - RNA, 19 nt, synthetic construct
  source 1..19: mol_type = other RNA
gtgaggatccaggtcgtcc

SEQ ID NO: 34829 - RNA, 19 nt, synthetic construct
  source 1..19: mol_type = other RNA
atttcatagttgaagcaca

SEQ ID NO: 34830 - RNA, 19 nt, synthetic construct
  source 1..19: mol_type = other RNA
atttcatagttgaagcaca

SEQ ID NO: 34831 - RNA, 19 nt, synthetic construct
  source 1..19: mol_type = other RNA
atttcatagttgaagcaca

SEQ ID NO: 34832 - RNA, 19 nt, synthetic construct
  source 1..19: mol_type = other RNA
atttcatagttgaagcaca

SEQ ID NO: 34833 - RNA, 19 nt, synthetic construct
  source 1..19: mol_type = other RNA
cgtccccagagtggaggag

SEQ ID NO: 34834 - RNA, 19 nt, synthetic construct
  source 1..19: mol_type = other RNA
tcgtccccagagtggagga

SEQ ID NO: 34835 - RNA, 19 nt, synthetic construct
  source 1..19: mol_type = other RNA
gccttgatgacaacacggg

SEQ ID NO: 34836 - RNA, 19 nt, synthetic construct
  source 1..19: mol_type = other RNA
gttgtggtagtcagcactt

SEQ ID NO: 34837 - RNA, 19 nt, synthetic construct
  source 1..19: mol_type = other RNA
ccgtggtggtaagcactgt

SEQ ID NO: 34838 - RNA, 19 nt, synthetic construct
  source 1..19: mol_type = other RNA
ccgtggtggtaagcactgt

SEQ ID NO: 34839 - RNA, 19 nt, synthetic construct
  source 1..19: mol_type = other RNA
gtggatgcagtcgtagtgg

SEQ ID NO: 34840 - RNA, 19 nt, synthetic construct
  source 1..19: mol_type = other RNA
cttcgttcttgcaggtcag

SEQ ID NO: 34841 - RNA, 19 nt, synthetic construct
  source 1..19: mol_type = other RNA
cagtggacgcagtcgtagt

SEQ ID NO: 34842 - RNA, 19 nt, synthetic construct
  source 1..19: mol_type = other RNA
cagtggacgcagtcgtagt

SEQ ID NO: 34843 - RNA, 19 nt, synthetic construct
  source 1..19: mol_type = other RNA
acctgcccgacctggtcga

SEQ ID NO: 34844 - RNA, 19 nt, synthetic construct
  source 1..19: mol_type = other RNA
gcccgacctggtcgatgct

SEQ ID NO: 34845 - RNA, 19 nt, synthetic construct
  source 1..19: mol_type = other RNA
ctgcctgtctggtcttcgt

SEQ ID NO: 34846 - RNA, 19 nt, synthetic construct
  source 1..19: mol_type = other RNA
caaagcacacgcacgttgt

SEQ ID NO: 34847 - RNA, 19 nt, synthetic construct
  source 1..19: mol_type = other RNA
tcttcgttcttgcaggtca

SEQ ID NO: 34848 - RNA, 19 nt, synthetic construct
  source 1..19: mol_type = other RNA
aaagcacacgcacgttgta

SEQ ID NO: 34849 - RNA, 19 nt, synthetic construct
  source 1..19: mol_type = other RNA
gtagtcgtcacagcaaagc

SEQ ID NO: 34850 - RNA, 19 nt, synthetic construct
  source 1..19: mol_type = other RNA
ctcagtcgtagtggctgtt

SEQ ID NO: 34851 - RNA, 19 nt, synthetic construct
  source 1..19: mol_type = other RNA
ctcagtcgtagtggctgtt

SEQ ID NO: 34852 - RNA, 19 nt, synthetic construct
  source 1..19: mol_type = other RNA
agcacacgcacgttgtagt

SEQ ID NO: 34853 - RNA, 19 nt, synthetic construct
  source 1..19: mol_type = other RNA
aagcacacgcacgttgtag

SEQ ID NO: 34854 - RNA, 19 nt, synthetic construct
  source 1..19: mol_type = other RNA
aggtcgtccccggagttga

SEQ ID NO: 34855 - RNA, 19 nt, synthetic construct
  source 1..19: mol_type = other RNA
aggtcgtccccggagttga

SEQ ID NO: 34856 - RNA, 19 nt, synthetic construct
  source 1..19: mol_type = other RNA
cgacctggtcgatgcttac

SEQ ID NO: 34857 - RNA, 19 nt, synthetic construct
  source 1..19: mol_type = other RNA
gacagggctggagtcgagt

SEQ ID NO: 34858 - RNA, 19 nt, synthetic construct
  source 1..19: mol_type = other RNA
gacagggctggagtcgagt

SEQ ID NO: 34859 - RNA, 19 nt, synthetic construct
  source 1..19: mol_type = other RNA
gacagggctggagtcgagt

SEQ ID NO: 34860 - RNA, 19 nt, synthetic construct
  source 1..19: mol_type = other RNA
gtggacgcagtcgtagtgg

SEQ ID NO: 34861 - RNA, 19 nt, synthetic construct
  source 1..19: mol_type = other RNA
gtggacgcagtcgtagtgg

SEQ ID NO: 34862 - RNA, 19 nt, synthetic construct
  source 1..19: mol_type = other RNA
gctgttgtggtcggctttg

SEQ ID NO: 34863 - RNA, 19 nt, synthetic construct
  source 1..19: mol_type = other RNA
gatccagtggacgcagtcg

SEQ ID NO: 34864 - RNA, 19 nt, synthetic construct
  source 1..19: mol_type = other RNA
gatccagtggacgcagtcg

SEQ ID NO: 34865 - RNA, 19 nt, synthetic construct
  source 1..19: mol_type = other RNA
tggtcggctttgtgaggat

SEQ ID NO: 34866 - RNA, 19 nt, synthetic construct
  source 1..19: mol_type = other RNA
gcctgtctggtcttcgttc

SEQ ID NO: 34867 - RNA, 19 nt, synthetic construct
  source 1..19: mol_type = other RNA
ccaggtcgtccccggagtt

SEQ ID NO: 34868 - RNA, 19 nt, synthetic construct
  source 1..19: mol_type = other RNA
ccaggtcgtccccggagtt

SEQ ID NO: 34869 - RNA, 19 nt, synthetic construct
  source 1..19: mol_type = other RNA
gacctggtcgatgcttacc

SEQ ID NO: 34870 - RNA, 19 nt, synthetic construct
  source 1..19: mol_type = other RNA
gcagtcgtagtggctgttg

SEQ ID NO: 34871 - RNA, 19 nt, synthetic construct
  source 1..19: mol_type = other RNA
tcagtcgtagtggctgttg

SEQ ID NO: 34872 - RNA, 19 nt, synthetic construct
  source 1..19: mol_type = other RNA
actcagtcgtagtggctgt

SEQ ID NO: 34873 - RNA, 19 nt, synthetic construct
  source 1..19: mol_type = other RNA
tcagtcgtagtggctgttg

SEQ ID NO: 34874 - RNA, 19 nt, synthetic construct
  source 1..19: mol_type = other RNA
actcagtcgtagtggctgt

SEQ ID NO: 34875 - RNA, 19 nt, synthetic construct
  source 1..19: mol_type = other RNA
gcagtcgtagtggctgttg

SEQ ID NO: 34876 - RNA, 19 nt, synthetic construct
  source 1..19: mol_type = other RNA
gcagtcgtagtggctgttg

SEQ ID NO: 34877 - RNA, 19 nt, synthetic construct
  source 1..19: mol_type = other RNA
agtggacgcagtcgtagtg

SEQ ID NO: 34878 - RNA, 19 nt, synthetic construct
  source 1..19: mol_type = other RNA
agtggacgcagtcgtagtg

SEQ ID NO: 34879 - RNA, 19 nt, synthetic construct
  source 1..19: mol_type = other RNA
cccgacctggtcgatgctt

SEQ ID NO: 34880 - RNA, 19 nt, synthetic construct
  source 1..19: mol_type = other RNA
cacacgcacgttgtagttg

SEQ ID NO: 34881 - RNA, 19 nt, synthetic construct
  source 1..19: mol_type = other RNA
gcacacgcacgttgtagtt

SEQ ID NO: 34882 - RNA, 19 nt, synthetic construct
  source 1..19: mol_type = other RNA
tggctgtagtcgtcacagc

SEQ ID NO: 34883 - RNA, 19 nt, synthetic construct
  source 1..19: mol_type = other RNA
gtcgtccccggagttgagg

SEQ ID NO: 34884 - RNA, 19 nt, synthetic construct
  source 1..19: mol_type = other RNA
caggtcgtccccggagttg

SEQ ID NO: 34885 - RNA, 19 nt, synthetic construct
  source 1..19: mol_type = other RNA
gacgcagtcgtagtggctg

SEQ ID NO: 34886 - RNA, 19 nt, synthetic construct
  source 1..19: mol_type = other RNA
tccagtggacgcagtcgta

SEQ ID NO: 34887 - RNA, 19 nt, synthetic construct
  source 1..19: mol_type = other RNA
gtcgtccccggagttgagg

SEQ ID NO: 34888 - RNA, 19 nt, synthetic construct
  source 1..19: mol_type = other RNA
caggtcgtccccggagttg

SEQ ID NO: 34889 - RNA, 19 nt, synthetic construct
  source 1..19: mol_type = other RNA
gatgcagtcgtagtggctg

SEQ ID NO: 34890 - RNA, 19 nt, synthetic construct
  source 1..19: mol_type = other RNA
ggatgcagtcgtagtggct

SEQ ID NO: 34891 - RNA, 19 nt, synthetic construct
  source 1..19: mol_type = other RNA
gacgcagtcgtagtggctg

SEQ ID NO: 34892 - RNA, 19 nt, synthetic construct
  source 1..19: mol_type = other RNA
tccagtggacgcagtcgta

SEQ ID NO: 34893 - RNA, 19 nt, synthetic construct
  source 1..19: mol_type = other RNA
cttaaaggtcccctcttgg

SEQ ID NO: 34894 - RNA, 19 nt, synthetic construct
  source 1..19: mol_type = other RNA
tgcaacccctgaggttggg

SEQ ID NO: 34895 - RNA, 19 nt, synthetic construct
  source 1..19: mol_type = other RNA
tgcccgacctggtcgatgc

SEQ ID NO: 34896 - RNA, 19 nt, synthetic construct
  source 1..19: mol_type = other RNA
ctgcccgacctggtcgatg

SEQ ID NO: 34897 - RNA, 19 nt, synthetic construct
  source 1..19: mol_type = other RNA
cttgcaggtcagccccgtc

SEQ ID NO: 34898 - RNA, 19 nt, synthetic construct
  source 1..19: mol_type = other RNA
ttcttgcaggtcagccccg

SEQ ID NO: 34899 - RNA, 19 nt, synthetic construct
  source 1..19: mol_type = other RNA
tcgttcttgcaggtcagcc

SEQ ID NO: 34900 - RNA, 19 nt, synthetic construct
  source 1..19: mol_type = other RNA
ttcgttcttgcaggtcagc

SEQ ID NO: 34901 - RNA, 19 nt, synthetic construct
  source 1..19: mol_type = other RNA
cctgtctggtcttcgttct

SEQ ID NO: 34902 - RNA, 19 nt, synthetic construct
  source 1..19: mol_type = other RNA
gttgtagttgaagcacatg

SEQ ID NO: 34903 - RNA, 19 nt, synthetic construct
  source 1..19: mol_type = other RNA
cacgcacgttgtagttgaa

SEQ ID NO: 34904 - RNA, 19 nt, synthetic construct
  source 1..19: mol_type = other RNA
tagtcgtcacagcaaagca

SEQ ID NO: 34905 - RNA, 19 nt, synthetic construct
  source 1..19: mol_type = other RNA
ggtcgtccccggagttgag

SEQ ID NO: 34906 - RNA, 19 nt, synthetic construct
  source 1..19: mol_type = other RNA
gctttgtgaggatccaggt

SEQ ID NO: 34907 - RNA, 19 nt, synthetic construct
  source 1..19: mol_type = other RNA
ggtcggctttgtgaggatc

SEQ ID NO: 34908 - RNA, 19 nt, synthetic construct
  source 1..19: mol_type = other RNA
tgttgtggtcggctttgtg

SEQ ID NO: 34909 - RNA, 19 nt, synthetic construct
  source 1..19: mol_type = other RNA
ctgttgtggtcggctttgt

SEQ ID NO: 34910 - RNA, 19 nt, synthetic construct
  source 1..19: mol_type = other RNA
acgcagtcgtagtggctgt

SEQ ID NO: 34911 - RNA, 19 nt, synthetic construct
  source 1..19: mol_type = other RNA
ggacgcagtcgtagtggct

SEQ ID NO: 34912 - RNA, 19 nt, synthetic construct
  source 1..19: mol_type = other RNA
tggacgcagtcgtagtggc

SEQ ID NO: 34913 - RNA, 19 nt, synthetic construct
  source 1..19: mol_type = other RNA
gtggatccagtggacgcag

SEQ ID NO: 34914 - RNA, 19 nt, synthetic construct
  source 1..19: mol_type = other RNA
ggtcgtccccggagttgag

SEQ ID NO: 34915 - RNA, 19 nt, synthetic construct
  source 1..19: mol_type = other RNA
gctttgtgaggatccaggt

SEQ ID NO: 34916 - RNA, 19 nt, synthetic construct
  source 1..19: mol_type = other RNA
atgcagtcgtagtggctgt

SEQ ID NO: 34917 - RNA, 19 nt, synthetic construct
  source 1..19: mol_type = other RNA
tggatgcagtcgtagtggc

SEQ ID NO: 34918 - RNA, 19 nt, synthetic construct
  source 1..19: mol_type = other RNA
agtggatgcagtcgtagtg

SEQ ID NO: 34919 - RNA, 19 nt, synthetic construct
  source 1..19: mol_type = other RNA
acgcagtcgtagtggctgt

SEQ ID NO: 34920 - RNA, 19 nt, synthetic construct
  source 1..19: mol_type = other RNA
ggacgcagtcgtagtggct

SEQ ID NO: 34921 - RNA, 19 nt, synthetic construct
  source 1..19: mol_type = other RNA
tggacgcagtcgtagtggc

SEQ ID NO: 34922 - RNA, 19 nt, synthetic construct
  source 1..19: mol_type = other RNA
gtggatccagtggacgcag

SEQ ID NO: 34923 - RNA, 19 nt, synthetic construct
  source 1..19: mol_type = other RNA
gtcggtcttattgtagatg

SEQ ID NO: 34924 - RNA, 19 nt, synthetic construct
  source 1..19: mol_type = other RNA
ttgaacctgcctgtctggt

SEQ ID NO: 34925 - RNA, 19 nt, synthetic construct
  source 1..19: mol_type = other RNA
ggctgttgtggtcggcttt

SEQ ID NO: 34926 - RNA, 19 nt, synthetic construct
  source 1..19: mol_type = other RNA
acgcacgttgtagttgaag

SEQ ID NO: 34927 - RNA, 19 nt, synthetic construct
  source 1..19: mol_type = other RNA
tcgtagtggctgttgtggt

SEQ ID NO: 34928 - RNA, 19 nt, synthetic construct
  source 1..19: mol_type = other RNA
tcgtagtggctgttgtggt

SEQ ID NO: 34929 - RNA, 19 nt, synthetic construct
  source 1..19: mol_type = other RNA
tcgtagtggctgttgtggt

SEQ ID NO: 34930 - RNA, 19 nt, synthetic construct
  source 1..19: mol_type = other RNA
tcgtagtggctgttgtggt

SEQ ID NO: 34931 - RNA, 19 nt, synthetic construct
  source 1..19: mol_type = other RNA
tcgtagtggctgttgtggt

SEQ ID NO: 34932 - RNA, 19 nt, synthetic construct
  source 1..19: mol_type = other RNA
ttgcaggtcagccccgtct

SEQ ID NO: 34933 - RNA, 19 nt, synthetic construct
  source 1..19: mol_type = other RNA
tcttgcaggtcagccccgt

SEQ ID NO: 34934 - RNA, 19 nt, synthetic construct
  source 1..19: mol_type = other RNA
ggtcttcgttcttgcaggt

SEQ ID NO: 34935 - RNA, 19 nt, synthetic construct
  source 1..19: mol_type = other RNA
ctgtctggtcttcgttctt

SEQ ID NO: 34936 - RNA, 19 nt, synthetic construct
  source 1..19: mol_type = other RNA
ccggagttgaggagggcgt

SEQ ID NO: 34937 - RNA, 19 nt, synthetic construct
  source 1..19: mol_type = other RNA
tggctgttgtggtcggctt

SEQ ID NO: 34938 - RNA, 19 nt, synthetic construct
  source 1..19: mol_type = other RNA
gtggctgttgtggtcggct

SEQ ID NO: 34939 - RNA, 19 nt, synthetic construct
  source 1..19: mol_type = other RNA
ccggagttgaggagggcgt

SEQ ID NO: 34940 - RNA, 19 nt, synthetic construct
  source 1..19: mol_type = other RNA
gtcggctttgtgaggatcc

SEQ ID NO: 34941 - RNA, 19 nt, synthetic construct
  source 1..19: mol_type = other RNA
gcaacccctgaggttggga

SEQ ID NO: 34942 - RNA, 19 nt, synthetic construct
  source 1..19: mol_type = other RNA
gtttccatgtccccgcctg

SEQ ID NO: 34943 - RNA, 19 nt, synthetic construct
  source 1..19: mol_type = other RNA
gtcgtcacagcaaagcaca

SEQ ID NO: 34944 - RNA, 19 nt, synthetic construct
  source 1..19: mol_type = other RNA
gtccccggagttgaggagg

SEQ ID NO: 34945 - RNA, 19 nt, synthetic construct
  source 1..19: mol_type = other RNA
gtccccggagttgaggagg

SEQ ID NO: 34946 - RNA, 19 nt, synthetic construct
  source 1..19: mol_type = other RNA
tgcctgtctggtcttcgtt

SEQ ID NO: 34947 - RNA, 19 nt, synthetic construct
  source 1..19: mol_type = other RNA
gtcgtagtggctgttgtgg

SEQ ID NO: 34948 - RNA, 19 nt, synthetic construct
  source 1..19: mol_type = other RNA
gtcgtagtggctgttgtgg

SEQ ID NO: 34949 - RNA, 19 nt, synthetic construct
  source 1..19: mol_type = other RNA
gtcgtagtggctgttgtgg

SEQ ID NO: 34950 - RNA, 19 nt, synthetic construct
  source 1..19: mol_type = other RNA
gtcgtagtggctgttgtgg

SEQ ID NO: 34951 - RNA, 19 nt, synthetic construct
  source 1..19: mol_type = other RNA
gtcgtagtggctgttgtgg

SEQ ID NO: 34952 - RNA, 19 nt, synthetic construct
  source 1..19: mol_type = other RNA
gcaaagcacacgcacgttg

SEQ ID NO: 34953 - RNA, 19 nt, synthetic construct
  source 1..19: mol_type = other RNA
tggatccagtggatgcagt

SEQ ID NO: 34954 - RNA, 19 nt, synthetic construct
  source 1..19: mol_type = other RNA
gttgtagtggctgttgtgg

SEQ ID NO: 34955 - RNA, 19 nt, synthetic construct
  source 1..19: mol_type = other RNA
ccagtggacgcagtcgtag

SEQ ID NO: 34956 - RNA, 19 nt, synthetic construct
  source 1..19: mol_type = other RNA
ccagtggacgcagtcgtag

SEQ ID NO: 34957 - RNA, 19 nt, synthetic construct
  source 1..19: mol_type = other RNA
cacgggtggggggacgggg

SEQ ID NO: 34958 - RNA, 19 nt, synthetic construct
  source 1..19: mol_type = other RNA
cacaggtcctgggcgcagg

SEQ ID NO: 34959 - RNA, 19 nt, synthetic construct
  source 1..19: mol_type = other RNA
cacggtgaagctgctgtcg

SEQ ID NO: 34960 - RNA, 19 nt, synthetic construct
  source 1..19: mol_type = other RNA
ggaaggtcccgtgggtggt

SEQ ID NO: 34961 - RNA, 19 nt, synthetic construct
  source 1..19: mol_type = other RNA
ggacccagtctgcgaggtg

SEQ ID NO: 34962 - RNA, 19 nt, synthetic construct
  source 1..19: mol_type = other RNA
ctgcaacccctgaggttgg

SEQ ID NO: 34963 - RNA, 19 nt, synthetic construct
  source 1..19: mol_type = other RNA
cctgcccgacctggtcgat

SEQ ID NO: 34964 - RNA, 19 nt, synthetic construct
  source 1..19: mol_type = other RNA
gcacctgcccgacctggtc

SEQ ID NO: 34965 - RNA, 19 nt, synthetic construct
  source 1..19: mol_type = other RNA
agcacctgcccgacctggt

SEQ ID NO: 34966 - RNA, 19 nt, synthetic construct
  source 1..19: mol_type = other RNA
tcagcacctgcccgacctg

SEQ ID NO: 34967 - RNA, 19 nt, synthetic construct
  source 1..19: mol_type = other RNA
ggtcagcacctgcccgacc

SEQ ID NO: 34968 - RNA, 19 nt, synthetic construct
  source 1..19: mol_type = other RNA
acctgcctgtctggtcttc

SEQ ID NO: 34969 - RNA, 19 nt, synthetic construct
  source 1..19: mol_type = other RNA
gggcgtggccgtggagctg

SEQ ID NO: 34970 - RNA, 19 nt, synthetic construct
  source 1..19: mol_type = other RNA
gatccaggtcgtccccgga

SEQ ID NO: 34971 - RNA, 19 nt, synthetic construct
  source 1..19: mol_type = other RNA
ggatccaggtcgtccccgg

SEQ ID NO: 34972 - RNA, 19 nt, synthetic construct
  source 1..19: mol_type = other RNA
tagtggctgttgtggtcgg

SEQ ID NO: 34973 - RNA, 19 nt, synthetic construct
  source 1..19: mol_type = other RNA
agtcaccgtggaaggctct

SEQ ID NO: 34974 - RNA, 19 nt, synthetic construct
  source 1..19: mol_type = other RNA
gatccaggtcgtccccgga

SEQ ID NO: 34975 - RNA, 19 nt, synthetic construct
  source 1..19: mol_type = other RNA
ggatccaggtcgtccccgg

SEQ ID NO: 34976 - RNA, 19 nt, synthetic construct
  source 1..19: mol_type = other RNA
tagtggctgttgtggtcag

SEQ ID NO: 34977 - RNA, 19 nt, synthetic construct
  source 1..19: mol_type = other RNA
cccgtgtgtggtggccgtg

SEQ ID NO: 34978 - RNA, 19 nt, synthetic construct
  source 1..19: mol_type = other RNA
gggtgtggtggccgtgctg

SEQ ID NO: 34979 - RNA, 19 nt, synthetic construct
  source 1..19: mol_type = other RNA
gatccaggtcgtccccgga

SEQ ID NO: 34980 - RNA, 19 nt, synthetic construct
  source 1..19: mol_type = other RNA
ggatccaggtcgtccccgg

SEQ ID NO: 34981 - RNA, 19 nt, synthetic construct
  source 1..19: mol_type = other RNA
gggtgtggtggccgtgctg

SEQ ID NO: 34982 - RNA, 19 nt, synthetic construct
  source 1..19: mol_type = other RNA
cccgtgtgtggtggccgtg

SEQ ID NO: 34983 - RNA, 19 nt, synthetic construct
  source 1..19: mol_type = other RNA
agtcaccgtggaaggctct

SEQ ID NO: 34984 - RNA, 19 nt, synthetic construct
  source 1..19: mol_type = other RNA
gatccaggtcgtccccgga

SEQ ID NO: 34985 - RNA, 19 nt, synthetic construct
  source 1..19: mol_type = other RNA
ggatccaggtcgtccccgg

SEQ ID NO: 34986 - RNA, 19 nt, synthetic construct
  source 1..19: mol_type = other RNA
tagtggctgttgtggtcag

SEQ ID NO: 34987 - RNA, 19 nt, synthetic construct
  source 1..19: mol_type = other RNA
cccgtgtgtggtggccgtg

SEQ ID NO: 34988 - RNA, 19 nt, synthetic construct
  source 1..19: mol_type = other RNA
gatccaggtcgtccccgga

SEQ ID NO: 34989 - RNA, 19 nt, synthetic construct
  source 1..19: mol_type = other RNA
ggatccaggtcgtccccgg

SEQ ID NO: 34990 - RNA, 19 nt, synthetic construct
  source 1..19: mol_type = other RNA
tagtggctgttgtggtcag

SEQ ID NO: 34991 - RNA, 19 nt, synthetic construct
  source 1..19: mol_type = other RNA
ggatccagtggatgcagtc

SEQ ID NO: 34992 - RNA, 19 nt, synthetic construct
  source 1..19: mol_type = other RNA
gatccaggtcgtccccgga

SEQ ID NO: 34993 - RNA, 19 nt, synthetic construct
  source 1..19: mol_type = other RNA
ggatccaggtcgtccccgg

SEQ ID NO: 34994 - RNA, 19 nt, synthetic construct
  source 1..19: mol_type = other RNA
tagtggctgttgtggtcag

SEQ ID NO: 34995 - RNA, 19 nt, synthetic construct
  source 1..19: mol_type = other RNA
gggtgtggtggccgtgctg

SEQ ID NO: 34996 - RNA, 19 nt, synthetic construct
  source 1..19: mol_type = other RNA
tagtggctgttgtggtcag

SEQ ID NO: 34997 - RNA, 19 nt, synthetic construct
  source 1..19: mol_type = other RNA
cgttggccacaggctttgg

SEQ ID NO: 34998 - RNA, 19 nt, synthetic construct
  source 1..19: mol_type = other RNA
gctgagggcgcgggggcag

SEQ ID NO: 34999 - RNA, 19 nt, synthetic construct
  source 1..19: mol_type = other RNA
agttgaggagggcgtggcc

SEQ ID NO: 35000 - RNA, 19 nt, synthetic construct
  source 1..19: mol_type = other RNA
agttgaggagggcgtggcc

SEQ ID NO: 35001 - RNA, 19 nt, synthetic construct
  source 1..19: mol_type = other RNA
ctttgtgaggatccaggtc

SEQ ID NO: 35002 - RNA, 19 nt, synthetic construct
  source 1..19: mol_type = other RNA
ctgttgtggtcagctctgt

SEQ ID NO: 35003 - RNA, 19 nt, synthetic construct
  source 1..19: mol_type = other RNA
ctttgtgaggatccaggtc

SEQ ID NO: 35004 - RNA, 19 nt, synthetic construct
  source 1..19: mol_type = other RNA
ctgttgtggtcagctctgt

SEQ ID NO: 35005 - RNA, 19 nt, synthetic construct
  source 1..19: mol_type = other RNA
gatccagtggatgcagtcg

SEQ ID NO: 35006 - RNA, 19 nt, synthetic construct
  source 1..19: mol_type = other RNA
ctgttgtggtcagctctgt

SEQ ID NO: 35007 - RNA, 19 nt, synthetic construct
  source 1..19: mol_type = other RNA
tggacccagtctgcgaggt

SEQ ID NO: 35008 - RNA, 19 nt, synthetic construct
  source 1..19: mol_type = other RNA
gcaggtggtgttgaaggag

SEQ ID NO: 35009 - RNA, 19 nt, synthetic construct
  source 1..19: mol_type = other RNA
tcacggggcctgagctgga

SEQ ID NO: 35010 - RNA, 19 nt, synthetic construct
  source 1..19: mol_type = other RNA
gaacagggcctgggtggtg

SEQ ID NO: 35011 - RNA, 19 nt, synthetic construct
  source 1..19: mol_type = other RNA
gtccccgcctgcaacccct

SEQ ID NO: 35012 - RNA, 19 nt, synthetic construct
  source 1..19: mol_type = other RNA
tttccatgtccccgcctgc

SEQ ID NO: 35013 - RNA, 19 nt, synthetic construct
  source 1..19: mol_type = other RNA
cgtccccggagttgaggag

SEQ ID NO: 35014 - RNA, 19 nt, synthetic construct
  source 1..19: mol_type = other RNA
tgtgggtgtcgtggccgtg

SEQ ID NO: 35015 - RNA, 19 nt, synthetic construct
  source 1..19: mol_type = other RNA
ctgtgggtgtcgtggccgt

SEQ ID NO: 35016 - RNA, 19 nt, synthetic construct
  source 1..19: mol_type = other RNA
tagggtgagggctggacag

SEQ ID NO: 35017 - RNA, 19 nt, synthetic construct
  source 1..19: mol_type = other RNA
acagtctctggagtagagg

SEQ ID NO: 35018 - RNA, 19 nt, synthetic construct
  source 1..19: mol_type = other RNA
tagggtgagggctggacag

SEQ ID NO: 35019 - RNA, 19 nt, synthetic construct
  source 1..19: mol_type = other RNA
cgtccccggagttgaggag

SEQ ID NO: 35020 - RNA, 19 nt, synthetic construct
  source 1..19: mol_type = other RNA
tgtgggtgtcgtggccgtg

SEQ ID NO: 35021 - RNA, 19 nt, synthetic construct
  source 1..19: mol_type = other RNA
ctgtgggtgtcgtggccgt

SEQ ID NO: 35022 - RNA, 19 nt, synthetic construct
  source 1..19: mol_type = other RNA
tagggtgagggctggacag

SEQ ID NO: 35023 - RNA, 19 nt, synthetic construct
  source 1..19: mol_type = other RNA
tgtgggtgtcgtggccgtg

SEQ ID NO: 35024 - RNA, 19 nt, synthetic construct
  source 1..19: mol_type = other RNA
ctgtgggtgtcgtggccgt

SEQ ID NO: 35025 - RNA, 19 nt, synthetic construct
  source 1..19: mol_type = other RNA
gtggtctctggagtagagg

SEQ ID NO: 35026 - RNA, 19 nt, synthetic construct
  source 1..19: mol_type = other RNA
ttgtggcacgtcccctgca

SEQ ID NO: 35027 - RNA, 19 nt, synthetic construct
  source 1..19: mol_type = other RNA
ggccgtggtgttcggcact

SEQ ID NO: 35028 - RNA, 19 nt, synthetic construct
  source 1..19: mol_type = other RNA
ggccgtggtgttcggcact

SEQ ID NO: 35029 - RNA, 19 nt, synthetic construct
  source 1..19: mol_type = other RNA
ggccgtggtgttcggcact

SEQ ID NO: 35030 - RNA, 19 nt, synthetic construct
  source 1..19: mol_type = other RNA
ggccgtggcggtaagcact

SEQ ID NO: 35031 - RNA, 19 nt, synthetic construct
  source 1..19: mol_type = other RNA
ggccgtggcggtaagcact

SEQ ID NO: 35032 - RNA, 19 nt, synthetic construct
  source 1..19: mol_type = other RNA
ctctatgtccttaggctgc

SEQ ID NO: 35033 - RNA, 19 nt, synthetic construct
  source 1..19: mol_type = other RNA
ggtcgtggtggtaagcact

SEQ ID NO: 35034 - RNA, 19 nt, synthetic construct
  source 1..19: mol_type = other RNA
gatggaggcagaacgttct

SEQ ID NO: 35035 - RNA, 19 nt, synthetic construct
  source 1..19: mol_type = other RNA
gttgccggccggcaagggc

SEQ ID NO: 35036 - RNA, 19 nt, synthetic construct
  source 1..19: mol_type = other RNA
ccgtggtggctgtaccaag

SEQ ID NO: 35037 - RNA, 19 nt, synthetic construct
  source 1..19: mol_type = other RNA
gttgaggagggcgtggccg

SEQ ID NO: 35038 - RNA, 19 nt, synthetic construct
  source 1..19: mol_type = other RNA
gttgaggagggcgtggccg

SEQ ID NO: 35039 - RNA, 19 nt, synthetic construct
  source 1..19: mol_type = other RNA
gaattggtggcccttgtca

SEQ ID NO: 35040 - RNA, 19 nt, synthetic construct
  source 1..19: mol_type = other RNA
caccgtggaaggctctgtg

SEQ ID NO: 35041 - RNA, 19 nt, synthetic construct
  source 1..19: mol_type = other RNA
caccgtggaaggctctgtg

SEQ ID NO: 35042 - RNA, 19 nt, synthetic construct
  source 1..19: mol_type = other RNA
gcacgaaggaaacgctgca

SEQ ID NO: 35043 - RNA, 19 nt, synthetic construct
  source 1..19: mol_type = other RNA
ttgcggtcgtagtggctgc

SEQ ID NO: 35044 - RNA, 19 nt, synthetic construct
  source 1..19: mol_type = other RNA
tggaggcgtgagtgccgtc

SEQ ID NO: 35045 - RNA, 19 nt, synthetic construct
  source 1..19: mol_type = other RNA
tggaggcgtgagtgccgtc

SEQ ID NO: 35046 - RNA, 19 nt, synthetic construct
  source 1..19: mol_type = other RNA
tggaggcgtgagtgccgtc

SEQ ID NO: 35047 - RNA, 19 nt, synthetic construct
  source 1..19: mol_type = other RNA
ggccttcgtggtcagcact

SEQ ID NO: 35048 - RNA, 19 nt, synthetic construct
  source 1..19: mol_type = other RNA
ggccttcgtggtcagcact

SEQ ID NO: 35049 - RNA, 19 nt, synthetic construct
  source 1..19: mol_type = other RNA
agtcgtcacagcaaagcac

SEQ ID NO: 35050 - RNA, 19 nt, synthetic construct
  source 1..19: mol_type = other RNA
accgccttaaaggtcccct

SEQ ID NO: 35051 - RNA, 19 nt, synthetic construct
  source 1..19: mol_type = other RNA
gcgtagaaatggcagccgg

SEQ ID NO: 35052 - RNA, 19 nt, synthetic construct
  source 1..19: mol_type = other RNA
ggtgccgtgagcgtagcag

SEQ ID NO: 35053 - RNA, 19 nt, synthetic construct
  source 1..19: mol_type = other RNA
tggcactttggtagtgtga

SEQ ID NO: 35054 - RNA, 19 nt, synthetic construct
  source 1..19: mol_type = other RNA
cggcactttggtagtgtga

SEQ ID NO: 35055 - RNA, 19 nt, synthetic construct
  source 1..19: mol_type = other RNA
cggcactttggtagtgtga

SEQ ID NO: 35056 - RNA, 19 nt, synthetic construct
  source 1..19: mol_type = other RNA
cggcactttggtagtgtga

SEQ ID NO: 35057 - RNA, 19 nt, synthetic construct
  source 1..19: mol_type = other RNA
tcccgaaaggggtcctgct

SEQ ID NO: 35058 - RNA, 19 nt, synthetic construct
  source 1..19: mol_type = other RNA
ggtggccttcgtggtcagc

SEQ ID NO: 35059 - RNA, 19 nt, synthetic construct
  source 1..19: mol_type = other RNA
ggtggccttcgtggtcagc

SEQ ID NO: 35060 - RNA, 19 nt, synthetic construct
  source 1..19: mol_type = other RNA
tcgaccctgatggtctctc

SEQ ID NO: 35061 - RNA, 19 nt, synthetic construct
  source 1..19: mol_type = other RNA
cctcaaggcggcccctgca

SEQ ID NO: 35062 - RNA, 19 nt, synthetic construct
  source 1..19: mol_type = other RNA
acgttgtagttgaagcaca

SEQ ID NO: 35063 - RNA, 19 nt, synthetic construct
  source 1..19: mol_type = other RNA
tgcccaagatgcccgaggt

SEQ ID NO: 35064 - RNA, 19 nt, synthetic construct
  source 1..19: mol_type = other RNA
tgcccaagatgcccgaggt

SEQ ID NO: 35065 - RNA, 19 nt, synthetic construct
  source 1..19: mol_type = other RNA
tggaagcgtgcgtgccgtc

SEQ ID NO: 35066 - RNA, 19 nt, synthetic construct
  source 1..19: mol_type = other RNA
tggcggcagtggttccgtc

SEQ ID NO: 35067 - RNA, 19 nt, synthetic construct
  source 1..19: mol_type = other RNA
gggtccagcaggacgacac

SEQ ID NO: 35068 - RNA, 19 nt, synthetic construct
  source 1..19: mol_type = other RNA
tctgtgataggcgggtcca

SEQ ID NO: 35069 - RNA, 19 nt, synthetic construct
  source 1..19: mol_type = other RNA
tgtcaaagtccccgccaga

SEQ ID NO: 35070 - RNA, 19 nt, synthetic construct
  source 1..19: mol_type = other RNA
tctgtgataggcgggtcca

SEQ ID NO: 35071 - RNA, 19 nt, synthetic construct
  source 1..19: mol_type = other RNA
tgtcaaagtccccgccaga

SEQ ID NO: 35072 - RNA, 19 nt, synthetic construct
  source 1..19: mol_type = other RNA
tctgtgataggcgggtcca

SEQ ID NO: 35073 - RNA, 19 nt, synthetic construct
  source 1..19: mol_type = other RNA
tgtcaaagtccccgccaga

SEQ ID NO: 35074 - RNA, 19 nt, synthetic construct
  source 1..19: mol_type = other RNA
tctgtgataggcgggtcca

SEQ ID NO: 35075 - RNA, 19 nt, synthetic construct
  source 1..19: mol_type = other RNA
tgtcaaagtccccgccaga

SEQ ID NO: 35076 - RNA, 19 nt, synthetic construct
  source 1..19: mol_type = other RNA
tctgtgataggcgggtcca

SEQ ID NO: 35077 - RNA, 19 nt, synthetic construct
  source 1..19: mol_type = other RNA
gcacaggccaccggttgca

SEQ ID NO: 35078 - RNA, 19 nt, synthetic construct
  source 1..19: mol_type = other RNA
aggcggtctggacgcactc

SEQ ID NO: 35079 - RNA, 19 nt, synthetic construct
  source 1..19: mol_type = other RNA
ggctctttggaagcggtgc

SEQ ID NO: 35080 - RNA, 19 nt, synthetic construct
  source 1..19: mol_type = other RNA
caggacgacacggttgtca

SEQ ID NO: 35081 - RNA, 19 nt, synthetic construct
  source 1..19: mol_type = other RNA
ccgccttgcctgtcgcagc

SEQ ID NO: 35082 - RNA, 19 nt, synthetic construct
  source 1..19: mol_type = other RNA
gtgtccgtgcagggtgagc

SEQ ID NO: 35083 - RNA, 19 nt, synthetic construct
  source 1..19: mol_type = other RNA
gccagagtgcgtgatgtca

SEQ ID NO: 35084 - RNA, 19 nt, synthetic construct
  source 1..19: mol_type = other RNA
ccatagccccccggagcag

SEQ ID NO: 35085 - RNA, 19 nt, synthetic construct
  source 1..19: mol_type = other RNA
tgcaggtcgtagagtttct

SEQ ID NO: 35086 - RNA, 19 nt, synthetic construct
  source 1..19: mol_type = other RNA
caggccgcacttccgcagc

SEQ ID NO: 35087 - RNA, 19 nt, synthetic construct
  source 1..19: mol_type = other RNA
tcaaagctgttcctggcat

SEQ ID NO: 35088 - RNA, 19 nt, synthetic construct
  source 1..19: mol_type = other RNA
gagcgtagcaggggcactc

SEQ ID NO: 35089 - RNA, 19 nt, synthetic construct
  source 1..19: mol_type = other RNA
tcgtcgtgcaccacctctc

SEQ ID NO: 35090 - RNA, 19 nt, synthetic construct
  source 1..19: mol_type = other RNA
ggcaatgcagcccccactc

SEQ ID NO: 35091 - RNA, 19 nt, synthetic construct
  source 1..19: mol_type = other RNA
tgactcggtggttctgctg

SEQ ID NO: 35092 - RNA, 19 nt, synthetic construct
  source 1..19: mol_type = other RNA
ccccgtggaaggctctgtg

SEQ ID NO: 35093 - RNA, 19 nt, synthetic construct
  source 1..19: mol_type = other RNA
ggtaccggtggttgctgct

SEQ ID NO: 35094 - RNA, 19 nt, synthetic construct
  source 1..19: mol_type = other RNA
gggtcccggtggtcccaag

SEQ ID NO: 35095 - RNA, 19 nt, synthetic construct
  source 1..19: mol_type = other RNA
gttgtggtagtcggcactt

SEQ ID NO: 35096 - RNA, 19 nt, synthetic construct
  source 1..19: mol_type = other RNA
gttgtggtagtcggcactt

SEQ ID NO: 35097 - RNA, 19 nt, synthetic construct
  source 1..19: mol_type = other RNA
ccccgtggaaggctctgtg

SEQ ID NO: 35098 - RNA, 19 nt, synthetic construct
  source 1..19: mol_type = other RNA
ggtaccggtggttgctgct

SEQ ID NO: 35099 - RNA, 19 nt, synthetic construct
  source 1..19: mol_type = other RNA
gggtcccggtggtcccaag

SEQ ID NO: 35100 - RNA, 19 nt, synthetic construct
  source 1..19: mol_type = other RNA
gttgtggtagtcggcactt

SEQ ID NO: 35101 - RNA, 19 nt, synthetic construct
  source 1..19: mol_type = other RNA
ggcggtggccgtggaaccg

SEQ ID NO: 35102 - RNA, 19 nt, synthetic construct
  source 1..19: mol_type = other RNA
gccacaggctttgggtcca

SEQ ID NO: 35103 - RNA, 19 nt, synthetic construct
  source 1..19: mol_type = other RNA
caccgtctcggggcagcag

SEQ ID NO: 35104 - RNA, 19 nt, synthetic construct
  source 1..19: mol_type = other RNA
aaccccgtagaaggtgcca

SEQ ID NO: 35105 - RNA, 19 nt, synthetic construct
  source 1..19: mol_type = other RNA
ggtagtattgttgcaggca

SEQ ID NO: 35106 - RNA, 19 nt, synthetic construct
  source 1..19: mol_type = other RNA
ccacaggatggtcgtgttg

SEQ ID NO: 35107 - RNA, 19 nt, synthetic construct
  source 1..19: mol_type = other RNA
catgatcagacaatgcaca

SEQ ID NO: 35108 - RNA, 19 nt, synthetic construct
  source 1..19: mol_type = other RNA
agttaccctgcagcaggca

SEQ ID NO: 35109 - RNA, 19 nt, synthetic construct
  source 1..19: mol_type = other RNA
ctttgggatgctgacccct

SEQ ID NO: 35110 - RNA, 19 nt, synthetic construct
  source 1..19: mol_type = other RNA
ggtggcagatgccctcctc

SEQ ID NO: 35111 - RNA, 19 nt, synthetic construct
  source 1..19: mol_type = other RNA
cctgcatgagtggcaccag

SEQ ID NO: 35112 - RNA, 19 nt, synthetic construct
  source 1..19: mol_type = other RNA
ctgttggctgttggcgcac

SEQ ID NO: 35113 - RNA, 19 nt, synthetic construct
  source 1..19: mol_type = other RNA
ccgaggtggccgaagtcca

SEQ ID NO: 35114 - RNA, 19 nt, synthetic construct
  source 1..19: mol_type = other RNA
gtgctggtcagcactttga

SEQ ID NO: 35115 - RNA, 19 nt, synthetic construct
  source 1..19: mol_type = other RNA
ccgaggtggccgaagtcca

SEQ ID NO: 35116 - RNA, 19 nt, synthetic construct
  source 1..19: mol_type = other RNA
tgttggctgttggcgcaca

SEQ ID NO: 35117 - RNA, 19 nt, synthetic construct
  source 1..19: mol_type = other RNA
gactcggtggtcctgctgc

SEQ ID NO: 35118 - RNA, 19 nt, synthetic construct
  source 1..19: mol_type = other RNA
gactcggtggtcctgctgc

SEQ ID NO: 35119 - RNA, 19 nt, synthetic construct
  source 1..19: mol_type = other RNA
gactcggtggtcctgctgc

SEQ ID NO: 35120 - RNA, 19 nt, synthetic construct
  source 1..19: mol_type = other RNA
catggacttgtagtggatg

SEQ ID NO: 35121 - RNA, 19 nt, synthetic construct
  source 1..19: mol_type = other RNA
gaagacttggccattgaag

SEQ ID NO: 35122 - RNA, 19 nt, synthetic construct
  source 1..19: mol_type = other RNA
tgaggaacacgccgccgtc

SEQ ID NO: 35123 - RNA, 19 nt, synthetic construct
  source 1..19: mol_type = other RNA
gacccaggcggtggtgaag

SEQ ID NO: 35124 - RNA, 19 nt, synthetic construct
  source 1..19: mol_type = other RNA
gcggtgcccattgtaccag

SEQ ID NO: 35125 - RNA, 19 nt, synthetic construct
  source 1..19: mol_type = other RNA
cagaccaggccaaagtcca

SEQ ID NO: 35126 - RNA, 19 nt, synthetic construct
  source 1..19: mol_type = other RNA
cagaccaggccaaagtcca

SEQ ID NO: 35127 - RNA, 19 nt, synthetic construct
  source 1..19: mol_type = other RNA
tgcagttgtagtggctgct

SEQ ID NO: 35128 - RNA, 19 nt, synthetic construct
  source 1..19: mol_type = other RNA
tcgtggtggtaagcactgt

SEQ ID NO: 35129 - RNA, 19 nt, synthetic construct
  source 1..19: mol_type = other RNA
cagaccaggccaaagtcca

SEQ ID NO: 35130 - RNA, 19 nt, synthetic construct
  source 1..19: mol_type = other RNA
cagaccaggccaaagtcca

SEQ ID NO: 35131 - RNA, 19 nt, synthetic construct
  source 1..19: mol_type = other RNA
tgcagttgtagtggctgct

SEQ ID NO: 35132 - RNA, 19 nt, synthetic construct
  source 1..19: mol_type = other RNA
cagccctccgccatcccct

SEQ ID NO: 35133 - RNA, 19 nt, synthetic construct
  source 1..19: mol_type = other RNA
accctgggcgtcacagggc

SEQ ID NO: 35134 - RNA, 19 nt, synthetic construct
  source 1..19: mol_type = other RNA
gcgtcccagtgacatcagg

SEQ ID NO: 35135 - RNA, 19 nt, synthetic construct
  source 1..19: mol_type = other RNA
gggactctgttggctgttg

SEQ ID NO: 35136 - RNA, 19 nt, synthetic construct
  source 1..19: mol_type = other RNA
gggggactctgttggctgt

SEQ ID NO: 35137 - RNA, 19 nt, synthetic construct
  source 1..19: mol_type = other RNA
acctggtcgatgcttacct

SEQ ID NO: 35138 - RNA, 19 nt, synthetic construct
  source 1..19: mol_type = other RNA
cacgttgtagttgaagcac

SEQ ID NO: 35139 - RNA, 19 nt, synthetic construct
  source 1..19: mol_type = other RNA
ccccggagttgaggagggc

SEQ ID NO: 35140 - RNA, 19 nt, synthetic construct
  source 1..19: mol_type = other RNA
agtccagccactctgacca

SEQ ID NO: 35141 - RNA, 19 nt, synthetic construct
  source 1..19: mol_type = other RNA
tgttgtggtcagctctgtg

SEQ ID NO: 35142 - RNA, 19 nt, synthetic construct
  source 1..19: mol_type = other RNA
agtccagccactctgacca

SEQ ID NO: 35143 - RNA, 19 nt, synthetic construct
  source 1..19: mol_type = other RNA
gtgaggatccaggtcgtcc

SEQ ID NO: 35144 - RNA, 19 nt, synthetic construct
  source 1..19: mol_type = other RNA
cgtggtcagcactgtggag

SEQ ID NO: 35145 - RNA, 19 nt, synthetic construct
  source 1..19: mol_type = other RNA
agtccagccactctgacca

SEQ ID NO: 35146 - RNA, 19 nt, synthetic construct
  source 1..19: mol_type = other RNA
ccccggagttgaggagggc

SEQ ID NO: 35147 - RNA, 19 nt, synthetic construct
  source 1..19: mol_type = other RNA
agtccagccactctgacca

SEQ ID NO: 35148 - RNA, 19 nt, synthetic construct
  source 1..19: mol_type = other RNA
tgttgtggtcagctctgtg

SEQ ID NO: 35149 - RNA, 19 nt, synthetic construct
  source 1..19: mol_type = other RNA
cgtggtcagcactgtggag

SEQ ID NO: 35150 - RNA, 19 nt, synthetic construct
  source 1..19: mol_type = other RNA
tgttgtggtcagctctgtg

SEQ ID NO: 35151 - RNA, 19 nt, synthetic construct
  source 1..19: mol_type = other RNA
ggtggtcagcactgtggag

SEQ ID NO: 35152 - RNA, 19 nt, synthetic construct
  source 1..19: mol_type = other RNA
gtccccacggtggacgagc

SEQ ID NO: 35153 - RNA, 19 nt, synthetic construct
  source 1..19: mol_type = other RNA
ggagccgccccacatgctg

SEQ ID NO: 35154 - RNA, 19 nt, synthetic construct
  source 1..19: mol_type = other RNA
aggctctggcagggcacct

SEQ ID NO: 35155 - RNA, 19 nt, synthetic construct
  source 1..19: mol_type = other RNA
ggtcctggaggtgcccctg

SEQ ID NO: 35156 - RNA, 19 nt, synthetic construct
  source 1..19: mol_type = other RNA
gccgtgctggtcagcactt

SEQ ID NO: 35157 - RNA, 19 nt, synthetic construct
  source 1..19: mol_type = other RNA
gccgtgctggtcagcactt

SEQ ID NO: 35158 - RNA, 19 nt, synthetic construct
  source 1..19: mol_type = other RNA
tggaggcgtgcgtgccgtc

SEQ ID NO: 35159 - RNA, 19 nt, synthetic construct
  source 1..19: mol_type = other RNA
ttctgctgtcggggaccag

SEQ ID NO: 35160 - RNA, 19 nt, synthetic construct
  source 1..19: mol_type = other RNA
cctcgtggacccgcctctc

SEQ ID NO: 35161 - RNA, 19 nt, synthetic construct
  source 1..19: mol_type = other RNA
gggtgtggtggccgtggtg

SEQ ID NO: 35162 - RNA, 19 nt, synthetic construct
  source 1..19: mol_type = other RNA
gggtggtgcccaagatgcc

SEQ ID NO: 35163 - RNA, 19 nt, synthetic construct
  source 1..19: mol_type = other RNA
gggtggtgcccaagatgcc

SEQ ID NO: 35164 - RNA, 19 nt, synthetic construct
  source 1..19: mol_type = other RNA
ggcgcctgggaaggttgca

SEQ ID NO: 35165 - RNA, 19 nt, synthetic construct
  source 1..19: mol_type = other RNA
gtgactcggtggttctgct

SEQ ID NO: 35166 - RNA, 19 nt, synthetic construct
  source 1..19: mol_type = other RNA
tggtctgttctgggagggt

SEQ ID NO: 35167 - RNA, 19 nt, synthetic construct
  source 1..19: mol_type = other RNA
tggtctgttctgggagggt

SEQ ID NO: 35168 - RNA, 19 nt, synthetic construct
  source 1..19: mol_type = other RNA
tgctgtggtctgctctgtg

SEQ ID NO: 35169 - RNA, 19 nt, synthetic construct
  source 1..19: mol_type = other RNA
ttaggctgctggcataagt

SEQ ID NO: 35170 - RNA, 19 nt, synthetic construct
  source 1..19: mol_type = other RNA
cacgagcatggccgccaga

SEQ ID NO: 35171 - RNA, 19 nt, synthetic construct
  source 1..19: mol_type = other RNA
gttggggtaggcacagcag

SEQ ID NO: 35172 - RNA, 19 nt, synthetic construct
  source 1..19: mol_type = other RNA
cagcgcgagaaggcactgt

SEQ ID NO: 35173 - RNA, 19 nt, synthetic construct
  source 1..19: mol_type = other RNA
cagtcctcctcggcaatgc

SEQ ID NO: 35174 - RNA, 19 nt, synthetic construct
  source 1..19: mol_type = other RNA
tgcagtggtcgtcactgca

SEQ ID NO: 35175 - RNA, 19 nt, synthetic construct
  source 1..19: mol_type = other RNA
tgtagtggatgctgagggc

SEQ ID NO: 35176 - RNA, 19 nt, synthetic construct
  source 1..19: mol_type = other RNA
gtgactcggtggtcctgct

SEQ ID NO: 35177 - RNA, 19 nt, synthetic construct
  source 1..19: mol_type = other RNA
gtgactcggtggtcctgct

SEQ ID NO: 35178 - RNA, 19 nt, synthetic construct
  source 1..19: mol_type = other RNA
gtgactcggtggtcctgct

SEQ ID NO: 35179 - RNA, 19 nt, synthetic construct
  source 1..19: mol_type = other RNA
tgactcggtggtcctgctg

SEQ ID NO: 35180 - RNA, 19 nt, synthetic construct
  source 1..19: mol_type = other RNA
tgactcggtggtcctgctg

SEQ ID NO: 35181 - RNA, 19 nt, synthetic construct
  source 1..19: mol_type = other RNA
tgactcggtggtcctgctg

SEQ ID NO: 35182 - RNA, 19 nt, synthetic construct
  source 1..19: mol_type = other RNA
tgaaggttggcaggctgct

SEQ ID NO: 35183 - RNA, 19 nt, synthetic construct
  source 1..19: mol_type = other RNA
gctggtcagcactttggga

SEQ ID NO: 35184 - RNA, 19 nt, synthetic construct
  source 1..19: mol_type = other RNA
gctggtcagcactttggga

SEQ ID NO: 35185 - RNA, 19 nt, synthetic construct
  source 1..19: mol_type = other RNA
ccgcctctcctggcagcag

SEQ ID NO: 35186 - RNA, 19 nt, synthetic construct
  source 1..19: mol_type = other RNA
gcattggcacaggcagcct

SEQ ID NO: 35187 - RNA, 19 nt, synthetic construct
  source 1..19: mol_type = other RNA
gtcttcgttcttgcaggtc

SEQ ID NO: 35188 - RNA, 19 nt, synthetic construct
  source 1..19: mol_type = other RNA
tgacgctcacgcccagggc

SEQ ID NO: 35189 - RNA, 19 nt, synthetic construct
  source 1..19: mol_type = other RNA
tggacgtcacagtgcacct

SEQ ID NO: 35190 - RNA, 19 nt, synthetic construct
  source 1..19: mol_type = other RNA
cgtggttgtggtagtcagc

SEQ ID NO: 35191 - RNA, 19 nt, synthetic construct
  source 1..19: mol_type = other RNA
gtgtgtgctgaaacagccc

SEQ ID NO: 35192 - RNA, 19 nt, synthetic construct
  source 1..19: mol_type = other RNA
cagcaggctccgtgctggc

SEQ ID NO: 35193 - RNA, 19 nt, synthetic construct
  source 1..19: mol_type = other RNA
cacatcttgcccccagcag

SEQ ID NO: 35194 - RNA, 19 nt, synthetic construct
  source 1..19: mol_type = other RNA
ggcactctatgctctttgg

SEQ ID NO: 35195 - RNA, 19 nt, synthetic construct
  source 1..19: mol_type = other RNA
cctcggggtagttctccgc

SEQ ID NO: 35196 - RNA, 19 nt, synthetic construct
  source 1..19: mol_type = other RNA
gcaggggtcctcaaagctg

SEQ ID NO: 35197 - RNA, 19 nt, synthetic construct
  source 1..19: mol_type = other RNA
tatgctctttggtgcccag

SEQ ID NO: 35198 - RNA, 19 nt, synthetic construct
  source 1..19: mol_type = other RNA
gttctccgcccggcactct

SEQ ID NO: 35199 - RNA, 19 nt, synthetic construct
  source 1..19: mol_type = other RNA
ttctccgcccggcactcta

SEQ ID NO: 35200 - RNA, 19 nt, synthetic construct
  source 1..19: mol_type = other RNA
tctatgctctttggtgccc

SEQ ID NO: 35201 - RNA, 19 nt, synthetic construct
  source 1..19: mol_type = other RNA
ccccagcagccctgatgtt

SEQ ID NO: 35202 - RNA, 19 nt, synthetic construct
  source 1..19: mol_type = other RNA
ggagcaggggtcctcaaag

SEQ ID NO: 35203 - RNA, 19 nt, synthetic construct
  source 1..19: mol_type = other RNA
ggcactcggccccaggggt

SEQ ID NO: 35204 - RNA, 19 nt, synthetic construct
  source 1..19: mol_type = other RNA
ggcactctatgtccttagg

SEQ ID NO: 35205 - RNA, 19 nt, synthetic construct
  source 1..19: mol_type = other RNA
tggcactctatgtccttag

SEQ ID NO: 35206 - RNA, 19 nt, synthetic construct
  source 1..19: mol_type = other RNA
cactctatgctctttggtg

SEQ ID NO: 35207 - RNA, 19 nt, synthetic construct
  source 1..19: mol_type = other RNA
tctccgcccggcactctat

SEQ ID NO: 35208 - RNA, 19 nt, synthetic construct
  source 1..19: mol_type = other RNA
atgttgaacctgcctgtct

SEQ ID NO: 35209 - RNA, 19 nt, synthetic construct
  source 1..19: mol_type = other RNA
agttctccgcccggcactc

SEQ ID NO: 35210 - RNA, 19 nt, synthetic construct
  source 1..19: mol_type = other RNA
ccagcctgacaaacacctg

SEQ ID NO: 35211 - RNA, 19 nt, synthetic construct
  source 1..19: mol_type = other RNA
gagcaggggtcctcaaagc

SEQ ID NO: 35212 - RNA, 19 nt, synthetic construct
  source 1..19: mol_type = other RNA
accctctctgcctcaggtt

SEQ ID NO: 35213 - RNA, 19 nt, synthetic construct
  source 1..19: mol_type = other RNA
gaggttgggaagtccacgt

SEQ ID NO: 35214 - RNA, 19 nt, synthetic construct
  source 1..19: mol_type = other RNA
tgaggttgggaagtccacg

SEQ ID NO: 35215 - RNA, 19 nt, synthetic construct
  source 1..19: mol_type = other RNA
gcagccctgatgttttcaa

SEQ ID NO: 35216 - RNA, 19 nt, synthetic construct
  source 1..19: mol_type = other RNA
agcagccctgatgttttca

SEQ ID NO: 35217 - RNA, 19 nt, synthetic construct
  source 1..19: mol_type = other RNA
ttggtgcccagcacatctt

SEQ ID NO: 35218 - RNA, 19 nt, synthetic construct
  source 1..19: mol_type = other RNA
ccctctctgcctcaggttt

SEQ ID NO: 35219 - RNA, 19 nt, synthetic construct
  source 1..19: mol_type = other RNA
agtttccatgtccccgcct

SEQ ID NO: 35220 - RNA, 19 nt, synthetic construct
  source 1..19: mol_type = other RNA
ccagcacatcttgccccca

SEQ ID NO: 35221 - RNA, 19 nt, synthetic construct
  source 1..19: mol_type = other RNA
acatcttgcccccagcagc

SEQ ID NO: 35222 - RNA, 19 nt, synthetic construct
  source 1..19: mol_type = other RNA
aggttgggaagtccacgtc

SEQ ID NO: 35223 - RNA, 19 nt, synthetic construct
  source 1..19: mol_type = other RNA
ctatgctctttggtgccca

SEQ ID NO: 35224 - RNA, 19 nt, synthetic construct
  source 1..19: mol_type = other RNA
ttgaagcacatgttgaacc

SEQ ID NO: 35225 - RNA, 19 nt, synthetic construct
  source 1..19: mol_type = other RNA
tgcccagcacatcttgccc

SEQ ID NO: 35226 - RNA, 19 nt, synthetic construct
  source 1..19: mol_type = other RNA
cacatctggccctggtggg

SEQ ID NO: 35227 - RNA, 19 nt, synthetic construct
  source 1..19: mol_type = other RNA
agcaggggtcctcaaagct

SEQ ID NO: 35228 - RNA, 19 nt, synthetic construct
  source 1..19: mol_type = other RNA
ggtggtggtggccgtctcc

SEQ ID NO: 35229 - RNA, 19 nt, synthetic construct
  source 1..19: mol_type = other RNA
cctgaggttgggaagtcca

SEQ ID NO: 35230 - RNA, 19 nt, synthetic construct
  source 1..19: mol_type = other RNA
cccccagcagccctgatgt

SEQ ID NO: 35231 - RNA, 19 nt, synthetic construct
  source 1..19: mol_type = other RNA
tttggtgcccagcacatct

SEQ ID NO: 35232 - RNA, 19 nt, synthetic construct
  source 1..19: mol_type = other RNA
acatgttgaacctgcctgt

SEQ ID NO: 35233 - RNA, 19 nt, synthetic construct
  source 1..19: mol_type = other RNA
gaagcacatgttgaacctg

SEQ ID NO: 35234 - RNA, 19 nt, synthetic construct
  source 1..19: mol_type = other RNA
tctccaggagccagcacgg

SEQ ID NO: 35235 - RNA, 19 nt, synthetic construct
  source 1..19: mol_type = other RNA
aaaagtttccatgtccccg

SEQ ID NO: 35236 - RNA, 19 nt, synthetic construct
  source 1..19: mol_type = other RNA
agggggacaccaggctggg

SEQ ID NO: 35237 - RNA, 19 nt, synthetic construct
  source 1..19: mol_type = other RNA
agggggacaccaggctggg

SEQ ID NO: 35238 - RNA, 19 nt, synthetic construct
  source 1..19: mol_type = other RNA
agggggacaccaggctggg

SEQ ID NO: 35239 - RNA, 19 nt, synthetic construct
  source 1..19: mol_type = other RNA
agggggacaccaggctggg

SEQ ID NO: 35240 - RNA, 19 nt, synthetic construct
  source 1..19: mol_type = other RNA
cctctctgcctcaggtttt

SEQ ID NO: 35241 - RNA, 19 nt, synthetic construct
  source 1..19: mol_type = other RNA
atgttttcaaaagtttcca

SEQ ID NO: 35242 - RNA, 19 nt, synthetic construct
  source 1..19: mol_type = other RNA
cagccctgatgttttcaaa

SEQ ID NO: 35243 - RNA, 19 nt, synthetic construct
  source 1..19: mol_type = other RNA
catcttgcccccagcagcc

SEQ ID NO: 35244 - RNA, 19 nt, synthetic construct
  source 1..19: mol_type = other RNA
agggtggggactgctgtgg

SEQ ID NO: 35245 - RNA, 19 nt, synthetic construct
  source 1..19: mol_type = other RNA
gcccagcacatcttgcccc

SEQ ID NO: 35246 - RNA, 19 nt, synthetic construct
  source 1..19: mol_type = other RNA
agagaagtgggagctgggg

SEQ ID NO: 35247 - RNA, 19 nt, synthetic construct
  source 1..19: mol_type = other RNA
caaaagtttccatgtcccc

SEQ ID NO: 35248 - RNA, 19 nt, synthetic construct
  source 1..19: mol_type = other RNA
ctgaggttgggaagtccac

SEQ ID NO: 35249 - RNA, 19 nt, synthetic construct
  source 1..19: mol_type = other RNA
gccctggtgggcggggtcc

SEQ ID NO: 35250 - RNA, 19 nt, synthetic construct
  source 1..19: mol_type = other RNA
ccctgaggttgggaagtcc

SEQ ID NO: 35251 - RNA, 19 nt, synthetic construct
  source 1..19: mol_type = other RNA
ctccaggagccagcacggt

SEQ ID NO: 35252 - RNA, 19 nt, synthetic construct
  source 1..19: mol_type = other RNA
gaggagggcgtggccgtgg

SEQ ID NO: 35253 - RNA, 19 nt, synthetic construct
  source 1..19: mol_type = other RNA
aggcactcggccccagggg

SEQ ID NO: 35254 - RNA, 19 nt, synthetic construct
  source 1..19: mol_type = other RNA
ataggtgcaggtgcaggcc

SEQ ID NO: 35255 - RNA, 19 nt, synthetic construct
  source 1..19: mol_type = other RNA
ctgggacagtgggttctgt

SEQ ID NO: 35256 - RNA, 19 nt, synthetic construct
  source 1..19: mol_type = other RNA
tgtcacagccaggggcagg

SEQ ID NO: 35257 - RNA, 19 nt, synthetic construct
  source 1..19: mol_type = other RNA
cataggtgcaggtgcaggc

SEQ ID NO: 35258 - RNA, 19 nt, synthetic construct
  source 1..19: mol_type = other RNA
ttttcaaaagtttccatgt

SEQ ID NO: 35259 - RNA, 19 nt, synthetic construct
  source 1..19: mol_type = other RNA
atgctctttggtgcccagc

SEQ ID NO: 35260 - RNA, 19 nt, synthetic construct
  source 1..19: mol_type = other RNA
agggggctcaggctgggga

SEQ ID NO: 35261 - RNA, 19 nt, synthetic construct
  source 1..19: mol_type = other RNA
caacttctgcaggttccca

SEQ ID NO: 35262 - RNA, 19 nt, synthetic construct
  source 1..19: mol_type = other RNA
cagcctgacaaacacctgc

SEQ ID NO: 35263 - RNA, 19 nt, synthetic construct
  source 1..19: mol_type = other RNA
tccaggccaggcaggtcca

SEQ ID NO: 35264 - RNA, 19 nt, synthetic construct
  source 1..19: mol_type = other RNA
cggggctggcaggtggtgg

SEQ ID NO: 35265 - RNA, 19 nt, synthetic construct
  source 1..19: mol_type = other RNA
accggggctggcaggtggt

SEQ ID NO: 35266 - RNA, 19 nt, synthetic construct
  source 1..19: mol_type = other RNA
gtggtggtggccgtctcca

SEQ ID NO: 35267 - RNA, 19 nt, synthetic construct
  source 1..19: mol_type = other RNA
gggtggggactgctgtggt

SEQ ID NO: 35268 - RNA, 19 nt, synthetic construct
  source 1..19: mol_type = other RNA
tcaaaagtttccatgtccc

SEQ ID NO: 35269 - RNA, 19 nt, synthetic construct
  source 1..19: mol_type = other RNA
ttcaaaagtttccatgtcc

SEQ ID NO: 35270 - RNA, 19 nt, synthetic construct
  source 1..19: mol_type = other RNA
gttttcaaaagtttccatg

SEQ ID NO: 35271 - RNA, 19 nt, synthetic construct
  source 1..19: mol_type = other RNA
tgttttcaaaagtttccat

SEQ ID NO: 35272 - RNA, 19 nt, synthetic construct
  source 1..19: mol_type = other RNA
cctgatgttttcaaaagtt

SEQ ID NO: 35273 - RNA, 19 nt, synthetic construct
  source 1..19: mol_type = other RNA
agccctgatgttttcaaaa

SEQ ID NO: 35274 - RNA, 19 nt, synthetic construct
  source 1..19: mol_type = other RNA
gcccccagcagccctgatg

SEQ ID NO: 35275 - RNA, 19 nt, synthetic construct
  source 1..19: mol_type = other RNA
tcttgcccccagcagccct

SEQ ID NO: 35276 - RNA, 19 nt, synthetic construct
  source 1..19: mol_type = other RNA
cccagcacatcttgccccc

SEQ ID NO: 35277 - RNA, 19 nt, synthetic construct
  source 1..19: mol_type = other RNA
gtgcccagcacatcttgcc

SEQ ID NO: 35278 - RNA, 19 nt, synthetic construct
  source 1..19: mol_type = other RNA
ctttggtgcccagcacatc

SEQ ID NO: 35279 - RNA, 19 nt, synthetic construct
  source 1..19: mol_type = other RNA
tgaagcacatgttgaacct

SEQ ID NO: 35280 - RNA, 19 nt, synthetic construct
  source 1..19: mol_type = other RNA
ggcagtggctgtagtcgtc

SEQ ID NO: 35281 - RNA, 19 nt, synthetic construct
  source 1..19: mol_type = other RNA
aggagggcgtggccgtgga

SEQ ID NO: 35282 - RNA, 19 nt, synthetic construct
  source 1..19: mol_type = other RNA
ccctgggctggaggagggg

SEQ ID NO: 35283 - RNA, 19 nt, synthetic construct
  source 1..19: mol_type = other RNA
atgtggggctgctgggcag

SEQ ID NO: 35284 - RNA, 19 nt, synthetic construct
  source 1..19: mol_type = other RNA
gggggacaccaggctgggc

SEQ ID NO: 35285 - RNA, 19 nt, synthetic construct
  source 1..19: mol_type = other RNA
cagggggacaccaggctgg

SEQ ID NO: 35286 - RNA, 19 nt, synthetic construct
  source 1..19: mol_type = other RNA
ccctgggctggaggagggg

SEQ ID NO: 35287 - RNA, 19 nt, synthetic construct
  source 1..19: mol_type = other RNA
atgtggggctgctgggcag

SEQ ID NO: 35288 - RNA, 19 nt, synthetic construct
  source 1..19: mol_type = other RNA
gggggacaccaggctgggc

SEQ ID NO: 35289 - RNA, 19 nt, synthetic construct
  source 1..19: mol_type = other RNA
cagggggacaccaggctgg

SEQ ID NO: 35290 - RNA, 19 nt, synthetic construct
  source 1..19: mol_type = other RNA
gtccctggagtggaggagg

SEQ ID NO: 35291 - RNA, 19 nt, synthetic construct
  source 1..19: mol_type = other RNA
ccctgggctggaggagggg

SEQ ID NO: 35292 - RNA, 19 nt, synthetic construct
  source 1..19: mol_type = other RNA
atgtggggctgctgggcag

SEQ ID NO: 35293 - RNA, 19 nt, synthetic construct
  source 1..19: mol_type = other RNA
gggggacaccaggctgggc

SEQ ID NO: 35294 - RNA, 19 nt, synthetic construct
  source 1..19: mol_type = other RNA
cagggggacaccaggctgg

SEQ ID NO: 35295 - RNA, 19 nt, synthetic construct
  source 1..19: mol_type = other RNA
ccctgggctggaggagggg

SEQ ID NO: 35296 - RNA, 19 nt, synthetic construct
  source 1..19: mol_type = other RNA
atgtggggctgctgggcag

SEQ ID NO: 35297 - RNA, 19 nt, synthetic construct
  source 1..19: mol_type = other RNA
gggggacaccaggctgggc

SEQ ID NO: 35298 - RNA, 19 nt, synthetic construct
  source 1..19: mol_type = other RNA
cagggggacaccaggctgg

SEQ ID NO: 35299 - RNA, 19 nt, synthetic construct
  source 1..19: mol_type = other RNA
ccctgggctggaggagggg

SEQ ID NO: 35300 - RNA, 19 nt, synthetic construct
  source 1..19: mol_type = other RNA
ggcaggctgctggggagca

SEQ ID NO: 35301 - RNA, 19 nt, synthetic construct
  source 1..19: mol_type = other RNA
ccctgatgttttcaaaagt

SEQ ID NO: 35302 - RNA, 19 nt, synthetic construct
  source 1..19: mol_type = other RNA
gatcctgtagttgtagcac

SEQ ID NO: 35303 - RNA, 19 nt, synthetic construct
  source 1..19: mol_type = other RNA
gggttctgtggagcctgca

SEQ ID NO: 35304 - RNA, 19 nt, synthetic construct
  source 1..19: mol_type = other RNA
gggccgatgtggggctgct

SEQ ID NO: 35305 - RNA, 19 nt, synthetic construct
  source 1..19: mol_type = other RNA
gggccgatgtggggctgct

SEQ ID NO: 35306 - RNA, 19 nt, synthetic construct
  source 1..19: mol_type = other RNA
gggccgatgtggggctgct

SEQ ID NO: 35307 - RNA, 19 nt, synthetic construct
  source 1..19: mol_type = other RNA
gggccgatgtggggctgct

SEQ ID NO: 35308 - RNA, 19 nt, synthetic construct
  source 1..19: mol_type = other RNA
atggggtagctgtagtcca

SEQ ID NO: 35309 - RNA, 19 nt, synthetic construct
  source 1..19: mol_type = other RNA
atggggtagctgtagtcca

SEQ ID NO: 35310 - RNA, 19 nt, synthetic construct
  source 1..19: mol_type = other RNA
atggggtagctgtagtcca

SEQ ID NO: 35311 - RNA, 19 nt, synthetic construct
  source 1..19: mol_type = other RNA
atggggtagctgtagtcca

SEQ ID NO: 35312 - RNA, 19 nt, synthetic construct
  source 1..19: mol_type = other RNA
gccgtggtggtcagcactt

SEQ ID NO: 35313 - RNA, 19 nt, synthetic construct
  source 1..19: mol_type = other RNA
ctggccaccgtgcagttct

SEQ ID NO: 35314 - RNA, 19 nt, synthetic construct
  source 1..19: mol_type = other RNA
ggatcagctcgtagctctc

SEQ ID NO: 35315 - RNA, 19 nt, synthetic construct
  source 1..19: mol_type = other RNA
caggaagatccccatgtag

SEQ ID NO: 35316 - RNA, 19 nt, synthetic construct
  source 1..19: mol_type = other RNA
tggggaagacagtgacggg

SEQ ID NO: 35317 - RNA, 19 nt, synthetic construct
  source 1..19: mol_type = other RNA
cactttgatgggcaggtgc

SEQ ID NO: 35318 - RNA, 19 nt, synthetic construct
  source 1..19: mol_type = other RNA
tggccgtgtccccgccgtc

SEQ ID NO: 35319 - RNA, 19 nt, synthetic construct
  source 1..19: mol_type = other RNA
gctgtgagcgcactggatg

SEQ ID NO: 35320 - RNA, 19 nt, synthetic construct
  source 1..19: mol_type = other RNA
tgcccgaggggcaggcagc

SEQ ID NO: 35321 - RNA, 19 nt, synthetic construct
  source 1..19: mol_type = other RNA
ctctttggtgcccagcaca

SEQ ID NO: 35322 - RNA, 19 nt, synthetic construct
  source 1..19: mol_type = other RNA
caggctccgtgctggcact

SEQ ID NO: 35323 - RNA, 19 nt, synthetic construct
  source 1..19: mol_type = other RNA
gacagacacagccggacac

SEQ ID NO: 35324 - RNA, 19 nt, synthetic construct
  source 1..19: mol_type = other RNA
cacggcaggtcctggcact

SEQ ID NO: 35325 - RNA, 19 nt, synthetic construct
  source 1..19: mol_type = other RNA
tggtggagtcaacctggga

SEQ ID NO: 35326 - RNA, 19 nt, synthetic construct
  source 1..19: mol_type = other RNA
gcaggcctcaaggctgtga

SEQ ID NO: 35327 - RNA, 19 nt, synthetic construct
  source 1..19: mol_type = other RNA
acatctggccctggtgggc

SEQ ID NO: 35328 - RNA, 19 nt, synthetic construct
  source 1..19: mol_type = other RNA
ctgcccgaggggcaggcag

SEQ ID NO: 35329 - RNA, 19 nt, synthetic construct
  source 1..19: mol_type = other RNA
gcccgaggggcaggcagcc

SEQ ID NO: 35330 - RNA, 19 nt, synthetic construct
  source 1..19: mol_type = other RNA
actcggccccaggggtgcc

SEQ ID NO: 35331 - RNA, 19 nt, synthetic construct
  source 1..19: mol_type = other RNA
agggagtagagaagtggga

SEQ ID NO: 35332 - RNA, 19 nt, synthetic construct
  source 1..19: mol_type = other RNA
gcaagggcaccgtctcctc

SEQ ID NO: 35333 - RNA, 19 nt, synthetic construct
  source 1..19: mol_type = other RNA
gtggaagaggctgtagggc

SEQ ID NO: 35334 - RNA, 19 nt, synthetic construct
  source 1..19: mol_type = other RNA
tcaaggctgtgagcgcact

SEQ ID NO: 35335 - RNA, 19 nt, synthetic construct
  source 1..19: mol_type = other RNA
aaggccggccccagcaggg

SEQ ID NO: 35336 - RNA, 19 nt, synthetic construct
  source 1..19: mol_type = other RNA
tgccggtggtcccacaggg

SEQ ID NO: 35337 - RNA, 19 nt, synthetic construct
  source 1..19: mol_type = other RNA
cactggggttccggcaggt

SEQ ID NO: 35338 - RNA, 19 nt, synthetic construct
  source 1..19: mol_type = other RNA
ggcattgtcacagccaggg

SEQ ID NO: 35339 - RNA, 19 nt, synthetic construct
  source 1..19: mol_type = other RNA
ggcccatccaacttctgca

SEQ ID NO: 35340 - RNA, 19 nt, synthetic construct
  source 1..19: mol_type = other RNA
gcagctgcgtgtagatgga

SEQ ID NO: 35341 - RNA, 19 nt, synthetic construct
  source 1..19: mol_type = other RNA
ctgaaacagcccacgtcca

SEQ ID NO: 35342 - RNA, 19 nt, synthetic construct
  source 1..19: mol_type = other RNA
gctctttggtgcccagcac

SEQ ID NO: 35343 - RNA, 19 nt, synthetic construct
  source 1..19: mol_type = other RNA
cgtggccgtggtcctggag

SEQ ID NO: 35344 - RNA, 19 nt, synthetic construct
  source 1..19: mol_type = other RNA
cgtggccgtggtcctggag

SEQ ID NO: 35345 - RNA, 19 nt, synthetic construct
  source 1..19: mol_type = other RNA
ggatgcaggctgtggggtc

SEQ ID NO: 35346 - RNA, 19 nt, synthetic construct
  source 1..19: mol_type = other RNA
ggggccgatgtggggctgc

SEQ ID NO: 35347 - RNA, 19 nt, synthetic construct
  source 1..19: mol_type = other RNA
tggcccaactcccgcaggg

SEQ ID NO: 35348 - RNA, 19 nt, synthetic construct
  source 1..19: mol_type = other RNA
ggggccgatgtggggctgc

SEQ ID NO: 35349 - RNA, 19 nt, synthetic construct
  source 1..19: mol_type = other RNA
tggcccaactcccgcaggg

SEQ ID NO: 35350 - RNA, 19 nt, synthetic construct
  source 1..19: mol_type = other RNA
ggggccgatgtggggctgc

SEQ ID NO: 35351 - RNA, 19 nt, synthetic construct
  source 1..19: mol_type = other RNA
tggcccaactcccgcaggg

SEQ ID NO: 35352 - RNA, 19 nt, synthetic construct
  source 1..19: mol_type = other RNA
ggggccgatgtggggctgc

SEQ ID NO: 35353 - RNA, 19 nt, synthetic construct
  source 1..19: mol_type = other RNA
gaggcactcggccccaggg

SEQ ID NO: 35354 - RNA, 19 nt, synthetic construct
  source 1..19: mol_type = other RNA
ggtggctgtgcttgtcagc

SEQ ID NO: 35355 - RNA, 19 nt, synthetic construct
  source 1..19: mol_type = other RNA
ggtggctgtgcttgtcagc

SEQ ID NO: 35356 - RNA, 19 nt, synthetic construct
  source 1..19: mol_type = other RNA
ggcaggtttttaggcaggg

SEQ ID NO: 35357 - RNA, 19 nt, synthetic construct
  source 1..19: mol_type = other RNA
tgcaggcctcaaggctgtg

SEQ ID NO: 35358 - RNA, 19 nt, synthetic construct
  source 1..19: mol_type = other RNA
ccccggagtggaggagggc

SEQ ID NO: 35359 - RNA, 19 nt, synthetic construct
  source 1..19: mol_type = other RNA
ccccggagtggaggagggc

SEQ ID NO: 35360 - RNA, 19 nt, synthetic construct
  source 1..19: mol_type = other RNA
ctagaggagggtgttgcca

SEQ ID NO: 35361 - RNA, 19 nt, synthetic construct
  source 1..19: mol_type = other RNA
ctagaggagggtgttgcca

SEQ ID NO: 35362 - RNA, 19 nt, synthetic construct
  source 1..19: mol_type = other RNA
ctagaggagggtgttgcca

SEQ ID NO: 35363 - RNA, 19 nt, synthetic construct
  source 1..19: mol_type = other RNA
ctagaggagggtgttgcca

SEQ ID NO: 35364 - RNA, 19 nt, synthetic construct
  source 1..19: mol_type = other RNA
ctagaggagggtgttgcca

SEQ ID NO: 35365 - RNA, 19 nt, synthetic construct
  source 1..19: mol_type = other RNA
cggtcacagtccacctgct

SEQ ID NO: 35366 - RNA, 19 nt, synthetic construct
  source 1..19: mol_type = other RNA
ctgcaggttcccaaactgg

SEQ ID NO: 35367 - RNA, 19 nt, synthetic construct
  source 1..19: mol_type = other RNA
cccgaggggcaggcagcca

SEQ ID NO: 35368 - RNA, 19 nt, synthetic construct
  source 1..19: mol_type = other RNA
ggtcctgggtgtccccaga

SEQ ID NO: 35369 - RNA, 19 nt, synthetic construct
  source 1..19: mol_type = other RNA
gtgtggtggccgtggtggt

SEQ ID NO: 35370 - RNA, 19 nt, synthetic construct
  source 1..19: mol_type = other RNA
gccgtgtccccgccgtcca

SEQ ID NO: 35371 - RNA, 19 nt, synthetic construct
  source 1..19: mol_type = other RNA
acttggtgcagacgccgtc

SEQ ID NO: 35372 - RNA, 19 nt, synthetic construct
  source 1..19: mol_type = other RNA
gtgggtgcaggggcactgc

SEQ ID NO: 35373 - RNA, 19 nt, synthetic construct
  source 1..19: mol_type = other RNA
ggctgccgacaggggcagc

SEQ ID NO: 35374 - RNA, 19 nt, synthetic construct
  source 1..19: mol_type = other RNA
agagccggtggctgcactc

SEQ ID NO: 35375 - RNA, 19 nt, synthetic construct
  source 1..19: mol_type = other RNA
tcttccggtcccaggacac

SEQ ID NO: 35376 - RNA, 19 nt, synthetic construct
  source 1..19: mol_type = other RNA
ggtggccgtggtggtcagc

SEQ ID NO: 35377 - RNA, 19 nt, synthetic construct
  source 1..19: mol_type = other RNA
ttcttgctgaaaccgctgc

SEQ ID NO: 35378 - RNA, 19 nt, synthetic construct
  source 1..19: mol_type = other RNA
agggcactgtcctctccgt

SEQ ID NO: 35379 - RNA, 19 nt, synthetic construct
  source 1..19: mol_type = other RNA
gagctggtggccggggtgc

SEQ ID NO: 35380 - RNA, 19 nt, synthetic construct
  source 1..19: mol_type = other RNA
gagctggtggccggggtgc

SEQ ID NO: 35381 - RNA, 19 nt, synthetic construct
  source 1..19: mol_type = other RNA
gagctggtggccggggtgc

SEQ ID NO: 35382 - RNA, 19 nt, synthetic construct
  source 1..19: mol_type = other RNA
gagctggtggccggggtgc

SEQ ID NO: 35383 - RNA, 19 nt, synthetic construct
  source 1..19: mol_type = other RNA
ctgaggctccccctgcagc

SEQ ID NO: 35384 - RNA, 19 nt, synthetic construct
  source 1..19: mol_type = other RNA
tgagagggtggggactgct

SEQ ID NO: 35385 - RNA, 19 nt, synthetic construct
  source 1..19: mol_type = other RNA
tgcagttctccagggtcca

SEQ ID NO: 35386 - RNA, 19 nt, synthetic construct
  source 1..19: mol_type = other RNA
agcagggcactgtcctctc

SEQ ID NO: 35387 - RNA, 19 nt, synthetic construct
  source 1..19: mol_type = other RNA
gcgctgggggttggagcag

SEQ ID NO: 35388 - RNA, 19 nt, synthetic construct
  source 1..19: mol_type = other RNA
gggggcagaagcagccgtc

SEQ ID NO: 35389 - RNA, 19 nt, synthetic construct
  source 1..19: mol_type = other RNA
cggcaggtcctggcactgc

SEQ ID NO: 35390 - RNA, 19 nt, synthetic construct
  source 1..19: mol_type = other RNA
caccagctgcaccagcagc

SEQ ID NO: 35391 - RNA, 19 nt, synthetic construct
  source 1..19: mol_type = other RNA
gcagagccggtggctgcac

SEQ ID NO: 35392 - RNA, 19 nt, synthetic construct
  source 1..19: mol_type = other RNA
taccctctctgcctcaggt

SEQ ID NO: 35393 - RNA, 19 nt, synthetic construct
  source 1..19: mol_type = other RNA
tggtggtggtggccgtctc

SEQ ID NO: 35394 - RNA, 19 nt, synthetic construct
  source 1..19: mol_type = other RNA
gtggggactgctgtggtgc

SEQ ID NO: 35395 - RNA, 19 nt, synthetic construct
  source 1..19: mol_type = other RNA
ccctggagtggaggagggc

SEQ ID NO: 35396 - RNA, 19 nt, synthetic construct
  source 1..19: mol_type = other RNA
caggctgctggggagcact

SEQ ID NO: 35397 - RNA, 19 nt, synthetic construct
  source 1..19: mol_type = other RNA
ccgtgcagttctccagggt

SEQ ID NO: 35398 - RNA, 19 nt, synthetic construct
  source 1..19: mol_type = other RNA
ctccaggctctggcagggc

SEQ ID NO: 35399 - RNA, 19 nt, synthetic construct
  source 1..19: mol_type = other RNA
tgcaggctgtggggtcagc

SEQ ID NO: 35400 - RNA, 19 nt, synthetic construct
  source 1..19: mol_type = other RNA
tcctggcagcaggtgcact

SEQ ID NO: 35401 - RNA, 19 nt, synthetic construct
  source 1..19: mol_type = other RNA
agcaggtgcaggagctgca

SEQ ID NO: 35402 - RNA, 19 nt, synthetic construct
  source 1..19: mol_type = other RNA
ccagctgcaccagcagctg

SEQ ID NO: 35403 - RNA, 19 nt, synthetic construct
  source 1..19: mol_type = other RNA
catctggccctggtgggcg

SEQ ID NO: 35404 - RNA, 19 nt, synthetic construct
  source 1..19: mol_type = other RNA
gctgcactcccacctccgg

SEQ ID NO: 35405 - RNA, 19 nt, synthetic construct
  source 1..19: mol_type = other RNA
gcacttcatctggtcctca

SEQ ID NO: 35406 - RNA, 19 nt, synthetic construct
  source 1..19: mol_type = other RNA
taggtgcaggtgcaggcct

SEQ ID NO: 35407 - RNA, 19 nt, synthetic construct
  source 1..19: mol_type = other RNA
tggcaggtggtggtacctg

SEQ ID NO: 35408 - RNA, 19 nt, synthetic construct
  source 1..19: mol_type = other RNA
ggtgtggtggccgtggtgg

SEQ ID NO: 35409 - RNA, 19 nt, synthetic construct
  source 1..19: mol_type = other RNA
ggtcctggaggtggccgtg

SEQ ID NO: 35410 - RNA, 19 nt, synthetic construct
  source 1..19: mol_type = other RNA
ggtcctggaggtggccgtg

SEQ ID NO: 35411 - RNA, 19 nt, synthetic construct
  source 1..19: mol_type = other RNA
gaggactgaggaggacaca

SEQ ID NO: 35412 - RNA, 19 nt, synthetic construct
  source 1..19: mol_type = other RNA
gcaggctgtggggtcagca

SEQ ID NO: 35413 - RNA, 19 nt, synthetic construct
  source 1..19: mol_type = other RNA
tcctgaggctccccctgca

SEQ ID NO: 35414 - RNA, 19 nt, synthetic construct
  source 1..19: mol_type = other RNA
ttcctgaggctccccctgc

SEQ ID NO: 35415 - RNA, 19 nt, synthetic construct
  source 1..19: mol_type = other RNA
gagcaggtgcaggagctgc

SEQ ID NO: 35416 - RNA, 19 nt, synthetic construct
  source 1..19: mol_type = other RNA
cccgcacaggccgcagacc

SEQ ID NO: 35417 - RNA, 19 nt, synthetic construct
  source 1..19: mol_type = other RNA
ttcccacacaggccgcaca

SEQ ID NO: 35418 - RNA, 19 nt, synthetic construct
  source 1..19: mol_type = other RNA
ttggtgcaggtgccgcact

SEQ ID NO: 35419 - RNA, 19 nt, synthetic construct
  source 1..19: mol_type = other RNA
gtcgtcgaagttcccgcac

SEQ ID NO: 35420 - RNA, 19 nt, synthetic construct
  source 1..19: mol_type = other RNA
ccagctccagcagggcact

SEQ ID NO: 35421 - RNA, 19 nt, synthetic construct
  source 1..19: mol_type = other RNA
tctgtgaggatccaggtcg

SEQ ID NO: 35422 - RNA, 19 nt, synthetic construct
  source 1..19: mol_type = other RNA
tctgtgaggatccaggtcg

SEQ ID NO: 35423 - RNA, 19 nt, synthetic construct
  source 1..19: mol_type = other RNA
tctgtgaggatccaggtcg

SEQ ID NO: 35424 - RNA, 19 nt, synthetic construct
  source 1..19: mol_type = other RNA
tctgtgaggatccaggtcg

SEQ ID NO: 35425 - RNA, 19 nt, synthetic construct
  source 1..19: mol_type = other RNA
tctgtgaggatccaggtcg

SEQ ID NO: 35426 - RNA, 19 nt, synthetic construct
  source 1..19: mol_type = other RNA
ctgtgaggatccaggtcgt

SEQ ID NO: 35427 - RNA, 19 nt, synthetic construct
  source 1..19: mol_type = other RNA
ctgtgaggatccaggtcgt

SEQ ID NO: 35428 - RNA, 19 nt, synthetic construct
  source 1..19: mol_type = other RNA
ctgtgaggatccaggtcgt

SEQ ID NO: 35429 - RNA, 19 nt, synthetic construct
  source 1..19: mol_type = other RNA
ctgtgaggatccaggtcgt

SEQ ID NO: 35430 - RNA, 19 nt, synthetic construct
  source 1..19: mol_type = other RNA
ctgtgaggatccaggtcgt

SEQ ID NO: 35431 - RNA, 19 nt, synthetic construct
  source 1..19: mol_type = other RNA
caggctgcaggtcagcacc

SEQ ID NO: 35432 - RNA, 19 nt, synthetic construct
  source 1..19: mol_type = other RNA
ctctgtgaggatccaggtc

SEQ ID NO: 35433 - RNA, 19 nt, synthetic construct
  source 1..19: mol_type = other RNA
ctctgtgaggatccaggtc

SEQ ID NO: 35434 - RNA, 19 nt, synthetic construct
  source 1..19: mol_type = other RNA
ctctgtgaggatccaggtc

SEQ ID NO: 35435 - RNA, 19 nt, synthetic construct
  source 1..19: mol_type = other RNA
ctctgtgaggatccaggtc

SEQ ID NO: 35436 - RNA, 19 nt, synthetic construct
  source 1..19: mol_type = other RNA
ctctgtgaggatccaggtc

SEQ ID NO: 35437 - RNA, 19 nt, synthetic construct
  source 1..19: mol_type = other RNA
tcggctctgtgaggatcca

SEQ ID NO: 35438 - RNA, 19 nt, synthetic construct
  source 1..19: mol_type = other RNA
tcggctctgtgaggatcca

SEQ ID NO: 35439 - RNA, 19 nt, synthetic construct
  source 1..19: mol_type = other RNA
tcggctctgtgaggatcca

SEQ ID NO: 35440 - RNA, 19 nt, synthetic construct
  source 1..19: mol_type = other RNA
tcggctctgtgaggatcca

SEQ ID NO: 35441 - RNA, 19 nt, synthetic construct
  source 1..19: mol_type = other RNA
tttatttgcaaaactgggc

SEQ ID NO: 35442 - RNA, 19 nt, synthetic construct
  source 1..19: mol_type = other RNA
ccgtctccaggctgcaggt

SEQ ID NO: 35443 - RNA, 19 nt, synthetic construct
  source 1..19: mol_type = other RNA
agcagagggggctttggga

SEQ ID NO: 35444 - RNA, 19 nt, synthetic construct
  source 1..19: mol_type = other RNA
cagccccgtctccaggctg

SEQ ID NO: 35445 - RNA, 19 nt, synthetic construct
  source 1..19: mol_type = other RNA
tgggctctgtgaggatcca

SEQ ID NO: 35446 - RNA, 19 nt, synthetic construct
  source 1..19: mol_type = other RNA
cagggccctgggtctctgc

SEQ ID NO: 35447 - RNA, 19 nt, synthetic construct
  source 1..19: mol_type = other RNA
ggctgcaggtcagcacctg

SEQ ID NO: 35448 - RNA, 19 nt, synthetic construct
  source 1..19: mol_type = other RNA
tccaggctgcaggtcagca

SEQ ID NO: 35449 - RNA, 19 nt, synthetic construct
  source 1..19: mol_type = other RNA
tctccaggctgcaggtcag

SEQ ID NO: 35450 - RNA, 19 nt, synthetic construct
  source 1..19: mol_type = other RNA
cccgtctccaggctgcagg

SEQ ID NO: 35451 - RNA, 19 nt, synthetic construct
  source 1..19: mol_type = other RNA
tcagccccgtctccaggct

SEQ ID NO: 35452 - RNA, 19 nt, synthetic construct
  source 1..19: mol_type = other RNA
gtggtcagctctgtgagga

SEQ ID NO: 35453 - RNA, 19 nt, synthetic construct
  source 1..19: mol_type = other RNA
gtggtcagctctgtgagga

SEQ ID NO: 35454 - RNA, 19 nt, synthetic construct
  source 1..19: mol_type = other RNA
gtggtcagctctgtgagga

SEQ ID NO: 35455 - RNA, 19 nt, synthetic construct
  source 1..19: mol_type = other RNA
gtggtcagctctgtgagga

SEQ ID NO: 35456 - RNA, 19 nt, synthetic construct
  source 1..19: mol_type = other RNA
gtggtcagctctgtgagga

SEQ ID NO: 35457 - RNA, 19 nt, synthetic construct
  source 1..19: mol_type = other RNA
ggaggagggtgtggccgtg

SEQ ID NO: 35458 - RNA, 19 nt, synthetic construct
  source 1..19: mol_type = other RNA
ctttggtgggtgggcaggt

SEQ ID NO: 35459 - RNA, 19 nt, synthetic construct
  source 1..19: mol_type = other RNA
caaaactgggctgggttga

SEQ ID NO: 35460 - RNA, 19 nt, synthetic construct
  source 1..19: mol_type = other RNA
gtttatttgcaaaactggg

SEQ ID NO: 35461 - RNA, 19 nt, synthetic construct
  source 1..19: mol_type = other RNA
aggctgcaggtcagcacct

SEQ ID NO: 35462 - RNA, 19 nt, synthetic construct
  source 1..19: mol_type = other RNA
gtctccaggctgcaggtca

SEQ ID NO: 35463 - RNA, 19 nt, synthetic construct
  source 1..19: mol_type = other RNA
gacagagcatggggatgga

SEQ ID NO: 35464 - RNA, 19 nt, synthetic construct
  source 1..19: mol_type = other RNA
ccgccagagccaacaccag

SEQ ID NO: 35465 - RNA, 19 nt, synthetic construct
  source 1..19: mol_type = other RNA
aggaggacacagtggacac

SEQ ID NO: 35466 - RNA, 19 nt, synthetic construct
  source 1..19: mol_type = other RNA
gccccgtctccaggctgca

SEQ ID NO: 35467 - RNA, 19 nt, synthetic construct
  source 1..19: mol_type = other RNA
acgtccagcgtgtggcagc

SEQ ID NO: 35468 - RNA, 19 nt, synthetic construct
  source 1..19: mol_type = other RNA
aggtgggccacaggctctc

SEQ ID NO: 35469 - RNA, 19 nt, synthetic construct
  source 1..19: mol_type = other RNA
aaactgggctgggttgagc

SEQ ID NO: 35470 - RNA, 19 nt, synthetic construct
  source 1..19: mol_type = other RNA
tgcaggtcagcacctgccc

SEQ ID NO: 35471 - RNA, 19 nt, synthetic construct
  source 1..19: mol_type = other RNA
cagggcaggggcttgcact

SEQ ID NO: 35472 - RNA, 19 nt, synthetic construct
  source 1..19: mol_type = other RNA
ggtcctgctggcccctcac

SEQ ID NO: 35473 - RNA, 19 nt, synthetic construct
  source 1..19: mol_type = other RNA
gatttcatagttgaagcac

SEQ ID NO: 35474 - RNA, 19 nt, synthetic construct
  source 1..19: mol_type = other RNA
gatttcatagttgaagcac

SEQ ID NO: 35475 - RNA, 19 nt, synthetic construct
  source 1..19: mol_type = other RNA
gatttcatagttgaagcac

SEQ ID NO: 35476 - RNA, 19 nt, synthetic construct
  source 1..19: mol_type = other RNA
gatttcatagttgaagcac

SEQ ID NO: 35477 - RNA, 19 nt, synthetic construct
  source 1..19: mol_type = other RNA
acagggcaggggcttgcac

SEQ ID NO: 35478 - RNA, 19 nt, synthetic construct
  source 1..19: mol_type = other RNA
aggggtcctgctggcccct

SEQ ID NO: 35479 - RNA, 19 nt, synthetic construct
  source 1..19: mol_type = other RNA
ggcaaggccaaggtgggcc

SEQ ID NO: 35480 - RNA, 19 nt, synthetic construct
  source 1..19: mol_type = other RNA
ctgcaggtcagcacctgcc

SEQ ID NO: 35481 - RNA, 19 nt, synthetic construct
  source 1..19: mol_type = other RNA
ctccaggctgcaggtcagc

SEQ ID NO: 35482 - RNA, 19 nt, synthetic construct
  source 1..19: mol_type = other RNA
gagtggaggagggcatggc

SEQ ID NO: 35483 - RNA, 19 nt, synthetic construct
  source 1..19: mol_type = other RNA
gagtggaggagggcatggc

SEQ ID NO: 35484 - RNA, 19 nt, synthetic construct
  source 1..19: mol_type = other RNA
cgtctccaggctgcaggtc

SEQ ID NO: 35485 - RNA, 19 nt, synthetic construct
  source 1..19: mol_type = other RNA
tctggcagttctccgctgt

SEQ ID NO: 35486 - RNA, 19 nt, synthetic construct
  source 1..19: mol_type = other RNA
ctctggcagttctccgctg

SEQ ID NO: 35487 - RNA, 19 nt, synthetic construct
  source 1..19: mol_type = other RNA
ggccggggtgctggggcag

SEQ ID NO: 35488 - RNA, 19 nt, synthetic construct
  source 1..19: mol_type = other RNA
ggccggggtgctggggcag

SEQ ID NO: 35489 - RNA, 19 nt, synthetic construct
  source 1..19: mol_type = other RNA
ggccggggtgctggggcag

SEQ ID NO: 35490 - RNA, 19 nt, synthetic construct
  source 1..19: mol_type = other RNA
ggccggggtgctggggcag

SEQ ID NO: 35491 - RNA, 19 nt, synthetic construct
  source 1..19: mol_type = other RNA
ttctccacactgagggagc

SEQ ID NO: 35492 - RNA, 19 nt, synthetic construct
  source 1..19: mol_type = other RNA
ttgtggtggccgtggtggt

SEQ ID NO: 35493 - RNA, 19 nt, synthetic construct
  source 1..19: mol_type = other RNA
ttgtggtggccgtggtggt

SEQ ID NO: 35494 - RNA, 19 nt, synthetic construct
  source 1..19: mol_type = other RNA
agtctctggagtggaggag

SEQ ID NO: 35495 - RNA, 19 nt, synthetic construct
  source 1..19: mol_type = other RNA
agtctctggagtggaggag

SEQ ID NO: 35496 - RNA, 19 nt, synthetic construct
  source 1..19: mol_type = other RNA
agtctctggagtggaggag

SEQ ID NO: 35497 - RNA, 19 nt, synthetic construct
  source 1..19: mol_type = other RNA
agtctctggagtggaggag

SEQ ID NO: 35498 - RNA, 19 nt, synthetic construct
  source 1..19: mol_type = other RNA
gaggaagaggggatggctg

SEQ ID NO: 35499 - RNA, 19 nt, synthetic construct
  source 1..19: mol_type = other RNA
ggccgtggtggtaagcact

SEQ ID NO: 35500 - RNA, 19 nt, synthetic construct
  source 1..19: mol_type = other RNA
ggccgtggtggtaagcact

SEQ ID NO: 35501 - RNA, 19 nt, synthetic construct
  source 1..19: mol_type = other RNA
ggccgccgtgggtgcaggg

SEQ ID NO: 35502 - RNA, 19 nt, synthetic construct
  source 1..19: mol_type = other RNA
acgcactccccacagcact

SEQ ID NO: 35503 - RNA, 19 nt, synthetic construct
  source 1..19: mol_type = other RNA
tccacactgagggagcagg

SEQ ID NO: 35504 - RNA, 19 nt, synthetic construct
  source 1..19: mol_type = other RNA
cggcactcgaggcccaggg

SEQ ID NO: 35505 - RNA, 19 nt, synthetic construct
  source 1..19: mol_type = other RNA
cggcactcgaggcccaggg

SEQ ID NO: 35506 - RNA, 19 nt, synthetic construct
  source 1..19: mol_type = other RNA
cggcactcgaggcccaggg

SEQ ID NO: 35507 - RNA, 19 nt, synthetic construct
  source 1..19: mol_type = other RNA
cggcactcgaggcccaggg

SEQ ID NO: 35508 - RNA, 19 nt, synthetic construct
  source 1..19: mol_type = other RNA
ctccacactgagggagcag

SEQ ID NO: 35509 - RNA, 19 nt, synthetic construct
  source 1..19: mol_type = other RNA
tccgggggcagagctcagg

SEQ ID NO: 35510 - RNA, 19 nt, synthetic construct
  source 1..19: mol_type = other RNA
ccacactgagggagcaggg

SEQ ID NO: 35511 - RNA, 19 nt, synthetic construct
  source 1..19: mol_type = other RNA
ctcgaggcccaggggctgc

SEQ ID NO: 35512 - RNA, 19 nt, synthetic construct
  source 1..19: mol_type = other RNA
ctcgaggcccaggggctgc

SEQ ID NO: 35513 - RNA, 19 nt, synthetic construct
  source 1..19: mol_type = other RNA
ctcgaggcccaggggctgc

SEQ ID NO: 35514 - RNA, 19 nt, synthetic construct
  source 1..19: mol_type = other RNA
ctcgaggcccaggggctgc

SEQ ID NO: 35515 - RNA, 19 nt, synthetic construct
  source 1..19: mol_type = other RNA
gctggggagcactgcaggg

SEQ ID NO: 35516 - RNA, 19 nt, synthetic construct
  source 1..19: mol_type = other RNA
gctgctggggagcactgca

SEQ ID NO: 35517 - RNA, 19 nt, synthetic construct
  source 1..19: mol_type = other RNA
gcactccccacagcactgc

SEQ ID NO: 35518 - RNA, 19 nt, synthetic construct
  source 1..19: mol_type = other RNA
tgcagtccctggactggag

SEQ ID NO: 35519 - RNA, 19 nt, synthetic construct
  source 1..19: mol_type = other RNA
gttgtggtggccgtggtgg

SEQ ID NO: 35520 - RNA, 19 nt, synthetic construct
  source 1..19: mol_type = other RNA
tgcagtccctggactggag

SEQ ID NO: 35521 - RNA, 19 nt, synthetic construct
  source 1..19: mol_type = other RNA
gttgtggtggccgtggtgg

SEQ ID NO: 35522 - RNA, 19 nt, synthetic construct
  source 1..19: mol_type = other RNA
tgcagtccctggactggag

SEQ ID NO: 35523 - RNA, 19 nt, synthetic construct
  source 1..19: mol_type = other RNA
tgggtgtggtggtctgtgc

SEQ ID NO: 35524 - RNA, 19 nt, synthetic construct
  source 1..19: mol_type = other RNA
cctggtcgatgcttacctc

SEQ ID NO: 35525 - RNA, 19 nt, synthetic construct
  source 1..19: mol_type = other RNA
cacctgcccgacctggtcg

SEQ ID NO: 35526 - RNA, 19 nt, synthetic construct
  source 1..19: mol_type = other RNA
ccagtggatgcagtcgtag

SEQ ID NO: 35527 - RNA, 19 nt, synthetic construct
  source 1..19: mol_type = other RNA
cgcagtcgtagtggctgtt

SEQ ID NO: 35528 - RNA, 19 nt, synthetic construct
  source 1..19: mol_type = other RNA
tgcagtcgtagtggctgtt

SEQ ID NO: 35529 - RNA, 19 nt, synthetic construct
  source 1..19: mol_type = other RNA
cgcagtcgtagtggctgtt

SEQ ID NO: 35530 - RNA, 19 nt, synthetic construct
  source 1..19: mol_type = other RNA
tgtctggtcttcgttcttg

SEQ ID NO: 35531 - RNA, 19 nt, synthetic construct
  source 1..19: mol_type = other RNA
catgtccccgcctgcaacc

SEQ ID NO: 35532 - RNA, 19 nt, synthetic construct
  source 1..19: mol_type = other RNA
ggagttgaggagggcgtgg

SEQ ID NO: 35533 - RNA, 19 nt, synthetic construct
  source 1..19: mol_type = other RNA
gtggtcggctttgtgagga

SEQ ID NO: 35534 - RNA, 19 nt, synthetic construct
  source 1..19: mol_type = other RNA
ggagttgaggagggcgtgg

SEQ ID NO: 35535 - RNA, 19 nt, synthetic construct
  source 1..19: mol_type = other RNA
gagttgaggagggcgtggc

SEQ ID NO: 35536 - RNA, 19 nt, synthetic construct
  source 1..19: mol_type = other RNA
tgtggtcggctttgtgagg

SEQ ID NO: 35537 - RNA, 19 nt, synthetic construct
  source 1..19: mol_type = other RNA
gagttgaggagggcgtggc

SEQ ID NO: 35538 - RNA, 19 nt, synthetic construct
  source 1..19: mol_type = other RNA
cggggtcacccatagggtg

SEQ ID NO: 35539 - RNA, 19 nt, synthetic construct
  source 1..19: mol_type = other RNA
acccagtctgcgaggtgag

SEQ ID NO: 35540 - RNA, 19 nt, synthetic construct
  source 1..19: mol_type = other RNA
ccatgtccccgcctgcaac

SEQ ID NO: 35541 - RNA, 19 nt, synthetic construct
  source 1..19: mol_type = other RNA
tcgtcacagcaaagcacac

SEQ ID NO: 35542 - RNA, 19 nt, synthetic construct
  source 1..19: mol_type = other RNA
aacccctgaggttgggaag

SEQ ID NO: 35543 - RNA, 19 nt, synthetic construct
  source 1..19: mol_type = other RNA
tccatgtccccgcctgcaa

SEQ ID NO: 35544 - RNA, 19 nt, synthetic construct
  source 1..19: mol_type = other RNA
gtctggtcttcgttcttgc

SEQ ID NO: 35545 - RNA, 19 nt, synthetic construct
  source 1..19: mol_type = other RNA
tgaacctgcctgtctggtc

SEQ ID NO: 35546 - RNA, 19 nt, synthetic construct
  source 1..19: mol_type = other RNA
cgttgtagttgaagcacat

SEQ ID NO: 35547 - RNA, 19 nt, synthetic construct
  source 1..19: mol_type = other RNA
gcacgttgtagttgaagca

SEQ ID NO: 35548 - RNA, 19 nt, synthetic construct
  source 1..19: mol_type = other RNA
ctgtagtcgtcacagcaaa

SEQ ID NO: 35549 - RNA, 19 nt, synthetic construct
  source 1..19: mol_type = other RNA
ggctgtagtcgtcacagca

SEQ ID NO: 35550 - RNA, 19 nt, synthetic construct
  source 1..19: mol_type = other RNA
atccaggtcgtccccggag

SEQ ID NO: 35551 - RNA, 19 nt, synthetic construct
  source 1..19: mol_type = other RNA
ggctttgtgaggatccagg

SEQ ID NO: 35552 - RNA, 19 nt, synthetic construct
  source 1..19: mol_type = other RNA
ggatccagtggacgcagtc

SEQ ID NO: 35553 - RNA, 19 nt, synthetic construct
  source 1..19: mol_type = other RNA
atccaggtcgtccccggag

SEQ ID NO: 35554 - RNA, 19 nt, synthetic construct
  source 1..19: mol_type = other RNA
atccaggtcgtccccggag

SEQ ID NO: 35555 - RNA, 19 nt, synthetic construct
  source 1..19: mol_type = other RNA
ggtggctgtgatcgtagtg

SEQ ID NO: 35556 - RNA, 19 nt, synthetic construct
  source 1..19: mol_type = other RNA
atccaggtcgtccccggag

SEQ ID NO: 35557 - RNA, 19 nt, synthetic construct
  source 1..19: mol_type = other RNA
agctttgtgaggatccagg

SEQ ID NO: 35558 - RNA, 19 nt, synthetic construct
  source 1..19: mol_type = other RNA
atccaggtcgtccccggag

SEQ ID NO: 35559 - RNA, 19 nt, synthetic construct
  source 1..19: mol_type = other RNA
cagtggatgcagtcgtagt

SEQ ID NO: 35560 - RNA, 19 nt, synthetic construct
  source 1..19: mol_type = other RNA
tccagtggatgcagtcgta

SEQ ID NO: 35561 - RNA, 19 nt, synthetic construct
  source 1..19: mol_type = other RNA
atccaggtcgtccccggag

SEQ ID NO: 35562 - RNA, 19 nt, synthetic construct
  source 1..19: mol_type = other RNA
ggatccagtggacgcagtc

SEQ ID NO: 35563 - RNA, 19 nt, synthetic construct
  source 1..19: mol_type = other RNA
gaaagggctggagtcgagt

SEQ ID NO: 35564 - RNA, 19 nt, synthetic construct
  source 1..19: mol_type = other RNA
gagctggtggctggggtac

SEQ ID NO: 35565 - RNA, 19 nt, synthetic construct
  source 1..19: mol_type = other RNA
cctgcaacccctgaggttg

SEQ ID NO: 35566 - RNA, 19 nt, synthetic construct
  source 1..19: mol_type = other RNA
cctgcctgtctggtcttcg

SEQ ID NO: 35567 - RNA, 19 nt, synthetic construct
  source 1..19: mol_type = other RNA
aggatccaggtcgtccccg

SEQ ID NO: 35568 - RNA, 19 nt, synthetic construct
  source 1..19: mol_type = other RNA
aggatccaggtcgtccccg

SEQ ID NO: 35569 - RNA, 19 nt, synthetic construct
  source 1..19: mol_type = other RNA
gtcagctctgtgaggatcc

SEQ ID NO: 35570 - RNA, 19 nt, synthetic construct
  source 1..19: mol_type = other RNA
gctgttgtggtcagctctg

SEQ ID NO: 35571 - RNA, 19 nt, synthetic construct
  source 1..19: mol_type = other RNA
aggatccaggtcgtccccg

SEQ ID NO: 35572 - RNA, 19 nt, synthetic construct
  source 1..19: mol_type = other RNA
gtcagctctgtgaggatcc

SEQ ID NO: 35573 - RNA, 19 nt, synthetic construct
  source 1..19: mol_type = other RNA
aggatccaggtcgtccccg

SEQ ID NO: 35574 - RNA, 19 nt, synthetic construct
  source 1..19: mol_type = other RNA
aggatccaggtcgtccccg

SEQ ID NO: 35575 - RNA, 19 nt, synthetic construct
  source 1..19: mol_type = other RNA
gtcagctctgtgaggatcc

SEQ ID NO: 35576 - RNA, 19 nt, synthetic construct
  source 1..19: mol_type = other RNA
gctgttgtggtcagctctg

SEQ ID NO: 35577 - RNA, 19 nt, synthetic construct
  source 1..19: mol_type = other RNA
aggatccaggtcgtccccg

SEQ ID NO: 35578 - RNA, 19 nt, synthetic construct
  source 1..19: mol_type = other RNA
gtcagctctgtgaggatcc

SEQ ID NO: 35579 - RNA, 19 nt, synthetic construct
  source 1..19: mol_type = other RNA
gtcagctctgtgaggatcc

SEQ ID NO: 35580 - RNA, 19 nt, synthetic construct
  source 1..19: mol_type = other RNA
gctgttgtggtcagctctg

SEQ ID NO: 35581 - RNA, 19 nt, synthetic construct
  source 1..19: mol_type = other RNA
ttgtagtggctgttgtggt

SEQ ID NO: 35582 - RNA, 19 nt, synthetic construct
  source 1..19: mol_type = other RNA
cgccgtccctccagtcgct

SEQ ID NO: 35583 - RNA, 19 nt, synthetic construct
  source 1..19: mol_type = other RNA
ccgacctggtcgatgctta

SEQ ID NO: 35584 - RNA, 19 nt, synthetic construct
  source 1..19: mol_type = other RNA
tctggtcttcgttcttgca

SEQ ID NO: 35585 - RNA, 19 nt, synthetic construct
  source 1..19: mol_type = other RNA
cgtcacagcaaagcacacg

SEQ ID NO: 35586 - RNA, 19 nt, synthetic construct
  source 1..19: mol_type = other RNA
tcgtccccggagttgagga

SEQ ID NO: 35587 - RNA, 19 nt, synthetic construct
  source 1..19: mol_type = other RNA
tcgtccccggagttgagga

SEQ ID NO: 35588 - RNA, 19 nt, synthetic construct
  source 1..19: mol_type = other RNA
gtctcggggcagcaggggt

SEQ ID NO: 35589 - RNA, 19 nt, synthetic construct
  source 1..19: mol_type = other RNA
gcaggtcagccccgtctcc

SEQ ID NO: 35590 - RNA, 19 nt, synthetic construct
  source 1..19: mol_type = other RNA
tgtagtcgtcacagcaaag

SEQ ID NO: 35591 - RNA, 19 nt, synthetic construct
  source 1..19: mol_type = other RNA
cggagttgaggagggcgtg

SEQ ID NO: 35592 - RNA, 19 nt, synthetic construct
  source 1..19: mol_type = other RNA
cccggagttgaggagggcg

SEQ ID NO: 35593 - RNA, 19 nt, synthetic construct
  source 1..19: mol_type = other RNA
cggagttgaggagggcgtg

SEQ ID NO: 35594 - RNA, 19 nt, synthetic construct
  source 1..19: mol_type = other RNA
cccggagttgaggagggcg

SEQ ID NO: 35595 - RNA, 19 nt, synthetic construct
  source 1..19: mol_type = other RNA
tggacttgtagtggatgct

SEQ ID NO: 35596 - RNA, 19 nt, synthetic construct
  source 1..19: mol_type = other RNA
gacccagtctgcgaggtga

SEQ ID NO: 35597 - RNA, 19 nt, synthetic construct
  source 1..19: mol_type = other RNA
tggtcttcgttcttgcagg

SEQ ID NO: 35598 - RNA, 19 nt, synthetic construct
  source 1..19: mol_type = other RNA
tcacagcaaagcacacgca

SEQ ID NO: 35599 - RNA, 19 nt, synthetic construct
  source 1..19: mol_type = other RNA
agtcgtagtggctgttgtg

SEQ ID NO: 35600 - RNA, 19 nt, synthetic construct
  source 1..19: mol_type = other RNA
agtcgtagtggctgttgtg

SEQ ID NO: 35601 - RNA, 19 nt, synthetic construct
  source 1..19: mol_type = other RNA
agtcgtagtggctgttgtg

SEQ ID NO: 35602 - RNA, 19 nt, synthetic construct
  source 1..19: mol_type = other RNA
agtcgtagtggctgttgtg

SEQ ID NO: 35603 - RNA, 19 nt, synthetic construct
  source 1..19: mol_type = other RNA
agtcgtagtggctgttgtg

SEQ ID NO: 35604 - RNA, 19 nt, synthetic construct
  source 1..19: mol_type = other RNA
ccgcctgcaacccctgagg

SEQ ID NO: 35605 - RNA, 19 nt, synthetic construct
  source 1..19: mol_type = other RNA
ggggtactggggcagtggc

SEQ ID NO: 35606 - RNA, 19 nt, synthetic construct
  source 1..19: mol_type = other RNA
ctggggtactggggcagtg

SEQ ID NO: 35607 - RNA, 19 nt, synthetic construct
  source 1..19: mol_type = other RNA
cagtcgtagtggctgttgt

SEQ ID NO: 35608 - RNA, 19 nt, synthetic construct
  source 1..19: mol_type = other RNA
cagtcgtagtggctgttgt

SEQ ID NO: 35609 - RNA, 19 nt, synthetic construct
  source 1..19: mol_type = other RNA
gggtggaggacgggatggc

SEQ ID NO: 35610 - RNA, 19 nt, synthetic construct
  source 1..19: mol_type = other RNA
cagtcgtagtggctgttgt

SEQ ID NO: 35611 - RNA, 19 nt, synthetic construct
  source 1..19: mol_type = other RNA
cagtcgtagtggctgttgt

SEQ ID NO: 35612 - RNA, 19 nt, synthetic construct
  source 1..19: mol_type = other RNA
cagtcgtagtggctgttgt

SEQ ID NO: 35613 - RNA, 19 nt, synthetic construct
  source 1..19: mol_type = other RNA
ctggcattggcacaggcag

SEQ ID NO: 35614 - RNA, 19 nt, synthetic construct
  source 1..19: mol_type = other RNA
acgccgtccctccagtcgc

SEQ ID NO: 35615 - RNA, 19 nt, synthetic construct
  source 1..19: mol_type = other RNA
ccccgcctgcaacccctga

SEQ ID NO: 35616 - RNA, 19 nt, synthetic construct
  source 1..19: mol_type = other RNA
aggtcagcacctgcccgac

SEQ ID NO: 35617 - RNA, 19 nt, synthetic construct
  source 1..19: mol_type = other RNA
aggtcagccccgtctccag

SEQ ID NO: 35618 - RNA, 19 nt, synthetic construct
  source 1..19: mol_type = other RNA
caggtcagccccgtctcca

SEQ ID NO: 35619 - RNA, 19 nt, synthetic construct
  source 1..19: mol_type = other RNA
ctggtcttcgttcttgcag

SEQ ID NO: 35620 - RNA, 19 nt, synthetic construct
  source 1..19: mol_type = other RNA
cgcacgttgtagttgaagc

SEQ ID NO: 35621 - RNA, 19 nt, synthetic construct
  source 1..19: mol_type = other RNA
acacgcacgttgtagttga

SEQ ID NO: 35622 - RNA, 19 nt, synthetic construct
  source 1..19: mol_type = other RNA
gctgtagtcgtcacagcaa

SEQ ID NO: 35623 - RNA, 19 nt, synthetic construct
  source 1..19: mol_type = other RNA
gtactggggcagtggctgt

SEQ ID NO: 35624 - RNA, 19 nt, synthetic construct
  source 1..19: mol_type = other RNA
tggggtactggggcagtgg

SEQ ID NO: 35625 - RNA, 19 nt, synthetic construct
  source 1..19: mol_type = other RNA
ggctggggtactggggcag

SEQ ID NO: 35626 - RNA, 19 nt, synthetic construct
  source 1..19: mol_type = other RNA
gtggctggggtactggggc

SEQ ID NO: 35627 - RNA, 19 nt, synthetic construct
  source 1..19: mol_type = other RNA
gctggtggctggggtactg

SEQ ID NO: 35628 - RNA, 19 nt, synthetic construct
  source 1..19: mol_type = other RNA
tggagctggtggctggggt

SEQ ID NO: 35629 - RNA, 19 nt, synthetic construct
  source 1..19: mol_type = other RNA
tccccggagttgaggaggg

SEQ ID NO: 35630 - RNA, 19 nt, synthetic construct
  source 1..19: mol_type = other RNA
tccaggtcgtccccggagt

SEQ ID NO: 35631 - RNA, 19 nt, synthetic construct
  source 1..19: mol_type = other RNA
gaggatccaggtcgtcccc

SEQ ID NO: 35632 - RNA, 19 nt, synthetic construct
  source 1..19: mol_type = other RNA
ttgtgaggatccaggtcgt

SEQ ID NO: 35633 - RNA, 19 nt, synthetic construct
  source 1..19: mol_type = other RNA
gtagtggctgttgtggtcg

SEQ ID NO: 35634 - RNA, 19 nt, synthetic construct
  source 1..19: mol_type = other RNA
cgtagtggctgttgtggtc

SEQ ID NO: 35635 - RNA, 19 nt, synthetic construct
  source 1..19: mol_type = other RNA
cgtggatccagtggacgca

SEQ ID NO: 35636 - RNA, 19 nt, synthetic construct
  source 1..19: mol_type = other RNA
tgtagtccagccactctga

SEQ ID NO: 35637 - RNA, 19 nt, synthetic construct
  source 1..19: mol_type = other RNA
gaggatccaggtcgtcccc

SEQ ID NO: 35638 - RNA, 19 nt, synthetic construct
  source 1..19: mol_type = other RNA
cgtagtggctgttgtggtc

SEQ ID NO: 35639 - RNA, 19 nt, synthetic construct
  source 1..19: mol_type = other RNA
gaggtggccctggtgtggc

SEQ ID NO: 35640 - RNA, 19 nt, synthetic construct
  source 1..19: mol_type = other RNA
tgtagtccagccactctga

SEQ ID NO: 35641 - RNA, 19 nt, synthetic construct
  source 1..19: mol_type = other RNA
gaggatccaggtcgtcccc

SEQ ID NO: 35642 - RNA, 19 nt, synthetic construct
  source 1..19: mol_type = other RNA
tgtagtccagccactctga

SEQ ID NO: 35643 - RNA, 19 nt, synthetic construct
  source 1..19: mol_type = other RNA
tccccggagttgaggaggg

SEQ ID NO: 35644 - RNA, 19 nt, synthetic construct
  source 1..19: mol_type = other RNA
tccaggtcgtccccggagt

SEQ ID NO: 35645 - RNA, 19 nt, synthetic construct
  source 1..19: mol_type = other RNA
gaggatccaggtcgtcccc

SEQ ID NO: 35646 - RNA, 19 nt, synthetic construct
  source 1..19: mol_type = other RNA
ttgtgaggatccaggtcgt

SEQ ID NO: 35647 - RNA, 19 nt, synthetic construct
  source 1..19: mol_type = other RNA
cgtagtggctgttgtggtc

SEQ ID NO: 35648 - RNA, 19 nt, synthetic construct
  source 1..19: mol_type = other RNA
tgtagtccagccactctga

SEQ ID NO: 35649 - RNA, 19 nt, synthetic construct
  source 1..19: mol_type = other RNA
gaggatccaggtcgtcccc

SEQ ID NO: 35650 - RNA, 19 nt, synthetic construct
  source 1..19: mol_type = other RNA
cgtagtggctgttgtggtc

SEQ ID NO: 35651 - RNA, 19 nt, synthetic construct
  source 1..19: mol_type = other RNA
gaggatccaggtcgtcccc

SEQ ID NO: 35652 - RNA, 19 nt, synthetic construct
  source 1..19: mol_type = other RNA
cgtagtggctgttgtggtc

SEQ ID NO: 35653 - RNA, 19 nt, synthetic construct
  source 1..19: mol_type = other RNA
cgtggatccagtggacgca

SEQ ID NO: 35654 - RNA, 19 nt, synthetic construct
  source 1..19: mol_type = other RNA
tgtagtggctgttgtggtc

SEQ ID NO: 35655 - RNA, 19 nt, synthetic construct
  source 1..19: mol_type = other RNA
ggctgtggtgggcatgggg

SEQ ID NO: 35656 - RNA, 19 nt, synthetic construct
  source 1..19: mol_type = other RNA
cgcctgcaacccctgaggt

SEQ ID NO: 35657 - RNA, 19 nt, synthetic construct
  source 1..19: mol_type = other RNA
tcagctttgtgaggatcca

SEQ ID NO: 35658 - RNA, 19 nt, synthetic construct
  source 1..19: mol_type = other RNA
ttgtggtcggctttgtgag

SEQ ID NO: 35659 - RNA, 19 nt, synthetic construct
  source 1..19: mol_type = other RNA
gggcctcccgtggtggctg

SEQ ID NO: 35660 - RNA, 19 nt, synthetic construct
  source 1..19: mol_type = other RNA
cggctttgtgaggatccag

SEQ ID NO: 35661 - RNA, 19 nt, synthetic construct
  source 1..19: mol_type = other RNA
gtggatccagtggatgcag

SEQ ID NO: 35662 - RNA, 19 nt, synthetic construct
  source 1..19: mol_type = other RNA
tgtccccgcctgcaacccc

SEQ ID NO: 35663 - RNA, 19 nt, synthetic construct
  source 1..19: mol_type = other RNA
agcaaagcacacgcacgtt

SEQ ID NO: 35664 - RNA, 19 nt, synthetic construct
  source 1..19: mol_type = other RNA
cagcaaagcacacgcacgt

SEQ ID NO: 35665 - RNA, 19 nt, synthetic construct
  source 1..19: mol_type = other RNA
cgtgcaccacctctccagg

SEQ ID NO: 35666 - RNA, 19 nt, synthetic construct
  source 1..19: mol_type = other RNA
ccgtgtggggactgctggg

SEQ ID NO: 35667 - RNA, 19 nt, synthetic construct
  source 1..19: mol_type = other RNA
ccgtgtggggactgctggg

SEQ ID NO: 35668 - RNA, 19 nt, synthetic construct
  source 1..19: mol_type = other RNA
ccgtgtggggactgctggg

SEQ ID NO: 35669 - RNA, 19 nt, synthetic construct
  source 1..19: mol_type = other RNA
ccgtgtggggactgctggg

SEQ ID NO: 35670 - RNA, 19 nt, synthetic construct
  source 1..19: mol_type = other RNA
gtctcgcagccctggtgcc

SEQ ID NO: 35671 - RNA, 19 nt, synthetic construct
  source 1..19: mol_type = other RNA
ggccgtgaagtcgtcagcc

SEQ ID NO: 35672 - RNA, 19 nt, synthetic construct
  source 1..19: mol_type = other RNA
ggactggagaagggagtgg

SEQ ID NO: 35673 - RNA, 19 nt, synthetic construct
  source 1..19: mol_type = other RNA
gtagctgtggatttggtgg

SEQ ID NO: 35674 - RNA, 19 nt, synthetic construct
  source 1..19: mol_type = other RNA
ggactggagaagggagtgg

SEQ ID NO: 35675 - RNA, 19 nt, synthetic construct
  source 1..19: mol_type = other RNA
gtagctgtggatttggtgg

SEQ ID NO: 35676 - RNA, 19 nt, synthetic construct
  source 1..19: mol_type = other RNA
atgtccccgcctgcaaccc

SEQ ID NO: 35677 - RNA, 19 nt, synthetic construct
  source 1..19: mol_type = other RNA
gagggcgtggccgtggagc

SEQ ID NO: 35678 - RNA, 19 nt, synthetic construct
  source 1..19: mol_type = other RNA
gccgtggctgtggtcctgg

SEQ ID NO: 35679 - RNA, 19 nt, synthetic construct
  source 1..19: mol_type = other RNA
agtggctgttgtggtcagc

SEQ ID NO: 35680 - RNA, 19 nt, synthetic construct
  source 1..19: mol_type = other RNA
catggtggccatgggtgtg

SEQ ID NO: 35681 - RNA, 19 nt, synthetic construct
  source 1..19: mol_type = other RNA
tggtcctggaggtgcccct

SEQ ID NO: 35682 - RNA, 19 nt, synthetic construct
  source 1..19: mol_type = other RNA
agtggctgttgtggtcagc

SEQ ID NO: 35683 - RNA, 19 nt, synthetic construct
  source 1..19: mol_type = other RNA
agtggctgttgtggtcagc

SEQ ID NO: 35684 - RNA, 19 nt, synthetic construct
  source 1..19: mol_type = other RNA
agtggctgttgtggtcagc

SEQ ID NO: 35685 - RNA, 19 nt, synthetic construct
  source 1..19: mol_type = other RNA
cttgtcatggtggctgtgg

SEQ ID NO: 35686 - RNA, 19 nt, synthetic construct
  source 1..19: mol_type = other RNA
agtggctgttgtggtcagc

SEQ ID NO: 35687 - RNA, 19 nt, synthetic construct
  source 1..19: mol_type = other RNA
ggtctcgcagccctggtgc

SEQ ID NO: 35688 - RNA, 19 nt, synthetic construct
  source 1..19: mol_type = other RNA
caacccctgaggttgggaa

SEQ ID NO: 35689 - RNA, 19 nt, synthetic construct
  source 1..19: mol_type = other RNA
tggtggtaagcactgtgga

SEQ ID NO: 35690 - RNA, 19 nt, synthetic construct
  source 1..19: mol_type = other RNA
tggtggtaagcactgtgga

SEQ ID NO: 35691 - RNA, 19 nt, synthetic construct
  source 1..19: mol_type = other RNA
tggtggtaagcactgtgga

SEQ ID NO: 35692 - RNA, 19 nt, synthetic construct
  source 1..19: mol_type = other RNA
agggtgagggctggacagg

SEQ ID NO: 35693 - RNA, 19 nt, synthetic construct
  source 1..19: mol_type = other RNA
agggtgagggctggacagg

SEQ ID NO: 35694 - RNA, 19 nt, synthetic construct
  source 1..19: mol_type = other RNA
agggtgagggctggacagg

SEQ ID NO: 35695 - RNA, 19 nt, synthetic construct
  source 1..19: mol_type = other RNA
cgtgggtgtaggtgtgcag

SEQ ID NO: 35696 - RNA, 19 nt, synthetic construct
  source 1..19: mol_type = other RNA
ggggccggggaggggccac

SEQ ID NO: 35697 - RNA, 19 nt, synthetic construct
  source 1..19: mol_type = other RNA
cacagcaaagcacacgcac

SEQ ID NO: 35698 - RNA, 19 nt, synthetic construct
  source 1..19: mol_type = other RNA
ggcggttgcagtccctgga

SEQ ID NO: 35699 - RNA, 19 nt, synthetic construct
  source 1..19: mol_type = other RNA
gcttctcagtgctggaagg

SEQ ID NO: 35700 - RNA, 19 nt, synthetic construct
  source 1..19: mol_type = other RNA
tgtggtcagctctgtgagg

SEQ ID NO: 35701 - RNA, 19 nt, synthetic construct
  source 1..19: mol_type = other RNA
gtggctgttgtggtcagct

SEQ ID NO: 35702 - RNA, 19 nt, synthetic construct
  source 1..19: mol_type = other RNA
ggcggttgcagtccctgga

SEQ ID NO: 35703 - RNA, 19 nt, synthetic construct
  source 1..19: mol_type = other RNA
gcttctcagtgctggaagg

SEQ ID NO: 35704 - RNA, 19 nt, synthetic construct
  source 1..19: mol_type = other RNA
tgtggtcagctctgtgagg

SEQ ID NO: 35705 - RNA, 19 nt, synthetic construct
  source 1..19: mol_type = other RNA
ggcggttgcagtccctgga

SEQ ID NO: 35706 - RNA, 19 nt, synthetic construct
  source 1..19: mol_type = other RNA
gcttctcagtgctggaagg

SEQ ID NO: 35707 - RNA, 19 nt, synthetic construct
  source 1..19: mol_type = other RNA
ggcggttgcagtccctgga

SEQ ID NO: 35708 - RNA, 19 nt, synthetic construct
  source 1..19: mol_type = other RNA
gcttctcagtgctggaagg

SEQ ID NO: 35709 - RNA, 19 nt, synthetic construct
  source 1..19: mol_type = other RNA
tgtggtcagctctgtgagg

SEQ ID NO: 35710 - RNA, 19 nt, synthetic construct
  source 1..19: mol_type = other RNA
gtggctgttgtggtcagct

SEQ ID NO: 35711 - RNA, 19 nt, synthetic construct
  source 1..19: mol_type = other RNA
tgtggtcagctctgtgagg

SEQ ID NO: 35712 - RNA, 19 nt, synthetic construct
  source 1..19: mol_type = other RNA
tgtggtcagctctgtgagg

SEQ ID NO: 35713 - RNA, 19 nt, synthetic construct
  source 1..19: mol_type = other RNA
gtggctgttgtggtcagct

SEQ ID NO: 35714 - RNA, 19 nt, synthetic construct
  source 1..19: mol_type = other RNA
gcttctcagtgctggaagg

SEQ ID NO: 35715 - RNA, 19 nt, synthetic construct
  source 1..19: mol_type = other RNA
gtggctgttgtggtcagct

SEQ ID NO: 35716 - RNA, 19 nt, synthetic construct
  source 1..19: mol_type = other RNA
ggccacaggctctcccagg

SEQ ID NO: 35717 - RNA, 19 nt, synthetic construct
  source 1..19: mol_type = other RNA
ccacagcactgcccggcca

SEQ ID NO: 35718 - RNA, 19 nt, synthetic construct
  source 1..19: mol_type = other RNA
gtgccagcagttgcctggg

SEQ ID NO: 35719 - RNA, 19 nt, synthetic construct
  source 1..19: mol_type = other RNA
tctgctctgtgaggatcca

SEQ ID NO: 35720 - RNA, 19 nt, synthetic construct
  source 1..19: mol_type = other RNA
gtgccagcagttgcctggg

SEQ ID NO: 35721 - RNA, 19 nt, synthetic construct
  source 1..19: mol_type = other RNA
gtgccagcagttgcctggg

SEQ ID NO: 35722 - RNA, 19 nt, synthetic construct
  source 1..19: mol_type = other RNA
ttgtggtcagctctgtgag

SEQ ID NO: 35723 - RNA, 19 nt, synthetic construct
  source 1..19: mol_type = other RNA
ctgtggtcagctctgtgag

SEQ ID NO: 35724 - RNA, 19 nt, synthetic construct
  source 1..19: mol_type = other RNA
ttgtggtcagctctgtgag

SEQ ID NO: 35725 - RNA, 19 nt, synthetic construct
  source 1..19: mol_type = other RNA
ctgtggtcagctctgtgag

SEQ ID NO: 35726 - RNA, 19 nt, synthetic construct
  source 1..19: mol_type = other RNA
ttgtggtcagctctgtgag

SEQ ID NO: 35727 - RNA, 19 nt, synthetic construct
  source 1..19: mol_type = other RNA
gttcttgcaggtcagcccc

SEQ ID NO: 35728 - RNA, 19 nt, synthetic construct
  source 1..19: mol_type = other RNA
cacaggaatgtcagcacca

SEQ ID NO: 35729 - RNA, 19 nt, synthetic construct
  source 1..19: mol_type = other RNA
cgttcttgcaggtcagccc

SEQ ID NO: 35730 - RNA, 19 nt, synthetic construct
  source 1..19: mol_type = other RNA
agttgcctgggtggaggag

SEQ ID NO: 35731 - RNA, 19 nt, synthetic construct
  source 1..19: mol_type = other RNA
agttgcctgggtggaggag

SEQ ID NO: 35732 - RNA, 19 nt, synthetic construct
  source 1..19: mol_type = other RNA
agttgcctgggtggaggag

SEQ ID NO: 35733 - RNA, 19 nt, synthetic construct
  source 1..19: mol_type = other RNA
ggtggagaccgggagggcc

SEQ ID NO: 35734 - RNA, 19 nt, synthetic construct
  source 1..19: mol_type = other RNA
tccccgcctgcaacccctg

SEQ ID NO: 35735 - RNA, 19 nt, synthetic construct
  source 1..19: mol_type = other RNA
tgggggctgcacaccctgt

SEQ ID NO: 35736 - RNA, 19 nt, synthetic construct
  source 1..19: mol_type = other RNA
tggtggctggggtactggg

SEQ ID NO: 35737 - RNA, 19 nt, synthetic construct
  source 1..19: mol_type = other RNA
ggccgtggagctggtggct

SEQ ID NO: 35738 - RNA, 19 nt, synthetic construct
  source 1..19: mol_type = other RNA
tggccgtggagctggtggc

SEQ ID NO: 35739 - RNA, 19 nt, synthetic construct
  source 1..19: mol_type = other RNA
tggtcagctctgtgaggat

SEQ ID NO: 35740 - RNA, 19 nt, synthetic construct
  source 1..19: mol_type = other RNA
tggtcagctctgtgaggat

SEQ ID NO: 35741 - RNA, 19 nt, synthetic construct
  source 1..19: mol_type = other RNA
tggtcagctctgtgaggat

SEQ ID NO: 35742 - RNA, 19 nt, synthetic construct
  source 1..19: mol_type = other RNA
tggtcagctctgtgaggat

SEQ ID NO: 35743 - RNA, 19 nt, synthetic construct
  source 1..19: mol_type = other RNA
tggtcagctctgtgaggat

SEQ ID NO: 35744 - RNA, 19 nt, synthetic construct
  source 1..19: mol_type = other RNA
cagctgtgggctctggttc

SEQ ID NO: 35745 - RNA, 19 nt, synthetic construct
  source 1..19: mol_type = other RNA
gtgctggaagggcagttgc

SEQ ID NO: 35746 - RNA, 19 nt, synthetic construct
  source 1..19: mol_type = other RNA
ctctgggggcaggtggttg

SEQ ID NO: 35747 - RNA, 19 nt, synthetic construct
  source 1..19: mol_type = other RNA
gtgcaccacctctccagga

SEQ ID NO: 35748 - RNA, 19 nt, synthetic construct
  source 1..19: mol_type = other RNA
aacagggcctgggtggtgg

SEQ ID NO: 35749 - RNA, 19 nt, synthetic construct
  source 1..19: mol_type = other RNA
aacctgcctgtctggtctt

SEQ ID NO: 35750 - RNA, 19 nt, synthetic construct
  source 1..19: mol_type = other RNA
ctggggcagtggctgtagt

SEQ ID NO: 35751 - RNA, 19 nt, synthetic construct
  source 1..19: mol_type = other RNA
ggccgtggctgtggtcctg

SEQ ID NO: 35752 - RNA, 19 nt, synthetic construct
  source 1..19: mol_type = other RNA
ggtcagctctgtgaggatc

SEQ ID NO: 35753 - RNA, 19 nt, synthetic construct
  source 1..19: mol_type = other RNA
ggtcagctctgtgaggatc

SEQ ID NO: 35754 - RNA, 19 nt, synthetic construct
  source 1..19: mol_type = other RNA
caccgtggagccactggtt

SEQ ID NO: 35755 - RNA, 19 nt, synthetic construct
  source 1..19: mol_type = other RNA
tcgtccctggggaaggggg

SEQ ID NO: 35756 - RNA, 19 nt, synthetic construct
  source 1..19: mol_type = other RNA
ggtcagctctgtgaggatc

SEQ ID NO: 35757 - RNA, 19 nt, synthetic construct
  source 1..19: mol_type = other RNA
ggtcagctctgtgaggatc

SEQ ID NO: 35758 - RNA, 19 nt, synthetic construct
  source 1..19: mol_type = other RNA
ggtcagctctgtgaggatc

SEQ ID NO: 35759 - RNA, 19 nt, synthetic construct
  source 1..19: mol_type = other RNA
caccgtggagccactggtt

SEQ ID NO: 35760 - RNA, 19 nt, synthetic construct
  source 1..19: mol_type = other RNA
cagctggactggctggcca

SEQ ID NO: 35761 - RNA, 19 nt, synthetic construct
  source 1..19: mol_type = other RNA
tcgcagcttcctggcagca

SEQ ID NO: 35762 - RNA, 19 nt, synthetic construct
  source 1..19: mol_type = other RNA
gctggggtactggggcagt

SEQ ID NO: 35763 - RNA, 19 nt, synthetic construct
  source 1..19: mol_type = other RNA
ccgtccctgggctggagga

SEQ ID NO: 35764 - RNA, 19 nt, synthetic construct
  source 1..19: mol_type = other RNA
gcactgggggtgtgtgggt

SEQ ID NO: 35765 - RNA, 19 nt, synthetic construct
  source 1..19: mol_type = other RNA
ccgtccctgggctggagga

SEQ ID NO: 35766 - RNA, 19 nt, synthetic construct
  source 1..19: mol_type = other RNA
gcactgggggtgtgtgggt

SEQ ID NO: 35767 - RNA, 19 nt, synthetic construct
  source 1..19: mol_type = other RNA
ccgtccctgggctggagga

SEQ ID NO: 35768 - RNA, 19 nt, synthetic construct
  source 1..19: mol_type = other RNA
gcactgggggtgtgtgggt

SEQ ID NO: 35769 - RNA, 19 nt, synthetic construct
  source 1..19: mol_type = other RNA
ccgtccctgggctggagga

SEQ ID NO: 35770 - RNA, 19 nt, synthetic construct
  source 1..19: mol_type = other RNA
gcactgggggtgtgtgggt

SEQ ID NO: 35771 - RNA, 19 nt, synthetic construct
  source 1..19: mol_type = other RNA
ccgtccctgggctggagga

SEQ ID NO: 35772 - RNA, 19 nt, synthetic construct
  source 1..19: mol_type = other RNA
ttggcaggctgctggggag

SEQ ID NO: 35773 - RNA, 19 nt, synthetic construct
  source 1..19: mol_type = other RNA
tggggcagtggctgtagtc

SEQ ID NO: 35774 - RNA, 19 nt, synthetic construct
  source 1..19: mol_type = other RNA
agtggctgttgtggtcggc

SEQ ID NO: 35775 - RNA, 19 nt, synthetic construct
  source 1..19: mol_type = other RNA
ggtggtcagcactgtgggg

SEQ ID NO: 35776 - RNA, 19 nt, synthetic construct
  source 1..19: mol_type = other RNA
accgtggagccactggttg

SEQ ID NO: 35777 - RNA, 19 nt, synthetic construct
  source 1..19: mol_type = other RNA
ggtggtcagcactgtgggg

SEQ ID NO: 35778 - RNA, 19 nt, synthetic construct
  source 1..19: mol_type = other RNA
accgtggagccactggttg

SEQ ID NO: 35779 - RNA, 19 nt, synthetic construct
  source 1..19: mol_type = other RNA
atgggggctgcacaccctg

SEQ ID NO: 35780 - RNA, 19 nt, synthetic construct
  source 1..19: mol_type = other RNA
cccgcctgcaacccctgag

SEQ ID NO: 35781 - RNA, 19 nt, synthetic construct
  source 1..19: mol_type = other RNA
gtcagccccgtctccaggc

SEQ ID NO: 35782 - RNA, 19 nt, synthetic construct
  source 1..19: mol_type = other RNA
gtggctgcaggtgtggtgg

SEQ ID NO: 35783 - RNA, 19 nt, synthetic construct
  source 1..19: mol_type = other RNA
gtggctgcaggtgtggtgg

SEQ ID NO: 35784 - RNA, 19 nt, synthetic construct
  source 1..19: mol_type = other RNA
gtggctgcaggtgtggtgg

SEQ ID NO: 35785 - RNA, 19 nt, synthetic construct
  source 1..19: mol_type = other RNA
gtggtcctggaggtgcccc

SEQ ID NO: 35786 - RNA, 19 nt, synthetic construct
  source 1..19: mol_type = other RNA
gtggctgcaggtgtggtgg

SEQ ID NO: 35787 - RNA, 19 nt, synthetic construct
  source 1..19: mol_type = other RNA
tttggagctggtggctgcg

SEQ ID NO: 35788 - RNA, 19 nt, synthetic construct
  source 1..19: mol_type = other RNA
gattgtggacatggtggac

SEQ ID NO: 35789 - RNA, 19 nt, synthetic construct
  source 1..19: mol_type = other RNA
caggctctgggggcaggtg

SEQ ID NO: 35790 - RNA, 19 nt, synthetic construct
  source 1..19: mol_type = other RNA
acgtgggtgtaggtgtgca

SEQ ID NO: 35791 - RNA, 19 nt, synthetic construct
  source 1..19: mol_type = other RNA
gcagggagggagccgggcc

SEQ ID NO: 35792 - RNA, 19 nt, synthetic construct
  source 1..19: mol_type = other RNA
ccacagggccctgggtctc

SEQ ID NO: 35793 - RNA, 19 nt, synthetic construct
  source 1..19: mol_type = other RNA
agagctcagggcacctcca

SEQ ID NO: 35794 - RNA, 19 nt, synthetic construct
  source 1..19: mol_type = other RNA
gggcagagctcagggcacc

SEQ ID NO: 35795 - RNA, 19 nt, synthetic construct
  source 1..19: mol_type = other RNA
ggggcagagctcagggcac

SEQ ID NO: 35796 - RNA, 19 nt, synthetic construct
  source 1..19: mol_type = other RNA
caggtggtgttgaaggagg

SEQ ID NO: 35797 - RNA, 19 nt, synthetic construct
  source 1..19: mol_type = other RNA
gggccgtgaagtcgtcagc

SEQ ID NO: 35798 - RNA, 19 nt, synthetic construct
  source 1..19: mol_type = other RNA
gcccgtggcctccaccacc

SEQ ID NO: 35799 - RNA, 19 nt, synthetic construct
  source 1..19: mol_type = other RNA
cgcccgtggcctccaccac

SEQ ID NO: 35800 - RNA, 19 nt, synthetic construct
  source 1..19: mol_type = other RNA
gcgcccgtggcctccacca

SEQ ID NO: 35801 - RNA, 19 nt, synthetic construct
  source 1..19: mol_type = other RNA
tccgacaccagccccgggg

SEQ ID NO: 35802 - RNA, 19 nt, synthetic construct
  source 1..19: mol_type = other RNA
agtctccgcctcccaggcc

SEQ ID NO: 35803 - RNA, 19 nt, synthetic construct
  source 1..19: mol_type = other RNA
gcctggggccggggagggg

SEQ ID NO: 35804 - RNA, 19 nt, synthetic construct
  source 1..19: mol_type = other RNA
tgcctggggccggggaggg

SEQ ID NO: 35805 - RNA, 19 nt, synthetic construct
  source 1..19: mol_type = other RNA
ttccatgtccccgcctgca

SEQ ID NO: 35806 - RNA, 19 nt, synthetic construct
  source 1..19: mol_type = other RNA
gtcagcacctgcccgacct

SEQ ID NO: 35807 - RNA, 19 nt, synthetic construct
  source 1..19: mol_type = other RNA
caggtcagcacctgcccga

SEQ ID NO: 35808 - RNA, 19 nt, synthetic construct
  source 1..19: mol_type = other RNA
gcaggtcagcacctgcccg

SEQ ID NO: 35809 - RNA, 19 nt, synthetic construct
  source 1..19: mol_type = other RNA
ggtcagccccgtctccagg

SEQ ID NO: 35810 - RNA, 19 nt, synthetic construct
  source 1..19: mol_type = other RNA
actggggcagtggctgtag

SEQ ID NO: 35811 - RNA, 19 nt, synthetic construct
  source 1..19: mol_type = other RNA
tactggggcagtggctgta

SEQ ID NO: 35812 - RNA, 19 nt, synthetic construct
  source 1..19: mol_type = other RNA
ggtactggggcagtggctg

SEQ ID NO: 35813 - RNA, 19 nt, synthetic construct
  source 1..19: mol_type = other RNA
gggtactggggcagtggct

SEQ ID NO: 35814 - RNA, 19 nt, synthetic construct
  source 1..19: mol_type = other RNA
ggtggctggggtactgggg

SEQ ID NO: 35815 - RNA, 19 nt, synthetic construct
  source 1..19: mol_type = other RNA
ctggtggctggggtactgg

SEQ ID NO: 35816 - RNA, 19 nt, synthetic construct
  source 1..19: mol_type = other RNA
ggagctggtggctggggta

SEQ ID NO: 35817 - RNA, 19 nt, synthetic construct
  source 1..19: mol_type = other RNA
gtggagctggtggctgggg

SEQ ID NO: 35818 - RNA, 19 nt, synthetic construct
  source 1..19: mol_type = other RNA
gccgtggagctggtggctg

SEQ ID NO: 35819 - RNA, 19 nt, synthetic construct
  source 1..19: mol_type = other RNA
gtggccgtggagctggtgg

SEQ ID NO: 35820 - RNA, 19 nt, synthetic construct
  source 1..19: mol_type = other RNA
cgtggccgtggagctggtg

SEQ ID NO: 35821 - RNA, 19 nt, synthetic construct
  source 1..19: mol_type = other RNA
gcgtggccgtggagctggt

SEQ ID NO: 35822 - RNA, 19 nt, synthetic construct
  source 1..19: mol_type = other RNA
ggcgtggccgtggagctgg

SEQ ID NO: 35823 - RNA, 19 nt, synthetic construct
  source 1..19: mol_type = other RNA
agggcgtggccgtggagct

SEQ ID NO: 35824 - RNA, 19 nt, synthetic construct
  source 1..19: mol_type = other RNA
ggagggcgtggccgtggag

SEQ ID NO: 35825 - RNA, 19 nt, synthetic construct
  source 1..19: mol_type = other RNA
ttgaggagggcgtggccgt

SEQ ID NO: 35826 - RNA, 19 nt, synthetic construct
  source 1..19: mol_type = other RNA
tgaggatccaggtcgtccc

SEQ ID NO: 35827 - RNA, 19 nt, synthetic construct
  source 1..19: mol_type = other RNA
tggatccagtggacgcagt

SEQ ID NO: 35828 - RNA, 19 nt, synthetic construct
  source 1..19: mol_type = other RNA
tcagcactttgggaggggg

SEQ ID NO: 35829 - RNA, 19 nt, synthetic construct
  source 1..19: mol_type = other RNA
ggttgcagtccctggactg

SEQ ID NO: 35830 - RNA, 19 nt, synthetic construct
  source 1..19: mol_type = other RNA
cagggaggaagaggggatg

SEQ ID NO: 35831 - RNA, 19 nt, synthetic construct
  source 1..19: mol_type = other RNA
ggtggaggagggggtggcc

SEQ ID NO: 35832 - RNA, 19 nt, synthetic construct
  source 1..19: mol_type = other RNA
ggatggaggagggggtcac

SEQ ID NO: 35833 - RNA, 19 nt, synthetic construct
  source 1..19: mol_type = other RNA
tgttgctggtggctgcagg

SEQ ID NO: 35834 - RNA, 19 nt, synthetic construct
  source 1..19: mol_type = other RNA
ggcactgggggtgtgtggg

SEQ ID NO: 35835 - RNA, 19 nt, synthetic construct
  source 1..19: mol_type = other RNA
aagtccaggctgtgcgcac

SEQ ID NO: 35836 - RNA, 19 nt, synthetic construct
  source 1..19: mol_type = other RNA
acaccaggctgggcctggg

SEQ ID NO: 35837 - RNA, 19 nt, synthetic construct
  source 1..19: mol_type = other RNA
tgaggatccaggtcgtccc

SEQ ID NO: 35838 - RNA, 19 nt, synthetic construct
  source 1..19: mol_type = other RNA
tggctgttgtggtcagctc

SEQ ID NO: 35839 - RNA, 19 nt, synthetic construct
  source 1..19: mol_type = other RNA
gtagtggctgttgtggtca

SEQ ID NO: 35840 - RNA, 19 nt, synthetic construct
  source 1..19: mol_type = other RNA
ggggtggaggacggggtgg

SEQ ID NO: 35841 - RNA, 19 nt, synthetic construct
  source 1..19: mol_type = other RNA
tggggtggaggacggggtg

SEQ ID NO: 35842 - RNA, 19 nt, synthetic construct
  source 1..19: mol_type = other RNA
ggaggaggcggtggccgtg

SEQ ID NO: 35843 - RNA, 19 nt, synthetic construct
  source 1..19: mol_type = other RNA
tggaggaggcggtggccgt

SEQ ID NO: 35844 - RNA, 19 nt, synthetic construct
  source 1..19: mol_type = other RNA
tgccagcagttgcctgggt

SEQ ID NO: 35845 - RNA, 19 nt, synthetic construct
  source 1..19: mol_type = other RNA
ggttgcagtccctggactg

SEQ ID NO: 35846 - RNA, 19 nt, synthetic construct
  source 1..19: mol_type = other RNA
ggtggaggagggggtggcc

SEQ ID NO: 35847 - RNA, 19 nt, synthetic construct
  source 1..19: mol_type = other RNA
ggatggaggagggggtcac

SEQ ID NO: 35848 - RNA, 19 nt, synthetic construct
  source 1..19: mol_type = other RNA
tgctgctggtggctgcagg

SEQ ID NO: 35849 - RNA, 19 nt, synthetic construct
  source 1..19: mol_type = other RNA
gtgctgctggtggctgcag

SEQ ID NO: 35850 - RNA, 19 nt, synthetic construct
  source 1..19: mol_type = other RNA
ggcactgggggtgtgtggg

SEQ ID NO: 35851 - RNA, 19 nt, synthetic construct
  source 1..19: mol_type = other RNA
aagtccaggctgtgcgcac

SEQ ID NO: 35852 - RNA, 19 nt, synthetic construct
  source 1..19: mol_type = other RNA
aggtggccctggtgtggcc

SEQ ID NO: 35853 - RNA, 19 nt, synthetic construct
  source 1..19: mol_type = other RNA
ggtgtggccgtggccgtgg

SEQ ID NO: 35854 - RNA, 19 nt, synthetic construct
  source 1..19: mol_type = other RNA
acaccaggctgggcctggg

SEQ ID NO: 35855 - RNA, 19 nt, synthetic construct
  source 1..19: mol_type = other RNA
agtggctgctgtggtctgc

SEQ ID NO: 35856 - RNA, 19 nt, synthetic construct
  source 1..19: mol_type = other RNA
tcagcactttgggaggggg

SEQ ID NO: 35857 - RNA, 19 nt, synthetic construct
  source 1..19: mol_type = other RNA
gtggctgtgggtgtggtgg

SEQ ID NO: 35858 - RNA, 19 nt, synthetic construct
  source 1..19: mol_type = other RNA
tggaggaggaagtggcttt

SEQ ID NO: 35859 - RNA, 19 nt, synthetic construct
  source 1..19: mol_type = other RNA
ggtgaaggaggggatgggt

SEQ ID NO: 35860 - RNA, 19 nt, synthetic construct
  source 1..19: mol_type = other RNA
tgaggatccaggtcgtccc

SEQ ID NO: 35861 - RNA, 19 nt, synthetic construct
  source 1..19: mol_type = other RNA
cggggtggccgtggggcca

SEQ ID NO: 35862 - RNA, 19 nt, synthetic construct
  source 1..19: mol_type = other RNA
ggggtggaggacggggtgg

SEQ ID NO: 35863 - RNA, 19 nt, synthetic construct
  source 1..19: mol_type = other RNA
tggggtggaggacggggtg

SEQ ID NO: 35864 - RNA, 19 nt, synthetic construct
  source 1..19: mol_type = other RNA
ggaggaggcggtggccgtg

SEQ ID NO: 35865 - RNA, 19 nt, synthetic construct
  source 1..19: mol_type = other RNA
tggaggaggcggtggccgt

SEQ ID NO: 35866 - RNA, 19 nt, synthetic construct
  source 1..19: mol_type = other RNA
ggttgcagtccctggactg

SEQ ID NO: 35867 - RNA, 19 nt, synthetic construct
  source 1..19: mol_type = other RNA
ggaggaagaggggatggct

SEQ ID NO: 35868 - RNA, 19 nt, synthetic construct
  source 1..19: mol_type = other RNA
cagggaggaagaggggatg

SEQ ID NO: 35869 - RNA, 19 nt, synthetic construct
  source 1..19: mol_type = other RNA
ggtggaggagggggtggcc

SEQ ID NO: 35870 - RNA, 19 nt, synthetic construct
  source 1..19: mol_type = other RNA
ggatggaggagggggtcac

SEQ ID NO: 35871 - RNA, 19 nt, synthetic construct
  source 1..19: mol_type = other RNA
tgctgctggtggctgcagg

SEQ ID NO: 35872 - RNA, 19 nt, synthetic construct
  source 1..19: mol_type = other RNA
gtgctgctggtggctgcag

SEQ ID NO: 35873 - RNA, 19 nt, synthetic construct
  source 1..19: mol_type = other RNA
ggcactgggggtgtgtggg

SEQ ID NO: 35874 - RNA, 19 nt, synthetic construct
  source 1..19: mol_type = other RNA
aagtccaggctgtgcgcac

SEQ ID NO: 35875 - RNA, 19 nt, synthetic construct
  source 1..19: mol_type = other RNA
tgctgggtggtactggtgg

SEQ ID NO: 35876 - RNA, 19 nt, synthetic construct
  source 1..19: mol_type = other RNA
gctgtggctgtggtcctgg

SEQ ID NO: 35877 - RNA, 19 nt, synthetic construct
  source 1..19: mol_type = other RNA
tcttgctgggtgtggctgt

SEQ ID NO: 35878 - RNA, 19 nt, synthetic construct
  source 1..19: mol_type = other RNA
acaccaggctgggcctggg

SEQ ID NO: 35879 - RNA, 19 nt, synthetic construct
  source 1..19: mol_type = other RNA
tgaggatccaggtcgtccc

SEQ ID NO: 35880 - RNA, 19 nt, synthetic construct
  source 1..19: mol_type = other RNA
gtagtggctgttgtggtca

SEQ ID NO: 35881 - RNA, 19 nt, synthetic construct
  source 1..19: mol_type = other RNA
ggggtggaggacggggtgg

SEQ ID NO: 35882 - RNA, 19 nt, synthetic construct
  source 1..19: mol_type = other RNA
tggggtggaggacggggtg

SEQ ID NO: 35883 - RNA, 19 nt, synthetic construct
  source 1..19: mol_type = other RNA
ggaggaggcggtggccgtg

SEQ ID NO: 35884 - RNA, 19 nt, synthetic construct
  source 1..19: mol_type = other RNA
tggaggaggcggtggccgt

SEQ ID NO: 35885 - RNA, 19 nt, synthetic construct
  source 1..19: mol_type = other RNA
tgccagcagttgcctgggt

SEQ ID NO: 35886 - RNA, 19 nt, synthetic construct
  source 1..19: mol_type = other RNA
ggttgcagtccctggactg

SEQ ID NO: 35887 - RNA, 19 nt, synthetic construct
  source 1..19: mol_type = other RNA
tggggtggaagagggggtg

SEQ ID NO: 35888 - RNA, 19 nt, synthetic construct
  source 1..19: mol_type = other RNA
ctggggtggaagagggggt

SEQ ID NO: 35889 - RNA, 19 nt, synthetic construct
  source 1..19: mol_type = other RNA
ttcctggggtggaagaggg

SEQ ID NO: 35890 - RNA, 19 nt, synthetic construct
  source 1..19: mol_type = other RNA
gggctggaggagggggtga

SEQ ID NO: 35891 - RNA, 19 nt, synthetic construct
  source 1..19: mol_type = other RNA
tgctgctggtggctgcagg

SEQ ID NO: 35892 - RNA, 19 nt, synthetic construct
  source 1..19: mol_type = other RNA
gtgctgctggtggctgcag

SEQ ID NO: 35893 - RNA, 19 nt, synthetic construct
  source 1..19: mol_type = other RNA
ggcactgggggtgtgtggg

SEQ ID NO: 35894 - RNA, 19 nt, synthetic construct
  source 1..19: mol_type = other RNA
aagtccaggctgtgcgcac

SEQ ID NO: 35895 - RNA, 19 nt, synthetic construct
  source 1..19: mol_type = other RNA
ggtgtggccgtggccgtgg

SEQ ID NO: 35896 - RNA, 19 nt, synthetic construct
  source 1..19: mol_type = other RNA
acaccaggctgggcctggg

SEQ ID NO: 35897 - RNA, 19 nt, synthetic construct
  source 1..19: mol_type = other RNA
tgaggatccaggtcgtccc

SEQ ID NO: 35898 - RNA, 19 nt, synthetic construct
  source 1..19: mol_type = other RNA
tggctgttgtggtcagctc

SEQ ID NO: 35899 - RNA, 19 nt, synthetic construct
  source 1..19: mol_type = other RNA
gtagtggctgttgtggtca

SEQ ID NO: 35900 - RNA, 19 nt, synthetic construct
  source 1..19: mol_type = other RNA
cgtggatccagtggatgca

SEQ ID NO: 35901 - RNA, 19 nt, synthetic construct
  source 1..19: mol_type = other RNA
ggggtggaggacggggtgg

SEQ ID NO: 35902 - RNA, 19 nt, synthetic construct
  source 1..19: mol_type = other RNA
cggggtggaggacggggtg

SEQ ID NO: 35903 - RNA, 19 nt, synthetic construct
  source 1..19: mol_type = other RNA
tcagcactttgggaggggg

SEQ ID NO: 35904 - RNA, 19 nt, synthetic construct
  source 1..19: mol_type = other RNA
gtggctgtgggtgtggtgg

SEQ ID NO: 35905 - RNA, 19 nt, synthetic construct
  source 1..19: mol_type = other RNA
tggaggaggaagtggcttt

SEQ ID NO: 35906 - RNA, 19 nt, synthetic construct
  source 1..19: mol_type = other RNA
tgaggatccaggtcgtccc

SEQ ID NO: 35907 - RNA, 19 nt, synthetic construct
  source 1..19: mol_type = other RNA
cggggtggccgtggggcca

SEQ ID NO: 35908 - RNA, 19 nt, synthetic construct
  source 1..19: mol_type = other RNA
ggggtggaggacggggtgg

SEQ ID NO: 35909 - RNA, 19 nt, synthetic construct
  source 1..19: mol_type = other RNA
tggggtggaggacggggtg

SEQ ID NO: 35910 - RNA, 19 nt, synthetic construct
  source 1..19: mol_type = other RNA
tggctgttgtggtcagctc

SEQ ID NO: 35911 - RNA, 19 nt, synthetic construct
  source 1..19: mol_type = other RNA
gtagtggctgttgtggtca

SEQ ID NO: 35912 - RNA, 19 nt, synthetic construct
  source 1..19: mol_type = other RNA
tggatccagtggacgcagt

SEQ ID NO: 35913 - RNA, 19 nt, synthetic construct
  source 1..19: mol_type = other RNA
ggggtggaggacggggtgg

SEQ ID NO: 35914 - RNA, 19 nt, synthetic construct
  source 1..19: mol_type = other RNA
tggggtggaggacggggtg

SEQ ID NO: 35915 - RNA, 19 nt, synthetic construct
  source 1..19: mol_type = other RNA
ggaggaggcggtggccgtg

SEQ ID NO: 35916 - RNA, 19 nt, synthetic construct
  source 1..19: mol_type = other RNA
tggaggaggcggtggccgt

SEQ ID NO: 35917 - RNA, 19 nt, synthetic construct
  source 1..19: mol_type = other RNA
tgccagcagttgcctgggt

SEQ ID NO: 35918 - RNA, 19 nt, synthetic construct
  source 1..19: mol_type = other RNA
agttgcagtccctggactg

SEQ ID NO: 35919 - RNA, 19 nt, synthetic construct
  source 1..19: mol_type = other RNA
ggtggaggagggggtggcc

SEQ ID NO: 35920 - RNA, 19 nt, synthetic construct
  source 1..19: mol_type = other RNA
ggatggaggagggggtcac

SEQ ID NO: 35921 - RNA, 19 nt, synthetic construct
  source 1..19: mol_type = other RNA
ggaagtggctttggagctg

SEQ ID NO: 35922 - RNA, 19 nt, synthetic construct
  source 1..19: mol_type = other RNA
tggaggaggaagtggcttt

SEQ ID NO: 35923 - RNA, 19 nt, synthetic construct
  source 1..19: mol_type = other RNA
acagggtggaggaggggat

SEQ ID NO: 35924 - RNA, 19 nt, synthetic construct
  source 1..19: mol_type = other RNA
tgtcatggtggctgtggtg

SEQ ID NO: 35925 - RNA, 19 nt, synthetic construct
  source 1..19: mol_type = other RNA
ttgtcatggtggctgtggt

SEQ ID NO: 35926 - RNA, 19 nt, synthetic construct
  source 1..19: mol_type = other RNA
gaggagggtgtggccgtgg

SEQ ID NO: 35927 - RNA, 19 nt, synthetic construct
  source 1..19: mol_type = other RNA
gtagtggctgttgtggtca

SEQ ID NO: 35928 - RNA, 19 nt, synthetic construct
  source 1..19: mol_type = other RNA
gtccctggggtggaggaca

SEQ ID NO: 35929 - RNA, 19 nt, synthetic construct
  source 1..19: mol_type = other RNA
ggtccctggggtggaggac

SEQ ID NO: 35930 - RNA, 19 nt, synthetic construct
  source 1..19: mol_type = other RNA
ggaggaggcggtggccgtg

SEQ ID NO: 35931 - RNA, 19 nt, synthetic construct
  source 1..19: mol_type = other RNA
tggaggaggcggtggccgt

SEQ ID NO: 35932 - RNA, 19 nt, synthetic construct
  source 1..19: mol_type = other RNA
gagctggggaagccagtgg

SEQ ID NO: 35933 - RNA, 19 nt, synthetic construct
  source 1..19: mol_type = other RNA
ggagctggggaagccagtg

SEQ ID NO: 35934 - RNA, 19 nt, synthetic construct
  source 1..19: mol_type = other RNA
gcgggcggcagcggcagtg

SEQ ID NO: 35935 - RNA, 19 nt, synthetic construct
  source 1..19: mol_type = other RNA
tgagggcgcgggggcagcg

SEQ ID NO: 35936 - RNA, 19 nt, synthetic construct
  source 1..19: mol_type = other RNA
cctggaagacttggccatt

SEQ ID NO: 35937 - RNA, 19 nt, synthetic construct
  source 1..19: mol_type = other RNA
gggcatggggtgggggtgg

SEQ ID NO: 35938 - RNA, 19 nt, synthetic construct
  source 1..19: mol_type = other RNA
gtgggcatggggtgggggt

SEQ ID NO: 35939 - RNA, 19 nt, synthetic construct
  source 1..19: mol_type = other RNA
ggtgggtgggcaggtgagg

SEQ ID NO: 35940 - RNA, 19 nt, synthetic construct
  source 1..19: mol_type = other RNA
agctgtgggctctggttcc

SEQ ID NO: 35941 - RNA, 19 nt, synthetic construct
  source 1..19: mol_type = other RNA
tcaaagccctggggacagg

SEQ ID NO: 35942 - RNA, 19 nt, synthetic construct
  source 1..19: mol_type = other RNA
cagcactttgggaggggga

SEQ ID NO: 35943 - RNA, 19 nt, synthetic construct
  source 1..19: mol_type = other RNA
cagcactttgggaggggga

SEQ ID NO: 35944 - RNA, 19 nt, synthetic construct
  source 1..19: mol_type = other RNA
cagcactttgggaggggga

SEQ ID NO: 35945 - RNA, 19 nt, synthetic construct
  source 1..19: mol_type = other RNA
caagggtggaggaggggat

SEQ ID NO: 35946 - RNA, 19 nt, synthetic construct
  source 1..19: mol_type = other RNA
cagagtggaggaggcggtg

SEQ ID NO: 35947 - RNA, 19 nt, synthetic construct
  source 1..19: mol_type = other RNA
ctgttcccagagtggagga

SEQ ID NO: 35948 - RNA, 19 nt, synthetic construct
  source 1..19: mol_type = other RNA
cctcctccttcccatgcac

SEQ ID NO: 35949 - RNA, 19 nt, synthetic construct
  source 1..19: mol_type = other RNA
caccaggctgggcctgggc

SEQ ID NO: 35950 - RNA, 19 nt, synthetic construct
  source 1..19: mol_type = other RNA
caccaggctgggcctgggc

SEQ ID NO: 35951 - RNA, 19 nt, synthetic construct
  source 1..19: mol_type = other RNA
caccaggctgggcctgggc

SEQ ID NO: 35952 - RNA, 19 nt, synthetic construct
  source 1..19: mol_type = other RNA
caccaggctgggcctgggc

SEQ ID NO: 35953 - RNA, 19 nt, synthetic construct
  source 1..19: mol_type = other RNA
ggaagtggctttggaactg

SEQ ID NO: 35954 - RNA, 19 nt, synthetic construct
  source 1..19: mol_type = other RNA
ggaagtggctttggaactg

SEQ ID NO: 35955 - RNA, 19 nt, synthetic construct
  source 1..19: mol_type = other RNA
ggggctgcacaccctgtgc

SEQ ID NO: 35956 - RNA, 19 nt, synthetic construct
  source 1..19: mol_type = other RNA
gggggctgcacaccctgtg

SEQ ID NO: 35957 - RNA, 19 nt, synthetic construct
  source 1..19: mol_type = other RNA
gtggaggaggcggtggccg

SEQ ID NO: 35958 - RNA, 19 nt, synthetic construct
  source 1..19: mol_type = other RNA
aggaagtggctttggaact

SEQ ID NO: 35959 - RNA, 19 nt, synthetic construct
  source 1..19: mol_type = other RNA
gtggaggaggcggtggccg

SEQ ID NO: 35960 - RNA, 19 nt, synthetic construct
  source 1..19: mol_type = other RNA
gtggaggaggcggtggccg

SEQ ID NO: 35961 - RNA, 19 nt, synthetic construct
  source 1..19: mol_type = other RNA
aggaagtggctttggaact

SEQ ID NO: 35962 - RNA, 19 nt, synthetic construct
  source 1..19: mol_type = other RNA
gtggaggaggcggtggccg

SEQ ID NO: 35963 - RNA, 19 nt, synthetic construct
  source 1..19: mol_type = other RNA
gtggaggaggcggtggccg

SEQ ID NO: 35964 - RNA, 19 nt, synthetic construct
  source 1..19: mol_type = other RNA
gggctgcacaccctgtgct

SEQ ID NO: 35965 - RNA, 19 nt, synthetic construct
  source 1..19: mol_type = other RNA
gggtggaggacggggtggc

SEQ ID NO: 35966 - RNA, 19 nt, synthetic construct
  source 1..19: mol_type = other RNA
gggtggaggacggggtggc

SEQ ID NO: 35967 - RNA, 19 nt, synthetic construct
  source 1..19: mol_type = other RNA
gggtggaggacggggtggc

SEQ ID NO: 35968 - RNA, 19 nt, synthetic construct
  source 1..19: mol_type = other RNA
gggtggaggacggggtggc

SEQ ID NO: 35969 - RNA, 19 nt, synthetic construct
  source 1..19: mol_type = other RNA
gggtggaggacggggtggc

SEQ ID NO: 35970 - RNA, 19 nt, synthetic construct
  source 1..19: mol_type = other RNA
gggtggaggacggggtggc

SEQ ID NO: 35971 - RNA, 19 nt, synthetic construct
  source 1..19: mol_type = other RNA
ccgtggcctccaccacccc

SEQ ID NO: 35972 - RNA, 19 nt, synthetic construct
  source 1..19: mol_type = other RNA
ggcccagctcctccagcgg

SEQ ID NO: 35973 - RNA, 19 nt, synthetic construct
  source 1..19: mol_type = other RNA
tggctggggtactggggca

SEQ ID NO: 35974 - RNA, 19 nt, synthetic construct
  source 1..19: mol_type = other RNA
agggtgagggctggaaagg

SEQ ID NO: 35975 - RNA, 19 nt, synthetic construct
  source 1..19: mol_type = other RNA
ttgctgggtgtggctgtgg

SEQ ID NO: 35976 - RNA, 19 nt, synthetic construct
  source 1..19: mol_type = other RNA
cttgctgggtgtggctgtg

SEQ ID NO: 35977 - RNA, 19 nt, synthetic construct
  source 1..19: mol_type = other RNA
cggctgtggtgggcatggg

SEQ ID NO: 35978 - RNA, 19 nt, synthetic construct
  source 1..19: mol_type = other RNA
tatagtgctcggctctgtg

SEQ ID NO: 35979 - RNA, 19 nt, synthetic construct
  source 1..19: mol_type = other RNA
ccgcacatgcttagtttgt

SEQ ID NO: 35980 - RNA, 19 nt, synthetic construct
  source 1..19: mol_type = other RNA
ccgtggcggtaagcactgt

SEQ ID NO: 35981 - RNA, 19 nt, synthetic construct
  source 1..19: mol_type = other RNA
ccgtggcggtaagcactgt

SEQ ID NO: 35982 - RNA, 19 nt, synthetic construct
  source 1..19: mol_type = other RNA
cgtaagcctccaggctctg

SEQ ID NO: 35983 - RNA, 19 nt, synthetic construct
  source 1..19: mol_type = other RNA
acatggtggccatgggtgt

SEQ ID NO: 35984 - RNA, 19 nt, synthetic construct
  source 1..19: mol_type = other RNA
gtagtgctcggctctgtga

SEQ ID NO: 35985 - RNA, 19 nt, synthetic construct
  source 1..19: mol_type = other RNA
gtagtgctcggctctgtga

SEQ ID NO: 35986 - RNA, 19 nt, synthetic construct
  source 1..19: mol_type = other RNA
gtagtgctcggctctgtga

SEQ ID NO: 35987 - RNA, 19 nt, synthetic construct
  source 1..19: mol_type = other RNA
atagtgctcggctctgtga

SEQ ID NO: 35988 - RNA, 19 nt, synthetic construct
  source 1..19: mol_type = other RNA
tgaggagggcgtggccgtg

SEQ ID NO: 35989 - RNA, 19 nt, synthetic construct
  source 1..19: mol_type = other RNA
cggcactcgatgtcagcca

SEQ ID NO: 35990 - RNA, 19 nt, synthetic construct
  source 1..19: mol_type = other RNA
tctccgttccacaggaatg

SEQ ID NO: 35991 - RNA, 19 nt, synthetic construct
  source 1..19: mol_type = other RNA
gtggtactggtggttgctg

SEQ ID NO: 35992 - RNA, 19 nt, synthetic construct
  source 1..19: mol_type = other RNA
cacagtggacacgctgaag

SEQ ID NO: 35993 - RNA, 19 nt, synthetic construct
  source 1..19: mol_type = other RNA
ccacatgctgcagatgcac

SEQ ID NO: 35994 - RNA, 19 nt, synthetic construct
  source 1..19: mol_type = other RNA
atgtcagccagcacagggc

SEQ ID NO: 35995 - RNA, 19 nt, synthetic construct
  source 1..19: mol_type = other RNA
cagagggggctttgggatg

SEQ ID NO: 35996 - RNA, 19 nt, synthetic construct
  source 1..19: mol_type = other RNA
cctgctcacggttcctgca

SEQ ID NO: 35997 - RNA, 19 nt, synthetic construct
  source 1..19: mol_type = other RNA
cctgctcacggttcctgca

SEQ ID NO: 35998 - RNA, 19 nt, synthetic construct
  source 1..19: mol_type = other RNA
gctgtggtctgctctgtga

SEQ ID NO: 35999 - RNA, 19 nt, synthetic construct
  source 1..19: mol_type = other RNA
ggtggccgtgctggtcagc

SEQ ID NO: 36000 - RNA, 19 nt, synthetic construct
  source 1..19: mol_type = other RNA
ggtggccgtgctggtcagc

SEQ ID NO: 36001 - RNA, 19 nt, synthetic construct
  source 1..19: mol_type = other RNA
cctgctcacggttcctgca

SEQ ID NO: 36002 - RNA, 19 nt, synthetic construct
  source 1..19: mol_type = other RNA
cctgctcacggttcctgca

SEQ ID NO: 36003 - RNA, 19 nt, synthetic construct
  source 1..19: mol_type = other RNA
ggccgtgctggtcagcact

SEQ ID NO: 36004 - RNA, 19 nt, synthetic construct
  source 1..19: mol_type = other RNA
ggtggccgtgctggtcagc

SEQ ID NO: 36005 - RNA, 19 nt, synthetic construct
  source 1..19: mol_type = other RNA
agcagccatcctttctgct

SEQ ID NO: 36006 - RNA, 19 nt, synthetic construct
  source 1..19: mol_type = other RNA
ctggccttgcctggaccag

SEQ ID NO: 36007 - RNA, 19 nt, synthetic construct
  source 1..19: mol_type = other RNA
taaagctggtagctgtgga

SEQ ID NO: 36008 - RNA, 19 nt, synthetic construct
  source 1..19: mol_type = other RNA
gtagctgtggattttgtgg

SEQ ID NO: 36009 - RNA, 19 nt, synthetic construct
  source 1..19: mol_type = other RNA
taaagctggtagctgtgga

SEQ ID NO: 36010 - RNA, 19 nt, synthetic construct
  source 1..19: mol_type = other RNA
catcctggctccaggtgga

SEQ ID NO: 36011 - RNA, 19 nt, synthetic construct
  source 1..19: mol_type = other RNA
ctgagttaccctgcagcag

SEQ ID NO: 36012 - RNA, 19 nt, synthetic construct
  source 1..19: mol_type = other RNA
gagagggatggcattgtca

SEQ ID NO: 36013 - RNA, 19 nt, synthetic construct
  source 1..19: mol_type = other RNA
gtgcccaagatgcccgagg

SEQ ID NO: 36014 - RNA, 19 nt, synthetic construct
  source 1..19: mol_type = other RNA
tgcccaaggtgcctgaggt

SEQ ID NO: 36015 - RNA, 19 nt, synthetic construct
  source 1..19: mol_type = other RNA
gtgcccaagatgcccgagg

SEQ ID NO: 36016 - RNA, 19 nt, synthetic construct
  source 1..19: mol_type = other RNA
tgcccaaggtgcctgaggt

SEQ ID NO: 36017 - RNA, 19 nt, synthetic construct
  source 1..19: mol_type = other RNA
ggccgccgtcgaccggatg

SEQ ID NO: 36018 - RNA, 19 nt, synthetic construct
  source 1..19: mol_type = other RNA
ggagggagtcactgtgctg

SEQ ID NO: 36019 - RNA, 19 nt, synthetic construct
  source 1..19: mol_type = other RNA
ggagggagtcactgtgctg

SEQ ID NO: 36020 - RNA, 19 nt, synthetic construct
  source 1..19: mol_type = other RNA
ggagggagtcactgtgctg

SEQ ID NO: 36021 - RNA, 19 nt, synthetic construct
  source 1..19: mol_type = other RNA
gatgaacacgctggtcttc

SEQ ID NO: 36022 - RNA, 19 nt, synthetic construct
  source 1..19: mol_type = other RNA
gggtgtggccgtggccgtg

SEQ ID NO: 36023 - RNA, 19 nt, synthetic construct
  source 1..19: mol_type = other RNA
gggtgtggccgtggccgtg

SEQ ID NO: 36024 - RNA, 19 nt, synthetic construct
  source 1..19: mol_type = other RNA
attgtgcgccgggttcagg

SEQ ID NO: 36025 - RNA, 19 nt, synthetic construct
  source 1..19: mol_type = other RNA
tctatgtccttaggctgct

SEQ ID NO: 36026 - RNA, 19 nt, synthetic construct
  source 1..19: mol_type = other RNA
gttgtggtagttggcactt

SEQ ID NO: 36027 - RNA, 19 nt, synthetic construct
  source 1..19: mol_type = other RNA
tgtagtgctcggctctgtg

SEQ ID NO: 36028 - RNA, 19 nt, synthetic construct
  source 1..19: mol_type = other RNA
tgtagtgctcggctctgtg

SEQ ID NO: 36029 - RNA, 19 nt, synthetic construct
  source 1..19: mol_type = other RNA
tgtagtgctcggctctgtg

SEQ ID NO: 36030 - RNA, 19 nt, synthetic construct
  source 1..19: mol_type = other RNA
ccttcgtggtcagcactgt

SEQ ID NO: 36031 - RNA, 19 nt, synthetic construct
  source 1..19: mol_type = other RNA
ccttcgtggtcagcactgt

SEQ ID NO: 36032 - RNA, 19 nt, synthetic construct
  source 1..19: mol_type = other RNA
gttgtggtcagctttgtga

SEQ ID NO: 36033 - RNA, 19 nt, synthetic construct
  source 1..19: mol_type = other RNA
cgaagccgggacggttgca

SEQ ID NO: 36034 - RNA, 19 nt, synthetic construct
  source 1..19: mol_type = other RNA
cccggggcctggtcacggt

SEQ ID NO: 36035 - RNA, 19 nt, synthetic construct
  source 1..19: mol_type = other RNA
tgccgtgagcgtagcaggg

SEQ ID NO: 36036 - RNA, 19 nt, synthetic construct
  source 1..19: mol_type = other RNA
cagcactttggtagtgtga

SEQ ID NO: 36037 - RNA, 19 nt, synthetic construct
  source 1..19: mol_type = other RNA
cactcccatccgacaccag

SEQ ID NO: 36038 - RNA, 19 nt, synthetic construct
  source 1..19: mol_type = other RNA
ggccatggtgttcggcact

SEQ ID NO: 36039 - RNA, 19 nt, synthetic construct
  source 1..19: mol_type = other RNA
gactcggtggttctgctgc

SEQ ID NO: 36040 - RNA, 19 nt, synthetic construct
  source 1..19: mol_type = other RNA
ggtggccgggctggtcagc

SEQ ID NO: 36041 - RNA, 19 nt, synthetic construct
  source 1..19: mol_type = other RNA
gtggtggtctgttctggga

SEQ ID NO: 36042 - RNA, 19 nt, synthetic construct
  source 1..19: mol_type = other RNA
gtggtggtctgttctggga

SEQ ID NO: 36043 - RNA, 19 nt, synthetic construct
  source 1..19: mol_type = other RNA
tgtcagcaccagccggatg

SEQ ID NO: 36044 - RNA, 19 nt, synthetic construct
  source 1..19: mol_type = other RNA
ggtggtcagcactttggga

SEQ ID NO: 36045 - RNA, 19 nt, synthetic construct
  source 1..19: mol_type = other RNA
ggtgtcgtggccgtggtgc

SEQ ID NO: 36046 - RNA, 19 nt, synthetic construct
  source 1..19: mol_type = other RNA
agggagtcactgtgctgct

SEQ ID NO: 36047 - RNA, 19 nt, synthetic construct
  source 1..19: mol_type = other RNA
agggagtcactgtgctgct

SEQ ID NO: 36048 - RNA, 19 nt, synthetic construct
  source 1..19: mol_type = other RNA
ggtgtcgtggccgtggtgc

SEQ ID NO: 36049 - RNA, 19 nt, synthetic construct
  source 1..19: mol_type = other RNA
agggagtcactgtgctgct

SEQ ID NO: 36050 - RNA, 19 nt, synthetic construct
  source 1..19: mol_type = other RNA
ggtgtcgtggccgtggtgc

SEQ ID NO: 36051 - RNA, 19 nt, synthetic construct
  source 1..19: mol_type = other RNA
ggctgtggtggtcagcact

SEQ ID NO: 36052 - RNA, 19 nt, synthetic construct
  source 1..19: mol_type = other RNA
caccactttgggggtgtga

SEQ ID NO: 36053 - RNA, 19 nt, synthetic construct
  source 1..19: mol_type = other RNA
gccatggtggtcaccactt

SEQ ID NO: 36054 - RNA, 19 nt, synthetic construct
  source 1..19: mol_type = other RNA
ccgtctcggggcagcaggg

SEQ ID NO: 36055 - RNA, 19 nt, synthetic construct
  source 1..19: mol_type = other RNA
tccgcagaggaggcccaag

SEQ ID NO: 36056 - RNA, 19 nt, synthetic construct
  source 1..19: mol_type = other RNA
ccccagcagggtgcggtgg

SEQ ID NO: 36057 - RNA, 19 nt, synthetic construct
  source 1..19: mol_type = other RNA
gttgtggtcggctttgtga

SEQ ID NO: 36058 - RNA, 19 nt, synthetic construct
  source 1..19: mol_type = other RNA
tcctgcagaccaggccaaa

SEQ ID NO: 36059 - RNA, 19 nt, synthetic construct
  source 1..19: mol_type = other RNA
ccacagagccggtggcccc

SEQ ID NO: 36060 - RNA, 19 nt, synthetic construct
  source 1..19: mol_type = other RNA
gcccaaggtgcctgaggtg

SEQ ID NO: 36061 - RNA, 19 nt, synthetic construct
  source 1..19: mol_type = other RNA
tcctgcagaccaggccaaa

SEQ ID NO: 36062 - RNA, 19 nt, synthetic construct
  source 1..19: mol_type = other RNA
gctgtggtcagctctgtga

SEQ ID NO: 36063 - RNA, 19 nt, synthetic construct
  source 1..19: mol_type = other RNA
tgctgtggtcagctctgtg

SEQ ID NO: 36064 - RNA, 19 nt, synthetic construct
  source 1..19: mol_type = other RNA
gtagtggctgctgtggtca

SEQ ID NO: 36065 - RNA, 19 nt, synthetic construct
  source 1..19: mol_type = other RNA
tcctgcagaccaggccaaa

SEQ ID NO: 36066 - RNA, 19 nt, synthetic construct
  source 1..19: mol_type = other RNA
gcccaaggtgcctgaggtg

SEQ ID NO: 36067 - RNA, 19 nt, synthetic construct
  source 1..19: mol_type = other RNA
tcctgcagaccaggccaaa

SEQ ID NO: 36068 - RNA, 19 nt, synthetic construct
  source 1..19: mol_type = other RNA
gctgtggtcagctctgtga

SEQ ID NO: 36069 - RNA, 19 nt, synthetic construct
  source 1..19: mol_type = other RNA
tgctgtggtcagctctgtg

SEQ ID NO: 36070 - RNA, 19 nt, synthetic construct
  source 1..19: mol_type = other RNA
gtagtggctgctgtggtca

SEQ ID NO: 36071 - RNA, 19 nt, synthetic construct
  source 1..19: mol_type = other RNA
ccacagagccggtggcccc

SEQ ID NO: 36072 - RNA, 19 nt, synthetic construct
  source 1..19: mol_type = other RNA
cgtagaaatggcagccggc

SEQ ID NO: 36073 - RNA, 19 nt, synthetic construct
  source 1..19: mol_type = other RNA
cagggcacctcaaggcggc

SEQ ID NO: 36074 - RNA, 19 nt, synthetic construct
  source 1..19: mol_type = other RNA
cgtggacccgcctctcctg

SEQ ID NO: 36075 - RNA, 19 nt, synthetic construct
  source 1..19: mol_type = other RNA
tgtctgccccagcggccgg

SEQ ID NO: 36076 - RNA, 19 nt, synthetic construct
  source 1..19: mol_type = other RNA
gtgggtgtaggtgtgcagg

SEQ ID NO: 36077 - RNA, 19 nt, synthetic construct
  source 1..19: mol_type = other RNA
gtggaggagggcgtggccg

SEQ ID NO: 36078 - RNA, 19 nt, synthetic construct
  source 1..19: mol_type = other RNA
tggtcagcactttgggagg

SEQ ID NO: 36079 - RNA, 19 nt, synthetic construct
  source 1..19: mol_type = other RNA
tggtcagcactttgggagg

SEQ ID NO: 36080 - RNA, 19 nt, synthetic construct
  source 1..19: mol_type = other RNA
tggtcagcactttgggagg

SEQ ID NO: 36081 - RNA, 19 nt, synthetic construct
  source 1..19: mol_type = other RNA
gtccctggagttgaggagg

SEQ ID NO: 36082 - RNA, 19 nt, synthetic construct
  source 1..19: mol_type = other RNA
gtccctggagttgaggagg

SEQ ID NO: 36083 - RNA, 19 nt, synthetic construct
  source 1..19: mol_type = other RNA
gtccctggagttgaggagg

SEQ ID NO: 36084 - RNA, 19 nt, synthetic construct
  source 1..19: mol_type = other RNA
gtccctggagttgaggagg

SEQ ID NO: 36085 - RNA, 19 nt, synthetic construct
  source 1..19: mol_type = other RNA
tagtggccatggtggtcac

SEQ ID NO: 36086 - RNA, 19 nt, synthetic construct
  source 1..19: mol_type = other RNA
gtggagaccgggagggccg

SEQ ID NO: 36087 - RNA, 19 nt, synthetic construct
  source 1..19: mol_type = other RNA
caaagtccaggctgcattc

SEQ ID NO: 36088 - RNA, 19 nt, synthetic construct
  source 1..19: mol_type = other RNA
caaagtccaggctgcattc

SEQ ID NO: 36089 - RNA, 19 nt, synthetic construct
  source 1..19: mol_type = other RNA
caaagtccaggctgcattc

SEQ ID NO: 36090 - RNA, 19 nt, synthetic construct
  source 1..19: mol_type = other RNA
caaagtccaggctgcattc

SEQ ID NO: 36091 - RNA, 19 nt, synthetic construct
  source 1..19: mol_type = other RNA
cccacagtagtcctgggcc

SEQ ID NO: 36092 - RNA, 19 nt, synthetic construct
  source 1..19: mol_type = other RNA
ctcctggtgctgcatgttg

SEQ ID NO: 36093 - RNA, 19 nt, synthetic construct
  source 1..19: mol_type = other RNA
ggagctgcaggtggtgttg

SEQ ID NO: 36094 - RNA, 19 nt, synthetic construct
  source 1..19: mol_type = other RNA
gccagcgtgggtggctgtg

SEQ ID NO: 36095 - RNA, 19 nt, synthetic construct
  source 1..19: mol_type = other RNA
cgctgtggggacccttgca

SEQ ID NO: 36096 - RNA, 19 nt, synthetic construct
  source 1..19: mol_type = other RNA
gttgtggtcagctctgtga

SEQ ID NO: 36097 - RNA, 19 nt, synthetic construct
  source 1..19: mol_type = other RNA
gttgtggtcagctctgtga

SEQ ID NO: 36098 - RNA, 19 nt, synthetic construct
  source 1..19: mol_type = other RNA
gttgtggtcagctctgtga

SEQ ID NO: 36099 - RNA, 19 nt, synthetic construct
  source 1..19: mol_type = other RNA
acaggaatgtcagcaccag

SEQ ID NO: 36100 - RNA, 19 nt, synthetic construct
  source 1..19: mol_type = other RNA
gcaagtgggctggcaggca

SEQ ID NO: 36101 - RNA, 19 nt, synthetic construct
  source 1..19: mol_type = other RNA
gtagtgctgggctctgtga

SEQ ID NO: 36102 - RNA, 19 nt, synthetic construct
  source 1..19: mol_type = other RNA
tgtagtgctgggctctgtg

SEQ ID NO: 36103 - RNA, 19 nt, synthetic construct
  source 1..19: mol_type = other RNA
cgtggatccagtggctgca

SEQ ID NO: 36104 - RNA, 19 nt, synthetic construct
  source 1..19: mol_type = other RNA
catggcctgggcctctgct

SEQ ID NO: 36105 - RNA, 19 nt, synthetic construct
  source 1..19: mol_type = other RNA
cattgtaccagctggacca

SEQ ID NO: 36106 - RNA, 19 nt, synthetic construct
  source 1..19: mol_type = other RNA
tagtccagccactctgacc

SEQ ID NO: 36107 - RNA, 19 nt, synthetic construct
  source 1..19: mol_type = other RNA
tagtccagccactctgacc

SEQ ID NO: 36108 - RNA, 19 nt, synthetic construct
  source 1..19: mol_type = other RNA
tagtccagccactctgacc

SEQ ID NO: 36109 - RNA, 19 nt, synthetic construct
  source 1..19: mol_type = other RNA
tagtccagccactctgacc

SEQ ID NO: 36110 - RNA, 19 nt, synthetic construct
  source 1..19: mol_type = other RNA
gtcctcagggcagaagcag

SEQ ID NO: 36111 - RNA, 19 nt, synthetic construct
  source 1..19: mol_type = other RNA
cagcgggcggcagcggcag

SEQ ID NO: 36112 - RNA, 19 nt, synthetic construct
  source 1..19: mol_type = other RNA
gtcgtggcaggcctgggcg

SEQ ID NO: 36113 - RNA, 19 nt, synthetic construct
  source 1..19: mol_type = other RNA
gtgcccagggaggaggagg

SEQ ID NO: 36114 - RNA, 19 nt, synthetic construct
  source 1..19: mol_type = other RNA
gtgcccagggaggaggagg

SEQ ID NO: 36115 - RNA, 19 nt, synthetic construct
  source 1..19: mol_type = other RNA
gtgcccagggaggaggagg

SEQ ID NO: 36116 - RNA, 19 nt, synthetic construct
  source 1..19: mol_type = other RNA
agcgggcggcagcggcagt

SEQ ID NO: 36117 - RNA, 19 nt, synthetic construct
  source 1..19: mol_type = other RNA
caccggggctgcggggctg

SEQ ID NO: 36118 - RNA, 19 nt, synthetic construct
  source 1..19: mol_type = other RNA
gcttagtttgttccagggc

SEQ ID NO: 36119 - RNA, 19 nt, synthetic construct
  source 1..19: mol_type = other RNA
tgtgggtggtccctagggc

SEQ ID NO: 36120 - RNA, 19 nt, synthetic construct
  source 1..19: mol_type = other RNA
tgtgggtggtccctagggc

SEQ ID NO: 36121 - RNA, 19 nt, synthetic construct
  source 1..19: mol_type = other RNA
tgtgggtggtccctagggc

SEQ ID NO: 36122 - RNA, 19 nt, synthetic construct
  source 1..19: mol_type = other RNA
tgtgggtggtccctagggc

SEQ ID NO: 36123 - RNA, 19 nt, synthetic construct
  source 1..19: mol_type = other RNA
gcatcctcctgacattgca

SEQ ID NO: 36124 - RNA, 19 nt, synthetic construct
  source 1..19: mol_type = other RNA
gccgcacttccgcagctca

SEQ ID NO: 36125 - RNA, 19 nt, synthetic construct
  source 1..19: mol_type = other RNA
agcaaagacctggctcagc

SEQ ID NO: 36126 - RNA, 19 nt, synthetic construct
  source 1..19: mol_type = other RNA
ctgctcacagactgcccct

SEQ ID NO: 36127 - RNA, 19 nt, synthetic construct
  source 1..19: mol_type = other RNA
gccgggctggtcagcactt

SEQ ID NO: 36128 - RNA, 19 nt, synthetic construct
  source 1..19: mol_type = other RNA
ctgtggtggtcagcactgt

SEQ ID NO: 36129 - RNA, 19 nt, synthetic construct
  source 1..19: mol_type = other RNA
cgggtgtgtgggggagcca

SEQ ID NO: 36130 - RNA, 19 nt, synthetic construct
  source 1..19: mol_type = other RNA
ccacacacaggccgggggg

SEQ ID NO: 36131 - RNA, 19 nt, synthetic construct
  source 1..19: mol_type = other RNA
gccacacacaggccggggg

SEQ ID NO: 36132 - RNA, 19 nt, synthetic construct
  source 1..19: mol_type = other RNA
cgtcatagtagtttccgtc

SEQ ID NO: 36133 - RNA, 19 nt, synthetic construct
  source 1..19: mol_type = other RNA
gccaagatgtactcgcagc

SEQ ID NO: 36134 - RNA, 19 nt, synthetic construct
  source 1..19: mol_type = other RNA
ggcggtggtggtcagcact

SEQ ID NO: 36135 - RNA, 19 nt, synthetic construct
  source 1..19: mol_type = other RNA
ggtggcggtggtggtcagc

SEQ ID NO: 36136 - RNA, 19 nt, synthetic construct
  source 1..19: mol_type = other RNA
tggtaccggtggttgctgc

SEQ ID NO: 36137 - RNA, 19 nt, synthetic construct
  source 1..19: mol_type = other RNA
gtggtaccggtggttgctg

SEQ ID NO: 36138 - RNA, 19 nt, synthetic construct
  source 1..19: mol_type = other RNA
ggcggtggtggtcagcact

SEQ ID NO: 36139 - RNA, 19 nt, synthetic construct
  source 1..19: mol_type = other RNA
ggtggcggtggtggtcagc

SEQ ID NO: 36140 - RNA, 19 nt, synthetic construct
  source 1..19: mol_type = other RNA
tggtaccggtggttgctgc

SEQ ID NO: 36141 - RNA, 19 nt, synthetic construct
  source 1..19: mol_type = other RNA
gtggtaccggtggttgctg

SEQ ID NO: 36142 - RNA, 19 nt, synthetic construct
  source 1..19: mol_type = other RNA
ggcggtggtggtcagcact

SEQ ID NO: 36143 - RNA, 19 nt, synthetic construct
  source 1..19: mol_type = other RNA
ggtggcggtggtggtcagc

SEQ ID NO: 36144 - RNA, 19 nt, synthetic construct
  source 1..19: mol_type = other RNA
tggtactggtggttgctgc

SEQ ID NO: 36145 - RNA, 19 nt, synthetic construct
  source 1..19: mol_type = other RNA
ggcggtggtggtcagcact

SEQ ID NO: 36146 - RNA, 19 nt, synthetic construct
  source 1..19: mol_type = other RNA
ggtggcggtggtggtcagc

SEQ ID NO: 36147 - RNA, 19 nt, synthetic construct
  source 1..19: mol_type = other RNA
tggtaccggtggttgctgc

SEQ ID NO: 36148 - RNA, 19 nt, synthetic construct
  source 1..19: mol_type = other RNA
gtggtaccggtggttgctg

SEQ ID NO: 36149 - RNA, 19 nt, synthetic construct
  source 1..19: mol_type = other RNA
tggcccaactcccccaggg

SEQ ID NO: 36150 - RNA, 19 nt, synthetic construct
  source 1..19: mol_type = other RNA
ggttgtgttgcacacgcac

SEQ ID NO: 36151 - RNA, 19 nt, synthetic construct
  source 1..19: mol_type = other RNA
ccctggggacaggtagtat

SEQ ID NO: 36152 - RNA, 19 nt, synthetic construct
  source 1..19: mol_type = other RNA
cgtccacacagtggtcctc

SEQ ID NO: 36153 - RNA, 19 nt, synthetic construct
  source 1..19: mol_type = other RNA
gagggagtcactgtgctgc

SEQ ID NO: 36154 - RNA, 19 nt, synthetic construct
  source 1..19: mol_type = other RNA
ctgaggtggccgaagtcca

SEQ ID NO: 36155 - RNA, 19 nt, synthetic construct
  source 1..19: mol_type = other RNA
gagggagtcactgtgctgc

SEQ ID NO: 36156 - RNA, 19 nt, synthetic construct
  source 1..19: mol_type = other RNA
gagggagtcactgtgctgc

SEQ ID NO: 36157 - RNA, 19 nt, synthetic construct
  source 1..19: mol_type = other RNA
ctgaggtggccgaagtcca

SEQ ID NO: 36158 - RNA, 19 nt, synthetic construct
  source 1..19: mol_type = other RNA
agtcggggcccagcagcca

SEQ ID NO: 36159 - RNA, 19 nt, synthetic construct
  source 1..19: mol_type = other RNA
gtgtgcaggatggctgagc

SEQ ID NO: 36160 - RNA, 19 nt, synthetic construct
  source 1..19: mol_type = other RNA
gggacacataggcccgcac

SEQ ID NO: 36161 - RNA, 19 nt, synthetic construct
  source 1..19: mol_type = other RNA
cctcgttgtgcacacaggg

SEQ ID NO: 36162 - RNA, 19 nt, synthetic construct
  source 1..19: mol_type = other RNA
cgagctctggaggttgcca

SEQ ID NO: 36163 - RNA, 19 nt, synthetic construct
  source 1..19: mol_type = other RNA
ctcgcagaaggtgatgttg

SEQ ID NO: 36164 - RNA, 19 nt, synthetic construct
  source 1..19: mol_type = other RNA
agccctgagttaccctgca

SEQ ID NO: 36165 - RNA, 19 nt, synthetic construct
  source 1..19: mol_type = other RNA
tggaagtcaccccaggtgc

SEQ ID NO: 36166 - RNA, 19 nt, synthetic construct
  source 1..19: mol_type = other RNA
ggtactggtggttgctgct

SEQ ID NO: 36167 - RNA, 19 nt, synthetic construct
  source 1..19: mol_type = other RNA
cacttccgcagctcagcca

SEQ ID NO: 36168 - RNA, 19 nt, synthetic construct
  source 1..19: mol_type = other RNA
tcaaacgtctcaaagtctc

SEQ ID NO: 36169 - RNA, 19 nt, synthetic construct
  source 1..19: mol_type = other RNA
agggggagctgttctcagg

SEQ ID NO: 36170 - RNA, 19 nt, synthetic construct
  source 1..19: mol_type = other RNA
ctgcagttgtagtggctgc

SEQ ID NO: 36171 - RNA, 19 nt, synthetic construct
  source 1..19: mol_type = other RNA
ctgcagttgtagtggctgc

SEQ ID NO: 36172 - RNA, 19 nt, synthetic construct
  source 1..19: mol_type = other RNA
tccaggtagaggctgagat

SEQ ID NO: 36173 - RNA, 19 nt, synthetic construct
  source 1..19: mol_type = other RNA
gtgcagtagtggttgtcca

SEQ ID NO: 36174 - RNA, 19 nt, synthetic construct
  source 1..19: mol_type = other RNA
cccacggggtgggcagcag

SEQ ID NO: 36175 - RNA, 19 nt, synthetic construct
  source 1..19: mol_type = other RNA
ccagctggaatccgtgctg

SEQ ID NO: 36176 - RNA, 19 nt, synthetic construct
  source 1..19: mol_type = other RNA
acggtgaagctgctgtcgg

SEQ ID NO: 36177 - RNA, 19 nt, synthetic construct
  source 1..19: mol_type = other RNA
ggggactctgttggctgtt

SEQ ID NO: 36178 - RNA, 19 nt, synthetic construct
  source 1..19: mol_type = other RNA
gtggtcagcactttgggag

SEQ ID NO: 36179 - RNA, 19 nt, synthetic construct
  source 1..19: mol_type = other RNA
ctagggtgagggctggaca

SEQ ID NO: 36180 - RNA, 19 nt, synthetic construct
  source 1..19: mol_type = other RNA
ctggtcagcactttgggag

SEQ ID NO: 36181 - RNA, 19 nt, synthetic construct
  source 1..19: mol_type = other RNA
ctagggtgagggctggaca

SEQ ID NO: 36182 - RNA, 19 nt, synthetic construct
  source 1..19: mol_type = other RNA
ctagggtgagggctggaca

SEQ ID NO: 36183 - RNA, 19 nt, synthetic construct
  source 1..19: mol_type = other RNA
ctggtcagcactttgggag

SEQ ID NO: 36184 - RNA, 19 nt, synthetic construct
  source 1..19: mol_type = other RNA
tagctgtggattttgtggc

SEQ ID NO: 36185 - RNA, 19 nt, synthetic construct
  source 1..19: mol_type = other RNA
cacgtgggtgtaggtgtgc

SEQ ID NO: 36186 - RNA, 19 nt, synthetic construct
  source 1..19: mol_type = other RNA
gtggctgtaccaagggtgc

SEQ ID NO: 36187 - RNA, 19 nt, synthetic construct
  source 1..19: mol_type = other RNA
gttaggacagtgcaagggc

SEQ ID NO: 36188 - RNA, 19 nt, synthetic construct
  source 1..19: mol_type = other RNA
gcaaagtcattgatggcat

SEQ ID NO: 36189 - RNA, 19 nt, synthetic construct
  source 1..19: mol_type = other RNA
tgtggctgtgcttgtcagc

SEQ ID NO: 36190 - RNA, 19 nt, synthetic construct
  source 1..19: mol_type = other RNA
agtggcaccagctgcacca

SEQ ID NO: 36191 - RNA, 19 nt, synthetic construct
  source 1..19: mol_type = other RNA
gccagcacggtgaagctgc

SEQ ID NO: 36192 - RNA, 19 nt, synthetic construct
  source 1..19: mol_type = other RNA
aggcggtggccgtggatcc

SEQ ID NO: 36193 - RNA, 19 nt, synthetic construct
  source 1..19: mol_type = other RNA
aggcggtggccgtggatcc

SEQ ID NO: 36194 - RNA, 19 nt, synthetic construct
  source 1..19: mol_type = other RNA
aggcggtggccgtggatcc

SEQ ID NO: 36195 - RNA, 19 nt, synthetic construct
  source 1..19: mol_type = other RNA
aggcggtggccgtggatcc

SEQ ID NO: 36196 - RNA, 19 nt, synthetic construct
  source 1..19: mol_type = other RNA
caaaggtggaatagtggga

SEQ ID NO: 36197 - RNA, 19 nt, synthetic construct
  source 1..19: mol_type = other RNA
tttcatgatcagacaatgc

SEQ ID NO: 36198 - RNA, 19 nt, synthetic construct
  source 1..19: mol_type = other RNA
tgcagggtgagccacactc

SEQ ID NO: 36199 - RNA, 19 nt, synthetic construct
  source 1..19: mol_type = other RNA
tggaggtgtgggtggtctc

SEQ ID NO: 36200 - RNA, 19 nt, synthetic construct
  source 1..19: mol_type = other RNA
ctctggagctgatgactgt

SEQ ID NO: 36201 - RNA, 19 nt, synthetic construct
  source 1..19: mol_type = other RNA
tggaggtgtgggtggtctc

SEQ ID NO: 36202 - RNA, 19 nt, synthetic construct
  source 1..19: mol_type = other RNA
ctgaaggttggcaggctgc

SEQ ID NO: 36203 - RNA, 19 nt, synthetic construct
  source 1..19: mol_type = other RNA
ccgagctgttgctgcagtc

SEQ ID NO: 36204 - RNA, 19 nt, synthetic construct
  source 1..19: mol_type = other RNA
ccccacccggccctctcgc

SEQ ID NO: 36205 - RNA, 19 nt, synthetic construct
  source 1..19: mol_type = other RNA
ggtgacgctcacgcccagg

SEQ ID NO: 36206 - RNA, 19 nt, synthetic construct
  source 1..19: mol_type = other RNA
taagcctccaggctctggc

SEQ ID NO: 36207 - RNA, 19 nt, synthetic construct
  source 1..19: mol_type = other RNA
tccagcaggacgacacggt

SEQ ID NO: 36208 - RNA, 19 nt, synthetic construct
  source 1..19: mol_type = other RNA
ccagcgtgggtggctgtga

SEQ ID NO: 36209 - RNA, 19 nt, synthetic construct
  source 1..19: mol_type = other RNA
ggtgtgagctgttcccaga

SEQ ID NO: 36210 - RNA, 19 nt, synthetic construct
  source 1..19: mol_type = other RNA
tgtcacagtgctgattgca

SEQ ID NO: 36211 - RNA, 19 nt, synthetic construct
  source 1..19: mol_type = other RNA
ggcaggtggttgtgttgca

SEQ ID NO: 36212 - RNA, 19 nt, synthetic construct
  source 1..19: mol_type = other RNA
actgcccggccactctctt

SEQ ID NO: 36213 - RNA, 19 nt, synthetic construct
  source 1..19: mol_type = other RNA
ggtggagccggtggctgtg

SEQ ID NO: 36214 - RNA, 19 nt, synthetic construct
  source 1..19: mol_type = other RNA
cccacctccggttcctgca

SEQ ID NO: 36215 - RNA, 19 nt, synthetic construct
  source 1..19: mol_type = other RNA
gctgccttcaaagctgtag

SEQ ID NO: 36216 - RNA, 19 nt, synthetic construct
  source 1..19: mol_type = other RNA
actcgatgtcagccagcac

SEQ ID NO: 36217 - RNA, 19 nt, synthetic construct
  source 1..19: mol_type = other RNA
cacctgctggcccagctcc

SEQ ID NO: 36218 - RNA, 19 nt, synthetic construct
  source 1..19: mol_type = other RNA
ggtggtcccaagggtgaag

SEQ ID NO: 36219 - RNA, 19 nt, synthetic construct
  source 1..19: mol_type = other RNA
tggtggtggtccccagcac

SEQ ID NO: 36220 - RNA, 19 nt, synthetic construct
  source 1..19: mol_type = other RNA
cacgcccagggcaggaatg

SEQ ID NO: 36221 - RNA, 19 nt, synthetic construct
  source 1..19: mol_type = other RNA
gtgtggtggccgtgctggt

SEQ ID NO: 36222 - RNA, 19 nt, synthetic construct
  source 1..19: mol_type = other RNA
gtgtggtggccgtgctggt

SEQ ID NO: 36223 - RNA, 19 nt, synthetic construct
  source 1..19: mol_type = other RNA
gtgtggtggccgtgctggt

SEQ ID NO: 36224 - RNA, 19 nt, synthetic construct
  source 1..19: mol_type = other RNA
gtcagctcagtgaggatcc

SEQ ID NO: 36225 - RNA, 19 nt, synthetic construct
  source 1..19: mol_type = other RNA
ctggaagcggtcaatgtca

SEQ ID NO: 36226 - RNA, 19 nt, synthetic construct
  source 1..19: mol_type = other RNA
agcaggtgtccgtgcaggg

SEQ ID NO: 36227 - RNA, 19 nt, synthetic construct
  source 1..19: mol_type = other RNA
tgggcaggtgaggtcgcac

SEQ ID NO: 36228 - RNA, 19 nt, synthetic construct
  source 1..19: mol_type = other RNA
ggacacataggcccgcaca

SEQ ID NO: 36229 - RNA, 19 nt, synthetic construct
  source 1..19: mol_type = other RNA
gttccacaggaatgtcagc

SEQ ID NO: 36230 - RNA, 19 nt, synthetic construct
  source 1..19: mol_type = other RNA
tgaagctgctgtcggcaca

SEQ ID NO: 36231 - RNA, 19 nt, synthetic construct
  source 1..19: mol_type = other RNA
gccttaaaggtcccctctt

SEQ ID NO: 36232 - RNA, 19 nt, synthetic construct
  source 1..19: mol_type = other RNA
ggtccttgggtgccagggc

SEQ ID NO: 36233 - RNA, 19 nt, synthetic construct
  source 1..19: mol_type = other RNA
gcagatggcgatcaagcag

SEQ ID NO: 36234 - RNA, 19 nt, synthetic construct
  source 1..19: mol_type = other RNA
ccacctgtgccagggtcca

SEQ ID NO: 36235 - RNA, 19 nt, synthetic construct
  source 1..19: mol_type = other RNA
ttctcagtgctggaagggc

SEQ ID NO: 36236 - RNA, 19 nt, synthetic construct
  source 1..19: mol_type = other RNA
ttccccacctgctcacggt

SEQ ID NO: 36237 - RNA, 19 nt, synthetic construct
  source 1..19: mol_type = other RNA
ttctcagtgctggaagggc

SEQ ID NO: 36238 - RNA, 19 nt, synthetic construct
  source 1..19: mol_type = other RNA
ttccccacctgctcacggt

SEQ ID NO: 36239 - RNA, 19 nt, synthetic construct
  source 1..19: mol_type = other RNA
ttctcagtgctggaagggc

SEQ ID NO: 36240 - RNA, 19 nt, synthetic construct
  source 1..19: mol_type = other RNA
ttccccacctgctcacggt

SEQ ID NO: 36241 - RNA, 19 nt, synthetic construct
  source 1..19: mol_type = other RNA
ttctcagtgctggaagggc

SEQ ID NO: 36242 - RNA, 19 nt, synthetic construct
  source 1..19: mol_type = other RNA
ttccccacctgctcacggt

SEQ ID NO: 36243 - RNA, 19 nt, synthetic construct
  source 1..19: mol_type = other RNA
ttctcagtgctggaagggc

SEQ ID NO: 36244 - RNA, 19 nt, synthetic construct
  source 1..19: mol_type = other RNA
gtccacgtggtccacaggg

SEQ ID NO: 36245 - RNA, 19 nt, synthetic construct
  source 1..19: mol_type = other RNA
agccgccccacatgctgca

SEQ ID NO: 36246 - RNA, 19 nt, synthetic construct
  source 1..19: mol_type = other RNA
tcggggcagcaggggttct

SEQ ID NO: 36247 - RNA, 19 nt, synthetic construct
  source 1..19: mol_type = other RNA
acatgtggcagggaagggc

SEQ ID NO: 36248 - RNA, 19 nt, synthetic construct
  source 1..19: mol_type = other RNA
gttgtccacatggctgttg

SEQ ID NO: 36249 - RNA, 19 nt, synthetic construct
  source 1..19: mol_type = other RNA
agccacactcctggtgctg

SEQ ID NO: 36250 - RNA, 19 nt, synthetic construct
  source 1..19: mol_type = other RNA
tgagccacactcctggtgc

SEQ ID NO: 36251 - RNA, 19 nt, synthetic construct
  source 1..19: mol_type = other RNA
gccccacctgtgccagggt

SEQ ID NO: 36252 - RNA, 19 nt, synthetic construct
  source 1..19: mol_type = other RNA
tgggagggggagctgttct

SEQ ID NO: 36253 - RNA, 19 nt, synthetic construct
  source 1..19: mol_type = other RNA
ggctgtgcttgtcagcact

SEQ ID NO: 36254 - RNA, 19 nt, synthetic construct
  source 1..19: mol_type = other RNA
ggctgtgcttgtcagcact

SEQ ID NO: 36255 - RNA, 19 nt, synthetic construct
  source 1..19: mol_type = other RNA
ggctgtgcttgtcagcact

SEQ ID NO: 36256 - RNA, 19 nt, synthetic construct
  source 1..19: mol_type = other RNA
aagccagtgggtctcaggg

SEQ ID NO: 36257 - RNA, 19 nt, synthetic construct
  source 1..19: mol_type = other RNA
gccacaggctctcccaggg

SEQ ID NO: 36258 - RNA, 19 nt, synthetic construct
  source 1..19: mol_type = other RNA
gtgggtgtggtggtctgtg

SEQ ID NO: 36259 - RNA, 19 nt, synthetic construct
  source 1..19: mol_type = other RNA
cagcactggggggatggga

SEQ ID NO: 36260 - RNA, 19 nt, synthetic construct
  source 1..19: mol_type = other RNA
gtgggtgtggtggtctgtg

SEQ ID NO: 36261 - RNA, 19 nt, synthetic construct
  source 1..19: mol_type = other RNA
gatgtgggtggtgcccaag

SEQ ID NO: 36262 - RNA, 19 nt, synthetic construct
  source 1..19: mol_type = other RNA
gtgggtgtggtggtctgtg

SEQ ID NO: 36263 - RNA, 19 nt, synthetic construct
  source 1..19: mol_type = other RNA
cagcactggggggatggga

SEQ ID NO: 36264 - RNA, 19 nt, synthetic construct
  source 1..19: mol_type = other RNA
gtgggtgtggtggtctgtg

SEQ ID NO: 36265 - RNA, 19 nt, synthetic construct
  source 1..19: mol_type = other RNA
ggaggagggggtgactgtg

SEQ ID NO: 36266 - RNA, 19 nt, synthetic construct
  source 1..19: mol_type = other RNA
gatgtgggtggtgcccaag

SEQ ID NO: 36267 - RNA, 19 nt, synthetic construct
  source 1..19: mol_type = other RNA
gtgggtgtggtggtctgtg

SEQ ID NO: 36268 - RNA, 19 nt, synthetic construct
  source 1..19: mol_type = other RNA
gttgcagtccttggactgg

SEQ ID NO: 36269 - RNA, 19 nt, synthetic construct
  source 1..19: mol_type = other RNA
gttgcagtccttggactgg

SEQ ID NO: 36270 - RNA, 19 nt, synthetic construct
  source 1..19: mol_type = other RNA
gttgcagtccttggactgg

SEQ ID NO: 36271 - RNA, 19 nt, synthetic construct
  source 1..19: mol_type = other RNA
tgggccgggaagccacggg

SEQ ID NO: 36272 - RNA, 19 nt, synthetic construct
  source 1..19: mol_type = other RNA
tcctgggggctggcacggg

SEQ ID NO: 36273 - RNA, 19 nt, synthetic construct
  source 1..19: mol_type = other RNA
tggacgcctccagcaccag

SEQ ID NO: 36274 - RNA, 19 nt, synthetic construct
  source 1..19: mol_type = other RNA
tgggatccagctccagcag

SEQ ID NO: 36275 - RNA, 19 nt, synthetic construct
  source 1..19: mol_type = other RNA
cgggggcagagctcagggc

SEQ ID NO: 36276 - RNA, 19 nt, synthetic construct
  source 1..19: mol_type = other RNA
acagagcaggtgccagggc

SEQ ID NO: 36277 - RNA, 19 nt, synthetic construct
  source 1..19: mol_type = other RNA
ccagcacggtgaagctgct

SEQ ID NO: 36278 - RNA, 19 nt, synthetic construct
  source 1..19: mol_type = other RNA
ggcagcgcgagaaggcact

SEQ ID NO: 36279 - RNA, 19 nt, synthetic construct
  source 1..19: mol_type = other RNA
gcttggggttgatgatgga

SEQ ID NO: 36280 - RNA, 19 nt, synthetic construct
  source 1..19: mol_type = other RNA
cggggcaggtgcagccgtc

SEQ ID NO: 36281 - RNA, 19 nt, synthetic construct
  source 1..19: mol_type = other RNA
accacctctccaggagcca

SEQ ID NO: 36282 - RNA, 19 nt, synthetic construct
  source 1..19: mol_type = other RNA
gagctgttgctgcagtcca

SEQ ID NO: 36283 - RNA, 19 nt, synthetic construct
  source 1..19: mol_type = other RNA
ccgccgagctgttgctgca

SEQ ID NO: 36284 - RNA, 19 nt, synthetic construct
  source 1..19: mol_type = other RNA
cacaggggcagtcctcctc

SEQ ID NO: 36285 - RNA, 19 nt, synthetic construct
  source 1..19: mol_type = other RNA
ttgtagaagtcacagaaca

SEQ ID NO: 36286 - RNA, 19 nt, synthetic construct
  source 1..19: mol_type = other RNA
cggggaggggccacagggc

SEQ ID NO: 36287 - RNA, 19 nt, synthetic construct
  source 1..19: mol_type = other RNA
tgccattgttgttggggcc

SEQ ID NO: 36288 - RNA, 19 nt, synthetic construct
  source 1..19: mol_type = other RNA
gggggagctgttctcaggg

SEQ ID NO: 36289 - RNA, 19 nt, synthetic construct
  source 1..19: mol_type = other RNA
gttgcagtccctggactgg

SEQ ID NO: 36290 - RNA, 19 nt, synthetic construct
  source 1..19: mol_type = other RNA
ggaggagggggtggctgtg

SEQ ID NO: 36291 - RNA, 19 nt, synthetic construct
  source 1..19: mol_type = other RNA
gggtggtccccgggatgga

SEQ ID NO: 36292 - RNA, 19 nt, synthetic construct
  source 1..19: mol_type = other RNA
tggtggtggtcagcactgt

SEQ ID NO: 36293 - RNA, 19 nt, synthetic construct
  source 1..19: mol_type = other RNA
tgtgttgctggtggctgca

SEQ ID NO: 36294 - RNA, 19 nt, synthetic construct
  source 1..19: mol_type = other RNA
cagaggagggagtcactgt

SEQ ID NO: 36295 - RNA, 19 nt, synthetic construct
  source 1..19: mol_type = other RNA
gcaccgtgtggggactgct

SEQ ID NO: 36296 - RNA, 19 nt, synthetic construct
  source 1..19: mol_type = other RNA
gttgcagtccctggactgg

SEQ ID NO: 36297 - RNA, 19 nt, synthetic construct
  source 1..19: mol_type = other RNA
ggaggagggggtggctgtg

SEQ ID NO: 36298 - RNA, 19 nt, synthetic construct
  source 1..19: mol_type = other RNA
gggtggtccccgggatgga

SEQ ID NO: 36299 - RNA, 19 nt, synthetic construct
  source 1..19: mol_type = other RNA
tggtggtggtcagcactgt

SEQ ID NO: 36300 - RNA, 19 nt, synthetic construct
  source 1..19: mol_type = other RNA
cagaggagggagtcactgt

SEQ ID NO: 36301 - RNA, 19 nt, synthetic construct
  source 1..19: mol_type = other RNA
gcaccgtgtggggactgct

SEQ ID NO: 36302 - RNA, 19 nt, synthetic construct
  source 1..19: mol_type = other RNA
tgcggtcgtagtggctgct

SEQ ID NO: 36303 - RNA, 19 nt, synthetic construct
  source 1..19: mol_type = other RNA
cgtggggccagtggctgca

SEQ ID NO: 36304 - RNA, 19 nt, synthetic construct
  source 1..19: mol_type = other RNA
gttgcagtccctggactgg

SEQ ID NO: 36305 - RNA, 19 nt, synthetic construct
  source 1..19: mol_type = other RNA
ggaggagggggtggctgtg

SEQ ID NO: 36306 - RNA, 19 nt, synthetic construct
  source 1..19: mol_type = other RNA
gggtggtccccgggatgga

SEQ ID NO: 36307 - RNA, 19 nt, synthetic construct
  source 1..19: mol_type = other RNA
tggtggtggtcagcactgt

SEQ ID NO: 36308 - RNA, 19 nt, synthetic construct
  source 1..19: mol_type = other RNA
cagaggagggagtcactgt

SEQ ID NO: 36309 - RNA, 19 nt, synthetic construct
  source 1..19: mol_type = other RNA
gcaccgtgtggggactgct

SEQ ID NO: 36310 - RNA, 19 nt, synthetic construct
  source 1..19: mol_type = other RNA
ggggctgctcacagactgc

SEQ ID NO: 36311 - RNA, 19 nt, synthetic construct
  source 1..19: mol_type = other RNA
gttgcagtccctggactgg

SEQ ID NO: 36312 - RNA, 19 nt, synthetic construct
  source 1..19: mol_type = other RNA
tggaggagggggtgactgt

SEQ ID NO: 36313 - RNA, 19 nt, synthetic construct
  source 1..19: mol_type = other RNA
tggtggtggtcagcactgt

SEQ ID NO: 36314 - RNA, 19 nt, synthetic construct
  source 1..19: mol_type = other RNA
cagaggagggagtcactgt

SEQ ID NO: 36315 - RNA, 19 nt, synthetic construct
  source 1..19: mol_type = other RNA
gcaccgtgtggggactgct

SEQ ID NO: 36316 - RNA, 19 nt, synthetic construct
  source 1..19: mol_type = other RNA
gccgtggatccagtggatg

SEQ ID NO: 36317 - RNA, 19 nt, synthetic construct
  source 1..19: mol_type = other RNA
cgtggggccagtggctgca

SEQ ID NO: 36318 - RNA, 19 nt, synthetic construct
  source 1..19: mol_type = other RNA
gttgcagtccctggactgg

SEQ ID NO: 36319 - RNA, 19 nt, synthetic construct
  source 1..19: mol_type = other RNA
ggaggagggggtggctgtg

SEQ ID NO: 36320 - RNA, 19 nt, synthetic construct
  source 1..19: mol_type = other RNA
gggtggtccccgggatgga

SEQ ID NO: 36321 - RNA, 19 nt, synthetic construct
  source 1..19: mol_type = other RNA
ggtggctgtggtggtcagc

SEQ ID NO: 36322 - RNA, 19 nt, synthetic construct
  source 1..19: mol_type = other RNA
gaagccagtgggtctcagg

SEQ ID NO: 36323 - RNA, 19 nt, synthetic construct
  source 1..19: mol_type = other RNA
gtgggagctggggaagcca

SEQ ID NO: 36324 - RNA, 19 nt, synthetic construct
  source 1..19: mol_type = other RNA
tgccggagagggatggcat

SEQ ID NO: 36325 - RNA, 19 nt, synthetic construct
  source 1..19: mol_type = other RNA
caggctttgggtccagcag

SEQ ID NO: 36326 - RNA, 19 nt, synthetic construct
  source 1..19: mol_type = other RNA
agaggatctggtcctcagg

SEQ ID NO: 36327 - RNA, 19 nt, synthetic construct
  source 1..19: mol_type = other RNA
aacacagctgaggtctgca

SEQ ID NO: 36328 - RNA, 19 nt, synthetic construct
  source 1..19: mol_type = other RNA
agggaggggcaaggccaag

SEQ ID NO: 36329 - RNA, 19 nt, synthetic construct
  source 1..19: mol_type = other RNA
gcagcttcctggcagcagc

SEQ ID NO: 36330 - RNA, 19 nt, synthetic construct
  source 1..19: mol_type = other RNA
ctccagcaccagcccctgg

SEQ ID NO: 36331 - RNA, 19 nt, synthetic construct
  source 1..19: mol_type = other RNA
cctccagcaccagcccctg

SEQ ID NO: 36332 - RNA, 19 nt, synthetic construct
  source 1..19: mol_type = other RNA
gcctccagcaccagcccct

SEQ ID NO: 36333 - RNA, 19 nt, synthetic construct
  source 1..19: mol_type = other RNA
cgcctccagcaccagcccc

SEQ ID NO: 36334 - RNA, 19 nt, synthetic construct
  source 1..19: mol_type = other RNA
gatccagctccagcagggc

SEQ ID NO: 36335 - RNA, 19 nt, synthetic construct
  source 1..19: mol_type = other RNA
agccccccggagcaggtgc

SEQ ID NO: 36336 - RNA, 19 nt, synthetic construct
  source 1..19: mol_type = other RNA
tagccccccggagcaggtg

SEQ ID NO: 36337 - RNA, 19 nt, synthetic construct
  source 1..19: mol_type = other RNA
cccgccctgcacagagcag

SEQ ID NO: 36338 - RNA, 19 nt, synthetic construct
  source 1..19: mol_type = other RNA
gtggcaccagctgcaccag

SEQ ID NO: 36339 - RNA, 19 nt, synthetic construct
  source 1..19: mol_type = other RNA
tgagtggcaccagctgcac

SEQ ID NO: 36340 - RNA, 19 nt, synthetic construct
  source 1..19: mol_type = other RNA
tgccacagccttcctgatg

SEQ ID NO: 36341 - RNA, 19 nt, synthetic construct
  source 1..19: mol_type = other RNA
attgtaccagctggaccag

SEQ ID NO: 36342 - RNA, 19 nt, synthetic construct
  source 1..19: mol_type = other RNA
gcccagctcctccagcggc

SEQ ID NO: 36343 - RNA, 19 nt, synthetic construct
  source 1..19: mol_type = other RNA
ggtcgtgccctggctggtg

SEQ ID NO: 36344 - RNA, 19 nt, synthetic construct
  source 1..19: mol_type = other RNA
cgtccctgggctggaggag

SEQ ID NO: 36345 - RNA, 19 nt, synthetic construct
  source 1..19: mol_type = other RNA
acagttgtggtggtggtgg

SEQ ID NO: 36346 - RNA, 19 nt, synthetic construct
  source 1..19: mol_type = other RNA
cggttcctgcagaccaggc

SEQ ID NO: 36347 - RNA, 19 nt, synthetic construct
  source 1..19: mol_type = other RNA
gaggaggcggtggccgtgg

SEQ ID NO: 36348 - RNA, 19 nt, synthetic construct
  source 1..19: mol_type = other RNA
ggtggaggaggcggtggcc

SEQ ID NO: 36349 - RNA, 19 nt, synthetic construct
  source 1..19: mol_type = other RNA
ctgggtggaggaggcggtg

SEQ ID NO: 36350 - RNA, 19 nt, synthetic construct
  source 1..19: mol_type = other RNA
ccctggactggagaaggga

SEQ ID NO: 36351 - RNA, 19 nt, synthetic construct
  source 1..19: mol_type = other RNA
ggtggtgcccagggaggag

SEQ ID NO: 36352 - RNA, 19 nt, synthetic construct
  source 1..19: mol_type = other RNA
ggttgtggtggccgtggtg

SEQ ID NO: 36353 - RNA, 19 nt, synthetic construct
  source 1..19: mol_type = other RNA
cggttgtggtggccgtggt

SEQ ID NO: 36354 - RNA, 19 nt, synthetic construct
  source 1..19: mol_type = other RNA
cgtccctgggctggaggag

SEQ ID NO: 36355 - RNA, 19 nt, synthetic construct
  source 1..19: mol_type = other RNA
acagttgtggtggtggtgg

SEQ ID NO: 36356 - RNA, 19 nt, synthetic construct
  source 1..19: mol_type = other RNA
tgtgctgctggtggctgca

SEQ ID NO: 36357 - RNA, 19 nt, synthetic construct
  source 1..19: mol_type = other RNA
tgctgggtgtggccgtggc

SEQ ID NO: 36358 - RNA, 19 nt, synthetic construct
  source 1..19: mol_type = other RNA
cggttcctgcagaccaggc

SEQ ID NO: 36359 - RNA, 19 nt, synthetic construct
  source 1..19: mol_type = other RNA
ggtgtggtggccgtgctgg

SEQ ID NO: 36360 - RNA, 19 nt, synthetic construct
  source 1..19: mol_type = other RNA
ggaggaagtggctttggaa

SEQ ID NO: 36361 - RNA, 19 nt, synthetic construct
  source 1..19: mol_type = other RNA
ggaggaggaagtggctttg

SEQ ID NO: 36362 - RNA, 19 nt, synthetic construct
  source 1..19: mol_type = other RNA
gtggctgtgcttgtcagca

SEQ ID NO: 36363 - RNA, 19 nt, synthetic construct
  source 1..19: mol_type = other RNA
tagtggctgctgtggtcag

SEQ ID NO: 36364 - RNA, 19 nt, synthetic construct
  source 1..19: mol_type = other RNA
gaggaggcggtggccgtgg

SEQ ID NO: 36365 - RNA, 19 nt, synthetic construct
  source 1..19: mol_type = other RNA
ggtggaggaggcggtggcc

SEQ ID NO: 36366 - RNA, 19 nt, synthetic construct
  source 1..19: mol_type = other RNA
ccgggtggaggaggcggtg

SEQ ID NO: 36367 - RNA, 19 nt, synthetic construct
  source 1..19: mol_type = other RNA
ggtgtggtggccgtgctgg

SEQ ID NO: 36368 - RNA, 19 nt, synthetic construct
  source 1..19: mol_type = other RNA
cgtccctgggctggaggag

SEQ ID NO: 36369 - RNA, 19 nt, synthetic construct
  source 1..19: mol_type = other RNA
acagttgtggtggtggtgg

SEQ ID NO: 36370 - RNA, 19 nt, synthetic construct
  source 1..19: mol_type = other RNA
tgtgctgctggtggctgca

SEQ ID NO: 36371 - RNA, 19 nt, synthetic construct
  source 1..19: mol_type = other RNA
ctgtggtcctggaggtgcc

SEQ ID NO: 36372 - RNA, 19 nt, synthetic construct
  source 1..19: mol_type = other RNA
cggttcctgcagaccaggc

SEQ ID NO: 36373 - RNA, 19 nt, synthetic construct
  source 1..19: mol_type = other RNA
gaggaggcggtggccgtgg

SEQ ID NO: 36374 - RNA, 19 nt, synthetic construct
  source 1..19: mol_type = other RNA
ggtggaggaggcggtggcc

SEQ ID NO: 36375 - RNA, 19 nt, synthetic construct
  source 1..19: mol_type = other RNA
ctgggtggaggaggcggtg

SEQ ID NO: 36376 - RNA, 19 nt, synthetic construct
  source 1..19: mol_type = other RNA
ccctggactggagaaggga

SEQ ID NO: 36377 - RNA, 19 nt, synthetic construct
  source 1..19: mol_type = other RNA
ggtggtgcccagggaggag

SEQ ID NO: 36378 - RNA, 19 nt, synthetic construct
  source 1..19: mol_type = other RNA
ggttgtggtggccgtggtg

SEQ ID NO: 36379 - RNA, 19 nt, synthetic construct
  source 1..19: mol_type = other RNA
tggttgtggtggccgtggt

SEQ ID NO: 36380 - RNA, 19 nt, synthetic construct
  source 1..19: mol_type = other RNA
tgggctggaggagggggtg

SEQ ID NO: 36381 - RNA, 19 nt, synthetic construct
  source 1..19: mol_type = other RNA
cgtccctgggctggaggag

SEQ ID NO: 36382 - RNA, 19 nt, synthetic construct
  source 1..19: mol_type = other RNA
acagttgtggtggtggtgg

SEQ ID NO: 36383 - RNA, 19 nt, synthetic construct
  source 1..19: mol_type = other RNA
tgtgctgctggtggctgca

SEQ ID NO: 36384 - RNA, 19 nt, synthetic construct
  source 1..19: mol_type = other RNA
cgtccctggggaagggggt

SEQ ID NO: 36385 - RNA, 19 nt, synthetic construct
  source 1..19: mol_type = other RNA
tgctgggtgtggccgtggc

SEQ ID NO: 36386 - RNA, 19 nt, synthetic construct
  source 1..19: mol_type = other RNA
cggttcctgcagaccaggc

SEQ ID NO: 36387 - RNA, 19 nt, synthetic construct
  source 1..19: mol_type = other RNA
ggaggaagtggctttggaa

SEQ ID NO: 36388 - RNA, 19 nt, synthetic construct
  source 1..19: mol_type = other RNA
ggaggaggaagtggctttg

SEQ ID NO: 36389 - RNA, 19 nt, synthetic construct
  source 1..19: mol_type = other RNA
gtggctgtgcttgtcagca

SEQ ID NO: 36390 - RNA, 19 nt, synthetic construct
  source 1..19: mol_type = other RNA
tagtggctgctgtggtcag

SEQ ID NO: 36391 - RNA, 19 nt, synthetic construct
  source 1..19: mol_type = other RNA
gaggaggcggtggccgtgg

SEQ ID NO: 36392 - RNA, 19 nt, synthetic construct
  source 1..19: mol_type = other RNA
ggtggaggaggcggtggcc

SEQ ID NO: 36393 - RNA, 19 nt, synthetic construct
  source 1..19: mol_type = other RNA
ctgggtggaggaggcggtg

SEQ ID NO: 36394 - RNA, 19 nt, synthetic construct
  source 1..19: mol_type = other RNA
ggtggtgcccagggaggag

SEQ ID NO: 36395 - RNA, 19 nt, synthetic construct
  source 1..19: mol_type = other RNA
cgtccctgggctggaggag

SEQ ID NO: 36396 - RNA, 19 nt, synthetic construct
  source 1..19: mol_type = other RNA
acagttgtggtggtggtgg

SEQ ID NO: 36397 - RNA, 19 nt, synthetic construct
  source 1..19: mol_type = other RNA
cagcactggggtgatgggt

SEQ ID NO: 36398 - RNA, 19 nt, synthetic construct
  source 1..19: mol_type = other RNA
ggtgtggtggccgtgctgg

SEQ ID NO: 36399 - RNA, 19 nt, synthetic construct
  source 1..19: mol_type = other RNA
ggaggaggaagtggctttg

SEQ ID NO: 36400 - RNA, 19 nt, synthetic construct
  source 1..19: mol_type = other RNA
gtggctgtgcttgtcagca

SEQ ID NO: 36401 - RNA, 19 nt, synthetic construct
  source 1..19: mol_type = other RNA
tggtccacagggtggagga

SEQ ID NO: 36402 - RNA, 19 nt, synthetic construct
  source 1..19: mol_type = other RNA
atgggtgtggtggtctgtg

SEQ ID NO: 36403 - RNA, 19 nt, synthetic construct
  source 1..19: mol_type = other RNA
cctggggtggaggacaggg

SEQ ID NO: 36404 - RNA, 19 nt, synthetic construct
  source 1..19: mol_type = other RNA
gaggaggcggtggccgtgg

SEQ ID NO: 36405 - RNA, 19 nt, synthetic construct
  source 1..19: mol_type = other RNA
agtggaggaggcggtggcc

SEQ ID NO: 36406 - RNA, 19 nt, synthetic construct
  source 1..19: mol_type = other RNA
tagaggctgagattcccaa

SEQ ID NO: 36407 - RNA, 19 nt, synthetic construct
  source 1..19: mol_type = other RNA
cgggcggcagcggcagtgg

SEQ ID NO: 36408 - RNA, 19 nt, synthetic construct
  source 1..19: mol_type = other RNA
gcagcgggcggcagcggca

SEQ ID NO: 36409 - RNA, 19 nt, synthetic construct
  source 1..19: mol_type = other RNA
ggcgcgggggcagcgggcg

SEQ ID NO: 36410 - RNA, 19 nt, synthetic construct
  source 1..19: mol_type = other RNA
acaccggggctgcggggct

SEQ ID NO: 36411 - RNA, 19 nt, synthetic construct
  source 1..19: mol_type = other RNA
gtggtgggcatggggtggg

SEQ ID NO: 36412 - RNA, 19 nt, synthetic construct
  source 1..19: mol_type = other RNA
ctgtggtgggcatggggtg

SEQ ID NO: 36413 - RNA, 19 nt, synthetic construct
  source 1..19: mol_type = other RNA
agggcacctcaaggcggcc

SEQ ID NO: 36414 - RNA, 19 nt, synthetic construct
  source 1..19: mol_type = other RNA
gcagggcacctcaaggcgg

SEQ ID NO: 36415 - RNA, 19 nt, synthetic construct
  source 1..19: mol_type = other RNA
aagcctccaggctctggca

SEQ ID NO: 36416 - RNA, 19 nt, synthetic construct
  source 1..19: mol_type = other RNA
gtaagcctccaggctctgg

SEQ ID NO: 36417 - RNA, 19 nt, synthetic construct
  source 1..19: mol_type = other RNA
tctgggggcaggtggttgt

SEQ ID NO: 36418 - RNA, 19 nt, synthetic construct
  source 1..19: mol_type = other RNA
tggcctgggcctctgctga

SEQ ID NO: 36419 - RNA, 19 nt, synthetic construct
  source 1..19: mol_type = other RNA
gtggacccgcctctcctgg

SEQ ID NO: 36420 - RNA, 19 nt, synthetic construct
  source 1..19: mol_type = other RNA
agacagcagtggcctcctg

SEQ ID NO: 36421 - RNA, 19 nt, synthetic construct
  source 1..19: mol_type = other RNA
gaggggcaaggccaaggtg

SEQ ID NO: 36422 - RNA, 19 nt, synthetic construct
  source 1..19: mol_type = other RNA
tggcagcagctggccttgc

SEQ ID NO: 36423 - RNA, 19 nt, synthetic construct
  source 1..19: mol_type = other RNA
cagcttcctggcagcagct

SEQ ID NO: 36424 - RNA, 19 nt, synthetic construct
  source 1..19: mol_type = other RNA
agagaggctcccaggcagc

SEQ ID NO: 36425 - RNA, 19 nt, synthetic construct
  source 1..19: mol_type = other RNA
gcaggtcctggcactgcca

SEQ ID NO: 36426 - RNA, 19 nt, synthetic construct
  source 1..19: mol_type = other RNA
catggggtgggggtgggtg

SEQ ID NO: 36427 - RNA, 19 nt, synthetic construct
  source 1..19: mol_type = other RNA
caaggttgtggcactcagc

SEQ ID NO: 36428 - RNA, 19 nt, synthetic construct
  source 1..19: mol_type = other RNA
ctgggtgtggctgtggctg

SEQ ID NO: 36429 - RNA, 19 nt, synthetic construct
  source 1..19: mol_type = other RNA
gtccccacccggccctctc

SEQ ID NO: 36430 - RNA, 19 nt, synthetic construct
  source 1..19: mol_type = other RNA
tgtggtggtggtggtcagc

SEQ ID NO: 36431 - RNA, 19 nt, synthetic construct
  source 1..19: mol_type = other RNA
tgtggtggtggtggtcagc

SEQ ID NO: 36432 - RNA, 19 nt, synthetic construct
  source 1..19: mol_type = other RNA
tgtggtggtggtggtcagc

SEQ ID NO: 36433 - RNA, 19 nt, synthetic construct
  source 1..19: mol_type = other RNA
tgtggtggtggtggtcagc

SEQ ID NO: 36434 - RNA, 19 nt, synthetic construct
  source 1..19: mol_type = other RNA
tgtggtggtggtggtcagc

SEQ ID NO: 36435 - RNA, 19 nt, synthetic construct
  source 1..19: mol_type = other RNA
acggggtggccgtggggcc

SEQ ID NO: 36436 - RNA, 19 nt, synthetic construct
  source 1..19: mol_type = other RNA
acggggtggccgtggggcc

SEQ ID NO: 36437 - RNA, 19 nt, synthetic construct
  source 1..19: mol_type = other RNA
agtccccacacaggccaca

SEQ ID NO: 36438 - RNA, 19 nt, synthetic construct
  source 1..19: mol_type = other RNA
tccccacccggccctctcg

SEQ ID NO: 36439 - RNA, 19 nt, synthetic construct
  source 1..19: mol_type = other RNA
tgcaggtcagccccgtctc

SEQ ID NO: 36440 - RNA, 19 nt, synthetic construct
  source 1..19: mol_type = other RNA
gctgcactgcttctgggcc

SEQ ID NO: 36441 - RNA, 19 nt, synthetic construct
  source 1..19: mol_type = other RNA
cccctgaggttgggaagtc

SEQ ID NO: 36442 - RNA, 19 nt, synthetic construct
  source 1..19: mol_type = other RNA
ccagcagccctgatgtttt

SEQ ID NO: 36443 - RNA, 19 nt, synthetic construct
  source 1..19: mol_type = other RNA
tctttggtgcccagcacat

SEQ ID NO: 36444 - RNA, 19 nt, synthetic construct
  source 1..19: mol_type = other RNA
tttcaaaagtttccatgtc

SEQ ID NO: 36445 - RNA, 19 nt, synthetic construct
  source 1..19: mol_type = other RNA
tagctgtgggtgtggtggc

SEQ ID NO: 36446 - RNA, 19 nt, synthetic construct
  source 1..19: mol_type = other RNA
tagctgtgggtgtggtggc

SEQ ID NO: 36447 - RNA, 19 nt, synthetic construct
  source 1..19: mol_type = other RNA
tagctgtgggtgtggtggc

SEQ ID NO: 36448 - RNA, 19 nt, synthetic construct
  source 1..19: mol_type = other RNA
tagctgtgggtgtggtggc

SEQ ID NO: 36449 - RNA, 19 nt, synthetic construct
  source 1..19: mol_type = other RNA
tagctgtgggtgtggtggc

SEQ ID NO: 36450 - RNA, 19 nt, synthetic construct
  source 1..19: mol_type = other RNA
atccagcaccgtgcctggg

SEQ ID NO: 36451 - RNA, 19 nt, synthetic construct
  source 1..19: mol_type = other RNA
gccgcagaccctgcccttg

SEQ ID NO: 36452 - RNA, 19 nt, synthetic construct
  source 1..19: mol_type = other RNA
tgcccccagcagccctgat

SEQ ID NO: 36453 - RNA, 19 nt, synthetic construct
  source 1..19: mol_type = other RNA
cttgcccccagcagccctg

SEQ ID NO: 36454 - RNA, 19 nt, synthetic construct
  source 1..19: mol_type = other RNA
tgtggtggccgtggtggtc

SEQ ID NO: 36455 - RNA, 19 nt, synthetic construct
  source 1..19: mol_type = other RNA
agctgtgggtgtggtggct

SEQ ID NO: 36456 - RNA, 19 nt, synthetic construct
  source 1..19: mol_type = other RNA
gtagctgtgggtgtggtgg

SEQ ID NO: 36457 - RNA, 19 nt, synthetic construct
  source 1..19: mol_type = other RNA
agctgtgggtgtggtggct

SEQ ID NO: 36458 - RNA, 19 nt, synthetic construct
  source 1..19: mol_type = other RNA
gtagctgtgggtgtggtgg

SEQ ID NO: 36459 - RNA, 19 nt, synthetic construct
  source 1..19: mol_type = other RNA
agctgtgggtgtggtggct

SEQ ID NO: 36460 - RNA, 19 nt, synthetic construct
  source 1..19: mol_type = other RNA
gtagctgtgggtgtggtgg

SEQ ID NO: 36461 - RNA, 19 nt, synthetic construct
  source 1..19: mol_type = other RNA
agctgtgggtgtggtggct

SEQ ID NO: 36462 - RNA, 19 nt, synthetic construct
  source 1..19: mol_type = other RNA
gtagctgtgggtgtggtgg

SEQ ID NO: 36463 - RNA, 19 nt, synthetic construct
  source 1..19: mol_type = other RNA
agctgtgggtgtggtggct

SEQ ID NO: 36464 - RNA, 19 nt, synthetic construct
  source 1..19: mol_type = other RNA
gtagctgtgggtgtggtgg

SEQ ID NO: 36465 - RNA, 19 nt, synthetic construct
  source 1..19: mol_type = other RNA
gccctgatgttttcaaaag

SEQ ID NO: 36466 - RNA, 19 nt, synthetic construct
  source 1..19: mol_type = other RNA
atcttgcccccagcagccc

SEQ ID NO: 36467 - RNA, 19 nt, synthetic construct
  source 1..19: mol_type = other RNA
acccctgaggttgggaagt

SEQ ID NO: 36468 - RNA, 19 nt, synthetic construct
  source 1..19: mol_type = other RNA
cagcagccctgatgttttc

SEQ ID NO: 36469 - RNA, 19 nt, synthetic construct
  source 1..19: mol_type = other RNA
gggcagtggctgtagtcgt

SEQ ID NO: 36470 - RNA, 19 nt, synthetic construct
  source 1..19: mol_type = other RNA
gcctggggggcagaagcag

SEQ ID NO: 36471 - RNA, 19 nt, synthetic construct
  source 1..19: mol_type = other RNA
tcacagttgcaggtgtcaa

SEQ ID NO: 36472 - RNA, 19 nt, synthetic construct
  source 1..19: mol_type = other RNA
cttggagcaggtggtgccg

SEQ ID NO: 36473 - RNA, 19 nt, synthetic construct
  source 1..19: mol_type = other RNA
gatgttttcaaaagtttcc

SEQ ID NO: 36474 - RNA, 19 nt, synthetic construct
  source 1..19: mol_type = other RNA
tgatgttttcaaaagtttc

SEQ ID NO: 36475 - RNA, 19 nt, synthetic construct
  source 1..19: mol_type = other RNA
ctgatgttttcaaaagttt

SEQ ID NO: 36476 - RNA, 19 nt, synthetic construct
  source 1..19: mol_type = other RNA
cctgggctggaggaggggg

SEQ ID NO: 36477 - RNA, 19 nt, synthetic construct
  source 1..19: mol_type = other RNA
cctgggctggaggaggggg

SEQ ID NO: 36478 - RNA, 19 nt, synthetic construct
  source 1..19: mol_type = other RNA
cctgggctggaggaggggg

SEQ ID NO: 36479 - RNA, 19 nt, synthetic construct
  source 1..19: mol_type = other RNA
cctgggctggaggaggggg

SEQ ID NO: 36480 - RNA, 19 nt, synthetic construct
  source 1..19: mol_type = other RNA
cctgggctggaggaggggg

SEQ ID NO: 36481 - RNA, 19 nt, synthetic construct
  source 1..19: mol_type = other RNA
agggcagccgggcctggaa

SEQ ID NO: 36482 - RNA, 19 nt, synthetic construct
  source 1..19: mol_type = other RNA
ctcacaggagtagcagcag

SEQ ID NO: 36483 - RNA, 19 nt, synthetic construct
  source 1..19: mol_type = other RNA
cctcacaggagtagcagca

SEQ ID NO: 36484 - RNA, 19 nt, synthetic construct
  source 1..19: mol_type = other RNA
gtggggctgctgggcagca

SEQ ID NO: 36485 - RNA, 19 nt, synthetic construct
  source 1..19: mol_type = other RNA
gtggggctgctgggcagca

SEQ ID NO: 36486 - RNA, 19 nt, synthetic construct
  source 1..19: mol_type = other RNA
gtggggctgctgggcagca

SEQ ID NO: 36487 - RNA, 19 nt, synthetic construct
  source 1..19: mol_type = other RNA
gtggggctgctgggcagca

SEQ ID NO: 36488 - RNA, 19 nt, synthetic construct
  source 1..19: mol_type = other RNA
ggaggacagcgcggcgcac

SEQ ID NO: 36489 - RNA, 19 nt, synthetic construct
  source 1..19: mol_type = other RNA
ggctgctgggcagcagggt

SEQ ID NO: 36490 - RNA, 19 nt, synthetic construct
  source 1..19: mol_type = other RNA
ggctgctgggcagcagggt

SEQ ID NO: 36491 - RNA, 19 nt, synthetic construct
  source 1..19: mol_type = other RNA
ggctgctgggcagcagggt

SEQ ID NO: 36492 - RNA, 19 nt, synthetic construct
  source 1..19: mol_type = other RNA
ggctgctgggcagcagggt

SEQ ID NO: 36493 - RNA, 19 nt, synthetic construct
  source 1..19: mol_type = other RNA
ggcggcacaggcgtgcaca

SEQ ID NO: 36494 - RNA, 19 nt, synthetic construct
  source 1..19: mol_type = other RNA
cgccagtcactgcacactc

SEQ ID NO: 36495 - RNA, 19 nt, synthetic construct
  source 1..19: mol_type = other RNA
gtggtggtggtggccgtct

SEQ ID NO: 36496 - RNA, 19 nt, synthetic construct
  source 1..19: mol_type = other RNA
tggggctgctgggcagcag

SEQ ID NO: 36497 - RNA, 19 nt, synthetic construct
  source 1..19: mol_type = other RNA
tggggctgctgggcagcag

SEQ ID NO: 36498 - RNA, 19 nt, synthetic construct
  source 1..19: mol_type = other RNA
tggggctgctgggcagcag

SEQ ID NO: 36499 - RNA, 19 nt, synthetic construct
  source 1..19: mol_type = other RNA
tggggctgctgggcagcag

SEQ ID NO: 36500 - RNA, 19 nt, synthetic construct
  source 1..19: mol_type = other RNA
ggactgaggaggacacagt

SEQ ID NO: 36501 - RNA, 19 nt, synthetic construct
  source 1..19: mol_type = other RNA
aggactgaggaggacacag

SEQ ID NO: 36502 - RNA, 19 nt, synthetic construct
  source 1..19: mol_type = other RNA
tttcctgaggctccccctg

SEQ ID NO: 36503 - RNA, 19 nt, synthetic construct
  source 1..19: mol_type = other RNA
cactgcttctgggcccagg

SEQ ID NO: 36504 - RNA, 19 nt, synthetic construct
  source 1..19: mol_type = other RNA
gcactgcttctgggcccag

SEQ ID NO: 36505 - RNA, 19 nt, synthetic construct
  source 1..19: mol_type = other RNA
atgctgcactgcttctggg

SEQ ID NO: 36506 - RNA, 19 nt, synthetic construct
  source 1..19: mol_type = other RNA
gatgctgcactgcttctgg

SEQ ID NO: 36507 - RNA, 19 nt, synthetic construct
  source 1..19: mol_type = other RNA
ccggatcctgtagttgtag

SEQ ID NO: 36508 - RNA, 19 nt, synthetic construct
  source 1..19: mol_type = other RNA
caccctgtgcttttctgca

SEQ ID NO: 36509 - RNA, 19 nt, synthetic construct
  source 1..19: mol_type = other RNA
gtcacagccaggggcaggg

SEQ ID NO: 36510 - RNA, 19 nt, synthetic construct
  source 1..19: mol_type = other RNA
aaatgccctgcagaagcag

SEQ ID NO: 36511 - RNA, 19 nt, synthetic construct
  source 1..19: mol_type = other RNA
gcagcaggtgcactggtgc

SEQ ID NO: 36512 - RNA, 19 nt, synthetic construct
  source 1..19: mol_type = other RNA
gatggcattgtcacagcca

SEQ ID NO: 36513 - RNA, 19 nt, synthetic construct
  source 1..19: mol_type = other RNA
cgaggggcaggcagccaga

SEQ ID NO: 36514 - RNA, 19 nt, synthetic construct
  source 1..19: mol_type = other RNA
cagctgcaccagcagctgc

SEQ ID NO: 36515 - RNA, 19 nt, synthetic construct
  source 1..19: mol_type = other RNA
gttcccacacaggccgcac

SEQ ID NO: 36516 - RNA, 19 nt, synthetic construct
  source 1..19: mol_type = other RNA
cggcgcacaggcagtcctc

SEQ ID NO: 36517 - RNA, 19 nt, synthetic construct
  source 1..19: mol_type = other RNA
cttgatggccttggagcag

SEQ ID NO: 36518 - RNA, 19 nt, synthetic construct
  source 1..19: mol_type = other RNA
accgtgcagttctccaggg

SEQ ID NO: 36519 - RNA, 19 nt, synthetic construct
  source 1..19: mol_type = other RNA
aggggttggccgtgcaggg

SEQ ID NO: 36520 - RNA, 19 nt, synthetic construct
  source 1..19: mol_type = other RNA
gggctgctgggcagcaggg

SEQ ID NO: 36521 - RNA, 19 nt, synthetic construct
  source 1..19: mol_type = other RNA
gggctgctgggcagcaggg

SEQ ID NO: 36522 - RNA, 19 nt, synthetic construct
  source 1..19: mol_type = other RNA
gggctgctgggcagcaggg

SEQ ID NO: 36523 - RNA, 19 nt, synthetic construct
  source 1..19: mol_type = other RNA
gggctgctgggcagcaggg

SEQ ID NO: 36524 - RNA, 19 nt, synthetic construct
  source 1..19: mol_type = other RNA
gccaggggcaggggagggc

SEQ ID NO: 36525 - RNA, 19 nt, synthetic construct
  source 1..19: mol_type = other RNA
agcaggtgcactggtgctg

SEQ ID NO: 36526 - RNA, 19 nt, synthetic construct
  source 1..19: mol_type = other RNA
ctcctggcagcaggtgcac

SEQ ID NO: 36527 - RNA, 19 nt, synthetic construct
  source 1..19: mol_type = other RNA
agctgcaccagcagctgca

SEQ ID NO: 36528 - RNA, 19 nt, synthetic construct
  source 1..19: mol_type = other RNA
ttgcccccagcagccctga

SEQ ID NO: 36529 - RNA, 19 nt, synthetic construct
  source 1..19: mol_type = other RNA
gggccctgggtctctgcct

SEQ ID NO: 36530 - RNA, 19 nt, synthetic construct
  source 1..19: mol_type = other RNA
agccccgtctccaggctgc

SEQ ID NO: 36531 - RNA, 19 nt, synthetic construct
  source 1..19: mol_type = other RNA
tggtggtggtggtggccgt

SEQ ID NO: 36532 - RNA, 19 nt, synthetic construct
  source 1..19: mol_type = other RNA
ccaggctgcaggtcagcac

SEQ ID NO: 36533 - RNA, 19 nt, synthetic construct
  source 1..19: mol_type = other RNA
cgcagggacacagaagggc

SEQ ID NO: 36534 - RNA, 19 nt, synthetic construct
  source 1..19: mol_type = other RNA
cacagggcaggggcttgca

SEQ ID NO: 36535 - RNA, 19 nt, synthetic construct
  source 1..19: mol_type = other RNA
gctgcaggtcagcacctgc

SEQ ID NO: 36536 - RNA, 19 nt, synthetic construct
  source 1..19: mol_type = other RNA
cctgggtggtggtggtggt

SEQ ID NO: 36537 - RNA, 19 nt, synthetic construct
  source 1..19: mol_type = other RNA
tggccggggtgctggggca

SEQ ID NO: 36538 - RNA, 19 nt, synthetic construct
  source 1..19: mol_type = other RNA
tggccggggtgctggggca

SEQ ID NO: 36539 - RNA, 19 nt, synthetic construct
  source 1..19: mol_type = other RNA
tggccggggtgctggggca

SEQ ID NO: 36540 - RNA, 19 nt, synthetic construct
  source 1..19: mol_type = other RNA
tggccggggtgctggggca

SEQ ID NO: 36541 - RNA, 19 nt, synthetic construct
  source 1..19: mol_type = other RNA
ccgtggaggatgctgcact

SEQ ID NO: 36542 - RNA, 19 nt, synthetic construct
  source 1..19: mol_type = other RNA
atccagtggacgcagtcgt

SEQ ID NO: 36543 - RNA, 19 nt, synthetic construct
  source 1..19: mol_type = other RNA
atccagtggacgcagtcgt

SEQ ID NO: 36544 - RNA, 19 nt, synthetic construct
  source 1..19: mol_type = other RNA
tttgtgaggatccaggtcg

SEQ ID NO: 36545 - RNA, 19 nt, synthetic construct
  source 1..19: mol_type = other RNA
tttgtgaggatccaggtcg

SEQ ID NO: 36546 - RNA, 19 nt, synthetic construct
  source 1..19: mol_type = other RNA
ggctcacagcccatggtca

SEQ ID NO: 36547 - RNA, 19 nt, synthetic construct
  source 1..19: mol_type = other RNA
ggctcacagcccatggtca

SEQ ID NO: 36548 - RNA, 19 nt, synthetic construct
  source 1..19: mol_type = other RNA
tgttggggccagcgtgggt

SEQ ID NO: 36549 - RNA, 19 nt, synthetic construct
  source 1..19: mol_type = other RNA
gtcacagcaaagcacacgc

SEQ ID NO: 36550 - RNA, 19 nt, synthetic construct
  source 1..19: mol_type = other RNA
agctggtggctggggtact

SEQ ID NO: 36551 - RNA, 19 nt, synthetic construct
  source 1..19: mol_type = other RNA
gtgagggctggaaagggct

SEQ ID NO: 36552 - RNA, 19 nt, synthetic construct
  source 1..19: mol_type = other RNA
cagctttgtgaggatccag

SEQ ID NO: 36553 - RNA, 19 nt, synthetic construct
  source 1..19: mol_type = other RNA
gcctgcaacccctgaggtt

SEQ ID NO: 36554 - RNA, 19 nt, synthetic construct
  source 1..19: mol_type = other RNA
ggctgttgtggtcagctct

SEQ ID NO: 36555 - RNA, 19 nt, synthetic construct
  source 1..19: mol_type = other RNA
ggctgttgtggtcagctct

SEQ ID NO: 36556 - RNA, 19 nt, synthetic construct
  source 1..19: mol_type = other RNA
ggctgttgtggtcagctct

SEQ ID NO: 36557 - RNA, 19 nt, synthetic construct
  source 1..19: mol_type = other RNA
ggccctgggtctctgcctg

SEQ ID NO: 36558 - RNA, 19 nt, synthetic construct
  source 1..19: mol_type = other RNA
tggggccggggaggggcca

SEQ ID NO: 36559 - RNA, 19 nt, synthetic construct
  source 1..19: mol_type = other RNA
cctggggccggggaggggc

SEQ ID NO: 36560 - RNA, 19 nt, synthetic construct
  source 1..19: mol_type = other RNA
ctgccccacctgtgccagg

SEQ ID NO: 36561 - RNA, 19 nt, synthetic construct
  source 1..19: mol_type = other RNA
tctgccccacctgtgccag

SEQ ID NO: 36562 - RNA, 19 nt, synthetic construct
  source 1..19: mol_type = other RNA
acagcaaagcacacgcacg

SEQ ID NO: 36563 - RNA, 19 nt, synthetic construct
  source 1..19: mol_type = other RNA
ccgtggagctggtggctgg

SEQ ID NO: 36564 - RNA, 19 nt, synthetic construct
  source 1..19: mol_type = other RNA
tgagggctggaaagggctg

SEQ ID NO: 36565 - RNA, 19 nt, synthetic construct
  source 1..19: mol_type = other RNA
tcagctctgtgaggatcca

SEQ ID NO: 36566 - RNA, 19 nt, synthetic construct
  source 1..19: mol_type = other RNA
tgggtggaggaggcggtgg

SEQ ID NO: 36567 - RNA, 19 nt, synthetic construct
  source 1..19: mol_type = other RNA
tccggagtggaggaggggt

SEQ ID NO: 36568 - RNA, 19 nt, synthetic construct
  source 1..19: mol_type = other RNA
tcagctctgtgaggatcca

SEQ ID NO: 36569 - RNA, 19 nt, synthetic construct
  source 1..19: mol_type = other RNA
cgggtggaggaggcggtgg

SEQ ID NO: 36570 - RNA, 19 nt, synthetic construct
  source 1..19: mol_type = other RNA
tgggtggaggaggcggtgg

SEQ ID NO: 36571 - RNA, 19 nt, synthetic construct
  source 1..19: mol_type = other RNA
tcagctctgtgaggatcca

SEQ ID NO: 36572 - RNA, 19 nt, synthetic construct
  source 1..19: mol_type = other RNA
tccggagtggaggaggggt

SEQ ID NO: 36573 - RNA, 19 nt, synthetic construct
  source 1..19: mol_type = other RNA
tcagctctgtgaggatcca

SEQ ID NO: 36574 - RNA, 19 nt, synthetic construct
  source 1..19: mol_type = other RNA
tcagctctgtgaggatcca

SEQ ID NO: 36575 - RNA, 19 nt, synthetic construct
  source 1..19: mol_type = other RNA
tgggtggaggaggcggtgg

SEQ ID NO: 36576 - RNA, 19 nt, synthetic construct
  source 1..19: mol_type = other RNA
tgcggggctggcagtgggg

SEQ ID NO: 36577 - RNA, 19 nt, synthetic construct
  source 1..19: mol_type = other RNA
ggtgggcatggggtggggg

SEQ ID NO: 36578 - RNA, 19 nt, synthetic construct
  source 1..19: mol_type = other RNA
agctggacacatctgggca

SEQ ID NO: 36579 - RNA, 19 nt, synthetic construct
  source 1..19: mol_type = other RNA
cccctgcagctggacacat

SEQ ID NO: 36580 - RNA, 19 nt, synthetic construct
  source 1..19: mol_type = other RNA
agagtggaggaggcggtgg

SEQ ID NO: 36581 - RNA, 19 nt, synthetic construct
  source 1..19: mol_type = other RNA
ggcaggtcctggcactgcc

SEQ ID NO: 36582 - RNA, 19 nt, synthetic construct
  source 1..19: mol_type = other RNA
cagcacctgcccgacctgg

SEQ ID NO: 36583 - RNA, 19 nt, synthetic construct
  source 1..19: mol_type = other RNA
atccagtggatgcagtcgt

SEQ ID NO: 36584 - RNA, 19 nt, synthetic construct
  source 1..19: mol_type = other RNA
gttggcaggctgctgggga

SEQ ID NO: 36585 - RNA, 19 nt, synthetic construct
  source 1..19: mol_type = other RNA
gaacctgcctgtctggtct

SEQ ID NO: 36586 - RNA, 19 nt, synthetic construct
  source 1..19: mol_type = other RNA
gggagtggctttggagctg

SEQ ID NO: 36587 - RNA, 19 nt, synthetic construct
  source 1..19: mol_type = other RNA
tctctggagtggaggaggg

SEQ ID NO: 36588 - RNA, 19 nt, synthetic construct
  source 1..19: mol_type = other RNA
gggagtggctttggagctg

SEQ ID NO: 36589 - RNA, 19 nt, synthetic construct
  source 1..19: mol_type = other RNA
tctctggagtggaggaggg

SEQ ID NO: 36590 - RNA, 19 nt, synthetic construct
  source 1..19: mol_type = other RNA
gggagtggctttggagctg

SEQ ID NO: 36591 - RNA, 19 nt, synthetic construct
  source 1..19: mol_type = other RNA
tctctggagtggaggaggg

SEQ ID NO: 36592 - RNA, 19 nt, synthetic construct
  source 1..19: mol_type = other RNA
gggagtggctttggagctg

SEQ ID NO: 36593 - RNA, 19 nt, synthetic construct
  source 1..19: mol_type = other RNA
tctctggagtggaggaggg

SEQ ID NO: 36594 - RNA, 19 nt, synthetic construct
  source 1..19: mol_type = other RNA
cccgtggcctccaccaccc

SEQ ID NO: 36595 - RNA, 19 nt, synthetic construct
  source 1..19: mol_type = other RNA
cccgccgagctgttgctgc

SEQ ID NO: 36596 - RNA, 19 nt, synthetic construct
  source 1..19: mol_type = other RNA
tgctggcccagctcctcca

SEQ ID NO: 36597 - RNA, 19 nt, synthetic construct
  source 1..19: mol_type = other RNA
cgtggagctggtggctggg

SEQ ID NO: 36598 - RNA, 19 nt, synthetic construct
  source 1..19: mol_type = other RNA
ctggggtggaggagggggt

SEQ ID NO: 36599 - RNA, 19 nt, synthetic construct
  source 1..19: mol_type = other RNA
ctggggtggaggagggggt

SEQ ID NO: 36600 - RNA, 19 nt, synthetic construct
  source 1..19: mol_type = other RNA
ctggggtggaggagggggt

SEQ ID NO: 36601 - RNA, 19 nt, synthetic construct
  source 1..19: mol_type = other RNA
ctggggtggaggagggggt

SEQ ID NO: 36602 - RNA, 19 nt, synthetic construct
  source 1..19: mol_type = other RNA
gcgcgggggcagcgggcgg

SEQ ID NO: 36603 - RNA, 19 nt, synthetic construct
  source 1..19: mol_type = other RNA
ccaccagtgcgtggcactc

SEQ ID NO: 36604 - RNA, 19 nt, synthetic construct
  source 1..19: mol_type = other RNA
agaggctgagattcccaaa

SEQ ID NO: 36605 - RNA, 19 nt, synthetic construct
  source 1..19: mol_type = other RNA
gggtgtggctgtggctgtg

SEQ ID NO: 36606 - RNA, 19 nt, synthetic construct
  source 1..19: mol_type = other RNA
cgggggcagcgggcggcag

SEQ ID NO: 36607 - RNA, 19 nt, synthetic construct
  source 1..19: mol_type = other RNA
cgcgggggcagcgggcggc

SEQ ID NO: 36608 - RNA, 19 nt, synthetic construct
  source 1..19: mol_type = other RNA
tggacatggtggccacggg

SEQ ID NO: 36609 - RNA, 19 nt, synthetic construct
  source 1..19: mol_type = other RNA
tgccccacctgtgccaggg

SEQ ID NO: 36610 - RNA, 19 nt, synthetic construct
  source 1..19: mol_type = other RNA
gacacatctgggcaggatg

SEQ ID NO: 36611 - RNA, 19 nt, synthetic construct
  source 1..19: mol_type = other RNA
gaagtcaccccaggtgctg

SEQ ID NO: 36612 - RNA, 19 nt, synthetic construct
  source 1..19: mol_type = other RNA
ctggggccggggaggggcc

SEQ ID NO: 36613 - RNA, 19 nt, synthetic construct
  source 1..19: mol_type = other RNA
ctttggagctggtgactgt

SEQ ID NO: 36614 - RNA, 19 nt, synthetic construct
  source 1..19: mol_type = other RNA
ctttggagctggtgactgt

SEQ ID NO: 36615 - RNA, 19 nt, synthetic construct
  source 1..19: mol_type = other RNA
tccctggactggagaaggg

SEQ ID NO: 36616 - RNA, 19 nt, synthetic construct
  source 1..19: mol_type = other RNA
ctttggagctggtgactgt

SEQ ID NO: 36617 - RNA, 19 nt, synthetic construct
  source 1..19: mol_type = other RNA
tccctggactggagaaggg

SEQ ID NO: 36618 - RNA, 19 nt, synthetic construct
  source 1..19: mol_type = other RNA
ctttggagctggtgactgt

SEQ ID NO: 36619 - RNA, 19 nt, synthetic construct
  source 1..19: mol_type = other RNA
tgggcgtcacagggcaggg

SEQ ID NO: 36620 - RNA, 19 nt, synthetic construct
  source 1..19: mol_type = other RNA
gcccagggaggaggagggg

SEQ ID NO: 36621 - RNA, 19 nt, synthetic construct
  source 1..19: mol_type = other RNA
gactggaggaggaagtggc

SEQ ID NO: 36622 - RNA, 19 nt, synthetic construct
  source 1..19: mol_type = other RNA
gcccagggaggaggagggg

SEQ ID NO: 36623 - RNA, 19 nt, synthetic construct
  source 1..19: mol_type = other RNA
gactggaggaggaagtggc

SEQ ID NO: 36624 - RNA, 19 nt, synthetic construct
  source 1..19: mol_type = other RNA
gcccagggaggaggagggg

SEQ ID NO: 36625 - RNA, 19 nt, synthetic construct
  source 1..19: mol_type = other RNA
gactggaggaggaagtggc

SEQ ID NO: 36626 - RNA, 19 nt, synthetic construct
  source 1..19: mol_type = other RNA
gggcggcagcggcagtggc

SEQ ID NO: 36627 - RNA, 19 nt, synthetic construct
  source 1..19: mol_type = other RNA
tggtgggcatggggtgggg

SEQ ID NO: 36628 - RNA, 19 nt, synthetic construct
  source 1..19: mol_type = other RNA
acggggtgggcagcaggag

SEQ ID NO: 36629 - RNA, 19 nt, synthetic construct
  source 1..19: mol_type = other RNA
gtcagcactttgggagggg

SEQ ID NO: 36630 - RNA, 19 nt, synthetic construct
  source 1..19: mol_type = other RNA
ggtcagcactttgggaggg

SEQ ID NO: 36631 - RNA, 19 nt, synthetic construct
  source 1..19: mol_type = other RNA
gtcagcactttgggagggg

SEQ ID NO: 36632 - RNA, 19 nt, synthetic construct
  source 1..19: mol_type = other RNA
ggtcagcactttgggaggg

SEQ ID NO: 36633 - RNA, 19 nt, synthetic construct
  source 1..19: mol_type = other RNA
gtcagcactttgggagggg

SEQ ID NO: 36634 - RNA, 19 nt, synthetic construct
  source 1..19: mol_type = other RNA
ggtcagcactttgggaggg

SEQ ID NO: 36635 - RNA, 19 nt, synthetic construct
  source 1..19: mol_type = other RNA
ggagcaggtgcaggagctg

SEQ ID NO: 36636 - RNA, 19 nt, synthetic construct
  source 1..19: mol_type = other RNA
gttcccagagtggaggagg

SEQ ID NO: 36637 - RNA, 19 nt, synthetic construct
  source 1..19: mol_type = other RNA
gcgggggcagcgggcggca

SEQ ID NO: 36638 - RNA, 19 nt, synthetic construct
  source 1..19: mol_type = other RNA
tggagaccgggagggccgg

SEQ ID NO: 36639 - RNA, 19 nt, synthetic construct
  source 1..19: mol_type = other RNA
ggagaccgggagggccggg

SEQ ID NO: 36640 - RNA, 19 nt, synthetic construct
  source 1..19: mol_type = other RNA
ttgtgcgccgggttcaggg

SEQ ID NO: 36641 - RNA, 19 nt, synthetic construct
  source 1..19: mol_type = other RNA
agtgcaagggcaccgtctc

SEQ ID NO: 36642 - RNA, 19 nt, synthetic construct
  source 1..19: mol_type = other RNA
gcagcagagaacccgcagc

SEQ ID NO: 36643 - RNA, 19 nt, synthetic construct
  source 1..19: mol_type = other RNA
gctggacgttgaagtcctc

SEQ ID NO: 36644 - RNA, 19 nt, synthetic construct
  source 1..19: mol_type = other RNA
gctgcaggtggtgttgaag

SEQ ID NO: 36645 - RNA, 19 nt, synthetic construct
  source 1..19: mol_type = other RNA
ttgtgctgatccacactgg

SEQ ID NO: 36646 - RNA, 19 nt, synthetic construct
  source 1..19: mol_type = other RNA
ttgtgctgatccacactgg

SEQ ID NO: 36647 - RNA, 19 nt, synthetic construct
  source 1..19: mol_type = other RNA
ctgtgcttgtcagcactgg

SEQ ID NO: 36648 - RNA, 19 nt, synthetic construct
  source 1..19: mol_type = other RNA
ttgtgctgatccacactgg

SEQ ID NO: 36649 - RNA, 19 nt, synthetic construct
  source 1..19: mol_type = other RNA
ttgtgctgatccacactgg

SEQ ID NO: 36650 - RNA, 19 nt, synthetic construct
  source 1..19: mol_type = other RNA
ctgtgcttgtcagcactgg

SEQ ID NO: 36651 - RNA, 19 nt, synthetic construct
  source 1..19: mol_type = other RNA
ttgtgctgatccacactgg

SEQ ID NO: 36652 - RNA, 19 nt, synthetic construct
  source 1..19: mol_type = other RNA
ctgtgcttgtcagcactgg

SEQ ID NO: 36653 - RNA, 19 nt, synthetic construct
  source 1..19: mol_type = other RNA
catggctgttgacccaggt

SEQ ID NO: 36654 - RNA, 19 nt, synthetic construct
  source 1..19: mol_type = other RNA
cctgcagaccaggccaaag

SEQ ID NO: 36655 - RNA, 19 nt, synthetic construct
  source 1..19: mol_type = other RNA
cctgcagaccaggccaaag

SEQ ID NO: 36656 - RNA, 19 nt, synthetic construct
  source 1..19: mol_type = other RNA
cctgcagaccaggccaaag

SEQ ID NO: 36657 - RNA, 19 nt, synthetic construct
  source 1..19: mol_type = other RNA
cctgcagaccaggccaaag

SEQ ID NO: 36658 - RNA, 19 nt, synthetic construct
  source 1..19: mol_type = other RNA
gccgtggaggatgctgcac

SEQ ID NO: 36659 - RNA, 19 nt, synthetic construct
  source 1..19: mol_type = other RNA
ggtggtggtggtcagcact

SEQ ID NO: 36660 - RNA, 19 nt, synthetic construct
  source 1..19: mol_type = other RNA
ggtggtggtggtcagcact

SEQ ID NO: 36661 - RNA, 19 nt, synthetic construct
  source 1..19: mol_type = other RNA
ggtggtggtggtcagcact

SEQ ID NO: 36662 - RNA, 19 nt, synthetic construct
  source 1..19: mol_type = other RNA
ggtggtggtggtcagcact

SEQ ID NO: 36663 - RNA, 19 nt, synthetic construct
  source 1..19: mol_type = other RNA
gcccgccgagctgttgctg

SEQ ID NO: 36664 - RNA, 19 nt, synthetic construct
  source 1..19: mol_type = other RNA
ggggccgtggaggatgctg

SEQ ID NO: 36665 - RNA, 19 nt, synthetic construct
  source 1..19: mol_type = other RNA
ggtggggccgtggaggatg

SEQ ID NO: 36666 - RNA, 19 nt, synthetic construct
  source 1..19: mol_type = other RNA
aggatctggtcctcagggc

SEQ ID NO: 36667 - RNA, 19 nt, synthetic construct
  source 1..19: mol_type = other RNA
cagctgcagccccaggcct

SEQ ID NO: 36668 - RNA, 19 nt, synthetic construct
  source 1..19: mol_type = other RNA
gcagctgcagccccaggcc

SEQ ID NO: 36669 - RNA, 19 nt, synthetic construct
  source 1..19: mol_type = other RNA
agcagctgcagccccaggc

SEQ ID NO: 36670 - RNA, 19 nt, synthetic construct
  source 1..19: mol_type = other RNA
tgatggtctctccaggctt

SEQ ID NO: 36671 - RNA, 19 nt, synthetic construct
  source 1..19: mol_type = other RNA
cctgctggcccagctcctc

SEQ ID NO: 36672 - RNA, 19 nt, synthetic construct
  source 1..19: mol_type = other RNA
gggtggtggtggtggtggc

SEQ ID NO: 36673 - RNA, 19 nt, synthetic construct
  source 1..19: mol_type = other RNA
tgggtggtggtggtggtgg

SEQ ID NO: 36674 - RNA, 19 nt, synthetic construct
  source 1..19: mol_type = other RNA
ctgggtggtggtggtggtg

SEQ ID NO: 36675 - RNA, 19 nt, synthetic construct
  source 1..19: mol_type = other RNA
gtggtgcccagggaggagg

SEQ ID NO: 36676 - RNA, 19 nt, synthetic construct
  source 1..19: mol_type = other RNA
gaggaagtggctttggaac

SEQ ID NO: 36677 - RNA, 19 nt, synthetic construct
  source 1..19: mol_type = other RNA
tgggtgtggctgtggctgt

SEQ ID NO: 36678 - RNA, 19 nt, synthetic construct
  source 1..19: mol_type = other RNA
gtggtgcccagggaggagg

SEQ ID NO: 36679 - RNA, 19 nt, synthetic construct
  source 1..19: mol_type = other RNA
gaggaagtggctttggaac

SEQ ID NO: 36680 - RNA, 19 nt, synthetic construct
  source 1..19: mol_type = other RNA
gtggtgcccagggaggagg

SEQ ID NO: 36681 - RNA, 19 nt, synthetic construct
  source 1..19: mol_type = other RNA
ggcggcagcggcagtggca

SEQ ID NO: 36682 - RNA, 19 nt, synthetic construct
  source 1..19: mol_type = other RNA
accggggctgcggggctgg

SEQ ID NO: 36683 - RNA, 19 nt, synthetic construct
  source 1..19: mol_type = other RNA
tgtggtgggcatggggtgg

SEQ ID NO: 36684 - RNA, 21 nt, synthetic construct
  source 1..21: mol_type = other RNA
cctcaatgacgcgggcgcctg

SEQ ID NO: 36685 - RNA, 21 nt, synthetic construct
  source 1..21: mol_type = other RNA
gacgtgggctgtttcagcaca

SEQ ID NO: 36686 - RNA, 21 nt, synthetic construct
  source 1..21: mol_type = other RNA
tgtccgcgaggtctgccgctg

SEQ ID NO: 36687 - RNA, 21 nt, synthetic construct
  source 1..21: mol_type = other RNA
gacgttgagtcctacgataag

SEQ ID NO: 36688 - RNA, 21 nt, synthetic construct
  source 1..21: mol_type = other RNA
actatgagtgcgagtgcatct

SEQ ID NO: 36689 - RNA, 21 nt, synthetic construct
  source 1..21: mol_type = other RNA
gctacgttctgtccaagaaat

SEQ ID NO: 36690 - RNA, 21 nt, synthetic construct
  source 1..21: mol_type = other RNA
tgaacaacttggaggggacgt

SEQ ID NO: 36691 - RNA, 21 nt, synthetic construct
  source 1..21: mol_type = other RNA
tccactatgagtgcgagtgca

SEQ ID NO: 36692 - RNA, 21 nt, synthetic construct
  source 1..21: mol_type = other RNA
gcggtttcagcaagaacggcg

SEQ ID NO: 36693 - RNA, 21 nt, synthetic construct
  source 1..21: mol_type = other RNA
agaacggcgtgcttgtgtctg

SEQ ID NO: 36694 - RNA, 21 nt, synthetic construct
  source 1..21: mol_type = other RNA
ctgaccccgctccagtttggg

SEQ ID NO: 36695 - RNA, 21 nt, synthetic construct
  source 1..21: mol_type = other RNA
gtcacctgcgtgaacaagcac

SEQ ID NO: 36696 - RNA, 21 nt, synthetic construct
  source 1..21: mol_type = other RNA
cctttgtggaatactcacgcc

SEQ ID NO: 36697 - RNA, 21 nt, synthetic construct
  source 1..21: mol_type = other RNA
ggcgcagccttcgccaacacc

SEQ ID NO: 36698 - RNA, 21 nt, synthetic construct
  source 1..21: mol_type = other RNA
ggacgttgagtcctacgataa

SEQ ID NO: 36699 - RNA, 21 nt, synthetic construct
  source 1..21: mol_type = other RNA
tcacggcaccgtgctggctcc

SEQ ID NO: 36700 - RNA, 21 nt, synthetic construct
  source 1..21: mol_type = other RNA
gttgactccaccaagtactac

SEQ ID NO: 36701 - RNA, 21 nt, synthetic construct
  source 1..21: mol_type = other RNA
caagtccatggatatcgtcct

SEQ ID NO: 36702 - RNA, 21 nt, synthetic construct
  source 1..21: mol_type = other RNA
cagctacgttctgtccaagaa

SEQ ID NO: 36703 - RNA, 21 nt, synthetic construct
  source 1..21: mol_type = other RNA
tttgacggcacctcttacacc

SEQ ID NO: 36704 - RNA, 21 nt, synthetic construct
  source 1..21: mol_type = other RNA
ctgtttgaccaaattccggtg

SEQ ID NO: 36705 - RNA, 21 nt, synthetic construct
  source 1..21: mol_type = other RNA
ccctcgagcttcttcatcgtg

SEQ ID NO: 36706 - RNA, 21 nt, synthetic construct
  source 1..21: mol_type = other RNA
tattccacctttgacggcacc

SEQ ID NO: 36707 - RNA, 21 nt, synthetic construct
  source 1..21: mol_type = other RNA
acggcgtctgcaccaagtaca

SEQ ID NO: 36708 - RNA, 21 nt, synthetic construct
  source 1..21: mol_type = other RNA
gttcatccgactgcaccagga

SEQ ID NO: 36709 - RNA, 21 nt, synthetic construct
  source 1..21: mol_type = other RNA
actccaccaagtactacgagg

SEQ ID NO: 36710 - RNA, 21 nt, synthetic construct
  source 1..21: mol_type = other RNA
gtgacttccactatgagtgcg

SEQ ID NO: 36711 - RNA, 21 nt, synthetic construct
  source 1..21: mol_type = other RNA
cctccactccggggacgacct

SEQ ID NO: 36712 - RNA, 21 nt, synthetic construct
  source 1..21: mol_type = other RNA
cctccactccggggacgacct

SEQ ID NO: 36713 - RNA, 21 nt, synthetic construct
  source 1..21: mol_type = other RNA
cctccactccggggacgacct

SEQ ID NO: 36714 - RNA, 21 nt, synthetic construct
  source 1..21: mol_type = other RNA
ttgaccaaattccggtgagca

SEQ ID NO: 36715 - RNA, 21 nt, synthetic construct
  source 1..21: mol_type = other RNA
gccggaaccccagtgggcact

SEQ ID NO: 36716 - RNA, 21 nt, synthetic construct
  source 1..21: mol_type = other RNA
tgaaatccgtgtgttctgctg

SEQ ID NO: 36717 - RNA, 21 nt, synthetic construct
  source 1..21: mol_type = other RNA
tgaaatccgtgtgttctgctg

SEQ ID NO: 36718 - RNA, 21 nt, synthetic construct
  source 1..21: mol_type = other RNA
tgaaatccgtgtgttctgctg

SEQ ID NO: 36719 - RNA, 21 nt, synthetic construct
  source 1..21: mol_type = other RNA
cgaatacgtgccctgtggccc

SEQ ID NO: 36720 - RNA, 21 nt, synthetic construct
  source 1..21: mol_type = other RNA
actcacgccagtgcgcccacg

SEQ ID NO: 36721 - RNA, 21 nt, synthetic construct
  source 1..21: mol_type = other RNA
cggcgtctgcaccaagtacat

SEQ ID NO: 36722 - RNA, 21 nt, synthetic construct
  source 1..21: mol_type = other RNA
cgctgaccacgagcctggcgc

SEQ ID NO: 36723 - RNA, 21 nt, synthetic construct
  source 1..21: mol_type = other RNA
cactacaagtccatggatatc

SEQ ID NO: 36724 - RNA, 21 nt, synthetic construct
  source 1..21: mol_type = other RNA
gtgttcatccgactgcaccag

SEQ ID NO: 36725 - RNA, 21 nt, synthetic construct
  source 1..21: mol_type = other RNA
agcggtttcagcaagaacggc

SEQ ID NO: 36726 - RNA, 21 nt, synthetic construct
  source 1..21: mol_type = other RNA
aacaacttggaggggacgttg

SEQ ID NO: 36727 - RNA, 21 nt, synthetic construct
  source 1..21: mol_type = other RNA
ccaaattccggtgagcagcgg

SEQ ID NO: 36728 - RNA, 21 nt, synthetic construct
  source 1..21: mol_type = other RNA
gccaggtgcgtgggtgacaac

SEQ ID NO: 36729 - RNA, 21 nt, synthetic construct
  source 1..21: mol_type = other RNA
ttcctcaatgacgcgggcgcc

SEQ ID NO: 36730 - RNA, 21 nt, synthetic construct
  source 1..21: mol_type = other RNA
ggacgtcatctacaacaccac

SEQ ID NO: 36731 - RNA, 21 nt, synthetic construct
  source 1..21: mol_type = other RNA
accccgctccagtttgggaac

SEQ ID NO: 36732 - RNA, 21 nt, synthetic construct
  source 1..21: mol_type = other RNA
tcatccgactgcaccaggact

SEQ ID NO: 36733 - RNA, 21 nt, synthetic construct
  source 1..21: mol_type = other RNA
agaactgccagagctgtaact

SEQ ID NO: 36734 - RNA, 21 nt, synthetic construct
  source 1..21: mol_type = other RNA
aactacaggatccgggtcctc

SEQ ID NO: 36735 - RNA, 21 nt, synthetic construct
  source 1..21: mol_type = other RNA
cctttgacggcacctcttaca

SEQ ID NO: 36736 - RNA, 21 nt, synthetic construct
  source 1..21: mol_type = other RNA
cgggaccttccgcatcgtcac

SEQ ID NO: 36737 - RNA, 21 nt, synthetic construct
  source 1..21: mol_type = other RNA
acgttgagtcctacgataaga

SEQ ID NO: 36738 - RNA, 21 nt, synthetic construct
  source 1..21: mol_type = other RNA
ttgacggcacctcttacacct

SEQ ID NO: 36739 - RNA, 21 nt, synthetic construct
  source 1..21: mol_type = other RNA
caccctcgagcttcttcatcg

SEQ ID NO: 36740 - RNA, 21 nt, synthetic construct
  source 1..21: mol_type = other RNA
agctgccttacagccgcactg

SEQ ID NO: 36741 - RNA, 21 nt, synthetic construct
  source 1..21: mol_type = other RNA
aagtccatggatatcgtcctc

SEQ ID NO: 36742 - RNA, 21 nt, synthetic construct
  source 1..21: mol_type = other RNA
tttgtggaatactcacgccag

SEQ ID NO: 36743 - RNA, 21 nt, synthetic construct
  source 1..21: mol_type = other RNA
tgttctgctgcaactacggcc

SEQ ID NO: 36744 - RNA, 21 nt, synthetic construct
  source 1..21: mol_type = other RNA
tgttctgctgcaactacggcc

SEQ ID NO: 36745 - RNA, 21 nt, synthetic construct
  source 1..21: mol_type = other RNA
gatgaagtgcgtggcccagtg

SEQ ID NO: 36746 - RNA, 21 nt, synthetic construct
  source 1..21: mol_type = other RNA
cacctttgacggcacctctta

SEQ ID NO: 36747 - RNA, 21 nt, synthetic construct
  source 1..21: mol_type = other RNA
agcaagaacggcgtgcttgtg

SEQ ID NO: 36748 - RNA, 21 nt, synthetic construct
  source 1..21: mol_type = other RNA
gcctgagtgaggccgacgtca

SEQ ID NO: 36749 - RNA, 21 nt, synthetic construct
  source 1..21: mol_type = other RNA
ccagaaccaggctgacgactt

SEQ ID NO: 36750 - RNA, 21 nt, synthetic construct
  source 1..21: mol_type = other RNA
ctattccacctttgacggcac

SEQ ID NO: 36751 - RNA, 21 nt, synthetic construct
  source 1..21: mol_type = other RNA
acctttgacggcacctcttac

SEQ ID NO: 36752 - RNA, 21 nt, synthetic construct
  source 1..21: mol_type = other RNA
agcctcaggaaaaccggctgc

SEQ ID NO: 36753 - RNA, 21 nt, synthetic construct
  source 1..21: mol_type = other RNA
gcacggtggccaggtgcgtgg

SEQ ID NO: 36754 - RNA, 21 nt, synthetic construct
  source 1..21: mol_type = other RNA
gttgggccaggtcgtggaatg

SEQ ID NO: 36755 - RNA, 21 nt, synthetic construct
  source 1..21: mol_type = other RNA
gttgggccaggtcgtggaatg

SEQ ID NO: 36756 - RNA, 21 nt, synthetic construct
  source 1..21: mol_type = other RNA
gttgggccaggtcgtggaatg

SEQ ID NO: 36757 - RNA, 21 nt, synthetic construct
  source 1..21: mol_type = other RNA
gttgggccaggtcgtggaatg

SEQ ID NO: 36758 - RNA, 21 nt, synthetic construct
  source 1..21: mol_type = other RNA
ctcttccacaacaacaccgag

SEQ ID NO: 36759 - RNA, 21 nt, synthetic construct
  source 1..21: mol_type = other RNA
accaacaaccagagggacgac

SEQ ID NO: 36760 - RNA, 21 nt, synthetic construct
  source 1..21: mol_type = other RNA
gatgagtgtggctgcacgccc

SEQ ID NO: 36761 - RNA, 21 nt, synthetic construct
  source 1..21: mol_type = other RNA
tacaagtccatggatatcgtc

SEQ ID NO: 36762 - RNA, 21 nt, synthetic construct
  source 1..21: mol_type = other RNA
gaatgagaactacgcccggca

SEQ ID NO: 36763 - RNA, 21 nt, synthetic construct
  source 1..21: mol_type = other RNA
ccgagaacatcccctgtggga

SEQ ID NO: 36764 - RNA, 21 nt, synthetic construct
  source 1..21: mol_type = other RNA
gaggactaccccaagtctgaa

SEQ ID NO: 36765 - RNA, 21 nt, synthetic construct
  source 1..21: mol_type = other RNA
agtcctacgataagatcaggg

SEQ ID NO: 36766 - RNA, 21 nt, synthetic construct
  source 1..21: mol_type = other RNA
tttcagcaagaacggcgtgct

SEQ ID NO: 36767 - RNA, 21 nt, synthetic construct
  source 1..21: mol_type = other RNA
cggggatggccacttcatcac

SEQ ID NO: 36768 - RNA, 21 nt, synthetic construct
  source 1..21: mol_type = other RNA
gtgagctttgttccacccgtc

SEQ ID NO: 36769 - RNA, 21 nt, synthetic construct
  source 1..21: mol_type = other RNA
gactaccccaagtctgaacaa

SEQ ID NO: 36770 - RNA, 21 nt, synthetic construct
  source 1..21: mol_type = other RNA
acctatgaggacaggacctac

SEQ ID NO: 36771 - RNA, 21 nt, synthetic construct
  source 1..21: mol_type = other RNA
accctcgagcttcttcatcgt

SEQ ID NO: 36772 - RNA, 21 nt, synthetic construct
  source 1..21: mol_type = other RNA
gacttccactatgagtgcgag

SEQ ID NO: 36773 - RNA, 21 nt, synthetic construct
  source 1..21: mol_type = other RNA
gccaggtcgtggaatgcagcc

SEQ ID NO: 36774 - RNA, 21 nt, synthetic construct
  source 1..21: mol_type = other RNA
gccaggtcgtggaatgcagcc

SEQ ID NO: 36775 - RNA, 21 nt, synthetic construct
  source 1..21: mol_type = other RNA
gccaggtcgtggaatgcagcc

SEQ ID NO: 36776 - RNA, 21 nt, synthetic construct
  source 1..21: mol_type = other RNA
gccaggtcgtggaatgcagcc

SEQ ID NO: 36777 - RNA, 21 nt, synthetic construct
  source 1..21: mol_type = other RNA
gtggacagagtggtttgacgt

SEQ ID NO: 36778 - RNA, 21 nt, synthetic construct
  source 1..21: mol_type = other RNA
agaatgagaactacgcccggc

SEQ ID NO: 36779 - RNA, 21 nt, synthetic construct
  source 1..21: mol_type = other RNA
gagaactgccagagctgtaac

SEQ ID NO: 36780 - RNA, 21 nt, synthetic construct
  source 1..21: mol_type = other RNA
ttcaagatgtgctacaactac

SEQ ID NO: 36781 - RNA, 21 nt, synthetic construct
  source 1..21: mol_type = other RNA
ggggacgttgagtcctacgat

SEQ ID NO: 36782 - RNA, 21 nt, synthetic construct
  source 1..21: mol_type = other RNA
aactgcacctatgtcctcatg

SEQ ID NO: 36783 - RNA, 21 nt, synthetic construct
  source 1..21: mol_type = other RNA
cagtgcgcccacgcggggggc

SEQ ID NO: 36784 - RNA, 21 nt, synthetic construct
  source 1..21: mol_type = other RNA
gtggtttgatgaggactaccc

SEQ ID NO: 36785 - RNA, 21 nt, synthetic construct
  source 1..21: mol_type = other RNA
atgggcccacggagcagtgcc

SEQ ID NO: 36786 - RNA, 21 nt, synthetic construct
  source 1..21: mol_type = other RNA
tgcacaacgaggccacctaca

SEQ ID NO: 36787 - RNA, 21 nt, synthetic construct
  source 1..21: mol_type = other RNA
acgacgcgggcctgtgtgtgt

SEQ ID NO: 36788 - RNA, 21 nt, synthetic construct
  source 1..21: mol_type = other RNA
gacgtcatctacaacaccacc

SEQ ID NO: 36789 - RNA, 21 nt, synthetic construct
  source 1..21: mol_type = other RNA
ggacttcaacgtccagctacg

SEQ ID NO: 36790 - RNA, 21 nt, synthetic construct
  source 1..21: mol_type = other RNA
tgcacctatgaggacaggacc

SEQ ID NO: 36791 - RNA, 21 nt, synthetic construct
  source 1..21: mol_type = other RNA
aacttggaggggacgttgagt

SEQ ID NO: 36792 - RNA, 21 nt, synthetic construct
  source 1..21: mol_type = other RNA
accctgttcacaccctcgagc

SEQ ID NO: 36793 - RNA, 21 nt, synthetic construct
  source 1..21: mol_type = other RNA
ccctgttcacaccctcgagct

SEQ ID NO: 36794 - RNA, 21 nt, synthetic construct
  source 1..21: mol_type = other RNA
cgcatcgtcaccgagaacatc

SEQ ID NO: 36795 - RNA, 21 nt, synthetic construct
  source 1..21: mol_type = other RNA
cctggcggactccggacacct

SEQ ID NO: 36796 - RNA, 21 nt, synthetic construct
  source 1..21: mol_type = other RNA
aactactatgacgtcggtgca

SEQ ID NO: 36797 - RNA, 21 nt, synthetic construct
  source 1..21: mol_type = other RNA
cacgacccgctgtcaaccgaa

SEQ ID NO: 36798 - RNA, 21 nt, synthetic construct
  source 1..21: mol_type = other RNA
acggaaactactatgacgtcg

SEQ ID NO: 36799 - RNA, 21 nt, synthetic construct
  source 1..21: mol_type = other RNA
aataagaccgaccgagccggc

SEQ ID NO: 36800 - RNA, 21 nt, synthetic construct
  source 1..21: mol_type = other RNA
acggccactacgatcacggcc

SEQ ID NO: 36801 - RNA, 21 nt, synthetic construct
  source 1..21: mol_type = other RNA
acggccactacgatcacggcc

SEQ ID NO: 36802 - RNA, 21 nt, synthetic construct
  source 1..21: mol_type = other RNA
acggccactacgatcacggcc

SEQ ID NO: 36803 - RNA, 21 nt, synthetic construct
  source 1..21: mol_type = other RNA
acggccactacgatcacggcc

SEQ ID NO: 36804 - RNA, 21 nt, synthetic construct
  source 1..21: mol_type = other RNA
cgacccgctgtcaaccgaagt

SEQ ID NO: 36805 - RNA, 21 nt, synthetic construct
  source 1..21: mol_type = other RNA
acgaccactgcaggggacgtg

SEQ ID NO: 36806 - RNA, 21 nt, synthetic construct
  source 1..21: mol_type = other RNA
tgctcgcgcctgaccgatccc

SEQ ID NO: 36807 - RNA, 21 nt, synthetic construct
  source 1..21: mol_type = other RNA
ctaccaaagtgccgactacca

SEQ ID NO: 36808 - RNA, 21 nt, synthetic construct
  source 1..21: mol_type = other RNA
ctaccaaagtgccgactacca

SEQ ID NO: 36809 - RNA, 21 nt, synthetic construct
  source 1..21: mol_type = other RNA
ctaccaaagtgccgactacca

SEQ ID NO: 36810 - RNA, 21 nt, synthetic construct
  source 1..21: mol_type = other RNA
ctgcgaatacgtgccctgtgg

SEQ ID NO: 36811 - RNA, 21 nt, synthetic construct
  source 1..21: mol_type = other RNA
cactaccaaagtgccgactac

SEQ ID NO: 36812 - RNA, 21 nt, synthetic construct
  source 1..21: mol_type = other RNA
actaccaaagtgccgactacc

SEQ ID NO: 36813 - RNA, 21 nt, synthetic construct
  source 1..21: mol_type = other RNA
cactaccaaagtgccgactac

SEQ ID NO: 36814 - RNA, 21 nt, synthetic construct
  source 1..21: mol_type = other RNA
actaccaaagtgccgactacc

SEQ ID NO: 36815 - RNA, 21 nt, synthetic construct
  source 1..21: mol_type = other RNA
cactaccaaagtgccgactac

SEQ ID NO: 36816 - RNA, 21 nt, synthetic construct
  source 1..21: mol_type = other RNA
actaccaaagtgccgactacc

SEQ ID NO: 36817 - RNA, 21 nt, synthetic construct
  source 1..21: mol_type = other RNA
gacccgatgggtttcctaaat

SEQ ID NO: 36818 - RNA, 21 nt, synthetic construct
  source 1..21: mol_type = other RNA
cacacccccagtgccgaacac

SEQ ID NO: 36819 - RNA, 21 nt, synthetic construct
  source 1..21: mol_type = other RNA
cacacccccagtgccgaacac

SEQ ID NO: 36820 - RNA, 21 nt, synthetic construct
  source 1..21: mol_type = other RNA
cacacccccagtgccgaacac

SEQ ID NO: 36821 - RNA, 21 nt, synthetic construct
  source 1..21: mol_type = other RNA
cacacccccagtgccgaacac

SEQ ID NO: 36822 - RNA, 21 nt, synthetic construct
  source 1..21: mol_type = other RNA
gtgctcgcgcctgaccgatcc

SEQ ID NO: 36823 - RNA, 21 nt, synthetic construct
  source 1..21: mol_type = other RNA
gatacgctacatggggatctt

SEQ ID NO: 36824 - RNA, 21 nt, synthetic construct
  source 1..21: mol_type = other RNA
ggtgtccccctgcgggagttg

SEQ ID NO: 36825 - RNA, 21 nt, synthetic construct
  source 1..21: mol_type = other RNA
cagtgcgctcacagccttgag

SEQ ID NO: 36826 - RNA, 21 nt, synthetic construct
  source 1..21: mol_type = other RNA
gggacgttgagtcctacgata

SEQ ID NO: 36827 - RNA, 21 nt, synthetic construct
  source 1..21: mol_type = other RNA
ggtgtccccctgcgggagttg

SEQ ID NO: 36828 - RNA, 21 nt, synthetic construct
  source 1..21: mol_type = other RNA
ggtgtccccctgcgggagttg

SEQ ID NO: 36829 - RNA, 21 nt, synthetic construct
  source 1..21: mol_type = other RNA
gccaacgtcacctgcgtgaac

SEQ ID NO: 36830 - RNA, 21 nt, synthetic construct
  source 1..21: mol_type = other RNA
ggacgcactggagtttgggaa

SEQ ID NO: 36831 - RNA, 21 nt, synthetic construct
  source 1..21: mol_type = other RNA
ctacgataagatcagggccgc

SEQ ID NO: 36832 - RNA, 21 nt, synthetic construct
  source 1..21: mol_type = other RNA
caataagaccgaccgagccgg

SEQ ID NO: 36833 - RNA, 21 nt, synthetic construct
  source 1..21: mol_type = other RNA
ctactatgacgtcggtgcaag

SEQ ID NO: 36834 - RNA, 21 nt, synthetic construct
  source 1..21: mol_type = other RNA
cagcctggtgtccccctgcgg

SEQ ID NO: 36835 - RNA, 21 nt, synthetic construct
  source 1..21: mol_type = other RNA
cagcctggtgtccccctgcgg

SEQ ID NO: 36836 - RNA, 21 nt, synthetic construct
  source 1..21: mol_type = other RNA
cagcctggtgtccccctgcgg

SEQ ID NO: 36837 - RNA, 21 nt, synthetic construct
  source 1..21: mol_type = other RNA
cagaaccaggctgacgacttc

SEQ ID NO: 36838 - RNA, 21 nt, synthetic construct
  source 1..21: mol_type = other RNA
atgtacgggtgggaagctaag

SEQ ID NO: 36839 - RNA, 21 nt, synthetic construct
  source 1..21: mol_type = other RNA
tacgctacatggggatcttcc

SEQ ID NO: 36840 - RNA, 21 nt, synthetic construct
  source 1..21: mol_type = other RNA
gcgaatacgtgccctgtggcc

SEQ ID NO: 36841 - RNA, 21 nt, synthetic construct
  source 1..21: mol_type = other RNA
gctacgcctacgtggtggatg

SEQ ID NO: 36842 - RNA, 21 nt, synthetic construct
  source 1..21: mol_type = other RNA
gcacgacccgctgtcaaccga

SEQ ID NO: 36843 - RNA, 21 nt, synthetic construct
  source 1..21: mol_type = other RNA
caccggtaccacccagcactc

SEQ ID NO: 36844 - RNA, 21 nt, synthetic construct
  source 1..21: mol_type = other RNA
acggcacgcacgcttccagtg

SEQ ID NO: 36845 - RNA, 21 nt, synthetic construct
  source 1..21: mol_type = other RNA
caccggtaccacccagcactc

SEQ ID NO: 36846 - RNA, 21 nt, synthetic construct
  source 1..21: mol_type = other RNA
caccggtaccacccagcactc

SEQ ID NO: 36847 - RNA, 21 nt, synthetic construct
  source 1..21: mol_type = other RNA
caacgtccagctacgccgagg

SEQ ID NO: 36848 - RNA, 21 nt, synthetic construct
  source 1..21: mol_type = other RNA
tacgccgaggcctagtgggct

SEQ ID NO: 36849 - RNA, 21 nt, synthetic construct
  source 1..21: mol_type = other RNA
tgccttacagccgcactggcc

SEQ ID NO: 36850 - RNA, 21 nt, synthetic construct
  source 1..21: mol_type = other RNA
tctacgacctgcatggtgact

SEQ ID NO: 36851 - RNA, 21 nt, synthetic construct
  source 1..21: mol_type = other RNA
gcggcgtgttcctcaactcca

SEQ ID NO: 36852 - RNA, 21 nt, synthetic construct
  source 1..21: mol_type = other RNA
ccagcgctacgcctacgtggt

SEQ ID NO: 36853 - RNA, 21 nt, synthetic construct
  source 1..21: mol_type = other RNA
ggcgatcgctacagctttgaa

SEQ ID NO: 36854 - RNA, 21 nt, synthetic construct
  source 1..21: mol_type = other RNA
cgatcgctacagctttgaagg

SEQ ID NO: 36855 - RNA, 21 nt, synthetic construct
  source 1..21: mol_type = other RNA
gaccggaagaccagcgtgttc

SEQ ID NO: 36856 - RNA, 21 nt, synthetic construct
  source 1..21: mol_type = other RNA
cacgactacgagctgcgggtt

SEQ ID NO: 36857 - RNA, 21 nt, synthetic construct
  source 1..21: mol_type = other RNA
acgacggggagcttgggcaca

SEQ ID NO: 36858 - RNA, 21 nt, synthetic construct
  source 1..21: mol_type = other RNA
cacgagcctggcgccaacact

SEQ ID NO: 36859 - RNA, 21 nt, synthetic construct
  source 1..21: mol_type = other RNA
gagacgacaatgagccccttg

SEQ ID NO: 36860 - RNA, 21 nt, synthetic construct
  source 1..21: mol_type = other RNA
gacgacaatgagccccttgac

SEQ ID NO: 36861 - RNA, 21 nt, synthetic construct
  source 1..21: mol_type = other RNA
ccagcgttacacccatcccct

SEQ ID NO: 36862 - RNA, 21 nt, synthetic construct
  source 1..21: mol_type = other RNA
cagcgttacacccatcccctc

SEQ ID NO: 36863 - RNA, 21 nt, synthetic construct
  source 1..21: mol_type = other RNA
ccagcgttacacccatcccct

SEQ ID NO: 36864 - RNA, 21 nt, synthetic construct
  source 1..21: mol_type = other RNA
cagcgttacacccatcccctc

SEQ ID NO: 36865 - RNA, 21 nt, synthetic construct
  source 1..21: mol_type = other RNA
gtgtcggacccgagccagccc

SEQ ID NO: 36866 - RNA, 21 nt, synthetic construct
  source 1..21: mol_type = other RNA
cactactgcacggcctctgcc

SEQ ID NO: 36867 - RNA, 21 nt, synthetic construct
  source 1..21: mol_type = other RNA
ttacgcagagctctgccgcgc

SEQ ID NO: 36868 - RNA, 21 nt, synthetic construct
  source 1..21: mol_type = other RNA
ccgtcccggcttcgtaaccgt

SEQ ID NO: 36869 - RNA, 21 nt, synthetic construct
  source 1..21: mol_type = other RNA
cccggcttcgtaaccgtgacc

SEQ ID NO: 36870 - RNA, 21 nt, synthetic construct
  source 1..21: mol_type = other RNA
acggtgtgcgtgtgcaacaca

SEQ ID NO: 36871 - RNA, 21 nt, synthetic construct
  source 1..21: mol_type = other RNA
tgtgcgggcctatgtgtccct

SEQ ID NO: 36872 - RNA, 21 nt, synthetic construct
  source 1..21: mol_type = other RNA
acggattccagctggccacgt

SEQ ID NO: 36873 - RNA, 21 nt, synthetic construct
  source 1..21: mol_type = other RNA
gagcctcaggaaaaccggctg

SEQ ID NO: 36874 - RNA, 21 nt, synthetic construct
  source 1..21: mol_type = other RNA
gccagtgcgcccacgcggggg

SEQ ID NO: 36875 - RNA, 21 nt, synthetic construct
  source 1..21: mol_type = other RNA
catcgagtgccgggcggcgca

SEQ ID NO: 36876 - RNA, 21 nt, synthetic construct
  source 1..21: mol_type = other RNA
aaccgaaaagaccaccctatg

SEQ ID NO: 36877 - RNA, 21 nt, synthetic construct
  source 1..21: mol_type = other RNA
cttcaacgtccagctacgccg

SEQ ID NO: 36878 - RNA, 21 nt, synthetic construct
  source 1..21: mol_type = other RNA
gcgtagccggtccgtggtggg

SEQ ID NO: 36879 - RNA, 21 nt, synthetic construct
  source 1..21: mol_type = other RNA
cactaccaaagtgctgactac

SEQ ID NO: 36880 - RNA, 21 nt, synthetic construct
  source 1..21: mol_type = other RNA
accgaaaagaccaccctatgg

SEQ ID NO: 36881 - RNA, 21 nt, synthetic construct
  source 1..21: mol_type = other RNA
gctacgccgaggcctagtggg

SEQ ID NO: 36882 - RNA, 21 nt, synthetic construct
  source 1..21: mol_type = other RNA
cctcgagcttcttcatcgtgg

SEQ ID NO: 36883 - RNA, 21 nt, synthetic construct
  source 1..21: mol_type = other RNA
ccggagcgtccaagtactcag

SEQ ID NO: 36884 - RNA, 21 nt, synthetic construct
  source 1..21: mol_type = other RNA
cccgctctgtcacgactacga

SEQ ID NO: 36885 - RNA, 21 nt, synthetic construct
  source 1..21: mol_type = other RNA
gcgcgtgagctttgttccacc

SEQ ID NO: 36886 - RNA, 21 nt, synthetic construct
  source 1..21: mol_type = other RNA
actactatgacgtcggtgcaa

SEQ ID NO: 36887 - RNA, 21 nt, synthetic construct
  source 1..21: mol_type = other RNA
tttgcggagtgccacgcactg

SEQ ID NO: 36888 - RNA, 21 nt, synthetic construct
  source 1..21: mol_type = other RNA
tctacggggttggtgcaacct

SEQ ID NO: 36889 - RNA, 21 nt, synthetic construct
  source 1..21: mol_type = other RNA
gctgtgttcgtacaatggcac

SEQ ID NO: 36890 - RNA, 21 nt, synthetic construct
  source 1..21: mol_type = other RNA
gactacgagctgcgggttctc

SEQ ID NO: 36891 - RNA, 21 nt, synthetic construct
  source 1..21: mol_type = other RNA
ccgagcatccggtcgacggcg

SEQ ID NO: 36892 - RNA, 21 nt, synthetic construct
  source 1..21: mol_type = other RNA
acaagatacgctacatgggga

SEQ ID NO: 36893 - RNA, 21 nt, synthetic construct
  source 1..21: mol_type = other RNA
ctgtcacgactacgagctgcg

SEQ ID NO: 36894 - RNA, 21 nt, synthetic construct
  source 1..21: mol_type = other RNA
gataagatcagggccgctgga

SEQ ID NO: 36895 - RNA, 21 nt, synthetic construct
  source 1..21: mol_type = other RNA
acgcacgcttccagtgtggat

SEQ ID NO: 36896 - RNA, 21 nt, synthetic construct
  source 1..21: mol_type = other RNA
cagctaccagctttacaccca

SEQ ID NO: 36897 - RNA, 21 nt, synthetic construct
  source 1..21: mol_type = other RNA
cagctaccagctttacaccca

SEQ ID NO: 36898 - RNA, 21 nt, synthetic construct
  source 1..21: mol_type = other RNA
cgccgcagcctacgagtagcc

SEQ ID NO: 36899 - RNA, 21 nt, synthetic construct
  source 1..21: mol_type = other RNA
gactttgccacgcgtagccgg

SEQ ID NO: 36900 - RNA, 21 nt, synthetic construct
  source 1..21: mol_type = other RNA
actttgccacgcgtagccggt

SEQ ID NO: 36901 - RNA, 21 nt, synthetic construct
  source 1..21: mol_type = other RNA
caacgagttctatgcccacaa

SEQ ID NO: 36902 - RNA, 21 nt, synthetic construct
  source 1..21: mol_type = other RNA
aacggcgtgcttgtgtctgtg

SEQ ID NO: 36903 - RNA, 21 nt, synthetic construct
  source 1..21: mol_type = other RNA
agaactacgcccggcactggt

SEQ ID NO: 36904 - RNA, 21 nt, synthetic construct
  source 1..21: mol_type = other RNA
gcgtctgcaccaagtacatgc

SEQ ID NO: 36905 - RNA, 21 nt, synthetic construct
  source 1..21: mol_type = other RNA
cactatgagtgcgagtgcatc

SEQ ID NO: 36906 - RNA, 21 nt, synthetic construct
  source 1..21: mol_type = other RNA
aaattccggtgagcagcggtt

SEQ ID NO: 36907 - RNA, 21 nt, synthetic construct
  source 1..21: mol_type = other RNA
tccgcatcgtcaccgagaaca

SEQ ID NO: 36908 - RNA, 21 nt, synthetic construct
  source 1..21: mol_type = other RNA
caacgaggccacctacaagcc

SEQ ID NO: 36909 - RNA, 21 nt, synthetic construct
  source 1..21: mol_type = other RNA
tgcgtgaacgacgcgtgtgcc

SEQ ID NO: 36910 - RNA, 21 nt, synthetic construct
  source 1..21: mol_type = other RNA
gcgtgaacgacgcgtgtgcct

SEQ ID NO: 36911 - RNA, 21 nt, synthetic construct
  source 1..21: mol_type = other RNA
cgtgaacgacgcgtgtgcctg

SEQ ID NO: 36912 - RNA, 21 nt, synthetic construct
  source 1..21: mol_type = other RNA
tcaacgagttctatgcccaca

SEQ ID NO: 36913 - RNA, 21 nt, synthetic construct
  source 1..21: mol_type = other RNA
tgacggacaacgagaactgcc

SEQ ID NO: 36914 - RNA, 21 nt, synthetic construct
  source 1..21: mol_type = other RNA
acgccaaccagacctgtggcc

SEQ ID NO: 36915 - RNA, 21 nt, synthetic construct
  source 1..21: mol_type = other RNA
ggtccacgaggagacggtgcc

SEQ ID NO: 36916 - RNA, 21 nt, synthetic construct
  source 1..21: mol_type = other RNA
ctttgccacgcgtagccggtc

SEQ ID NO: 36917 - RNA, 21 nt, synthetic construct
  source 1..21: mol_type = other RNA
tgagtcctacgataagatcag

SEQ ID NO: 36918 - RNA, 21 nt, synthetic construct
  source 1..21: mol_type = other RNA
ccacgggaccttccgcatcgt

SEQ ID NO: 36919 - RNA, 21 nt, synthetic construct
  source 1..21: mol_type = other RNA
ttccggtgagcagcggtttca

SEQ ID NO: 36920 - RNA, 21 nt, synthetic construct
  source 1..21: mol_type = other RNA
tcaaccgaagtgtgagtggac

SEQ ID NO: 36921 - RNA, 21 nt, synthetic construct
  source 1..21: mol_type = other RNA
gcatcgtcaccgagaacatcc

SEQ ID NO: 36922 - RNA, 21 nt, synthetic construct
  source 1..21: mol_type = other RNA
tttgaccaaattccggtgagc

SEQ ID NO: 36923 - RNA, 21 nt, synthetic construct
  source 1..21: mol_type = other RNA
aatacgccaaccagacctgtg

SEQ ID NO: 36924 - RNA, 21 nt, synthetic construct
  source 1..21: mol_type = other RNA
tatgagtgcgagtgcatctgc

SEQ ID NO: 36925 - RNA, 21 nt, synthetic construct
  source 1..21: mol_type = other RNA
aggtcgtggaatgcagcctgg

SEQ ID NO: 36926 - RNA, 21 nt, synthetic construct
  source 1..21: mol_type = other RNA
aggtcgtggaatgcagcctgg

SEQ ID NO: 36927 - RNA, 21 nt, synthetic construct
  source 1..21: mol_type = other RNA
aggtcgtggaatgcagcctgg

SEQ ID NO: 36928 - RNA, 21 nt, synthetic construct
  source 1..21: mol_type = other RNA
aggtcgtggaatgcagcctgg

SEQ ID NO: 36929 - RNA, 21 nt, synthetic construct
  source 1..21: mol_type = other RNA
gcgagtgtttctgcacggctg

SEQ ID NO: 36930 - RNA, 21 nt, synthetic construct
  source 1..21: mol_type = other RNA
acgagttctatgcccacaacg

SEQ ID NO: 36931 - RNA, 21 nt, synthetic construct
  source 1..21: mol_type = other RNA
cgtagccggtccgtggtgggg

SEQ ID NO: 36932 - RNA, 21 nt, synthetic construct
  source 1..21: mol_type = other RNA
gggacgcactggagtttggga

SEQ ID NO: 36933 - RNA, 21 nt, synthetic construct
  source 1..21: mol_type = other RNA
cttgatcgccatctgcggaag

SEQ ID NO: 36934 - RNA, 21 nt, synthetic construct
  source 1..21: mol_type = other RNA
cttacgcagagctctgccgcg

SEQ ID NO: 36935 - RNA, 21 nt, synthetic construct
  source 1..21: mol_type = other RNA
aacgtccagctacgccgaggc

SEQ ID NO: 36936 - RNA, 21 nt, synthetic construct
  source 1..21: mol_type = other RNA
tgatcgccatctgcggaagca

SEQ ID NO: 36937 - RNA, 21 nt, synthetic construct
  source 1..21: mol_type = other RNA
cacttcggcctggtgtgcagg

SEQ ID NO: 36938 - RNA, 21 nt, synthetic construct
  source 1..21: mol_type = other RNA
gcactatagccaccgtgatgg

SEQ ID NO: 36939 - RNA, 21 nt, synthetic construct
  source 1..21: mol_type = other RNA
aagaccgaccgagccggctgc

SEQ ID NO: 36940 - RNA, 21 nt, synthetic construct
  source 1..21: mol_type = other RNA
tgtcacgactacgagctgcgg

SEQ ID NO: 36941 - RNA, 21 nt, synthetic construct
  source 1..21: mol_type = other RNA
catcgagacccacgggatggc

SEQ ID NO: 36942 - RNA, 21 nt, synthetic construct
  source 1..21: mol_type = other RNA
ctacccgaagtgcccacccag

SEQ ID NO: 36943 - RNA, 21 nt, synthetic construct
  source 1..21: mol_type = other RNA
tgtacgggtgggaagctaagc

SEQ ID NO: 36944 - RNA, 21 nt, synthetic construct
  source 1..21: mol_type = other RNA
gtgcttaccgccacggccacc

SEQ ID NO: 36945 - RNA, 21 nt, synthetic construct
  source 1..21: mol_type = other RNA
gtgcttaccgccacggccacc

SEQ ID NO: 36946 - RNA, 21 nt, synthetic construct
  source 1..21: mol_type = other RNA
tgtgacgagggttcagtgtcg

SEQ ID NO: 36947 - RNA, 21 nt, synthetic construct
  source 1..21: mol_type = other RNA
ccgcaaccactggatccacgg

SEQ ID NO: 36948 - RNA, 21 nt, synthetic construct
  source 1..21: mol_type = other RNA
cacaccgccacagtgctgacc

SEQ ID NO: 36949 - RNA, 21 nt, synthetic construct
  source 1..21: mol_type = other RNA
acacgggcgatccctgtcccc

SEQ ID NO: 36950 - RNA, 21 nt, synthetic construct
  source 1..21: mol_type = other RNA
cacaccgccacagtgctgacc

SEQ ID NO: 36951 - RNA, 21 nt, synthetic construct
  source 1..21: mol_type = other RNA
acacgggcgatccctgtcccc

SEQ ID NO: 36952 - RNA, 21 nt, synthetic construct
  source 1..21: mol_type = other RNA
gaacgacgcgtgtgcctgcga

SEQ ID NO: 36953 - RNA, 21 nt, synthetic construct
  source 1..21: mol_type = other RNA
ccgacctccaccctgagaaca

SEQ ID NO: 36954 - RNA, 21 nt, synthetic construct
  source 1..21: mol_type = other RNA
ctcgcgcctgaccgatcccaa

SEQ ID NO: 36955 - RNA, 21 nt, synthetic construct
  source 1..21: mol_type = other RNA
ggaccggaagaccagcgtgtt

SEQ ID NO: 36956 - RNA, 21 nt, synthetic construct
  source 1..21: mol_type = other RNA
gacgcgtgtgcctgcgactcg

SEQ ID NO: 36957 - RNA, 21 nt, synthetic construct
  source 1..21: mol_type = other RNA
ccgcatgcgggggctgatgtg

SEQ ID NO: 36958 - RNA, 21 nt, synthetic construct
  source 1..21: mol_type = other RNA
acggcgtgcttgtgtctgtgc

SEQ ID NO: 36959 - RNA, 21 nt, synthetic construct
  source 1..21: mol_type = other RNA
tgagcgtcaccttcaatggcc

SEQ ID NO: 36960 - RNA, 21 nt, synthetic construct
  source 1..21: mol_type = other RNA
ccgagacggtgtgcgtgtgca

SEQ ID NO: 36961 - RNA, 21 nt, synthetic construct
  source 1..21: mol_type = other RNA
accggtaccacccagcactcg

SEQ ID NO: 36962 - RNA, 21 nt, synthetic construct
  source 1..21: mol_type = other RNA
accggtaccacccagcactcg

SEQ ID NO: 36963 - RNA, 21 nt, synthetic construct
  source 1..21: mol_type = other RNA
accggtaccacccagcactcg

SEQ ID NO: 36964 - RNA, 21 nt, synthetic construct
  source 1..21: mol_type = other RNA
gacgagggttcagtgtcggtg

SEQ ID NO: 36965 - RNA, 21 nt, synthetic construct
  source 1..21: mol_type = other RNA
agcactatagccaccgtgatg

SEQ ID NO: 36966 - RNA, 21 nt, synthetic construct
  source 1..21: mol_type = other RNA
gcgtcaccttcaatggccaag

SEQ ID NO: 36967 - RNA, 21 nt, synthetic construct
  source 1..21: mol_type = other RNA
cttcaacgcacacatgggcat

SEQ ID NO: 36968 - RNA, 21 nt, synthetic construct
  source 1..21: mol_type = other RNA
aatttcccggggagcggtggg

SEQ ID NO: 36969 - RNA, 21 nt, synthetic construct
  source 1..21: mol_type = other RNA
ccggcgcacaatgggcgggtg

SEQ ID NO: 36970 - RNA, 21 nt, synthetic construct
  source 1..21: mol_type = other RNA
gcacgacgagggcgccgtgtg

SEQ ID NO: 36971 - RNA, 21 nt, synthetic construct
  source 1..21: mol_type = other RNA
atcgctacagctttgaaggca

SEQ ID NO: 36972 - RNA, 21 nt, synthetic construct
  source 1..21: mol_type = other RNA
accgatcccaacagtgccttc

SEQ ID NO: 36973 - RNA, 21 nt, synthetic construct
  source 1..21: mol_type = other RNA
tcgagacccacgggatggccg

SEQ ID NO: 36974 - RNA, 21 nt, synthetic construct
  source 1..21: mol_type = other RNA
ctatgtgtccctgccacggcc

SEQ ID NO: 36975 - RNA, 21 nt, synthetic construct
  source 1..21: mol_type = other RNA
cacgcctccagtgtggatcag

SEQ ID NO: 36976 - RNA, 21 nt, synthetic construct
  source 1..21: mol_type = other RNA
cacgcctccagtgtggatcag

SEQ ID NO: 36977 - RNA, 21 nt, synthetic construct
  source 1..21: mol_type = other RNA
cacgcctccagtgtggatcag

SEQ ID NO: 36978 - RNA, 21 nt, synthetic construct
  source 1..21: mol_type = other RNA
cacgcctccagtgtggatcag

SEQ ID NO: 36979 - RNA, 21 nt, synthetic construct
  source 1..21: mol_type = other RNA
ggacgtgccacaaccccgcca

SEQ ID NO: 36980 - RNA, 21 nt, synthetic construct
  source 1..21: mol_type = other RNA
agagcggggactacatcaagg

SEQ ID NO: 36981 - RNA, 21 nt, synthetic construct
  source 1..21: mol_type = other RNA
gttcgtacaatggcaccttct

SEQ ID NO: 36982 - RNA, 21 nt, synthetic construct
  source 1..21: mol_type = other RNA
tgaacgacgcgtgtgcctgcg

SEQ ID NO: 36983 - RNA, 21 nt, synthetic construct
  source 1..21: mol_type = other RNA
acaatgggcgggtgtgcagca

SEQ ID NO: 36984 - RNA, 21 nt, synthetic construct
  source 1..21: mol_type = other RNA
atatcgtcctcactgtcacca

SEQ ID NO: 36985 - RNA, 21 nt, synthetic construct
  source 1..21: mol_type = other RNA
ccacctacaagcctggagaga

SEQ ID NO: 36986 - RNA, 21 nt, synthetic construct
  source 1..21: mol_type = other RNA
gacgtcggtgcaagggtcccc

SEQ ID NO: 36987 - RNA, 21 nt, synthetic construct
  source 1..21: mol_type = other RNA
gcgcagcttcccgacatgccg

SEQ ID NO: 36988 - RNA, 21 nt, synthetic construct
  source 1..21: mol_type = other RNA
tcccgacatgccgctggagga

SEQ ID NO: 36989 - RNA, 21 nt, synthetic construct
  source 1..21: mol_type = other RNA
tgcgagtgcatctgcagcatg

SEQ ID NO: 36990 - RNA, 21 nt, synthetic construct
  source 1..21: mol_type = other RNA
gtcgcaacggccaggtcagag

SEQ ID NO: 36991 - RNA, 21 nt, synthetic construct
  source 1..21: mol_type = other RNA
gcgctacgcctacgtggtgga

SEQ ID NO: 36992 - RNA, 21 nt, synthetic construct
  source 1..21: mol_type = other RNA
caactgcacggacgaggaggg

SEQ ID NO: 36993 - RNA, 21 nt, synthetic construct
  source 1..21: mol_type = other RNA
cgctacgcctacgtggtggat

SEQ ID NO: 36994 - RNA, 21 nt, synthetic construct
  source 1..21: mol_type = other RNA
atcgagacccacgggatggcc

SEQ ID NO: 36995 - RNA, 21 nt, synthetic construct
  source 1..21: mol_type = other RNA
tacgaggacttcaacgtccag

SEQ ID NO: 36996 - RNA, 21 nt, synthetic construct
  source 1..21: mol_type = other RNA
tgtgcgggaacttcgacgaca

SEQ ID NO: 36997 - RNA, 21 nt, synthetic construct
  source 1..21: mol_type = other RNA
ccgacatgccgctggaggagc

SEQ ID NO: 36998 - RNA, 21 nt, synthetic construct
  source 1..21: mol_type = other RNA
cccgtgtgccacctttgtgga

SEQ ID NO: 36999 - RNA, 21 nt, synthetic construct
  source 1..21: mol_type = other RNA
tcgctacagctttgaaggcag

SEQ ID NO: 37000 - RNA, 21 nt, synthetic construct
  source 1..21: mol_type = other RNA
ctacgagtagcccggggctga

SEQ ID NO: 37001 - RNA, 21 nt, synthetic construct
  source 1..21: mol_type = other RNA
ccccgacctccaccctgagaa

SEQ ID NO: 37002 - RNA, 21 nt, synthetic construct
  source 1..21: mol_type = other RNA
cttcggccacctcgggcatct

SEQ ID NO: 37003 - RNA, 21 nt, synthetic construct
  source 1..21: mol_type = other RNA
cttcggccacctcgggcatct

SEQ ID NO: 37004 - RNA, 21 nt, synthetic construct
  source 1..21: mol_type = other RNA
cacgaccatcctgtggcacca

SEQ ID NO: 37005 - RNA, 21 nt, synthetic construct
  source 1..21: mol_type = other RNA
gtgcgccaacagccaacagag

SEQ ID NO: 37006 - RNA, 21 nt, synthetic construct
  source 1..21: mol_type = other RNA
ctactccagagactgtccaca

SEQ ID NO: 37007 - RNA, 21 nt, synthetic construct
  source 1..21: mol_type = other RNA
tctccggcaggtgaatgagac

SEQ ID NO: 37008 - RNA, 21 nt, synthetic construct
  source 1..21: mol_type = other RNA
aaatccgtgtgttctgctgca

SEQ ID NO: 37009 - RNA, 21 nt, synthetic construct
  source 1..21: mol_type = other RNA
aaatccgtgtgttctgctgca

SEQ ID NO: 37010 - RNA, 21 nt, synthetic construct
  source 1..21: mol_type = other RNA
aaatccgtgtgttctgctgca

SEQ ID NO: 37011 - RNA, 21 nt, synthetic construct
  source 1..21: mol_type = other RNA
aaatccgtgtgttctgctgca

SEQ ID NO: 37012 - RNA, 21 nt, synthetic construct
  source 1..21: mol_type = other RNA
tggcctacggggatggccact

SEQ ID NO: 37013 - RNA, 21 nt, synthetic construct
  source 1..21: mol_type = other RNA
acgaggcctgcgtgaacgacg

SEQ ID NO: 37014 - RNA, 21 nt, synthetic construct
  source 1..21: mol_type = other RNA
ggcactaccagccctgcgggg

SEQ ID NO: 37015 - RNA, 21 nt, synthetic construct
  source 1..21: mol_type = other RNA
gcttaccaccacggccaccac

SEQ ID NO: 37016 - RNA, 21 nt, synthetic construct
  source 1..21: mol_type = other RNA
gcttaccaccacggccaccac

SEQ ID NO: 37017 - RNA, 21 nt, synthetic construct
  source 1..21: mol_type = other RNA
agcgttacacccatcccctct

SEQ ID NO: 37018 - RNA, 21 nt, synthetic construct
  source 1..21: mol_type = other RNA
agcgttacacccatcccctcc

SEQ ID NO: 37019 - RNA, 21 nt, synthetic construct
  source 1..21: mol_type = other RNA
acgctacatggggatcttcct

SEQ ID NO: 37020 - RNA, 21 nt, synthetic construct
  source 1..21: mol_type = other RNA
tacgcagtgtgcaatcagcac

SEQ ID NO: 37021 - RNA, 21 nt, synthetic construct
  source 1..21: mol_type = other RNA
gaccttcgacggcgacgtctt

SEQ ID NO: 37022 - RNA, 21 nt, synthetic construct
  source 1..21: mol_type = other RNA
cgacggcgacgtcttccgctt

SEQ ID NO: 37023 - RNA, 21 nt, synthetic construct
  source 1..21: mol_type = other RNA
cactcgaactgcatgtttgac

SEQ ID NO: 37024 - RNA, 21 nt, synthetic construct
  source 1..21: mol_type = other RNA
tcgaactgcatgtttgacacc

SEQ ID NO: 37025 - RNA, 21 nt, synthetic construct
  source 1..21: mol_type = other RNA
caccgtgtacctctgtgaggc

SEQ ID NO: 37026 - RNA, 21 nt, synthetic construct
  source 1..21: mol_type = other RNA
acaagaccttcgacggcgacg

SEQ ID NO: 37027 - RNA, 21 nt, synthetic construct
  source 1..21: mol_type = other RNA
cccccgccgtgcaaccgtccc

SEQ ID NO: 37028 - RNA, 21 nt, synthetic construct
  source 1..21: mol_type = other RNA
ctacgacctgcatggtgactg

SEQ ID NO: 37029 - RNA, 21 nt, synthetic construct
  source 1..21: mol_type = other RNA
ccctacaagatacgctacatg

SEQ ID NO: 37030 - RNA, 21 nt, synthetic construct
  source 1..21: mol_type = other RNA
tgtcctaacggctcagccatc

SEQ ID NO: 37031 - RNA, 21 nt, synthetic construct
  source 1..21: mol_type = other RNA
tgttcgtacaatggcaccttc

SEQ ID NO: 37032 - RNA, 21 nt, synthetic construct
  source 1..21: mol_type = other RNA
tgcaccgtgtacctctgtgag

SEQ ID NO: 37033 - RNA, 21 nt, synthetic construct
  source 1..21: mol_type = other RNA
gacggcgacgtcttccgcttc

SEQ ID NO: 37034 - RNA, 21 nt, synthetic construct
  source 1..21: mol_type = other RNA
cttaccgccacggccaccaca

SEQ ID NO: 37035 - RNA, 21 nt, synthetic construct
  source 1..21: mol_type = other RNA
cttaccgccacggccaccaca

SEQ ID NO: 37036 - RNA, 21 nt, synthetic construct
  source 1..21: mol_type = other RNA
tgcgaatacgtgccctgtggc

SEQ ID NO: 37037 - RNA, 21 nt, synthetic construct
  source 1..21: mol_type = other RNA
ccgatcccaacagtgccttct

SEQ ID NO: 37038 - RNA, 21 nt, synthetic construct
  source 1..21: mol_type = other RNA
ggacggaaactactatgacgt

SEQ ID NO: 37039 - RNA, 21 nt, synthetic construct
  source 1..21: mol_type = other RNA
aacatccgtgcggccggaggg

SEQ ID NO: 37040 - RNA, 21 nt, synthetic construct
  source 1..21: mol_type = other RNA
aacatccgtgcggccggaggg

SEQ ID NO: 37041 - RNA, 21 nt, synthetic construct
  source 1..21: mol_type = other RNA
aacatccgtgcggccggaggg

SEQ ID NO: 37042 - RNA, 21 nt, synthetic construct
  source 1..21: mol_type = other RNA
aacatccgtgcggccggaggg

SEQ ID NO: 37043 - RNA, 21 nt, synthetic construct
  source 1..21: mol_type = other RNA
ctgtgttcgtacaatggcacc

SEQ ID NO: 37044 - RNA, 21 nt, synthetic construct
  source 1..21: mol_type = other RNA
cccaacggtgcaatgtcagga

SEQ ID NO: 37045 - RNA, 21 nt, synthetic construct
  source 1..21: mol_type = other RNA
cctaacggctcagccatcctg

SEQ ID NO: 37046 - RNA, 21 nt, synthetic construct
  source 1..21: mol_type = other RNA
cagctaccagcgttacaccca

SEQ ID NO: 37047 - RNA, 21 nt, synthetic construct
  source 1..21: mol_type = other RNA
cacatcggccccaataaccac

SEQ ID NO: 37048 - RNA, 21 nt, synthetic construct
  source 1..21: mol_type = other RNA
cagctaccagcgttacaccca

SEQ ID NO: 37049 - RNA, 21 nt, synthetic construct
  source 1..21: mol_type = other RNA
ccaacactcacgagcgagctg

SEQ ID NO: 37050 - RNA, 21 nt, synthetic construct
  source 1..21: mol_type = other RNA
ctacgaggacttcaacgtcca

SEQ ID NO: 37051 - RNA, 21 nt, synthetic construct
  source 1..21: mol_type = other RNA
ctacaataagaccgaccgagc

SEQ ID NO: 37052 - RNA, 21 nt, synthetic construct
  source 1..21: mol_type = other RNA
cacaccatggatggcggtgcc

SEQ ID NO: 37053 - RNA, 21 nt, synthetic construct
  source 1..21: mol_type = other RNA
cggccactacgatcacggcca

SEQ ID NO: 37054 - RNA, 21 nt, synthetic construct
  source 1..21: mol_type = other RNA
cggccactacgatcacggcca

SEQ ID NO: 37055 - RNA, 21 nt, synthetic construct
  source 1..21: mol_type = other RNA
cggccactacgatcacggcca

SEQ ID NO: 37056 - RNA, 21 nt, synthetic construct
  source 1..21: mol_type = other RNA
cggccactacgatcacggcca

SEQ ID NO: 37057 - RNA, 21 nt, synthetic construct
  source 1..21: mol_type = other RNA
acgactacgagctgcgggttc

SEQ ID NO: 37058 - RNA, 21 nt, synthetic construct
  source 1..21: mol_type = other RNA
cagcgctacgcctacgtggtg

SEQ ID NO: 37059 - RNA, 21 nt, synthetic construct
  source 1..21: mol_type = other RNA
ggtcgacggcggccctcacct

SEQ ID NO: 37060 - RNA, 21 nt, synthetic construct
  source 1..21: mol_type = other RNA
cctacgagtagcccggggctg

SEQ ID NO: 37061 - RNA, 21 nt, synthetic construct
  source 1..21: mol_type = other RNA
ggacggcacgcacgcttccag

SEQ ID NO: 37062 - RNA, 21 nt, synthetic construct
  source 1..21: mol_type = other RNA
gctcgcgcctgaccgatccca

SEQ ID NO: 37063 - RNA, 21 nt, synthetic construct
  source 1..21: mol_type = other RNA
agcgctacgcctacgtggtgg

SEQ ID NO: 37064 - RNA, 21 nt, synthetic construct
  source 1..21: mol_type = other RNA
ctgcgactcgggtggcgactg

SEQ ID NO: 37065 - RNA, 21 nt, synthetic construct
  source 1..21: mol_type = other RNA
gctacccgaagtgcccaccca

SEQ ID NO: 37066 - RNA, 21 nt, synthetic construct
  source 1..21: mol_type = other RNA
ccgtgacggtcaccccctcgg

SEQ ID NO: 37067 - RNA, 21 nt, synthetic construct
  source 1..21: mol_type = other RNA
cctggcgccaacactcacgag

SEQ ID NO: 37068 - RNA, 21 nt, synthetic construct
  source 1..21: mol_type = other RNA
ctaccagcgttacacccatcc

SEQ ID NO: 37069 - RNA, 21 nt, synthetic construct
  source 1..21: mol_type = other RNA
ggacccgcctatcacagacca

SEQ ID NO: 37070 - RNA, 21 nt, synthetic construct
  source 1..21: mol_type = other RNA
ggacggcactcacgcctccag

SEQ ID NO: 37071 - RNA, 21 nt, synthetic construct
  source 1..21: mol_type = other RNA
cactacgatcacggccaccgg

SEQ ID NO: 37072 - RNA, 21 nt, synthetic construct
  source 1..21: mol_type = other RNA
ggacccgcctatcacagacca

SEQ ID NO: 37073 - RNA, 21 nt, synthetic construct
  source 1..21: mol_type = other RNA
cactacgatcacggccaccgg

SEQ ID NO: 37074 - RNA, 21 nt, synthetic construct
  source 1..21: mol_type = other RNA
cacctatccccccagtgctga

SEQ ID NO: 37075 - RNA, 21 nt, synthetic construct
  source 1..21: mol_type = other RNA
ggacccgcctatcacagacca

SEQ ID NO: 37076 - RNA, 21 nt, synthetic construct
  source 1..21: mol_type = other RNA
ggacggcactcacgcctccag

SEQ ID NO: 37077 - RNA, 21 nt, synthetic construct
  source 1..21: mol_type = other RNA
ggacccgcctatcacagacca

SEQ ID NO: 37078 - RNA, 21 nt, synthetic construct
  source 1..21: mol_type = other RNA
cactacgatcacggccaccgg

SEQ ID NO: 37079 - RNA, 21 nt, synthetic construct
  source 1..21: mol_type = other RNA
cacctatccccccagtgctga

SEQ ID NO: 37080 - RNA, 21 nt, synthetic construct
  source 1..21: mol_type = other RNA
ctaccagcgttacacccatcc

SEQ ID NO: 37081 - RNA, 21 nt, synthetic construct
  source 1..21: mol_type = other RNA
ggacccgcctatcacagacca

SEQ ID NO: 37082 - RNA, 21 nt, synthetic construct
  source 1..21: mol_type = other RNA
ggacggcactcacgcctccag

SEQ ID NO: 37083 - RNA, 21 nt, synthetic construct
  source 1..21: mol_type = other RNA
cactacgatcacggccaccgg

SEQ ID NO: 37084 - RNA, 21 nt, synthetic construct
  source 1..21: mol_type = other RNA
cacgtggaccgtcccagcaca

SEQ ID NO: 37085 - RNA, 21 nt, synthetic construct
  source 1..21: mol_type = other RNA
gcttacgcagagctctgccgc

SEQ ID NO: 37086 - RNA, 21 nt, synthetic construct
  source 1..21: mol_type = other RNA
gcgaggtgcaaccggtggcct

SEQ ID NO: 37087 - RNA, 21 nt, synthetic construct
  source 1..21: mol_type = other RNA
gccccgagacggtgtgcgtgt

SEQ ID NO: 37088 - RNA, 21 nt, synthetic construct
  source 1..21: mol_type = other RNA
acggggttggtgcaaccttcc

SEQ ID NO: 37089 - RNA, 21 nt, synthetic construct
  source 1..21: mol_type = other RNA
caccgtgtgtgtccgcgaggt

SEQ ID NO: 37090 - RNA, 21 nt, synthetic construct
  source 1..21: mol_type = other RNA
ctaacggctcagccatcctgc

SEQ ID NO: 37091 - RNA, 21 nt, synthetic construct
  source 1..21: mol_type = other RNA
ggacggcacgcacgcctccag

SEQ ID NO: 37092 - RNA, 21 nt, synthetic construct
  source 1..21: mol_type = other RNA
tgactaccacaaccacgggct

SEQ ID NO: 37093 - RNA, 21 nt, synthetic construct
  source 1..21: mol_type = other RNA
cgactaccacaaccacgggct

SEQ ID NO: 37094 - RNA, 21 nt, synthetic construct
  source 1..21: mol_type = other RNA
cgactaccacaaccacgggct

SEQ ID NO: 37095 - RNA, 21 nt, synthetic construct
  source 1..21: mol_type = other RNA
cgactaccacaaccacgggct

SEQ ID NO: 37096 - RNA, 21 nt, synthetic construct
  source 1..21: mol_type = other RNA
cccgggcccattcttcaacgc

SEQ ID NO: 37097 - RNA, 21 nt, synthetic construct
  source 1..21: mol_type = other RNA
cccgatgggtttcctaaattt

SEQ ID NO: 37098 - RNA, 21 nt, synthetic construct
  source 1..21: mol_type = other RNA
ccgagcactatagccaccgtg

SEQ ID NO: 37099 - RNA, 21 nt, synthetic construct
  source 1..21: mol_type = other RNA
cacgacgcctgcaggctccac

SEQ ID NO: 37100 - RNA, 21 nt, synthetic construct
  source 1..21: mol_type = other RNA
aagacccgcacctcgaccctg

SEQ ID NO: 37101 - RNA, 21 nt, synthetic construct
  source 1..21: mol_type = other RNA
aagacccgcacctcgaccctg

SEQ ID NO: 37102 - RNA, 21 nt, synthetic construct
  source 1..21: mol_type = other RNA
aagacccgcacctcgaccctg

SEQ ID NO: 37103 - RNA, 21 nt, synthetic construct
  source 1..21: mol_type = other RNA
aagacccgcacctcgaccctg

SEQ ID NO: 37104 - RNA, 21 nt, synthetic construct
  source 1..21: mol_type = other RNA
tacgggtgggaagctaagctg

SEQ ID NO: 37105 - RNA, 21 nt, synthetic construct
  source 1..21: mol_type = other RNA
aaggacggaaactactatgac

SEQ ID NO: 37106 - RNA, 21 nt, synthetic construct
  source 1..21: mol_type = other RNA
gccgctggagggcacttatgc

SEQ ID NO: 37107 - RNA, 21 nt, synthetic construct
  source 1..21: mol_type = other RNA
ccgctggagggcacttatgcc

SEQ ID NO: 37108 - RNA, 21 nt, synthetic construct
  source 1..21: mol_type = other RNA
cggagcgtccaagtactcagc

SEQ ID NO: 37109 - RNA, 21 nt, synthetic construct
  source 1..21: mol_type = other RNA
tttctcgcccggggaagtcat

SEQ ID NO: 37110 - RNA, 21 nt, synthetic construct
  source 1..21: mol_type = other RNA
actcacgagcgagctgtccac

SEQ ID NO: 37111 - RNA, 21 nt, synthetic construct
  source 1..21: mol_type = other RNA
ctacgctcacggcaccgtgct

SEQ ID NO: 37112 - RNA, 21 nt, synthetic construct
  source 1..21: mol_type = other RNA
cggcgtgttcctcaactccat

SEQ ID NO: 37113 - RNA, 21 nt, synthetic construct
  source 1..21: mol_type = other RNA
ccgtgtgccacctttgtggaa

SEQ ID NO: 37114 - RNA, 21 nt, synthetic construct
  source 1..21: mol_type = other RNA
ctacgatcacggccaccggct

SEQ ID NO: 37115 - RNA, 21 nt, synthetic construct
  source 1..21: mol_type = other RNA
ctacgatcacggccaccggct

SEQ ID NO: 37116 - RNA, 21 nt, synthetic construct
  source 1..21: mol_type = other RNA
ctacgatcacggccaccggct

SEQ ID NO: 37117 - RNA, 21 nt, synthetic construct
  source 1..21: mol_type = other RNA
ctacgatcacggccaccggct

SEQ ID NO: 37118 - RNA, 21 nt, synthetic construct
  source 1..21: mol_type = other RNA
cagctgtgttcgtacaatggc

SEQ ID NO: 37119 - RNA, 21 nt, synthetic construct
  source 1..21: mol_type = other RNA
catccgggtccaagcggacgg

SEQ ID NO: 37120 - RNA, 21 nt, synthetic construct
  source 1..21: mol_type = other RNA
tcccggcttcgtaaccgtgac

SEQ ID NO: 37121 - RNA, 21 nt, synthetic construct
  source 1..21: mol_type = other RNA
tactatgacgtcggtgcaagg

SEQ ID NO: 37122 - RNA, 21 nt, synthetic construct
  source 1..21: mol_type = other RNA
tgacgtcggtgcaagggtccc

SEQ ID NO: 37123 - RNA, 21 nt, synthetic construct
  source 1..21: mol_type = other RNA
acgagctgatcctccaagagg

SEQ ID NO: 37124 - RNA, 21 nt, synthetic construct
  source 1..21: mol_type = other RNA
catcggccccaataaccacgg

SEQ ID NO: 37125 - RNA, 21 nt, synthetic construct
  source 1..21: mol_type = other RNA
cccatacagcctgccacctgc

SEQ ID NO: 37126 - RNA, 21 nt, synthetic construct
  source 1..21: mol_type = other RNA
acacgaccatcctgtggcacc

SEQ ID NO: 37127 - RNA, 21 nt, synthetic construct
  source 1..21: mol_type = other RNA
ccggacctgccccctcaacat

SEQ ID NO: 37128 - RNA, 21 nt, synthetic construct
  source 1..21: mol_type = other RNA
cacatcggcccccataaccac

SEQ ID NO: 37129 - RNA, 21 nt, synthetic construct
  source 1..21: mol_type = other RNA
gcacgcttccagtgtggatca

SEQ ID NO: 37130 - RNA, 21 nt, synthetic construct
  source 1..21: mol_type = other RNA
cacatcggcccccataaccac

SEQ ID NO: 37131 - RNA, 21 nt, synthetic construct
  source 1..21: mol_type = other RNA
cacatcggcccccataaccac

SEQ ID NO: 37132 - RNA, 21 nt, synthetic construct
  source 1..21: mol_type = other RNA
ccggcttcgtaaccgtgacca

SEQ ID NO: 37133 - RNA, 21 nt, synthetic construct
  source 1..21: mol_type = other RNA
aagcatgtgcgggcctatgtg

SEQ ID NO: 37134 - RNA, 21 nt, synthetic construct
  source 1..21: mol_type = other RNA
tctcaacgccgcagcctacga

SEQ ID NO: 37135 - RNA, 21 nt, synthetic construct
  source 1..21: mol_type = other RNA
gctacgctcacggcaccgtgc

SEQ ID NO: 37136 - RNA, 21 nt, synthetic construct
  source 1..21: mol_type = other RNA
gacgtgccacaaccccgccac

SEQ ID NO: 37137 - RNA, 21 nt, synthetic construct
  source 1..21: mol_type = other RNA
cgagttctatgcccacaacgc

SEQ ID NO: 37138 - RNA, 21 nt, synthetic construct
  source 1..21: mol_type = other RNA
cctttaaggcggtggcgagag

SEQ ID NO: 37139 - RNA, 21 nt, synthetic construct
  source 1..21: mol_type = other RNA
cgctctgtcacgactacgagc

SEQ ID NO: 37140 - RNA, 21 nt, synthetic construct
  source 1..21: mol_type = other RNA
gtgcgtgggtgacaaccgtgt

SEQ ID NO: 37141 - RNA, 21 nt, synthetic construct
  source 1..21: mol_type = other RNA
ggccactacgatcacggccac

SEQ ID NO: 37142 - RNA, 21 nt, synthetic construct
  source 1..21: mol_type = other RNA
ggccactacgatcacggccac

SEQ ID NO: 37143 - RNA, 21 nt, synthetic construct
  source 1..21: mol_type = other RNA
ggccactacgatcacggccac

SEQ ID NO: 37144 - RNA, 21 nt, synthetic construct
  source 1..21: mol_type = other RNA
ggccactacgatcacggccac

SEQ ID NO: 37145 - RNA, 21 nt, synthetic construct
  source 1..21: mol_type = other RNA
gtgacgagggttcagtgtcgg

SEQ ID NO: 37146 - RNA, 21 nt, synthetic construct
  source 1..21: mol_type = other RNA
tcctgtcaagtccgcatcaac

SEQ ID NO: 37147 - RNA, 21 nt, synthetic construct
  source 1..21: mol_type = other RNA
gtccaagaaatgtgccgacag

SEQ ID NO: 37148 - RNA, 21 nt, synthetic construct
  source 1..21: mol_type = other RNA
ctgtgacgtccacttcggcct

SEQ ID NO: 37149 - RNA, 21 nt, synthetic construct
  source 1..21: mol_type = other RNA
ggtgcgtgggtgacaaccgtg

SEQ ID NO: 37150 - RNA, 21 nt, synthetic construct
  source 1..21: mol_type = other RNA
cagctacgccgaggcctagtg

SEQ ID NO: 37151 - RNA, 21 nt, synthetic construct
  source 1..21: mol_type = other RNA
aaactactatgacgtcggtgc

SEQ ID NO: 37152 - RNA, 21 nt, synthetic construct
  source 1..21: mol_type = other RNA
gggtgacaaccgtgtcgtcct

SEQ ID NO: 37153 - RNA, 21 nt, synthetic construct
  source 1..21: mol_type = other RNA
gcccccgccgtgcaaccgtcc

SEQ ID NO: 37154 - RNA, 21 nt, synthetic construct
  source 1..21: mol_type = other RNA
gtacgggtgggaagctaagct

SEQ ID NO: 37155 - RNA, 21 nt, synthetic construct
  source 1..21: mol_type = other RNA
ctgctacgacaaggacggaaa

SEQ ID NO: 37156 - RNA, 21 nt, synthetic construct
  source 1..21: mol_type = other RNA
cacactaccaaagtgccgact

SEQ ID NO: 37157 - RNA, 21 nt, synthetic construct
  source 1..21: mol_type = other RNA
cacactaccaaagtgccgact

SEQ ID NO: 37158 - RNA, 21 nt, synthetic construct
  source 1..21: mol_type = other RNA
cacactaccaaagtgccgact

SEQ ID NO: 37159 - RNA, 21 nt, synthetic construct
  source 1..21: mol_type = other RNA
cgccaacactcacgagcgagc

SEQ ID NO: 37160 - RNA, 21 nt, synthetic construct
  source 1..21: mol_type = other RNA
gcaaccggtggcctgtgcgac

SEQ ID NO: 37161 - RNA, 21 nt, synthetic construct
  source 1..21: mol_type = other RNA
ccccgagcatccggtcgacgg

SEQ ID NO: 37162 - RNA, 21 nt, synthetic construct
  source 1..21: mol_type = other RNA
acctttgatggcgatcgctac

SEQ ID NO: 37163 - RNA, 21 nt, synthetic construct
  source 1..21: mol_type = other RNA
accccgagcatccggtcgacg

SEQ ID NO: 37164 - RNA, 21 nt, synthetic construct
  source 1..21: mol_type = other RNA
cccccgctctgtcacgactac

SEQ ID NO: 37165 - RNA, 21 nt, synthetic construct
  source 1..21: mol_type = other RNA
gaggactcctgtcaagtccgc

SEQ ID NO: 37166 - RNA, 21 nt, synthetic construct
  source 1..21: mol_type = other RNA
gcccttgcactgtcctaacgg

SEQ ID NO: 37167 - RNA, 21 nt, synthetic construct
  source 1..21: mol_type = other RNA
acgacccgctgtcaaccgaag

SEQ ID NO: 37168 - RNA, 21 nt, synthetic construct
  source 1..21: mol_type = other RNA
cccttgccggccggcaactgc

SEQ ID NO: 37169 - RNA, 21 nt, synthetic construct
  source 1..21: mol_type = other RNA
ggcaccttctacggggttggt

SEQ ID NO: 37170 - RNA, 21 nt, synthetic construct
  source 1..21: mol_type = other RNA
aagtccgcatcaacacgacca

SEQ ID NO: 37171 - RNA, 21 nt, synthetic construct
  source 1..21: mol_type = other RNA
ccatccgggtccaagcggacg

SEQ ID NO: 37172 - RNA, 21 nt, synthetic construct
  source 1..21: mol_type = other RNA
gagaccatcagggtcgactgc

SEQ ID NO: 37173 - RNA, 21 nt, synthetic construct
  source 1..21: mol_type = other RNA
cctttgatggcgatcgctaca

SEQ ID NO: 37174 - RNA, 21 nt, synthetic construct
  source 1..21: mol_type = other RNA
tcccccgctctgtcacgacta

SEQ ID NO: 37175 - RNA, 21 nt, synthetic construct
  source 1..21: mol_type = other RNA
ccccgctctgtcacgactacg

SEQ ID NO: 37176 - RNA, 21 nt, synthetic construct
  source 1..21: mol_type = other RNA
gacccgctgtcaaccgaagtg

SEQ ID NO: 37177 - RNA, 21 nt, synthetic construct
  source 1..21: mol_type = other RNA
acagctaccagcgttacaccc

SEQ ID NO: 37178 - RNA, 21 nt, synthetic construct
  source 1..21: mol_type = other RNA
acagctaccagcgttacaccc

SEQ ID NO: 37179 - RNA, 21 nt, synthetic construct
  source 1..21: mol_type = other RNA
ggacagtttttctcgcccggg

SEQ ID NO: 37180 - RNA, 21 nt, synthetic construct
  source 1..21: mol_type = other RNA
gcaaccgtcccggcttcgtaa

SEQ ID NO: 37181 - RNA, 21 nt, synthetic construct
  source 1..21: mol_type = other RNA
aaccgtcccggcttcgtaacc

SEQ ID NO: 37182 - RNA, 21 nt, synthetic construct
  source 1..21: mol_type = other RNA
gcttcgtaaccgtgaccaggc

SEQ ID NO: 37183 - RNA, 21 nt, synthetic construct
  source 1..21: mol_type = other RNA
acctcagctgtgttcgtacaa

SEQ ID NO: 37184 - RNA, 21 nt, synthetic construct
  source 1..21: mol_type = other RNA
ctcctgtcaagtccgcatcaa

SEQ ID NO: 37185 - RNA, 21 nt, synthetic construct
  source 1..21: mol_type = other RNA
ggctgaggtcgcaacggccag

SEQ ID NO: 37186 - RNA, 21 nt, synthetic construct
  source 1..21: mol_type = other RNA
cctaaatttcccggggagcgg

SEQ ID NO: 37187 - RNA, 21 nt, synthetic construct
  source 1..21: mol_type = other RNA
gctgctacgacaaggacggaa

SEQ ID NO: 37188 - RNA, 21 nt, synthetic construct
  source 1..21: mol_type = other RNA
ttcctaaatttcccggggagc

SEQ ID NO: 37189 - RNA, 21 nt, synthetic construct
  source 1..21: mol_type = other RNA
ccctagcagcaaccaccggta

SEQ ID NO: 37190 - RNA, 21 nt, synthetic construct
  source 1..21: mol_type = other RNA
agctacgccgaggcctagtgg

SEQ ID NO: 37191 - RNA, 21 nt, synthetic construct
  source 1..21: mol_type = other RNA
agcagccactacgaccgcaac

SEQ ID NO: 37192 - RNA, 21 nt, synthetic construct
  source 1..21: mol_type = other RNA
gtggggcggctcccactattc

SEQ ID NO: 37193 - RNA, 21 nt, synthetic construct
  source 1..21: mol_type = other RNA
tgggtttcctaaatttcccgg

SEQ ID NO: 37194 - RNA, 21 nt, synthetic construct
  source 1..21: mol_type = other RNA
atctacaataagaccgaccga

SEQ ID NO: 37195 - RNA, 21 nt, synthetic construct
  source 1..21: mol_type = other RNA
ccacggccactacgatcacgg

SEQ ID NO: 37196 - RNA, 21 nt, synthetic construct
  source 1..21: mol_type = other RNA
ccacggccactacgatcacgg

SEQ ID NO: 37197 - RNA, 21 nt, synthetic construct
  source 1..21: mol_type = other RNA
ccacggccactacgatcacgg

SEQ ID NO: 37198 - RNA, 21 nt, synthetic construct
  source 1..21: mol_type = other RNA
ccacggccactacgatcacgg

SEQ ID NO: 37199 - RNA, 21 nt, synthetic construct
  source 1..21: mol_type = other RNA
ccaacatccgtgcggccggag

SEQ ID NO: 37200 - RNA, 21 nt, synthetic construct
  source 1..21: mol_type = other RNA
ccaacatccgtgcggccggag

SEQ ID NO: 37201 - RNA, 21 nt, synthetic construct
  source 1..21: mol_type = other RNA
ccaacatccgtgcggccggag

SEQ ID NO: 37202 - RNA, 21 nt, synthetic construct
  source 1..21: mol_type = other RNA
ccaacatccgtgcggccggag

SEQ ID NO: 37203 - RNA, 21 nt, synthetic construct
  source 1..21: mol_type = other RNA
aggcgtccaacggctccgtcc

SEQ ID NO: 37204 - RNA, 21 nt, synthetic construct
  source 1..21: mol_type = other RNA
cttggcgcctgcttgatcgcc

SEQ ID NO: 37205 - RNA, 21 nt, synthetic construct
  source 1..21: mol_type = other RNA
cgtgggtgacaaccgtgtcgt

SEQ ID NO: 37206 - RNA, 21 nt, synthetic construct
  source 1..21: mol_type = other RNA
ccgcagccccggtgtctagca

SEQ ID NO: 37207 - RNA, 21 nt, synthetic construct
  source 1..21: mol_type = other RNA
aacaaactaagcatgtgcggg

SEQ ID NO: 37208 - RNA, 21 nt, synthetic construct
  source 1..21: mol_type = other RNA
acaataagaccgaccgagccg

SEQ ID NO: 37209 - RNA, 21 nt, synthetic construct
  source 1..21: mol_type = other RNA
ccccgagacggtgtgcgtgtg

SEQ ID NO: 37210 - RNA, 21 nt, synthetic construct
  source 1..21: mol_type = other RNA
ccgagcgcgtgccggacgctg

SEQ ID NO: 37211 - RNA, 21 nt, synthetic construct
  source 1..21: mol_type = other RNA
tacaagatacgctacatgggg

SEQ ID NO: 37212 - RNA, 21 nt, synthetic construct
  source 1..21: mol_type = other RNA
cccaagtcccagcgctacgcc

SEQ ID NO: 37213 - RNA, 21 nt, synthetic construct
  source 1..21: mol_type = other RNA
agtcccccgctctgtcacgac

SEQ ID NO: 37214 - RNA, 21 nt, synthetic construct
  source 1..21: mol_type = other RNA
taccaaagtgccaactaccac

SEQ ID NO: 37215 - RNA, 21 nt, synthetic construct
  source 1..21: mol_type = other RNA
ggccaccacacacgggcgatc

SEQ ID NO: 37216 - RNA, 21 nt, synthetic construct
  source 1..21: mol_type = other RNA
gcccccataaccacggtggtg

SEQ ID NO: 37217 - RNA, 21 nt, synthetic construct
  source 1..21: mol_type = other RNA
tactccaacatccgtgcggcc

SEQ ID NO: 37218 - RNA, 21 nt, synthetic construct
  source 1..21: mol_type = other RNA
ggccaccacacacgggcgatc

SEQ ID NO: 37219 - RNA, 21 nt, synthetic construct
  source 1..21: mol_type = other RNA
gccccacatcggccccaataa

SEQ ID NO: 37220 - RNA, 21 nt, synthetic construct
  source 1..21: mol_type = other RNA
tactccaacatccgtgcggcc

SEQ ID NO: 37221 - RNA, 21 nt, synthetic construct
  source 1..21: mol_type = other RNA
taccaaagtgccgactaccac

SEQ ID NO: 37222 - RNA, 21 nt, synthetic construct
  source 1..21: mol_type = other RNA
gcccccataaccacggtggtg

SEQ ID NO: 37223 - RNA, 21 nt, synthetic construct
  source 1..21: mol_type = other RNA
tactccaacatccgtgcggcc

SEQ ID NO: 37224 - RNA, 21 nt, synthetic construct
  source 1..21: mol_type = other RNA
taccaaagtgccgactaccac

SEQ ID NO: 37225 - RNA, 21 nt, synthetic construct
  source 1..21: mol_type = other RNA
ggccaccacacacgggcgatc

SEQ ID NO: 37226 - RNA, 21 nt, synthetic construct
  source 1..21: mol_type = other RNA
gcccccataaccacggtggtg

SEQ ID NO: 37227 - RNA, 21 nt, synthetic construct
  source 1..21: mol_type = other RNA
tactccaacatccgtgcggcc

SEQ ID NO: 37228 - RNA, 21 nt, synthetic construct
  source 1..21: mol_type = other RNA
taccaaagtgccgactaccac

SEQ ID NO: 37229 - RNA, 21 nt, synthetic construct
  source 1..21: mol_type = other RNA
tgtggaccacgtggaccgtcc

SEQ ID NO: 37230 - RNA, 21 nt, synthetic construct
  source 1..21: mol_type = other RNA
ctcttcaacgcacacatgggc

SEQ ID NO: 37231 - RNA, 21 nt, synthetic construct
  source 1..21: mol_type = other RNA
tgtgtgtggcaccccgcgctc

SEQ ID NO: 37232 - RNA, 21 nt, synthetic construct
  source 1..21: mol_type = other RNA
ccgggcccattcttcaacgcc

SEQ ID NO: 37233 - RNA, 21 nt, synthetic construct
  source 1..21: mol_type = other RNA
cgcagcctacgagtagcccgg

SEQ ID NO: 37234 - RNA, 21 nt, synthetic construct
  source 1..21: mol_type = other RNA
gcagcctacgagtagcccggg

SEQ ID NO: 37235 - RNA, 21 nt, synthetic construct
  source 1..21: mol_type = other RNA
tctacaataagaccgaccgag

SEQ ID NO: 37236 - RNA, 21 nt, synthetic construct
  source 1..21: mol_type = other RNA
gccaccacacacgggcggtcc

SEQ ID NO: 37237 - RNA, 21 nt, synthetic construct
  source 1..21: mol_type = other RNA
acaaactaagcatgtgcgggc

SEQ ID NO: 37238 - RNA, 21 nt, synthetic construct
  source 1..21: mol_type = other RNA
agagaccatcagggtcgactg

SEQ ID NO: 37239 - RNA, 21 nt, synthetic construct
  source 1..21: mol_type = other RNA
aggccctgttctcaacgccgc

SEQ ID NO: 37240 - RNA, 21 nt, synthetic construct
  source 1..21: mol_type = other RNA
tccaagaaatgtgccgacagc

SEQ ID NO: 37241 - RNA, 21 nt, synthetic construct
  source 1..21: mol_type = other RNA
tcggccccaataaccacggtg

SEQ ID NO: 37242 - RNA, 21 nt, synthetic construct
  source 1..21: mol_type = other RNA
cccggcactggtgctcgcgcc

SEQ ID NO: 37243 - RNA, 21 nt, synthetic construct
  source 1..21: mol_type = other RNA
ggccgctggagggcacttatg

SEQ ID NO: 37244 - RNA, 21 nt, synthetic construct
  source 1..21: mol_type = other RNA
gtgctgtggggagtgcgtcca

SEQ ID NO: 37245 - RNA, 21 nt, synthetic construct
  source 1..21: mol_type = other RNA
gggcgtgagcgtcaccttcaa

SEQ ID NO: 37246 - RNA, 21 nt, synthetic construct
  source 1..21: mol_type = other RNA
agatacgctacatggggatct

SEQ ID NO: 37247 - RNA, 21 nt, synthetic construct
  source 1..21: mol_type = other RNA
cgcgtgagctttgttccaccc

SEQ ID NO: 37248 - RNA, 21 nt, synthetic construct
  source 1..21: mol_type = other RNA
caaccggtggcctgtgcgacc

SEQ ID NO: 37249 - RNA, 21 nt, synthetic construct
  source 1..21: mol_type = other RNA
acatcggccccaataaccacg

SEQ ID NO: 37250 - RNA, 21 nt, synthetic construct
  source 1..21: mol_type = other RNA
gctacaactacaggatccggg

SEQ ID NO: 37251 - RNA, 21 nt, synthetic construct
  source 1..21: mol_type = other RNA
gtgccggacgctggtgttggc

SEQ ID NO: 37252 - RNA, 21 nt, synthetic construct
  source 1..21: mol_type = other RNA
aagaacggcgtgcttgtgtct

SEQ ID NO: 37253 - RNA, 21 nt, synthetic construct
  source 1..21: mol_type = other RNA
catcgtcaccgagaacatccc

SEQ ID NO: 37254 - RNA, 21 nt, synthetic construct
  source 1..21: mol_type = other RNA
gtcaaccgaagtgtgagtgga

SEQ ID NO: 37255 - RNA, 21 nt, synthetic construct
  source 1..21: mol_type = other RNA
agctacgttctgtccaagaaa

SEQ ID NO: 37256 - RNA, 21 nt, synthetic construct
  source 1..21: mol_type = other RNA
ggcgtctgcaccaagtacatg

SEQ ID NO: 37257 - RNA, 21 nt, synthetic construct
  source 1..21: mol_type = other RNA
cacgacgcgggcctgtgtgtg

SEQ ID NO: 37258 - RNA, 21 nt, synthetic construct
  source 1..21: mol_type = other RNA
ccgctgtcaaccgaagtgtga

SEQ ID NO: 37259 - RNA, 21 nt, synthetic construct
  source 1..21: mol_type = other RNA
cacggcaccgtgctggctcct

SEQ ID NO: 37260 - RNA, 21 nt, synthetic construct
  source 1..21: mol_type = other RNA
aactacgcccggcactggtgc

SEQ ID NO: 37261 - RNA, 21 nt, synthetic construct
  source 1..21: mol_type = other RNA
cacaacgaggccacctacaag

SEQ ID NO: 37262 - RNA, 21 nt, synthetic construct
  source 1..21: mol_type = other RNA
ccggaaccccagtgggcactg

SEQ ID NO: 37263 - RNA, 21 nt, synthetic construct
  source 1..21: mol_type = other RNA
tccactacaagtccatggata

SEQ ID NO: 37264 - RNA, 21 nt, synthetic construct
  source 1..21: mol_type = other RNA
tactcacgccagtgcgcccac

SEQ ID NO: 37265 - RNA, 21 nt, synthetic construct
  source 1..21: mol_type = other RNA
atactcacgccagtgcgccca

SEQ ID NO: 37266 - RNA, 21 nt, synthetic construct
  source 1..21: mol_type = other RNA
gaggggacgttgagtcctacg

SEQ ID NO: 37267 - RNA, 21 nt, synthetic construct
  source 1..21: mol_type = other RNA
caggacccaacggtgcaatgt

SEQ ID NO: 37268 - RNA, 21 nt, synthetic construct
  source 1..21: mol_type = other RNA
ctgtcaaccgaagtgtgagtg

SEQ ID NO: 37269 - RNA, 21 nt, synthetic construct
  source 1..21: mol_type = other RNA
caggtcgtggaatgcagcctg

SEQ ID NO: 37270 - RNA, 21 nt, synthetic construct
  source 1..21: mol_type = other RNA
caggtcgtggaatgcagcctg

SEQ ID NO: 37271 - RNA, 21 nt, synthetic construct
  source 1..21: mol_type = other RNA
caggtcgtggaatgcagcctg

SEQ ID NO: 37272 - RNA, 21 nt, synthetic construct
  source 1..21: mol_type = other RNA
caggtcgtggaatgcagcctg

SEQ ID NO: 37273 - RNA, 21 nt, synthetic construct
  source 1..21: mol_type = other RNA
aaccgaagtgtgagtggacag

SEQ ID NO: 37274 - RNA, 21 nt, synthetic construct
  source 1..21: mol_type = other RNA
tcctcaatgacgcgggcgcct

SEQ ID NO: 37275 - RNA, 21 nt, synthetic construct
  source 1..21: mol_type = other RNA
tggaggggacgttgagtccta

SEQ ID NO: 37276 - RNA, 21 nt, synthetic construct
  source 1..21: mol_type = other RNA
ctcaatgacgcgggcgcctgt

SEQ ID NO: 37277 - RNA, 21 nt, synthetic construct
  source 1..21: mol_type = other RNA
tgtggaatactcacgccagtg

SEQ ID NO: 37278 - RNA, 21 nt, synthetic construct
  source 1..21: mol_type = other RNA
ctacaacaccaccgatgggct

SEQ ID NO: 37279 - RNA, 21 nt, synthetic construct
  source 1..21: mol_type = other RNA
ccgcgaggtctgccgctggtc

SEQ ID NO: 37280 - RNA, 21 nt, synthetic construct
  source 1..21: mol_type = other RNA
actacgcccggcactggtgct

SEQ ID NO: 37281 - RNA, 21 nt, synthetic construct
  source 1..21: mol_type = other RNA
caactacaggatccgggtcct

SEQ ID NO: 37282 - RNA, 21 nt, synthetic construct
  source 1..21: mol_type = other RNA
tgtttgaccaaattccggtga

SEQ ID NO: 37283 - RNA, 21 nt, synthetic construct
  source 1..21: mol_type = other RNA
tgtcaaccgaagtgtgagtgg

SEQ ID NO: 37284 - RNA, 21 nt, synthetic construct
  source 1..21: mol_type = other RNA
cacctgcgtggcctacgggga

SEQ ID NO: 37285 - RNA, 21 nt, synthetic construct
  source 1..21: mol_type = other RNA
agtccatggatatcgtcctca

SEQ ID NO: 37286 - RNA, 21 nt, synthetic construct
  source 1..21: mol_type = other RNA
caaattccggtgagcagcggt

SEQ ID NO: 37287 - RNA, 21 nt, synthetic construct
  source 1..21: mol_type = other RNA
ccctgtcggcagccaacatca

SEQ ID NO: 37288 - RNA, 21 nt, synthetic construct
  source 1..21: mol_type = other RNA
ggagctgccttacagccgcac

SEQ ID NO: 37289 - RNA, 21 nt, synthetic construct
  source 1..21: mol_type = other RNA
atgagtgcgagtgcatctgca

SEQ ID NO: 37290 - RNA, 21 nt, synthetic construct
  source 1..21: mol_type = other RNA
atcagggtcgactgcaacacc

SEQ ID NO: 37291 - RNA, 21 nt, synthetic construct
  source 1..21: mol_type = other RNA
gcgtggcctacggggatggcc

SEQ ID NO: 37292 - RNA, 21 nt, synthetic construct
  source 1..21: mol_type = other RNA
tctacaacaccaccgatgggc

SEQ ID NO: 37293 - RNA, 21 nt, synthetic construct
  source 1..21: mol_type = other RNA
aggggacgttgagtcctacga

SEQ ID NO: 37294 - RNA, 21 nt, synthetic construct
  source 1..21: mol_type = other RNA
cagaagttggatgggcccacg

SEQ ID NO: 37295 - RNA, 21 nt, synthetic construct
  source 1..21: mol_type = other RNA
gtgtcctggcggactccggac

SEQ ID NO: 37296 - RNA, 21 nt, synthetic construct
  source 1..21: mol_type = other RNA
acaccctcgagcttcttcatc

SEQ ID NO: 37297 - RNA, 21 nt, synthetic construct
  source 1..21: mol_type = other RNA
tgcgtggcctacggggatggc

SEQ ID NO: 37298 - RNA, 21 nt, synthetic construct
  source 1..21: mol_type = other RNA
cctgagtgaggccgacgtcac

SEQ ID NO: 37299 - RNA, 21 nt, synthetic construct
  source 1..21: mol_type = other RNA
ctgagtgaggccgacgtcacc

SEQ ID NO: 37300 - RNA, 21 nt, synthetic construct
  source 1..21: mol_type = other RNA
gctttgttccacccgtcactg

SEQ ID NO: 37301 - RNA, 21 nt, synthetic construct
  source 1..21: mol_type = other RNA
acccgctgtcaaccgaagtgt

SEQ ID NO: 37302 - RNA, 21 nt, synthetic construct
  source 1..21: mol_type = other RNA
ttgtggaatactcacgccagt

SEQ ID NO: 37303 - RNA, 21 nt, synthetic construct
  source 1..21: mol_type = other RNA
tacaacaccaccgatgggctt

SEQ ID NO: 37304 - RNA, 21 nt, synthetic construct
  source 1..21: mol_type = other RNA
gtgactggcgaggtgcaaccg

SEQ ID NO: 37305 - RNA, 21 nt, synthetic construct
  source 1..21: mol_type = other RNA
tgactggcgaggtgcaaccgg

SEQ ID NO: 37306 - RNA, 21 nt, synthetic construct
  source 1..21: mol_type = other RNA
cggtggccaggtgcgtgggtg

SEQ ID NO: 37307 - RNA, 21 nt, synthetic construct
  source 1..21: mol_type = other RNA
cccgctgtcaaccgaagtgtg

SEQ ID NO: 37308 - RNA, 21 nt, synthetic construct
  source 1..21: mol_type = other RNA
agtgactggcgaggtgcaacc

SEQ ID NO: 37309 - RNA, 21 nt, synthetic construct
  source 1..21: mol_type = other RNA
ggacggcgtctgcaccaagta

SEQ ID NO: 37310 - RNA, 21 nt, synthetic construct
  source 1..21: mol_type = other RNA
ctttgtggaatactcacgcca

SEQ ID NO: 37311 - RNA, 21 nt, synthetic construct
  source 1..21: mol_type = other RNA
gagtcctacgataagatcagg

SEQ ID NO: 37312 - RNA, 21 nt, synthetic construct
  source 1..21: mol_type = other RNA
ggacatagagtgccaggccga

SEQ ID NO: 37313 - RNA, 21 nt, synthetic construct
  source 1..21: mol_type = other RNA
gtctgcaccaagtacatgcag

SEQ ID NO: 37314 - RNA, 21 nt, synthetic construct
  source 1..21: mol_type = other RNA
gtggaatactcacgccagtgc

SEQ ID NO: 37315 - RNA, 21 nt, synthetic construct
  source 1..21: mol_type = other RNA
ctatgagtgcgagtgcatctg

SEQ ID NO: 37316 - RNA, 21 nt, synthetic construct
  source 1..21: mol_type = other RNA
accatcagggtcgactgcaac

SEQ ID NO: 37317 - RNA, 21 nt, synthetic construct
  source 1..21: mol_type = other RNA
gtgtcctgggaccggaagacc

SEQ ID NO: 37318 - RNA, 21 nt, synthetic construct
  source 1..21: mol_type = other RNA
gcacaacgaggccacctacaa

SEQ ID NO: 37319 - RNA, 21 nt, synthetic construct
  source 1..21: mol_type = other RNA
ccgcatcgtcaccgagaacat

SEQ ID NO: 37320 - RNA, 21 nt, synthetic construct
  source 1..21: mol_type = other RNA
tcagggtcgactgcaacacct

SEQ ID NO: 37321 - RNA, 21 nt, synthetic construct
  source 1..21: mol_type = other RNA
acaagtccatggatatcgtcc

SEQ ID NO: 37322 - RNA, 21 nt, synthetic construct
  source 1..21: mol_type = other RNA
accaaattccggtgagcagcg

SEQ ID NO: 37323 - RNA, 21 nt, synthetic construct
  source 1..21: mol_type = other RNA
caagaacggcgtgcttgtgtc

SEQ ID NO: 37324 - RNA, 21 nt, synthetic construct
  source 1..21: mol_type = other RNA
actattccacctttgacggca

SEQ ID NO: 37325 - RNA, 21 nt, synthetic construct
  source 1..21: mol_type = other RNA
cacggtggccaggtgcgtggg

SEQ ID NO: 37326 - RNA, 21 nt, synthetic construct
  source 1..21: mol_type = other RNA
tgcagctacgttctgtccaag

SEQ ID NO: 37327 - RNA, 21 nt, synthetic construct
  source 1..21: mol_type = other RNA
catcagggtcgactgcaacac

SEQ ID NO: 37328 - RNA, 21 nt, synthetic construct
  source 1..21: mol_type = other RNA
gcaactgcacctatgtcctca

SEQ ID NO: 37329 - RNA, 21 nt, synthetic construct
  source 1..21: mol_type = other RNA
gagttgggccaggtcgtggaa

SEQ ID NO: 37330 - RNA, 21 nt, synthetic construct
  source 1..21: mol_type = other RNA
ctgcagctacgttctgtccaa

SEQ ID NO: 37331 - RNA, 21 nt, synthetic construct
  source 1..21: mol_type = other RNA
acggacaacgagaactgcctg

SEQ ID NO: 37332 - RNA, 21 nt, synthetic construct
  source 1..21: mol_type = other RNA
cacaccctcgagcttcttcat

SEQ ID NO: 37333 - RNA, 21 nt, synthetic construct
  source 1..21: mol_type = other RNA
agggtcgactgcaacacctgc

SEQ ID NO: 37334 - RNA, 21 nt, synthetic construct
  source 1..21: mol_type = other RNA
ccttccgcatcgtcaccgaga

SEQ ID NO: 37335 - RNA, 21 nt, synthetic construct
  source 1..21: mol_type = other RNA
gagttgggccaggtcgtggaa

SEQ ID NO: 37336 - RNA, 21 nt, synthetic construct
  source 1..21: mol_type = other RNA
gacatagagtgccaggccgag

SEQ ID NO: 37337 - RNA, 21 nt, synthetic construct
  source 1..21: mol_type = other RNA
ccacggtgacttcccacaccc

SEQ ID NO: 37338 - RNA, 21 nt, synthetic construct
  source 1..21: mol_type = other RNA
acagctaccagctttacagcc

SEQ ID NO: 37339 - RNA, 21 nt, synthetic construct
  source 1..21: mol_type = other RNA
ccacggtgacttcccacaccc

SEQ ID NO: 37340 - RNA, 21 nt, synthetic construct
  source 1..21: mol_type = other RNA
acagctaccagctttacagcc

SEQ ID NO: 37341 - RNA, 21 nt, synthetic construct
  source 1..21: mol_type = other RNA
acagctaccagctttacagcc

SEQ ID NO: 37342 - RNA, 21 nt, synthetic construct
  source 1..21: mol_type = other RNA
cacctgcgtgaacaagcacct

SEQ ID NO: 37343 - RNA, 21 nt, synthetic construct
  source 1..21: mol_type = other RNA
tcagcaagaacggcgtgcttg

SEQ ID NO: 37344 - RNA, 21 nt, synthetic construct
  source 1..21: mol_type = other RNA
gaacggcgtgcttgtgtctgt

SEQ ID NO: 37345 - RNA, 21 nt, synthetic construct
  source 1..21: mol_type = other RNA
ctttgttccacccgtcactgt

SEQ ID NO: 37346 - RNA, 21 nt, synthetic construct
  source 1..21: mol_type = other RNA
ttgttccacccgtcactgtct

SEQ ID NO: 37347 - RNA, 21 nt, synthetic construct
  source 1..21: mol_type = other RNA
tgttccacccgtcactgtctt

SEQ ID NO: 37348 - RNA, 21 nt, synthetic construct
  source 1..21: mol_type = other RNA
gagttgggccaggtcgtggaa

SEQ ID NO: 37349 - RNA, 21 nt, synthetic construct
  source 1..21: mol_type = other RNA
gagttgggccaggtcgtggaa

SEQ ID NO: 37350 - RNA, 21 nt, synthetic construct
  source 1..21: mol_type = other RNA
gccacctttgtggaatactca

SEQ ID NO: 37351 - RNA, 21 nt, synthetic construct
  source 1..21: mol_type = other RNA
aatactcacgccagtgcgccc

SEQ ID NO: 37352 - RNA, 21 nt, synthetic construct
  source 1..21: mol_type = other RNA
agtgcgcccacgcggggggcc

SEQ ID NO: 37353 - RNA, 21 nt, synthetic construct
  source 1..21: mol_type = other RNA
ggggacacggccatccgggtc

SEQ ID NO: 37354 - RNA, 21 nt, synthetic construct
  source 1..21: mol_type = other RNA
accttccgcatcgtcaccgag

SEQ ID NO: 37355 - RNA, 21 nt, synthetic construct
  source 1..21: mol_type = other RNA
cttggaggggacgttgagtcc

SEQ ID NO: 37356 - RNA, 21 nt, synthetic construct
  source 1..21: mol_type = other RNA
cccaggacccaacggtgcaat

SEQ ID NO: 37357 - RNA, 21 nt, synthetic construct
  source 1..21: mol_type = other RNA
gagaatgagaactacgcccgg

SEQ ID NO: 37358 - RNA, 21 nt, synthetic construct
  source 1..21: mol_type = other RNA
gggggctgatgtgcgccaaca

SEQ ID NO: 37359 - RNA, 21 nt, synthetic construct
  source 1..21: mol_type = other RNA
accttcctcaatgacgcgggc

SEQ ID NO: 37360 - RNA, 21 nt, synthetic construct
  source 1..21: mol_type = other RNA
acaacttggaggggacgttga

SEQ ID NO: 37361 - RNA, 21 nt, synthetic construct
  source 1..21: mol_type = other RNA
atgagaactacgcccggcact

SEQ ID NO: 37362 - RNA, 21 nt, synthetic construct
  source 1..21: mol_type = other RNA
gggctgtttcagcacacactg

SEQ ID NO: 37363 - RNA, 21 nt, synthetic construct
  source 1..21: mol_type = other RNA
ttccactatgagtgcgagtgc

SEQ ID NO: 37364 - RNA, 21 nt, synthetic construct
  source 1..21: mol_type = other RNA
aatgagaactacgcccggcac

SEQ ID NO: 37365 - RNA, 21 nt, synthetic construct
  source 1..21: mol_type = other RNA
aaaaccggctgctgctactcc

SEQ ID NO: 37366 - RNA, 21 nt, synthetic construct
  source 1..21: mol_type = other RNA
ggggccggcctttgcggagtg

SEQ ID NO: 37367 - RNA, 21 nt, synthetic construct
  source 1..21: mol_type = other RNA
ctgcgtggcctacggggatgg

SEQ ID NO: 37368 - RNA, 21 nt, synthetic construct
  source 1..21: mol_type = other RNA
gcagccaacatcaccctgttc

SEQ ID NO: 37369 - RNA, 21 nt, synthetic construct
  source 1..21: mol_type = other RNA
agctgccacacgctggacgtg

SEQ ID NO: 37370 - RNA, 21 nt, synthetic construct
  source 1..21: mol_type = other RNA
ggcacctgcgtggcctacggg

SEQ ID NO: 37371 - RNA, 21 nt, synthetic construct
  source 1..21: mol_type = other RNA
gaccttccgcatcgtcaccga

SEQ ID NO: 37372 - RNA, 21 nt, synthetic construct
  source 1..21: mol_type = other RNA
catccgactgcaccaggacta

SEQ ID NO: 37373 - RNA, 21 nt, synthetic construct
  source 1..21: mol_type = other RNA
actgacatcccccagatacac

SEQ ID NO: 37374 - RNA, 21 nt, synthetic construct
  source 1..21: mol_type = other RNA
tgttctgctgcaactacggcc

SEQ ID NO: 37375 - RNA, 21 nt, synthetic construct
  source 1..21: mol_type = other RNA
tcctggcggactccggacacc

SEQ ID NO: 37376 - RNA, 21 nt, synthetic construct
  source 1..21: mol_type = other RNA
gcacctgcacctatgaggaca

SEQ ID NO: 37377 - RNA, 21 nt, synthetic construct
  source 1..21: mol_type = other RNA
taccaggacgtcatctacaac

SEQ ID NO: 37378 - RNA, 21 nt, synthetic construct
  source 1..21: mol_type = other RNA
aggacgtcatctacaacacca

SEQ ID NO: 37379 - RNA, 21 nt, synthetic construct
  source 1..21: mol_type = other RNA
tgttctgctgcaactacggcc

SEQ ID NO: 37380 - RNA, 21 nt, synthetic construct
  source 1..21: mol_type = other RNA
gtgctacaactacaggatccg

SEQ ID NO: 37381 - RNA, 21 nt, synthetic construct
  source 1..21: mol_type = other RNA
atctacaacaccaccgatggg

SEQ ID NO: 37382 - RNA, 21 nt, synthetic construct
  source 1..21: mol_type = other RNA
ccactacaagtccatggatat

SEQ ID NO: 37383 - RNA, 21 nt, synthetic construct
  source 1..21: mol_type = other RNA
gctgaccacgagcctggcgcc

SEQ ID NO: 37384 - RNA, 21 nt, synthetic construct
  source 1..21: mol_type = other RNA
gcgaggtctgccgctggtcca

SEQ ID NO: 37385 - RNA, 21 nt, synthetic construct
  source 1..21: mol_type = other RNA
ctggcggactccggacacctg

SEQ ID NO: 37386 - RNA, 21 nt, synthetic construct
  source 1..21: mol_type = other RNA
catctacaacaccaccgatgg

SEQ ID NO: 37387 - RNA, 21 nt, synthetic construct
  source 1..21: mol_type = other RNA
gctgatgtgcgccaacagcca

SEQ ID NO: 37388 - RNA, 21 nt, synthetic construct
  source 1..21: mol_type = other RNA
acccacgggaccttccgcatc

SEQ ID NO: 37389 - RNA, 21 nt, synthetic construct
  source 1..21: mol_type = other RNA
agagtggtttgatgaggacta

SEQ ID NO: 37390 - RNA, 21 nt, synthetic construct
  source 1..21: mol_type = other RNA
ccttcaacgagttctatgccc

SEQ ID NO: 37391 - RNA, 21 nt, synthetic construct
  source 1..21: mol_type = other RNA
tggtttgatgaggactacccc

SEQ ID NO: 37392 - RNA, 21 nt, synthetic construct
  source 1..21: mol_type = other RNA
ggtttgatgaggactacccca

SEQ ID NO: 37393 - RNA, 21 nt, synthetic construct
  source 1..21: mol_type = other RNA
aggactaccccaagtctgaac

SEQ ID NO: 37394 - RNA, 21 nt, synthetic construct
  source 1..21: mol_type = other RNA
caacttggaggggacgttgag

SEQ ID NO: 37395 - RNA, 21 nt, synthetic construct
  source 1..21: mol_type = other RNA
acatagagtgccaggccgaga

SEQ ID NO: 37396 - RNA, 21 nt, synthetic construct
  source 1..21: mol_type = other RNA
catagagtgccaggccgagag

SEQ ID NO: 37397 - RNA, 21 nt, synthetic construct
  source 1..21: mol_type = other RNA
ggccgagagcttccccaactg

SEQ ID NO: 37398 - RNA, 21 nt, synthetic construct
  source 1..21: mol_type = other RNA
ccctgtgggaccaccggcacc

SEQ ID NO: 37399 - RNA, 21 nt, synthetic construct
  source 1..21: mol_type = other RNA
cttctgcagggcatttggaca

SEQ ID NO: 37400 - RNA, 21 nt, synthetic construct
  source 1..21: mol_type = other RNA
tggacagagtggtttgacgtg

SEQ ID NO: 37401 - RNA, 21 nt, synthetic construct
  source 1..21: mol_type = other RNA
agaactgcacggtggccaggt

SEQ ID NO: 37402 - RNA, 21 nt, synthetic construct
  source 1..21: mol_type = other RNA
acggtggccaggtgcgtgggt

SEQ ID NO: 37403 - RNA, 21 nt, synthetic construct
  source 1..21: mol_type = other RNA
aggttgactccaccaagtact

SEQ ID NO: 37404 - RNA, 21 nt, synthetic construct
  source 1..21: mol_type = other RNA
acaactacaggatccgggtcc

SEQ ID NO: 37405 - RNA, 21 nt, synthetic construct
  source 1..21: mol_type = other RNA
gcaagaacggcgtgcttgtgt

SEQ ID NO: 37406 - RNA, 21 nt, synthetic construct
  source 1..21: mol_type = other RNA
tcttccacaacaacaccgagg

SEQ ID NO: 37407 - RNA, 21 nt, synthetic construct
  source 1..21: mol_type = other RNA
ttccacaacaacaccgagggc

SEQ ID NO: 37408 - RNA, 21 nt, synthetic construct
  source 1..21: mol_type = other RNA
ttgtgcccccgggcccattct

SEQ ID NO: 37409 - RNA, 21 nt, synthetic construct
  source 1..21: mol_type = other RNA
agctttgttccacccgtcact

SEQ ID NO: 37410 - RNA, 21 nt, synthetic construct
  source 1..21: mol_type = other RNA
gcccggggagtgtgcagtgac

SEQ ID NO: 37411 - RNA, 21 nt, synthetic construct
  source 1..21: mol_type = other RNA
ctggggccggcctttgcggag

SEQ ID NO: 37412 - RNA, 21 nt, synthetic construct
  source 1..21: mol_type = other RNA
gccggcctttgcggagtgcca

SEQ ID NO: 37413 - RNA, 21 nt, synthetic construct
  source 1..21: mol_type = other RNA
caactccatctacacgcagct

SEQ ID NO: 37414 - RNA, 21 nt, synthetic construct
  source 1..21: mol_type = other RNA
cgaggtctgccgctggtccag

SEQ ID NO: 37415 - RNA, 21 nt, synthetic construct
  source 1..21: mol_type = other RNA
cctgttcacaccctcgagctt

SEQ ID NO: 37416 - RNA, 21 nt, synthetic construct
  source 1..21: mol_type = other RNA
cttcaaccagaaccaggctga

SEQ ID NO: 37417 - RNA, 21 nt, synthetic construct
  source 1..21: mol_type = other RNA
cgtctgcaccaagtacatgca

SEQ ID NO: 37418 - RNA, 21 nt, synthetic construct
  source 1..21: mol_type = other RNA
cttcctcaatgacgcgggcgc

SEQ ID NO: 37419 - RNA, 21 nt, synthetic construct
  source 1..21: mol_type = other RNA
gacgcgggcgcctgtgtgccc

SEQ ID NO: 37420 - RNA, 21 nt, synthetic construct
  source 1..21: mol_type = other RNA
tgagtgaggccgacgtcacct

SEQ ID NO: 37421 - RNA, 21 nt, synthetic construct
  source 1..21: mol_type = other RNA
tacggggatggccacttcatc

SEQ ID NO: 37422 - RNA, 21 nt, synthetic construct
  source 1..21: mol_type = other RNA
tggacgtgggctgtttcagca

SEQ ID NO: 37423 - RNA, 21 nt, synthetic construct
  source 1..21: mol_type = other RNA
tggtgtccccctgcgggagtt

SEQ ID NO: 37424 - RNA, 21 nt, synthetic construct
  source 1..21: mol_type = other RNA
cctgtgccgctgccccacctg

SEQ ID NO: 37425 - RNA, 21 nt, synthetic construct
  source 1..21: mol_type = other RNA
ctcaactccatctacacgcag

SEQ ID NO: 37426 - RNA, 21 nt, synthetic construct
  source 1..21: mol_type = other RNA
catgcagaactgccccaagtc

SEQ ID NO: 37427 - RNA, 21 nt, synthetic construct
  source 1..21: mol_type = other RNA
tcaagatgtgctacaactaca

SEQ ID NO: 37428 - RNA, 21 nt, synthetic construct
  source 1..21: mol_type = other RNA
tggtgtccccctgcgggagtt

SEQ ID NO: 37429 - RNA, 21 nt, synthetic construct
  source 1..21: mol_type = other RNA
tggtgtccccctgcgggagtt

SEQ ID NO: 37430 - RNA, 21 nt, synthetic construct
  source 1..21: mol_type = other RNA
ctgcctaaaaacctgccggaa

SEQ ID NO: 37431 - RNA, 21 nt, synthetic construct
  source 1..21: mol_type = other RNA
ccgaagtgtgagtggacagag

SEQ ID NO: 37432 - RNA, 21 nt, synthetic construct
  source 1..21: mol_type = other RNA
acggggatggccacttcatca

SEQ ID NO: 37433 - RNA, 21 nt, synthetic construct
  source 1..21: mol_type = other RNA
gccgctgaccacgagcctggc

SEQ ID NO: 37434 - RNA, 21 nt, synthetic construct
  source 1..21: mol_type = other RNA
cgctgtcaaccgaagtgtgag

SEQ ID NO: 37435 - RNA, 21 nt, synthetic construct
  source 1..21: mol_type = other RNA
gggtcgactgcaacacctgca

SEQ ID NO: 37436 - RNA, 21 nt, synthetic construct
  source 1..21: mol_type = other RNA
cacactgcgtgtccggctgtg

SEQ ID NO: 37437 - RNA, 21 nt, synthetic construct
  source 1..21: mol_type = other RNA
tgttcatccgactgcaccagg

SEQ ID NO: 37438 - RNA, 21 nt, synthetic construct
  source 1..21: mol_type = other RNA
ggacagagtggtttgacgtgg

SEQ ID NO: 37439 - RNA, 21 nt, synthetic construct
  source 1..21: mol_type = other RNA
ttcagcacacactgcgtgtcc

SEQ ID NO: 37440 - RNA, 21 nt, synthetic construct
  source 1..21: mol_type = other RNA
atgaagtgcgtggcccagtgt

SEQ ID NO: 37441 - RNA, 21 nt, synthetic construct
  source 1..21: mol_type = other RNA
gtgcgctcacagccttgaggc

SEQ ID NO: 37442 - RNA, 21 nt, synthetic construct
  source 1..21: mol_type = other RNA
ctgcacctatgaggacaggac

SEQ ID NO: 37443 - RNA, 21 nt, synthetic construct
  source 1..21: mol_type = other RNA
ttccacccgtcactgtcttcc

SEQ ID NO: 37444 - RNA, 21 nt, synthetic construct
  source 1..21: mol_type = other RNA
cggcacctgcaccaacaacca

SEQ ID NO: 37445 - RNA, 21 nt, synthetic construct
  source 1..21: mol_type = other RNA
gcccccgggcccattcttcaa

SEQ ID NO: 37446 - RNA, 21 nt, synthetic construct
  source 1..21: mol_type = other RNA
cagcgggaggagctgccttac

SEQ ID NO: 37447 - RNA, 21 nt, synthetic construct
  source 1..21: mol_type = other RNA
gcccacggagcagtgcccgga

SEQ ID NO: 37448 - RNA, 21 nt, synthetic construct
  source 1..21: mol_type = other RNA
cacggagcagtgcccggaccc

SEQ ID NO: 37449 - RNA, 21 nt, synthetic construct
  source 1..21: mol_type = other RNA
gtttgacgtggacttcccaac

SEQ ID NO: 37450 - RNA, 21 nt, synthetic construct
  source 1..21: mol_type = other RNA
ccacctttgacggcacctctt

SEQ ID NO: 37451 - RNA, 21 nt, synthetic construct
  source 1..21: mol_type = other RNA
ctgctccaacccccagcgcgc

SEQ ID NO: 37452 - RNA, 21 nt, synthetic construct
  source 1..21: mol_type = other RNA
tccgcgaggtctgccgctggt

SEQ ID NO: 37453 - RNA, 21 nt, synthetic construct
  source 1..21: mol_type = other RNA
cagtgccaggacctgccgtgc

SEQ ID NO: 37454 - RNA, 21 nt, synthetic construct
  source 1..21: mol_type = other RNA
tcctcaactccatctacacgc

SEQ ID NO: 37455 - RNA, 21 nt, synthetic construct
  source 1..21: mol_type = other RNA
cctcaactccatctacacgca

SEQ ID NO: 37456 - RNA, 21 nt, synthetic construct
  source 1..21: mol_type = other RNA
gagctacgagctgatcctcca

SEQ ID NO: 37457 - RNA, 21 nt, synthetic construct
  source 1..21: mol_type = other RNA
tgcctgtggacggctgcacct

SEQ ID NO: 37458 - RNA, 21 nt, synthetic construct
  source 1..21: mol_type = other RNA
cagatgaagtgcgtggcccag

SEQ ID NO: 37459 - RNA, 21 nt, synthetic construct
  source 1..21: mol_type = other RNA
ggagtgcagccaccggctctg

SEQ ID NO: 37460 - RNA, 21 nt, synthetic construct
  source 1..21: mol_type = other RNA
atcccctgtgggaccaccggc

SEQ ID NO: 37461 - RNA, 21 nt, synthetic construct
  source 1..21: mol_type = other RNA
tgactccaccaagtactacga

SEQ ID NO: 37462 - RNA, 21 nt, synthetic construct
  source 1..21: mol_type = other RNA
ggtttcagcaagaacggcgtg

SEQ ID NO: 37463 - RNA, 21 nt, synthetic construct
  source 1..21: mol_type = other RNA
agtgtgcagtgactggcgagg

SEQ ID NO: 37464 - RNA, 21 nt, synthetic construct
  source 1..21: mol_type = other RNA
cgccagtgcgcccacgcgggg

SEQ ID NO: 37465 - RNA, 21 nt, synthetic construct
  source 1..21: mol_type = other RNA
ggacacccaggacccaacggt

SEQ ID NO: 37466 - RNA, 21 nt, synthetic construct
  source 1..21: mol_type = other RNA
aggacttcaacgtccagctac

SEQ ID NO: 37467 - RNA, 21 nt, synthetic construct
  source 1..21: mol_type = other RNA
gacttcaacgtccagctacgc

SEQ ID NO: 37468 - RNA, 21 nt, synthetic construct
  source 1..21: mol_type = other RNA
gaggacttcaacgtccagcta

SEQ ID NO: 37469 - RNA, 21 nt, synthetic construct
  source 1..21: mol_type = other RNA
cacacactgcgtgtccggctg

SEQ ID NO: 37470 - RNA, 21 nt, synthetic construct
  source 1..21: mol_type = other RNA
gtgcacaacgaggccacctac

SEQ ID NO: 37471 - RNA, 21 nt, synthetic construct
  source 1..21: mol_type = other RNA
ctgcgtgtccggctgtgtctg

SEQ ID NO: 37472 - RNA, 21 nt, synthetic construct
  source 1..21: mol_type = other RNA
acgaggccacctacaagcctg

SEQ ID NO: 37473 - RNA, 21 nt, synthetic construct
  source 1..21: mol_type = other RNA
gcacctgcgtggcctacgggg

SEQ ID NO: 37474 - RNA, 21 nt, synthetic construct
  source 1..21: mol_type = other RNA
cgacgcgggcctgtgtgtgtc

SEQ ID NO: 37475 - RNA, 21 nt, synthetic construct
  source 1..21: mol_type = other RNA
tgtgtcctggcggactccgga

SEQ ID NO: 37476 - RNA, 21 nt, synthetic construct
  source 1..21: mol_type = other RNA
ggcggactccggacacctgcc

SEQ ID NO: 37477 - RNA, 21 nt, synthetic construct
  source 1..21: mol_type = other RNA
ccctgcggggcaccctgccta

SEQ ID NO: 37478 - RNA, 21 nt, synthetic construct
  source 1..21: mol_type = other RNA
cgtcatctacaacaccaccga

SEQ ID NO: 37479 - RNA, 21 nt, synthetic construct
  source 1..21: mol_type = other RNA
ccgctgaccacgagcctggcg

SEQ ID NO: 37480 - RNA, 21 nt, synthetic construct
  source 1..21: mol_type = other RNA
cacctctcaggccgagaccag

SEQ ID NO: 37481 - RNA, 21 nt, synthetic construct
  source 1..21: mol_type = other RNA
attccacctttgacggcacct

SEQ ID NO: 37482 - RNA, 21 nt, synthetic construct
  source 1..21: mol_type = other RNA
tgaccaaattccggtgagcag

SEQ ID NO: 37483 - RNA, 21 nt, synthetic construct
  source 1..21: mol_type = other RNA
acgggaccttccgcatcgtca

SEQ ID NO: 37484 - RNA, 21 nt, synthetic construct
  source 1..21: mol_type = other RNA
gggaccttccgcatcgtcacc

SEQ ID NO: 37485 - RNA, 21 nt, synthetic construct
  source 1..21: mol_type = other RNA
gtgcagtgactggcgaggtgc

SEQ ID NO: 37486 - RNA, 21 nt, synthetic construct
  source 1..21: mol_type = other RNA
ggaccttccgcatcgtcaccg

SEQ ID NO: 37487 - RNA, 21 nt, synthetic construct
  source 1..21: mol_type = other RNA
gactccaccaagtactacgag

SEQ ID NO: 37488 - RNA, 21 nt, synthetic construct
  source 1..21: mol_type = other RNA
gtcctggcggactccggacac

SEQ ID NO: 37489 - RNA, 21 nt, synthetic construct
  source 1..21: mol_type = other RNA
gtcatctacaacaccaccgat

SEQ ID NO: 37490 - RNA, 21 nt, synthetic construct
  source 1..21: mol_type = other RNA
gacgcgggcctgtgtgtgtcc

SEQ ID NO: 37491 - RNA, 21 nt, synthetic construct
  source 1..21: mol_type = other RNA
tcatctacaacaccaccgatg

SEQ ID NO: 37492 - RNA, 21 nt, synthetic construct
  source 1..21: mol_type = other RNA
acaacaccaccgatgggcttg

SEQ ID NO: 37493 - RNA, 21 nt, synthetic construct
  source 1..21: mol_type = other RNA
cgcgaggtctgccgctggtcc

SEQ ID NO: 37494 - RNA, 21 nt, synthetic construct
  source 1..21: mol_type = other RNA
ggggctgatgtgcgccaacag

SEQ ID NO: 37495 - RNA, 21 nt, synthetic construct
  source 1..21: mol_type = other RNA
ggctgatgtgcgccaacagcc

SEQ ID NO: 37496 - RNA, 21 nt, synthetic construct
  source 1..21: mol_type = other RNA
acccaggacccaacggtgcaa

SEQ ID NO: 37497 - RNA, 21 nt, synthetic construct
  source 1..21: mol_type = other RNA
agtggacagagtggtttgatg

SEQ ID NO: 37498 - RNA, 21 nt, synthetic construct
  source 1..21: mol_type = other RNA
agcaaccgaaaagaccaccct

SEQ ID NO: 37499 - RNA, 21 nt, synthetic construct
  source 1..21: mol_type = other RNA
agtggtttgatgaggactacc

SEQ ID NO: 37500 - RNA, 21 nt, synthetic construct
  source 1..21: mol_type = other RNA
gccgagagcttccccaactgg

SEQ ID NO: 37501 - RNA, 21 nt, synthetic construct
  source 1..21: mol_type = other RNA
actacaagtccatggatatcg

SEQ ID NO: 37502 - RNA, 21 nt, synthetic construct
  source 1..21: mol_type = other RNA
tgtgctacaactacaggatcc

SEQ ID NO: 37503 - RNA, 21 nt, synthetic construct
  source 1..21: mol_type = other RNA
catccagtgcgctcacagcct

SEQ ID NO: 37504 - RNA, 21 nt, synthetic construct
  source 1..21: mol_type = other RNA
gaccccgctccagtttgggaa

SEQ ID NO: 37505 - RNA, 21 nt, synthetic construct
  source 1..21: mol_type = other RNA
cacagctaccagctttacagc

SEQ ID NO: 37506 - RNA, 21 nt, synthetic construct
  source 1..21: mol_type = other RNA
cacagctaccagctttacagc

SEQ ID NO: 37507 - RNA, 21 nt, synthetic construct
  source 1..21: mol_type = other RNA
cacagctaccagctttacagc

SEQ ID NO: 37508 - RNA, 21 nt, synthetic construct
  source 1..21: mol_type = other RNA
ctccacgacaagcccggccct

SEQ ID NO: 37509 - RNA, 21 nt, synthetic construct
  source 1..21: mol_type = other RNA
gcacctatgtcctcatgagag

SEQ ID NO: 37510 - RNA, 21 nt, synthetic construct
  source 1..21: mol_type = other RNA
gcctgccgctcccaggttgac

SEQ ID NO: 37511 - RNA, 21 nt, synthetic construct
  source 1..21: mol_type = other RNA
gttcacaccctcgagcttctt

SEQ ID NO: 37512 - RNA, 21 nt, synthetic construct
  source 1..21: mol_type = other RNA
ttcacaccctcgagcttcttc

SEQ ID NO: 37513 - RNA, 21 nt, synthetic construct
  source 1..21: mol_type = other RNA
caagatgtgctacaactacag

SEQ ID NO: 37514 - RNA, 21 nt, synthetic construct
  source 1..21: mol_type = other RNA
agccccggtgtcagtggacag

SEQ ID NO: 37515 - RNA, 21 nt, synthetic construct
  source 1..21: mol_type = other RNA
tgccaggacctgccgtgccct

SEQ ID NO: 37516 - RNA, 21 nt, synthetic construct
  source 1..21: mol_type = other RNA
tgcctaaaaacctgccggaac

SEQ ID NO: 37517 - RNA, 21 nt, synthetic construct
  source 1..21: mol_type = other RNA
aacatcccctgtgggaccacc

SEQ ID NO: 37518 - RNA, 21 nt, synthetic construct
  source 1..21: mol_type = other RNA
gcacctatgaggacaggacct

SEQ ID NO: 37519 - RNA, 21 nt, synthetic construct
  source 1..21: mol_type = other RNA
tcaatgacgcgggcgcctgtg

SEQ ID NO: 37520 - RNA, 21 nt, synthetic construct
  source 1..21: mol_type = other RNA
tccctcagtgccagcacggag

SEQ ID NO: 37521 - RNA, 21 nt, synthetic construct
  source 1..21: mol_type = other RNA
cccctgtcggcagccaacatc

SEQ ID NO: 37522 - RNA, 21 nt, synthetic construct
  source 1..21: mol_type = other RNA
cccacagctaccagctttaca

SEQ ID NO: 37523 - RNA, 21 nt, synthetic construct
  source 1..21: mol_type = other RNA
cccacagctaccagctttaca

SEQ ID NO: 37524 - RNA, 21 nt, synthetic construct
  source 1..21: mol_type = other RNA
ggagcagtgcccggacccgct

SEQ ID NO: 37525 - RNA, 21 nt, synthetic construct
  source 1..21: mol_type = other RNA
cccacgcggggggccagccgc

SEQ ID NO: 37526 - RNA, 21 nt, synthetic construct
  source 1..21: mol_type = other RNA
tgacgcgggcgcctgtgtgcc

SEQ ID NO: 37527 - RNA, 21 nt, synthetic construct
  source 1..21: mol_type = other RNA
agcacacactgcgtgtccggc

SEQ ID NO: 37528 - RNA, 21 nt, synthetic construct
  source 1..21: mol_type = other RNA
cccacagctaccagctttaca

SEQ ID NO: 37529 - RNA, 21 nt, synthetic construct
  source 1..21: mol_type = other RNA
tcccactattccacctttgac

SEQ ID NO: 37530 - RNA, 21 nt, synthetic construct
  source 1..21: mol_type = other RNA
ttcttcaatgaggaccagatg

SEQ ID NO: 37531 - RNA, 21 nt, synthetic construct
  source 1..21: mol_type = other RNA
tgtcctcatgagagagatcca

SEQ ID NO: 37532 - RNA, 21 nt, synthetic construct
  source 1..21: mol_type = other RNA
ccacaacgccattcaccttca

SEQ ID NO: 37533 - RNA, 21 nt, synthetic construct
  source 1..21: mol_type = other RNA
cacaacgccattcaccttcac

SEQ ID NO: 37534 - RNA, 21 nt, synthetic construct
  source 1..21: mol_type = other RNA
gagtggtttgatgaggactac

SEQ ID NO: 37535 - RNA, 21 nt, synthetic construct
  source 1..21: mol_type = other RNA
acggagcctgctgtgcctacc

SEQ ID NO: 37536 - RNA, 21 nt, synthetic construct
  source 1..21: mol_type = other RNA
gaccaaattccggtgagcagc

SEQ ID NO: 37537 - RNA, 21 nt, synthetic construct
  source 1..21: mol_type = other RNA
gtccatggatatcgtcctcac

SEQ ID NO: 37538 - RNA, 21 nt, synthetic construct
  source 1..21: mol_type = other RNA
ccccaagcccttccactcgaa

SEQ ID NO: 37539 - RNA, 21 nt, synthetic construct
  source 1..21: mol_type = other RNA
ctgtgacttctacaacccaca

SEQ ID NO: 37540 - RNA, 21 nt, synthetic construct
  source 1..21: mol_type = other RNA
aggacatagagtgccaggccg

SEQ ID NO: 37541 - RNA, 21 nt, synthetic construct
  source 1..21: mol_type = other RNA
gcagcggtttcagcaagaacg

SEQ ID NO: 37542 - RNA, 21 nt, synthetic construct
  source 1..21: mol_type = other RNA
tctatggcaacaccctcctct

SEQ ID NO: 37543 - RNA, 21 nt, synthetic construct
  source 1..21: mol_type = other RNA
tctatggcaacaccctcctct

SEQ ID NO: 37544 - RNA, 21 nt, synthetic construct
  source 1..21: mol_type = other RNA
tctatggcaacaccctcctct

SEQ ID NO: 37545 - RNA, 21 nt, synthetic construct
  source 1..21: mol_type = other RNA
tctatggcaacaccctcctct

SEQ ID NO: 37546 - RNA, 21 nt, synthetic construct
  source 1..21: mol_type = other RNA
tctatggcaacaccctcctct

SEQ ID NO: 37547 - RNA, 21 nt, synthetic construct
  source 1..21: mol_type = other RNA
ttcagcaagaacggcgtgctt

SEQ ID NO: 37548 - RNA, 21 nt, synthetic construct
  source 1..21: mol_type = other RNA
tgtgcccccgggcccattctt

SEQ ID NO: 37549 - RNA, 21 nt, synthetic construct
  source 1..21: mol_type = other RNA
cacccaggacccaacggtgca

SEQ ID NO: 37550 - RNA, 21 nt, synthetic construct
  source 1..21: mol_type = other RNA
gggctgtgagtggcactacca

SEQ ID NO: 37551 - RNA, 21 nt, synthetic construct
  source 1..21: mol_type = other RNA
gtggccaggtgcgtgggtgac

SEQ ID NO: 37552 - RNA, 21 nt, synthetic construct
  source 1..21: mol_type = other RNA
cagcaggtggactgtgaccgc

SEQ ID NO: 37553 - RNA, 21 nt, synthetic construct
  source 1..21: mol_type = other RNA
aggcccggctgccctacagcc

SEQ ID NO: 37554 - RNA, 21 nt, synthetic construct
  source 1..21: mol_type = other RNA
gactgacatcccccagataca

SEQ ID NO: 37555 - RNA, 21 nt, synthetic construct
  source 1..21: mol_type = other RNA
cagaaggtgcactgtgacgtc

SEQ ID NO: 37556 - RNA, 21 nt, synthetic construct
  source 1..21: mol_type = other RNA
gtgccaggccgagagcttccc

SEQ ID NO: 37557 - RNA, 21 nt, synthetic construct
  source 1..21: mol_type = other RNA
ccactattccacctttgacgg

SEQ ID NO: 37558 - RNA, 21 nt, synthetic construct
  source 1..21: mol_type = other RNA
gggacacggccatccgggtcc

SEQ ID NO: 37559 - RNA, 21 nt, synthetic construct
  source 1..21: mol_type = other RNA
ttgactccaccaagtactacg

SEQ ID NO: 37560 - RNA, 21 nt, synthetic construct
  source 1..21: mol_type = other RNA
caggacctgtgccgctgcccc

SEQ ID NO: 37561 - RNA, 21 nt, synthetic construct
  source 1..21: mol_type = other RNA
cagcccttcttcaatgaggac

SEQ ID NO: 37562 - RNA, 21 nt, synthetic construct
  source 1..21: mol_type = other RNA
ccatcagggtcgactgcaaca

SEQ ID NO: 37563 - RNA, 21 nt, synthetic construct
  source 1..21: mol_type = other RNA
gcccttcttcaatgaggacca

SEQ ID NO: 37564 - RNA, 21 nt, synthetic construct
  source 1..21: mol_type = other RNA
tgaagtgcgtggcccagtgtg

SEQ ID NO: 37565 - RNA, 21 nt, synthetic construct
  source 1..21: mol_type = other RNA
catcccctgtgggaccaccgg

SEQ ID NO: 37566 - RNA, 21 nt, synthetic construct
  source 1..21: mol_type = other RNA
ccagatgaagtgcgtggccca

SEQ ID NO: 37567 - RNA, 21 nt, synthetic construct
  source 1..21: mol_type = other RNA
ggcagtgcccctgcacccacg

SEQ ID NO: 37568 - RNA, 21 nt, synthetic construct
  source 1..21: mol_type = other RNA
cagaccacagcaaccgaaaag

SEQ ID NO: 37569 - RNA, 21 nt, synthetic construct
  source 1..21: mol_type = other RNA
ttgtcaggctggaccccgccc

SEQ ID NO: 37570 - RNA, 21 nt, synthetic construct
  source 1..21: mol_type = other RNA
tgtggaacggagaggacagtg

SEQ ID NO: 37571 - RNA, 21 nt, synthetic construct
  source 1..21: mol_type = other RNA
gcacacactgcgtgtccggct

SEQ ID NO: 37572 - RNA, 21 nt, synthetic construct
  source 1..21: mol_type = other RNA
ctgcggggcaccctgcctaaa

SEQ ID NO: 37573 - RNA, 21 nt, synthetic construct
  source 1..21: mol_type = other RNA
accagatgaagtgcgtggccc

SEQ ID NO: 37574 - RNA, 21 nt, synthetic construct
  source 1..21: mol_type = other RNA
cctcagtgccagcacggagcc

SEQ ID NO: 37575 - RNA, 21 nt, synthetic construct
  source 1..21: mol_type = other RNA
ttggaggggacgttgagtcct

SEQ ID NO: 37576 - RNA, 21 nt, synthetic construct
  source 1..21: mol_type = other RNA
ggtggccaggtgcgtgggtga

SEQ ID NO: 37577 - RNA, 21 nt, synthetic construct
  source 1..21: mol_type = other RNA
gggagttgggccaggtcgtgg

SEQ ID NO: 37578 - RNA, 21 nt, synthetic construct
  source 1..21: mol_type = other RNA
gggagttgggccaggtcgtgg

SEQ ID NO: 37579 - RNA, 21 nt, synthetic construct
  source 1..21: mol_type = other RNA
gggagttgggccaggtcgtgg

SEQ ID NO: 37580 - RNA, 21 nt, synthetic construct
  source 1..21: mol_type = other RNA
ccaccagggccagatgtgcgg

SEQ ID NO: 37581 - RNA, 21 nt, synthetic construct
  source 1..21: mol_type = other RNA
gggagttgggccaggtcgtgg

SEQ ID NO: 37582 - RNA, 21 nt, synthetic construct
  source 1..21: mol_type = other RNA
cagcgggacggaaccactgcc

SEQ ID NO: 37583 - RNA, 21 nt, synthetic construct
  source 1..21: mol_type = other RNA
ggacgactgtctccagcggga

SEQ ID NO: 37584 - RNA, 21 nt, synthetic construct
  source 1..21: mol_type = other RNA
tcaactatgaaatccgtgtgt

SEQ ID NO: 37585 - RNA, 21 nt, synthetic construct
  source 1..21: mol_type = other RNA
tcaactatgaaatccgtgtgt

SEQ ID NO: 37586 - RNA, 21 nt, synthetic construct
  source 1..21: mol_type = other RNA
tcaactatgaaatccgtgtgt

SEQ ID NO: 37587 - RNA, 21 nt, synthetic construct
  source 1..21: mol_type = other RNA
tcaactatgaaatccgtgtgt

SEQ ID NO: 37588 - RNA, 21 nt, synthetic construct
  source 1..21: mol_type = other RNA
agtgtcggacccgagccagcc

SEQ ID NO: 37589 - RNA, 21 nt, synthetic construct
  source 1..21: mol_type = other RNA
gagttctatgcccacaacgcc

SEQ ID NO: 37590 - RNA, 21 nt, synthetic construct
  source 1..21: mol_type = other RNA
actatgaaatccgtgtgttct

SEQ ID NO: 37591 - RNA, 21 nt, synthetic construct
  source 1..21: mol_type = other RNA
actatgaaatccgtgtgttct

SEQ ID NO: 37592 - RNA, 21 nt, synthetic construct
  source 1..21: mol_type = other RNA
actatgaaatccgtgtgttct

SEQ ID NO: 37593 - RNA, 21 nt, synthetic construct
  source 1..21: mol_type = other RNA
actatgaaatccgtgtgttct

SEQ ID NO: 37594 - RNA, 21 nt, synthetic construct
  source 1..21: mol_type = other RNA
gggacgactgtctccagcggg

SEQ ID NO: 37595 - RNA, 21 nt, synthetic construct
  source 1..21: mol_type = other RNA
tgatgtcactgggacgccctg

SEQ ID NO: 37596 - RNA, 21 nt, synthetic construct
  source 1..21: mol_type = other RNA
tgcttcaactatgaaatccgt

SEQ ID NO: 37597 - RNA, 21 nt, synthetic construct
  source 1..21: mol_type = other RNA
tgcttcaactatgaaatccgt

SEQ ID NO: 37598 - RNA, 21 nt, synthetic construct
  source 1..21: mol_type = other RNA
tgcttcaactatgaaatccgt

SEQ ID NO: 37599 - RNA, 21 nt, synthetic construct
  source 1..21: mol_type = other RNA
tgcttcaactatgaaatccgt

SEQ ID NO: 37600 - RNA, 21 nt, synthetic construct
  source 1..21: mol_type = other RNA
ctcctccactccggggacgac

SEQ ID NO: 37601 - RNA, 21 nt, synthetic construct
  source 1..21: mol_type = other RNA
tccagcgggacggaaccactg

SEQ ID NO: 37602 - RNA, 21 nt, synthetic construct
  source 1..21: mol_type = other RNA
ctcctccactccggggacgac

SEQ ID NO: 37603 - RNA, 21 nt, synthetic construct
  source 1..21: mol_type = other RNA
ctacaagtccatggatatcgt

SEQ ID NO: 37604 - RNA, 21 nt, synthetic construct
  source 1..21: mol_type = other RNA
tcaccctgttcacaccctcga

SEQ ID NO: 37605 - RNA, 21 nt, synthetic construct
  source 1..21: mol_type = other RNA
ccaacgtcacctgcgtgaaca

SEQ ID NO: 37606 - RNA, 21 nt, synthetic construct
  source 1..21: mol_type = other RNA
agggacgactgtctccagcgg

SEQ ID NO: 37607 - RNA, 21 nt, synthetic construct
  source 1..21: mol_type = other RNA
ttcaactatgaaatccgtgtg

SEQ ID NO: 37608 - RNA, 21 nt, synthetic construct
  source 1..21: mol_type = other RNA
ttcaactatgaaatccgtgtg

SEQ ID NO: 37609 - RNA, 21 nt, synthetic construct
  source 1..21: mol_type = other RNA
ttcaactatgaaatccgtgtg

SEQ ID NO: 37610 - RNA, 21 nt, synthetic construct
  source 1..21: mol_type = other RNA
ttcaactatgaaatccgtgtg

SEQ ID NO: 37611 - RNA, 21 nt, synthetic construct
  source 1..21: mol_type = other RNA
gttctatgcccacaacgccag

SEQ ID NO: 37612 - RNA, 21 nt, synthetic construct
  source 1..21: mol_type = other RNA
cttcaactatgaaatccgtgt

SEQ ID NO: 37613 - RNA, 21 nt, synthetic construct
  source 1..21: mol_type = other RNA
cttcaactatgaaatccgtgt

SEQ ID NO: 37614 - RNA, 21 nt, synthetic construct
  source 1..21: mol_type = other RNA
tgaaatccgtgtgttctgctg

SEQ ID NO: 37615 - RNA, 21 nt, synthetic construct
  source 1..21: mol_type = other RNA
tgtgcttcaactatgaaatcc

SEQ ID NO: 37616 - RNA, 21 nt, synthetic construct
  source 1..21: mol_type = other RNA
atgaaatccgtgtgttctgct

SEQ ID NO: 37617 - RNA, 21 nt, synthetic construct
  source 1..21: mol_type = other RNA
tgtgcttcaactatgaaatcc

SEQ ID NO: 37618 - RNA, 21 nt, synthetic construct
  source 1..21: mol_type = other RNA
atgaaatccgtgtgttctgct

SEQ ID NO: 37619 - RNA, 21 nt, synthetic construct
  source 1..21: mol_type = other RNA
tgtgcttcaactatgaaatcc

SEQ ID NO: 37620 - RNA, 21 nt, synthetic construct
  source 1..21: mol_type = other RNA
atgaaatccgtgtgttctgct

SEQ ID NO: 37621 - RNA, 21 nt, synthetic construct
  source 1..21: mol_type = other RNA
tgtgcttcaactatgaaatcc

SEQ ID NO: 37622 - RNA, 21 nt, synthetic construct
  source 1..21: mol_type = other RNA
atgaaatccgtgtgttctgct

SEQ ID NO: 37623 - RNA, 21 nt, synthetic construct
  source 1..21: mol_type = other RNA
cgtcacctgcgtgaacaagca

SEQ ID NO: 37624 - RNA, 21 nt, synthetic construct
  source 1..21: mol_type = other RNA
ccagcgggacggaaccactgc

SEQ ID NO: 37625 - RNA, 21 nt, synthetic construct
  source 1..21: mol_type = other RNA
gccacgcgtagccggtccgtg

SEQ ID NO: 37626 - RNA, 21 nt, synthetic construct
  source 1..21: mol_type = other RNA
caggtggactgtgaccgcatg

SEQ ID NO: 37627 - RNA, 21 nt, synthetic construct
  source 1..21: mol_type = other RNA
gcttcaactatgaaatccgtg

SEQ ID NO: 37628 - RNA, 21 nt, synthetic construct
  source 1..21: mol_type = other RNA
gcttcaactatgaaatccgtg

SEQ ID NO: 37629 - RNA, 21 nt, synthetic construct
  source 1..21: mol_type = other RNA
gcttcaactatgaaatccgtg

SEQ ID NO: 37630 - RNA, 21 nt, synthetic construct
  source 1..21: mol_type = other RNA
gcttcaactatgaaatccgtg

SEQ ID NO: 37631 - RNA, 21 nt, synthetic construct
  source 1..21: mol_type = other RNA
acgtcacctgcgtgaacaagc

SEQ ID NO: 37632 - RNA, 21 nt, synthetic construct
  source 1..21: mol_type = other RNA
cctgcccatcaaagtgtcgga

SEQ ID NO: 37633 - RNA, 21 nt, synthetic construct
  source 1..21: mol_type = other RNA
caacaaccagagggacgactg

SEQ ID NO: 37634 - RNA, 21 nt, synthetic construct
  source 1..21: mol_type = other RNA
cagagggacgactgtctccag

SEQ ID NO: 37635 - RNA, 21 nt, synthetic construct
  source 1..21: mol_type = other RNA
agagggacgactgtctccagc

SEQ ID NO: 37636 - RNA, 21 nt, synthetic construct
  source 1..21: mol_type = other RNA
gacgactgtctccagcgggac

SEQ ID NO: 37637 - RNA, 21 nt, synthetic construct
  source 1..21: mol_type = other RNA
cccacccaccaaagtgtacaa

SEQ ID NO: 37638 - RNA, 21 nt, synthetic construct
  source 1..21: mol_type = other RNA
ctgcacgcccttctgtgtccc

SEQ ID NO: 37639 - RNA, 21 nt, synthetic construct
  source 1..21: mol_type = other RNA
aaccagagggacgactgtctc

SEQ ID NO: 37640 - RNA, 21 nt, synthetic construct
  source 1..21: mol_type = other RNA
ggctgcacgcccttctgtgtc

SEQ ID NO: 37641 - RNA, 21 nt, synthetic construct
  source 1..21: mol_type = other RNA
cctccggagctgccacacgct

SEQ ID NO: 37642 - RNA, 21 nt, synthetic construct
  source 1..21: mol_type = other RNA
ctccggagctgccacacgctg

SEQ ID NO: 37643 - RNA, 21 nt, synthetic construct
  source 1..21: mol_type = other RNA
gggccgagtgcctccggagct

SEQ ID NO: 37644 - RNA, 21 nt, synthetic construct
  source 1..21: mol_type = other RNA
cttcaactatgaaatccgtgt

SEQ ID NO: 37645 - RNA, 21 nt, synthetic construct
  source 1..21: mol_type = other RNA
acccaccaaagtgtacaagcc

SEQ ID NO: 37646 - RNA, 21 nt, synthetic construct
  source 1..21: mol_type = other RNA
cttcaactatgaaatccgtgt

SEQ ID NO: 37647 - RNA, 21 nt, synthetic construct
  source 1..21: mol_type = other RNA
ggccgagtgcctccggagctg

SEQ ID NO: 37648 - RNA, 21 nt, synthetic construct
  source 1..21: mol_type = other RNA
ccgcgcccggggagtgtgcag

SEQ ID NO: 37649 - RNA, 21 nt, synthetic construct
  source 1..21: mol_type = other RNA
ctccagcgggacggaaccact

SEQ ID NO: 37650 - RNA, 21 nt, synthetic construct
  source 1..21: mol_type = other RNA
cctgcccacccaccaaagtgt

SEQ ID NO: 37651 - RNA, 21 nt, synthetic construct
  source 1..21: mol_type = other RNA
ctggtgttggctctggcggcc

SEQ ID NO: 37652 - RNA, 21 nt, synthetic construct
  source 1..21: mol_type = other RNA
gtctccagcgggacggaacca

SEQ ID NO: 37653 - RNA, 21 nt, synthetic construct
  source 1..21: mol_type = other RNA
tccggagctgccacacgctgg

SEQ ID NO: 37654 - RNA, 21 nt, synthetic construct
  source 1..21: mol_type = other RNA
tgtctccagcgggacggaacc

SEQ ID NO: 37655 - RNA, 21 nt, synthetic construct
  source 1..21: mol_type = other RNA
gctgcacgcccttctgtgtcc

SEQ ID NO: 37656 - RNA, 21 nt, synthetic construct
  source 1..21: mol_type = other RNA
agggcgactgctgtcccacct

SEQ ID NO: 37657 - RNA, 21 nt, synthetic construct
  source 1..21: mol_type = other RNA
gactgtctccagcgggacgga

SEQ ID NO: 37658 - RNA, 21 nt, synthetic construct
  source 1..21: mol_type = other RNA
cacggttcccagctcgtccac

SEQ ID NO: 37659 - RNA, 21 nt, synthetic construct
  source 1..21: mol_type = other RNA
ctgccgcgcccggggagtgtg

SEQ ID NO: 37660 - RNA, 21 nt, synthetic construct
  source 1..21: mol_type = other RNA
gccgacgtcacctgcagcgtt

SEQ ID NO: 37661 - RNA, 21 nt, synthetic construct
  source 1..21: mol_type = other RNA
tggtcacccgtgttgtcatca

SEQ ID NO: 37662 - RNA, 21 nt, synthetic construct
  source 1..21: mol_type = other RNA
gcggccgcacctacagcccgg

SEQ ID NO: 37663 - RNA, 21 nt, synthetic construct
  source 1..21: mol_type = other RNA
tgcaactacggccactgcccc

SEQ ID NO: 37664 - RNA, 21 nt, synthetic construct
  source 1..21: mol_type = other RNA
tccacagtgcttaccaccacg

SEQ ID NO: 37665 - RNA, 21 nt, synthetic construct
  source 1..21: mol_type = other RNA
cagtgcttaccaccacggcca

SEQ ID NO: 37666 - RNA, 21 nt, synthetic construct
  source 1..21: mol_type = other RNA
actaccaaagtgctgactacc

SEQ ID NO: 37667 - RNA, 21 nt, synthetic construct
  source 1..21: mol_type = other RNA
aaagtgctgactaccacaacc

SEQ ID NO: 37668 - RNA, 21 nt, synthetic construct
  source 1..21: mol_type = other RNA
aagtgctgactaccacaacca

SEQ ID NO: 37669 - RNA, 21 nt, synthetic construct
  source 1..21: mol_type = other RNA
tgcaactacggccactgcccc

SEQ ID NO: 37670 - RNA, 21 nt, synthetic construct
  source 1..21: mol_type = other RNA
tccacagtgcttaccaccacg

SEQ ID NO: 37671 - RNA, 21 nt, synthetic construct
  source 1..21: mol_type = other RNA
tgcaactacggccactgcccc

SEQ ID NO: 37672 - RNA, 21 nt, synthetic construct
  source 1..21: mol_type = other RNA
tccacagtgcttaccaccacg

SEQ ID NO: 37673 - RNA, 21 nt, synthetic construct
  source 1..21: mol_type = other RNA
cagtgcttaccaccacggcca

SEQ ID NO: 37674 - RNA, 21 nt, synthetic construct
  source 1..21: mol_type = other RNA
tgcaactacggccactgcccc

SEQ ID NO: 37675 - RNA, 21 nt, synthetic construct
  source 1..21: mol_type = other RNA
tgtggacaactgcaccgtgta

SEQ ID NO: 37676 - RNA, 21 nt, synthetic construct
  source 1..21: mol_type = other RNA
tggacaactgcaccgtgtacc

SEQ ID NO: 37677 - RNA, 21 nt, synthetic construct
  source 1..21: mol_type = other RNA
gagggcgactgctgtcccacc

SEQ ID NO: 37678 - RNA, 21 nt, synthetic construct
  source 1..21: mol_type = other RNA
cagcggagaactgccagagct

SEQ ID NO: 37679 - RNA, 21 nt, synthetic construct
  source 1..21: mol_type = other RNA
gacgtcacctgcagcgtttcc

SEQ ID NO: 37680 - RNA, 21 nt, synthetic construct
  source 1..21: mol_type = other RNA
aaagtgtcggacccgagccag

SEQ ID NO: 37681 - RNA, 21 nt, synthetic construct
  source 1..21: mol_type = other RNA
tgggggacgcactggagtttg

SEQ ID NO: 37682 - RNA, 21 nt, synthetic construct
  source 1..21: mol_type = other RNA
gggggacgcactggagtttgg

SEQ ID NO: 37683 - RNA, 21 nt, synthetic construct
  source 1..21: mol_type = other RNA
accaaagtgctgactaccaca

SEQ ID NO: 37684 - RNA, 21 nt, synthetic construct
  source 1..21: mol_type = other RNA
actgtctccagcgggacggaa

SEQ ID NO: 37685 - RNA, 21 nt, synthetic construct
  source 1..21: mol_type = other RNA
ctgtctccagcgggacggaac

SEQ ID NO: 37686 - RNA, 21 nt, synthetic construct
  source 1..21: mol_type = other RNA
cctgtggtcacccgtgttgtc

SEQ ID NO: 37687 - RNA, 21 nt, synthetic construct
  source 1..21: mol_type = other RNA
gcctgtggtcacccgtgttgt

SEQ ID NO: 37688 - RNA, 21 nt, synthetic construct
  source 1..21: mol_type = other RNA
ccagaccacagcaaccgaaaa

SEQ ID NO: 37689 - RNA, 21 nt, synthetic construct
  source 1..21: mol_type = other RNA
ttctgctgcaactacggccac

SEQ ID NO: 37690 - RNA, 21 nt, synthetic construct
  source 1..21: mol_type = other RNA
ttctgctgcaactacggccac

SEQ ID NO: 37691 - RNA, 21 nt, synthetic construct
  source 1..21: mol_type = other RNA
ttctgctgcaactacggccac

SEQ ID NO: 37692 - RNA, 21 nt, synthetic construct
  source 1..21: mol_type = other RNA
ttctgctgcaactacggccac

SEQ ID NO: 37693 - RNA, 21 nt, synthetic construct
  source 1..21: mol_type = other RNA
gttctgctgcaactacggcca

SEQ ID NO: 37694 - RNA, 21 nt, synthetic construct
  source 1..21: mol_type = other RNA
ctgctgcaactacggccactg

SEQ ID NO: 37695 - RNA, 21 nt, synthetic construct
  source 1..21: mol_type = other RNA
gttctgctgcaactacggcca

SEQ ID NO: 37696 - RNA, 21 nt, synthetic construct
  source 1..21: mol_type = other RNA
ccgacgtcacctgcagcgttt

SEQ ID NO: 37697 - RNA, 21 nt, synthetic construct
  source 1..21: mol_type = other RNA
tgctgcaactacggccactgc

SEQ ID NO: 37698 - RNA, 21 nt, synthetic construct
  source 1..21: mol_type = other RNA
tgctgcaactacggccactgc

SEQ ID NO: 37699 - RNA, 21 nt, synthetic construct
  source 1..21: mol_type = other RNA
tgctgcaactacggccactgc

SEQ ID NO: 37700 - RNA, 21 nt, synthetic construct
  source 1..21: mol_type = other RNA
tgctgcaactacggccactgc

SEQ ID NO: 37701 - RNA, 21 nt, synthetic construct
  source 1..21: mol_type = other RNA
cggagaactgccagagctgta

SEQ ID NO: 37702 - RNA, 21 nt, synthetic construct
  source 1..21: mol_type = other RNA
cccagaccacagcaaccgaaa

SEQ ID NO: 37703 - RNA, 21 nt, synthetic construct
  source 1..21: mol_type = other RNA
ggtgggggacgcactggagtt

SEQ ID NO: 37704 - RNA, 21 nt, synthetic construct
  source 1..21: mol_type = other RNA
ctgctgcaactacggccactg

SEQ ID NO: 37705 - RNA, 21 nt, synthetic construct
  source 1..21: mol_type = other RNA
cgtcacctgcagcgtttcctt

SEQ ID NO: 37706 - RNA, 21 nt, synthetic construct
  source 1..21: mol_type = other RNA
gaaactactatgacgtcggtg

SEQ ID NO: 37707 - RNA, 21 nt, synthetic construct
  source 1..21: mol_type = other RNA
tcctacgataagatcagggcc

SEQ ID NO: 37708 - RNA, 21 nt, synthetic construct
  source 1..21: mol_type = other RNA
gttctgctgcaactacggcca

SEQ ID NO: 37709 - RNA, 21 nt, synthetic construct
  source 1..21: mol_type = other RNA
ctgctgcaactacggccactg

SEQ ID NO: 37710 - RNA, 21 nt, synthetic construct
  source 1..21: mol_type = other RNA
tggcgaggtgcaaccggtggc

SEQ ID NO: 37711 - RNA, 21 nt, synthetic construct
  source 1..21: mol_type = other RNA
agtccgcatcaacacgaccat

SEQ ID NO: 37712 - RNA, 21 nt, synthetic construct
  source 1..21: mol_type = other RNA
gttctgctgcaactacggcca

SEQ ID NO: 37713 - RNA, 21 nt, synthetic construct
  source 1..21: mol_type = other RNA
ctgctgcaactacggccactg

SEQ ID NO: 37714 - RNA, 21 nt, synthetic construct
  source 1..21: mol_type = other RNA
cgactacgagctgcgggttct

SEQ ID NO: 37715 - RNA, 21 nt, synthetic construct
  source 1..21: mol_type = other RNA
caccttctacggggttggtgc

SEQ ID NO: 37716 - RNA, 21 nt, synthetic construct
  source 1..21: mol_type = other RNA
ctacgagctgcgggttctctg

SEQ ID NO: 37717 - RNA, 21 nt, synthetic construct
  source 1..21: mol_type = other RNA
tgacaaccgtgtcgtcctgct

SEQ ID NO: 37718 - RNA, 21 nt, synthetic construct
  source 1..21: mol_type = other RNA
gtgggggacgcactggagttt

SEQ ID NO: 37719 - RNA, 21 nt, synthetic construct
  source 1..21: mol_type = other RNA
taaatttcccggggagcggtg

SEQ ID NO: 37720 - RNA, 21 nt, synthetic construct
  source 1..21: mol_type = other RNA
gacggaaactactatgacgtc

SEQ ID NO: 37721 - RNA, 21 nt, synthetic construct
  source 1..21: mol_type = other RNA
ccactacgaccgcaaccactg

SEQ ID NO: 37722 - RNA, 21 nt, synthetic construct
  source 1..21: mol_type = other RNA
cggcgcgtgagctttgttcca

SEQ ID NO: 37723 - RNA, 21 nt, synthetic construct
  source 1..21: mol_type = other RNA
tgggtgacaaccgtgtcgtcc

SEQ ID NO: 37724 - RNA, 21 nt, synthetic construct
  source 1..21: mol_type = other RNA
ctttcgggagggcgccactca

SEQ ID NO: 37725 - RNA, 21 nt, synthetic construct
  source 1..21: mol_type = other RNA
tatgacgtcggtgcaagggtc

SEQ ID NO: 37726 - RNA, 21 nt, synthetic construct
  source 1..21: mol_type = other RNA
ctcacgagcgagctgtccacc

SEQ ID NO: 37727 - RNA, 21 nt, synthetic construct
  source 1..21: mol_type = other RNA
caccctacaagatacgctaca

SEQ ID NO: 37728 - RNA, 21 nt, synthetic construct
  source 1..21: mol_type = other RNA
gtcccggcttcgtaaccgtga

SEQ ID NO: 37729 - RNA, 21 nt, synthetic construct
  source 1..21: mol_type = other RNA
tacgataagatcagggccgct

SEQ ID NO: 37730 - RNA, 21 nt, synthetic construct
  source 1..21: mol_type = other RNA
ccacccggcgcgtgagctttg

SEQ ID NO: 37731 - RNA, 21 nt, synthetic construct
  source 1..21: mol_type = other RNA
cactacgaccgcaaccactgg

SEQ ID NO: 37732 - RNA, 21 nt, synthetic construct
  source 1..21: mol_type = other RNA
agcctacgagtagcccggggc

SEQ ID NO: 37733 - RNA, 21 nt, synthetic construct
  source 1..21: mol_type = other RNA
ctctgtcacgactacgagctg

SEQ ID NO: 37734 - RNA, 21 nt, synthetic construct
  source 1..21: mol_type = other RNA
gctgcgacaggcaaggcggcc

SEQ ID NO: 37735 - RNA, 21 nt, synthetic construct
  source 1..21: mol_type = other RNA
aagatacgctacatggggatc

SEQ ID NO: 37736 - RNA, 21 nt, synthetic construct
  source 1..21: mol_type = other RNA
actatgacgtcggtgcaaggg

SEQ ID NO: 37737 - RNA, 21 nt, synthetic construct
  source 1..21: mol_type = other RNA
cagcctacgagtagcccgggg

SEQ ID NO: 37738 - RNA, 21 nt, synthetic construct
  source 1..21: mol_type = other RNA
gcctacgagtagcccggggct

SEQ ID NO: 37739 - RNA, 21 nt, synthetic construct
  source 1..21: mol_type = other RNA
cacccggcgcgtgagctttgt

SEQ ID NO: 37740 - RNA, 21 nt, synthetic construct
  source 1..21: mol_type = other RNA
acgaccgcaaccactggatcc

SEQ ID NO: 37741 - RNA, 21 nt, synthetic construct
  source 1..21: mol_type = other RNA
cccggagcgtccaagtactca

SEQ ID NO: 37742 - RNA, 21 nt, synthetic construct
  source 1..21: mol_type = other RNA
cttgccgcggcctgagtgagg

SEQ ID NO: 37743 - RNA, 21 nt, synthetic construct
  source 1..21: mol_type = other RNA
ctgaggtcgcaacggccaggt

SEQ ID NO: 37744 - RNA, 21 nt, synthetic construct
  source 1..21: mol_type = other RNA
cgaccgcaaccactggatcca

SEQ ID NO: 37745 - RNA, 21 nt, synthetic construct
  source 1..21: mol_type = other RNA
gagggcgccgtgtgttcatgt

SEQ ID NO: 37746 - RNA, 21 nt, synthetic construct
  source 1..21: mol_type = other RNA
gcgactcgggtggcgactgcg

SEQ ID NO: 37747 - RNA, 21 nt, synthetic construct
  source 1..21: mol_type = other RNA
actacgaccgcaaccactgga

SEQ ID NO: 37748 - RNA, 21 nt, synthetic construct
  source 1..21: mol_type = other RNA
tccaagcggacggcggcgtgt

SEQ ID NO: 37749 - RNA, 21 nt, synthetic construct
  source 1..21: mol_type = other RNA
gacggcggcgtgttcctcaac

SEQ ID NO: 37750 - RNA, 21 nt, synthetic construct
  source 1..21: mol_type = other RNA
agggcgccgtgtgttcatgta

SEQ ID NO: 37751 - RNA, 21 nt, synthetic construct
  source 1..21: mol_type = other RNA
ctacgagctgatcctccaaga

SEQ ID NO: 37752 - RNA, 21 nt, synthetic construct
  source 1..21: mol_type = other RNA
gccaacactcacgagcgagct

SEQ ID NO: 37753 - RNA, 21 nt, synthetic construct
  source 1..21: mol_type = other RNA
gaggttccacggtgaccccct

SEQ ID NO: 37754 - RNA, 21 nt, synthetic construct
  source 1..21: mol_type = other RNA
acaaccactactgcacggcct

SEQ ID NO: 37755 - RNA, 21 nt, synthetic construct
  source 1..21: mol_type = other RNA
catggatatcgtcctcactgt

SEQ ID NO: 37756 - RNA, 21 nt, synthetic construct
  source 1..21: mol_type = other RNA
ggagcgtccaagtactcagca

SEQ ID NO: 37757 - RNA, 21 nt, synthetic construct
  source 1..21: mol_type = other RNA
ctggatcccaaatacgccaac

SEQ ID NO: 37758 - RNA, 21 nt, synthetic construct
  source 1..21: mol_type = other RNA
atgagaaactctacgacctgc

SEQ ID NO: 37759 - RNA, 21 nt, synthetic construct
  source 1..21: mol_type = other RNA
aagcggacggcggcgtgttcc

SEQ ID NO: 37760 - RNA, 21 nt, synthetic construct
  source 1..21: mol_type = other RNA
tgccactcatgcaggtgtttg

SEQ ID NO: 37761 - RNA, 21 nt, synthetic construct
  source 1..21: mol_type = other RNA
gaccgatcccaacagtgcctt

SEQ ID NO: 37762 - RNA, 21 nt, synthetic construct
  source 1..21: mol_type = other RNA
ctacgcctacgtggtggatgc

SEQ ID NO: 37763 - RNA, 21 nt, synthetic construct
  source 1..21: mol_type = other RNA
ctacagctaccaggacgtcat

SEQ ID NO: 37764 - RNA, 21 nt, synthetic construct
  source 1..21: mol_type = other RNA
agacgtttgaaaacctgaggc

SEQ ID NO: 37765 - RNA, 21 nt, synthetic construct
  source 1..21: mol_type = other RNA
ggagggcgtcttcaagatgtg

SEQ ID NO: 37766 - RNA, 21 nt, synthetic construct
  source 1..21: mol_type = other RNA
gggacgtgccacaaccccgcc

SEQ ID NO: 37767 - RNA, 21 nt, synthetic construct
  source 1..21: mol_type = other RNA
cttggtacagccaccacggga

SEQ ID NO: 37768 - RNA, 21 nt, synthetic construct
  source 1..21: mol_type = other RNA
ctggacccgcctatcacagac

SEQ ID NO: 37769 - RNA, 21 nt, synthetic construct
  source 1..21: mol_type = other RNA
caacatccgtgcggccggagg

SEQ ID NO: 37770 - RNA, 21 nt, synthetic construct
  source 1..21: mol_type = other RNA
ctggacccgcctatcacagac

SEQ ID NO: 37771 - RNA, 21 nt, synthetic construct
  source 1..21: mol_type = other RNA
caacatccgtgcggccggagg

SEQ ID NO: 37772 - RNA, 21 nt, synthetic construct
  source 1..21: mol_type = other RNA
agccactacgaccgcaaccac

SEQ ID NO: 37773 - RNA, 21 nt, synthetic construct
  source 1..21: mol_type = other RNA
ctggacccgcctatcacagac

SEQ ID NO: 37774 - RNA, 21 nt, synthetic construct
  source 1..21: mol_type = other RNA
caacatccgtgcggccggagg

SEQ ID NO: 37775 - RNA, 21 nt, synthetic construct
  source 1..21: mol_type = other RNA
ctggacccgcctatcacagac

SEQ ID NO: 37776 - RNA, 21 nt, synthetic construct
  source 1..21: mol_type = other RNA
ggcacgcacgcctccagtgtg

SEQ ID NO: 37777 - RNA, 21 nt, synthetic construct
  source 1..21: mol_type = other RNA
caacatccgtgcggccggagg

SEQ ID NO: 37778 - RNA, 21 nt, synthetic construct
  source 1..21: mol_type = other RNA
ctggacccgcctatcacagac

SEQ ID NO: 37779 - RNA, 21 nt, synthetic construct
  source 1..21: mol_type = other RNA
tgacaagggccaccaattcca

SEQ ID NO: 37780 - RNA, 21 nt, synthetic construct
  source 1..21: mol_type = other RNA
caccggttccacggccaccgc

SEQ ID NO: 37781 - RNA, 21 nt, synthetic construct
  source 1..21: mol_type = other RNA
ttctacgcagtgtgcaatcag

SEQ ID NO: 37782 - RNA, 21 nt, synthetic construct
  source 1..21: mol_type = other RNA
ccatgcacgctttgggaatct

SEQ ID NO: 37783 - RNA, 21 nt, synthetic construct
  source 1..21: mol_type = other RNA
ccactactgcacggcctctgc

SEQ ID NO: 37784 - RNA, 21 nt, synthetic construct
  source 1..21: mol_type = other RNA
cagtgtcggtgcagtgcaagc

SEQ ID NO: 37785 - RNA, 21 nt, synthetic construct
  source 1..21: mol_type = other RNA
agtgtcggtgcagtgcaagcc

SEQ ID NO: 37786 - RNA, 21 nt, synthetic construct
  source 1..21: mol_type = other RNA
tccgcatcaacacgaccatcc

SEQ ID NO: 37787 - RNA, 21 nt, synthetic construct
  source 1..21: mol_type = other RNA
tcaacgtccagctacgccgag

SEQ ID NO: 37788 - RNA, 21 nt, synthetic construct
  source 1..21: mol_type = other RNA
tgctacgctcacggcaccgtg

SEQ ID NO: 37789 - RNA, 21 nt, synthetic construct
  source 1..21: mol_type = other RNA
ctcccggccttcaacgagttc

SEQ ID NO: 37790 - RNA, 21 nt, synthetic construct
  source 1..21: mol_type = other RNA
ctgcgagtacatcttggccca

SEQ ID NO: 37791 - RNA, 21 nt, synthetic construct
  source 1..21: mol_type = other RNA
ccggttccacggccaccgcct

SEQ ID NO: 37792 - RNA, 21 nt, synthetic construct
  source 1..21: mol_type = other RNA
catgcggccccatacagcctg

SEQ ID NO: 37793 - RNA, 21 nt, synthetic construct
  source 1..21: mol_type = other RNA
agctaccagctttacacccat

SEQ ID NO: 37794 - RNA, 21 nt, synthetic construct
  source 1..21: mol_type = other RNA
agctaccagctttacacccat

SEQ ID NO: 37795 - RNA, 21 nt, synthetic construct
  source 1..21: mol_type = other RNA
cctgctacgctcacggcaccg

SEQ ID NO: 37796 - RNA, 21 nt, synthetic construct
  source 1..21: mol_type = other RNA
tcatgtacgggtgggaagcta

SEQ ID NO: 37797 - RNA, 21 nt, synthetic construct
  source 1..21: mol_type = other RNA
accagcgttacacccatcccc

SEQ ID NO: 37798 - RNA, 21 nt, synthetic construct
  source 1..21: mol_type = other RNA
accagcgttacacccatcccc

SEQ ID NO: 37799 - RNA, 21 nt, synthetic construct
  source 1..21: mol_type = other RNA
cttcaacggcctcccggcctt

SEQ ID NO: 37800 - RNA, 21 nt, synthetic construct
  source 1..21: mol_type = other RNA
cacgggcgatccctgtccccc

SEQ ID NO: 37801 - RNA, 21 nt, synthetic construct
  source 1..21: mol_type = other RNA
cacgggcgatccctgtccccc

SEQ ID NO: 37802 - RNA, 21 nt, synthetic construct
  source 1..21: mol_type = other RNA
gcatgtgcgggcctatgtgtc

SEQ ID NO: 37803 - RNA, 21 nt, synthetic construct
  source 1..21: mol_type = other RNA
ctatgcccacaacgccaggct

SEQ ID NO: 37804 - RNA, 21 nt, synthetic construct
  source 1..21: mol_type = other RNA
cggggactttgacacctactc

SEQ ID NO: 37805 - RNA, 21 nt, synthetic construct
  source 1..21: mol_type = other RNA
cggggactttgacacctactc

SEQ ID NO: 37806 - RNA, 21 nt, synthetic construct
  source 1..21: mol_type = other RNA
cggggactttgacacctactc

SEQ ID NO: 37807 - RNA, 21 nt, synthetic construct
  source 1..21: mol_type = other RNA
cggggactttgacacctactc

SEQ ID NO: 37808 - RNA, 21 nt, synthetic construct
  source 1..21: mol_type = other RNA
cccggccttcaacgagttcta

SEQ ID NO: 37809 - RNA, 21 nt, synthetic construct
  source 1..21: mol_type = other RNA
ggaccaccgagtcaccccctt

SEQ ID NO: 37810 - RNA, 21 nt, synthetic construct
  source 1..21: mol_type = other RNA
ggaccaccgagtcaccccctt

SEQ ID NO: 37811 - RNA, 21 nt, synthetic construct
  source 1..21: mol_type = other RNA
ggaccaccgagtcaccccctt

SEQ ID NO: 37812 - RNA, 21 nt, synthetic construct
  source 1..21: mol_type = other RNA
tcacgactacgagctgcgggt

SEQ ID NO: 37813 - RNA, 21 nt, synthetic construct
  source 1..21: mol_type = other RNA
gcaaccgaaaagaccacccta

SEQ ID NO: 37814 - RNA, 21 nt, synthetic construct
  source 1..21: mol_type = other RNA
cacacgggcgatccctgtccc

SEQ ID NO: 37815 - RNA, 21 nt, synthetic construct
  source 1..21: mol_type = other RNA
cacacgggcgatccctgtccc

SEQ ID NO: 37816 - RNA, 21 nt, synthetic construct
  source 1..21: mol_type = other RNA
ggacggaaccactgccgccag

SEQ ID NO: 37817 - RNA, 21 nt, synthetic construct
  source 1..21: mol_type = other RNA
gacggaaccactgccgccagt

SEQ ID NO: 37818 - RNA, 21 nt, synthetic construct
  source 1..21: mol_type = other RNA
tgtgcgacctcacctgcccac

SEQ ID NO: 37819 - RNA, 21 nt, synthetic construct
  source 1..21: mol_type = other RNA
gcgtacagctcagcgactgga

SEQ ID NO: 37820 - RNA, 21 nt, synthetic construct
  source 1..21: mol_type = other RNA
gcgccgtgtgttcatgtacgg

SEQ ID NO: 37821 - RNA, 21 nt, synthetic construct
  source 1..21: mol_type = other RNA
gctacgacaaggacggaaact

SEQ ID NO: 37822 - RNA, 21 nt, synthetic construct
  source 1..21: mol_type = other RNA
ctgccccgagacggtgtgcgt

SEQ ID NO: 37823 - RNA, 21 nt, synthetic construct
  source 1..21: mol_type = other RNA
ccccgtgggtgaaaccggccc

SEQ ID NO: 37824 - RNA, 21 nt, synthetic construct
  source 1..21: mol_type = other RNA
gcctacgaggacttcaacgtc

SEQ ID NO: 37825 - RNA, 21 nt, synthetic construct
  source 1..21: mol_type = other RNA
cctacgaggacttcaacgtcc

SEQ ID NO: 37826 - RNA, 21 nt, synthetic construct
  source 1..21: mol_type = other RNA
cgcctacgaggacttcaacgt

SEQ ID NO: 37827 - RNA, 21 nt, synthetic construct
  source 1..21: mol_type = other RNA
tgccatttctacgcagtgtgc

SEQ ID NO: 37828 - RNA, 21 nt, synthetic construct
  source 1..21: mol_type = other RNA
ggttcagtgtcggtgcagtgc

SEQ ID NO: 37829 - RNA, 21 nt, synthetic construct
  source 1..21: mol_type = other RNA
ctgcgacaggcaaggcggccg

SEQ ID NO: 37830 - RNA, 21 nt, synthetic construct
  source 1..21: mol_type = other RNA
cccaccctacaagatacgcta

SEQ ID NO: 37831 - RNA, 21 nt, synthetic construct
  source 1..21: mol_type = other RNA
ctgcgtgggacccgatgggtt

SEQ ID NO: 37832 - RNA, 21 nt, synthetic construct
  source 1..21: mol_type = other RNA
tgcgtgggtgacaaccgtgtc

SEQ ID NO: 37833 - RNA, 21 nt, synthetic construct
  source 1..21: mol_type = other RNA
cctttgcggagtgccacgcac

SEQ ID NO: 37834 - RNA, 21 nt, synthetic construct
  source 1..21: mol_type = other RNA
aactaagcatgtgcgggccta

SEQ ID NO: 37835 - RNA, 21 nt, synthetic construct
  source 1..21: mol_type = other RNA
tggacagtttttctcgcccgg

SEQ ID NO: 37836 - RNA, 21 nt, synthetic construct
  source 1..21: mol_type = other RNA
gacagtttttctcgcccgggg

SEQ ID NO: 37837 - RNA, 21 nt, synthetic construct
  source 1..21: mol_type = other RNA
ctggcgaggtgcaaccggtgg

SEQ ID NO: 37838 - RNA, 21 nt, synthetic construct
  source 1..21: mol_type = other RNA
caagtccgcatcaacacgacc

SEQ ID NO: 37839 - RNA, 21 nt, synthetic construct
  source 1..21: mol_type = other RNA
caaactaagcatgtgcgggcc

SEQ ID NO: 37840 - RNA, 21 nt, synthetic construct
  source 1..21: mol_type = other RNA
agctaccaggacgtcatctac

SEQ ID NO: 37841 - RNA, 21 nt, synthetic construct
  source 1..21: mol_type = other RNA
catctacaataagaccgaccg

SEQ ID NO: 37842 - RNA, 21 nt, synthetic construct
  source 1..21: mol_type = other RNA
tggatccacggccatcccgtc

SEQ ID NO: 37843 - RNA, 21 nt, synthetic construct
  source 1..21: mol_type = other RNA
ctcaggccccgtgacggtcac

SEQ ID NO: 37844 - RNA, 21 nt, synthetic construct
  source 1..21: mol_type = other RNA
gtccaagcggacggcggcgtg

SEQ ID NO: 37845 - RNA, 21 nt, synthetic construct
  source 1..21: mol_type = other RNA
gttctctgctgcgaatacgtg

SEQ ID NO: 37846 - RNA, 21 nt, synthetic construct
  source 1..21: mol_type = other RNA
agggctgaggtcgcaacggcc

SEQ ID NO: 37847 - RNA, 21 nt, synthetic construct
  source 1..21: mol_type = other RNA
tggcgcctgcttgatcgccat

SEQ ID NO: 37848 - RNA, 21 nt, synthetic construct
  source 1..21: mol_type = other RNA
acatccacccttccaacacgc

SEQ ID NO: 37849 - RNA, 21 nt, synthetic construct
  source 1..21: mol_type = other RNA
cacagctaccagcgttacacc

SEQ ID NO: 37850 - RNA, 21 nt, synthetic construct
  source 1..21: mol_type = other RNA
caccacggccactacgatcac

SEQ ID NO: 37851 - RNA, 21 nt, synthetic construct
  source 1..21: mol_type = other RNA
caccacggccactacgatcac

SEQ ID NO: 37852 - RNA, 21 nt, synthetic construct
  source 1..21: mol_type = other RNA
caccacggccactacgatcac

SEQ ID NO: 37853 - RNA, 21 nt, synthetic construct
  source 1..21: mol_type = other RNA
cagggacggcacgcacgcctc

SEQ ID NO: 37854 - RNA, 21 nt, synthetic construct
  source 1..21: mol_type = other RNA
caccacggccactacgatcac

SEQ ID NO: 37855 - RNA, 21 nt, synthetic construct
  source 1..21: mol_type = other RNA
cacagctaccagcgttacacc

SEQ ID NO: 37856 - RNA, 21 nt, synthetic construct
  source 1..21: mol_type = other RNA
caccacggccactacgatcac

SEQ ID NO: 37857 - RNA, 21 nt, synthetic construct
  source 1..21: mol_type = other RNA
accagcgtgttcatccgactg

SEQ ID NO: 37858 - RNA, 21 nt, synthetic construct
  source 1..21: mol_type = other RNA
gactgtgaccgcatgcggggg

SEQ ID NO: 37859 - RNA, 21 nt, synthetic construct
  source 1..21: mol_type = other RNA
tcctctgctgcagtgacgacc

SEQ ID NO: 37860 - RNA, 21 nt, synthetic construct
  source 1..21: mol_type = other RNA
tggggcggctcccactattcc

SEQ ID NO: 37861 - RNA, 21 nt, synthetic construct
  source 1..21: mol_type = other RNA
agagagatccatgcacgcttt

SEQ ID NO: 37862 - RNA, 21 nt, synthetic construct
  source 1..21: mol_type = other RNA
gctgcgaatacgtgccctgtg

SEQ ID NO: 37863 - RNA, 21 nt, synthetic construct
  source 1..21: mol_type = other RNA
ggcctttgcggagtgccacgc

SEQ ID NO: 37864 - RNA, 21 nt, synthetic construct
  source 1..21: mol_type = other RNA
acagagccgagcactatagcc

SEQ ID NO: 37865 - RNA, 21 nt, synthetic construct
  source 1..21: mol_type = other RNA
aggggacctttaaggcggtgg

SEQ ID NO: 37866 - RNA, 21 nt, synthetic construct
  source 1..21: mol_type = other RNA
cggccactacgatcacagcca

SEQ ID NO: 37867 - RNA, 21 nt, synthetic construct
  source 1..21: mol_type = other RNA
accaggctgacgacttcacgg

SEQ ID NO: 37868 - RNA, 21 nt, synthetic construct
  source 1..21: mol_type = other RNA
atcacctttgatggcgatcgc

SEQ ID NO: 37869 - RNA, 21 nt, synthetic construct
  source 1..21: mol_type = other RNA
acctttaaggcggtggcgaga

SEQ ID NO: 37870 - RNA, 21 nt, synthetic construct
  source 1..21: mol_type = other RNA
gaccccgagcatccggtcgac

SEQ ID NO: 37871 - RNA, 21 nt, synthetic construct
  source 1..21: mol_type = other RNA
ctctgctgcagtgacgaccac

SEQ ID NO: 37872 - RNA, 21 nt, synthetic construct
  source 1..21: mol_type = other RNA
ctgcaggggacgtgccacaac

SEQ ID NO: 37873 - RNA, 21 nt, synthetic construct
  source 1..21: mol_type = other RNA
ggggacgtgccacaaccccgc

SEQ ID NO: 37874 - RNA, 21 nt, synthetic construct
  source 1..21: mol_type = other RNA
acctggacccgcctatcacag

SEQ ID NO: 37875 - RNA, 21 nt, synthetic construct
  source 1..21: mol_type = other RNA
gccaccacacacgggcgatcc

SEQ ID NO: 37876 - RNA, 21 nt, synthetic construct
  source 1..21: mol_type = other RNA
gtgacggtgcccaccggatcc

SEQ ID NO: 37877 - RNA, 21 nt, synthetic construct
  source 1..21: mol_type = other RNA
acctggacccgcctatcacag

SEQ ID NO: 37878 - RNA, 21 nt, synthetic construct
  source 1..21: mol_type = other RNA
gccaccacacacgggcgatcc

SEQ ID NO: 37879 - RNA, 21 nt, synthetic construct
  source 1..21: mol_type = other RNA
ccccacatcggccccaataac

SEQ ID NO: 37880 - RNA, 21 nt, synthetic construct
  source 1..21: mol_type = other RNA
gtgacggtgcccaccggatcc

SEQ ID NO: 37881 - RNA, 21 nt, synthetic construct
  source 1..21: mol_type = other RNA
gcctggacccgcctatcacag

SEQ ID NO: 37882 - RNA, 21 nt, synthetic construct
  source 1..21: mol_type = other RNA
ggccaccacacacgggcggtc

SEQ ID NO: 37883 - RNA, 21 nt, synthetic construct
  source 1..21: mol_type = other RNA
accggaagaccagcgtgttca

SEQ ID NO: 37884 - RNA, 21 nt, synthetic construct
  source 1..21: mol_type = other RNA
acctcttacaccttccggggc

SEQ ID NO: 37885 - RNA, 21 nt, synthetic construct
  source 1..21: mol_type = other RNA
ggggagtgcgtccagaccgcc

SEQ ID NO: 37886 - RNA, 21 nt, synthetic construct
  source 1..21: mol_type = other RNA
aaactaagcatgtgcgggcct

SEQ ID NO: 37887 - RNA, 21 nt, synthetic construct
  source 1..21: mol_type = other RNA
gccatgctcgtggtgccgcag

SEQ ID NO: 37888 - RNA, 21 nt, synthetic construct
  source 1..21: mol_type = other RNA
ggcggcgtgttcctcaactcc

SEQ ID NO: 37889 - RNA, 21 nt, synthetic construct
  source 1..21: mol_type = other RNA
cccctgctacgctcacggcac

SEQ ID NO: 37890 - RNA, 21 nt, synthetic construct
  source 1..21: mol_type = other RNA
ctggagaggtggtgcacgacg

SEQ ID NO: 37891 - RNA, 21 nt, synthetic construct
  source 1..21: mol_type = other RNA
cagcgtgttcatccgactgca

SEQ ID NO: 37892 - RNA, 21 nt, synthetic construct
  source 1..21: mol_type = other RNA
atcgccatctgcggaagcaac

SEQ ID NO: 37893 - RNA, 21 nt, synthetic construct
  source 1..21: mol_type = other RNA
ctccaccgtgtgtgtccgcga

SEQ ID NO: 37894 - RNA, 21 nt, synthetic construct
  source 1..21: mol_type = other RNA
cagcttcccgacatgccgctg

SEQ ID NO: 37895 - RNA, 21 nt, synthetic construct
  source 1..21: mol_type = other RNA
cggcccccataaccacggtgg

SEQ ID NO: 37896 - RNA, 21 nt, synthetic construct
  source 1..21: mol_type = other RNA
ccagggacaacacctatcccc

SEQ ID NO: 37897 - RNA, 21 nt, synthetic construct
  source 1..21: mol_type = other RNA
cggcccccataaccacggtgg

SEQ ID NO: 37898 - RNA, 21 nt, synthetic construct
  source 1..21: mol_type = other RNA
ccagggacaacacctatcccc

SEQ ID NO: 37899 - RNA, 21 nt, synthetic construct
  source 1..21: mol_type = other RNA
cggcccccataaccacggtgg

SEQ ID NO: 37900 - RNA, 21 nt, synthetic construct
  source 1..21: mol_type = other RNA
tgacgagggttcagtgtcggt

SEQ ID NO: 37901 - RNA, 21 nt, synthetic construct
  source 1..21: mol_type = other RNA
gtgacggtgcccaccggatcc

SEQ ID NO: 37902 - RNA, 21 nt, synthetic construct
  source 1..21: mol_type = other RNA
acctggacccgcctatcacag

SEQ ID NO: 37903 - RNA, 21 nt, synthetic construct
  source 1..21: mol_type = other RNA
gccaccacacacgggcgatcc

SEQ ID NO: 37904 - RNA, 21 nt, synthetic construct
  source 1..21: mol_type = other RNA
gtgacggtgcccaccggatcc

SEQ ID NO: 37905 - RNA, 21 nt, synthetic construct
  source 1..21: mol_type = other RNA
cccaccccgtgggtgaaaccg

SEQ ID NO: 37906 - RNA, 21 nt, synthetic construct
  source 1..21: mol_type = other RNA
gacaaggacggaaactactat

SEQ ID NO: 37907 - RNA, 21 nt, synthetic construct
  source 1..21: mol_type = other RNA
tccaacatccgtgcggccgga

SEQ ID NO: 37908 - RNA, 21 nt, synthetic construct
  source 1..21: mol_type = other RNA
tccaacatccgtgcggccgga

SEQ ID NO: 37909 - RNA, 21 nt, synthetic construct
  source 1..21: mol_type = other RNA
tccaacatccgtgcggccgga

SEQ ID NO: 37910 - RNA, 21 nt, synthetic construct
  source 1..21: mol_type = other RNA
tccaacatccgtgcggccgga

SEQ ID NO: 37911 - RNA, 21 nt, synthetic construct
  source 1..21: mol_type = other RNA
acctggacccgcctatcacag

SEQ ID NO: 37912 - RNA, 21 nt, synthetic construct
  source 1..21: mol_type = other RNA
cacggccactacgatcacggc

SEQ ID NO: 37913 - RNA, 21 nt, synthetic construct
  source 1..21: mol_type = other RNA
cacggccactacgatcacggc

SEQ ID NO: 37914 - RNA, 21 nt, synthetic construct
  source 1..21: mol_type = other RNA
cacggccactacgatcacggc

SEQ ID NO: 37915 - RNA, 21 nt, synthetic construct
  source 1..21: mol_type = other RNA
cacggccactacgatcacggc

SEQ ID NO: 37916 - RNA, 21 nt, synthetic construct
  source 1..21: mol_type = other RNA
ctttaaggcggtggcgagagg

SEQ ID NO: 37917 - RNA, 21 nt, synthetic construct
  source 1..21: mol_type = other RNA
aagtgtacaagccatgcggcc

SEQ ID NO: 37918 - RNA, 21 nt, synthetic construct
  source 1..21: mol_type = other RNA
cgccgtgcaaccgtcccggct

SEQ ID NO: 37919 - RNA, 21 nt, synthetic construct
  source 1..21: mol_type = other RNA
gccgtgcaaccgtcccggctt

SEQ ID NO: 37920 - RNA, 21 nt, synthetic construct
  source 1..21: mol_type = other RNA
cactcacgagcgagctgtcca

SEQ ID NO: 37921 - RNA, 21 nt, synthetic construct
  source 1..21: mol_type = other RNA
tacgaccgcaaccactggatc

SEQ ID NO: 37922 - RNA, 21 nt, synthetic construct
  source 1..21: mol_type = other RNA
gccgactaccacaaccacggg

SEQ ID NO: 37923 - RNA, 21 nt, synthetic construct
  source 1..21: mol_type = other RNA
gccgactaccacaaccacggg

SEQ ID NO: 37924 - RNA, 21 nt, synthetic construct
  source 1..21: mol_type = other RNA
acaaccacgggcttcacagtc

SEQ ID NO: 37925 - RNA, 21 nt, synthetic construct
  source 1..21: mol_type = other RNA
gccgactaccacaaccacggg

SEQ ID NO: 37926 - RNA, 21 nt, synthetic construct
  source 1..21: mol_type = other RNA
tttaaggcggtggcgagaggg

SEQ ID NO: 37927 - RNA, 21 nt, synthetic construct
  source 1..21: mol_type = other RNA
ggacaacacctatccccccag

SEQ ID NO: 37928 - RNA, 21 nt, synthetic construct
  source 1..21: mol_type = other RNA
ggacaacacctatccccccag

SEQ ID NO: 37929 - RNA, 21 nt, synthetic construct
  source 1..21: mol_type = other RNA
tcccggccttcaacgagttct

SEQ ID NO: 37930 - RNA, 21 nt, synthetic construct
  source 1..21: mol_type = other RNA
ccaagcggacggcggcgtgtt

SEQ ID NO: 37931 - RNA, 21 nt, synthetic construct
  source 1..21: mol_type = other RNA
gcggaagcaacggcaccatca

SEQ ID NO: 37932 - RNA, 21 nt, synthetic construct
  source 1..21: mol_type = other RNA
tgtgacgtccacttcggcctg

SEQ ID NO: 37933 - RNA, 21 nt, synthetic construct
  source 1..21: mol_type = other RNA
gcaagacccgcacctcgaccc

SEQ ID NO: 37934 - RNA, 21 nt, synthetic construct
  source 1..21: mol_type = other RNA
gcaagacccgcacctcgaccc

SEQ ID NO: 37935 - RNA, 21 nt, synthetic construct
  source 1..21: mol_type = other RNA
gcaagacccgcacctcgaccc

SEQ ID NO: 37936 - RNA, 21 nt, synthetic construct
  source 1..21: mol_type = other RNA
gcaagacccgcacctcgaccc

SEQ ID NO: 37937 - RNA, 21 nt, synthetic construct
  source 1..21: mol_type = other RNA
agctgtgttcgtacaatggca

SEQ ID NO: 37938 - RNA, 21 nt, synthetic construct
  source 1..21: mol_type = other RNA
ctgctccggggggctatggca

SEQ ID NO: 37939 - RNA, 21 nt, synthetic construct
  source 1..21: mol_type = other RNA
cttcgacgacaatgccatcaa

SEQ ID NO: 37940 - RNA, 21 nt, synthetic construct
  source 1..21: mol_type = other RNA
acaaggacggaaactactatg

SEQ ID NO: 37941 - RNA, 21 nt, synthetic construct
  source 1..21: mol_type = other RNA
gctaccagcgttacacccatc

SEQ ID NO: 37942 - RNA, 21 nt, synthetic construct
  source 1..21: mol_type = other RNA
gcaacaccctcctctagcaca

SEQ ID NO: 37943 - RNA, 21 nt, synthetic construct
  source 1..21: mol_type = other RNA
ccacatcggcccccataacca

SEQ ID NO: 37944 - RNA, 21 nt, synthetic construct
  source 1..21: mol_type = other RNA
ggactacagctaccccatgcc

SEQ ID NO: 37945 - RNA, 21 nt, synthetic construct
  source 1..21: mol_type = other RNA
ctggcggggactttgacacct

SEQ ID NO: 37946 - RNA, 21 nt, synthetic construct
  source 1..21: mol_type = other RNA
gcaacaccctcctctagcaca

SEQ ID NO: 37947 - RNA, 21 nt, synthetic construct
  source 1..21: mol_type = other RNA
ggactacagctaccccatgcc

SEQ ID NO: 37948 - RNA, 21 nt, synthetic construct
  source 1..21: mol_type = other RNA
ctggcggggactttgacacct

SEQ ID NO: 37949 - RNA, 21 nt, synthetic construct
  source 1..21: mol_type = other RNA
gaccgcaaccactggatccac

SEQ ID NO: 37950 - RNA, 21 nt, synthetic construct
  source 1..21: mol_type = other RNA
cagctaccagcgttacagcca

SEQ ID NO: 37951 - RNA, 21 nt, synthetic construct
  source 1..21: mol_type = other RNA
gcaacaccctcctctagcaca

SEQ ID NO: 37952 - RNA, 21 nt, synthetic construct
  source 1..21: mol_type = other RNA
acacacgggcggtccctgccc

SEQ ID NO: 37953 - RNA, 21 nt, synthetic construct
  source 1..21: mol_type = other RNA
ccacatcggcccccataacca

SEQ ID NO: 37954 - RNA, 21 nt, synthetic construct
  source 1..21: mol_type = other RNA
ggactacagctaccccatgcc

SEQ ID NO: 37955 - RNA, 21 nt, synthetic construct
  source 1..21: mol_type = other RNA
ctggcggggactttgacacct

SEQ ID NO: 37956 - RNA, 21 nt, synthetic construct
  source 1..21: mol_type = other RNA
gcaacaccctcctctagcaca

SEQ ID NO: 37957 - RNA, 21 nt, synthetic construct
  source 1..21: mol_type = other RNA
ccacatcggcccccataacca

SEQ ID NO: 37958 - RNA, 21 nt, synthetic construct
  source 1..21: mol_type = other RNA
ggactacagctaccccatgcc

SEQ ID NO: 37959 - RNA, 21 nt, synthetic construct
  source 1..21: mol_type = other RNA
ctggcggggactttgacacct

SEQ ID NO: 37960 - RNA, 21 nt, synthetic construct
  source 1..21: mol_type = other RNA
gctaccagcgttacacccatc

SEQ ID NO: 37961 - RNA, 21 nt, synthetic construct
  source 1..21: mol_type = other RNA
gcaacaccctcctctagcaca

SEQ ID NO: 37962 - RNA, 21 nt, synthetic construct
  source 1..21: mol_type = other RNA
cactatagccaccgtgatggt

SEQ ID NO: 37963 - RNA, 21 nt, synthetic construct
  source 1..21: mol_type = other RNA
acaaccttgtgcccccgggcc

SEQ ID NO: 37964 - RNA, 21 nt, synthetic construct
  source 1..21: mol_type = other RNA
gggcccattcttcaacgcctg

SEQ ID NO: 37965 - RNA, 21 nt, synthetic construct
  source 1..21: mol_type = other RNA
gtcctgcgtgtgtgacgaggg

SEQ ID NO: 37966 - RNA, 21 nt, synthetic construct
  source 1..21: mol_type = other RNA
acaatggcaccttctacgggg

SEQ ID NO: 37967 - RNA, 21 nt, synthetic construct
  source 1..21: mol_type = other RNA
gacaaccgtgtcgtcctgctg

SEQ ID NO: 37968 - RNA, 21 nt, synthetic construct
  source 1..21: mol_type = other RNA
agggttcagtgtcggtgcagt

SEQ ID NO: 37969 - RNA, 21 nt, synthetic construct
  source 1..21: mol_type = other RNA
cacacgggcgatccctgcccc

SEQ ID NO: 37970 - RNA, 21 nt, synthetic construct
  source 1..21: mol_type = other RNA
cagtttttctcgcccggggaa

SEQ ID NO: 37971 - RNA, 21 nt, synthetic construct
  source 1..21: mol_type = other RNA
tgcgtgtgtgacgagggttca

SEQ ID NO: 37972 - RNA, 21 nt, synthetic construct
  source 1..21: mol_type = other RNA
ggtaccacccagcactcgact

SEQ ID NO: 37973 - RNA, 21 nt, synthetic construct
  source 1..21: mol_type = other RNA
ggtaccacccagcactcgact

SEQ ID NO: 37974 - RNA, 21 nt, synthetic construct
  source 1..21: mol_type = other RNA
agtaccacccagcactcgact

SEQ ID NO: 37975 - RNA, 21 nt, synthetic construct
  source 1..21: mol_type = other RNA
ggtaccacccagcactcgact

SEQ ID NO: 37976 - RNA, 21 nt, synthetic construct
  source 1..21: mol_type = other RNA
caacactcacgagcgagctgt

SEQ ID NO: 37977 - RNA, 21 nt, synthetic construct
  source 1..21: mol_type = other RNA
gaccagcgtgttcatccgact

SEQ ID NO: 37978 - RNA, 21 nt, synthetic construct
  source 1..21: mol_type = other RNA
agggacggcacgcacgcttcc

SEQ ID NO: 37979 - RNA, 21 nt, synthetic construct
  source 1..21: mol_type = other RNA
tccgggtccaagcggacggcg

SEQ ID NO: 37980 - RNA, 21 nt, synthetic construct
  source 1..21: mol_type = other RNA
gccccaataaccacggtggtg

SEQ ID NO: 37981 - RNA, 21 nt, synthetic construct
  source 1..21: mol_type = other RNA
cctgaacccggcgcacaatgg

SEQ ID NO: 37982 - RNA, 21 nt, synthetic construct
  source 1..21: mol_type = other RNA
ctgcagcgtttccttcgtgcc

SEQ ID NO: 37983 - RNA, 21 nt, synthetic construct
  source 1..21: mol_type = other RNA
ttcaacggcctcccggccttc

SEQ ID NO: 37984 - RNA, 21 nt, synthetic construct
  source 1..21: mol_type = other RNA
tgcaaccggtggcctgtgcga

SEQ ID NO: 37985 - RNA, 21 nt, synthetic construct
  source 1..21: mol_type = other RNA
ctaaatttcccggggagcggt

SEQ ID NO: 37986 - RNA, 21 nt, synthetic construct
  source 1..21: mol_type = other RNA
aagaccaccctatgggtgacc

SEQ ID NO: 37987 - RNA, 21 nt, synthetic construct
  source 1..21: mol_type = other RNA
aactccagggacaacacctat

SEQ ID NO: 37988 - RNA, 21 nt, synthetic construct
  source 1..21: mol_type = other RNA
ccaccacacacgggcggtccc

SEQ ID NO: 37989 - RNA, 21 nt, synthetic construct
  source 1..21: mol_type = other RNA
aactccagggacaacacctat

SEQ ID NO: 37990 - RNA, 21 nt, synthetic construct
  source 1..21: mol_type = other RNA
aggtgcgtgggtgacaaccgt

SEQ ID NO: 37991 - RNA, 21 nt, synthetic construct
  source 1..21: mol_type = other RNA
tgctgccccgagacggtgtgc

SEQ ID NO: 37992 - RNA, 21 nt, synthetic construct
  source 1..21: mol_type = other RNA
actgctgtctgagaacgttct

SEQ ID NO: 37993 - RNA, 21 nt, synthetic construct
  source 1..21: mol_type = other RNA
ccatttctacgcagtgtgcaa

SEQ ID NO: 37994 - RNA, 21 nt, synthetic construct
  source 1..21: mol_type = other RNA
gcgtgggtgacaaccgtgtcg

SEQ ID NO: 37995 - RNA, 21 nt, synthetic construct
  source 1..21: mol_type = other RNA
ggcgccgtgtgttcatgtacg

SEQ ID NO: 37996 - RNA, 21 nt, synthetic construct
  source 1..21: mol_type = other RNA
tggactgtgaccgcatgcggg

SEQ ID NO: 37997 - RNA, 21 nt, synthetic construct
  source 1..21: mol_type = other RNA
ctaagcatgtgcgggcctatg

SEQ ID NO: 37998 - RNA, 21 nt, synthetic construct
  source 1..21: mol_type = other RNA
caccacacacgggcggtccct

SEQ ID NO: 37999 - RNA, 21 nt, synthetic construct
  source 1..21: mol_type = other RNA
tgacggtgcccaccggatcca

SEQ ID NO: 38000 - RNA, 21 nt, synthetic construct
  source 1..21: mol_type = other RNA
tgacggtgcccaccggatcca

SEQ ID NO: 38001 - RNA, 21 nt, synthetic construct
  source 1..21: mol_type = other RNA
tgacggtgcccaccggatcca

SEQ ID NO: 38002 - RNA, 21 nt, synthetic construct
  source 1..21: mol_type = other RNA
tgacggtgcccaccggatcca

SEQ ID NO: 38003 - RNA, 21 nt, synthetic construct
  source 1..21: mol_type = other RNA
gctctgtcacgactacgagct

SEQ ID NO: 38004 - RNA, 21 nt, synthetic construct
  source 1..21: mol_type = other RNA
cacccccagtgccgaacacca

SEQ ID NO: 38005 - RNA, 21 nt, synthetic construct
  source 1..21: mol_type = other RNA
cacccccagtgccgaacacca

SEQ ID NO: 38006 - RNA, 21 nt, synthetic construct
  source 1..21: mol_type = other RNA
gagacgtttgaaaacctgagg

SEQ ID NO: 38007 - RNA, 21 nt, synthetic construct
  source 1..21: mol_type = other RNA
ggacccgatgggtttcctaaa

SEQ ID NO: 38008 - RNA, 21 nt, synthetic construct
  source 1..21: mol_type = other RNA
ctgccacgacgcgggcctgtg

SEQ ID NO: 38009 - RNA, 21 nt, synthetic construct
  source 1..21: mol_type = other RNA
gcaacggcaccatcatcagga

SEQ ID NO: 38010 - RNA, 21 nt, synthetic construct
  source 1..21: mol_type = other RNA
acgtgccacaaccccgccacc

SEQ ID NO: 38011 - RNA, 21 nt, synthetic construct
  source 1..21: mol_type = other RNA
cacaaccccgccaccgaccac

SEQ ID NO: 38012 - RNA, 21 nt, synthetic construct
  source 1..21: mol_type = other RNA
gccccggagcgtccaagtact

SEQ ID NO: 38013 - RNA, 21 nt, synthetic construct
  source 1..21: mol_type = other RNA
ctggaggcgtccaacggctcc

SEQ ID NO: 38014 - RNA, 21 nt, synthetic construct
  source 1..21: mol_type = other RNA
gacgtttgaaaacctgaggca

SEQ ID NO: 38015 - RNA, 21 nt, synthetic construct
  source 1..21: mol_type = other RNA
acgtttgaaaacctgaggcag

SEQ ID NO: 38016 - RNA, 21 nt, synthetic construct
  source 1..21: mol_type = other RNA
ccacgctggccccaacaacaa

SEQ ID NO: 38017 - RNA, 21 nt, synthetic construct
  source 1..21: mol_type = other RNA
accttctacggggttggtgca

SEQ ID NO: 38018 - RNA, 21 nt, synthetic construct
  source 1..21: mol_type = other RNA
ccttgcactgtcctaacggct

SEQ ID NO: 38019 - RNA, 21 nt, synthetic construct
  source 1..21: mol_type = other RNA
gcgacaggcaaggcggccgcc

SEQ ID NO: 38020 - RNA, 21 nt, synthetic construct
  source 1..21: mol_type = other RNA
acgacaaggacggaaactact

SEQ ID NO: 38021 - RNA, 21 nt, synthetic construct
  source 1..21: mol_type = other RNA
atacgctacatggggatcttc

SEQ ID NO: 38022 - RNA, 21 nt, synthetic construct
  source 1..21: mol_type = other RNA
ggatcccaaatacgccaacca

SEQ ID NO: 38023 - RNA, 21 nt, synthetic construct
  source 1..21: mol_type = other RNA
acacggccatccgggtccaag

SEQ ID NO: 38024 - RNA, 21 nt, synthetic construct
  source 1..21: mol_type = other RNA
cacccccagtgccgaacacca

SEQ ID NO: 38025 - RNA, 21 nt, synthetic construct
  source 1..21: mol_type = other RNA
cacccccagtgccgaacacca

SEQ ID NO: 38026 - RNA, 21 nt, synthetic construct
  source 1..21: mol_type = other RNA
caagtcccagcgctacgccta

SEQ ID NO: 38027 - RNA, 21 nt, synthetic construct
  source 1..21: mol_type = other RNA
caggagtgcccctgctacgct

SEQ ID NO: 38028 - RNA, 21 nt, synthetic construct
  source 1..21: mol_type = other RNA
accccgtgggtgaaaccggcc

SEQ ID NO: 38029 - RNA, 21 nt, synthetic construct
  source 1..21: mol_type = other RNA
agctcaggccccgtgacggtc

SEQ ID NO: 38030 - RNA, 21 nt, synthetic construct
  source 1..21: mol_type = other RNA
acaatgagccccttgactaac

SEQ ID NO: 38031 - RNA, 21 nt, synthetic construct
  source 1..21: mol_type = other RNA
cagggacggcacgcacgcttc

SEQ ID NO: 38032 - RNA, 21 nt, synthetic construct
  source 1..21: mol_type = other RNA
gacggtgcccaccggatccac

SEQ ID NO: 38033 - RNA, 21 nt, synthetic construct
  source 1..21: mol_type = other RNA
gacggtgcccaccggatccac

SEQ ID NO: 38034 - RNA, 21 nt, synthetic construct
  source 1..21: mol_type = other RNA
gacggtgcccaccggatccac

SEQ ID NO: 38035 - RNA, 21 nt, synthetic construct
  source 1..21: mol_type = other RNA
gacggtgcccaccggatccac

SEQ ID NO: 38036 - RNA, 21 nt, synthetic construct
  source 1..21: mol_type = other RNA
ggttctctgctgcgaatacgt

SEQ ID NO: 38037 - RNA, 21 nt, synthetic construct
  source 1..21: mol_type = other RNA
gtaccacccagcactcgactc

SEQ ID NO: 38038 - RNA, 21 nt, synthetic construct
  source 1..21: mol_type = other RNA
gtaccacccagcactcgactc

SEQ ID NO: 38039 - RNA, 21 nt, synthetic construct
  source 1..21: mol_type = other RNA
gtaccacccagcactcgactc

SEQ ID NO: 38040 - RNA, 21 nt, synthetic construct
  source 1..21: mol_type = other RNA
gtaccacccagcactcgactc

SEQ ID NO: 38041 - RNA, 21 nt, synthetic construct
  source 1..21: mol_type = other RNA
gcgcccgcgcagcacggattc

SEQ ID NO: 38042 - RNA, 21 nt, synthetic construct
  source 1..21: mol_type = other RNA
acaagccatgcggccccatac

SEQ ID NO: 38043 - RNA, 21 nt, synthetic construct
  source 1..21: mol_type = other RNA
tgggacgccctggaacaaact

SEQ ID NO: 38044 - RNA, 21 nt, synthetic construct
  source 1..21: mol_type = other RNA
ttctctgctgcgaatacgtgc

SEQ ID NO: 38045 - RNA, 21 nt, synthetic construct
  source 1..21: mol_type = other RNA
agagggtaccaggtatgccct

SEQ ID NO: 38046 - RNA, 21 nt, synthetic construct
  source 1..21: mol_type = other RNA
gcaccttctacggggttggtg

SEQ ID NO: 38047 - RNA, 21 nt, synthetic construct
  source 1..21: mol_type = other RNA
cccaacagtgccttctcgcgc

SEQ ID NO: 38048 - RNA, 21 nt, synthetic construct
  source 1..21: mol_type = other RNA
cgtgacggtcaccccctcggc

SEQ ID NO: 38049 - RNA, 21 nt, synthetic construct
  source 1..21: mol_type = other RNA
cccagggacggcactcacgcc

SEQ ID NO: 38050 - RNA, 21 nt, synthetic construct
  source 1..21: mol_type = other RNA
ctccactccagggacgacctg

SEQ ID NO: 38051 - RNA, 21 nt, synthetic construct
  source 1..21: mol_type = other RNA
cccagggacggcactcacgcc

SEQ ID NO: 38052 - RNA, 21 nt, synthetic construct
  source 1..21: mol_type = other RNA
cccagggacggcactcacgcc

SEQ ID NO: 38053 - RNA, 21 nt, synthetic construct
  source 1..21: mol_type = other RNA
catgcacgctttgggaatctc

SEQ ID NO: 38054 - RNA, 21 nt, synthetic construct
  source 1..21: mol_type = other RNA
gtgacaaccgtgtcgtcctgc

SEQ ID NO: 38055 - RNA, 21 nt, synthetic construct
  source 1..21: mol_type = other RNA
caccacacacgggcgatccct

SEQ ID NO: 38056 - RNA, 21 nt, synthetic construct
  source 1..21: mol_type = other RNA
caccacacacgggcgatccct

SEQ ID NO: 38057 - RNA, 21 nt, synthetic construct
  source 1..21: mol_type = other RNA
caccacacacgggcgatccct

SEQ ID NO: 38058 - RNA, 21 nt, synthetic construct
  source 1..21: mol_type = other RNA
cgaccgagccggctgccattt

SEQ ID NO: 38059 - RNA, 21 nt, synthetic construct
  source 1..21: mol_type = other RNA
atgatgagaaactctacgacc

SEQ ID NO: 38060 - RNA, 21 nt, synthetic construct
  source 1..21: mol_type = other RNA
tacagctaccaggacgtcatc

SEQ ID NO: 38061 - RNA, 21 nt, synthetic construct
  source 1..21: mol_type = other RNA
tccaccgtgtgtgtccgcgag

SEQ ID NO: 38062 - RNA, 21 nt, synthetic construct
  source 1..21: mol_type = other RNA
cgcagcttcccgacatgccgc

SEQ ID NO: 38063 - RNA, 21 nt, synthetic construct
  source 1..21: mol_type = other RNA
ctctgctgcgaatacgtgccc

SEQ ID NO: 38064 - RNA, 21 nt, synthetic construct
  source 1..21: mol_type = other RNA
acagtttttctcgcccgggga

SEQ ID NO: 38065 - RNA, 21 nt, synthetic construct
  source 1..21: mol_type = other RNA
tacaataagaccgaccgagcc

SEQ ID NO: 38066 - RNA, 21 nt, synthetic construct
  source 1..21: mol_type = other RNA
accggtggcctgtgcgacctc

SEQ ID NO: 38067 - RNA, 21 nt, synthetic construct
  source 1..21: mol_type = other RNA
ggtgtgcgtgtgcaacacaac

SEQ ID NO: 38068 - RNA, 21 nt, synthetic construct
  source 1..21: mol_type = other RNA
aacacgaccatcctgtggcac

SEQ ID NO: 38069 - RNA, 21 nt, synthetic construct
  source 1..21: mol_type = other RNA
taccacccagcactcgactcc

SEQ ID NO: 38070 - RNA, 21 nt, synthetic construct
  source 1..21: mol_type = other RNA
taccacccagcactcgactcc

SEQ ID NO: 38071 - RNA, 21 nt, synthetic construct
  source 1..21: mol_type = other RNA
taccacccagcactcgactcc

SEQ ID NO: 38072 - RNA, 21 nt, synthetic construct
  source 1..21: mol_type = other RNA
taccacccagcactcgactcc

SEQ ID NO: 38073 - RNA, 21 nt, synthetic construct
  source 1..21: mol_type = other RNA
ccctttcgggagggcgccact

SEQ ID NO: 38074 - RNA, 21 nt, synthetic construct
  source 1..21: mol_type = other RNA
aggactcctgtcaagtccgca

SEQ ID NO: 38075 - RNA, 21 nt, synthetic construct
  source 1..21: mol_type = other RNA
cccgagcatccggtcgacggc

SEQ ID NO: 38076 - RNA, 21 nt, synthetic construct
  source 1..21: mol_type = other RNA
ctgaaagcggtgacgctcagc

SEQ ID NO: 38077 - RNA, 21 nt, synthetic construct
  source 1..21: mol_type = other RNA
cctgcgactcgggtggcgact

SEQ ID NO: 38078 - RNA, 21 nt, synthetic construct
  source 1..21: mol_type = other RNA
ccgcctggacccgcctatcac

SEQ ID NO: 38079 - RNA, 21 nt, synthetic construct
  source 1..21: mol_type = other RNA
gtcatcgagacccacgggatg

SEQ ID NO: 38080 - RNA, 21 nt, synthetic construct
  source 1..21: mol_type = other RNA
gcccttgccggccggcaactg

SEQ ID NO: 38081 - RNA, 21 nt, synthetic construct
  source 1..21: mol_type = other RNA
tttgatggcgatcgctacagc

SEQ ID NO: 38082 - RNA, 21 nt, synthetic construct
  source 1..21: mol_type = other RNA
tcccagcgctacgcctacgtg

SEQ ID NO: 38083 - RNA, 21 nt, synthetic construct
  source 1..21: mol_type = other RNA
tcacctttgatggcgatcgct

SEQ ID NO: 38084 - RNA, 21 nt, synthetic construct
  source 1..21: mol_type = other RNA
ccaccctacaagatacgctac

SEQ ID NO: 38085 - RNA, 21 nt, synthetic construct
  source 1..21: mol_type = other RNA
ggatgacatcacgcactctgg

SEQ ID NO: 38086 - RNA, 21 nt, synthetic construct
  source 1..21: mol_type = other RNA
agaccagcgtgttcatccgac

SEQ ID NO: 38087 - RNA, 21 nt, synthetic construct
  source 1..21: mol_type = other RNA
ctggctgacatcgagtgccgg

SEQ ID NO: 38088 - RNA, 21 nt, synthetic construct
  source 1..21: mol_type = other RNA
tcaggccccgtgacggtcacc

SEQ ID NO: 38089 - RNA, 21 nt, synthetic construct
  source 1..21: mol_type = other RNA
aacgccgcagcctacgagtag

SEQ ID NO: 38090 - RNA, 21 nt, synthetic construct
  source 1..21: mol_type = other RNA
ccacctggacccgcctatcac

SEQ ID NO: 38091 - RNA, 21 nt, synthetic construct
  source 1..21: mol_type = other RNA
cacagtgcttaccgccacggc

SEQ ID NO: 38092 - RNA, 21 nt, synthetic construct
  source 1..21: mol_type = other RNA
ccacctggacccgcctatcac

SEQ ID NO: 38093 - RNA, 21 nt, synthetic construct
  source 1..21: mol_type = other RNA
ccacctggacccgcctatcac

SEQ ID NO: 38094 - RNA, 21 nt, synthetic construct
  source 1..21: mol_type = other RNA
ccacctggacccgcctatcac

SEQ ID NO: 38095 - RNA, 21 nt, synthetic construct
  source 1..21: mol_type = other RNA
cacagtgcttaccgccacggc

SEQ ID NO: 38096 - RNA, 21 nt, synthetic construct
  source 1..21: mol_type = other RNA
tcttacaccttccggggcaac

SEQ ID NO: 38097 - RNA, 21 nt, synthetic construct
  source 1..21: mol_type = other RNA
agcccccgccgtgcaaccgtc

SEQ ID NO: 38098 - RNA, 21 nt, synthetic construct
  source 1..21: mol_type = other RNA
accgtcccggcttcgtaaccg

SEQ ID NO: 38099 - RNA, 21 nt, synthetic construct
  source 1..21: mol_type = other RNA
gtccgcatcaacacgaccatc

SEQ ID NO: 38100 - RNA, 21 nt, synthetic construct
  source 1..21: mol_type = other RNA
tgctgtctgagaacgttctgc

SEQ ID NO: 38101 - RNA, 21 nt, synthetic construct
  source 1..21: mol_type = other RNA
agcaggacccctttcgggagg

SEQ ID NO: 38102 - RNA, 21 nt, synthetic construct
  source 1..21: mol_type = other RNA
atccgggtccaagcggacggc

SEQ ID NO: 38103 - RNA, 21 nt, synthetic construct
  source 1..21: mol_type = other RNA
cacctggacccgcctatcaca

SEQ ID NO: 38104 - RNA, 21 nt, synthetic construct
  source 1..21: mol_type = other RNA
gacacctactccaacatccgt

SEQ ID NO: 38105 - RNA, 21 nt, synthetic construct
  source 1..21: mol_type = other RNA
cacctggacccgcctatcaca

SEQ ID NO: 38106 - RNA, 21 nt, synthetic construct
  source 1..21: mol_type = other RNA
gacacctactccaacatccgt

SEQ ID NO: 38107 - RNA, 21 nt, synthetic construct
  source 1..21: mol_type = other RNA
cgcctggacccgcctatcaca

SEQ ID NO: 38108 - RNA, 21 nt, synthetic construct
  source 1..21: mol_type = other RNA
cagtaccacccagcactcgac

SEQ ID NO: 38109 - RNA, 21 nt, synthetic construct
  source 1..21: mol_type = other RNA
gacacctactccaacatccgt

SEQ ID NO: 38110 - RNA, 21 nt, synthetic construct
  source 1..21: mol_type = other RNA
cacctggacccgcctatcaca

SEQ ID NO: 38111 - RNA, 21 nt, synthetic construct
  source 1..21: mol_type = other RNA
gacacctactccaacatccgt

SEQ ID NO: 38112 - RNA, 21 nt, synthetic construct
  source 1..21: mol_type = other RNA
cacctggacccgcctatcaca

SEQ ID NO: 38113 - RNA, 21 nt, synthetic construct
  source 1..21: mol_type = other RNA
tgcactgtcctaacggctcag

SEQ ID NO: 38114 - RNA, 21 nt, synthetic construct
  source 1..21: mol_type = other RNA
cagggctgaggtcgcaacggc

SEQ ID NO: 38115 - RNA, 21 nt, synthetic construct
  source 1..21: mol_type = other RNA
tgtcaagtccgcatcaacacg

SEQ ID NO: 38116 - RNA, 21 nt, synthetic construct
  source 1..21: mol_type = other RNA
tggatggcggtgccccgacgt

SEQ ID NO: 38117 - RNA, 21 nt, synthetic construct
  source 1..21: mol_type = other RNA
tgatgagaaactctacgacct

SEQ ID NO: 38118 - RNA, 21 nt, synthetic construct
  source 1..21: mol_type = other RNA
tctgctgcgaatacgtgccct

SEQ ID NO: 38119 - RNA, 21 nt, synthetic construct
  source 1..21: mol_type = other RNA
tgatcaccacggccactacga

SEQ ID NO: 38120 - RNA, 21 nt, synthetic construct
  source 1..21: mol_type = other RNA
cgagcactatagccaccgtga

SEQ ID NO: 38121 - RNA, 21 nt, synthetic construct
  source 1..21: mol_type = other RNA
tttctacgcagtgtgcaatca

SEQ ID NO: 38122 - RNA, 21 nt, synthetic construct
  source 1..21: mol_type = other RNA
ccctgcgtgggacccgatggg

SEQ ID NO: 38123 - RNA, 21 nt, synthetic construct
  source 1..21: mol_type = other RNA
tgcctgaaagcggtgacgctc

SEQ ID NO: 38124 - RNA, 21 nt, synthetic construct
  source 1..21: mol_type = other RNA
cctacgataagatcagggccg

SEQ ID NO: 38125 - RNA, 21 nt, synthetic construct
  source 1..21: mol_type = other RNA
acgataagatcagggccgctg

SEQ ID NO: 38126 - RNA, 21 nt, synthetic construct
  source 1..21: mol_type = other RNA
ccccgccgtgcaaccgtcccg

SEQ ID NO: 38127 - RNA, 21 nt, synthetic construct
  source 1..21: mol_type = other RNA
tcgcccacccggcgcgtgagc

SEQ ID NO: 38128 - RNA, 21 nt, synthetic construct
  source 1..21: mol_type = other RNA
cccacccggcgcgtgagcttt

SEQ ID NO: 38129 - RNA, 21 nt, synthetic construct
  source 1..21: mol_type = other RNA
acccggcgcgtgagctttgtt

SEQ ID NO: 38130 - RNA, 21 nt, synthetic construct
  source 1..21: mol_type = other RNA
tggatgacatcacgcactctg

SEQ ID NO: 38131 - RNA, 21 nt, synthetic construct
  source 1..21: mol_type = other RNA
cgggtccaagcggacggcggc

SEQ ID NO: 38132 - RNA, 21 nt, synthetic construct
  source 1..21: mol_type = other RNA
tgtgttcatgtacgggtggga

SEQ ID NO: 38133 - RNA, 21 nt, synthetic construct
  source 1..21: mol_type = other RNA
acgggtgggaagctaagctgc

SEQ ID NO: 38134 - RNA, 21 nt, synthetic construct
  source 1..21: mol_type = other RNA
accctacaagatacgctacat

SEQ ID NO: 38135 - RNA, 21 nt, synthetic construct
  source 1..21: mol_type = other RNA
acgccgcagcctacgagtagc

SEQ ID NO: 38136 - RNA, 21 nt, synthetic construct
  source 1..21: mol_type = other RNA
catcggcccccataaccacgg

SEQ ID NO: 38137 - RNA, 21 nt, synthetic construct
  source 1..21: mol_type = other RNA
gggacaacacctatcccccca

SEQ ID NO: 38138 - RNA, 21 nt, synthetic construct
  source 1..21: mol_type = other RNA
acagctaccagcgttacagcc

SEQ ID NO: 38139 - RNA, 21 nt, synthetic construct
  source 1..21: mol_type = other RNA
ccacggccactacgatcacag

SEQ ID NO: 38140 - RNA, 21 nt, synthetic construct
  source 1..21: mol_type = other RNA
catcggcccccataaccacgg

SEQ ID NO: 38141 - RNA, 21 nt, synthetic construct
  source 1..21: mol_type = other RNA
gggacaacacctatcccccca

SEQ ID NO: 38142 - RNA, 21 nt, synthetic construct
  source 1..21: mol_type = other RNA
catcggcccccataaccacgg

SEQ ID NO: 38143 - RNA, 21 nt, synthetic construct
  source 1..21: mol_type = other RNA
gctgccatttctacgcagtgt

SEQ ID NO: 38144 - RNA, 21 nt, synthetic construct
  source 1..21: mol_type = other RNA
cctcttacaccttccggggca

SEQ ID NO: 38145 - RNA, 21 nt, synthetic construct
  source 1..21: mol_type = other RNA
gagagagatccatgcacgctt

SEQ ID NO: 38146 - RNA, 21 nt, synthetic construct
  source 1..21: mol_type = other RNA
agagatccatgcacgctttgg

SEQ ID NO: 38147 - RNA, 21 nt, synthetic construct
  source 1..21: mol_type = other RNA
tggacaaccactactgcacgg

SEQ ID NO: 38148 - RNA, 21 nt, synthetic construct
  source 1..21: mol_type = other RNA
cactgcaggggccgccttgag

SEQ ID NO: 38149 - RNA, 21 nt, synthetic construct
  source 1..21: mol_type = other RNA
gagggttcagtgtcggtgcag

SEQ ID NO: 38150 - RNA, 21 nt, synthetic construct
  source 1..21: mol_type = other RNA
gctgtctgagaacgttctgcc

SEQ ID NO: 38151 - RNA, 21 nt, synthetic construct
  source 1..21: mol_type = other RNA
actaagcatgtgcgggcctat

SEQ ID NO: 38152 - RNA, 21 nt, synthetic construct
  source 1..21: mol_type = other RNA
tcagggctgaggtcgcaacgg

SEQ ID NO: 38153 - RNA, 21 nt, synthetic construct
  source 1..21: mol_type = other RNA
ccgctctgtcacgactacgag

SEQ ID NO: 38154 - RNA, 21 nt, synthetic construct
  source 1..21: mol_type = other RNA
cgtgggacccgatgggtttcc

SEQ ID NO: 38155 - RNA, 21 nt, synthetic construct
  source 1..21: mol_type = other RNA
cacacacgggcgatccctgcc

SEQ ID NO: 38156 - RNA, 21 nt, synthetic construct
  source 1..21: mol_type = other RNA
ctggtgctcgcgcctgaccga

SEQ ID NO: 38157 - RNA, 21 nt, synthetic construct
  source 1..21: mol_type = other RNA
gtcccagcgctacgcctacgt

SEQ ID NO: 38158 - RNA, 21 nt, synthetic construct
  source 1..21: mol_type = other RNA
ctgctacgctcacggcaccgt

SEQ ID NO: 38159 - RNA, 21 nt, synthetic construct
  source 1..21: mol_type = other RNA
cgacgacaatgccatcaatga

SEQ ID NO: 38160 - RNA, 21 nt, synthetic construct
  source 1..21: mol_type = other RNA
ggtgaccccgagcatccggtc

SEQ ID NO: 38161 - RNA, 21 nt, synthetic construct
  source 1..21: mol_type = other RNA
gtgaccccgagcatccggtcg

SEQ ID NO: 38162 - RNA, 21 nt, synthetic construct
  source 1..21: mol_type = other RNA
tttttctcgcccggggaagtc

SEQ ID NO: 38163 - RNA, 21 nt, synthetic construct
  source 1..21: mol_type = other RNA
gtgggtgacaaccgtgtcgtc

SEQ ID NO: 38164 - RNA, 21 nt, synthetic construct
  source 1..21: mol_type = other RNA
gcgtgggacccgatgggtttc

SEQ ID NO: 38165 - RNA, 21 nt, synthetic construct
  source 1..21: mol_type = other RNA
gctgaccccgctccagtttgg

SEQ ID NO: 38166 - RNA, 21 nt, synthetic construct
  source 1..21: mol_type = other RNA
cggcctttgcggagtgccacg

SEQ ID NO: 38167 - RNA, 21 nt, synthetic construct
  source 1..21: mol_type = other RNA
ggtgctcgcgcctgaccgatc

SEQ ID NO: 38168 - RNA, 21 nt, synthetic construct
  source 1..21: mol_type = other RNA
gggacctttaaggcggtggcg

SEQ ID NO: 38169 - RNA, 21 nt, synthetic construct
  source 1..21: mol_type = other RNA
tgtgacttctacaacccacat

SEQ ID NO: 38170 - RNA, 21 nt, synthetic construct
  source 1..21: mol_type = other RNA
ggcgcctgcttgatcgccatc

SEQ ID NO: 38171 - RNA, 21 nt, synthetic construct
  source 1..21: mol_type = other RNA
cgccatctgcggaagcaacgg

SEQ ID NO: 38172 - RNA, 21 nt, synthetic construct
  source 1..21: mol_type = other RNA
ccaacagagtcccccgctctg

SEQ ID NO: 38173 - RNA, 21 nt, synthetic construct
  source 1..21: mol_type = other RNA
ccgcagcctacgagtagcccg

SEQ ID NO: 38174 - RNA, 21 nt, synthetic construct
  source 1..21: mol_type = other RNA
gaccagtggtactcccccatc

SEQ ID NO: 38175 - RNA, 21 nt, synthetic construct
  source 1..21: mol_type = other RNA
ccaccacacacgggcgatccc

SEQ ID NO: 38176 - RNA, 21 nt, synthetic construct
  source 1..21: mol_type = other RNA
ggggactttgacacctactcc

SEQ ID NO: 38177 - RNA, 21 nt, synthetic construct
  source 1..21: mol_type = other RNA
acggtgcccaccggatccacg

SEQ ID NO: 38178 - RNA, 21 nt, synthetic construct
  source 1..21: mol_type = other RNA
gaccagtggtactcccccatc

SEQ ID NO: 38179 - RNA, 21 nt, synthetic construct
  source 1..21: mol_type = other RNA
ccaccacacacgggcgatccc

SEQ ID NO: 38180 - RNA, 21 nt, synthetic construct
  source 1..21: mol_type = other RNA
ggggactttgacacctactcc

SEQ ID NO: 38181 - RNA, 21 nt, synthetic construct
  source 1..21: mol_type = other RNA
acggtgcccaccggatccacg

SEQ ID NO: 38182 - RNA, 21 nt, synthetic construct
  source 1..21: mol_type = other RNA
gaccagtggtactcccccatc

SEQ ID NO: 38183 - RNA, 21 nt, synthetic construct
  source 1..21: mol_type = other RNA
ggggactttgacacctactcc

SEQ ID NO: 38184 - RNA, 21 nt, synthetic construct
  source 1..21: mol_type = other RNA
acggtgcccaccggatccacg

SEQ ID NO: 38185 - RNA, 21 nt, synthetic construct
  source 1..21: mol_type = other RNA
gaccagtggtactcccccatc

SEQ ID NO: 38186 - RNA, 21 nt, synthetic construct
  source 1..21: mol_type = other RNA
ccaccacacacgggcgatccc

SEQ ID NO: 38187 - RNA, 21 nt, synthetic construct
  source 1..21: mol_type = other RNA
ggggactttgacacctactcc

SEQ ID NO: 38188 - RNA, 21 nt, synthetic construct
  source 1..21: mol_type = other RNA
acggtgcccaccggatccacg

SEQ ID NO: 38189 - RNA, 21 nt, synthetic construct
  source 1..21: mol_type = other RNA
gaccagtggtactcccccatc

SEQ ID NO: 38190 - RNA, 21 nt, synthetic construct
  source 1..21: mol_type = other RNA
gccgagcactatagccaccgt

SEQ ID NO: 38191 - RNA, 21 nt, synthetic construct
  source 1..21: mol_type = other RNA
ggacaaccactactgcacggc

SEQ ID NO: 38192 - RNA, 21 nt, synthetic construct
  source 1..21: mol_type = other RNA
gacaaccactactgcacggcc

SEQ ID NO: 38193 - RNA, 21 nt, synthetic construct
  source 1..21: mol_type = other RNA
aaagtgtacaagccatgcggc

SEQ ID NO: 38194 - RNA, 21 nt, synthetic construct
  source 1..21: mol_type = other RNA
cccgccgtgcaaccgtcccgg

SEQ ID NO: 38195 - RNA, 21 nt, synthetic construct
  source 1..21: mol_type = other RNA
cctgccacatgtgtacctgcc

SEQ ID NO: 38196 - RNA, 21 nt, synthetic construct
  source 1..21: mol_type = other RNA
ggctgcgagaccgaggtcaac

SEQ ID NO: 38197 - RNA, 21 nt, synthetic construct
  source 1..21: mol_type = other RNA
gtgtgtggcaccccgcgctcc

SEQ ID NO: 38198 - RNA, 21 nt, synthetic construct
  source 1..21: mol_type = other RNA
cccgcgcagcacggattccag

SEQ ID NO: 38199 - RNA, 21 nt, synthetic construct
  source 1..21: mol_type = other RNA
cggtgccccgacgtcctcgcc

SEQ ID NO: 38200 - RNA, 21 nt, synthetic construct
  source 1..21: mol_type = other RNA
cgcccacccggcgcgtgagct

SEQ ID NO: 38201 - RNA, 21 nt, synthetic construct
  source 1..21: mol_type = other RNA
cgccgaggcctagtgggctcc

SEQ ID NO: 38202 - RNA, 21 nt, synthetic construct
  source 1..21: mol_type = other RNA
ggtcagcatccggctggtgct

SEQ ID NO: 38203 - RNA, 21 nt, synthetic construct
  source 1..21: mol_type = other RNA
cggccttcaacgagttctatg

SEQ ID NO: 38204 - RNA, 21 nt, synthetic construct
  source 1..21: mol_type = other RNA
gtggacagcactgcgtacctg

SEQ ID NO: 38205 - RNA, 21 nt, synthetic construct
  source 1..21: mol_type = other RNA
ggacagcactgcgtacctggc

SEQ ID NO: 38206 - RNA, 21 nt, synthetic construct
  source 1..21: mol_type = other RNA
gacagcactgcgtacctggcc

SEQ ID NO: 38207 - RNA, 21 nt, synthetic construct
  source 1..21: mol_type = other RNA
tgtggctcaccctgcacggac

SEQ ID NO: 38208 - RNA, 21 nt, synthetic construct
  source 1..21: mol_type = other RNA
gaactgcctgaaagcggtgac

SEQ ID NO: 38209 - RNA, 21 nt, synthetic construct
  source 1..21: mol_type = other RNA
gccactcatgcaggtgtttgt

SEQ ID NO: 38210 - RNA, 21 nt, synthetic construct
  source 1..21: mol_type = other RNA
acttcacggccctcagcgggg

SEQ ID NO: 38211 - RNA, 21 nt, synthetic construct
  source 1..21: mol_type = other RNA
ccggcactggtgctcgcgcct

SEQ ID NO: 38212 - RNA, 21 nt, synthetic construct
  source 1..21: mol_type = other RNA
actggtgctcgcgcctgaccg

SEQ ID NO: 38213 - RNA, 21 nt, synthetic construct
  source 1..21: mol_type = other RNA
ctgaccgatcccaacagtgcc

SEQ ID NO: 38214 - RNA, 21 nt, synthetic construct
  source 1..21: mol_type = other RNA
ccaagtcccagcgctacgcct

SEQ ID NO: 38215 - RNA, 21 nt, synthetic construct
  source 1..21: mol_type = other RNA
gccagcccacttgccgcggcc

SEQ ID NO: 38216 - RNA, 21 nt, synthetic construct
  source 1..21: mol_type = other RNA
cccacttgccgcggcctgagt

SEQ ID NO: 38217 - RNA, 21 nt, synthetic construct
  source 1..21: mol_type = other RNA
acgacgagggcgccgtgtgtt

SEQ ID NO: 38218 - RNA, 21 nt, synthetic construct
  source 1..21: mol_type = other RNA
cgacgagggcgccgtgtgttc

SEQ ID NO: 38219 - RNA, 21 nt, synthetic construct
  source 1..21: mol_type = other RNA
ccggggctggtgtcggatggg

SEQ ID NO: 38220 - RNA, 21 nt, synthetic construct
  source 1..21: mol_type = other RNA
ggggacctttaaggcggtggc

SEQ ID NO: 38221 - RNA, 21 nt, synthetic construct
  source 1..21: mol_type = other RNA
ctacaagatacgctacatggg

SEQ ID NO: 38222 - RNA, 21 nt, synthetic construct
  source 1..21: mol_type = other RNA
ccagcgtgttcatccgactgc

SEQ ID NO: 38223 - RNA, 21 nt, synthetic construct
  source 1..21: mol_type = other RNA
tacgacaaggacggaaactac

SEQ ID NO: 38224 - RNA, 21 nt, synthetic construct
  source 1..21: mol_type = other RNA
gaactccagccacaacgccat

SEQ ID NO: 38225 - RNA, 21 nt, synthetic construct
  source 1..21: mol_type = other RNA
ccagccacaacgccattcacc

SEQ ID NO: 38226 - RNA, 21 nt, synthetic construct
  source 1..21: mol_type = other RNA
ccgtgtgtgtccgcgaggtct

SEQ ID NO: 38227 - RNA, 21 nt, synthetic construct
  source 1..21: mol_type = other RNA
cgtgtgtgtccgcgaggtctg

SEQ ID NO: 38228 - RNA, 21 nt, synthetic construct
  source 1..21: mol_type = other RNA
tggctgacatcgagtgccggg

SEQ ID NO: 38229 - RNA, 21 nt, synthetic construct
  source 1..21: mol_type = other RNA
ggctgacatcgagtgccgggc

SEQ ID NO: 38230 - RNA, 21 nt, synthetic construct
  source 1..21: mol_type = other RNA
ctgacatcgagtgccgggcgg

SEQ ID NO: 38231 - RNA, 21 nt, synthetic construct
  source 1..21: mol_type = other RNA
ggactgtgaccgcatgcgggg

SEQ ID NO: 38232 - RNA, 21 nt, synthetic construct
  source 1..21: mol_type = other RNA
gccaacagagtcccccgctct

SEQ ID NO: 38233 - RNA, 21 nt, synthetic construct
  source 1..21: mol_type = other RNA
tgaccccgagcatccggtcga

SEQ ID NO: 38234 - RNA, 21 nt, synthetic construct
  source 1..21: mol_type = other RNA
gctcaggccccgtgacggtca

SEQ ID NO: 38235 - RNA, 21 nt, synthetic construct
  source 1..21: mol_type = other RNA
gccctgttctcaacgccgcag

SEQ ID NO: 38236 - RNA, 21 nt, synthetic construct
  source 1..21: mol_type = other RNA
ccctgttctcaacgccgcagc

SEQ ID NO: 38237 - RNA, 21 nt, synthetic construct
  source 1..21: mol_type = other RNA
cctgttctcaacgccgcagcc

SEQ ID NO: 38238 - RNA, 21 nt, synthetic construct
  source 1..21: mol_type = other RNA
ctgttctcaacgccgcagcct

SEQ ID NO: 38239 - RNA, 21 nt, synthetic construct
  source 1..21: mol_type = other RNA
gccgcagcctacgagtagccc

SEQ ID NO: 38240 - RNA, 21 nt, synthetic construct
  source 1..21: mol_type = other RNA
ttggtacagccaccacgggag

SEQ ID NO: 38241 - RNA, 21 nt, synthetic construct
  source 1..21: mol_type = other RNA
accacgagcctggcgccaaca

SEQ ID NO: 38242 - RNA, 21 nt, synthetic construct
  source 1..21: mol_type = other RNA
gacaatgagccccttgactaa

SEQ ID NO: 38243 - RNA, 21 nt, synthetic construct
  source 1..21: mol_type = other RNA
caatgagccccttgactaaca

SEQ ID NO: 38244 - RNA, 21 nt, synthetic construct
  source 1..21: mol_type = other RNA
gagccccttgactaacaccac

SEQ ID NO: 38245 - RNA, 21 nt, synthetic construct
  source 1..21: mol_type = other RNA
agctaccagcgttacacccat

SEQ ID NO: 38246 - RNA, 21 nt, synthetic construct
  source 1..21: mol_type = other RNA
ctccacagtgcttaccgccac

SEQ ID NO: 38247 - RNA, 21 nt, synthetic construct
  source 1..21: mol_type = other RNA
accaaagtgccaactaccaca

SEQ ID NO: 38248 - RNA, 21 nt, synthetic construct
  source 1..21: mol_type = other RNA
ccaaagtgccaactaccacaa

SEQ ID NO: 38249 - RNA, 21 nt, synthetic construct
  source 1..21: mol_type = other RNA
gcccagggacggcactcacgc

SEQ ID NO: 38250 - RNA, 21 nt, synthetic construct
  source 1..21: mol_type = other RNA
aacaccctcctctagcacaca

SEQ ID NO: 38251 - RNA, 21 nt, synthetic construct
  source 1..21: mol_type = other RNA
ccaccacggccactacgatca

SEQ ID NO: 38252 - RNA, 21 nt, synthetic construct
  source 1..21: mol_type = other RNA
ccccacacggtgcgcacagcc

SEQ ID NO: 38253 - RNA, 21 nt, synthetic construct
  source 1..21: mol_type = other RNA
cccacacggtgcgcacagcct

SEQ ID NO: 38254 - RNA, 21 nt, synthetic construct
  source 1..21: mol_type = other RNA
cagcaaccaccggtaccaccc

SEQ ID NO: 38255 - RNA, 21 nt, synthetic construct
  source 1..21: mol_type = other RNA
accacccagcactcgactcca

SEQ ID NO: 38256 - RNA, 21 nt, synthetic construct
  source 1..21: mol_type = other RNA
cccataaccacggtggtgacc

SEQ ID NO: 38257 - RNA, 21 nt, synthetic construct
  source 1..21: mol_type = other RNA
cagctaccccatgccggggcc

SEQ ID NO: 38258 - RNA, 21 nt, synthetic construct
  source 1..21: mol_type = other RNA
gcctcgagtgccgtgcccagg

SEQ ID NO: 38259 - RNA, 21 nt, synthetic construct
  source 1..21: mol_type = other RNA
aacaccctcctctagcacaca

SEQ ID NO: 38260 - RNA, 21 nt, synthetic construct
  source 1..21: mol_type = other RNA
ccaccacggccactacgatca

SEQ ID NO: 38261 - RNA, 21 nt, synthetic construct
  source 1..21: mol_type = other RNA
ctccagggacaacacctatcc

SEQ ID NO: 38262 - RNA, 21 nt, synthetic construct
  source 1..21: mol_type = other RNA
cccagtgccgaacaccacggc

SEQ ID NO: 38263 - RNA, 21 nt, synthetic construct
  source 1..21: mol_type = other RNA
ccccacacggtgcgcacagcc

SEQ ID NO: 38264 - RNA, 21 nt, synthetic construct
  source 1..21: mol_type = other RNA
cccacacggtgcgcacagcct

SEQ ID NO: 38265 - RNA, 21 nt, synthetic construct
  source 1..21: mol_type = other RNA
cagcaaccaccggtaccaccc

SEQ ID NO: 38266 - RNA, 21 nt, synthetic construct
  source 1..21: mol_type = other RNA
accacccagcactcgactcca

SEQ ID NO: 38267 - RNA, 21 nt, synthetic construct
  source 1..21: mol_type = other RNA
cagctaccccatgccggggcc

SEQ ID NO: 38268 - RNA, 21 nt, synthetic construct
  source 1..21: mol_type = other RNA
gcctcgagtgccgtgcccagg

SEQ ID NO: 38269 - RNA, 21 nt, synthetic construct
  source 1..21: mol_type = other RNA
cactggatccacggccatccc

SEQ ID NO: 38270 - RNA, 21 nt, synthetic construct
  source 1..21: mol_type = other RNA
caccgcctggacccgcctatc

SEQ ID NO: 38271 - RNA, 21 nt, synthetic construct
  source 1..21: mol_type = other RNA
accaaagtgccgactaccaca

SEQ ID NO: 38272 - RNA, 21 nt, synthetic construct
  source 1..21: mol_type = other RNA
gcccagggacggcactcacgc

SEQ ID NO: 38273 - RNA, 21 nt, synthetic construct
  source 1..21: mol_type = other RNA
aacaccctcctctagcacaca

SEQ ID NO: 38274 - RNA, 21 nt, synthetic construct
  source 1..21: mol_type = other RNA
ccaccacggccactacgatca

SEQ ID NO: 38275 - RNA, 21 nt, synthetic construct
  source 1..21: mol_type = other RNA
cccagtgccgaacaccacggc

SEQ ID NO: 38276 - RNA, 21 nt, synthetic construct
  source 1..21: mol_type = other RNA
ccccacacggtgcgcacagcc

SEQ ID NO: 38277 - RNA, 21 nt, synthetic construct
  source 1..21: mol_type = other RNA
cccacacggtgcgcacagcct

SEQ ID NO: 38278 - RNA, 21 nt, synthetic construct
  source 1..21: mol_type = other RNA
accacccagcactcgactcca

SEQ ID NO: 38279 - RNA, 21 nt, synthetic construct
  source 1..21: mol_type = other RNA
cccataaccacggtggtgacc

SEQ ID NO: 38280 - RNA, 21 nt, synthetic construct
  source 1..21: mol_type = other RNA
cagctaccccatgccggggcc

SEQ ID NO: 38281 - RNA, 21 nt, synthetic construct
  source 1..21: mol_type = other RNA
gcctcgagtgccgtgcccagg

SEQ ID NO: 38282 - RNA, 21 nt, synthetic construct
  source 1..21: mol_type = other RNA
accaaagtgccgactaccaca

SEQ ID NO: 38283 - RNA, 21 nt, synthetic construct
  source 1..21: mol_type = other RNA
aacaccctcctctagcacaca

SEQ ID NO: 38284 - RNA, 21 nt, synthetic construct
  source 1..21: mol_type = other RNA
tcaccacggccactacgatca

SEQ ID NO: 38285 - RNA, 21 nt, synthetic construct
  source 1..21: mol_type = other RNA
ctccagggacaacacctatcc

SEQ ID NO: 38286 - RNA, 21 nt, synthetic construct
  source 1..21: mol_type = other RNA
cccagtgccgaacaccacggc

SEQ ID NO: 38287 - RNA, 21 nt, synthetic construct
  source 1..21: mol_type = other RNA
ccccacacggtgcgcacagcc

SEQ ID NO: 38288 - RNA, 21 nt, synthetic construct
  source 1..21: mol_type = other RNA
cccacacggtgcgcacagcct

SEQ ID NO: 38289 - RNA, 21 nt, synthetic construct
  source 1..21: mol_type = other RNA
cagcaaccaccggtaccaccc

SEQ ID NO: 38290 - RNA, 21 nt, synthetic construct
  source 1..21: mol_type = other RNA
accacccagcactcgactcca

SEQ ID NO: 38291 - RNA, 21 nt, synthetic construct
  source 1..21: mol_type = other RNA
cccataaccacggtggtgacc

SEQ ID NO: 38292 - RNA, 21 nt, synthetic construct
  source 1..21: mol_type = other RNA
cagctaccccatgccggggcc

SEQ ID NO: 38293 - RNA, 21 nt, synthetic construct
  source 1..21: mol_type = other RNA
gcctcgagtgccgtgcccagg

SEQ ID NO: 38294 - RNA, 21 nt, synthetic construct
  source 1..21: mol_type = other RNA
agctaccagcgttacacccat

SEQ ID NO: 38295 - RNA, 21 nt, synthetic construct
  source 1..21: mol_type = other RNA
ctccacagtgcttaccgccac

SEQ ID NO: 38296 - RNA, 21 nt, synthetic construct
  source 1..21: mol_type = other RNA
accaaagtgccgactaccaca

SEQ ID NO: 38297 - RNA, 21 nt, synthetic construct
  source 1..21: mol_type = other RNA
gcccagggacggcactcacgc

SEQ ID NO: 38298 - RNA, 21 nt, synthetic construct
  source 1..21: mol_type = other RNA
aacaccctcctctagcacaca

SEQ ID NO: 38299 - RNA, 21 nt, synthetic construct
  source 1..21: mol_type = other RNA
ccaccacggccactacgatca

SEQ ID NO: 38300 - RNA, 21 nt, synthetic construct
  source 1..21: mol_type = other RNA
ggaccacgtggaccgtcccag

SEQ ID NO: 38301 - RNA, 21 nt, synthetic construct
  source 1..21: mol_type = other RNA
gtgcccaccggttccacggcc

SEQ ID NO: 38302 - RNA, 21 nt, synthetic construct
  source 1..21: mol_type = other RNA
gccaaccttcagcgtgtccac

SEQ ID NO: 38303 - RNA, 21 nt, synthetic construct
  source 1..21: mol_type = other RNA
cgcttccagggcgcctgtccc

SEQ ID NO: 38304 - RNA, 21 nt, synthetic construct
  source 1..21: mol_type = other RNA
tccatggatatcgtcctcact

SEQ ID NO: 38305 - RNA, 21 nt, synthetic construct
  source 1..21: mol_type = other RNA
caccaccatgcgtgtggacat

SEQ ID NO: 38306 - RNA, 21 nt, synthetic construct
  source 1..21: mol_type = other RNA
atggccaagacgtggctggtc

SEQ ID NO: 38307 - RNA, 21 nt, synthetic construct
  source 1..21: mol_type = other RNA
ctgggccccgactggcacacc

SEQ ID NO: 38308 - RNA, 21 nt, synthetic construct
  source 1..21: mol_type = other RNA
cctgcatcagcgaccactgca

SEQ ID NO: 38309 - RNA, 21 nt, synthetic construct
  source 1..21: mol_type = other RNA
gtgtacaagccatgcggcccc

SEQ ID NO: 38310 - RNA, 21 nt, synthetic construct
  source 1..21: mol_type = other RNA
tcctcttcaacgcacacatgg

SEQ ID NO: 38311 - RNA, 21 nt, synthetic construct
  source 1..21: mol_type = other RNA
gatgggtttcctaaatttccc

SEQ ID NO: 38312 - RNA, 21 nt, synthetic construct
  source 1..21: mol_type = other RNA
tcagctgtgttcgtacaatgg

SEQ ID NO: 38313 - RNA, 21 nt, synthetic construct
  source 1..21: mol_type = other RNA
agtgcgtccagaccgcctgcc

SEQ ID NO: 38314 - RNA, 21 nt, synthetic construct
  source 1..21: mol_type = other RNA
gtgcgtccagaccgcctgcct

SEQ ID NO: 38315 - RNA, 21 nt, synthetic construct
  source 1..21: mol_type = other RNA
cctgcctcacgcccgatggcc

SEQ ID NO: 38316 - RNA, 21 nt, synthetic construct
  source 1..21: mol_type = other RNA
ctgccccggagcgtccaagta

SEQ ID NO: 38317 - RNA, 21 nt, synthetic construct
  source 1..21: mol_type = other RNA
ttgcactgtcctaacggctca

SEQ ID NO: 38318 - RNA, 21 nt, synthetic construct
  source 1..21: mol_type = other RNA
cactgtcctaacggctcagcc

SEQ ID NO: 38319 - RNA, 21 nt, synthetic construct
  source 1..21: mol_type = other RNA
gacggtgtgcgtgtgcaacac

SEQ ID NO: 38320 - RNA, 21 nt, synthetic construct
  source 1..21: mol_type = other RNA
gcggggactacatcaaggtca

SEQ ID NO: 38321 - RNA, 21 nt, synthetic construct
  source 1..21: mol_type = other RNA
ctttgcggagtgccacgcact

SEQ ID NO: 38322 - RNA, 21 nt, synthetic construct
  source 1..21: mol_type = other RNA
gaaagcggtgacgctcagcct

SEQ ID NO: 38323 - RNA, 21 nt, synthetic construct
  source 1..21: mol_type = other RNA
cccagcgctacgcctacgtgg

SEQ ID NO: 38324 - RNA, 21 nt, synthetic construct
  source 1..21: mol_type = other RNA
catgtacgggtgggaagctaa

SEQ ID NO: 38325 - RNA, 21 nt, synthetic construct
  source 1..21: mol_type = other RNA
gggacccaccctacaagatac

SEQ ID NO: 38326 - RNA, 21 nt, synthetic construct
  source 1..21: mol_type = other RNA
cagggacggcactcacgcctc

SEQ ID NO: 38327 - RNA, 21 nt, synthetic construct
  source 1..21: mol_type = other RNA
gacggcacgcacgcttccagt

SEQ ID NO: 38328 - RNA, 21 nt, synthetic construct
  source 1..21: mol_type = other RNA
cagggacggcactcacgcctc

SEQ ID NO: 38329 - RNA, 21 nt, synthetic construct
  source 1..21: mol_type = other RNA
cagggacggcactcacgcctc

SEQ ID NO: 38330 - RNA, 21 nt, synthetic construct
  source 1..21: mol_type = other RNA
acgacccggatcctcactgag

SEQ ID NO: 38331 - RNA, 21 nt, synthetic construct
  source 1..21: mol_type = other RNA
caacgcctgcatcagcgacca

SEQ ID NO: 38332 - RNA, 21 nt, synthetic construct
  source 1..21: mol_type = other RNA
ggacaactgcaccgtgtacct

SEQ ID NO: 38333 - RNA, 21 nt, synthetic construct
  source 1..21: mol_type = other RNA
ccccggagcgtccaagtactc

SEQ ID NO: 38334 - RNA, 21 nt, synthetic construct
  source 1..21: mol_type = other RNA
ccggcgcgtgagctttgttcc

SEQ ID NO: 38335 - RNA, 21 nt, synthetic construct
  source 1..21: mol_type = other RNA
gagcactatagccaccgtgat

SEQ ID NO: 38336 - RNA, 21 nt, synthetic construct
  source 1..21: mol_type = other RNA
gacatcgagtgccgggcggcg

SEQ ID NO: 38337 - RNA, 21 nt, synthetic construct
  source 1..21: mol_type = other RNA
gacccgcctatcacagaccac

SEQ ID NO: 38338 - RNA, 21 nt, synthetic construct
  source 1..21: mol_type = other RNA
agcaaccaccggtaccaccca

SEQ ID NO: 38339 - RNA, 21 nt, synthetic construct
  source 1..21: mol_type = other RNA
gacccgcctatcacagaccac

SEQ ID NO: 38340 - RNA, 21 nt, synthetic construct
  source 1..21: mol_type = other RNA
cacgcacgcttccagtgtgga

SEQ ID NO: 38341 - RNA, 21 nt, synthetic construct
  source 1..21: mol_type = other RNA
agcaaccaccggtaccaccca

SEQ ID NO: 38342 - RNA, 21 nt, synthetic construct
  source 1..21: mol_type = other RNA
gacccgcctatcacagaccac

SEQ ID NO: 38343 - RNA, 21 nt, synthetic construct
  source 1..21: mol_type = other RNA
gacccgcctatcacagaccac

SEQ ID NO: 38344 - RNA, 21 nt, synthetic construct
  source 1..21: mol_type = other RNA
agcaaccaccggtaccaccca

SEQ ID NO: 38345 - RNA, 21 nt, synthetic construct
  source 1..21: mol_type = other RNA
gacccgcctatcacagaccac

SEQ ID NO: 38346 - RNA, 21 nt, synthetic construct
  source 1..21: mol_type = other RNA
ctacacccacgtggatgagtg

SEQ ID NO: 38347 - RNA, 21 nt, synthetic construct
  source 1..21: mol_type = other RNA
ctgccttacagccgcactggc

SEQ ID NO: 38348 - RNA, 21 nt, synthetic construct
  source 1..21: mol_type = other RNA
gcctttgcggagtgccacgca

SEQ ID NO: 38349 - RNA, 21 nt, synthetic construct
  source 1..21: mol_type = other RNA
gcgggcaccttcctcaatgac

SEQ ID NO: 38350 - RNA, 21 nt, synthetic construct
  source 1..21: mol_type = other RNA
ccaccggtaccacccagcact

SEQ ID NO: 38351 - RNA, 21 nt, synthetic construct
  source 1..21: mol_type = other RNA
ctccaacatccgtgcggccgg

SEQ ID NO: 38352 - RNA, 21 nt, synthetic construct
  source 1..21: mol_type = other RNA
ccgagcactacagccaccgtg

SEQ ID NO: 38353 - RNA, 21 nt, synthetic construct
  source 1..21: mol_type = other RNA
ccaccggtaccacccagcact

SEQ ID NO: 38354 - RNA, 21 nt, synthetic construct
  source 1..21: mol_type = other RNA
ctccaacatccgtgcggccgg

SEQ ID NO: 38355 - RNA, 21 nt, synthetic construct
  source 1..21: mol_type = other RNA
ctccaacatccgtgcggccgg

SEQ ID NO: 38356 - RNA, 21 nt, synthetic construct
  source 1..21: mol_type = other RNA
ccgagcactacagccaccgtg

SEQ ID NO: 38357 - RNA, 21 nt, synthetic construct
  source 1..21: mol_type = other RNA
ccaccggtaccacccagcact

SEQ ID NO: 38358 - RNA, 21 nt, synthetic construct
  source 1..21: mol_type = other RNA
ctccaacatccgtgcggccgg

SEQ ID NO: 38359 - RNA, 21 nt, synthetic construct
  source 1..21: mol_type = other RNA
ccgagcactacagccaccgtg

SEQ ID NO: 38360 - RNA, 21 nt, synthetic construct
  source 1..21: mol_type = other RNA
cccacaccgccagagtgctga

SEQ ID NO: 38361 - RNA, 21 nt, synthetic construct
  source 1..21: mol_type = other RNA
cgtggaccgtcccagcacaga

SEQ ID NO: 38362 - RNA, 21 nt, synthetic construct
  source 1..21: mol_type = other RNA
gaccgaccgagccggctgcca

SEQ ID NO: 38363 - RNA, 21 nt, synthetic construct
  source 1..21: mol_type = other RNA
gtgtgacgagggttcagtgtc

SEQ ID NO: 38364 - RNA, 21 nt, synthetic construct
  source 1..21: mol_type = other RNA
ctgcaccgtgtacctctgtga

SEQ ID NO: 38365 - RNA, 21 nt, synthetic construct
  source 1..21: mol_type = other RNA
taagcatgtgcgggcctatgt

SEQ ID NO: 38366 - RNA, 21 nt, synthetic construct
  source 1..21: mol_type = other RNA
ggcgcgtgagctttgttccac

SEQ ID NO: 38367 - RNA, 21 nt, synthetic construct
  source 1..21: mol_type = other RNA
gtgccacgcactggtggacag

SEQ ID NO: 38368 - RNA, 21 nt, synthetic construct
  source 1..21: mol_type = other RNA
agcggtgacgctcagcctgga

SEQ ID NO: 38369 - RNA, 21 nt, synthetic construct
  source 1..21: mol_type = other RNA
ccacgggcgcagccttcgcca

SEQ ID NO: 38370 - RNA, 21 nt, synthetic construct
  source 1..21: mol_type = other RNA
gggcgccgtgtgttcatgtac

SEQ ID NO: 38371 - RNA, 21 nt, synthetic construct
  source 1..21: mol_type = other RNA
tccatttgctgaccccacagc

SEQ ID NO: 38372 - RNA, 21 nt, synthetic construct
  source 1..21: mol_type = other RNA
gcggagactttgagacgtttg

SEQ ID NO: 38373 - RNA, 21 nt, synthetic construct
  source 1..21: mol_type = other RNA
agctaccccatgccggggccc

SEQ ID NO: 38374 - RNA, 21 nt, synthetic construct
  source 1..21: mol_type = other RNA
agctaccccatgccggggccc

SEQ ID NO: 38375 - RNA, 21 nt, synthetic construct
  source 1..21: mol_type = other RNA
agctaccccatgccggggccc

SEQ ID NO: 38376 - RNA, 21 nt, synthetic construct
  source 1..21: mol_type = other RNA
agctaccccatgccggggccc

SEQ ID NO: 38377 - RNA, 21 nt, synthetic construct
  source 1..21: mol_type = other RNA
gggacccgatgggtttcctaa

SEQ ID NO: 38378 - RNA, 21 nt, synthetic construct
  source 1..21: mol_type = other RNA
ctgtcctaacggctcagccat

SEQ ID NO: 38379 - RNA, 21 nt, synthetic construct
  source 1..21: mol_type = other RNA
cgagcgcgtgccggacgctgg

SEQ ID NO: 38380 - RNA, 21 nt, synthetic construct
  source 1..21: mol_type = other RNA
agtgccacgcactggtggaca

SEQ ID NO: 38381 - RNA, 21 nt, synthetic construct
  source 1..21: mol_type = other RNA
cactgcgtacctggccgcctg

SEQ ID NO: 38382 - RNA, 21 nt, synthetic construct
  source 1..21: mol_type = other RNA
cggcggcgtgttcctcaactc

SEQ ID NO: 38383 - RNA, 21 nt, synthetic construct
  source 1..21: mol_type = other RNA
tggtgctcgcgcctgaccgat

SEQ ID NO: 38384 - RNA, 21 nt, synthetic construct
  source 1..21: mol_type = other RNA
ccaacagtgccttctcgcgct

SEQ ID NO: 38385 - RNA, 21 nt, synthetic construct
  source 1..21: mol_type = other RNA
gtgcacgacgagggcgccgtg

SEQ ID NO: 38386 - RNA, 21 nt, synthetic construct
  source 1..21: mol_type = other RNA
ttgatggcgatcgctacagct

SEQ ID NO: 38387 - RNA, 21 nt, synthetic construct
  source 1..21: mol_type = other RNA
tgatgtgcgccaacagccaac

SEQ ID NO: 38388 - RNA, 21 nt, synthetic construct
  source 1..21: mol_type = other RNA
gagtcccccgctctgtcacga

SEQ ID NO: 38389 - RNA, 21 nt, synthetic construct
  source 1..21: mol_type = other RNA
gctgcgggttctctgctgcga

SEQ ID NO: 38390 - RNA, 21 nt, synthetic construct
  source 1..21: mol_type = other RNA
agaccaccctatgggtgaccc

SEQ ID NO: 38391 - RNA, 21 nt, synthetic construct
  source 1..21: mol_type = other RNA
gcatccggtcgacggcggccc

SEQ ID NO: 38392 - RNA, 21 nt, synthetic construct
  source 1..21: mol_type = other RNA
gcgttacacccatcccctctt

SEQ ID NO: 38393 - RNA, 21 nt, synthetic construct
  source 1..21: mol_type = other RNA
cagtgcttaccgccacggcca

SEQ ID NO: 38394 - RNA, 21 nt, synthetic construct
  source 1..21: mol_type = other RNA
ccacaaccggggccaccggct

SEQ ID NO: 38395 - RNA, 21 nt, synthetic construct
  source 1..21: mol_type = other RNA
ccgactaccacaaccacgggc

SEQ ID NO: 38396 - RNA, 21 nt, synthetic construct
  source 1..21: mol_type = other RNA
ccgactaccacaaccacgggc

SEQ ID NO: 38397 - RNA, 21 nt, synthetic construct
  source 1..21: mol_type = other RNA
cagtgcttaccgccacggcca

SEQ ID NO: 38398 - RNA, 21 nt, synthetic construct
  source 1..21: mol_type = other RNA
ccacaaccggggccaccggct

SEQ ID NO: 38399 - RNA, 21 nt, synthetic construct
  source 1..21: mol_type = other RNA
ccgactaccacaaccacgggc

SEQ ID NO: 38400 - RNA, 21 nt, synthetic construct
  source 1..21: mol_type = other RNA
ccaccggttccacggccaccg

SEQ ID NO: 38401 - RNA, 21 nt, synthetic construct
  source 1..21: mol_type = other RNA
catttctacgcagtgtgcaat

SEQ ID NO: 38402 - RNA, 21 nt, synthetic construct
  source 1..21: mol_type = other RNA
cagcctctacctggacaacca

SEQ ID NO: 38403 - RNA, 21 nt, synthetic construct
  source 1..21: mol_type = other RNA
aggcttacgcagagctctgcc

SEQ ID NO: 38404 - RNA, 21 nt, synthetic construct
  source 1..21: mol_type = other RNA
ggcttacgcagagctctgccg

SEQ ID NO: 38405 - RNA, 21 nt, synthetic construct
  source 1..21: mol_type = other RNA
gtgggacccgatgggtttcct

SEQ ID NO: 38406 - RNA, 21 nt, synthetic construct
  source 1..21: mol_type = other RNA
ggcttcgtaaccgtgaccagg

SEQ ID NO: 38407 - RNA, 21 nt, synthetic construct
  source 1..21: mol_type = other RNA
tcaagtccgcatcaacacgac

SEQ ID NO: 38408 - RNA, 21 nt, synthetic construct
  source 1..21: mol_type = other RNA
tcaacacgaccatcctgtggc

SEQ ID NO: 38409 - RNA, 21 nt, synthetic construct
  source 1..21: mol_type = other RNA
gcactgtcctaacggctcagc

SEQ ID NO: 38410 - RNA, 21 nt, synthetic construct
  source 1..21: mol_type = other RNA
gggtgccccgagcgcgtgccg

SEQ ID NO: 38411 - RNA, 21 nt, synthetic construct
  source 1..21: mol_type = other RNA
gccgaggcctagtgggctcca

SEQ ID NO: 38412 - RNA, 21 nt, synthetic construct
  source 1..21: mol_type = other RNA
gaggcgtccaacggctccgtc

SEQ ID NO: 38413 - RNA, 21 nt, synthetic construct
  source 1..21: mol_type = other RNA
gcgtccaacggctccgtcctc

SEQ ID NO: 38414 - RNA, 21 nt, synthetic construct
  source 1..21: mol_type = other RNA
ccttacagccgcactggcctc

SEQ ID NO: 38415 - RNA, 21 nt, synthetic construct
  source 1..21: mol_type = other RNA
gtggggacttcaacggcctcc

SEQ ID NO: 38416 - RNA, 21 nt, synthetic construct
  source 1..21: mol_type = other RNA
gcaactgcacggacgaggagg

SEQ ID NO: 38417 - RNA, 21 nt, synthetic construct
  source 1..21: mol_type = other RNA
aactgcacggacgaggagggc

SEQ ID NO: 38418 - RNA, 21 nt, synthetic construct
  source 1..21: mol_type = other RNA
cgtgtgccacctttgtggaat

SEQ ID NO: 38419 - RNA, 21 nt, synthetic construct
  source 1..21: mol_type = other RNA
tgacatcacgcactctggctg

SEQ ID NO: 38420 - RNA, 21 nt, synthetic construct
  source 1..21: mol_type = other RNA
acctacagcccgggcacctcc

SEQ ID NO: 38421 - RNA, 21 nt, synthetic construct
  source 1..21: mol_type = other RNA
ctccacctatgatgagaaact

SEQ ID NO: 38422 - RNA, 21 nt, synthetic construct
  source 1..21: mol_type = other RNA
agcttcaccgtgctggctgag

SEQ ID NO: 38423 - RNA, 21 nt, synthetic construct
  source 1..21: mol_type = other RNA
acggccatccgggtccaagcg

SEQ ID NO: 38424 - RNA, 21 nt, synthetic construct
  source 1..21: mol_type = other RNA
gggtccaagcggacggcggcg

SEQ ID NO: 38425 - RNA, 21 nt, synthetic construct
  source 1..21: mol_type = other RNA
ggtgccactcatgcaggtgtt

SEQ ID NO: 38426 - RNA, 21 nt, synthetic construct
  source 1..21: mol_type = other RNA
gttcatgtacgggtgggaagc

SEQ ID NO: 38427 - RNA, 21 nt, synthetic construct
  source 1..21: mol_type = other RNA
tgatggcgatcgctacagctt

SEQ ID NO: 38428 - RNA, 21 nt, synthetic construct
  source 1..21: mol_type = other RNA
cgagtacatcttggcccagga

SEQ ID NO: 38429 - RNA, 21 nt, synthetic construct
  source 1..21: mol_type = other RNA
ggaagaccagcgtgttcatcc

SEQ ID NO: 38430 - RNA, 21 nt, synthetic construct
  source 1..21: mol_type = other RNA
caaggacggaaactactatga

SEQ ID NO: 38431 - RNA, 21 nt, synthetic construct
  source 1..21: mol_type = other RNA
ctatgacgtcggtgcaagggt

SEQ ID NO: 38432 - RNA, 21 nt, synthetic construct
  source 1..21: mol_type = other RNA
gcgcctgcttgatcgccatct

SEQ ID NO: 38433 - RNA, 21 nt, synthetic construct
  source 1..21: mol_type = other RNA
tgacatcgagtgccgggcggc

SEQ ID NO: 38434 - RNA, 21 nt, synthetic construct
  source 1..21: mol_type = other RNA
ctgatgtgcgccaacagccaa

SEQ ID NO: 38435 - RNA, 21 nt, synthetic construct
  source 1..21: mol_type = other RNA
catccggtcgacggcggccct

SEQ ID NO: 38436 - RNA, 21 nt, synthetic construct
  source 1..21: mol_type = other RNA
atccggtcgacggcggccctc

SEQ ID NO: 38437 - RNA, 21 nt, synthetic construct
  source 1..21: mol_type = other RNA
cgataagatcagggccgctgg

SEQ ID NO: 38438 - RNA, 21 nt, synthetic construct
  source 1..21: mol_type = other RNA
tgttctcaacgccgcagccta

SEQ ID NO: 38439 - RNA, 21 nt, synthetic construct
  source 1..21: mol_type = other RNA
gcacatggcgcccctcacagc

SEQ ID NO: 38440 - RNA, 21 nt, synthetic construct
  source 1..21: mol_type = other RNA
agctcgcccgacaggcacagc

SEQ ID NO: 38441 - RNA, 21 nt, synthetic construct
  source 1..21: mol_type = other RNA
accgcttccaaagagccgctg

SEQ ID NO: 38442 - RNA, 21 nt, synthetic construct
  source 1..21: mol_type = other RNA
ggactgcaaccgcccttccag

SEQ ID NO: 38443 - RNA, 21 nt, synthetic construct
  source 1..21: mol_type = other RNA
gcctatcacagaccaccacac

SEQ ID NO: 38444 - RNA, 21 nt, synthetic construct
  source 1..21: mol_type = other RNA
ctaccaaagtgccaactacca

SEQ ID NO: 38445 - RNA, 21 nt, synthetic construct
  source 1..21: mol_type = other RNA
cctagcagcaaccaccggtac

SEQ ID NO: 38446 - RNA, 21 nt, synthetic construct
  source 1..21: mol_type = other RNA
ctagcagcaaccaccggtacc

SEQ ID NO: 38447 - RNA, 21 nt, synthetic construct
  source 1..21: mol_type = other RNA
agcaagacccgcacctcgacc

SEQ ID NO: 38448 - RNA, 21 nt, synthetic construct
  source 1..21: mol_type = other RNA
ggcctcgagtgccgtgcccag

SEQ ID NO: 38449 - RNA, 21 nt, synthetic construct
  source 1..21: mol_type = other RNA
ggactgcaaccgcccttccag

SEQ ID NO: 38450 - RNA, 21 nt, synthetic construct
  source 1..21: mol_type = other RNA
gcctatcacagaccaccacac

SEQ ID NO: 38451 - RNA, 21 nt, synthetic construct
  source 1..21: mol_type = other RNA
aggttccacggtgaccccctc

SEQ ID NO: 38452 - RNA, 21 nt, synthetic construct
  source 1..21: mol_type = other RNA
agcaagacccgcacctcgacc

SEQ ID NO: 38453 - RNA, 21 nt, synthetic construct
  source 1..21: mol_type = other RNA
ggcctcgagtgccgtgcccag

SEQ ID NO: 38454 - RNA, 21 nt, synthetic construct
  source 1..21: mol_type = other RNA
acagctaccagctttacaccc

SEQ ID NO: 38455 - RNA, 21 nt, synthetic construct
  source 1..21: mol_type = other RNA
ggactgcaaccgcccttccag

SEQ ID NO: 38456 - RNA, 21 nt, synthetic construct
  source 1..21: mol_type = other RNA
gcctatcacagaccaccacac

SEQ ID NO: 38457 - RNA, 21 nt, synthetic construct
  source 1..21: mol_type = other RNA
acactaccaaagtgccgacta

SEQ ID NO: 38458 - RNA, 21 nt, synthetic construct
  source 1..21: mol_type = other RNA
agcaagacccgcacctcgacc

SEQ ID NO: 38459 - RNA, 21 nt, synthetic construct
  source 1..21: mol_type = other RNA
cacggtggtgaccacgggctg

SEQ ID NO: 38460 - RNA, 21 nt, synthetic construct
  source 1..21: mol_type = other RNA
ggcctcgagtgccgtgcccag

SEQ ID NO: 38461 - RNA, 21 nt, synthetic construct
  source 1..21: mol_type = other RNA
ggactgcaaccgcccttccag

SEQ ID NO: 38462 - RNA, 21 nt, synthetic construct
  source 1..21: mol_type = other RNA
gcctatcacagaccaccacac

SEQ ID NO: 38463 - RNA, 21 nt, synthetic construct
  source 1..21: mol_type = other RNA
acactaccaaagtgccgacta

SEQ ID NO: 38464 - RNA, 21 nt, synthetic construct
  source 1..21: mol_type = other RNA
acggcacgcacgcctccagtg

SEQ ID NO: 38465 - RNA, 21 nt, synthetic construct
  source 1..21: mol_type = other RNA
agcaagacccgcacctcgacc

SEQ ID NO: 38466 - RNA, 21 nt, synthetic construct
  source 1..21: mol_type = other RNA
cacggtggtgaccacgggctg

SEQ ID NO: 38467 - RNA, 21 nt, synthetic construct
  source 1..21: mol_type = other RNA
ggcctcgagtgccgtgcccag

SEQ ID NO: 38468 - RNA, 21 nt, synthetic construct
  source 1..21: mol_type = other RNA
ccagttccacgtccaccccct

SEQ ID NO: 38469 - RNA, 21 nt, synthetic construct
  source 1..21: mol_type = other RNA
gcctatcacagaccaccacac

SEQ ID NO: 38470 - RNA, 21 nt, synthetic construct
  source 1..21: mol_type = other RNA
acactaccaaagtgccgacta

SEQ ID NO: 38471 - RNA, 21 nt, synthetic construct
  source 1..21: mol_type = other RNA
acagctaccagctttacaccc

SEQ ID NO: 38472 - RNA, 21 nt, synthetic construct
  source 1..21: mol_type = other RNA
agtttttctcgcccggggaag

SEQ ID NO: 38473 - RNA, 21 nt, synthetic construct
  source 1..21: mol_type = other RNA
ttttctcgcccggggaagtca

SEQ ID NO: 38474 - RNA, 21 nt, synthetic construct
  source 1..21: mol_type = other RNA
gaccgagccggctgccatttc

SEQ ID NO: 38475 - RNA, 21 nt, synthetic construct
  source 1..21: mol_type = other RNA
accgagccggctgccatttct

SEQ ID NO: 38476 - RNA, 21 nt, synthetic construct
  source 1..21: mol_type = other RNA
cactgtgacattgaccgcttc

SEQ ID NO: 38477 - RNA, 21 nt, synthetic construct
  source 1..21: mol_type = other RNA
agtgtcctccgccccgctgtc

SEQ ID NO: 38478 - RNA, 21 nt, synthetic construct
  source 1..21: mol_type = other RNA
tccatgcacgctttgggaatc

SEQ ID NO: 38479 - RNA, 21 nt, synthetic construct
  source 1..21: mol_type = other RNA
atggatatcgtcctcactgtc

SEQ ID NO: 38480 - RNA, 21 nt, synthetic construct
  source 1..21: mol_type = other RNA
gcgtgagcgtcaccttcaatg

SEQ ID NO: 38481 - RNA, 21 nt, synthetic construct
  source 1..21: mol_type = other RNA
gtgagcgtcaccttcaatggc

SEQ ID NO: 38482 - RNA, 21 nt, synthetic construct
  source 1..21: mol_type = other RNA
ctgccgccagttgcaaggaca

SEQ ID NO: 38483 - RNA, 21 nt, synthetic construct
  source 1..21: mol_type = other RNA
tgccgccagttgcaaggacat

SEQ ID NO: 38484 - RNA, 21 nt, synthetic construct
  source 1..21: mol_type = other RNA
ccggtgtctagcacacccacc

SEQ ID NO: 38485 - RNA, 21 nt, synthetic construct
  source 1..21: mol_type = other RNA
agtgccacaaccttgtgcccc

SEQ ID NO: 38486 - RNA, 21 nt, synthetic construct
  source 1..21: mol_type = other RNA
ctgcatcagcgaccactgcag

SEQ ID NO: 38487 - RNA, 21 nt, synthetic construct
  source 1..21: mol_type = other RNA
ggaggcttacgcagagctctg

SEQ ID NO: 38488 - RNA, 21 nt, synthetic construct
  source 1..21: mol_type = other RNA
ctgcccctgcgtgggacccga

SEQ ID NO: 38489 - RNA, 21 nt, synthetic construct
  source 1..21: mol_type = other RNA
gcgtgtgtgacgagggttcag

SEQ ID NO: 38490 - RNA, 21 nt, synthetic construct
  source 1..21: mol_type = other RNA
cttcgtaaccgtgaccaggcc

SEQ ID NO: 38491 - RNA, 21 nt, synthetic construct
  source 1..21: mol_type = other RNA
tcgtaaccgtgaccaggcccc

SEQ ID NO: 38492 - RNA, 21 nt, synthetic construct
  source 1..21: mol_type = other RNA
catcaacacgaccatcctgtg

SEQ ID NO: 38493 - RNA, 21 nt, synthetic construct
  source 1..21: mol_type = other RNA
actgtcctaacggctcagcca

SEQ ID NO: 38494 - RNA, 21 nt, synthetic construct
  source 1..21: mol_type = other RNA
aaccttgggcctcctctgcgg

SEQ ID NO: 38495 - RNA, 21 nt, synthetic construct
  source 1..21: mol_type = other RNA
gacccctttcgggagggcgcc

SEQ ID NO: 38496 - RNA, 21 nt, synthetic construct
  source 1..21: mol_type = other RNA
gtgcgggcctatgtgtccctg

SEQ ID NO: 38497 - RNA, 21 nt, synthetic construct
  source 1..21: mol_type = other RNA
ggatgggtgccccgagcgcgt

SEQ ID NO: 38498 - RNA, 21 nt, synthetic construct
  source 1..21: mol_type = other RNA
gatgggtgccccgagcgcgtg

SEQ ID NO: 38499 - RNA, 21 nt, synthetic construct
  source 1..21: mol_type = other RNA
gccccgagcgcgtgccggacg

SEQ ID NO: 38500 - RNA, 21 nt, synthetic construct
  source 1..21: mol_type = other RNA
tggtgttggctctggcggcca

SEQ ID NO: 38501 - RNA, 21 nt, synthetic construct
  source 1..21: mol_type = other RNA
ggtgttggctctggcggccat

SEQ ID NO: 38502 - RNA, 21 nt, synthetic construct
  source 1..21: mol_type = other RNA
ctggcggccatgctcgtggtg

SEQ ID NO: 38503 - RNA, 21 nt, synthetic construct
  source 1..21: mol_type = other RNA
tggcggccatgctcgtggtgc

SEQ ID NO: 38504 - RNA, 21 nt, synthetic construct
  source 1..21: mol_type = other RNA
gctcgtggtgccgcaggcaga

SEQ ID NO: 38505 - RNA, 21 nt, synthetic construct
  source 1..21: mol_type = other RNA
ctcgtggtgccgcaggcagag

SEQ ID NO: 38506 - RNA, 21 nt, synthetic construct
  source 1..21: mol_type = other RNA
gcacaccatggatggcggtgc

SEQ ID NO: 38507 - RNA, 21 nt, synthetic construct
  source 1..21: mol_type = other RNA
ccatggatggcggtgccccga

SEQ ID NO: 38508 - RNA, 21 nt, synthetic construct
  source 1..21: mol_type = other RNA
ctcgcccacccggcgcgtgag

SEQ ID NO: 38509 - RNA, 21 nt, synthetic construct
  source 1..21: mol_type = other RNA
tccctggcctttgcaactacg

SEQ ID NO: 38510 - RNA, 21 nt, synthetic construct
  source 1..21: mol_type = other RNA
ccctggcctttgcaactacgt

SEQ ID NO: 38511 - RNA, 21 nt, synthetic construct
  source 1..21: mol_type = other RNA
acgccgaggcctagtgggctc

SEQ ID NO: 38512 - RNA, 21 nt, synthetic construct
  source 1..21: mol_type = other RNA
tggaggcgtccaacggctccg

SEQ ID NO: 38513 - RNA, 21 nt, synthetic construct
  source 1..21: mol_type = other RNA
ggaggcgtccaacggctccgt

SEQ ID NO: 38514 - RNA, 21 nt, synthetic construct
  source 1..21: mol_type = other RNA
tccaacggctccgtcctcatc

SEQ ID NO: 38515 - RNA, 21 nt, synthetic construct
  source 1..21: mol_type = other RNA
gccttacagccgcactggcct

SEQ ID NO: 38516 - RNA, 21 nt, synthetic construct
  source 1..21: mol_type = other RNA
atccggctggtgctgacattc

SEQ ID NO: 38517 - RNA, 21 nt, synthetic construct
  source 1..21: mol_type = other RNA
gctggatcccaaatacgccaa

SEQ ID NO: 38518 - RNA, 21 nt, synthetic construct
  source 1..21: mol_type = other RNA
tggatcccaaatacgccaacc

SEQ ID NO: 38519 - RNA, 21 nt, synthetic construct
  source 1..21: mol_type = other RNA
gcctcccggccttcaacgagt

SEQ ID NO: 38520 - RNA, 21 nt, synthetic construct
  source 1..21: mol_type = other RNA
cctcccggccttcaacgagtt

SEQ ID NO: 38521 - RNA, 21 nt, synthetic construct
  source 1..21: mol_type = other RNA
ttctatgcccacaacgccagg

SEQ ID NO: 38522 - RNA, 21 nt, synthetic construct
  source 1..21: mol_type = other RNA
ggctgaccccgctccagtttg

SEQ ID NO: 38523 - RNA, 21 nt, synthetic construct
  source 1..21: mol_type = other RNA
tgcccttgccggccggcaact

SEQ ID NO: 38524 - RNA, 21 nt, synthetic construct
  source 1..21: mol_type = other RNA
ccttgccggccggcaactgca

SEQ ID NO: 38525 - RNA, 21 nt, synthetic construct
  source 1..21: mol_type = other RNA
ttgccggccggcaactgcacg

SEQ ID NO: 38526 - RNA, 21 nt, synthetic construct
  source 1..21: mol_type = other RNA
gagtgccacgcactggtggac

SEQ ID NO: 38527 - RNA, 21 nt, synthetic construct
  source 1..21: mol_type = other RNA
tgccacgcactggtggacagc

SEQ ID NO: 38528 - RNA, 21 nt, synthetic construct
  source 1..21: mol_type = other RNA
tggacagcactgcgtacctgg

SEQ ID NO: 38529 - RNA, 21 nt, synthetic construct
  source 1..21: mol_type = other RNA
acagcactgcgtacctggccg

SEQ ID NO: 38530 - RNA, 21 nt, synthetic construct
  source 1..21: mol_type = other RNA
agcactgcgtacctggccgcc

SEQ ID NO: 38531 - RNA, 21 nt, synthetic construct
  source 1..21: mol_type = other RNA
cctgcccgtgtgccacctttg

SEQ ID NO: 38532 - RNA, 21 nt, synthetic construct
  source 1..21: mol_type = other RNA
gtgtgccacctttgtggaata

SEQ ID NO: 38533 - RNA, 21 nt, synthetic construct
  source 1..21: mol_type = other RNA
tgtgccacctttgtggaatac

SEQ ID NO: 38534 - RNA, 21 nt, synthetic construct
  source 1..21: mol_type = other RNA
ggggccagccgcggaactgga

SEQ ID NO: 38535 - RNA, 21 nt, synthetic construct
  source 1..21: mol_type = other RNA
ggccagccgcggaactggagg

SEQ ID NO: 38536 - RNA, 21 nt, synthetic construct
  source 1..21: mol_type = other RNA
cggacctgccccctcaacatg

SEQ ID NO: 38537 - RNA, 21 nt, synthetic construct
  source 1..21: mol_type = other RNA
ggacctgccccctcaacatgc

SEQ ID NO: 38538 - RNA, 21 nt, synthetic construct
  source 1..21: mol_type = other RNA
ctgccccctcaacatgcagca

SEQ ID NO: 38539 - RNA, 21 nt, synthetic construct
  source 1..21: mol_type = other RNA
ctcaccctgcacggacacctg

SEQ ID NO: 38540 - RNA, 21 nt, synthetic construct
  source 1..21: mol_type = other RNA
cctgctccggggggctatggc

SEQ ID NO: 38541 - RNA, 21 nt, synthetic construct
  source 1..21: mol_type = other RNA
ggggctatggcagtgccagga

SEQ ID NO: 38542 - RNA, 21 nt, synthetic construct
  source 1..21: mol_type = other RNA
ggcccacatctccacctatga

SEQ ID NO: 38543 - RNA, 21 nt, synthetic construct
  source 1..21: mol_type = other RNA
ccacatctccacctatgatga

SEQ ID NO: 38544 - RNA, 21 nt, synthetic construct
  source 1..21: mol_type = other RNA
acatctccacctatgatgaga

SEQ ID NO: 38545 - RNA, 21 nt, synthetic construct
  source 1..21: mol_type = other RNA
gatgagaaactctacgacctg

SEQ ID NO: 38546 - RNA, 21 nt, synthetic construct
  source 1..21: mol_type = other RNA
catggtgactgcagctacgtt

SEQ ID NO: 38547 - RNA, 21 nt, synthetic construct
  source 1..21: mol_type = other RNA
ctgcggaagtgcggcctgacg

SEQ ID NO: 38548 - RNA, 21 nt, synthetic construct
  source 1..21: mol_type = other RNA
tgcggcctgacggacaacgag

SEQ ID NO: 38549 - RNA, 21 nt, synthetic construct
  source 1..21: mol_type = other RNA
gcggcctgacggacaacgaga

SEQ ID NO: 38550 - RNA, 21 nt, synthetic construct
  source 1..21: mol_type = other RNA
gcctgacggacaacgagaact

SEQ ID NO: 38551 - RNA, 21 nt, synthetic construct
  source 1..21: mol_type = other RNA
gagaactgcctgaaagcggtg

SEQ ID NO: 38552 - RNA, 21 nt, synthetic construct
  source 1..21: mol_type = other RNA
aactgcctgaaagcggtgacg

SEQ ID NO: 38553 - RNA, 21 nt, synthetic construct
  source 1..21: mol_type = other RNA
tgaaagcggtgacgctcagcc

SEQ ID NO: 38554 - RNA, 21 nt, synthetic construct
  source 1..21: mol_type = other RNA
ggccatccgggtccaagcgga

SEQ ID NO: 38555 - RNA, 21 nt, synthetic construct
  source 1..21: mol_type = other RNA
ccgggtccaagcggacggcgg

SEQ ID NO: 38556 - RNA, 21 nt, synthetic construct
  source 1..21: mol_type = other RNA
agcttcttcatcgtggtgcag

SEQ ID NO: 38557 - RNA, 21 nt, synthetic construct
  source 1..21: mol_type = other RNA
gtgccactcatgcaggtgttt

SEQ ID NO: 38558 - RNA, 21 nt, synthetic construct
  source 1..21: mol_type = other RNA
cgacttcacggccctcagcgg

SEQ ID NO: 38559 - RNA, 21 nt, synthetic construct
  source 1..21: mol_type = other RNA
cttcacggccctcagcggggt

SEQ ID NO: 38560 - RNA, 21 nt, synthetic construct
  source 1..21: mol_type = other RNA
ggccacgggcgcagccttcgc

SEQ ID NO: 38561 - RNA, 21 nt, synthetic construct
  source 1..21: mol_type = other RNA
tcccaacagtgccttctcgcg

SEQ ID NO: 38562 - RNA, 21 nt, synthetic construct
  source 1..21: mol_type = other RNA
aacagtgccttctcgcgctgc

SEQ ID NO: 38563 - RNA, 21 nt, synthetic construct
  source 1..21: mol_type = other RNA
acttgccgcggcctgagtgag

SEQ ID NO: 38564 - RNA, 21 nt, synthetic construct
  source 1..21: mol_type = other RNA
gagtgcccctgctacgctcac

SEQ ID NO: 38565 - RNA, 21 nt, synthetic construct
  source 1..21: mol_type = other RNA
tgcccctgctacgctcacggc

SEQ ID NO: 38566 - RNA, 21 nt, synthetic construct
  source 1..21: mol_type = other RNA
acgctcacggcaccgtgctgg

SEQ ID NO: 38567 - RNA, 21 nt, synthetic construct
  source 1..21: mol_type = other RNA
ctcacggcaccgtgctggctc

SEQ ID NO: 38568 - RNA, 21 nt, synthetic construct
  source 1..21: mol_type = other RNA
ggagaggtggtgcacgacgag

SEQ ID NO: 38569 - RNA, 21 nt, synthetic construct
  source 1..21: mol_type = other RNA
gagaggtggtgcacgacgagg

SEQ ID NO: 38570 - RNA, 21 nt, synthetic construct
  source 1..21: mol_type = other RNA
gacgagggcgccgtgtgttca

SEQ ID NO: 38571 - RNA, 21 nt, synthetic construct
  source 1..21: mol_type = other RNA
acgagggcgccgtgtgttcat

SEQ ID NO: 38572 - RNA, 21 nt, synthetic construct
  source 1..21: mol_type = other RNA
cgagggcgccgtgtgttcatg

SEQ ID NO: 38573 - RNA, 21 nt, synthetic construct
  source 1..21: mol_type = other RNA
ttcatgtacgggtgggaagct

SEQ ID NO: 38574 - RNA, 21 nt, synthetic construct
  source 1..21: mol_type = other RNA
gcagcccccatggtgtacctg

SEQ ID NO: 38575 - RNA, 21 nt, synthetic construct
  source 1..21: mol_type = other RNA
cagcccccatggtgtacctgg

SEQ ID NO: 38576 - RNA, 21 nt, synthetic construct
  source 1..21: mol_type = other RNA
agcccccatggtgtacctgga

SEQ ID NO: 38577 - RNA, 21 nt, synthetic construct
  source 1..21: mol_type = other RNA
gctgcattgccgaggaggact

SEQ ID NO: 38578 - RNA, 21 nt, synthetic construct
  source 1..21: mol_type = other RNA
ctttgatggcgatcgctacag

SEQ ID NO: 38579 - RNA, 21 nt, synthetic construct
  source 1..21: mol_type = other RNA
gatggcgatcgctacagcttt

SEQ ID NO: 38580 - RNA, 21 nt, synthetic construct
  source 1..21: mol_type = other RNA
atggcgatcgctacagctttg

SEQ ID NO: 38581 - RNA, 21 nt, synthetic construct
  source 1..21: mol_type = other RNA
gcagctgcgagtacatcttgg

SEQ ID NO: 38582 - RNA, 21 nt, synthetic construct
  source 1..21: mol_type = other RNA
caagaggggacctttaaggcg

SEQ ID NO: 38583 - RNA, 21 nt, synthetic construct
  source 1..21: mol_type = other RNA
ggacctttaaggcggtggcga

SEQ ID NO: 38584 - RNA, 21 nt, synthetic construct
  source 1..21: mol_type = other RNA
ccgggtggggacccaccctac

SEQ ID NO: 38585 - RNA, 21 nt, synthetic construct
  source 1..21: mol_type = other RNA
ttcctggtcatcgagacccac

SEQ ID NO: 38586 - RNA, 21 nt, synthetic construct
  source 1..21: mol_type = other RNA
cgagacccacgggatggccgt

SEQ ID NO: 38587 - RNA, 21 nt, synthetic construct
  source 1..21: mol_type = other RNA
agcgtgttcatccgactgcac

SEQ ID NO: 38588 - RNA, 21 nt, synthetic construct
  source 1..21: mol_type = other RNA
tgcccggacgccctggcaccc

SEQ ID NO: 38589 - RNA, 21 nt, synthetic construct
  source 1..21: mol_type = other RNA
gtgcctgcgactcgggtggcg

SEQ ID NO: 38590 - RNA, 21 nt, synthetic construct
  source 1..21: mol_type = other RNA
tgcgactcgggtggcgactgc

SEQ ID NO: 38591 - RNA, 21 nt, synthetic construct
  source 1..21: mol_type = other RNA
ccggacacctgccccttgttc

SEQ ID NO: 38592 - RNA, 21 nt, synthetic construct
  source 1..21: mol_type = other RNA
tctacaacccacatgggggct

SEQ ID NO: 38593 - RNA, 21 nt, synthetic construct
  source 1..21: mol_type = other RNA
ctacaacccacatgggggctg

SEQ ID NO: 38594 - RNA, 21 nt, synthetic construct
  source 1..21: mol_type = other RNA
cgacaaggacggaaactacta

SEQ ID NO: 38595 - RNA, 21 nt, synthetic construct
  source 1..21: mol_type = other RNA
tcggtgcaagggtccccacag

SEQ ID NO: 38596 - RNA, 21 nt, synthetic construct
  source 1..21: mol_type = other RNA
agagctgtaactgcacaccca

SEQ ID NO: 38597 - RNA, 21 nt, synthetic construct
  source 1..21: mol_type = other RNA
aggacaggacctacagctacc

SEQ ID NO: 38598 - RNA, 21 nt, synthetic construct
  source 1..21: mol_type = other RNA
ccgatgggcttggcgcctgct

SEQ ID NO: 38599 - RNA, 21 nt, synthetic construct
  source 1..21: mol_type = other RNA
tctgcggaagcaacggcacca

SEQ ID NO: 38600 - RNA, 21 nt, synthetic construct
  source 1..21: mol_type = other RNA
cggaagcaacggcaccatcat

SEQ ID NO: 38601 - RNA, 21 nt, synthetic construct
  source 1..21: mol_type = other RNA
ggaagcaacggcaccatcatc

SEQ ID NO: 38602 - RNA, 21 nt, synthetic construct
  source 1..21: mol_type = other RNA
agccacaacgccattcacctt

SEQ ID NO: 38603 - RNA, 21 nt, synthetic construct
  source 1..21: mol_type = other RNA
gggaggcggagactttgagac

SEQ ID NO: 38604 - RNA, 21 nt, synthetic construct
  source 1..21: mol_type = other RNA
ggaggcggagactttgagacg

SEQ ID NO: 38605 - RNA, 21 nt, synthetic construct
  source 1..21: mol_type = other RNA
actgtgaccgcatgcgggggc

SEQ ID NO: 38606 - RNA, 21 nt, synthetic construct
  source 1..21: mol_type = other RNA
gaccgcatgcgggggctgatg

SEQ ID NO: 38607 - RNA, 21 nt, synthetic construct
  source 1..21: mol_type = other RNA
atgcgggggctgatgtgcgcc

SEQ ID NO: 38608 - RNA, 21 nt, synthetic construct
  source 1..21: mol_type = other RNA
tgcgggggctgatgtgcgcca

SEQ ID NO: 38609 - RNA, 21 nt, synthetic construct
  source 1..21: mol_type = other RNA
cgggggctgatgtgcgccaac

SEQ ID NO: 38610 - RNA, 21 nt, synthetic construct
  source 1..21: mol_type = other RNA
cagagtcccccgctctgtcac

SEQ ID NO: 38611 - RNA, 21 nt, synthetic construct
  source 1..21: mol_type = other RNA
gtcccccgctctgtcacgact

SEQ ID NO: 38612 - RNA, 21 nt, synthetic construct
  source 1..21: mol_type = other RNA
tctctgctgcgaatacgtgcc

SEQ ID NO: 38613 - RNA, 21 nt, synthetic construct
  source 1..21: mol_type = other RNA
gagcctgctgtgcctacccca

SEQ ID NO: 38614 - RNA, 21 nt, synthetic construct
  source 1..21: mol_type = other RNA
cctcgcagactgggtccagct

SEQ ID NO: 38615 - RNA, 21 nt, synthetic construct
  source 1..21: mol_type = other RNA
cccctcggccccaggtaccac

SEQ ID NO: 38616 - RNA, 21 nt, synthetic construct
  source 1..21: mol_type = other RNA
ctggagggcacttatgccagc

SEQ ID NO: 38617 - RNA, 21 nt, synthetic construct
  source 1..21: mol_type = other RNA
ggagggcacttatgccagcag

SEQ ID NO: 38618 - RNA, 21 nt, synthetic construct
  source 1..21: mol_type = other RNA
tgcactgtgacgtccacttcg

SEQ ID NO: 38619 - RNA, 21 nt, synthetic construct
  source 1..21: mol_type = other RNA
gcactgtgacgtccacttcgg

SEQ ID NO: 38620 - RNA, 21 nt, synthetic construct
  source 1..21: mol_type = other RNA
ggccctgttctcaacgccgca

SEQ ID NO: 38621 - RNA, 21 nt, synthetic construct
  source 1..21: mol_type = other RNA
ccctctcagaaggactgacat

SEQ ID NO: 38622 - RNA, 21 nt, synthetic construct
  source 1..21: mol_type = other RNA
ctgacatcccccagatacaca

SEQ ID NO: 38623 - RNA, 21 nt, synthetic construct
  source 1..21: mol_type = other RNA
gccaccacgggaggccccacg

SEQ ID NO: 38624 - RNA, 21 nt, synthetic construct
  source 1..21: mol_type = other RNA
acgggaggccccacgacgcct

SEQ ID NO: 38625 - RNA, 21 nt, synthetic construct
  source 1..21: mol_type = other RNA
cccttccagggacgacgggga

SEQ ID NO: 38626 - RNA, 21 nt, synthetic construct
  source 1..21: mol_type = other RNA
ggcacatggcgcccctcacag

SEQ ID NO: 38627 - RNA, 21 nt, synthetic construct
  source 1..21: mol_type = other RNA
cacatggcgcccctcacagcc

SEQ ID NO: 38628 - RNA, 21 nt, synthetic construct
  source 1..21: mol_type = other RNA
acccacgctggccccaacaac

SEQ ID NO: 38629 - RNA, 21 nt, synthetic construct
  source 1..21: mol_type = other RNA
cgctggccccaacaacaatgg

SEQ ID NO: 38630 - RNA, 21 nt, synthetic construct
  source 1..21: mol_type = other RNA
ggcaacctccagagctcgccc

SEQ ID NO: 38631 - RNA, 21 nt, synthetic construct
  source 1..21: mol_type = other RNA
aacctccagagctcgcccgac

SEQ ID NO: 38632 - RNA, 21 nt, synthetic construct
  source 1..21: mol_type = other RNA
cttccaaagagccgctgacca

SEQ ID NO: 38633 - RNA, 21 nt, synthetic construct
  source 1..21: mol_type = other RNA
ttccaaagagccgctgaccac

SEQ ID NO: 38634 - RNA, 21 nt, synthetic construct
  source 1..21: mol_type = other RNA
ccaaagagccgctgaccacga

SEQ ID NO: 38635 - RNA, 21 nt, synthetic construct
  source 1..21: mol_type = other RNA
ctgaccacgagcctggcgcca

SEQ ID NO: 38636 - RNA, 21 nt, synthetic construct
  source 1..21: mol_type = other RNA
gaccacgagcctggcgccaac

SEQ ID NO: 38637 - RNA, 21 nt, synthetic construct
  source 1..21: mol_type = other RNA
acactcacgagcgagctgtcc

SEQ ID NO: 38638 - RNA, 21 nt, synthetic construct
  source 1..21: mol_type = other RNA
ccacctctcaggccgagacca

SEQ ID NO: 38639 - RNA, 21 nt, synthetic construct
  source 1..21: mol_type = other RNA
tctcaggccgagaccagcacg

SEQ ID NO: 38640 - RNA, 21 nt, synthetic construct
  source 1..21: mol_type = other RNA
caggccgagaccagcacgccc

SEQ ID NO: 38641 - RNA, 21 nt, synthetic construct
  source 1..21: mol_type = other RNA
agagacgacaatgagcccctt

SEQ ID NO: 38642 - RNA, 21 nt, synthetic construct
  source 1..21: mol_type = other RNA
cacccacagctaccagcgtta

SEQ ID NO: 38643 - RNA, 21 nt, synthetic construct
  source 1..21: mol_type = other RNA
tggacccgcctatcacagacc

SEQ ID NO: 38644 - RNA, 21 nt, synthetic construct
  source 1..21: mol_type = other RNA
gaccaccacacccacggccac

SEQ ID NO: 38645 - RNA, 21 nt, synthetic construct
  source 1..21: mol_type = other RNA
ccacacctccacagtgcttac

SEQ ID NO: 38646 - RNA, 21 nt, synthetic construct
  source 1..21: mol_type = other RNA
gccaactaccacaaccacggg

SEQ ID NO: 38647 - RNA, 21 nt, synthetic construct
  source 1..21: mol_type = other RNA
actaccacaaccacgggcttc

SEQ ID NO: 38648 - RNA, 21 nt, synthetic construct
  source 1..21: mol_type = other RNA
ccacaaccacgggcttcacag

SEQ ID NO: 38649 - RNA, 21 nt, synthetic construct
  source 1..21: mol_type = other RNA
ccagggacggcactcacgcct

SEQ ID NO: 38650 - RNA, 21 nt, synthetic construct
  source 1..21: mol_type = other RNA
tcacgcctccagtgtggatca

SEQ ID NO: 38651 - RNA, 21 nt, synthetic construct
  source 1..21: mol_type = other RNA
ccacaaccagaggctccacgg

SEQ ID NO: 38652 - RNA, 21 nt, synthetic construct
  source 1..21: mol_type = other RNA
tccatcccggggaccacccac

SEQ ID NO: 38653 - RNA, 21 nt, synthetic construct
  source 1..21: mol_type = other RNA
acaccgccacagtgctgacca

SEQ ID NO: 38654 - RNA, 21 nt, synthetic construct
  source 1..21: mol_type = other RNA
caactgtggccactggttcta

SEQ ID NO: 38655 - RNA, 21 nt, synthetic construct
  source 1..21: mol_type = other RNA
tcctctagcacacagaccagt

SEQ ID NO: 38656 - RNA, 21 nt, synthetic construct
  source 1..21: mol_type = other RNA
actcccccatcactgaccacc

SEQ ID NO: 38657 - RNA, 21 nt, synthetic construct
  source 1..21: mol_type = other RNA
ccactacgatcacggccaccg

SEQ ID NO: 38658 - RNA, 21 nt, synthetic construct
  source 1..21: mol_type = other RNA
acacacccccagtgccgaaca

SEQ ID NO: 38659 - RNA, 21 nt, synthetic construct
  source 1..21: mol_type = other RNA
acacccccagtgccgaacacc

SEQ ID NO: 38660 - RNA, 21 nt, synthetic construct
  source 1..21: mol_type = other RNA
atggccaccacacacgggcga

SEQ ID NO: 38661 - RNA, 21 nt, synthetic construct
  source 1..21: mol_type = other RNA
acacacgggcgatccctgccc

SEQ ID NO: 38662 - RNA, 21 nt, synthetic construct
  source 1..21: mol_type = other RNA
acacgggcgatccctgccccc

SEQ ID NO: 38663 - RNA, 21 nt, synthetic construct
  source 1..21: mol_type = other RNA
cagtccccacacggtgcgcac

SEQ ID NO: 38664 - RNA, 21 nt, synthetic construct
  source 1..21: mol_type = other RNA
agtccccacacggtgcgcaca

SEQ ID NO: 38665 - RNA, 21 nt, synthetic construct
  source 1..21: mol_type = other RNA
gacttcggccacctcgggcat

SEQ ID NO: 38666 - RNA, 21 nt, synthetic construct
  source 1..21: mol_type = other RNA
cttgggcaccacccacatcac

SEQ ID NO: 38667 - RNA, 21 nt, synthetic construct
  source 1..21: mol_type = other RNA
cacccagcactcgactccagc

SEQ ID NO: 38668 - RNA, 21 nt, synthetic construct
  source 1..21: mol_type = other RNA
ctcaccctagcagcagaacca

SEQ ID NO: 38669 - RNA, 21 nt, synthetic construct
  source 1..21: mol_type = other RNA
cagcagaaccaccgagtcacc

SEQ ID NO: 38670 - RNA, 21 nt, synthetic construct
  source 1..21: mol_type = other RNA
accaccgagtcacccccttct

SEQ ID NO: 38671 - RNA, 21 nt, synthetic construct
  source 1..21: mol_type = other RNA
agggacgaccaccccgggcca

SEQ ID NO: 38672 - RNA, 21 nt, synthetic construct
  source 1..21: mol_type = other RNA
ccaccccgggccacaccacgg

SEQ ID NO: 38673 - RNA, 21 nt, synthetic construct
  source 1..21: mol_type = other RNA
acggccacacccagcaagacc

SEQ ID NO: 38674 - RNA, 21 nt, synthetic construct
  source 1..21: mol_type = other RNA
cagccccacatcggcccccat

SEQ ID NO: 38675 - RNA, 21 nt, synthetic construct
  source 1..21: mol_type = other RNA
cccacatcggcccccataacc

SEQ ID NO: 38676 - RNA, 21 nt, synthetic construct
  source 1..21: mol_type = other RNA
ggcccccataaccacggtggt

SEQ ID NO: 38677 - RNA, 21 nt, synthetic construct
  source 1..21: mol_type = other RNA
cccccataaccacggtggtga

SEQ ID NO: 38678 - RNA, 21 nt, synthetic construct
  source 1..21: mol_type = other RNA
gagtggctggactacagctac

SEQ ID NO: 38679 - RNA, 21 nt, synthetic construct
  source 1..21: mol_type = other RNA
actacagctaccccatgccgg

SEQ ID NO: 38680 - RNA, 21 nt, synthetic construct
  source 1..21: mol_type = other RNA
cacctactccaacatccgtgc

SEQ ID NO: 38681 - RNA, 21 nt, synthetic construct
  source 1..21: mol_type = other RNA
cggaggggccgtctgtgagca

SEQ ID NO: 38682 - RNA, 21 nt, synthetic construct
  source 1..21: mol_type = other RNA
cagctctacggccatgccctc

SEQ ID NO: 38683 - RNA, 21 nt, synthetic construct
  source 1..21: mol_type = other RNA
acagagccgagcactacagcc

SEQ ID NO: 38684 - RNA, 21 nt, synthetic construct
  source 1..21: mol_type = other RNA
gagccgagcactacagccacc

SEQ ID NO: 38685 - RNA, 21 nt, synthetic construct
  source 1..21: mol_type = other RNA
tacagccaccgtgacggtgcc

SEQ ID NO: 38686 - RNA, 21 nt, synthetic construct
  source 1..21: mol_type = other RNA
acagccaccgtgacggtgccc

SEQ ID NO: 38687 - RNA, 21 nt, synthetic construct
  source 1..21: mol_type = other RNA
ccgtgacggtgcccaccggat

SEQ ID NO: 38688 - RNA, 21 nt, synthetic construct
  source 1..21: mol_type = other RNA
gtgcccaccggatccacggcc

SEQ ID NO: 38689 - RNA, 21 nt, synthetic construct
  source 1..21: mol_type = other RNA
tgcccaccggatccacggcca

SEQ ID NO: 38690 - RNA, 21 nt, synthetic construct
  source 1..21: mol_type = other RNA
ccaccggatccacggccaccg

SEQ ID NO: 38691 - RNA, 21 nt, synthetic construct
  source 1..21: mol_type = other RNA
caggcaactgctggcacccca

SEQ ID NO: 38692 - RNA, 21 nt, synthetic construct
  source 1..21: mol_type = other RNA
accagctttacagccatcccc

SEQ ID NO: 38693 - RNA, 21 nt, synthetic construct
  source 1..21: mol_type = other RNA
tggacccgcctatcacagacc

SEQ ID NO: 38694 - RNA, 21 nt, synthetic construct
  source 1..21: mol_type = other RNA
gaccaccacacccacggccac

SEQ ID NO: 38695 - RNA, 21 nt, synthetic construct
  source 1..21: mol_type = other RNA
agagactgtccacacctccac

SEQ ID NO: 38696 - RNA, 21 nt, synthetic construct
  source 1..21: mol_type = other RNA
ccacacctccacagtgcttac

SEQ ID NO: 38697 - RNA, 21 nt, synthetic construct
  source 1..21: mol_type = other RNA
ctgactaccacaaccacgggc

SEQ ID NO: 38698 - RNA, 21 nt, synthetic construct
  source 1..21: mol_type = other RNA
actaccacaaccacgggcttc

SEQ ID NO: 38699 - RNA, 21 nt, synthetic construct
  source 1..21: mol_type = other RNA
ccacaaccacgggcttcacag

SEQ ID NO: 38700 - RNA, 21 nt, synthetic construct
  source 1..21: mol_type = other RNA
ggcacgcacgcttccagtgtg

SEQ ID NO: 38701 - RNA, 21 nt, synthetic construct
  source 1..21: mol_type = other RNA
gcacgcacgcttccagtgtgg

SEQ ID NO: 38702 - RNA, 21 nt, synthetic construct
  source 1..21: mol_type = other RNA
cagaggttccacggtgacccc

SEQ ID NO: 38703 - RNA, 21 nt, synthetic construct
  source 1..21: mol_type = other RNA
agaggttccacggtgaccccc

SEQ ID NO: 38704 - RNA, 21 nt, synthetic construct
  source 1..21: mol_type = other RNA
tccatcccggggaccacccac

SEQ ID NO: 38705 - RNA, 21 nt, synthetic construct
  source 1..21: mol_type = other RNA
caactgtggccactggttcta

SEQ ID NO: 38706 - RNA, 21 nt, synthetic construct
  source 1..21: mol_type = other RNA
tcctctagcacacagaccagt

SEQ ID NO: 38707 - RNA, 21 nt, synthetic construct
  source 1..21: mol_type = other RNA
actcccccatcactgaccacc

SEQ ID NO: 38708 - RNA, 21 nt, synthetic construct
  source 1..21: mol_type = other RNA
ccactacgatcacggccaccg

SEQ ID NO: 38709 - RNA, 21 nt, synthetic construct
  source 1..21: mol_type = other RNA
cagggacaacacctatccccc

SEQ ID NO: 38710 - RNA, 21 nt, synthetic construct
  source 1..21: mol_type = other RNA
aacacctatccccccagtgct

SEQ ID NO: 38711 - RNA, 21 nt, synthetic construct
  source 1..21: mol_type = other RNA
acacacccccagtgccgaaca

SEQ ID NO: 38712 - RNA, 21 nt, synthetic construct
  source 1..21: mol_type = other RNA
acacccccagtgccgaacacc

SEQ ID NO: 38713 - RNA, 21 nt, synthetic construct
  source 1..21: mol_type = other RNA
cagtgccgaacaccacggcca

SEQ ID NO: 38714 - RNA, 21 nt, synthetic construct
  source 1..21: mol_type = other RNA
cagtccccacacggtgcgcac

SEQ ID NO: 38715 - RNA, 21 nt, synthetic construct
  source 1..21: mol_type = other RNA
agtccccacacggtgcgcaca

SEQ ID NO: 38716 - RNA, 21 nt, synthetic construct
  source 1..21: mol_type = other RNA
cttgggcaccacccacatcac

SEQ ID NO: 38717 - RNA, 21 nt, synthetic construct
  source 1..21: mol_type = other RNA
cccagcagcaaccaccggtac

SEQ ID NO: 38718 - RNA, 21 nt, synthetic construct
  source 1..21: mol_type = other RNA
cacccagcactcgactccagc

SEQ ID NO: 38719 - RNA, 21 nt, synthetic construct
  source 1..21: mol_type = other RNA
accaccgagtcacccccttct

SEQ ID NO: 38720 - RNA, 21 nt, synthetic construct
  source 1..21: mol_type = other RNA
agggacgaccaccccgggcca

SEQ ID NO: 38721 - RNA, 21 nt, synthetic construct
  source 1..21: mol_type = other RNA
acggccacacccagcaagacc

SEQ ID NO: 38722 - RNA, 21 nt, synthetic construct
  source 1..21: mol_type = other RNA
ccacatcggccccaataacca

SEQ ID NO: 38723 - RNA, 21 nt, synthetic construct
  source 1..21: mol_type = other RNA
ggccccaataaccacggtggt

SEQ ID NO: 38724 - RNA, 21 nt, synthetic construct
  source 1..21: mol_type = other RNA
gagtggctggactacagctac

SEQ ID NO: 38725 - RNA, 21 nt, synthetic construct
  source 1..21: mol_type = other RNA
actacagctaccccatgccgg

SEQ ID NO: 38726 - RNA, 21 nt, synthetic construct
  source 1..21: mol_type = other RNA
cacctactccaacatccgtgc

SEQ ID NO: 38727 - RNA, 21 nt, synthetic construct
  source 1..21: mol_type = other RNA
cggaggggccgtctgtgagca

SEQ ID NO: 38728 - RNA, 21 nt, synthetic construct
  source 1..21: mol_type = other RNA
cagccactacgaccgcaacca

SEQ ID NO: 38729 - RNA, 21 nt, synthetic construct
  source 1..21: mol_type = other RNA
gccactacgaccgcaaccact

SEQ ID NO: 38730 - RNA, 21 nt, synthetic construct
  source 1..21: mol_type = other RNA
actgcaaccacccttccagtg

SEQ ID NO: 38731 - RNA, 21 nt, synthetic construct
  source 1..21: mol_type = other RNA
ccagctttacacccatcccct

SEQ ID NO: 38732 - RNA, 21 nt, synthetic construct
  source 1..21: mol_type = other RNA
cagctttacacccatcccctc

SEQ ID NO: 38733 - RNA, 21 nt, synthetic construct
  source 1..21: mol_type = other RNA
gaccctcccagaacagaccac

SEQ ID NO: 38734 - RNA, 21 nt, synthetic construct
  source 1..21: mol_type = other RNA
ctccactccggagaccaccca

SEQ ID NO: 38735 - RNA, 21 nt, synthetic construct
  source 1..21: mol_type = other RNA
cacagtgctgaccacgaaggc

SEQ ID NO: 38736 - RNA, 21 nt, synthetic construct
  source 1..21: mol_type = other RNA
agtgctgaccacgaaggccac

SEQ ID NO: 38737 - RNA, 21 nt, synthetic construct
  source 1..21: mol_type = other RNA
ccacgacaagggccaccagtt

SEQ ID NO: 38738 - RNA, 21 nt, synthetic construct
  source 1..21: mol_type = other RNA
tacagccaccgtgacggtgcc

SEQ ID NO: 38739 - RNA, 21 nt, synthetic construct
  source 1..21: mol_type = other RNA
acagccaccgtgacggtgccc

SEQ ID NO: 38740 - RNA, 21 nt, synthetic construct
  source 1..21: mol_type = other RNA
ccgtgacggtgcccaccggat

SEQ ID NO: 38741 - RNA, 21 nt, synthetic construct
  source 1..21: mol_type = other RNA
gtgcccaccggatccacggcc

SEQ ID NO: 38742 - RNA, 21 nt, synthetic construct
  source 1..21: mol_type = other RNA
tgcccaccggatccacggcca

SEQ ID NO: 38743 - RNA, 21 nt, synthetic construct
  source 1..21: mol_type = other RNA
ccaccggatccacggccaccg

SEQ ID NO: 38744 - RNA, 21 nt, synthetic construct
  source 1..21: mol_type = other RNA
cctccacccgggcaactgctg

SEQ ID NO: 38745 - RNA, 21 nt, synthetic construct
  source 1..21: mol_type = other RNA
cacccacagctaccagcgtta

SEQ ID NO: 38746 - RNA, 21 nt, synthetic construct
  source 1..21: mol_type = other RNA
tggacccgcctatcacagacc

SEQ ID NO: 38747 - RNA, 21 nt, synthetic construct
  source 1..21: mol_type = other RNA
gaccaccacacccacggccac

SEQ ID NO: 38748 - RNA, 21 nt, synthetic construct
  source 1..21: mol_type = other RNA
ctctactccagagactgtcca

SEQ ID NO: 38749 - RNA, 21 nt, synthetic construct
  source 1..21: mol_type = other RNA
agagactgtccacacctccac

SEQ ID NO: 38750 - RNA, 21 nt, synthetic construct
  source 1..21: mol_type = other RNA
ccacacctccacagtgcttac

SEQ ID NO: 38751 - RNA, 21 nt, synthetic construct
  source 1..21: mol_type = other RNA
actaccacaaccacgggcttc

SEQ ID NO: 38752 - RNA, 21 nt, synthetic construct
  source 1..21: mol_type = other RNA
ccacaaccacgggcttcacag

SEQ ID NO: 38753 - RNA, 21 nt, synthetic construct
  source 1..21: mol_type = other RNA
ccagggacggcactcacgcct

SEQ ID NO: 38754 - RNA, 21 nt, synthetic construct
  source 1..21: mol_type = other RNA
tcacgcctccagtgtggatca

SEQ ID NO: 38755 - RNA, 21 nt, synthetic construct
  source 1..21: mol_type = other RNA
ccacaaccagaggctccacgg

SEQ ID NO: 38756 - RNA, 21 nt, synthetic construct
  source 1..21: mol_type = other RNA
tccatcccggggaccacccac

SEQ ID NO: 38757 - RNA, 21 nt, synthetic construct
  source 1..21: mol_type = other RNA
acaccgccacagtgctgacca

SEQ ID NO: 38758 - RNA, 21 nt, synthetic construct
  source 1..21: mol_type = other RNA
caactgtggccactggttcta

SEQ ID NO: 38759 - RNA, 21 nt, synthetic construct
  source 1..21: mol_type = other RNA
tcctctagcacacagaccagt

SEQ ID NO: 38760 - RNA, 21 nt, synthetic construct
  source 1..21: mol_type = other RNA
actcccccatcactgaccacc

SEQ ID NO: 38761 - RNA, 21 nt, synthetic construct
  source 1..21: mol_type = other RNA
cactacgatcacagccaccgg

SEQ ID NO: 38762 - RNA, 21 nt, synthetic construct
  source 1..21: mol_type = other RNA
acacacccccagtgccgaaca

SEQ ID NO: 38763 - RNA, 21 nt, synthetic construct
  source 1..21: mol_type = other RNA
acacccccagtgccgaacacc

SEQ ID NO: 38764 - RNA, 21 nt, synthetic construct
  source 1..21: mol_type = other RNA
cagtgccgaacaccacggcca

SEQ ID NO: 38765 - RNA, 21 nt, synthetic construct
  source 1..21: mol_type = other RNA
cagtccccacacggtgcgcac

SEQ ID NO: 38766 - RNA, 21 nt, synthetic construct
  source 1..21: mol_type = other RNA
agtccccacacggtgcgcaca

SEQ ID NO: 38767 - RNA, 21 nt, synthetic construct
  source 1..21: mol_type = other RNA
gacttcggccacctcgggcat

SEQ ID NO: 38768 - RNA, 21 nt, synthetic construct
  source 1..21: mol_type = other RNA
cttgggcaccacccacatcac

SEQ ID NO: 38769 - RNA, 21 nt, synthetic construct
  source 1..21: mol_type = other RNA
caccagtaccacccagcactc

SEQ ID NO: 38770 - RNA, 21 nt, synthetic construct
  source 1..21: mol_type = other RNA
cacccagcactcgactccagc

SEQ ID NO: 38771 - RNA, 21 nt, synthetic construct
  source 1..21: mol_type = other RNA
accaccgagtcacccccttct

SEQ ID NO: 38772 - RNA, 21 nt, synthetic construct
  source 1..21: mol_type = other RNA
agggacgaccaccccgggcca

SEQ ID NO: 38773 - RNA, 21 nt, synthetic construct
  source 1..21: mol_type = other RNA
cagccccacatcggcccccat

SEQ ID NO: 38774 - RNA, 21 nt, synthetic construct
  source 1..21: mol_type = other RNA
cccacatcggcccccataacc

SEQ ID NO: 38775 - RNA, 21 nt, synthetic construct
  source 1..21: mol_type = other RNA
ggcccccataaccacggtggt

SEQ ID NO: 38776 - RNA, 21 nt, synthetic construct
  source 1..21: mol_type = other RNA
cccccataaccacggtggtga

SEQ ID NO: 38777 - RNA, 21 nt, synthetic construct
  source 1..21: mol_type = other RNA
tgaccacgggctgtgagcccc

SEQ ID NO: 38778 - RNA, 21 nt, synthetic construct
  source 1..21: mol_type = other RNA
gagtggctggactacagctac

SEQ ID NO: 38779 - RNA, 21 nt, synthetic construct
  source 1..21: mol_type = other RNA
actacagctaccccatgccgg

SEQ ID NO: 38780 - RNA, 21 nt, synthetic construct
  source 1..21: mol_type = other RNA
cacctactccaacatccgtgc

SEQ ID NO: 38781 - RNA, 21 nt, synthetic construct
  source 1..21: mol_type = other RNA
acagagccgagcactacagcc

SEQ ID NO: 38782 - RNA, 21 nt, synthetic construct
  source 1..21: mol_type = other RNA
gagccgagcactacagccacc

SEQ ID NO: 38783 - RNA, 21 nt, synthetic construct
  source 1..21: mol_type = other RNA
tacagccaccgtgacggtgcc

SEQ ID NO: 38784 - RNA, 21 nt, synthetic construct
  source 1..21: mol_type = other RNA
acagccaccgtgacggtgccc

SEQ ID NO: 38785 - RNA, 21 nt, synthetic construct
  source 1..21: mol_type = other RNA
ccgtgacggtgcccaccggat

SEQ ID NO: 38786 - RNA, 21 nt, synthetic construct
  source 1..21: mol_type = other RNA
gtgcccaccggatccacggcc

SEQ ID NO: 38787 - RNA, 21 nt, synthetic construct
  source 1..21: mol_type = other RNA
tgcccaccggatccacggcca

SEQ ID NO: 38788 - RNA, 21 nt, synthetic construct
  source 1..21: mol_type = other RNA
ccaccggatccacggccaccg

SEQ ID NO: 38789 - RNA, 21 nt, synthetic construct
  source 1..21: mol_type = other RNA
caggcaactgctggcacccca

SEQ ID NO: 38790 - RNA, 21 nt, synthetic construct
  source 1..21: mol_type = other RNA
accagctttacagccatcccc

SEQ ID NO: 38791 - RNA, 21 nt, synthetic construct
  source 1..21: mol_type = other RNA
tggacccgcctatcacagacc

SEQ ID NO: 38792 - RNA, 21 nt, synthetic construct
  source 1..21: mol_type = other RNA
gaccaccacacccacggccac

SEQ ID NO: 38793 - RNA, 21 nt, synthetic construct
  source 1..21: mol_type = other RNA
ccacacctccacagtgcttac

SEQ ID NO: 38794 - RNA, 21 nt, synthetic construct
  source 1..21: mol_type = other RNA
actaccacaaccacgggcttc

SEQ ID NO: 38795 - RNA, 21 nt, synthetic construct
  source 1..21: mol_type = other RNA
ccacaaccacgggcttcacag

SEQ ID NO: 38796 - RNA, 21 nt, synthetic construct
  source 1..21: mol_type = other RNA
ccacgggcttcacagtcaccc

SEQ ID NO: 38797 - RNA, 21 nt, synthetic construct
  source 1..21: mol_type = other RNA
cggcacgcacgcctccagtgt

SEQ ID NO: 38798 - RNA, 21 nt, synthetic construct
  source 1..21: mol_type = other RNA
gcacgcacgcctccagtgtgg

SEQ ID NO: 38799 - RNA, 21 nt, synthetic construct
  source 1..21: mol_type = other RNA
cgcacgcctccagtgtggatc

SEQ ID NO: 38800 - RNA, 21 nt, synthetic construct
  source 1..21: mol_type = other RNA
gcacgcctccagtgtggatca

SEQ ID NO: 38801 - RNA, 21 nt, synthetic construct
  source 1..21: mol_type = other RNA
cacacccacaaccagtggctc

SEQ ID NO: 38802 - RNA, 21 nt, synthetic construct
  source 1..21: mol_type = other RNA
tccgtcccggggaccacccac

SEQ ID NO: 38803 - RNA, 21 nt, synthetic construct
  source 1..21: mol_type = other RNA
caactgtggccactggttcta

SEQ ID NO: 38804 - RNA, 21 nt, synthetic construct
  source 1..21: mol_type = other RNA
tcctctagcacacagaccagt

SEQ ID NO: 38805 - RNA, 21 nt, synthetic construct
  source 1..21: mol_type = other RNA
ccactacgatcacggccaccg

SEQ ID NO: 38806 - RNA, 21 nt, synthetic construct
  source 1..21: mol_type = other RNA
cagggacaacacctatccccc

SEQ ID NO: 38807 - RNA, 21 nt, synthetic construct
  source 1..21: mol_type = other RNA
aacacctatccccccagtgct

SEQ ID NO: 38808 - RNA, 21 nt, synthetic construct
  source 1..21: mol_type = other RNA
acacacccccagtgccgaaca

SEQ ID NO: 38809 - RNA, 21 nt, synthetic construct
  source 1..21: mol_type = other RNA
acacccccagtgccgaacacc

SEQ ID NO: 38810 - RNA, 21 nt, synthetic construct
  source 1..21: mol_type = other RNA
cagtgccgaacaccacggcca

SEQ ID NO: 38811 - RNA, 21 nt, synthetic construct
  source 1..21: mol_type = other RNA
cagtccccacacggtgcgcac

SEQ ID NO: 38812 - RNA, 21 nt, synthetic construct
  source 1..21: mol_type = other RNA
agtccccacacggtgcgcaca

SEQ ID NO: 38813 - RNA, 21 nt, synthetic construct
  source 1..21: mol_type = other RNA
cttgggcaccacccacatcac

SEQ ID NO: 38814 - RNA, 21 nt, synthetic construct
  source 1..21: mol_type = other RNA
cccagcagcaaccaccggtac

SEQ ID NO: 38815 - RNA, 21 nt, synthetic construct
  source 1..21: mol_type = other RNA
cacccagcactcgactccagc

SEQ ID NO: 38816 - RNA, 21 nt, synthetic construct
  source 1..21: mol_type = other RNA
accaccgagtcacccccttcc

SEQ ID NO: 38817 - RNA, 21 nt, synthetic construct
  source 1..21: mol_type = other RNA
caccgagtcacccccttcccc

SEQ ID NO: 38818 - RNA, 21 nt, synthetic construct
  source 1..21: mol_type = other RNA
agggacgaccaccccgggcca

SEQ ID NO: 38819 - RNA, 21 nt, synthetic construct
  source 1..21: mol_type = other RNA
ccaccccgggccacaccacgg

SEQ ID NO: 38820 - RNA, 21 nt, synthetic construct
  source 1..21: mol_type = other RNA
acggccacacccagcaagacc

SEQ ID NO: 38821 - RNA, 21 nt, synthetic construct
  source 1..21: mol_type = other RNA
cagccccacatcggcccccat

SEQ ID NO: 38822 - RNA, 21 nt, synthetic construct
  source 1..21: mol_type = other RNA
cccacatcggcccccataacc

SEQ ID NO: 38823 - RNA, 21 nt, synthetic construct
  source 1..21: mol_type = other RNA
ggcccccataaccacggtggt

SEQ ID NO: 38824 - RNA, 21 nt, synthetic construct
  source 1..21: mol_type = other RNA
cccccataaccacggtggtga

SEQ ID NO: 38825 - RNA, 21 nt, synthetic construct
  source 1..21: mol_type = other RNA
tgaccacgggctgtgagcccc

SEQ ID NO: 38826 - RNA, 21 nt, synthetic construct
  source 1..21: mol_type = other RNA
gagtggctggactacagctac

SEQ ID NO: 38827 - RNA, 21 nt, synthetic construct
  source 1..21: mol_type = other RNA
actacagctaccccatgccgg

SEQ ID NO: 38828 - RNA, 21 nt, synthetic construct
  source 1..21: mol_type = other RNA
cacctactccaacatccgtgc

SEQ ID NO: 38829 - RNA, 21 nt, synthetic construct
  source 1..21: mol_type = other RNA
cggaggggccgtctgtgagca

SEQ ID NO: 38830 - RNA, 21 nt, synthetic construct
  source 1..21: mol_type = other RNA
cagctctacggccatgccctc

SEQ ID NO: 38831 - RNA, 21 nt, synthetic construct
  source 1..21: mol_type = other RNA
actgcaaccacccttccagtg

SEQ ID NO: 38832 - RNA, 21 nt, synthetic construct
  source 1..21: mol_type = other RNA
gaccctcccagaacagaccac

SEQ ID NO: 38833 - RNA, 21 nt, synthetic construct
  source 1..21: mol_type = other RNA
ctccactccggagaccaccca

SEQ ID NO: 38834 - RNA, 21 nt, synthetic construct
  source 1..21: mol_type = other RNA
cacagtgctgaccacgaaggc

SEQ ID NO: 38835 - RNA, 21 nt, synthetic construct
  source 1..21: mol_type = other RNA
agtgctgaccacgaaggccac

SEQ ID NO: 38836 - RNA, 21 nt, synthetic construct
  source 1..21: mol_type = other RNA
ccacgacaagggccaccagtt

SEQ ID NO: 38837 - RNA, 21 nt, synthetic construct
  source 1..21: mol_type = other RNA
cagttccacgtccaccccctc

SEQ ID NO: 38838 - RNA, 21 nt, synthetic construct
  source 1..21: mol_type = other RNA
acagagccgagcactacagcc

SEQ ID NO: 38839 - RNA, 21 nt, synthetic construct
  source 1..21: mol_type = other RNA
gagccgagcactacagccacc

SEQ ID NO: 38840 - RNA, 21 nt, synthetic construct
  source 1..21: mol_type = other RNA
tacagccaccgtgacggtgcc

SEQ ID NO: 38841 - RNA, 21 nt, synthetic construct
  source 1..21: mol_type = other RNA
acagccaccgtgacggtgccc

SEQ ID NO: 38842 - RNA, 21 nt, synthetic construct
  source 1..21: mol_type = other RNA
ccgtgacggtgcccaccggat

SEQ ID NO: 38843 - RNA, 21 nt, synthetic construct
  source 1..21: mol_type = other RNA
gtgcccaccggatccacggcc

SEQ ID NO: 38844 - RNA, 21 nt, synthetic construct
  source 1..21: mol_type = other RNA
tgcccaccggatccacggcca

SEQ ID NO: 38845 - RNA, 21 nt, synthetic construct
  source 1..21: mol_type = other RNA
ccaccggatccacggccaccg

SEQ ID NO: 38846 - RNA, 21 nt, synthetic construct
  source 1..21: mol_type = other RNA
caggcaactgctggcacccca

SEQ ID NO: 38847 - RNA, 21 nt, synthetic construct
  source 1..21: mol_type = other RNA
accagctttacagccatcccc

SEQ ID NO: 38848 - RNA, 21 nt, synthetic construct
  source 1..21: mol_type = other RNA
tggacccgcctatcacagacc

SEQ ID NO: 38849 - RNA, 21 nt, synthetic construct
  source 1..21: mol_type = other RNA
gaccaccacacccacggccac

SEQ ID NO: 38850 - RNA, 21 nt, synthetic construct
  source 1..21: mol_type = other RNA
agagactgtccacacctccac

SEQ ID NO: 38851 - RNA, 21 nt, synthetic construct
  source 1..21: mol_type = other RNA
ccacacctccacagtgcttac

SEQ ID NO: 38852 - RNA, 21 nt, synthetic construct
  source 1..21: mol_type = other RNA
actaccacaaccacgggcttc

SEQ ID NO: 38853 - RNA, 21 nt, synthetic construct
  source 1..21: mol_type = other RNA
ccacaaccacgggcttcacag

SEQ ID NO: 38854 - RNA, 21 nt, synthetic construct
  source 1..21: mol_type = other RNA
ccagggacggcactcacgcct

SEQ ID NO: 38855 - RNA, 21 nt, synthetic construct
  source 1..21: mol_type = other RNA
tcacgcctccagtgtggatca

SEQ ID NO: 38856 - RNA, 21 nt, synthetic construct
  source 1..21: mol_type = other RNA
cacacccacaaccagtggctc

SEQ ID NO: 38857 - RNA, 21 nt, synthetic construct
  source 1..21: mol_type = other RNA
tccatcccggggaccacccac

SEQ ID NO: 38858 - RNA, 21 nt, synthetic construct
  source 1..21: mol_type = other RNA
acaccgccagagtgctgacca

SEQ ID NO: 38859 - RNA, 21 nt, synthetic construct
  source 1..21: mol_type = other RNA
caactgtggccactggttcta

SEQ ID NO: 38860 - RNA, 21 nt, synthetic construct
  source 1..21: mol_type = other RNA
tcctctagcacacagaccagt

SEQ ID NO: 38861 - RNA, 21 nt, synthetic construct
  source 1..21: mol_type = other RNA
actcccccatcactgaccacc

SEQ ID NO: 38862 - RNA, 21 nt, synthetic construct
  source 1..21: mol_type = other RNA
ccactacgatcacggccaccg

SEQ ID NO: 38863 - RNA, 21 nt, synthetic construct
  source 1..21: mol_type = other RNA
actgcaaccacccttccagtg

SEQ ID NO: 38864 - RNA, 21 nt, synthetic construct
  source 1..21: mol_type = other RNA
ccagctttacacccatcccct

SEQ ID NO: 38865 - RNA, 21 nt, synthetic construct
  source 1..21: mol_type = other RNA
cagctttacacccatcccctc

SEQ ID NO: 38866 - RNA, 21 nt, synthetic construct
  source 1..21: mol_type = other RNA
tggaccgtcccagcacagacc

SEQ ID NO: 38867 - RNA, 21 nt, synthetic construct
  source 1..21: mol_type = other RNA
tccacaatccacacctcctct

SEQ ID NO: 38868 - RNA, 21 nt, synthetic construct
  source 1..21: mol_type = other RNA
cacaatccacacctcctctac

SEQ ID NO: 38869 - RNA, 21 nt, synthetic construct
  source 1..21: mol_type = other RNA
tccacacctcctctactccag

SEQ ID NO: 38870 - RNA, 21 nt, synthetic construct
  source 1..21: mol_type = other RNA
cctctactccagagaccaccc

SEQ ID NO: 38871 - RNA, 21 nt, synthetic construct
  source 1..21: mol_type = other RNA
acaagggccaccaattccacg

SEQ ID NO: 38872 - RNA, 21 nt, synthetic construct
  source 1..21: mol_type = other RNA
accaattccacggccacaccc

SEQ ID NO: 38873 - RNA, 21 nt, synthetic construct
  source 1..21: mol_type = other RNA
tccactctggggacgacccgg

SEQ ID NO: 38874 - RNA, 21 nt, synthetic construct
  source 1..21: mol_type = other RNA
ctctggggacgacccggatcc

SEQ ID NO: 38875 - RNA, 21 nt, synthetic construct
  source 1..21: mol_type = other RNA
agccgagcactatagccaccg

SEQ ID NO: 38876 - RNA, 21 nt, synthetic construct
  source 1..21: mol_type = other RNA
gccaccgtgatggtgcccacc

SEQ ID NO: 38877 - RNA, 21 nt, synthetic construct
  source 1..21: mol_type = other RNA
caccgtgatggtgcccaccgg

SEQ ID NO: 38878 - RNA, 21 nt, synthetic construct
  source 1..21: mol_type = other RNA
agctcacacccccaaagtggt

SEQ ID NO: 38879 - RNA, 21 nt, synthetic construct
  source 1..21: mol_type = other RNA
gcctgccaaccttcagcgtgt

SEQ ID NO: 38880 - RNA, 21 nt, synthetic construct
  source 1..21: mol_type = other RNA
cctgccaaccttcagcgtgtc

SEQ ID NO: 38881 - RNA, 21 nt, synthetic construct
  source 1..21: mol_type = other RNA
tttggacagtttttctcgccc

SEQ ID NO: 38882 - RNA, 21 nt, synthetic construct
  source 1..21: mol_type = other RNA
ttggacagtttttctcgcccg

SEQ ID NO: 38883 - RNA, 21 nt, synthetic construct
  source 1..21: mol_type = other RNA
cggggaagtcatctacaataa

SEQ ID NO: 38884 - RNA, 21 nt, synthetic construct
  source 1..21: mol_type = other RNA
ctgccatttctacgcagtgtg

SEQ ID NO: 38885 - RNA, 21 nt, synthetic construct
  source 1..21: mol_type = other RNA
ctacgcagtgtgcaatcagca

SEQ ID NO: 38886 - RNA, 21 nt, synthetic construct
  source 1..21: mol_type = other RNA
cagtgtgcaatcagcactgtg

SEQ ID NO: 38887 - RNA, 21 nt, synthetic construct
  source 1..21: mol_type = other RNA
gcaatcagcactgtgacattg

SEQ ID NO: 38888 - RNA, 21 nt, synthetic construct
  source 1..21: mol_type = other RNA
agcactgtgacattgaccgct

SEQ ID NO: 38889 - RNA, 21 nt, synthetic construct
  source 1..21: mol_type = other RNA
gcactgtgacattgaccgctt

SEQ ID NO: 38890 - RNA, 21 nt, synthetic construct
  source 1..21: mol_type = other RNA
ctccggcaggtgaatgagacc

SEQ ID NO: 38891 - RNA, 21 nt, synthetic construct
  source 1..21: mol_type = other RNA
ggggcggctcccactattcca

SEQ ID NO: 38892 - RNA, 21 nt, synthetic construct
  source 1..21: mol_type = other RNA
cacctcttacaccttccgggg

SEQ ID NO: 38893 - RNA, 21 nt, synthetic construct
  source 1..21: mol_type = other RNA
ctcttacaccttccggggcaa

SEQ ID NO: 38894 - RNA, 21 nt, synthetic construct
  source 1..21: mol_type = other RNA
tacaccttccggggcaactgc

SEQ ID NO: 38895 - RNA, 21 nt, synthetic construct
  source 1..21: mol_type = other RNA
tccggggcaactgcacctatg

SEQ ID NO: 38896 - RNA, 21 nt, synthetic construct
  source 1..21: mol_type = other RNA
gagagatccatgcacgctttg

SEQ ID NO: 38897 - RNA, 21 nt, synthetic construct
  source 1..21: mol_type = other RNA
atgcacgctttgggaatctca

SEQ ID NO: 38898 - RNA, 21 nt, synthetic construct
  source 1..21: mol_type = other RNA
tgcacgctttgggaatctcag

SEQ ID NO: 38899 - RNA, 21 nt, synthetic construct
  source 1..21: mol_type = other RNA
caaccactactgcacggcctc

SEQ ID NO: 38900 - RNA, 21 nt, synthetic construct
  source 1..21: mol_type = other RNA
aaccactactgcacggcctct

SEQ ID NO: 38901 - RNA, 21 nt, synthetic construct
  source 1..21: mol_type = other RNA
accactactgcacggcctctg

SEQ ID NO: 38902 - RNA, 21 nt, synthetic construct
  source 1..21: mol_type = other RNA
cctcagcatccactacaagtc

SEQ ID NO: 38903 - RNA, 21 nt, synthetic construct
  source 1..21: mol_type = other RNA
gcatccactacaagtccatgg

SEQ ID NO: 38904 - RNA, 21 nt, synthetic construct
  source 1..21: mol_type = other RNA
catccactacaagtccatgga

SEQ ID NO: 38905 - RNA, 21 nt, synthetic construct
  source 1..21: mol_type = other RNA
atccactacaagtccatggat

SEQ ID NO: 38906 - RNA, 21 nt, synthetic construct
  source 1..21: mol_type = other RNA
tggatatcgtcctcactgtca

SEQ ID NO: 38907 - RNA, 21 nt, synthetic construct
  source 1..21: mol_type = other RNA
tgtcaccatggtgcatgggaa

SEQ ID NO: 38908 - RNA, 21 nt, synthetic construct
  source 1..21: mol_type = other RNA
accaccatgcgtgtggacatt

SEQ ID NO: 38909 - RNA, 21 nt, synthetic construct
  source 1..21: mol_type = other RNA
atgcgtgtggacattcctgcc

SEQ ID NO: 38910 - RNA, 21 nt, synthetic construct
  source 1..21: mol_type = other RNA
tgggcgtgagcgtcaccttca

SEQ ID NO: 38911 - RNA, 21 nt, synthetic construct
  source 1..21: mol_type = other RNA
acggaaccactgccgccagtt

SEQ ID NO: 38912 - RNA, 21 nt, synthetic construct
  source 1..21: mol_type = other RNA
cggaaccactgccgccagttg

SEQ ID NO: 38913 - RNA, 21 nt, synthetic construct
  source 1..21: mol_type = other RNA
gaaccactgccgccagttgca

SEQ ID NO: 38914 - RNA, 21 nt, synthetic construct
  source 1..21: mol_type = other RNA
aaccactgccgccagttgcaa

SEQ ID NO: 38915 - RNA, 21 nt, synthetic construct
  source 1..21: mol_type = other RNA
actgccgccagttgcaaggac

SEQ ID NO: 38916 - RNA, 21 nt, synthetic construct
  source 1..21: mol_type = other RNA
ggacatggccaagacgtggct

SEQ ID NO: 38917 - RNA, 21 nt, synthetic construct
  source 1..21: mol_type = other RNA
gacatggccaagacgtggctg

SEQ ID NO: 38918 - RNA, 21 nt, synthetic construct
  source 1..21: mol_type = other RNA
tggccaagacgtggctggtcc

SEQ ID NO: 38919 - RNA, 21 nt, synthetic construct
  source 1..21: mol_type = other RNA
ggccaagacgtggctggtccc

SEQ ID NO: 38920 - RNA, 21 nt, synthetic construct
  source 1..21: mol_type = other RNA
ctggtccccgacagcagaaag

SEQ ID NO: 38921 - RNA, 21 nt, synthetic construct
  source 1..21: mol_type = other RNA
ccccgacagcagaaaggatgg

SEQ ID NO: 38922 - RNA, 21 nt, synthetic construct
  source 1..21: mol_type = other RNA
gccccgactggcacacccccc

SEQ ID NO: 38923 - RNA, 21 nt, synthetic construct
  source 1..21: mol_type = other RNA
cccggtgtctagcacacccac

SEQ ID NO: 38924 - RNA, 21 nt, synthetic construct
  source 1..21: mol_type = other RNA
gccgctctgtgatctgatgct

SEQ ID NO: 38925 - RNA, 21 nt, synthetic construct
  source 1..21: mol_type = other RNA
cgggcccattcttcaacgcct

SEQ ID NO: 38926 - RNA, 21 nt, synthetic construct
  source 1..21: mol_type = other RNA
ggcccattcttcaacgcctgc

SEQ ID NO: 38927 - RNA, 21 nt, synthetic construct
  source 1..21: mol_type = other RNA
gcctgcatcagcgaccactgc

SEQ ID NO: 38928 - RNA, 21 nt, synthetic construct
  source 1..21: mol_type = other RNA
gaccactgcaggggccgcctt

SEQ ID NO: 38929 - RNA, 21 nt, synthetic construct
  source 1..21: mol_type = other RNA
cctggaggcttacgcagagct

SEQ ID NO: 38930 - RNA, 21 nt, synthetic construct
  source 1..21: mol_type = other RNA
tacgcagagctctgccgcgcc

SEQ ID NO: 38931 - RNA, 21 nt, synthetic construct
  source 1..21: mol_type = other RNA
agtgtacaagccatgcggccc

SEQ ID NO: 38932 - RNA, 21 nt, synthetic construct
  source 1..21: mol_type = other RNA
gccatgcggccccatacagcc

SEQ ID NO: 38933 - RNA, 21 nt, synthetic construct
  source 1..21: mol_type = other RNA
gcggccccatacagcctgcca

SEQ ID NO: 38934 - RNA, 21 nt, synthetic construct
  source 1..21: mol_type = other RNA
cggccccatacagcctgccac

SEQ ID NO: 38935 - RNA, 21 nt, synthetic construct
  source 1..21: mol_type = other RNA
ctgcaactctaggaaccagag

SEQ ID NO: 38936 - RNA, 21 nt, synthetic construct
  source 1..21: mol_type = other RNA
gggcatctgcgtgcaggcctg

SEQ ID NO: 38937 - RNA, 21 nt, synthetic construct
  source 1..21: mol_type = other RNA
acccgatgggtttcctaaatt

SEQ ID NO: 38938 - RNA, 21 nt, synthetic construct
  source 1..21: mol_type = other RNA
cgatgggtttcctaaatttcc

SEQ ID NO: 38939 - RNA, 21 nt, synthetic construct
  source 1..21: mol_type = other RNA
ggagcggtgggtcagcaactg

SEQ ID NO: 38940 - RNA, 21 nt, synthetic construct
  source 1..21: mol_type = other RNA
gccagtcctgcgtgtgtgacg

SEQ ID NO: 38941 - RNA, 21 nt, synthetic construct
  source 1..21: mol_type = other RNA
cagtcctgcgtgtgtgacgag

SEQ ID NO: 38942 - RNA, 21 nt, synthetic construct
  source 1..21: mol_type = other RNA
cgtgtgtgacgagggttcagt

SEQ ID NO: 38943 - RNA, 21 nt, synthetic construct
  source 1..21: mol_type = other RNA
tcagtgtcggtgcagtgcaag

SEQ ID NO: 38944 - RNA, 21 nt, synthetic construct
  source 1..21: mol_type = other RNA
ccctgtgacgcccagggtcag

SEQ ID NO: 38945 - RNA, 21 nt, synthetic construct
  source 1..21: mol_type = other RNA
cgtcccggcttcgtaaccgtg

SEQ ID NO: 38946 - RNA, 21 nt, synthetic construct
  source 1..21: mol_type = other RNA
ttcgtaaccgtgaccaggccc

SEQ ID NO: 38947 - RNA, 21 nt, synthetic construct
  source 1..21: mol_type = other RNA
gtaaccgtgaccaggccccgg

SEQ ID NO: 38948 - RNA, 21 nt, synthetic construct
  source 1..21: mol_type = other RNA
gctgccccgagacggtgtgcg

SEQ ID NO: 38949 - RNA, 21 nt, synthetic construct
  source 1..21: mol_type = other RNA
gtgttcgtacaatggcacctt

SEQ ID NO: 38950 - RNA, 21 nt, synthetic construct
  source 1..21: mol_type = other RNA
ccttctacggggttggtgcaa

SEQ ID NO: 38951 - RNA, 21 nt, synthetic construct
  source 1..21: mol_type = other RNA
gggttggtgcaaccttcccag

SEQ ID NO: 38952 - RNA, 21 nt, synthetic construct
  source 1..21: mol_type = other RNA
ggttggtgcaaccttcccagg

SEQ ID NO: 38953 - RNA, 21 nt, synthetic construct
  source 1..21: mol_type = other RNA
gttggtgcaaccttcccaggc

SEQ ID NO: 38954 - RNA, 21 nt, synthetic construct
  source 1..21: mol_type = other RNA
atgcctgcaacaatactacct

SEQ ID NO: 38955 - RNA, 21 nt, synthetic construct
  source 1..21: mol_type = other RNA
tgcaacaatactacctgtccc

SEQ ID NO: 38956 - RNA, 21 nt, synthetic construct
  source 1..21: mol_type = other RNA
tttgagtacaagagagtggcc

SEQ ID NO: 38957 - RNA, 21 nt, synthetic construct
  source 1..21: mol_type = other RNA
ctgtggggagtgcgtccagac

SEQ ID NO: 38958 - RNA, 21 nt, synthetic construct
  source 1..21: mol_type = other RNA
ggagtgcgtccagaccgcctg

SEQ ID NO: 38959 - RNA, 21 nt, synthetic construct
  source 1..21: mol_type = other RNA
ctgcctcacgcccgatggcca

SEQ ID NO: 38960 - RNA, 21 nt, synthetic construct
  source 1..21: mol_type = other RNA
ctcacgcccgatggccagcca

SEQ ID NO: 38961 - RNA, 21 nt, synthetic construct
  source 1..21: mol_type = other RNA
aatgaaacctgggtcaacagc

SEQ ID NO: 38962 - RNA, 21 nt, synthetic construct
  source 1..21: mol_type = other RNA
gacaactgcaccgtgtacctc

SEQ ID NO: 38963 - RNA, 21 nt, synthetic construct
  source 1..21: mol_type = other RNA
aactgcaccgtgtacctctgt

SEQ ID NO: 38964 - RNA, 21 nt, synthetic construct
  source 1..21: mol_type = other RNA
actgcaccgtgtacctctgtg

SEQ ID NO: 38965 - RNA, 21 nt, synthetic construct
  source 1..21: mol_type = other RNA
ctgagggtggagtccatttgc

SEQ ID NO: 38966 - RNA, 21 nt, synthetic construct
  source 1..21: mol_type = other RNA
tgagggtggagtccatttgct

SEQ ID NO: 38967 - RNA, 21 nt, synthetic construct
  source 1..21: mol_type = other RNA
cctgtcaagtccgcatcaaca

SEQ ID NO: 38968 - RNA, 21 nt, synthetic construct
  source 1..21: mol_type = other RNA
ctgtcaagtccgcatcaacac

SEQ ID NO: 38969 - RNA, 21 nt, synthetic construct
  source 1..21: mol_type = other RNA
accagggctgcgagaccgagg

SEQ ID NO: 38970 - RNA, 21 nt, synthetic construct
  source 1..21: mol_type = other RNA
caacatcaccttctgcgaggg

SEQ ID NO: 38971 - RNA, 21 nt, synthetic construct
  source 1..21: mol_type = other RNA
ctcctgccccggagcgtccaa

SEQ ID NO: 38972 - RNA, 21 nt, synthetic construct
  source 1..21: mol_type = other RNA
gcgtccaagtactcagcagag

SEQ ID NO: 38973 - RNA, 21 nt, synthetic construct
  source 1..21: mol_type = other RNA
ccaagtactcagcagaggccc

SEQ ID NO: 38974 - RNA, 21 nt, synthetic construct
  source 1..21: mol_type = other RNA
gtcctaacggctcagccatcc

SEQ ID NO: 38975 - RNA, 21 nt, synthetic construct
  source 1..21: mol_type = other RNA
taacggctcagccatcctgca

SEQ ID NO: 38976 - RNA, 21 nt, synthetic construct
  source 1..21: mol_type = other RNA
acctacacccacgtggatgag

SEQ ID NO: 38977 - RNA, 21 nt, synthetic construct
  source 1..21: mol_type = other RNA
cctacacccacgtggatgagt

SEQ ID NO: 38978 - RNA, 21 nt, synthetic construct
  source 1..21: mol_type = other RNA
tacacccacgtggatgagtgt

SEQ ID NO: 38979 - RNA, 21 nt, synthetic construct
  source 1..21: mol_type = other RNA
gcctgtgtgtggcaccccgcg

SEQ ID NO: 38980 - RNA, 21 nt, synthetic construct
  source 1..21: mol_type = other RNA
gcaggacccctttcgggaggg

SEQ ID NO: 38981 - RNA, 21 nt, synthetic construct
  source 1..21: mol_type = other RNA
cccctttcgggagggcgccac

SEQ ID NO: 38982 - RNA, 21 nt, synthetic construct
  source 1..21: mol_type = other RNA
cctttcgggagggcgccactc

SEQ ID NO: 38983 - RNA, 21 nt, synthetic construct
  source 1..21: mol_type = other RNA
tttcgggagggcgccactcag

SEQ ID NO: 38984 - RNA, 21 nt, synthetic construct
  source 1..21: mol_type = other RNA
ctcaggagtcctaccctggga

SEQ ID NO: 38985 - RNA, 21 nt, synthetic construct
  source 1..21: mol_type = other RNA
tatgtgtccctgccacggccg

SEQ ID NO: 38986 - RNA, 21 nt, synthetic construct
  source 1..21: mol_type = other RNA
cggattccagctggccacgtc

SEQ ID NO: 38987 - RNA, 21 nt, synthetic construct
  source 1..21: mol_type = other RNA
ccagctggccacgtccggccg

SEQ ID NO: 38988 - RNA, 21 nt, synthetic construct
  source 1..21: mol_type = other RNA
tgcgacaggcaaggcggccgc

SEQ ID NO: 38989 - RNA, 21 nt, synthetic construct
  source 1..21: mol_type = other RNA
gacaggcaaggcggccgcctg

SEQ ID NO: 38990 - RNA, 21 nt, synthetic construct
  source 1..21: mol_type = other RNA
agggtaactcagggctgaggt

SEQ ID NO: 38991 - RNA, 21 nt, synthetic construct
  source 1..21: mol_type = other RNA
ccacatgtgagcaccacggcc

SEQ ID NO: 38992 - RNA, 21 nt, synthetic construct
  source 1..21: mol_type = other RNA
ccacatgtgagcaccacggcc

SEQ ID NO: 38993 - RNA, 21 nt, synthetic construct
  source 1..21: mol_type = other RNA
ccacatgtgagcaccacggcc

SEQ ID NO: 38994 - RNA, 21 nt, synthetic construct
  source 1..21: mol_type = other RNA
cctacaagatacgctacatgg

SEQ ID NO: 38995 - RNA, 21 nt, synthetic construct
  source 1..21: mol_type = other RNA
gtcacgactacgagctgcggg

SEQ ID NO: 38996 - RNA, 21 nt, synthetic construct
  source 1..21: mol_type = other RNA
caaccgaaaagaccaccctat

SEQ ID NO: 38997 - RNA, 21 nt, synthetic construct
  source 1..21: mol_type = other RNA
cacggccactacgatcacagc

SEQ ID NO: 38998 - RNA, 21 nt, synthetic construct
  source 1..21: mol_type = other RNA
ctgtctgagaacgttctgcct

SEQ ID NO: 38999 - RNA, 21 nt, synthetic construct
  source 1..21: mol_type = other RNA
tctgtcacgactacgagctgc

SEQ ID NO: 39000 - RNA, 21 nt, synthetic construct
  source 1..21: mol_type = other RNA
gctgacattcctgtggaacgg

SEQ ID NO: 39001 - RNA, 21 nt, synthetic construct
  source 1..21: mol_type = other RNA
caggacccctttcgggagggc

SEQ ID NO: 39002 - RNA, 21 nt, synthetic construct
  source 1..21: mol_type = other RNA
gcccgcgcagcacggattcca

SEQ ID NO: 39003 - RNA, 21 nt, synthetic construct
  source 1..21: mol_type = other RNA
ccgcgcagcacggattccagc

SEQ ID NO: 39004 - RNA, 21 nt, synthetic construct
  source 1..21: mol_type = other RNA
gctgaggtcgcaacggccagg

SEQ ID NO: 39005 - RNA, 21 nt, synthetic construct
  source 1..21: mol_type = other RNA
cgcccgcgcagcacggattcc

SEQ ID NO: 39006 - RNA, 21 nt, synthetic construct
  source 1..21: mol_type = other RNA
cccctgcgtgggacccgatgg

SEQ ID NO: 39007 - RNA, 21 nt, synthetic construct
  source 1..21: mol_type = other RNA
accacacacgggcgatccctg

SEQ ID NO: 39008 - RNA, 21 nt, synthetic construct
  source 1..21: mol_type = other RNA
accacacacgggcgatccctg

SEQ ID NO: 39009 - RNA, 21 nt, synthetic construct
  source 1..21: mol_type = other RNA
accacacacgggcgatccctg

SEQ ID NO: 39010 - RNA, 21 nt, synthetic construct
  source 1..21: mol_type = other RNA
tccagagctcgcccgacaggc

SEQ ID NO: 39011 - RNA, 21 nt, synthetic construct
  source 1..21: mol_type = other RNA
acccagcactcgactccagcc

SEQ ID NO: 39012 - RNA, 21 nt, synthetic construct
  source 1..21: mol_type = other RNA
cggtgcccaccggatccacgg

SEQ ID NO: 39013 - RNA, 21 nt, synthetic construct
  source 1..21: mol_type = other RNA
acacacgggcgatccctgtcc

SEQ ID NO: 39014 - RNA, 21 nt, synthetic construct
  source 1..21: mol_type = other RNA
acccagcactcgactccagcc

SEQ ID NO: 39015 - RNA, 21 nt, synthetic construct
  source 1..21: mol_type = other RNA
cggtgcccaccggatccacgg

SEQ ID NO: 39016 - RNA, 21 nt, synthetic construct
  source 1..21: mol_type = other RNA
cacacacgggcgatccctgtc

SEQ ID NO: 39017 - RNA, 21 nt, synthetic construct
  source 1..21: mol_type = other RNA
cacacacgggcgatccctgtc

SEQ ID NO: 39018 - RNA, 21 nt, synthetic construct
  source 1..21: mol_type = other RNA
cacttgccgcggcctgagtga

SEQ ID NO: 39019 - RNA, 21 nt, synthetic construct
  source 1..21: mol_type = other RNA
acagagacgacaatgagcccc

SEQ ID NO: 39020 - RNA, 21 nt, synthetic construct
  source 1..21: mol_type = other RNA
aactaccacaaccacgggctt

SEQ ID NO: 39021 - RNA, 21 nt, synthetic construct
  source 1..21: mol_type = other RNA
gactaccacaaccacgggctt

SEQ ID NO: 39022 - RNA, 21 nt, synthetic construct
  source 1..21: mol_type = other RNA
aaagtgccgactaccacaacc

SEQ ID NO: 39023 - RNA, 21 nt, synthetic construct
  source 1..21: mol_type = other RNA
gactaccacaaccacgggctt

SEQ ID NO: 39024 - RNA, 21 nt, synthetic construct
  source 1..21: mol_type = other RNA
aaagtgccgactaccacaacc

SEQ ID NO: 39025 - RNA, 21 nt, synthetic construct
  source 1..21: mol_type = other RNA
gactaccacaaccacgggctt

SEQ ID NO: 39026 - RNA, 21 nt, synthetic construct
  source 1..21: mol_type = other RNA
aaagtgccgactaccacaacc

SEQ ID NO: 39027 - RNA, 21 nt, synthetic construct
  source 1..21: mol_type = other RNA
gactaccacaaccacgggctt

SEQ ID NO: 39028 - RNA, 21 nt, synthetic construct
  source 1..21: mol_type = other RNA
tgtacaagccatgcggcccca

SEQ ID NO: 39029 - RNA, 21 nt, synthetic construct
  source 1..21: mol_type = other RNA
ccagggctgcgagaccgaggt

SEQ ID NO: 39030 - RNA, 21 nt, synthetic construct
  source 1..21: mol_type = other RNA
agcacggattccagctggcca

SEQ ID NO: 39031 - RNA, 21 nt, synthetic construct
  source 1..21: mol_type = other RNA
acggcctcccggccttcaacg

SEQ ID NO: 39032 - RNA, 21 nt, synthetic construct
  source 1..21: mol_type = other RNA
caggacctacagctaccagga

SEQ ID NO: 39033 - RNA, 21 nt, synthetic construct
  source 1..21: mol_type = other RNA
cttcaagatgtgctacaacta

SEQ ID NO: 39034 - RNA, 21 nt, synthetic construct
  source 1..21: mol_type = other RNA
acgacaatgagccccttgact

SEQ ID NO: 39035 - RNA, 21 nt, synthetic construct
  source 1..21: mol_type = other RNA
caactaccacaaccacgggct

SEQ ID NO: 39036 - RNA, 21 nt, synthetic construct
  source 1..21: mol_type = other RNA
catccccccagtgctgaccac

SEQ ID NO: 39037 - RNA, 21 nt, synthetic construct
  source 1..21: mol_type = other RNA
ccacacacgggcgatccctgc

SEQ ID NO: 39038 - RNA, 21 nt, synthetic construct
  source 1..21: mol_type = other RNA
acacggtgcgcacagcctgga

SEQ ID NO: 39039 - RNA, 21 nt, synthetic construct
  source 1..21: mol_type = other RNA
tatccccccagtgctgaccac

SEQ ID NO: 39040 - RNA, 21 nt, synthetic construct
  source 1..21: mol_type = other RNA
ccacacacgggcgatccctgt

SEQ ID NO: 39041 - RNA, 21 nt, synthetic construct
  source 1..21: mol_type = other RNA
acacggtgcgcacagcctgga

SEQ ID NO: 39042 - RNA, 21 nt, synthetic construct
  source 1..21: mol_type = other RNA
ttccacggggacttcccacac

SEQ ID NO: 39043 - RNA, 21 nt, synthetic construct
  source 1..21: mol_type = other RNA
cagtccaaggactgcaaccac

SEQ ID NO: 39044 - RNA, 21 nt, synthetic construct
  source 1..21: mol_type = other RNA
ctttacacccatcccctcctt

SEQ ID NO: 39045 - RNA, 21 nt, synthetic construct
  source 1..21: mol_type = other RNA
cacccttgggaccaccgggac

SEQ ID NO: 39046 - RNA, 21 nt, synthetic construct
  source 1..21: mol_type = other RNA
catccccccagtgctgaccac

SEQ ID NO: 39047 - RNA, 21 nt, synthetic construct
  source 1..21: mol_type = other RNA
accacacacgggcggtccctg

SEQ ID NO: 39048 - RNA, 21 nt, synthetic construct
  source 1..21: mol_type = other RNA
acacggtgcgcacagcctgga

SEQ ID NO: 39049 - RNA, 21 nt, synthetic construct
  source 1..21: mol_type = other RNA
tatccccccagtgctgaccac

SEQ ID NO: 39050 - RNA, 21 nt, synthetic construct
  source 1..21: mol_type = other RNA
ccacacacgggcgatccctgt

SEQ ID NO: 39051 - RNA, 21 nt, synthetic construct
  source 1..21: mol_type = other RNA
acacggtgcgcacagcctgga

SEQ ID NO: 39052 - RNA, 21 nt, synthetic construct
  source 1..21: mol_type = other RNA
ttccacggggacttcccacac

SEQ ID NO: 39053 - RNA, 21 nt, synthetic construct
  source 1..21: mol_type = other RNA
cagtccaaggactgcaaccac

SEQ ID NO: 39054 - RNA, 21 nt, synthetic construct
  source 1..21: mol_type = other RNA
cacccttgggaccaccgggac

SEQ ID NO: 39055 - RNA, 21 nt, synthetic construct
  source 1..21: mol_type = other RNA
aactccagggacaacacccat

SEQ ID NO: 39056 - RNA, 21 nt, synthetic construct
  source 1..21: mol_type = other RNA
cagtccaaggactgcaaccac

SEQ ID NO: 39057 - RNA, 21 nt, synthetic construct
  source 1..21: mol_type = other RNA
ctttacacccatcccctcctc

SEQ ID NO: 39058 - RNA, 21 nt, synthetic construct
  source 1..21: mol_type = other RNA
ggagggcctgatcctgtttga

SEQ ID NO: 39059 - RNA, 21 nt, synthetic construct
  source 1..21: mol_type = other RNA
cgcctgcatcagcgaccactg

SEQ ID NO: 39060 - RNA, 21 nt, synthetic construct
  source 1..21: mol_type = other RNA
ctgcaggggccgccttgaggt

SEQ ID NO: 39061 - RNA, 21 nt, synthetic construct
  source 1..21: mol_type = other RNA
ccatgcggccccatacagcct

SEQ ID NO: 39062 - RNA, 21 nt, synthetic construct
  source 1..21: mol_type = other RNA
tgccacctgcaactctaggaa

SEQ ID NO: 39063 - RNA, 21 nt, synthetic construct
  source 1..21: mol_type = other RNA
cacacatgggcatctgcgtgc

SEQ ID NO: 39064 - RNA, 21 nt, synthetic construct
  source 1..21: mol_type = other RNA
tcccggggagcggtgggtcag

SEQ ID NO: 39065 - RNA, 21 nt, synthetic construct
  source 1..21: mol_type = other RNA
cggcttcgtaaccgtgaccag

SEQ ID NO: 39066 - RNA, 21 nt, synthetic construct
  source 1..21: mol_type = other RNA
agggtggagtccatttgctga

SEQ ID NO: 39067 - RNA, 21 nt, synthetic construct
  source 1..21: mol_type = other RNA
caccagggctgcgagaccgag

SEQ ID NO: 39068 - RNA, 21 nt, synthetic construct
  source 1..21: mol_type = other RNA
cgcaacggccaggtcagagag

SEQ ID NO: 39069 - RNA, 21 nt, synthetic construct
  source 1..21: mol_type = other RNA
acccagcactcgactccagcc

SEQ ID NO: 39070 - RNA, 21 nt, synthetic construct
  source 1..21: mol_type = other RNA
cggtgcccaccggatccacgg

SEQ ID NO: 39071 - RNA, 21 nt, synthetic construct
  source 1..21: mol_type = other RNA
acacacgggcgatccctgtcc

SEQ ID NO: 39072 - RNA, 21 nt, synthetic construct
  source 1..21: mol_type = other RNA
acccagcactcgactccagcc

SEQ ID NO: 39073 - RNA, 21 nt, synthetic construct
  source 1..21: mol_type = other RNA
ggacgccctggaacaaactaa

SEQ ID NO: 39074 - RNA, 21 nt, synthetic construct
  source 1..21: mol_type = other RNA
ctacgccgaggcctagtgggc

SEQ ID NO: 39075 - RNA, 21 nt, synthetic construct
  source 1..21: mol_type = other RNA
tggtacaatgggcaccgccca

SEQ ID NO: 39076 - RNA, 21 nt, synthetic construct
  source 1..21: mol_type = other RNA
cggtgcccaccggatccacgg

SEQ ID NO: 39077 - RNA, 21 nt, synthetic construct
  source 1..21: mol_type = other RNA
tggaccacgtggaccgtccca

SEQ ID NO: 39078 - RNA, 21 nt, synthetic construct
  source 1..21: mol_type = other RNA
ccacgagcctggcgccaacac

SEQ ID NO: 39079 - RNA, 21 nt, synthetic construct
  source 1..21: mol_type = other RNA
ggtgaaaccggccccagaagg

SEQ ID NO: 39080 - RNA, 21 nt, synthetic construct
  source 1..21: mol_type = other RNA
ccgcctatcacagaccaccac

SEQ ID NO: 39081 - RNA, 21 nt, synthetic construct
  source 1..21: mol_type = other RNA
ccgcctatcacagaccaccac

SEQ ID NO: 39082 - RNA, 21 nt, synthetic construct
  source 1..21: mol_type = other RNA
ccgcctatcacagaccaccac

SEQ ID NO: 39083 - RNA, 21 nt, synthetic construct
  source 1..21: mol_type = other RNA
ccgcctatcacagaccaccac

SEQ ID NO: 39084 - RNA, 21 nt, synthetic construct
  source 1..21: mol_type = other RNA
ccgcctatcacagaccaccac

SEQ ID NO: 39085 - RNA, 21 nt, synthetic construct
  source 1..21: mol_type = other RNA
ttccctgccacatgtgtacct

SEQ ID NO: 39086 - RNA, 21 nt, synthetic construct
  source 1..21: mol_type = other RNA
tttcctaaatttcccggggag

SEQ ID NO: 39087 - RNA, 21 nt, synthetic construct
  source 1..21: mol_type = other RNA
ggcggggactttgacacctac

SEQ ID NO: 39088 - RNA, 21 nt, synthetic construct
  source 1..21: mol_type = other RNA
ggcggggactttgacacctac

SEQ ID NO: 39089 - RNA, 21 nt, synthetic construct
  source 1..21: mol_type = other RNA
ggcggggactttgacacctac

SEQ ID NO: 39090 - RNA, 21 nt, synthetic construct
  source 1..21: mol_type = other RNA
ggcggggactttgacacctac

SEQ ID NO: 39091 - RNA, 21 nt, synthetic construct
  source 1..21: mol_type = other RNA
cgaccactgcaggggacgtgc

SEQ ID NO: 39092 - RNA, 21 nt, synthetic construct
  source 1..21: mol_type = other RNA
cacctccacagtgcttaccgc

SEQ ID NO: 39093 - RNA, 21 nt, synthetic construct
  source 1..21: mol_type = other RNA
cacctccacagtgcttaccgc

SEQ ID NO: 39094 - RNA, 21 nt, synthetic construct
  source 1..21: mol_type = other RNA
aagagccgctgaccacgagcc

SEQ ID NO: 39095 - RNA, 21 nt, synthetic construct
  source 1..21: mol_type = other RNA
atgtgtccctgccacggccgg

SEQ ID NO: 39096 - RNA, 21 nt, synthetic construct
  source 1..21: mol_type = other RNA
ctgcgagaccgaggtcaacat

SEQ ID NO: 39097 - RNA, 21 nt, synthetic construct
  source 1..21: mol_type = other RNA
tcatcgagacccacgggatgg

SEQ ID NO: 39098 - RNA, 21 nt, synthetic construct
  source 1..21: mol_type = other RNA
tgtgctggctgacatcgagtg

SEQ ID NO: 39099 - RNA, 21 nt, synthetic construct
  source 1..21: mol_type = other RNA
cacccttccaacacgctcagc

SEQ ID NO: 39100 - RNA, 21 nt, synthetic construct
  source 1..21: mol_type = other RNA
acacctccacagtgcttaccg

SEQ ID NO: 39101 - RNA, 21 nt, synthetic construct
  source 1..21: mol_type = other RNA
ggccctctggcggggactttg

SEQ ID NO: 39102 - RNA, 21 nt, synthetic construct
  source 1..21: mol_type = other RNA
acacctccacagtgcttacca

SEQ ID NO: 39103 - RNA, 21 nt, synthetic construct
  source 1..21: mol_type = other RNA
ggccctctggcggggactttg

SEQ ID NO: 39104 - RNA, 21 nt, synthetic construct
  source 1..21: mol_type = other RNA
acacctccacagtgcttacca

SEQ ID NO: 39105 - RNA, 21 nt, synthetic construct
  source 1..21: mol_type = other RNA
ggccctctggcggggactttg

SEQ ID NO: 39106 - RNA, 21 nt, synthetic construct
  source 1..21: mol_type = other RNA
ggacccaccctacaagatacg

SEQ ID NO: 39107 - RNA, 21 nt, synthetic construct
  source 1..21: mol_type = other RNA
gggactgcaaccgcccttcca

SEQ ID NO: 39108 - RNA, 21 nt, synthetic construct
  source 1..21: mol_type = other RNA
cgggcgatccctgccccccag

SEQ ID NO: 39109 - RNA, 21 nt, synthetic construct
  source 1..21: mol_type = other RNA
ccaccgagtcacccccttctc

SEQ ID NO: 39110 - RNA, 21 nt, synthetic construct
  source 1..21: mol_type = other RNA
gggactgcaaccgcccttcca

SEQ ID NO: 39111 - RNA, 21 nt, synthetic construct
  source 1..21: mol_type = other RNA
aggaccaccgagtcaccccct

SEQ ID NO: 39112 - RNA, 21 nt, synthetic construct
  source 1..21: mol_type = other RNA
ccaccgagtcacccccttctc

SEQ ID NO: 39113 - RNA, 21 nt, synthetic construct
  source 1..21: mol_type = other RNA
gggactgcaaccgcccttcca

SEQ ID NO: 39114 - RNA, 21 nt, synthetic construct
  source 1..21: mol_type = other RNA
aggaccaccgagtcaccccct

SEQ ID NO: 39115 - RNA, 21 nt, synthetic construct
  source 1..21: mol_type = other RNA
ccaccgagtcacccccttctc

SEQ ID NO: 39116 - RNA, 21 nt, synthetic construct
  source 1..21: mol_type = other RNA
gggactgcaaccgcccttcca

SEQ ID NO: 39117 - RNA, 21 nt, synthetic construct
  source 1..21: mol_type = other RNA
aggaccaccgagtcaccccct

SEQ ID NO: 39118 - RNA, 21 nt, synthetic construct
  source 1..21: mol_type = other RNA
cccaccggttccacggccacc

SEQ ID NO: 39119 - RNA, 21 nt, synthetic construct
  source 1..21: mol_type = other RNA
gaagctgcgacaggcaaggcg

SEQ ID NO: 39120 - RNA, 21 nt, synthetic construct
  source 1..21: mol_type = other RNA
accatggatggcggtgccccg

SEQ ID NO: 39121 - RNA, 21 nt, synthetic construct
  source 1..21: mol_type = other RNA
gcgggggctgatgtgcgccaa

SEQ ID NO: 39122 - RNA, 21 nt, synthetic construct
  source 1..21: mol_type = other RNA
taccagcgttacacccatccc

SEQ ID NO: 39123 - RNA, 21 nt, synthetic construct
  source 1..21: mol_type = other RNA
caggaccaccgagtcaccccc

SEQ ID NO: 39124 - RNA, 21 nt, synthetic construct
  source 1..21: mol_type = other RNA
caggaccaccgagtcaccccc

SEQ ID NO: 39125 - RNA, 21 nt, synthetic construct
  source 1..21: mol_type = other RNA
caggaccaccgagtcaccccc

SEQ ID NO: 39126 - RNA, 21 nt, synthetic construct
  source 1..21: mol_type = other RNA
taccagcgttacacccatccc

SEQ ID NO: 39127 - RNA, 21 nt, synthetic construct
  source 1..21: mol_type = other RNA
ccgcgccctcagcatccacta

SEQ ID NO: 39128 - RNA, 21 nt, synthetic construct
  source 1..21: mol_type = other RNA
aggtgcaaccggtggcctgtg

SEQ ID NO: 39129 - RNA, 21 nt, synthetic construct
  source 1..21: mol_type = other RNA
agcgcgtgccggacgctggtg

SEQ ID NO: 39130 - RNA, 21 nt, synthetic construct
  source 1..21: mol_type = other RNA
ggcaactgcacggacgaggag

SEQ ID NO: 39131 - RNA, 21 nt, synthetic construct
  source 1..21: mol_type = other RNA
tccacctatgatgagaaactc

SEQ ID NO: 39132 - RNA, 21 nt, synthetic construct
  source 1..21: mol_type = other RNA
ccacctatgatgagaaactct

SEQ ID NO: 39133 - RNA, 21 nt, synthetic construct
  source 1..21: mol_type = other RNA
cagcttcaccgtgctggctga

SEQ ID NO: 39134 - RNA, 21 nt, synthetic construct
  source 1..21: mol_type = other RNA
ccactcatgcaggtgtttgtc

SEQ ID NO: 39135 - RNA, 21 nt, synthetic construct
  source 1..21: mol_type = other RNA
ctgtgtgcccgcccaggagtg

SEQ ID NO: 39136 - RNA, 21 nt, synthetic construct
  source 1..21: mol_type = other RNA
tgggggctgcattgccgagga

SEQ ID NO: 39137 - RNA, 21 nt, synthetic construct
  source 1..21: mol_type = other RNA
ggaaccggaggtgggagtgca

SEQ ID NO: 39138 - RNA, 21 nt, synthetic construct
  source 1..21: mol_type = other RNA
tcctggtcatcgagacccacg

SEQ ID NO: 39139 - RNA, 21 nt, synthetic construct
  source 1..21: mol_type = other RNA
ctcgggtggcgactgcgagtg

SEQ ID NO: 39140 - RNA, 21 nt, synthetic construct
  source 1..21: mol_type = other RNA
cacccagtggcatccagtgcg

SEQ ID NO: 39141 - RNA, 21 nt, synthetic construct
  source 1..21: mol_type = other RNA
cagctaccaggacgtcatcta

SEQ ID NO: 39142 - RNA, 21 nt, synthetic construct
  source 1..21: mol_type = other RNA
gatgggcttggcgcctgcttg

SEQ ID NO: 39143 - RNA, 21 nt, synthetic construct
  source 1..21: mol_type = other RNA
tctcagaaggactgacatccc

SEQ ID NO: 39144 - RNA, 21 nt, synthetic construct
  source 1..21: mol_type = other RNA
cagggacgacggggagcttgg

SEQ ID NO: 39145 - RNA, 21 nt, synthetic construct
  source 1..21: mol_type = other RNA
ccatcccggggaccacccaca

SEQ ID NO: 39146 - RNA, 21 nt, synthetic construct
  source 1..21: mol_type = other RNA
cccacaccctagcagcaacca

SEQ ID NO: 39147 - RNA, 21 nt, synthetic construct
  source 1..21: mol_type = other RNA
caccccgggccacaccacggc

SEQ ID NO: 39148 - RNA, 21 nt, synthetic construct
  source 1..21: mol_type = other RNA
cacctccacagtgcttaccac

SEQ ID NO: 39149 - RNA, 21 nt, synthetic construct
  source 1..21: mol_type = other RNA
ccatcccggggaccacccaca

SEQ ID NO: 39150 - RNA, 21 nt, synthetic construct
  source 1..21: mol_type = other RNA
tccactccagggacgacctgg

SEQ ID NO: 39151 - RNA, 21 nt, synthetic construct
  source 1..21: mol_type = other RNA
accagctttacacccatcccc

SEQ ID NO: 39152 - RNA, 21 nt, synthetic construct
  source 1..21: mol_type = other RNA
cacctccacagtgcttaccac

SEQ ID NO: 39153 - RNA, 21 nt, synthetic construct
  source 1..21: mol_type = other RNA
ccatcccggggaccacccaca

SEQ ID NO: 39154 - RNA, 21 nt, synthetic construct
  source 1..21: mol_type = other RNA
ccgtgcggccggaggggcagt

SEQ ID NO: 39155 - RNA, 21 nt, synthetic construct
  source 1..21: mol_type = other RNA
cacctccacagtgcttaccac

SEQ ID NO: 39156 - RNA, 21 nt, synthetic construct
  source 1..21: mol_type = other RNA
caccccgggccacaccacggc

SEQ ID NO: 39157 - RNA, 21 nt, synthetic construct
  source 1..21: mol_type = other RNA
ccatcccggggaccacccaca

SEQ ID NO: 39158 - RNA, 21 nt, synthetic construct
  source 1..21: mol_type = other RNA
accagctttacacccatcccc

SEQ ID NO: 39159 - RNA, 21 nt, synthetic construct
  source 1..21: mol_type = other RNA
aatccacacctcctctactcc

SEQ ID NO: 39160 - RNA, 21 nt, synthetic construct
  source 1..21: mol_type = other RNA
atccacacctcctctactcca

SEQ ID NO: 39161 - RNA, 21 nt, synthetic construct
  source 1..21: mol_type = other RNA
caagggccaccaattccacgg

SEQ ID NO: 39162 - RNA, 21 nt, synthetic construct
  source 1..21: mol_type = other RNA
cactgccgccagttgcaagga

SEQ ID NO: 39163 - RNA, 21 nt, synthetic construct
  source 1..21: mol_type = other RNA
gtgtctagcacacccaccccc

SEQ ID NO: 39164 - RNA, 21 nt, synthetic construct
  source 1..21: mol_type = other RNA
cgaggtgcaaccggtggcctg

SEQ ID NO: 39165 - RNA, 21 nt, synthetic construct
  source 1..21: mol_type = other RNA
atttcccggggagcggtgggt

SEQ ID NO: 39166 - RNA, 21 nt, synthetic construct
  source 1..21: mol_type = other RNA
ggtcagcaactgccagtcctg

SEQ ID NO: 39167 - RNA, 21 nt, synthetic construct
  source 1..21: mol_type = other RNA
agtcctgcgtgtgtgacgagg

SEQ ID NO: 39168 - RNA, 21 nt, synthetic construct
  source 1..21: mol_type = other RNA
ccttccgctgcagacctcagc

SEQ ID NO: 39169 - RNA, 21 nt, synthetic construct
  source 1..21: mol_type = other RNA
cagccagtccagctgaatgaa

SEQ ID NO: 39170 - RNA, 21 nt, synthetic construct
  source 1..21: mol_type = other RNA
acccctttcgggagggcgcca

SEQ ID NO: 39171 - RNA, 21 nt, synthetic construct
  source 1..21: mol_type = other RNA
tgacattcctgtggaacggag

SEQ ID NO: 39172 - RNA, 21 nt, synthetic construct
  source 1..21: mol_type = other RNA
aaccggtggcctgtgcgacct

SEQ ID NO: 39173 - RNA, 21 nt, synthetic construct
  source 1..21: mol_type = other RNA
acacctccacagtgcttacca

SEQ ID NO: 39174 - RNA, 21 nt, synthetic construct
  source 1..21: mol_type = other RNA
ggccctctggcggggactttg

SEQ ID NO: 39175 - RNA, 21 nt, synthetic construct
  source 1..21: mol_type = other RNA
acacctccacagtgcttaccg

SEQ ID NO: 39176 - RNA, 21 nt, synthetic construct
  source 1..21: mol_type = other RNA
ccacgtggaccgtcccagcac

SEQ ID NO: 39177 - RNA, 21 nt, synthetic construct
  source 1..21: mol_type = other RNA
ggtttcctaaatttcccgggg

SEQ ID NO: 39178 - RNA, 21 nt, synthetic construct
  source 1..21: mol_type = other RNA
acacagaccagtggtactccc

SEQ ID NO: 39179 - RNA, 21 nt, synthetic construct
  source 1..21: mol_type = other RNA
acacagaccagtggtactccc

SEQ ID NO: 39180 - RNA, 21 nt, synthetic construct
  source 1..21: mol_type = other RNA
acacagaccagtggtactccc

SEQ ID NO: 39181 - RNA, 21 nt, synthetic construct
  source 1..21: mol_type = other RNA
acacagaccagtggtactccc

SEQ ID NO: 39182 - RNA, 21 nt, synthetic construct
  source 1..21: mol_type = other RNA
acacagaccagtggtactccc

SEQ ID NO: 39183 - RNA, 21 nt, synthetic construct
  source 1..21: mol_type = other RNA
cctgcgtgggacccgatgggt

SEQ ID NO: 39184 - RNA, 21 nt, synthetic construct
  source 1..21: mol_type = other RNA
ggctccgtcctcatcaatggg

SEQ ID NO: 39185 - RNA, 21 nt, synthetic construct
  source 1..21: mol_type = other RNA
cactgctgtctgagaacgttc

SEQ ID NO: 39186 - RNA, 21 nt, synthetic construct
  source 1..21: mol_type = other RNA
cacggccatccgggtccaagc

SEQ ID NO: 39187 - RNA, 21 nt, synthetic construct
  source 1..21: mol_type = other RNA
gcgggaacttcgacgacaatg

SEQ ID NO: 39188 - RNA, 21 nt, synthetic construct
  source 1..21: mol_type = other RNA
cactgcaggggacgtgccaca

SEQ ID NO: 39189 - RNA, 21 nt, synthetic construct
  source 1..21: mol_type = other RNA
tcggcccccataaccacggtg

SEQ ID NO: 39190 - RNA, 21 nt, synthetic construct
  source 1..21: mol_type = other RNA
tcggcccccataaccacggtg

SEQ ID NO: 39191 - RNA, 21 nt, synthetic construct
  source 1..21: mol_type = other RNA
tcggcccccataaccacggtg

SEQ ID NO: 39192 - RNA, 21 nt, synthetic construct
  source 1..21: mol_type = other RNA
ggccggcaactgcacggacga

SEQ ID NO: 39193 - RNA, 21 nt, synthetic construct
  source 1..21: mol_type = other RNA
gggaacttcgacgacaatgcc

SEQ ID NO: 39194 - RNA, 21 nt, synthetic construct
  source 1..21: mol_type = other RNA
aaccactggatccacggccat

SEQ ID NO: 39195 - RNA, 21 nt, synthetic construct
  source 1..21: mol_type = other RNA
gagctgtaactgcacacccag

SEQ ID NO: 39196 - RNA, 21 nt, synthetic construct
  source 1..21: mol_type = other RNA
gtccactggatccacggccac

SEQ ID NO: 39197 - RNA, 21 nt, synthetic construct
  source 1..21: mol_type = other RNA
cccctgggcctcgagtgccgt

SEQ ID NO: 39198 - RNA, 21 nt, synthetic construct
  source 1..21: mol_type = other RNA
gtccactggatccacggccac

SEQ ID NO: 39199 - RNA, 21 nt, synthetic construct
  source 1..21: mol_type = other RNA
acaaccagaggttccacggtg

SEQ ID NO: 39200 - RNA, 21 nt, synthetic construct
  source 1..21: mol_type = other RNA
cccaataaccacggtggtgac

SEQ ID NO: 39201 - RNA, 21 nt, synthetic construct
  source 1..21: mol_type = other RNA
cccctgggcctcgagtgccgt

SEQ ID NO: 39202 - RNA, 21 nt, synthetic construct
  source 1..21: mol_type = other RNA
cccctgggcctcgagtgccgt

SEQ ID NO: 39203 - RNA, 21 nt, synthetic construct
  source 1..21: mol_type = other RNA
gtccactggatccacggccac

SEQ ID NO: 39204 - RNA, 21 nt, synthetic construct
  source 1..21: mol_type = other RNA
cgggaacttcgacgacaatgc

SEQ ID NO: 39205 - RNA, 21 nt, synthetic construct
  source 1..21: mol_type = other RNA
ccggccggcaactgcacggac

SEQ ID NO: 39206 - RNA, 21 nt, synthetic construct
  source 1..21: mol_type = other RNA
ttaaggcggtggcgagagggc

SEQ ID NO: 39207 - RNA, 21 nt, synthetic construct
  source 1..21: mol_type = other RNA
gccccgtgacggtcaccccct

SEQ ID NO: 39208 - RNA, 21 nt, synthetic construct
  source 1..21: mol_type = other RNA
tgtgttcgtacaatggcacct

SEQ ID NO: 39209 - RNA, 21 nt, synthetic construct
  source 1..21: mol_type = other RNA
cacgcactggtggacagcact

SEQ ID NO: 39210 - RNA, 21 nt, synthetic construct
  source 1..21: mol_type = other RNA
tcttcaacgcacacatgggca

SEQ ID NO: 39211 - RNA, 21 nt, synthetic construct
  source 1..21: mol_type = other RNA
gcattgccgaggaggactgcc

SEQ ID NO: 39212 - RNA, 21 nt, synthetic construct
  source 1..21: mol_type = other RNA
acgggcgatccctgtccccca

SEQ ID NO: 39213 - RNA, 21 nt, synthetic construct
  source 1..21: mol_type = other RNA
acgggcgatccctgtccccca

SEQ ID NO: 39214 - RNA, 21 nt, synthetic construct
  source 1..21: mol_type = other RNA
gagtcctaccctgggagagcc

SEQ ID NO: 39215 - RNA, 21 nt, synthetic construct
  source 1..21: mol_type = other RNA
caccatggatggcggtgcccc

SEQ ID NO: 39216 - RNA, 21 nt, synthetic construct
  source 1..21: mol_type = other RNA
gccccgacgtcctcgcccacc

SEQ ID NO: 39217 - RNA, 21 nt, synthetic construct
  source 1..21: mol_type = other RNA
gcactgcgtacctggccgcct

SEQ ID NO: 39218 - RNA, 21 nt, synthetic construct
  source 1..21: mol_type = other RNA
gccagccgcggaactggaggt

SEQ ID NO: 39219 - RNA, 21 nt, synthetic construct
  source 1..21: mol_type = other RNA
caagcggacggcggcgtgttc

SEQ ID NO: 39220 - RNA, 21 nt, synthetic construct
  source 1..21: mol_type = other RNA
acgacttcacggccctcagcg

SEQ ID NO: 39221 - RNA, 21 nt, synthetic construct
  source 1..21: mol_type = other RNA
tgaccgatcccaacagtgcct

SEQ ID NO: 39222 - RNA, 21 nt, synthetic construct
  source 1..21: mol_type = other RNA
tgggaagctaagctgcctggg

SEQ ID NO: 39223 - RNA, 21 nt, synthetic construct
  source 1..21: mol_type = other RNA
tgtgcacaacgaggccaccta

SEQ ID NO: 39224 - RNA, 21 nt, synthetic construct
  source 1..21: mol_type = other RNA
ggacaggacctacagctacca

SEQ ID NO: 39225 - RNA, 21 nt, synthetic construct
  source 1..21: mol_type = other RNA
cagccacaacgccattcacct

SEQ ID NO: 39226 - RNA, 21 nt, synthetic construct
  source 1..21: mol_type = other RNA
ccacaccctagcagcaaccac

SEQ ID NO: 39227 - RNA, 21 nt, synthetic construct
  source 1..21: mol_type = other RNA
ttgacacctactccaacatcc

SEQ ID NO: 39228 - RNA, 21 nt, synthetic construct
  source 1..21: mol_type = other RNA
ttgacacctactccaacatcc

SEQ ID NO: 39229 - RNA, 21 nt, synthetic construct
  source 1..21: mol_type = other RNA
ttgacacctactccaacatcc

SEQ ID NO: 39230 - RNA, 21 nt, synthetic construct
  source 1..21: mol_type = other RNA
ttgacacctactccaacatcc

SEQ ID NO: 39231 - RNA, 21 nt, synthetic construct
  source 1..21: mol_type = other RNA
ccccgactggcacacccccca

SEQ ID NO: 39232 - RNA, 21 nt, synthetic construct
  source 1..21: mol_type = other RNA
gaggcttacgcagagctctgc

SEQ ID NO: 39233 - RNA, 21 nt, synthetic construct
  source 1..21: mol_type = other RNA
cccgagacggtgtgcgtgtgc

SEQ ID NO: 39234 - RNA, 21 nt, synthetic construct
  source 1..21: mol_type = other RNA
cacccacgtggatgagtgtgg

SEQ ID NO: 39235 - RNA, 21 nt, synthetic construct
  source 1..21: mol_type = other RNA
cccgagcgcgtgccggacgct

SEQ ID NO: 39236 - RNA, 21 nt, synthetic construct
  source 1..21: mol_type = other RNA
acaccatggatggcggtgccc

SEQ ID NO: 39237 - RNA, 21 nt, synthetic construct
  source 1..21: mol_type = other RNA
gcacctggggtgacttccact

SEQ ID NO: 39238 - RNA, 21 nt, synthetic construct
  source 1..21: mol_type = other RNA
gtccaacggctccgtcctcat

SEQ ID NO: 39239 - RNA, 21 nt, synthetic construct
  source 1..21: mol_type = other RNA
catccggctggtgctgacatt

SEQ ID NO: 39240 - RNA, 21 nt, synthetic construct
  source 1..21: mol_type = other RNA
ccagccgcggaactggaggtg

SEQ ID NO: 39241 - RNA, 21 nt, synthetic construct
  source 1..21: mol_type = other RNA
agccgcggaactggaggtgcc

SEQ ID NO: 39242 - RNA, 21 nt, synthetic construct
  source 1..21: mol_type = other RNA
cctacagcccgggcacctcct

SEQ ID NO: 39243 - RNA, 21 nt, synthetic construct
  source 1..21: mol_type = other RNA
cttcatcgtggtgcagacagg

SEQ ID NO: 39244 - RNA, 21 nt, synthetic construct
  source 1..21: mol_type = other RNA
tgcctgtgccaatgccaggaa

SEQ ID NO: 39245 - RNA, 21 nt, synthetic construct
  source 1..21: mol_type = other RNA
gcctgtgccaatgccaggaac

SEQ ID NO: 39246 - RNA, 21 nt, synthetic construct
  source 1..21: mol_type = other RNA
gctacgagctgatcctccaag

SEQ ID NO: 39247 - RNA, 21 nt, synthetic construct
  source 1..21: mol_type = other RNA
aagaccagcgtgttcatccga

SEQ ID NO: 39248 - RNA, 21 nt, synthetic construct
  source 1..21: mol_type = other RNA
gcgtgtgcctgcgactcgggt

SEQ ID NO: 39249 - RNA, 21 nt, synthetic construct
  source 1..21: mol_type = other RNA
tggcgactgcgagtgtttctg

SEQ ID NO: 39250 - RNA, 21 nt, synthetic construct
  source 1..21: mol_type = other RNA
acaccaccgatgggcttggcg

SEQ ID NO: 39251 - RNA, 21 nt, synthetic construct
  source 1..21: mol_type = other RNA
accgatgggcttggcgcctgc

SEQ ID NO: 39252 - RNA, 21 nt, synthetic construct
  source 1..21: mol_type = other RNA
ccaccgtgtgtgtccgcgagg

SEQ ID NO: 39253 - RNA, 21 nt, synthetic construct
  source 1..21: mol_type = other RNA
cggtcgacggcggccctcacc

SEQ ID NO: 39254 - RNA, 21 nt, synthetic construct
  source 1..21: mol_type = other RNA
tcgacggcggccctcacctcg

SEQ ID NO: 39255 - RNA, 21 nt, synthetic construct
  source 1..21: mol_type = other RNA
gctcgcccgacaggcacagcc

SEQ ID NO: 39256 - RNA, 21 nt, synthetic construct
  source 1..21: mol_type = other RNA
aggccgagaccagcacgccca

SEQ ID NO: 39257 - RNA, 21 nt, synthetic construct
  source 1..21: mol_type = other RNA
atgagccccttgactaacacc

SEQ ID NO: 39258 - RNA, 21 nt, synthetic construct
  source 1..21: mol_type = other RNA
gccccttgactaacaccacca

SEQ ID NO: 39259 - RNA, 21 nt, synthetic construct
  source 1..21: mol_type = other RNA
gaacagctcacactaccaaag

SEQ ID NO: 39260 - RNA, 21 nt, synthetic construct
  source 1..21: mol_type = other RNA
acagctcacactaccaaagtg

SEQ ID NO: 39261 - RNA, 21 nt, synthetic construct
  source 1..21: mol_type = other RNA
aggctccacggtgaccccctc

SEQ ID NO: 39262 - RNA, 21 nt, synthetic construct
  source 1..21: mol_type = other RNA
ccatccccccagtgctgacca

SEQ ID NO: 39263 - RNA, 21 nt, synthetic construct
  source 1..21: mol_type = other RNA
cacacccagcaagacccgcac

SEQ ID NO: 39264 - RNA, 21 nt, synthetic construct
  source 1..21: mol_type = other RNA
ccagctctacggccatgccct

SEQ ID NO: 39265 - RNA, 21 nt, synthetic construct
  source 1..21: mol_type = other RNA
agagccgagcactacagccac

SEQ ID NO: 39266 - RNA, 21 nt, synthetic construct
  source 1..21: mol_type = other RNA
ctacagccaccgtgacggtgc

SEQ ID NO: 39267 - RNA, 21 nt, synthetic construct
  source 1..21: mol_type = other RNA
ctggcaccccacatgtgagca

SEQ ID NO: 39268 - RNA, 21 nt, synthetic construct
  source 1..21: mol_type = other RNA
gcaccccacatgtgagcacca

SEQ ID NO: 39269 - RNA, 21 nt, synthetic construct
  source 1..21: mol_type = other RNA
ccccacatgtgagcaccacgg

SEQ ID NO: 39270 - RNA, 21 nt, synthetic construct
  source 1..21: mol_type = other RNA
acatgtgagcaccacggccac

SEQ ID NO: 39271 - RNA, 21 nt, synthetic construct
  source 1..21: mol_type = other RNA
gaacagctcacactaccaaag

SEQ ID NO: 39272 - RNA, 21 nt, synthetic construct
  source 1..21: mol_type = other RNA
acagctcacactaccaaagtg

SEQ ID NO: 39273 - RNA, 21 nt, synthetic construct
  source 1..21: mol_type = other RNA
tgctgactaccacaaccacgg

SEQ ID NO: 39274 - RNA, 21 nt, synthetic construct
  source 1..21: mol_type = other RNA
ctcaactccagggacaacacc

SEQ ID NO: 39275 - RNA, 21 nt, synthetic construct
  source 1..21: mol_type = other RNA
ctatccccccagtgctgacca

SEQ ID NO: 39276 - RNA, 21 nt, synthetic construct
  source 1..21: mol_type = other RNA
cacacccagcaagacccgcac

SEQ ID NO: 39277 - RNA, 21 nt, synthetic construct
  source 1..21: mol_type = other RNA
tcacccttgggaccaccggga

SEQ ID NO: 39278 - RNA, 21 nt, synthetic construct
  source 1..21: mol_type = other RNA
ccgggaccctcccagaacaga

SEQ ID NO: 39279 - RNA, 21 nt, synthetic construct
  source 1..21: mol_type = other RNA
tgtccacaatccacccctcct

SEQ ID NO: 39280 - RNA, 21 nt, synthetic construct
  source 1..21: mol_type = other RNA
cagtgctgaccacgaaggcca

SEQ ID NO: 39281 - RNA, 21 nt, synthetic construct
  source 1..21: mol_type = other RNA
ctacagccaccgtgacggtgc

SEQ ID NO: 39282 - RNA, 21 nt, synthetic construct
  source 1..21: mol_type = other RNA
ggcaactgctggcaccctcaa

SEQ ID NO: 39283 - RNA, 21 nt, synthetic construct
  source 1..21: mol_type = other RNA
gaacagctcacactaccaaag

SEQ ID NO: 39284 - RNA, 21 nt, synthetic construct
  source 1..21: mol_type = other RNA
acagctcacactaccaaagtg

SEQ ID NO: 39285 - RNA, 21 nt, synthetic construct
  source 1..21: mol_type = other RNA
aggctccacggtgaccccctc

SEQ ID NO: 39286 - RNA, 21 nt, synthetic construct
  source 1..21: mol_type = other RNA
ccatccccccagtgctgacca

SEQ ID NO: 39287 - RNA, 21 nt, synthetic construct
  source 1..21: mol_type = other RNA
cacacccagcaagacccgcac

SEQ ID NO: 39288 - RNA, 21 nt, synthetic construct
  source 1..21: mol_type = other RNA
ccacggtggtgaccacgggct

SEQ ID NO: 39289 - RNA, 21 nt, synthetic construct
  source 1..21: mol_type = other RNA
agagccgagcactacagccac

SEQ ID NO: 39290 - RNA, 21 nt, synthetic construct
  source 1..21: mol_type = other RNA
ctacagccaccgtgacggtgc

SEQ ID NO: 39291 - RNA, 21 nt, synthetic construct
  source 1..21: mol_type = other RNA
ctggcaccccacatgtgagca

SEQ ID NO: 39292 - RNA, 21 nt, synthetic construct
  source 1..21: mol_type = other RNA
gcaccccacatgtgagcacca

SEQ ID NO: 39293 - RNA, 21 nt, synthetic construct
  source 1..21: mol_type = other RNA
ccccacatgtgagcaccacgg

SEQ ID NO: 39294 - RNA, 21 nt, synthetic construct
  source 1..21: mol_type = other RNA
acatgtgagcaccacggccac

SEQ ID NO: 39295 - RNA, 21 nt, synthetic construct
  source 1..21: mol_type = other RNA
gaacagctcacactaccaaag

SEQ ID NO: 39296 - RNA, 21 nt, synthetic construct
  source 1..21: mol_type = other RNA
acagctcacactaccaaagtg

SEQ ID NO: 39297 - RNA, 21 nt, synthetic construct
  source 1..21: mol_type = other RNA
ccacacccacaaccagtggct

SEQ ID NO: 39298 - RNA, 21 nt, synthetic construct
  source 1..21: mol_type = other RNA
gtggctccacggtgaccccct

SEQ ID NO: 39299 - RNA, 21 nt, synthetic construct
  source 1..21: mol_type = other RNA
tggctccacggtgaccccctc

SEQ ID NO: 39300 - RNA, 21 nt, synthetic construct
  source 1..21: mol_type = other RNA
actcccccatcactgatcacc

SEQ ID NO: 39301 - RNA, 21 nt, synthetic construct
  source 1..21: mol_type = other RNA
ctcccccatcactgatcacca

SEQ ID NO: 39302 - RNA, 21 nt, synthetic construct
  source 1..21: mol_type = other RNA
ctcaactccagggacaacacc

SEQ ID NO: 39303 - RNA, 21 nt, synthetic construct
  source 1..21: mol_type = other RNA
ctatccccccagtgctgacca

SEQ ID NO: 39304 - RNA, 21 nt, synthetic construct
  source 1..21: mol_type = other RNA
cacacccagcaagacccgcac

SEQ ID NO: 39305 - RNA, 21 nt, synthetic construct
  source 1..21: mol_type = other RNA
ccacggtggtgaccacgggct

SEQ ID NO: 39306 - RNA, 21 nt, synthetic construct
  source 1..21: mol_type = other RNA
ccagctctacggccatgccct

SEQ ID NO: 39307 - RNA, 21 nt, synthetic construct
  source 1..21: mol_type = other RNA
ccacccttgggaccaccggga

SEQ ID NO: 39308 - RNA, 21 nt, synthetic construct
  source 1..21: mol_type = other RNA
ccgggaccctcccagaacaga

SEQ ID NO: 39309 - RNA, 21 nt, synthetic construct
  source 1..21: mol_type = other RNA
acagaccaccacacccgtggc

SEQ ID NO: 39310 - RNA, 21 nt, synthetic construct
  source 1..21: mol_type = other RNA
tgtccacaatccacccctcct

SEQ ID NO: 39311 - RNA, 21 nt, synthetic construct
  source 1..21: mol_type = other RNA
cagtgctgaccacgaaggcca

SEQ ID NO: 39312 - RNA, 21 nt, synthetic construct
  source 1..21: mol_type = other RNA
agagccgagcactacagccac

SEQ ID NO: 39313 - RNA, 21 nt, synthetic construct
  source 1..21: mol_type = other RNA
ctacagccaccgtgacggtgc

SEQ ID NO: 39314 - RNA, 21 nt, synthetic construct
  source 1..21: mol_type = other RNA
ctggcaccccacatgtgagca

SEQ ID NO: 39315 - RNA, 21 nt, synthetic construct
  source 1..21: mol_type = other RNA
gcaccccacatgtgagcacca

SEQ ID NO: 39316 - RNA, 21 nt, synthetic construct
  source 1..21: mol_type = other RNA
ccccacatgtgagcaccacgg

SEQ ID NO: 39317 - RNA, 21 nt, synthetic construct
  source 1..21: mol_type = other RNA
acatgtgagcaccacggccac

SEQ ID NO: 39318 - RNA, 21 nt, synthetic construct
  source 1..21: mol_type = other RNA
gggactgcaactgcccttcca

SEQ ID NO: 39319 - RNA, 21 nt, synthetic construct
  source 1..21: mol_type = other RNA
gaacagctcacactaccaaag

SEQ ID NO: 39320 - RNA, 21 nt, synthetic construct
  source 1..21: mol_type = other RNA
acagctcacactaccaaagtg

SEQ ID NO: 39321 - RNA, 21 nt, synthetic construct
  source 1..21: mol_type = other RNA
ccacacccacaaccagtggct

SEQ ID NO: 39322 - RNA, 21 nt, synthetic construct
  source 1..21: mol_type = other RNA
gtggctccacggtgaccccct

SEQ ID NO: 39323 - RNA, 21 nt, synthetic construct
  source 1..21: mol_type = other RNA
tggctccacggtgaccccctc

SEQ ID NO: 39324 - RNA, 21 nt, synthetic construct
  source 1..21: mol_type = other RNA
ctcaactccagggacaacacc

SEQ ID NO: 39325 - RNA, 21 nt, synthetic construct
  source 1..21: mol_type = other RNA
cagggacaacacccatcaccc

SEQ ID NO: 39326 - RNA, 21 nt, synthetic construct
  source 1..21: mol_type = other RNA
gtggaccgtcccagcacagac

SEQ ID NO: 39327 - RNA, 21 nt, synthetic construct
  source 1..21: mol_type = other RNA
caccatgacaagggccaccaa

SEQ ID NO: 39328 - RNA, 21 nt, synthetic construct
  source 1..21: mol_type = other RNA
tctggggacgacccggatcct

SEQ ID NO: 39329 - RNA, 21 nt, synthetic construct
  source 1..21: mol_type = other RNA
tgaccgcttccagggcgcctg

SEQ ID NO: 39330 - RNA, 21 nt, synthetic construct
  source 1..21: mol_type = other RNA
gcttccagggcgcctgtccca

SEQ ID NO: 39331 - RNA, 21 nt, synthetic construct
  source 1..21: mol_type = other RNA
gcacgctttgggaatctcagc

SEQ ID NO: 39332 - RNA, 21 nt, synthetic construct
  source 1..21: mol_type = other RNA
gcagccccggtgtctagcaca

SEQ ID NO: 39333 - RNA, 21 nt, synthetic construct
  source 1..21: mol_type = other RNA
agccccggtgtctagcacacc

SEQ ID NO: 39334 - RNA, 21 nt, synthetic construct
  source 1..21: mol_type = other RNA
tgagtgccacaaccttgtgcc

SEQ ID NO: 39335 - RNA, 21 nt, synthetic construct
  source 1..21: mol_type = other RNA
acgcctgcatcagcgaccact

SEQ ID NO: 39336 - RNA, 21 nt, synthetic construct
  source 1..21: mol_type = other RNA
ccactgcaggggccgccttga

SEQ ID NO: 39337 - RNA, 21 nt, synthetic construct
  source 1..21: mol_type = other RNA
acgcagagctctgccgcgccc

SEQ ID NO: 39338 - RNA, 21 nt, synthetic construct
  source 1..21: mol_type = other RNA
ccatacagcctgccacctgca

SEQ ID NO: 39339 - RNA, 21 nt, synthetic construct
  source 1..21: mol_type = other RNA
ttcagtgtcggtgcagtgcaa

SEQ ID NO: 39340 - RNA, 21 nt, synthetic construct
  source 1..21: mol_type = other RNA
ctgtgacgcccagggtcagcc

SEQ ID NO: 39341 - RNA, 21 nt, synthetic construct
  source 1..21: mol_type = other RNA
gggtcagcccccgccgtgcaa

SEQ ID NO: 39342 - RNA, 21 nt, synthetic construct
  source 1..21: mol_type = other RNA
ccgccagggcaggagtccatc

SEQ ID NO: 39343 - RNA, 21 nt, synthetic construct
  source 1..21: mol_type = other RNA
tccctgccacatgtgtacctg

SEQ ID NO: 39344 - RNA, 21 nt, synthetic construct
  source 1..21: mol_type = other RNA
gctgaatgaaacctgggtcaa

SEQ ID NO: 39345 - RNA, 21 nt, synthetic construct
  source 1..21: mol_type = other RNA
atgtggacaactgcaccgtgt

SEQ ID NO: 39346 - RNA, 21 nt, synthetic construct
  source 1..21: mol_type = other RNA
gtccaagtactcagcagaggc

SEQ ID NO: 39347 - RNA, 21 nt, synthetic construct
  source 1..21: mol_type = other RNA
cccgtgggtgaaaccggcccc

SEQ ID NO: 39348 - RNA, 21 nt, synthetic construct
  source 1..21: mol_type = other RNA
tccctgccacggccggagcgc

SEQ ID NO: 39349 - RNA, 21 nt, synthetic construct
  source 1..21: mol_type = other RNA
cgcgcagcacggattccagct

SEQ ID NO: 39350 - RNA, 21 nt, synthetic construct
  source 1..21: mol_type = other RNA
acttcaacgtccagctacgcc

SEQ ID NO: 39351 - RNA, 21 nt, synthetic construct
  source 1..21: mol_type = other RNA
gacggcggccctcacctcgca

SEQ ID NO: 39352 - RNA, 21 nt, synthetic construct
  source 1..21: mol_type = other RNA
cgaggacttcaacgtccagct

SEQ ID NO: 39353 - RNA, 21 nt, synthetic construct
  source 1..21: mol_type = other RNA
cccctgggcctcgagtgccgt

SEQ ID NO: 39354 - RNA, 21 nt, synthetic construct
  source 1..21: mol_type = other RNA
atccactggatccacggccac

SEQ ID NO: 39355 - RNA, 21 nt, synthetic construct
  source 1..21: mol_type = other RNA
gtccactggatccacggccac

SEQ ID NO: 39356 - RNA, 21 nt, synthetic construct
  source 1..21: mol_type = other RNA
gctgcgagaccgaggtcaaca

SEQ ID NO: 39357 - RNA, 21 nt, synthetic construct
  source 1..21: mol_type = other RNA
gcctgcgactcgggtggcgac

SEQ ID NO: 39358 - RNA, 21 nt, synthetic construct
  source 1..21: mol_type = other RNA
cctgtgtgtggcaccccgcgc

SEQ ID NO: 39359 - RNA, 21 nt, synthetic construct
  source 1..21: mol_type = other RNA
atggtgactgcagctacgttc

SEQ ID NO: 39360 - RNA, 21 nt, synthetic construct
  source 1..21: mol_type = other RNA
gggcgtacagctcagcgactg

SEQ ID NO: 39361 - RNA, 21 nt, synthetic construct
  source 1..21: mol_type = other RNA
tcctgccccggagcgtccaag

SEQ ID NO: 39362 - RNA, 21 nt, synthetic construct
  source 1..21: mol_type = other RNA
tgccccggagcgtccaagtac

SEQ ID NO: 39363 - RNA, 21 nt, synthetic construct
  source 1..21: mol_type = other RNA
gccgtgtgttcatgtacgggt

SEQ ID NO: 39364 - RNA, 21 nt, synthetic construct
  source 1..21: mol_type = other RNA
agctggatcccaaatacgcca

SEQ ID NO: 39365 - RNA, 21 nt, synthetic construct
  source 1..21: mol_type = other RNA
gccagggcacgacccgctgtc

SEQ ID NO: 39366 - RNA, 21 nt, synthetic construct
  source 1..21: mol_type = other RNA
gagccgagcactatagccacc

SEQ ID NO: 39367 - RNA, 21 nt, synthetic construct
  source 1..21: mol_type = other RNA
ggattccagctggccacgtcc

SEQ ID NO: 39368 - RNA, 21 nt, synthetic construct
  source 1..21: mol_type = other RNA
tgccccgagacggtgtgcgtg

SEQ ID NO: 39369 - RNA, 21 nt, synthetic construct
  source 1..21: mol_type = other RNA
gacaacaccacccacgggacc

SEQ ID NO: 39370 - RNA, 21 nt, synthetic construct
  source 1..21: mol_type = other RNA
cagagcggggactacatcaag

SEQ ID NO: 39371 - RNA, 21 nt, synthetic construct
  source 1..21: mol_type = other RNA
ccaagaaatgtgccgacagca

SEQ ID NO: 39372 - RNA, 21 nt, synthetic construct
  source 1..21: mol_type = other RNA
gagcgtcaccttcaatggcca

SEQ ID NO: 39373 - RNA, 21 nt, synthetic construct
  source 1..21: mol_type = other RNA
agcgtccaagtactcagcaga

SEQ ID NO: 39374 - RNA, 21 nt, synthetic construct
  source 1..21: mol_type = other RNA
tgctgtggggagtgcgtccag

SEQ ID NO: 39375 - RNA, 21 nt, synthetic construct
  source 1..21: mol_type = other RNA
tccagggacaacacctatccc

SEQ ID NO: 39376 - RNA, 21 nt, synthetic construct
  source 1..21: mol_type = other RNA
tccagggacaacacctatccc

SEQ ID NO: 39377 - RNA, 21 nt, synthetic construct
  source 1..21: mol_type = other RNA
tctgtccaagaaatgtgccga

SEQ ID NO: 39378 - RNA, 21 nt, synthetic construct
  source 1..21: mol_type = other RNA
cgtgacggtgcccaccggatc

SEQ ID NO: 39379 - RNA, 21 nt, synthetic construct
  source 1..21: mol_type = other RNA
cgtgacggtgcccaccggatc

SEQ ID NO: 39380 - RNA, 21 nt, synthetic construct
  source 1..21: mol_type = other RNA
cgtgacggtgcccaccggatc

SEQ ID NO: 39381 - RNA, 21 nt, synthetic construct
  source 1..21: mol_type = other RNA
cgtgacggtgcccaccggatc

SEQ ID NO: 39382 - RNA, 21 nt, synthetic construct
  source 1..21: mol_type = other RNA
catgagagagatccatgcacg

SEQ ID NO: 39383 - RNA, 21 nt, synthetic construct
  source 1..21: mol_type = other RNA
accacccacaccgccagagtg

SEQ ID NO: 39384 - RNA, 21 nt, synthetic construct
  source 1..21: mol_type = other RNA
tgtggggcggctcccactatt

SEQ ID NO: 39385 - RNA, 21 nt, synthetic construct
  source 1..21: mol_type = other RNA
gggcttggcgcctgcttgatc

SEQ ID NO: 39386 - RNA, 21 nt, synthetic construct
  source 1..21: mol_type = other RNA
gggagcttgggcacatggcgc

SEQ ID NO: 39387 - RNA, 21 nt, synthetic construct
  source 1..21: mol_type = other RNA
ggagcttgggcacatggcgcc

SEQ ID NO: 39388 - RNA, 21 nt, synthetic construct
  source 1..21: mol_type = other RNA
acagccagcaccgcttccaaa

SEQ ID NO: 39389 - RNA, 21 nt, synthetic construct
  source 1..21: mol_type = other RNA
caccacctggacccgcctatc

SEQ ID NO: 39390 - RNA, 21 nt, synthetic construct
  source 1..21: mol_type = other RNA
cacacctccacagtgcttacc

SEQ ID NO: 39391 - RNA, 21 nt, synthetic construct
  source 1..21: mol_type = other RNA
caccacctggacccgcctatc

SEQ ID NO: 39392 - RNA, 21 nt, synthetic construct
  source 1..21: mol_type = other RNA
cacacctccacagtgcttacc

SEQ ID NO: 39393 - RNA, 21 nt, synthetic construct
  source 1..21: mol_type = other RNA
agccccacatcggccccaata

SEQ ID NO: 39394 - RNA, 21 nt, synthetic construct
  source 1..21: mol_type = other RNA
cacacctccacagtgcttacc

SEQ ID NO: 39395 - RNA, 21 nt, synthetic construct
  source 1..21: mol_type = other RNA
gacccacgggatggccgtgtc

SEQ ID NO: 39396 - RNA, 21 nt, synthetic construct
  source 1..21: mol_type = other RNA
gtgacttctacaacccacatg

SEQ ID NO: 39397 - RNA, 21 nt, synthetic construct
  source 1..21: mol_type = other RNA
tgacttctacaacccacatgg

SEQ ID NO: 39398 - RNA, 21 nt, synthetic construct
  source 1..21: mol_type = other RNA
ccagcaccgcttccaaagagc

SEQ ID NO: 39399 - RNA, 21 nt, synthetic construct
  source 1..21: mol_type = other RNA
cggccacgacacccacagtca

SEQ ID NO: 39400 - RNA, 21 nt, synthetic construct
  source 1..21: mol_type = other RNA
cggccacgacacccacagtca

SEQ ID NO: 39401 - RNA, 21 nt, synthetic construct
  source 1..21: mol_type = other RNA
cggccacgacacccacagtca

SEQ ID NO: 39402 - RNA, 21 nt, synthetic construct
  source 1..21: mol_type = other RNA
gcagagcggggactacatcaa

SEQ ID NO: 39403 - RNA, 21 nt, synthetic construct
  source 1..21: mol_type = other RNA
gccggccggcaactgcacgga

SEQ ID NO: 39404 - RNA, 21 nt, synthetic construct
  source 1..21: mol_type = other RNA
ggacgaggagggcatctgcca

SEQ ID NO: 39405 - RNA, 21 nt, synthetic construct
  source 1..21: mol_type = other RNA
tgctccggggggctatggcag

SEQ ID NO: 39406 - RNA, 21 nt, synthetic construct
  source 1..21: mol_type = other RNA
gggcgcctgtgtgcccgccca

SEQ ID NO: 39407 - RNA, 21 nt, synthetic construct
  source 1..21: mol_type = other RNA
tacgctcacggcaccgtgctg

SEQ ID NO: 39408 - RNA, 21 nt, synthetic construct
  source 1..21: mol_type = other RNA
cccggacgccctggcacccaa

SEQ ID NO: 39409 - RNA, 21 nt, synthetic construct
  source 1..21: mol_type = other RNA
tgcggaagcaacggcaccatc

SEQ ID NO: 39410 - RNA, 21 nt, synthetic construct
  source 1..21: mol_type = other RNA
gtccacttcggcctggtgtgc

SEQ ID NO: 39411 - RNA, 21 nt, synthetic construct
  source 1..21: mol_type = other RNA
acccttccaacacgctcagcc

SEQ ID NO: 39412 - RNA, 21 nt, synthetic construct
  source 1..21: mol_type = other RNA
agcctggcgccaacactcacg

SEQ ID NO: 39413 - RNA, 21 nt, synthetic construct
  source 1..21: mol_type = other RNA
gagcgagctgtccacctctca

SEQ ID NO: 39414 - RNA, 21 nt, synthetic construct
  source 1..21: mol_type = other RNA
ccacggccaccatgtccacag

SEQ ID NO: 39415 - RNA, 21 nt, synthetic construct
  source 1..21: mol_type = other RNA
cactaccaaagtgccaactac

SEQ ID NO: 39416 - RNA, 21 nt, synthetic construct
  source 1..21: mol_type = other RNA
cctcctctagcacacagacca

SEQ ID NO: 39417 - RNA, 21 nt, synthetic construct
  source 1..21: mol_type = other RNA
ctcctctagcacacagaccag

SEQ ID NO: 39418 - RNA, 21 nt, synthetic construct
  source 1..21: mol_type = other RNA
gaccaccccgggccacaccac

SEQ ID NO: 39419 - RNA, 21 nt, synthetic construct
  source 1..21: mol_type = other RNA
tacagctaccccatgccgggg

SEQ ID NO: 39420 - RNA, 21 nt, synthetic construct
  source 1..21: mol_type = other RNA
ccctctggcggggactttgac

SEQ ID NO: 39421 - RNA, 21 nt, synthetic construct
  source 1..21: mol_type = other RNA
ccacggccaccatgtccacag

SEQ ID NO: 39422 - RNA, 21 nt, synthetic construct
  source 1..21: mol_type = other RNA
cctcctctagcacacagacca

SEQ ID NO: 39423 - RNA, 21 nt, synthetic construct
  source 1..21: mol_type = other RNA
ctcctctagcacacagaccag

SEQ ID NO: 39424 - RNA, 21 nt, synthetic construct
  source 1..21: mol_type = other RNA
gaccaccccgggccacaccag

SEQ ID NO: 39425 - RNA, 21 nt, synthetic construct
  source 1..21: mol_type = other RNA
tacagctaccccatgccgggg

SEQ ID NO: 39426 - RNA, 21 nt, synthetic construct
  source 1..21: mol_type = other RNA
ccctctggcggggactttgac

SEQ ID NO: 39427 - RNA, 21 nt, synthetic construct
  source 1..21: mol_type = other RNA
cacagctaccagctttacacc

SEQ ID NO: 39428 - RNA, 21 nt, synthetic construct
  source 1..21: mol_type = other RNA
ccacggccaccatgtccacag

SEQ ID NO: 39429 - RNA, 21 nt, synthetic construct
  source 1..21: mol_type = other RNA
tcacactaccaaagtgccgac

SEQ ID NO: 39430 - RNA, 21 nt, synthetic construct
  source 1..21: mol_type = other RNA
cctcctctagcacacagacca

SEQ ID NO: 39431 - RNA, 21 nt, synthetic construct
  source 1..21: mol_type = other RNA
ctcctctagcacacagaccag

SEQ ID NO: 39432 - RNA, 21 nt, synthetic construct
  source 1..21: mol_type = other RNA
gaccaccccgggccacaccag

SEQ ID NO: 39433 - RNA, 21 nt, synthetic construct
  source 1..21: mol_type = other RNA
tacagctaccccatgccgggg

SEQ ID NO: 39434 - RNA, 21 nt, synthetic construct
  source 1..21: mol_type = other RNA
ccctctggcggggactttgac

SEQ ID NO: 39435 - RNA, 21 nt, synthetic construct
  source 1..21: mol_type = other RNA
ccacggccaccatgtccacag

SEQ ID NO: 39436 - RNA, 21 nt, synthetic construct
  source 1..21: mol_type = other RNA
tcacactaccaaagtgccgac

SEQ ID NO: 39437 - RNA, 21 nt, synthetic construct
  source 1..21: mol_type = other RNA
cctcctctagcacacagacca

SEQ ID NO: 39438 - RNA, 21 nt, synthetic construct
  source 1..21: mol_type = other RNA
ctcctctagcacacagaccag

SEQ ID NO: 39439 - RNA, 21 nt, synthetic construct
  source 1..21: mol_type = other RNA
gaccaccccgggccacaccac

SEQ ID NO: 39440 - RNA, 21 nt, synthetic construct
  source 1..21: mol_type = other RNA
tacagctaccccatgccgggg

SEQ ID NO: 39441 - RNA, 21 nt, synthetic construct
  source 1..21: mol_type = other RNA
ccctctggcggggactttgac

SEQ ID NO: 39442 - RNA, 21 nt, synthetic construct
  source 1..21: mol_type = other RNA
ccacggccaccatgtccacag

SEQ ID NO: 39443 - RNA, 21 nt, synthetic construct
  source 1..21: mol_type = other RNA
tcacactaccaaagtgccgac

SEQ ID NO: 39444 - RNA, 21 nt, synthetic construct
  source 1..21: mol_type = other RNA
cctcctctagcacacagacca

SEQ ID NO: 39445 - RNA, 21 nt, synthetic construct
  source 1..21: mol_type = other RNA
ctcctctagcacacagaccag

SEQ ID NO: 39446 - RNA, 21 nt, synthetic construct
  source 1..21: mol_type = other RNA
cacagctaccagctttacacc

SEQ ID NO: 39447 - RNA, 21 nt, synthetic construct
  source 1..21: mol_type = other RNA
accgcttccagggcgcctgtc

SEQ ID NO: 39448 - RNA, 21 nt, synthetic construct
  source 1..21: mol_type = other RNA
tggtccccgacagcagaaagg

SEQ ID NO: 39449 - RNA, 21 nt, synthetic construct
  source 1..21: mol_type = other RNA
gaccagatcctcttcaacgca

SEQ ID NO: 39450 - RNA, 21 nt, synthetic construct
  source 1..21: mol_type = other RNA
cctcttcaacgcacacatggg

SEQ ID NO: 39451 - RNA, 21 nt, synthetic construct
  source 1..21: mol_type = other RNA
gggtggagtccatttgctgac

SEQ ID NO: 39452 - RNA, 21 nt, synthetic construct
  source 1..21: mol_type = other RNA
ggcaccccgcgctccgtgctc

SEQ ID NO: 39453 - RNA, 21 nt, synthetic construct
  source 1..21: mol_type = other RNA
aggagtcctaccctgggagag

SEQ ID NO: 39454 - RNA, 21 nt, synthetic construct
  source 1..21: mol_type = other RNA
gtcctaccctgggagagcctg

SEQ ID NO: 39455 - RNA, 21 nt, synthetic construct
  source 1..21: mol_type = other RNA
cccctccctgatgtcactggg

SEQ ID NO: 39456 - RNA, 21 nt, synthetic construct
  source 1..21: mol_type = other RNA
caccacctggacccgcctatc

SEQ ID NO: 39457 - RNA, 21 nt, synthetic construct
  source 1..21: mol_type = other RNA
cacacctccacagtgcttacc

SEQ ID NO: 39458 - RNA, 21 nt, synthetic construct
  source 1..21: mol_type = other RNA
caggggacgtgccacaacccc

SEQ ID NO: 39459 - RNA, 21 nt, synthetic construct
  source 1..21: mol_type = other RNA
caccacctggacccgcctatc

SEQ ID NO: 39460 - RNA, 21 nt, synthetic construct
  source 1..21: mol_type = other RNA
ggcacaccatggatggcggtg

SEQ ID NO: 39461 - RNA, 21 nt, synthetic construct
  source 1..21: mol_type = other RNA
ctaccagcgttacagccatcc

SEQ ID NO: 39462 - RNA, 21 nt, synthetic construct
  source 1..21: mol_type = other RNA
taccagcgttacagccatccc

SEQ ID NO: 39463 - RNA, 21 nt, synthetic construct
  source 1..21: mol_type = other RNA
gccactcaggagtcctaccct

SEQ ID NO: 39464 - RNA, 21 nt, synthetic construct
  source 1..21: mol_type = other RNA
cacacctccacagtgcttacc

SEQ ID NO: 39465 - RNA, 21 nt, synthetic construct
  source 1..21: mol_type = other RNA
ctctacctggacaaccactac

SEQ ID NO: 39466 - RNA, 21 nt, synthetic construct
  source 1..21: mol_type = other RNA
tgctgcgaatacgtgccctgt

SEQ ID NO: 39467 - RNA, 21 nt, synthetic construct
  source 1..21: mol_type = other RNA
ccagaggttccacggtgaccc

SEQ ID NO: 39468 - RNA, 21 nt, synthetic construct
  source 1..21: mol_type = other RNA
gggctgaggtcgcaacggcca

SEQ ID NO: 39469 - RNA, 21 nt, synthetic construct
  source 1..21: mol_type = other RNA
gccatccgggtccaagcggac

SEQ ID NO: 39470 - RNA, 21 nt, synthetic construct
  source 1..21: mol_type = other RNA
ccccagtgccgaacaccacgg

SEQ ID NO: 39471 - RNA, 21 nt, synthetic construct
  source 1..21: mol_type = other RNA
ccccagtgccgaacaccacgg

SEQ ID NO: 39472 - RNA, 21 nt, synthetic construct
  source 1..21: mol_type = other RNA
ccccagtgccgaacaccacgg

SEQ ID NO: 39473 - RNA, 21 nt, synthetic construct
  source 1..21: mol_type = other RNA
gctgcggaagtgcggcctgac

SEQ ID NO: 39474 - RNA, 21 nt, synthetic construct
  source 1..21: mol_type = other RNA
tcccggtctccaccgtgtgtg

SEQ ID NO: 39475 - RNA, 21 nt, synthetic construct
  source 1..21: mol_type = other RNA
gttctcaacgccgcagcctac

SEQ ID NO: 39476 - RNA, 21 nt, synthetic construct
  source 1..21: mol_type = other RNA
aagccatgcggccccatacag

SEQ ID NO: 39477 - RNA, 21 nt, synthetic construct
  source 1..21: mol_type = other RNA
gtggctcaccctgcacggaca

SEQ ID NO: 39478 - RNA, 21 nt, synthetic construct
  source 1..21: mol_type = other RNA
cacacccagtggcatccagtg

SEQ ID NO: 39479 - RNA, 21 nt, synthetic construct
  source 1..21: mol_type = other RNA
gacctacagctaccaggacgt

SEQ ID NO: 39480 - RNA, 21 nt, synthetic construct
  source 1..21: mol_type = other RNA
gcggaagtgcggcctgacgga

SEQ ID NO: 39481 - RNA, 21 nt, synthetic construct
  source 1..21: mol_type = other RNA
cgcctacgtggtggatgcctg

SEQ ID NO: 39482 - RNA, 21 nt, synthetic construct
  source 1..21: mol_type = other RNA
gccacgcactggtggacagca

SEQ ID NO: 39483 - RNA, 21 nt, synthetic construct
  source 1..21: mol_type = other RNA
ccggggggctatggcagtgcc

SEQ ID NO: 39484 - RNA, 21 nt, synthetic construct
  source 1..21: mol_type = other RNA
caggatccgggtcctctgctg

SEQ ID NO: 39485 - RNA, 21 nt, synthetic construct
  source 1..21: mol_type = other RNA
tgcaggggacgtgccacaacc

SEQ ID NO: 39486 - RNA, 21 nt, synthetic construct
  source 1..21: mol_type = other RNA
tggatccacggccaccccgac

SEQ ID NO: 39487 - RNA, 21 nt, synthetic construct
  source 1..21: mol_type = other RNA
tggatccacggccaccccgtc

SEQ ID NO: 39488 - RNA, 21 nt, synthetic construct
  source 1..21: mol_type = other RNA
tggatccacggccaccccgtc

SEQ ID NO: 39489 - RNA, 21 nt, synthetic construct
  source 1..21: mol_type = other RNA
tggatccacggccaccccgtc

SEQ ID NO: 39490 - RNA, 21 nt, synthetic construct
  source 1..21: mol_type = other RNA
tggatccacggccaccccgtc

SEQ ID NO: 39491 - RNA, 21 nt, synthetic construct
  source 1..21: mol_type = other RNA
ggccatgctcgtggtgccgca

SEQ ID NO: 39492 - RNA, 21 nt, synthetic construct
  source 1..21: mol_type = other RNA
gcgtgagctttgttccacccg

SEQ ID NO: 39493 - RNA, 21 nt, synthetic construct
  source 1..21: mol_type = other RNA
tgttctctgagcactgccgcg

SEQ ID NO: 39494 - RNA, 21 nt, synthetic construct
  source 1..21: mol_type = other RNA
cagcactgcgtacctggccgc

SEQ ID NO: 39495 - RNA, 21 nt, synthetic construct
  source 1..21: mol_type = other RNA
tgagctgcggaagtgcggcct

SEQ ID NO: 39496 - RNA, 21 nt, synthetic construct
  source 1..21: mol_type = other RNA
cggccatccgggtccaagcgg

SEQ ID NO: 39497 - RNA, 21 nt, synthetic construct
  source 1..21: mol_type = other RNA
cagctggtgccactcatgcag

SEQ ID NO: 39498 - RNA, 21 nt, synthetic construct
  source 1..21: mol_type = other RNA
gccacgggcgcagccttcgcc

SEQ ID NO: 39499 - RNA, 21 nt, synthetic construct
  source 1..21: mol_type = other RNA
gcggcctgagtgaggccgacg

SEQ ID NO: 39500 - RNA, 21 nt, synthetic construct
  source 1..21: mol_type = other RNA
ccgcgggcaccttcctcaatg

SEQ ID NO: 39501 - RNA, 21 nt, synthetic construct
  source 1..21: mol_type = other RNA
cccggggctggtgtcggatgg

SEQ ID NO: 39502 - RNA, 21 nt, synthetic construct
  source 1..21: mol_type = other RNA
aggggacgtgccacaaccccg

SEQ ID NO: 39503 - RNA, 21 nt, synthetic construct
  source 1..21: mol_type = other RNA
atccacggccaccccgacctc

SEQ ID NO: 39504 - RNA, 21 nt, synthetic construct
  source 1..21: mol_type = other RNA
acccccagtgccgaacaccat

SEQ ID NO: 39505 - RNA, 21 nt, synthetic construct
  source 1..21: mol_type = other RNA
ccagcaagacccgcacctcga

SEQ ID NO: 39506 - RNA, 21 nt, synthetic construct
  source 1..21: mol_type = other RNA
accatgggctgtgagccccag

SEQ ID NO: 39507 - RNA, 21 nt, synthetic construct
  source 1..21: mol_type = other RNA
ccccggccaccagctctacgg

SEQ ID NO: 39508 - RNA, 21 nt, synthetic construct
  source 1..21: mol_type = other RNA
cacactaccaaagtgctgact

SEQ ID NO: 39509 - RNA, 21 nt, synthetic construct
  source 1..21: mol_type = other RNA
acccccagtgccgaacaccac

SEQ ID NO: 39510 - RNA, 21 nt, synthetic construct
  source 1..21: mol_type = other RNA
ctcaccctagcagcaggacca

SEQ ID NO: 39511 - RNA, 21 nt, synthetic construct
  source 1..21: mol_type = other RNA
ccagcaagacccgcacctcga

SEQ ID NO: 39512 - RNA, 21 nt, synthetic construct
  source 1..21: mol_type = other RNA
accatgggctgtgagccccag

SEQ ID NO: 39513 - RNA, 21 nt, synthetic construct
  source 1..21: mol_type = other RNA
ccccggccaccagctctacgg

SEQ ID NO: 39514 - RNA, 21 nt, synthetic construct
  source 1..21: mol_type = other RNA
tccaccccgggaacagctccc

SEQ ID NO: 39515 - RNA, 21 nt, synthetic construct
  source 1..21: mol_type = other RNA
ccaccccgggaacagctcccc

SEQ ID NO: 39516 - RNA, 21 nt, synthetic construct
  source 1..21: mol_type = other RNA
ctcctccagtccaaggactgc

SEQ ID NO: 39517 - RNA, 21 nt, synthetic construct
  source 1..21: mol_type = other RNA
ctgcaaccacccttccagtgc

SEQ ID NO: 39518 - RNA, 21 nt, synthetic construct
  source 1..21: mol_type = other RNA
ctcacactaccaaagtgccga

SEQ ID NO: 39519 - RNA, 21 nt, synthetic construct
  source 1..21: mol_type = other RNA
acccccagtgccgaacaccac

SEQ ID NO: 39520 - RNA, 21 nt, synthetic construct
  source 1..21: mol_type = other RNA
ctcaccctagcagcaggacca

SEQ ID NO: 39521 - RNA, 21 nt, synthetic construct
  source 1..21: mol_type = other RNA
ccagcaagacccgcacctcga

SEQ ID NO: 39522 - RNA, 21 nt, synthetic construct
  source 1..21: mol_type = other RNA
ccccggccaccagctctacgg

SEQ ID NO: 39523 - RNA, 21 nt, synthetic construct
  source 1..21: mol_type = other RNA
ctcacactaccaaagtgccga

SEQ ID NO: 39524 - RNA, 21 nt, synthetic construct
  source 1..21: mol_type = other RNA
cacccacaaccagtggctcca

SEQ ID NO: 39525 - RNA, 21 nt, synthetic construct
  source 1..21: mol_type = other RNA
acccccagtgccgaacaccac

SEQ ID NO: 39526 - RNA, 21 nt, synthetic construct
  source 1..21: mol_type = other RNA
ctcaccctagcagcaggacca

SEQ ID NO: 39527 - RNA, 21 nt, synthetic construct
  source 1..21: mol_type = other RNA
ccagcaagacccgcacctcga

SEQ ID NO: 39528 - RNA, 21 nt, synthetic construct
  source 1..21: mol_type = other RNA
ccccggccaccagctctacgg

SEQ ID NO: 39529 - RNA, 21 nt, synthetic construct
  source 1..21: mol_type = other RNA
tccaccccgggaacagctccc

SEQ ID NO: 39530 - RNA, 21 nt, synthetic construct
  source 1..21: mol_type = other RNA
ccaccccgggaacagctcccc

SEQ ID NO: 39531 - RNA, 21 nt, synthetic construct
  source 1..21: mol_type = other RNA
ctcctccagtccaaggactgc

SEQ ID NO: 39532 - RNA, 21 nt, synthetic construct
  source 1..21: mol_type = other RNA
ctgcaaccacccttccagtgc

SEQ ID NO: 39533 - RNA, 21 nt, synthetic construct
  source 1..21: mol_type = other RNA
ctcacactaccaaagtgccga

SEQ ID NO: 39534 - RNA, 21 nt, synthetic construct
  source 1..21: mol_type = other RNA
cacccacaaccagtggctcca

SEQ ID NO: 39535 - RNA, 21 nt, synthetic construct
  source 1..21: mol_type = other RNA
ctcctccagtccaaggactgc

SEQ ID NO: 39536 - RNA, 21 nt, synthetic construct
  source 1..21: mol_type = other RNA
ctgcaaccacccttccagtgc

SEQ ID NO: 39537 - RNA, 21 nt, synthetic construct
  source 1..21: mol_type = other RNA
agccgctctgtgatctgatgc

SEQ ID NO: 39538 - RNA, 21 nt, synthetic construct
  source 1..21: mol_type = other RNA
cagggtcagcccccgccgtgc

SEQ ID NO: 39539 - RNA, 21 nt, synthetic construct
  source 1..21: mol_type = other RNA
caacacgaccatcctgtggca

SEQ ID NO: 39540 - RNA, 21 nt, synthetic construct
  source 1..21: mol_type = other RNA
gcaccagggctgcgagaccga

SEQ ID NO: 39541 - RNA, 21 nt, synthetic construct
  source 1..21: mol_type = other RNA
ctgggacgccctggaacaaac

SEQ ID NO: 39542 - RNA, 21 nt, synthetic construct
  source 1..21: mol_type = other RNA
accaccgatgggcttggcgcc

SEQ ID NO: 39543 - RNA, 21 nt, synthetic construct
  source 1..21: mol_type = other RNA
acttatgccagcagcctaagg

SEQ ID NO: 39544 - RNA, 21 nt, synthetic construct
  source 1..21: mol_type = other RNA
acttcggccacctcgggcatc

SEQ ID NO: 39545 - RNA, 21 nt, synthetic construct
  source 1..21: mol_type = other RNA
acttcggccacctcgggcatc

SEQ ID NO: 39546 - RNA, 21 nt, synthetic construct
  source 1..21: mol_type = other RNA
acccagtggcatccagtgcgc

SEQ ID NO: 39547 - RNA, 21 nt, synthetic construct
  source 1..21: mol_type = other RNA
atcggcccccataaccacggt

SEQ ID NO: 39548 - RNA, 21 nt, synthetic construct
  source 1..21: mol_type = other RNA
atcggcccccataaccacggt

SEQ ID NO: 39549 - RNA, 21 nt, synthetic construct
  source 1..21: mol_type = other RNA
atcggcccccataaccacggt

SEQ ID NO: 39550 - RNA, 21 nt, synthetic construct
  source 1..21: mol_type = other RNA
gaggcggagactttgagacgt

SEQ ID NO: 39551 - RNA, 21 nt, synthetic construct
  source 1..21: mol_type = other RNA
agcttcccgacatgccgctgg

SEQ ID NO: 39552 - RNA, 21 nt, synthetic construct
  source 1..21: mol_type = other RNA
tcttcaagatgtgctacaact

SEQ ID NO: 39553 - RNA, 21 nt, synthetic construct
  source 1..21: mol_type = other RNA
ggtgacttcccacaccctagc

SEQ ID NO: 39554 - RNA, 21 nt, synthetic construct
  source 1..21: mol_type = other RNA
gcccggcactggtgctcgcgc

SEQ ID NO: 39555 - RNA, 21 nt, synthetic construct
  source 1..21: mol_type = other RNA
tgcgtgggacccgatgggttt

SEQ ID NO: 39556 - RNA, 21 nt, synthetic construct
  source 1..21: mol_type = other RNA
gcagcgtttccttcgtgcctg

SEQ ID NO: 39557 - RNA, 21 nt, synthetic construct
  source 1..21: mol_type = other RNA
ctgctgtctgagaacgttctg

SEQ ID NO: 39558 - RNA, 21 nt, synthetic construct
  source 1..21: mol_type = other RNA
atgtggggcggctcccactat

SEQ ID NO: 39559 - RNA, 21 nt, synthetic construct
  source 1..21: mol_type = other RNA
gagtacaagagagtggccggg

SEQ ID NO: 39560 - RNA, 21 nt, synthetic construct
  source 1..21: mol_type = other RNA
cacctacacccacgtggatga

SEQ ID NO: 39561 - RNA, 21 nt, synthetic construct
  source 1..21: mol_type = other RNA
tgccaactaccacaaccacgg

SEQ ID NO: 39562 - RNA, 21 nt, synthetic construct
  source 1..21: mol_type = other RNA
acgagtagcccggggctgacc

SEQ ID NO: 39563 - RNA, 21 nt, synthetic construct
  source 1..21: mol_type = other RNA
ccaataaccacggtggtgacc

SEQ ID NO: 39564 - RNA, 21 nt, synthetic construct
  source 1..21: mol_type = other RNA
caataaccacggtggtgacca

SEQ ID NO: 39565 - RNA, 21 nt, synthetic construct
  source 1..21: mol_type = other RNA
ccacccacaccgccagagtgc

SEQ ID NO: 39566 - RNA, 21 nt, synthetic construct
  source 1..21: mol_type = other RNA
tgtggccaacgtcacctgcgt

SEQ ID NO: 39567 - RNA, 21 nt, synthetic construct
  source 1..21: mol_type = other RNA
tgggcttggcgcctgcttgat

SEQ ID NO: 39568 - RNA, 21 nt, synthetic construct
  source 1..21: mol_type = other RNA
tcgccatctgcggaagcaacg

SEQ ID NO: 39569 - RNA, 21 nt, synthetic construct
  source 1..21: mol_type = other RNA
gcttcccgacatgccgctgga

SEQ ID NO: 39570 - RNA, 21 nt, synthetic construct
  source 1..21: mol_type = other RNA
cgtccacttcggcctggtgtg

SEQ ID NO: 39571 - RNA, 21 nt, synthetic construct
  source 1..21: mol_type = other RNA
cacatgtgagcaccacggcca

SEQ ID NO: 39572 - RNA, 21 nt, synthetic construct
  source 1..21: mol_type = other RNA
cacacccacaaccagaggttc

SEQ ID NO: 39573 - RNA, 21 nt, synthetic construct
  source 1..21: mol_type = other RNA
acccttccagtgctgacaagc

SEQ ID NO: 39574 - RNA, 21 nt, synthetic construct
  source 1..21: mol_type = other RNA
cgagcactacagccaccgtga

SEQ ID NO: 39575 - RNA, 21 nt, synthetic construct
  source 1..21: mol_type = other RNA
cgagcactacagccaccgtga

SEQ ID NO: 39576 - RNA, 21 nt, synthetic construct
  source 1..21: mol_type = other RNA
cgagcactacagccaccgtga

SEQ ID NO: 39577 - RNA, 21 nt, synthetic construct
  source 1..21: mol_type = other RNA
tgggacccgatgggtttccta

SEQ ID NO: 39578 - RNA, 21 nt, synthetic construct
  source 1..21: mol_type = other RNA
ccgtgcaaccgtcccggcttc

SEQ ID NO: 39579 - RNA, 21 nt, synthetic construct
  source 1..21: mol_type = other RNA
tccactccggagaccacccac

SEQ ID NO: 39580 - RNA, 21 nt, synthetic construct
  source 1..21: mol_type = other RNA
caaccacgggcttcacagtca

SEQ ID NO: 39581 - RNA, 21 nt, synthetic construct
  source 1..21: mol_type = other RNA
tccactccggagaccacccac

SEQ ID NO: 39582 - RNA, 21 nt, synthetic construct
  source 1..21: mol_type = other RNA
acacccacgtggatgagtgtg

SEQ ID NO: 39583 - RNA, 21 nt, synthetic construct
  source 1..21: mol_type = other RNA
tgccccgacgtcctcgcccac

SEQ ID NO: 39584 - RNA, 21 nt, synthetic construct
  source 1..21: mol_type = other RNA
ggcagctgcgagtacatcttg

SEQ ID NO: 39585 - RNA, 21 nt, synthetic construct
  source 1..21: mol_type = other RNA
acccacgggatggccgtgtcc

SEQ ID NO: 39586 - RNA, 21 nt, synthetic construct
  source 1..21: mol_type = other RNA
cccacgggatggccgtgtcct

SEQ ID NO: 39587 - RNA, 21 nt, synthetic construct
  source 1..21: mol_type = other RNA
cttcccgacatgccgctggag

SEQ ID NO: 39588 - RNA, 21 nt, synthetic construct
  source 1..21: mol_type = other RNA
ccagggcacgacccgctgtca

SEQ ID NO: 39589 - RNA, 21 nt, synthetic construct
  source 1..21: mol_type = other RNA
agtgccgaacaccatggccac

SEQ ID NO: 39590 - RNA, 21 nt, synthetic construct
  source 1..21: mol_type = other RNA
ccccatgccggggccctctgg

SEQ ID NO: 39591 - RNA, 21 nt, synthetic construct
  source 1..21: mol_type = other RNA
gggcctcgagtgccgtgccca

SEQ ID NO: 39592 - RNA, 21 nt, synthetic construct
  source 1..21: mol_type = other RNA
ccccatgccggggccctctgg

SEQ ID NO: 39593 - RNA, 21 nt, synthetic construct
  source 1..21: mol_type = other RNA
gggcctcgagtgccgtgccca

SEQ ID NO: 39594 - RNA, 21 nt, synthetic construct
  source 1..21: mol_type = other RNA
accgcaaccactggatccacg

SEQ ID NO: 39595 - RNA, 21 nt, synthetic construct
  source 1..21: mol_type = other RNA
ccccatgccggggccctctgg

SEQ ID NO: 39596 - RNA, 21 nt, synthetic construct
  source 1..21: mol_type = other RNA
gggcctcgagtgccgtgccca

SEQ ID NO: 39597 - RNA, 21 nt, synthetic construct
  source 1..21: mol_type = other RNA
ccccatgccggggccctctgg

SEQ ID NO: 39598 - RNA, 21 nt, synthetic construct
  source 1..21: mol_type = other RNA
gggcctcgagtgccgtgccca

SEQ ID NO: 39599 - RNA, 21 nt, synthetic construct
  source 1..21: mol_type = other RNA
cacccacaccgccagagtgct

SEQ ID NO: 39600 - RNA, 21 nt, synthetic construct
  source 1..21: mol_type = other RNA
ccagtcctgcgtgtgtgacga

SEQ ID NO: 39601 - RNA, 21 nt, synthetic construct
  source 1..21: mol_type = other RNA
ccccgagcgcgtgccggacgc

SEQ ID NO: 39602 - RNA, 21 nt, synthetic construct
  source 1..21: mol_type = other RNA
gtcctcgcccacccggcgcgt

SEQ ID NO: 39603 - RNA, 21 nt, synthetic construct
  source 1..21: mol_type = other RNA
ttctctgagcactgccgcgcc

SEQ ID NO: 39604 - RNA, 21 nt, synthetic construct
  source 1..21: mol_type = other RNA
tctctgagcactgccgcgccg

SEQ ID NO: 39605 - RNA, 21 nt, synthetic construct
  source 1..21: mol_type = other RNA
ctctgagcactgccgcgccgc

SEQ ID NO: 39606 - RNA, 21 nt, synthetic construct
  source 1..21: mol_type = other RNA
tcatcaatgggcagcgggagg

SEQ ID NO: 39607 - RNA, 21 nt, synthetic construct
  source 1..21: mol_type = other RNA
catcaatgggcagcgggagga

SEQ ID NO: 39608 - RNA, 21 nt, synthetic construct
  source 1..21: mol_type = other RNA
gcatccggctggtgctgacat

SEQ ID NO: 39609 - RNA, 21 nt, synthetic construct
  source 1..21: mol_type = other RNA
ggcctcccggccttcaacgag

SEQ ID NO: 39610 - RNA, 21 nt, synthetic construct
  source 1..21: mol_type = other RNA
gtgccacctttgtggaatact

SEQ ID NO: 39611 - RNA, 21 nt, synthetic construct
  source 1..21: mol_type = other RNA
gacctgccccctcaacatgca

SEQ ID NO: 39612 - RNA, 21 nt, synthetic construct
  source 1..21: mol_type = other RNA
ggagtgtggctcaccctgcac

SEQ ID NO: 39613 - RNA, 21 nt, synthetic construct
  source 1..21: mol_type = other RNA
atgacatcacgcactctggct

SEQ ID NO: 39614 - RNA, 21 nt, synthetic construct
  source 1..21: mol_type = other RNA
agctgcggaagtgcggcctga

SEQ ID NO: 39615 - RNA, 21 nt, synthetic construct
  source 1..21: mol_type = other RNA
cggtgacgctcagcctggacg

SEQ ID NO: 39616 - RNA, 21 nt, synthetic construct
  source 1..21: mol_type = other RNA
ctgacgacttcacggccctca

SEQ ID NO: 39617 - RNA, 21 nt, synthetic construct
  source 1..21: mol_type = other RNA
tgacgacttcacggccctcag

SEQ ID NO: 39618 - RNA, 21 nt, synthetic construct
  source 1..21: mol_type = other RNA
ttcacggccctcagcggggtg

SEQ ID NO: 39619 - RNA, 21 nt, synthetic construct
  source 1..21: mol_type = other RNA
tgccaatgccaggaacagctt

SEQ ID NO: 39620 - RNA, 21 nt, synthetic construct
  source 1..21: mol_type = other RNA
cctgaccgatcccaacagtgc

SEQ ID NO: 39621 - RNA, 21 nt, synthetic construct
  source 1..21: mol_type = other RNA
gcccttccactcgaactgcat

SEQ ID NO: 39622 - RNA, 21 nt, synthetic construct
  source 1..21: mol_type = other RNA
gccccaagtcccagcgctacg

SEQ ID NO: 39623 - RNA, 21 nt, synthetic construct
  source 1..21: mol_type = other RNA
ccagcccacttgccgcggcct

SEQ ID NO: 39624 - RNA, 21 nt, synthetic construct
  source 1..21: mol_type = other RNA
cagcccacttgccgcggcctg

SEQ ID NO: 39625 - RNA, 21 nt, synthetic construct
  source 1..21: mol_type = other RNA
tgcagcgtttccttcgtgcct

SEQ ID NO: 39626 - RNA, 21 nt, synthetic construct
  source 1..21: mol_type = other RNA
tgcagcccccatggtgtacct

SEQ ID NO: 39627 - RNA, 21 nt, synthetic construct
  source 1..21: mol_type = other RNA
cacgggatggccgtgtcctgg

SEQ ID NO: 39628 - RNA, 21 nt, synthetic construct
  source 1..21: mol_type = other RNA
cggtccgtggtgggggacgca

SEQ ID NO: 39629 - RNA, 21 nt, synthetic construct
  source 1..21: mol_type = other RNA
tgcctgcgactcgggtggcga

SEQ ID NO: 39630 - RNA, 21 nt, synthetic construct
  source 1..21: mol_type = other RNA
gcccaggcctgccacgacgcg

SEQ ID NO: 39631 - RNA, 21 nt, synthetic construct
  source 1..21: mol_type = other RNA
cccaggcctgccacgacgcgg

SEQ ID NO: 39632 - RNA, 21 nt, synthetic construct
  source 1..21: mol_type = other RNA
tatgaggacaggacctacagc

SEQ ID NO: 39633 - RNA, 21 nt, synthetic construct
  source 1..21: mol_type = other RNA
caccgatgggcttggcgcctg

SEQ ID NO: 39634 - RNA, 21 nt, synthetic construct
  source 1..21: mol_type = other RNA
ctgcggaagcaacggcaccat

SEQ ID NO: 39635 - RNA, 21 nt, synthetic construct
  source 1..21: mol_type = other RNA
gtctccaccgtgtgtgtccgc

SEQ ID NO: 39636 - RNA, 21 nt, synthetic construct
  source 1..21: mol_type = other RNA
ggccccgtgacggtcaccccc

SEQ ID NO: 39637 - RNA, 21 nt, synthetic construct
  source 1..21: mol_type = other RNA
ctgaccagggctcccccggcc

SEQ ID NO: 39638 - RNA, 21 nt, synthetic construct
  source 1..21: mol_type = other RNA
gaaggactgacatcccccaga

SEQ ID NO: 39639 - RNA, 21 nt, synthetic construct
  source 1..21: mol_type = other RNA
ccacgggaggccccacgacgc

SEQ ID NO: 39640 - RNA, 21 nt, synthetic construct
  source 1..21: mol_type = other RNA
acgctggccccaacaacaatg

SEQ ID NO: 39641 - RNA, 21 nt, synthetic construct
  source 1..21: mol_type = other RNA
agagccgctgaccacgagcct

SEQ ID NO: 39642 - RNA, 21 nt, synthetic construct
  source 1..21: mol_type = other RNA
tccacctctcaggccgagacc

SEQ ID NO: 39643 - RNA, 21 nt, synthetic construct
  source 1..21: mol_type = other RNA
actaccaaagtgccaactacc

SEQ ID NO: 39644 - RNA, 21 nt, synthetic construct
  source 1..21: mol_type = other RNA
ccaactaccacaaccacgggc

SEQ ID NO: 39645 - RNA, 21 nt, synthetic construct
  source 1..21: mol_type = other RNA
cacacccacaaccagaggctc

SEQ ID NO: 39646 - RNA, 21 nt, synthetic construct
  source 1..21: mol_type = other RNA
agaccagtggtactcccccat

SEQ ID NO: 39647 - RNA, 21 nt, synthetic construct
  source 1..21: mol_type = other RNA
accaccacggccactacgatc

SEQ ID NO: 39648 - RNA, 21 nt, synthetic construct
  source 1..21: mol_type = other RNA
acgatcacggccaccggctcc

SEQ ID NO: 39649 - RNA, 21 nt, synthetic construct
  source 1..21: mol_type = other RNA
cccagtgctgaccaccaccgc

SEQ ID NO: 39650 - RNA, 21 nt, synthetic construct
  source 1..21: mol_type = other RNA
gtgccgaacaccatggccacc

SEQ ID NO: 39651 - RNA, 21 nt, synthetic construct
  source 1..21: mol_type = other RNA
accaccggtaccacccagcac

SEQ ID NO: 39652 - RNA, 21 nt, synthetic construct
  source 1..21: mol_type = other RNA
tgcggccggaggggccgtctg

SEQ ID NO: 39653 - RNA, 21 nt, synthetic construct
  source 1..21: mol_type = other RNA
tcctcacagagccgagcacta

SEQ ID NO: 39654 - RNA, 21 nt, synthetic construct
  source 1..21: mol_type = other RNA
gagactgtccacacctccaca

SEQ ID NO: 39655 - RNA, 21 nt, synthetic construct
  source 1..21: mol_type = other RNA
gctgactaccacaaccacggg

SEQ ID NO: 39656 - RNA, 21 nt, synthetic construct
  source 1..21: mol_type = other RNA
agaccagtggtactcccccat

SEQ ID NO: 39657 - RNA, 21 nt, synthetic construct
  source 1..21: mol_type = other RNA
accaccacggccactacgatc

SEQ ID NO: 39658 - RNA, 21 nt, synthetic construct
  source 1..21: mol_type = other RNA
acgatcacggccaccggctcc

SEQ ID NO: 39659 - RNA, 21 nt, synthetic construct
  source 1..21: mol_type = other RNA
cccagtgctgaccaccaccgc

SEQ ID NO: 39660 - RNA, 21 nt, synthetic construct
  source 1..21: mol_type = other RNA
accaccggtaccacccagcac

SEQ ID NO: 39661 - RNA, 21 nt, synthetic construct
  source 1..21: mol_type = other RNA
tgcggccggaggggccgtctg

SEQ ID NO: 39662 - RNA, 21 nt, synthetic construct
  source 1..21: mol_type = other RNA
tgcaaccacccttccagtgct

SEQ ID NO: 39663 - RNA, 21 nt, synthetic construct
  source 1..21: mol_type = other RNA
cacccttccagtgctgacaag

SEQ ID NO: 39664 - RNA, 21 nt, synthetic construct
  source 1..21: mol_type = other RNA
cacacctccacagtgctgacc

SEQ ID NO: 39665 - RNA, 21 nt, synthetic construct
  source 1..21: mol_type = other RNA
tgaccacgaaggccaccacga

SEQ ID NO: 39666 - RNA, 21 nt, synthetic construct
  source 1..21: mol_type = other RNA
accctcaaagtgctgaccagc

SEQ ID NO: 39667 - RNA, 21 nt, synthetic construct
  source 1..21: mol_type = other RNA
gagactgtccacacctccaca

SEQ ID NO: 39668 - RNA, 21 nt, synthetic construct
  source 1..21: mol_type = other RNA
cacacccacaaccagaggctc

SEQ ID NO: 39669 - RNA, 21 nt, synthetic construct
  source 1..21: mol_type = other RNA
agaccagtggtactcccccat

SEQ ID NO: 39670 - RNA, 21 nt, synthetic construct
  source 1..21: mol_type = other RNA
accaccacggccactacgatc

SEQ ID NO: 39671 - RNA, 21 nt, synthetic construct
  source 1..21: mol_type = other RNA
ctacgatcacagccaccggct

SEQ ID NO: 39672 - RNA, 21 nt, synthetic construct
  source 1..21: mol_type = other RNA
cccagtgctgaccaccaccgc

SEQ ID NO: 39673 - RNA, 21 nt, synthetic construct
  source 1..21: mol_type = other RNA
acggtggtgaccacgggctgt

SEQ ID NO: 39674 - RNA, 21 nt, synthetic construct
  source 1..21: mol_type = other RNA
tcctcacagagccgagcacta

SEQ ID NO: 39675 - RNA, 21 nt, synthetic construct
  source 1..21: mol_type = other RNA
aaccacgggcttcacagtcac

SEQ ID NO: 39676 - RNA, 21 nt, synthetic construct
  source 1..21: mol_type = other RNA
agaccagtggtactcccccat

SEQ ID NO: 39677 - RNA, 21 nt, synthetic construct
  source 1..21: mol_type = other RNA
acgatcacggccaccggctcc

SEQ ID NO: 39678 - RNA, 21 nt, synthetic construct
  source 1..21: mol_type = other RNA
cccagtgctgaccaccaccgc

SEQ ID NO: 39679 - RNA, 21 nt, synthetic construct
  source 1..21: mol_type = other RNA
accaccggtaccacccagcac

SEQ ID NO: 39680 - RNA, 21 nt, synthetic construct
  source 1..21: mol_type = other RNA
acggtggtgaccacgggctgt

SEQ ID NO: 39681 - RNA, 21 nt, synthetic construct
  source 1..21: mol_type = other RNA
tgcggccggaggggccgtctg

SEQ ID NO: 39682 - RNA, 21 nt, synthetic construct
  source 1..21: mol_type = other RNA
tgcaaccacccttccagtgct

SEQ ID NO: 39683 - RNA, 21 nt, synthetic construct
  source 1..21: mol_type = other RNA
cacccttccagtgctgacaag

SEQ ID NO: 39684 - RNA, 21 nt, synthetic construct
  source 1..21: mol_type = other RNA
cacacctccacagtgctgacc

SEQ ID NO: 39685 - RNA, 21 nt, synthetic construct
  source 1..21: mol_type = other RNA
tgaccacgaaggccaccacga

SEQ ID NO: 39686 - RNA, 21 nt, synthetic construct
  source 1..21: mol_type = other RNA
accagttccacgtccaccccc

SEQ ID NO: 39687 - RNA, 21 nt, synthetic construct
  source 1..21: mol_type = other RNA
tcctcacagagccgagcacta

SEQ ID NO: 39688 - RNA, 21 nt, synthetic construct
  source 1..21: mol_type = other RNA
gagactgtccacacctccaca

SEQ ID NO: 39689 - RNA, 21 nt, synthetic construct
  source 1..21: mol_type = other RNA
agaccagtggtactcccccat

SEQ ID NO: 39690 - RNA, 21 nt, synthetic construct
  source 1..21: mol_type = other RNA
accaccacggccactacgatc

SEQ ID NO: 39691 - RNA, 21 nt, synthetic construct
  source 1..21: mol_type = other RNA
acgatcacggccaccggctcc

SEQ ID NO: 39692 - RNA, 21 nt, synthetic construct
  source 1..21: mol_type = other RNA
tgcaaccacccttccagtgct

SEQ ID NO: 39693 - RNA, 21 nt, synthetic construct
  source 1..21: mol_type = other RNA
cacccttccagtgctgacaag

SEQ ID NO: 39694 - RNA, 21 nt, synthetic construct
  source 1..21: mol_type = other RNA
cacacctccacagtgctgacc

SEQ ID NO: 39695 - RNA, 21 nt, synthetic construct
  source 1..21: mol_type = other RNA
cactctggggacgacccggat

SEQ ID NO: 39696 - RNA, 21 nt, synthetic construct
  source 1..21: mol_type = other RNA
tcctcacagagccgagcacta

SEQ ID NO: 39697 - RNA, 21 nt, synthetic construct
  source 1..21: mol_type = other RNA
gtccaccgtggggaccacccg

SEQ ID NO: 39698 - RNA, 21 nt, synthetic construct
  source 1..21: mol_type = other RNA
ctgccaaccttcagcgtgtcc

SEQ ID NO: 39699 - RNA, 21 nt, synthetic construct
  source 1..21: mol_type = other RNA
tcactgtcaccatggtgcatg

SEQ ID NO: 39700 - RNA, 21 nt, synthetic construct
  source 1..21: mol_type = other RNA
cgtgagcgtcaccttcaatgg

SEQ ID NO: 39701 - RNA, 21 nt, synthetic construct
  source 1..21: mol_type = other RNA
agaaaggatggctgctgggcc

SEQ ID NO: 39702 - RNA, 21 nt, synthetic construct
  source 1..21: mol_type = other RNA
cccccgggcccattcttcaac

SEQ ID NO: 39703 - RNA, 21 nt, synthetic construct
  source 1..21: mol_type = other RNA
ccggtggcctgtgcgacctca

SEQ ID NO: 39704 - RNA, 21 nt, synthetic construct
  source 1..21: mol_type = other RNA
tgccagtcctgcgtgtgtgac

SEQ ID NO: 39705 - RNA, 21 nt, synthetic construct
  source 1..21: mol_type = other RNA
tgtgcgtgtgcaacacaacca

SEQ ID NO: 39706 - RNA, 21 nt, synthetic construct
  source 1..21: mol_type = other RNA
caccttccgctgcagacctca

SEQ ID NO: 39707 - RNA, 21 nt, synthetic construct
  source 1..21: mol_type = other RNA
ggagtccatttgctgacccca

SEQ ID NO: 39708 - RNA, 21 nt, synthetic construct
  source 1..21: mol_type = other RNA
aagtactcagcagaggcccag

SEQ ID NO: 39709 - RNA, 21 nt, synthetic construct
  source 1..21: mol_type = other RNA
acacctacacccacgtggatg

SEQ ID NO: 39710 - RNA, 21 nt, synthetic construct
  source 1..21: mol_type = other RNA
atgtgcattgtctgatcatga

SEQ ID NO: 39711 - RNA, 21 nt, synthetic construct
  source 1..21: mol_type = other RNA
tgtgcattgtctgatcatgaa

SEQ ID NO: 39712 - RNA, 21 nt, synthetic construct
  source 1..21: mol_type = other RNA
gaaaaccttgggcctcctctg

SEQ ID NO: 39713 - RNA, 21 nt, synthetic construct
  source 1..21: mol_type = other RNA
gtgggtgaaaccggccccaga

SEQ ID NO: 39714 - RNA, 21 nt, synthetic construct
  source 1..21: mol_type = other RNA
aaccggccccagaagggtgag

SEQ ID NO: 39715 - RNA, 21 nt, synthetic construct
  source 1..21: mol_type = other RNA
ttcgggagggcgccactcagg

SEQ ID NO: 39716 - RNA, 21 nt, synthetic construct
  source 1..21: mol_type = other RNA
ggagtcctaccctgggagagc

SEQ ID NO: 39717 - RNA, 21 nt, synthetic construct
  source 1..21: mol_type = other RNA
ccctggaacaaactaagcatg

SEQ ID NO: 39718 - RNA, 21 nt, synthetic construct
  source 1..21: mol_type = other RNA
caaggcggccgcctgtccatg

SEQ ID NO: 39719 - RNA, 21 nt, synthetic construct
  source 1..21: mol_type = other RNA
gccccggtgtctagcacaccc

SEQ ID NO: 39720 - RNA, 21 nt, synthetic construct
  source 1..21: mol_type = other RNA
gcggggggccagccgcggaac

SEQ ID NO: 39721 - RNA, 21 nt, synthetic construct
  source 1..21: mol_type = other RNA
aaagtgccaactaccacaacc

SEQ ID NO: 39722 - RNA, 21 nt, synthetic construct
  source 1..21: mol_type = other RNA
actggttctatggcaacaccc

SEQ ID NO: 39723 - RNA, 21 nt, synthetic construct
  source 1..21: mol_type = other RNA
actggttctatggcaacaccc

SEQ ID NO: 39724 - RNA, 21 nt, synthetic construct
  source 1..21: mol_type = other RNA
actggttctatggcaacaccc

SEQ ID NO: 39725 - RNA, 21 nt, synthetic construct
  source 1..21: mol_type = other RNA
actggttctatggcaacaccc

SEQ ID NO: 39726 - RNA, 21 nt, synthetic construct
  source 1..21: mol_type = other RNA
actggttctatggcaacaccc

SEQ ID NO: 39727 - RNA, 21 nt, synthetic construct
  source 1..21: mol_type = other RNA
cctgccctgggcgtgagcgtc

SEQ ID NO: 39728 - RNA, 21 nt, synthetic construct
  source 1..21: mol_type = other RNA
ccccgggcccattcttcaacg

SEQ ID NO: 39729 - RNA, 21 nt, synthetic construct
  source 1..21: mol_type = other RNA
ccgcttccagggcgcctgtcc

SEQ ID NO: 39730 - RNA, 21 nt, synthetic construct
  source 1..21: mol_type = other RNA
gcccggacgccctggcaccca

SEQ ID NO: 39731 - RNA, 21 nt, synthetic construct
  source 1..21: mol_type = other RNA
acgaccaccacaaccagggcc

SEQ ID NO: 39732 - RNA, 21 nt, synthetic construct
  source 1..21: mol_type = other RNA
cacatgtgagcaccacggcca

SEQ ID NO: 39733 - RNA, 21 nt, synthetic construct
  source 1..21: mol_type = other RNA
acccttccagtgctgacaagc

SEQ ID NO: 39734 - RNA, 21 nt, synthetic construct
  source 1..21: mol_type = other RNA
cacatgtgagcaccacggcca

SEQ ID NO: 39735 - RNA, 21 nt, synthetic construct
  source 1..21: mol_type = other RNA
ccaccaaagtgtacaagccat

SEQ ID NO: 39736 - RNA, 21 nt, synthetic construct
  source 1..21: mol_type = other RNA
gggacttcaacggcctcccgg

SEQ ID NO: 39737 - RNA, 21 nt, synthetic construct
  source 1..21: mol_type = other RNA
cccggacctgccccctcaaca

SEQ ID NO: 39738 - RNA, 21 nt, synthetic construct
  source 1..21: mol_type = other RNA
tggaggccacgggcgcagcct

SEQ ID NO: 39739 - RNA, 21 nt, synthetic construct
  source 1..21: mol_type = other RNA
atgggcaccgcccagagcccg

SEQ ID NO: 39740 - RNA, 21 nt, synthetic construct
  source 1..21: mol_type = other RNA
tggccacatccacccttccaa

SEQ ID NO: 39741 - RNA, 21 nt, synthetic construct
  source 1..21: mol_type = other RNA
cccttctccagggacgaccac

SEQ ID NO: 39742 - RNA, 21 nt, synthetic construct
  source 1..21: mol_type = other RNA
cccttctccagggacgaccac

SEQ ID NO: 39743 - RNA, 21 nt, synthetic construct
  source 1..21: mol_type = other RNA
gggaccctcccagaacagacc

SEQ ID NO: 39744 - RNA, 21 nt, synthetic construct
  source 1..21: mol_type = other RNA
cccttctccagggacgaccac

SEQ ID NO: 39745 - RNA, 21 nt, synthetic construct
  source 1..21: mol_type = other RNA
tgcggccggaggggcagtctg

SEQ ID NO: 39746 - RNA, 21 nt, synthetic construct
  source 1..21: mol_type = other RNA
gggaccctcccagaacagacc

SEQ ID NO: 39747 - RNA, 21 nt, synthetic construct
  source 1..21: mol_type = other RNA
accaccacacccgtggccacc

SEQ ID NO: 39748 - RNA, 21 nt, synthetic construct
  source 1..21: mol_type = other RNA
ggaggagggcgactgctgtcc

SEQ ID NO: 39749 - RNA, 21 nt, synthetic construct
  source 1..21: mol_type = other RNA
acccttccagtgctgacaagc

SEQ ID NO: 39750 - RNA, 21 nt, synthetic construct
  source 1..21: mol_type = other RNA
tgccaaccttcagcgtgtcca

SEQ ID NO: 39751 - RNA, 21 nt, synthetic construct
  source 1..21: mol_type = other RNA
ggctgctacgacaaggacgga

SEQ ID NO: 39752 - RNA, 21 nt, synthetic construct
  source 1..21: mol_type = other RNA
gcccacccggcgcgtgagctt

SEQ ID NO: 39753 - RNA, 21 nt, synthetic construct
  source 1..21: mol_type = other RNA
gagaatgcagggcacaccatg

SEQ ID NO: 39754 - RNA, 21 nt, synthetic construct
  source 1..21: mol_type = other RNA
catgtccacaatccacccctc

SEQ ID NO: 39755 - RNA, 21 nt, synthetic construct
  source 1..21: mol_type = other RNA
catgtccacaatccacccctc

SEQ ID NO: 39756 - RNA, 21 nt, synthetic construct
  source 1..21: mol_type = other RNA
tgcccgtgtgccacctttgtg

SEQ ID NO: 39757 - RNA, 21 nt, synthetic construct
  source 1..21: mol_type = other RNA
agggacggcactcacgcctcc

SEQ ID NO: 39758 - RNA, 21 nt, synthetic construct
  source 1..21: mol_type = other RNA
agggacggcactcacgcctcc

SEQ ID NO: 39759 - RNA, 21 nt, synthetic construct
  source 1..21: mol_type = other RNA
ctcgcagactgggtccagctc

SEQ ID NO: 39760 - RNA, 21 nt, synthetic construct
  source 1..21: mol_type = other RNA
cataaccacggtggtgaccat

SEQ ID NO: 39761 - RNA, 21 nt, synthetic construct
  source 1..21: mol_type = other RNA
aataaccacggtggtgaccat

SEQ ID NO: 39762 - RNA, 21 nt, synthetic construct
  source 1..21: mol_type = other RNA
cataaccacggtggtgaccac

SEQ ID NO: 39763 - RNA, 21 nt, synthetic construct
  source 1..21: mol_type = other RNA
cataaccacggtggtgaccac

SEQ ID NO: 39764 - RNA, 21 nt, synthetic construct
  source 1..21: mol_type = other RNA
tcaacatgcagcaccaggagt

SEQ ID NO: 39765 - RNA, 21 nt, synthetic construct
  source 1..21: mol_type = other RNA
tcgagtgccgggcggcgcagc

SEQ ID NO: 39766 - RNA, 21 nt, synthetic construct
  source 1..21: mol_type = other RNA
acgcccaggacagagacgaca

SEQ ID NO: 39767 - RNA, 21 nt, synthetic construct
  source 1..21: mol_type = other RNA
ctcctgggacaactcccatcc

SEQ ID NO: 39768 - RNA, 21 nt, synthetic construct
  source 1..21: mol_type = other RNA
tccacggggacttcccacacc

SEQ ID NO: 39769 - RNA, 21 nt, synthetic construct
  source 1..21: mol_type = other RNA
tccacaatccacccctcctcc

SEQ ID NO: 39770 - RNA, 21 nt, synthetic construct
  source 1..21: mol_type = other RNA
tccacggggacttcccacacc

SEQ ID NO: 39771 - RNA, 21 nt, synthetic construct
  source 1..21: mol_type = other RNA
tccacaatccacccctcctcc

SEQ ID NO: 39772 - RNA, 21 nt, synthetic construct
  source 1..21: mol_type = other RNA
ctccagggacaacacccatca

SEQ ID NO: 39773 - RNA, 21 nt, synthetic construct
  source 1..21: mol_type = other RNA
tgggaatctcagcctctacct

SEQ ID NO: 39774 - RNA, 21 nt, synthetic construct
  source 1..21: mol_type = other RNA
accggccccagaagggtgagg

SEQ ID NO: 39775 - RNA, 21 nt, synthetic construct
  source 1..21: mol_type = other RNA
cagcacggattccagctggcc

SEQ ID NO: 39776 - RNA, 21 nt, synthetic construct
  source 1..21: mol_type = other RNA
cgcccggcactggtgctcgcg

SEQ ID NO: 39777 - RNA, 21 nt, synthetic construct
  source 1..21: mol_type = other RNA
gcggggactttgacacctact

SEQ ID NO: 39778 - RNA, 21 nt, synthetic construct
  source 1..21: mol_type = other RNA
gcggggactttgacacctact

SEQ ID NO: 39779 - RNA, 21 nt, synthetic construct
  source 1..21: mol_type = other RNA
gcggggactttgacacctact

SEQ ID NO: 39780 - RNA, 21 nt, synthetic construct
  source 1..21: mol_type = other RNA
tccgtgcggccggaggggcag

SEQ ID NO: 39781 - RNA, 21 nt, synthetic construct
  source 1..21: mol_type = other RNA
gcggggactttgacacctact

SEQ ID NO: 39782 - RNA, 21 nt, synthetic construct
  source 1..21: mol_type = other RNA
gggtcagcaactgccagtcct

SEQ ID NO: 39783 - RNA, 21 nt, synthetic construct
  source 1..21: mol_type = other RNA
agggacggcactcacgcctcc

SEQ ID NO: 39784 - RNA, 21 nt, synthetic construct
  source 1..21: mol_type = other RNA
ctggggacgacccggatcctc

SEQ ID NO: 39785 - RNA, 21 nt, synthetic construct
  source 1..21: mol_type = other RNA
ggccaccagttccacgtccac

SEQ ID NO: 39786 - RNA, 21 nt, synthetic construct
  source 1..21: mol_type = other RNA
acgatcacagccaccggctcc

SEQ ID NO: 39787 - RNA, 21 nt, synthetic construct
  source 1..21: mol_type = other RNA
catgtggggcggctcccacta

SEQ ID NO: 39788 - RNA, 21 nt, synthetic construct
  source 1..21: mol_type = other RNA
gaactggaggtgccctgagct

SEQ ID NO: 39789 - RNA, 21 nt, synthetic construct
  source 1..21: mol_type = other RNA
agcaacggcaccatcatcagg

SEQ ID NO: 39790 - RNA, 21 nt, synthetic construct
  source 1..21: mol_type = other RNA
cagccagcaccgcttccaaag

SEQ ID NO: 39791 - RNA, 21 nt, synthetic construct
  source 1..21: mol_type = other RNA
ctcacactaccaaagtgccaa

SEQ ID NO: 39792 - RNA, 21 nt, synthetic construct
  source 1..21: mol_type = other RNA
aaccttcagcgtgtccactgt

SEQ ID NO: 39793 - RNA, 21 nt, synthetic construct
  source 1..21: mol_type = other RNA
acctgggtcaacagccatgtg

SEQ ID NO: 39794 - RNA, 21 nt, synthetic construct
  source 1..21: mol_type = other RNA
gagtccatttgctgaccccac

SEQ ID NO: 39795 - RNA, 21 nt, synthetic construct
  source 1..21: mol_type = other RNA
ggcggccgcctgtccatgcct

SEQ ID NO: 39796 - RNA, 21 nt, synthetic construct
  source 1..21: mol_type = other RNA
tgcggaagtgcggcctgacgg

SEQ ID NO: 39797 - RNA, 21 nt, synthetic construct
  source 1..21: mol_type = other RNA
cctagggaccacccacacacc

SEQ ID NO: 39798 - RNA, 21 nt, synthetic construct
  source 1..21: mol_type = other RNA
cctagggaccacccacacacc

SEQ ID NO: 39799 - RNA, 21 nt, synthetic construct
  source 1..21: mol_type = other RNA
cctagggaccacccacacacc

SEQ ID NO: 39800 - RNA, 21 nt, synthetic construct
  source 1..21: mol_type = other RNA
cctagggaccacccacacacc

SEQ ID NO: 39801 - RNA, 21 nt, synthetic construct
  source 1..21: mol_type = other RNA
gcccaccggttccacggccac

SEQ ID NO: 39802 - RNA, 21 nt, synthetic construct
  source 1..21: mol_type = other RNA
ggaagctgcgacaggcaaggc

SEQ ID NO: 39803 - RNA, 21 nt, synthetic construct
  source 1..21: mol_type = other RNA
ggtacaatgggcaccgcccag

SEQ ID NO: 39804 - RNA, 21 nt, synthetic construct
  source 1..21: mol_type = other RNA
agaaccaccgagtcaccccct

SEQ ID NO: 39805 - RNA, 21 nt, synthetic construct
  source 1..21: mol_type = other RNA
cacccagcaagacccgcacct

SEQ ID NO: 39806 - RNA, 21 nt, synthetic construct
  source 1..21: mol_type = other RNA
cacccagcaagacccgcacct

SEQ ID NO: 39807 - RNA, 21 nt, synthetic construct
  source 1..21: mol_type = other RNA
ggactgcaaccacccttccag

SEQ ID NO: 39808 - RNA, 21 nt, synthetic construct
  source 1..21: mol_type = other RNA
cacccagcaagacccgcacct

SEQ ID NO: 39809 - RNA, 21 nt, synthetic construct
  source 1..21: mol_type = other RNA
cacccagcaagacccgcacct

SEQ ID NO: 39810 - RNA, 21 nt, synthetic construct
  source 1..21: mol_type = other RNA
ggactgcaaccacccttccag

SEQ ID NO: 39811 - RNA, 21 nt, synthetic construct
  source 1..21: mol_type = other RNA
ggactgcaaccacccttccag

SEQ ID NO: 39812 - RNA, 21 nt, synthetic construct
  source 1..21: mol_type = other RNA
agccagtccagctgaatgaaa

SEQ ID NO: 39813 - RNA, 21 nt, synthetic construct
  source 1..21: mol_type = other RNA
ctccctgatgtcactgggacg

SEQ ID NO: 39814 - RNA, 21 nt, synthetic construct
  source 1..21: mol_type = other RNA
ggtggacagcactgcgtacct

SEQ ID NO: 39815 - RNA, 21 nt, synthetic construct
  source 1..21: mol_type = other RNA
cagagactgtccacacctcca

SEQ ID NO: 39816 - RNA, 21 nt, synthetic construct
  source 1..21: mol_type = other RNA
cagggacgaccaccccgggcc

SEQ ID NO: 39817 - RNA, 21 nt, synthetic construct
  source 1..21: mol_type = other RNA
cagggacgaccaccccgggcc

SEQ ID NO: 39818 - RNA, 21 nt, synthetic construct
  source 1..21: mol_type = other RNA
cagggacgaccaccccgggcc

SEQ ID NO: 39819 - RNA, 21 nt, synthetic construct
  source 1..21: mol_type = other RNA
cagggacgaccaccccgggcc

SEQ ID NO: 39820 - RNA, 21 nt, synthetic construct
  source 1..21: mol_type = other RNA
ctgcccgtgtgccacctttgt

SEQ ID NO: 39821 - RNA, 21 nt, synthetic construct
  source 1..21: mol_type = other RNA
cgacccggatcctcactgagc

SEQ ID NO: 39822 - RNA, 21 nt, synthetic construct
  source 1..21: mol_type = other RNA
tggagtccatttgctgacccc

SEQ ID NO: 39823 - RNA, 21 nt, synthetic construct
  source 1..21: mol_type = other RNA
tgggtgaaaccggccccagaa

SEQ ID NO: 39824 - RNA, 21 nt, synthetic construct
  source 1..21: mol_type = other RNA
cggccggcaactgcacggacg

SEQ ID NO: 39825 - RNA, 21 nt, synthetic construct
  source 1..21: mol_type = other RNA
gacgacttcacggccctcagc

SEQ ID NO: 39826 - RNA, 21 nt, synthetic construct
  source 1..21: mol_type = other RNA
gagggccgggtggggacccac

SEQ ID NO: 39827 - RNA, 21 nt, synthetic construct
  source 1..21: mol_type = other RNA
tgctacgacaaggacggaaac

SEQ ID NO: 39828 - RNA, 21 nt, synthetic construct
  source 1..21: mol_type = other RNA
gagctggagacggccaccacc

SEQ ID NO: 39829 - RNA, 21 nt, synthetic construct
  source 1..21: mol_type = other RNA
cagccaccacgggaggcccca

SEQ ID NO: 39830 - RNA, 21 nt, synthetic construct
  source 1..21: mol_type = other RNA
gaggctccacggtgaccccct

SEQ ID NO: 39831 - RNA, 21 nt, synthetic construct
  source 1..21: mol_type = other RNA
acccacaccgccacagtgctg

SEQ ID NO: 39832 - RNA, 21 nt, synthetic construct
  source 1..21: mol_type = other RNA
caccacaactgtggccactgg

SEQ ID NO: 39833 - RNA, 21 nt, synthetic construct
  source 1..21: mol_type = other RNA
acaccctagcagcaaccaccg

SEQ ID NO: 39834 - RNA, 21 nt, synthetic construct
  source 1..21: mol_type = other RNA
caccctagcagcaaccaccgg

SEQ ID NO: 39835 - RNA, 21 nt, synthetic construct
  source 1..21: mol_type = other RNA
gccacaccacggccacctcca

SEQ ID NO: 39836 - RNA, 21 nt, synthetic construct
  source 1..21: mol_type = other RNA
cgtgcggccggaggggccgtc

SEQ ID NO: 39837 - RNA, 21 nt, synthetic construct
  source 1..21: mol_type = other RNA
caccacaactgtggccactgg

SEQ ID NO: 39838 - RNA, 21 nt, synthetic construct
  source 1..21: mol_type = other RNA
gccgaacaccacggccaccac

SEQ ID NO: 39839 - RNA, 21 nt, synthetic construct
  source 1..21: mol_type = other RNA
cgtgcggccggaggggccgtc

SEQ ID NO: 39840 - RNA, 21 nt, synthetic construct
  source 1..21: mol_type = other RNA
tccacagctaccagctttaca

SEQ ID NO: 39841 - RNA, 21 nt, synthetic construct
  source 1..21: mol_type = other RNA
accacaaccagggccaccggc

SEQ ID NO: 39842 - RNA, 21 nt, synthetic construct
  source 1..21: mol_type = other RNA
gaggctccacggtgaccccct

SEQ ID NO: 39843 - RNA, 21 nt, synthetic construct
  source 1..21: mol_type = other RNA
acccacaccgccacagtgctg

SEQ ID NO: 39844 - RNA, 21 nt, synthetic construct
  source 1..21: mol_type = other RNA
caccacaactgtggccactgg

SEQ ID NO: 39845 - RNA, 21 nt, synthetic construct
  source 1..21: mol_type = other RNA
ccagggacaactcccatcccc

SEQ ID NO: 39846 - RNA, 21 nt, synthetic construct
  source 1..21: mol_type = other RNA
gccgaacaccacggccaccac

SEQ ID NO: 39847 - RNA, 21 nt, synthetic construct
  source 1..21: mol_type = other RNA
accacaaccagggccaccggc

SEQ ID NO: 39848 - RNA, 21 nt, synthetic construct
  source 1..21: mol_type = other RNA
ctgcgtgaacgacgcgtgtgc

SEQ ID NO: 39849 - RNA, 21 nt, synthetic construct
  source 1..21: mol_type = other RNA
ctacgttctgtccaagaaatg

SEQ ID NO: 39850 - RNA, 21 nt, synthetic construct
  source 1..21: mol_type = other RNA
caaatacgccaaccagacctg

SEQ ID NO: 39851 - RNA, 21 nt, synthetic construct
  source 1..21: mol_type = other RNA
tccggtgagcagcggtttcag

SEQ ID NO: 39852 - RNA, 21 nt, synthetic construct
  source 1..21: mol_type = other RNA
cttcaacgagttctatgccca

SEQ ID NO: 39853 - RNA, 21 nt, synthetic construct
  source 1..21: mol_type = other RNA
gaactacgcccggcactggtg

SEQ ID NO: 39854 - RNA, 21 nt, synthetic construct
  source 1..21: mol_type = other RNA
caccgagaacatcccctgtgg

SEQ ID NO: 39855 - RNA, 21 nt, synthetic construct
  source 1..21: mol_type = other RNA
tacgttctgtccaagaaatgt

SEQ ID NO: 39856 - RNA, 21 nt, synthetic construct
  source 1..21: mol_type = other RNA
ctacaactacaggatccgggt

SEQ ID NO: 39857 - RNA, 21 nt, synthetic construct
  source 1..21: mol_type = other RNA
cttccgcatcgtcaccgagaa

SEQ ID NO: 39858 - RNA, 21 nt, synthetic construct
  source 1..21: mol_type = other RNA
ctgacggacaacgagaactgc

SEQ ID NO: 39859 - RNA, 21 nt, synthetic construct
  source 1..21: mol_type = other RNA
cagggtcgactgcaacacctg

SEQ ID NO: 39860 - RNA, 21 nt, synthetic construct
  source 1..21: mol_type = other RNA
tcgccaacacctggaaggccc

SEQ ID NO: 39861 - RNA, 21 nt, synthetic construct
  source 1..21: mol_type = other RNA
aacgaggccacctacaagcct

SEQ ID NO: 39862 - RNA, 21 nt, synthetic construct
  source 1..21: mol_type = other RNA
ccatcaagctcttcgtggaga

SEQ ID NO: 39863 - RNA, 21 nt, synthetic construct
  source 1..21: mol_type = other RNA
agtggtttgacgtggacttcc

SEQ ID NO: 39864 - RNA, 21 nt, synthetic construct
  source 1..21: mol_type = other RNA
tgcgagtgtttctgcacggct

SEQ ID NO: 39865 - RNA, 21 nt, synthetic construct
  source 1..21: mol_type = other RNA
gcctgtgcgggaacttcgacg

SEQ ID NO: 39866 - RNA, 21 nt, synthetic construct
  source 1..21: mol_type = other RNA
atgactttgccacgcgtagcc

SEQ ID NO: 39867 - RNA, 21 nt, synthetic construct
  source 1..21: mol_type = other RNA
aatgactttgccacgcgtagc

SEQ ID NO: 39868 - RNA, 21 nt, synthetic construct
  source 1..21: mol_type = other RNA
tcctgtttgaccaaattccgg

SEQ ID NO: 39869 - RNA, 21 nt, synthetic construct
  source 1..21: mol_type = other RNA
tcacaccctcgagcttcttca

SEQ ID NO: 39870 - RNA, 21 nt, synthetic construct
  source 1..21: mol_type = other RNA
ggagcctcaggaaaaccggct

SEQ ID NO: 39871 - RNA, 21 nt, synthetic construct
  source 1..21: mol_type = other RNA
tgactttgccacgcgtagccg

SEQ ID NO: 39872 - RNA, 21 nt, synthetic construct
  source 1..21: mol_type = other RNA
taccccaagtctgaacaactt

SEQ ID NO: 39873 - RNA, 21 nt, synthetic construct
  source 1..21: mol_type = other RNA
tgacggcacctcttacacctt

SEQ ID NO: 39874 - RNA, 21 nt, synthetic construct
  source 1..21: mol_type = other RNA
gtgaggccgacgtcacctgca

SEQ ID NO: 39875 - RNA, 21 nt, synthetic construct
  source 1..21: mol_type = other RNA
aatgacgcgggcgcctgtgtg

SEQ ID NO: 39876 - RNA, 21 nt, synthetic construct
  source 1..21: mol_type = other RNA
ggagagctacgagctgatcct

SEQ ID NO: 39877 - RNA, 21 nt, synthetic construct
  source 1..21: mol_type = other RNA
tgcggggcaccctgcctaaaa

SEQ ID NO: 39878 - RNA, 21 nt, synthetic construct
  source 1..21: mol_type = other RNA
gacagagtggtttgacgtgga

SEQ ID NO: 39879 - RNA, 21 nt, synthetic construct
  source 1..21: mol_type = other RNA
ctgtcggcagccaacatcacc

SEQ ID NO: 39880 - RNA, 21 nt, synthetic construct
  source 1..21: mol_type = other RNA
aaatacgccaaccagacctgt

SEQ ID NO: 39881 - RNA, 21 nt, synthetic construct
  source 1..21: mol_type = other RNA
cctgcgtgaacgacgcgtgtg

SEQ ID NO: 39882 - RNA, 21 nt, synthetic construct
  source 1..21: mol_type = other RNA
cttcgtggagagctacgagct

SEQ ID NO: 39883 - RNA, 21 nt, synthetic construct
  source 1..21: mol_type = other RNA
gcggggcaccctgcctaaaaa

SEQ ID NO: 39884 - RNA, 21 nt, synthetic construct
  source 1..21: mol_type = other RNA
gtgtgtgtccgcgaggtctgc

SEQ ID NO: 39885 - RNA, 21 nt, synthetic construct
  source 1..21: mol_type = other RNA
ggatgggcccacggagcagtg

SEQ ID NO: 39886 - RNA, 21 nt, synthetic construct
  source 1..21: mol_type = other RNA
ggccggcctttgcggagtgcc

SEQ ID NO: 39887 - RNA, 21 nt, synthetic construct
  source 1..21: mol_type = other RNA
ccttcctcaatgacgcgggcg

SEQ ID NO: 39888 - RNA, 21 nt, synthetic construct
  source 1..21: mol_type = other RNA
cacgggaccttccgcatcgtc

SEQ ID NO: 39889 - RNA, 21 nt, synthetic construct
  source 1..21: mol_type = other RNA
gagagctacgagctgatcctc

SEQ ID NO: 39890 - RNA, 21 nt, synthetic construct
  source 1..21: mol_type = other RNA
agagctacgagctgatcctcc

SEQ ID NO: 39891 - RNA, 21 nt, synthetic construct
  source 1..21: mol_type = other RNA
acctgccggaaccccagtggg

SEQ ID NO: 39892 - RNA, 21 nt, synthetic construct
  source 1..21: mol_type = other RNA
ctgccggaaccccagtgggca

SEQ ID NO: 39893 - RNA, 21 nt, synthetic construct
  source 1..21: mol_type = other RNA
ttcaatgaggaccagatgaag

SEQ ID NO: 39894 - RNA, 21 nt, synthetic construct
  source 1..21: mol_type = other RNA
gaccagatgaagtgcgtggcc

SEQ ID NO: 39895 - RNA, 21 nt, synthetic construct
  source 1..21: mol_type = other RNA
ctaccccaagtctgaacaact

SEQ ID NO: 39896 - RNA, 21 nt, synthetic construct
  source 1..21: mol_type = other RNA
ttgagtcctacgataagatca

SEQ ID NO: 39897 - RNA, 21 nt, synthetic construct
  source 1..21: mol_type = other RNA
cccaaagtgctgaccaccacg

SEQ ID NO: 39898 - RNA, 21 nt, synthetic construct
  source 1..21: mol_type = other RNA
ggcacctgcaccaacaaccag

SEQ ID NO: 39899 - RNA, 21 nt, synthetic construct
  source 1..21: mol_type = other RNA
agggctttgagtacaagagag

SEQ ID NO: 39900 - RNA, 21 nt, synthetic construct
  source 1..21: mol_type = other RNA
gaatacgtgccctgtggcccc

SEQ ID NO: 39901 - RNA, 21 nt, synthetic construct
  source 1..21: mol_type = other RNA
ccactatgagtgcgagtgcat

SEQ ID NO: 39902 - RNA, 21 nt, synthetic construct
  source 1..21: mol_type = other RNA
cgtgtcctgggaccggaagac

SEQ ID NO: 39903 - RNA, 21 nt, synthetic construct
  source 1..21: mol_type = other RNA
cacggtgacttcccacacccc

SEQ ID NO: 39904 - RNA, 21 nt, synthetic construct
  source 1..21: mol_type = other RNA
gcctaaaaacctgccggaacc

SEQ ID NO: 39905 - RNA, 21 nt, synthetic construct
  source 1..21: mol_type = other RNA
ccgctccagtttgggaacctg

SEQ ID NO: 39906 - RNA, 21 nt, synthetic construct
  source 1..21: mol_type = other RNA
tgcgtgtccggctgtgtctgt

SEQ ID NO: 39907 - RNA, 21 nt, synthetic construct
  source 1..21: mol_type = other RNA
cagccttgaggcctgcacctg

SEQ ID NO: 39908 - RNA, 21 nt, synthetic construct
  source 1..21: mol_type = other RNA
atccgtgtgttctgctgcaac

SEQ ID NO: 39909 - RNA, 21 nt, synthetic construct
  source 1..21: mol_type = other RNA
atccgtgtgttctgctgcaac

SEQ ID NO: 39910 - RNA, 21 nt, synthetic construct
  source 1..21: mol_type = other RNA
atccgtgtgttctgctgcaac

SEQ ID NO: 39911 - RNA, 21 nt, synthetic construct
  source 1..21: mol_type = other RNA
atccgtgtgttctgctgcaac

SEQ ID NO: 39912 - RNA, 21 nt, synthetic construct
  source 1..21: mol_type = other RNA
ctggacggcggggacacggcc

SEQ ID NO: 39913 - RNA, 21 nt, synthetic construct
  source 1..21: mol_type = other RNA
cgtggcctacggggatggcca

SEQ ID NO: 39914 - RNA, 21 nt, synthetic construct
  source 1..21: mol_type = other RNA
cccacgggaccttccgcatcg

SEQ ID NO: 39915 - RNA, 21 nt, synthetic construct
  source 1..21: mol_type = other RNA
cccaggttgactccaccaagt

SEQ ID NO: 39916 - RNA, 21 nt, synthetic construct
  source 1..21: mol_type = other RNA
ctgaacaacttggaggggacg

SEQ ID NO: 39917 - RNA, 21 nt, synthetic construct
  source 1..21: mol_type = other RNA
ggggccgtctgtgagcagccc

SEQ ID NO: 39918 - RNA, 21 nt, synthetic construct
  source 1..21: mol_type = other RNA
ggggccgtctgtgagcagccc

SEQ ID NO: 39919 - RNA, 21 nt, synthetic construct
  source 1..21: mol_type = other RNA
ggggccgtctgtgagcagccc

SEQ ID NO: 39920 - RNA, 21 nt, synthetic construct
  source 1..21: mol_type = other RNA
ggtgaatgagacctggaccct

SEQ ID NO: 39921 - RNA, 21 nt, synthetic construct
  source 1..21: mol_type = other RNA
ttcctgtggaacggagaggac

SEQ ID NO: 39922 - RNA, 21 nt, synthetic construct
  source 1..21: mol_type = other RNA
gcagaagttggatgggcccac

SEQ ID NO: 39923 - RNA, 21 nt, synthetic construct
  source 1..21: mol_type = other RNA
agaagttggatgggcccacgg

SEQ ID NO: 39924 - RNA, 21 nt, synthetic construct
  source 1..21: mol_type = other RNA
ttggatgggcccacggagcag

SEQ ID NO: 39925 - RNA, 21 nt, synthetic construct
  source 1..21: mol_type = other RNA
cctgtcggcagccaacatcac

SEQ ID NO: 39926 - RNA, 21 nt, synthetic construct
  source 1..21: mol_type = other RNA
ctgttcacaccctcgagcttc

SEQ ID NO: 39927 - RNA, 21 nt, synthetic construct
  source 1..21: mol_type = other RNA
ttcaaccagaaccaggctgac

SEQ ID NO: 39928 - RNA, 21 nt, synthetic construct
  source 1..21: mol_type = other RNA
atgcagaactgccccaagtcc

SEQ ID NO: 39929 - RNA, 21 nt, synthetic construct
  source 1..21: mol_type = other RNA
gcctgtggacggctgcacctg

SEQ ID NO: 39930 - RNA, 21 nt, synthetic construct
  source 1..21: mol_type = other RNA
atgacgcgggcgcctgtgtgc

SEQ ID NO: 39931 - RNA, 21 nt, synthetic construct
  source 1..21: mol_type = other RNA
ctctctgcagaaaagcacagg

SEQ ID NO: 39932 - RNA, 21 nt, synthetic construct
  source 1..21: mol_type = other RNA
cgtggagagctacgagctgat

SEQ ID NO: 39933 - RNA, 21 nt, synthetic construct
  source 1..21: mol_type = other RNA
atggccgtgtcctgggaccgg

SEQ ID NO: 39934 - RNA, 21 nt, synthetic construct
  source 1..21: mol_type = other RNA
catcaatgactttgccacgcg

SEQ ID NO: 39935 - RNA, 21 nt, synthetic construct
  source 1..21: mol_type = other RNA
ccaagtactacgaggcctgcg

SEQ ID NO: 39936 - RNA, 21 nt, synthetic construct
  source 1..21: mol_type = other RNA
tgccacgacgcgggcctgtgt

SEQ ID NO: 39937 - RNA, 21 nt, synthetic construct
  source 1..21: mol_type = other RNA
tgcacctgcacctatgaggac

SEQ ID NO: 39938 - RNA, 21 nt, synthetic construct
  source 1..21: mol_type = other RNA
cacggagcctgctgtgcctac

SEQ ID NO: 39939 - RNA, 21 nt, synthetic construct
  source 1..21: mol_type = other RNA
tttgatgaggactaccccaag

SEQ ID NO: 39940 - RNA, 21 nt, synthetic construct
  source 1..21: mol_type = other RNA
ccaggccgagagcttccccaa

SEQ ID NO: 39941 - RNA, 21 nt, synthetic construct
  source 1..21: mol_type = other RNA
accgaagtgtgagtggacaga

SEQ ID NO: 39942 - RNA, 21 nt, synthetic construct
  source 1..21: mol_type = other RNA
acagagtggtttgacgtggac

SEQ ID NO: 39943 - RNA, 21 nt, synthetic construct
  source 1..21: mol_type = other RNA
ggctggactacagctacccca

SEQ ID NO: 39944 - RNA, 21 nt, synthetic construct
  source 1..21: mol_type = other RNA
ggtcgtggaatgcagcctgga

SEQ ID NO: 39945 - RNA, 21 nt, synthetic construct
  source 1..21: mol_type = other RNA
ggctggactacagctacccca

SEQ ID NO: 39946 - RNA, 21 nt, synthetic construct
  source 1..21: mol_type = other RNA
ggtcgtggaatgcagcctgga

SEQ ID NO: 39947 - RNA, 21 nt, synthetic construct
  source 1..21: mol_type = other RNA
ggctggactacagctacccca

SEQ ID NO: 39948 - RNA, 21 nt, synthetic construct
  source 1..21: mol_type = other RNA
ggtcgtggaatgcagcctgga

SEQ ID NO: 39949 - RNA, 21 nt, synthetic construct
  source 1..21: mol_type = other RNA
ggctggactacagctacccca

SEQ ID NO: 39950 - RNA, 21 nt, synthetic construct
  source 1..21: mol_type = other RNA
ggtcgtggaatgcagcctgga

SEQ ID NO: 39951 - RNA, 21 nt, synthetic construct
  source 1..21: mol_type = other RNA
gaactgcacggtggccaggtg

SEQ ID NO: 39952 - RNA, 21 nt, synthetic construct
  source 1..21: mol_type = other RNA
ggccaggtgcgtgggtgacaa

SEQ ID NO: 39953 - RNA, 21 nt, synthetic construct
  source 1..21: mol_type = other RNA
tcacctgcgtgaacaagcacc

SEQ ID NO: 39954 - RNA, 21 nt, synthetic construct
  source 1..21: mol_type = other RNA
attccggtgagcagcggtttc

SEQ ID NO: 39955 - RNA, 21 nt, synthetic construct
  source 1..21: mol_type = other RNA
ccggtgagcagcggtttcagc

SEQ ID NO: 39956 - RNA, 21 nt, synthetic construct
  source 1..21: mol_type = other RNA
gagtgaggccgacgtcacctg

SEQ ID NO: 39957 - RNA, 21 nt, synthetic construct
  source 1..21: mol_type = other RNA
caactgcacctatgtcctcat

SEQ ID NO: 39958 - RNA, 21 nt, synthetic construct
  source 1..21: mol_type = other RNA
tgaccccgctccagtttggga

SEQ ID NO: 39959 - RNA, 21 nt, synthetic construct
  source 1..21: mol_type = other RNA
tccaccaagtactacgaggcc

SEQ ID NO: 39960 - RNA, 21 nt, synthetic construct
  source 1..21: mol_type = other RNA
cctaaaaacctgccggaaccc

SEQ ID NO: 39961 - RNA, 21 nt, synthetic construct
  source 1..21: mol_type = other RNA
ccttcgccaacacctggaagg

SEQ ID NO: 39962 - RNA, 21 nt, synthetic construct
  source 1..21: mol_type = other RNA
ccaccaagtactacgaggcct

SEQ ID NO: 39963 - RNA, 21 nt, synthetic construct
  source 1..21: mol_type = other RNA
gaatgagacctggaccctgga

SEQ ID NO: 39964 - RNA, 21 nt, synthetic construct
  source 1..21: mol_type = other RNA
agccaacatcaccctgttcac

SEQ ID NO: 39965 - RNA, 21 nt, synthetic construct
  source 1..21: mol_type = other RNA
gcaccttcctcaatgacgcgg

SEQ ID NO: 39966 - RNA, 21 nt, synthetic construct
  source 1..21: mol_type = other RNA
caccttcctcaatgacgcggg

SEQ ID NO: 39967 - RNA, 21 nt, synthetic construct
  source 1..21: mol_type = other RNA
tgtcggcagccaacatcaccc

SEQ ID NO: 39968 - RNA, 21 nt, synthetic construct
  source 1..21: mol_type = other RNA
gtgcgtggcccagtgtggctg

SEQ ID NO: 39969 - RNA, 21 nt, synthetic construct
  source 1..21: mol_type = other RNA
aaaccggctgctgctactcct

SEQ ID NO: 39970 - RNA, 21 nt, synthetic construct
  source 1..21: mol_type = other RNA
cccaaatacgccaaccagacc

SEQ ID NO: 39971 - RNA, 21 nt, synthetic construct
  source 1..21: mol_type = other RNA
agctcttcgtggagagctacg

SEQ ID NO: 39972 - RNA, 21 nt, synthetic construct
  source 1..21: mol_type = other RNA
gatgggcccacggagcagtgc

SEQ ID NO: 39973 - RNA, 21 nt, synthetic construct
  source 1..21: mol_type = other RNA
gtcaccgagaacatcccctgt

SEQ ID NO: 39974 - RNA, 21 nt, synthetic construct
  source 1..21: mol_type = other RNA
agtgaggccgacgtcacctgc

SEQ ID NO: 39975 - RNA, 21 nt, synthetic construct
  source 1..21: mol_type = other RNA
gaagttggatgggcccacgga

SEQ ID NO: 39976 - RNA, 21 nt, synthetic construct
  source 1..21: mol_type = other RNA
tacatgcagaactgccccaag

SEQ ID NO: 39977 - RNA, 21 nt, synthetic construct
  source 1..21: mol_type = other RNA
acacactgcgtgtccggctgt

SEQ ID NO: 39978 - RNA, 21 nt, synthetic construct
  source 1..21: mol_type = other RNA
ttcaacgagttctatgcccac

SEQ ID NO: 39979 - RNA, 21 nt, synthetic construct
  source 1..21: mol_type = other RNA
ctgtgggaccaccggcaccac

SEQ ID NO: 39980 - RNA, 21 nt, synthetic construct
  source 1..21: mol_type = other RNA
caatgactttgccacgcgtag

SEQ ID NO: 39981 - RNA, 21 nt, synthetic construct
  source 1..21: mol_type = other RNA
ttctgcacggctgtggctgcc

SEQ ID NO: 39982 - RNA, 21 nt, synthetic construct
  source 1..21: mol_type = other RNA
aacctgccggaaccccagtgg

SEQ ID NO: 39983 - RNA, 21 nt, synthetic construct
  source 1..21: mol_type = other RNA
ctaccaggacgtcatctacaa

SEQ ID NO: 39984 - RNA, 21 nt, synthetic construct
  source 1..21: mol_type = other RNA
agcgggaggagctgccttaca

SEQ ID NO: 39985 - RNA, 21 nt, synthetic construct
  source 1..21: mol_type = other RNA
gcgggaggagctgccttacag

SEQ ID NO: 39986 - RNA, 21 nt, synthetic construct
  source 1..21: mol_type = other RNA
cgggaggagctgccttacagc

SEQ ID NO: 39987 - RNA, 21 nt, synthetic construct
  source 1..21: mol_type = other RNA
ctgtggaacggagaggacagt

SEQ ID NO: 39988 - RNA, 21 nt, synthetic construct
  source 1..21: mol_type = other RNA
cccacggagcagtgcccggac

SEQ ID NO: 39989 - RNA, 21 nt, synthetic construct
  source 1..21: mol_type = other RNA
ccacctttgtggaatactcac

SEQ ID NO: 39990 - RNA, 21 nt, synthetic construct
  source 1..21: mol_type = other RNA
cacctttgtggaatactcacg

SEQ ID NO: 39991 - RNA, 21 nt, synthetic construct
  source 1..21: mol_type = other RNA
ctcacgccagtgcgcccacgc

SEQ ID NO: 39992 - RNA, 21 nt, synthetic construct
  source 1..21: mol_type = other RNA
cacgccagtgcgcccacgcgg

SEQ ID NO: 39993 - RNA, 21 nt, synthetic construct
  source 1..21: mol_type = other RNA
acgccagtgcgcccacgcggg

SEQ ID NO: 39994 - RNA, 21 nt, synthetic construct
  source 1..21: mol_type = other RNA
gcctgcccctcgggcagtgcc

SEQ ID NO: 39995 - RNA, 21 nt, synthetic construct
  source 1..21: mol_type = other RNA
gacgctcagcctggacggcgg

SEQ ID NO: 39996 - RNA, 21 nt, synthetic construct
  source 1..21: mol_type = other RNA
gcggggacacggccatccggg

SEQ ID NO: 39997 - RNA, 21 nt, synthetic construct
  source 1..21: mol_type = other RNA
cggggacacggccatccgggt

SEQ ID NO: 39998 - RNA, 21 nt, synthetic construct
  source 1..21: mol_type = other RNA
gccgcgctgtcctcctatgtg

SEQ ID NO: 39999 - RNA, 21 nt, synthetic construct
  source 1..21: mol_type = other RNA
acacgctggacgtgggctgtt

SEQ ID NO: 40000 - RNA, 21 nt, synthetic construct
  source 1..21: mol_type = other RNA
acaacgaggccacctacaagc

SEQ ID NO: 40001 - RNA, 21 nt, synthetic construct
  source 1..21: mol_type = other RNA
cttcatcacctttgatggcga

SEQ ID NO: 40002 - RNA, 21 nt, synthetic construct
  source 1..21: mol_type = other RNA
ggggatcttcctggtcatcga

SEQ ID NO: 40003 - RNA, 21 nt, synthetic construct
  source 1..21: mol_type = other RNA
caggttgactccaccaagtac

SEQ ID NO: 40004 - RNA, 21 nt, synthetic construct
  source 1..21: mol_type = other RNA
tgtgtgtgtcctggcggactc

SEQ ID NO: 40005 - RNA, 21 nt, synthetic construct
  source 1..21: mol_type = other RNA
gtgtgtgtcctggcggactcc

SEQ ID NO: 40006 - RNA, 21 nt, synthetic construct
  source 1..21: mol_type = other RNA
ggaccagatgaagtgcgtggc

SEQ ID NO: 40007 - RNA, 21 nt, synthetic construct
  source 1..21: mol_type = other RNA
ccaggacgtcatctacaacac

SEQ ID NO: 40008 - RNA, 21 nt, synthetic construct
  source 1..21: mol_type = other RNA
cggagcctgctgtgcctaccc

SEQ ID NO: 40009 - RNA, 21 nt, synthetic construct
  source 1..21: mol_type = other RNA
tgatgaggactaccccaagtc

SEQ ID NO: 40010 - RNA, 21 nt, synthetic construct
  source 1..21: mol_type = other RNA
accccaagtctgaacaacttg

SEQ ID NO: 40011 - RNA, 21 nt, synthetic construct
  source 1..21: mol_type = other RNA
gttgagtcctacgataagatc

SEQ ID NO: 40012 - RNA, 21 nt, synthetic construct
  source 1..21: mol_type = other RNA
aagatgtgctacaactacagg

SEQ ID NO: 40013 - RNA, 21 nt, synthetic construct
  source 1..21: mol_type = other RNA
agtggacagagtggtttgacg

SEQ ID NO: 40014 - RNA, 21 nt, synthetic construct
  source 1..21: mol_type = other RNA
ggcaggtgaatgagacctgga

SEQ ID NO: 40015 - RNA, 21 nt, synthetic construct
  source 1..21: mol_type = other RNA
gtttgaccaaattccggtgag

SEQ ID NO: 40016 - RNA, 21 nt, synthetic construct
  source 1..21: mol_type = other RNA
cttccacaacaacaccgaggg

SEQ ID NO: 40017 - RNA, 21 nt, synthetic construct
  source 1..21: mol_type = other RNA
tgctgtcccaccttccgctgc

SEQ ID NO: 40018 - RNA, 21 nt, synthetic construct
  source 1..21: mol_type = other RNA
gggaggagctgccttacagcc

SEQ ID NO: 40019 - RNA, 21 nt, synthetic construct
  source 1..21: mol_type = other RNA
cagtgcccggacccgctgccc

SEQ ID NO: 40020 - RNA, 21 nt, synthetic construct
  source 1..21: mol_type = other RNA
gtacatgcagaactgccccaa

SEQ ID NO: 40021 - RNA, 21 nt, synthetic construct
  source 1..21: mol_type = other RNA
caccaggactacaagggcagg

SEQ ID NO: 40022 - RNA, 21 nt, synthetic construct
  source 1..21: mol_type = other RNA
ctccaccaagtactacgaggc

SEQ ID NO: 40023 - RNA, 21 nt, synthetic construct
  source 1..21: mol_type = other RNA
actaccagccctgcggggcac

SEQ ID NO: 40024 - RNA, 21 nt, synthetic construct
  source 1..21: mol_type = other RNA
gtgagtggacagagtggtttg

SEQ ID NO: 40025 - RNA, 21 nt, synthetic construct
  source 1..21: mol_type = other RNA
tgcacctatgtcctcatgaga

SEQ ID NO: 40026 - RNA, 21 nt, synthetic construct
  source 1..21: mol_type = other RNA
gcgtgttcctcaactccatct

SEQ ID NO: 40027 - RNA, 21 nt, synthetic construct
  source 1..21: mol_type = other RNA
atcgtcaccgagaacatcccc

SEQ ID NO: 40028 - RNA, 21 nt, synthetic construct
  source 1..21: mol_type = other RNA
tcacgccagtgcgcccacgcg

SEQ ID NO: 40029 - RNA, 21 nt, synthetic construct
  source 1..21: mol_type = other RNA
cgcgggcgcctgtgtgcccgc

SEQ ID NO: 40030 - RNA, 21 nt, synthetic construct
  source 1..21: mol_type = other RNA
tgccacacgctggacgtgggc

SEQ ID NO: 40031 - RNA, 21 nt, synthetic construct
  source 1..21: mol_type = other RNA
cacggctgtggctgcctacgc

SEQ ID NO: 40032 - RNA, 21 nt, synthetic construct
  source 1..21: mol_type = other RNA
acctctcaggccgagaccagc

SEQ ID NO: 40033 - RNA, 21 nt, synthetic construct
  source 1..21: mol_type = other RNA
aggccatgcagcaccagtgca

SEQ ID NO: 40034 - RNA, 21 nt, synthetic construct
  source 1..21: mol_type = other RNA
tacaactacaggatccgggtc

SEQ ID NO: 40035 - RNA, 21 nt, synthetic construct
  source 1..21: mol_type = other RNA
ctctcaggccgagaccagcac

SEQ ID NO: 40036 - RNA, 21 nt, synthetic construct
  source 1..21: mol_type = other RNA
cgtgttcctcaactccatcta

SEQ ID NO: 40037 - RNA, 21 nt, synthetic construct
  source 1..21: mol_type = other RNA
tccatctacacgcagctgccc

SEQ ID NO: 40038 - RNA, 21 nt, synthetic construct
  source 1..21: mol_type = other RNA
ctgcccctgtcggcagccaac

SEQ ID NO: 40039 - RNA, 21 nt, synthetic construct
  source 1..21: mol_type = other RNA
tgtggacggctgcacctgccc

SEQ ID NO: 40040 - RNA, 21 nt, synthetic construct
  source 1..21: mol_type = other RNA
gcgggcgcctgtgtgcccgcc

SEQ ID NO: 40041 - RNA, 21 nt, synthetic construct
  source 1..21: mol_type = other RNA
gctgccacacgctggacgtgg

SEQ ID NO: 40042 - RNA, 21 nt, synthetic construct
  source 1..21: mol_type = other RNA
ccacacgctggacgtgggctg

SEQ ID NO: 40043 - RNA, 21 nt, synthetic construct
  source 1..21: mol_type = other RNA
cactgcgtgtccggctgtgtc

SEQ ID NO: 40044 - RNA, 21 nt, synthetic construct
  source 1..21: mol_type = other RNA
tcgtcaccgagaacatcccct

SEQ ID NO: 40045 - RNA, 21 nt, synthetic construct
  source 1..21: mol_type = other RNA
cccctgtgggaccaccggcac

SEQ ID NO: 40046 - RNA, 21 nt, synthetic construct
  source 1..21: mol_type = other RNA
cagccctgcggggcaccctgc

SEQ ID NO: 40047 - RNA, 21 nt, synthetic construct
  source 1..21: mol_type = other RNA
aaaacctgccggaaccccagt

SEQ ID NO: 40048 - RNA, 21 nt, synthetic construct
  source 1..21: mol_type = other RNA
cactccacgacaagcccggcc

SEQ ID NO: 40049 - RNA, 21 nt, synthetic construct
  source 1..21: mol_type = other RNA
gactgggtccagctcaggccc

SEQ ID NO: 40050 - RNA, 21 nt, synthetic construct
  source 1..21: mol_type = other RNA
cttcggcctggtgtgcaggaa

SEQ ID NO: 40051 - RNA, 21 nt, synthetic construct
  source 1..21: mol_type = other RNA
cacccttggtacagccaccac

SEQ ID NO: 40052 - RNA, 21 nt, synthetic construct
  source 1..21: mol_type = other RNA
cagtgactggcgaggtgcaac

SEQ ID NO: 40053 - RNA, 21 nt, synthetic construct
  source 1..21: mol_type = other RNA
tgctactcctgtgaggaggac

SEQ ID NO: 40054 - RNA, 21 nt, synthetic construct
  source 1..21: mol_type = other RNA
aatacgtgccctgtggcccct

SEQ ID NO: 40055 - RNA, 21 nt, synthetic construct
  source 1..21: mol_type = other RNA
ccatctacacgcagctgcccc

SEQ ID NO: 40056 - RNA, 21 nt, synthetic construct
  source 1..21: mol_type = other RNA
tggaacggagaggacagtgcc

SEQ ID NO: 40057 - RNA, 21 nt, synthetic construct
  source 1..21: mol_type = other RNA
ggtcgactgcaacacctgcac

SEQ ID NO: 40058 - RNA, 21 nt, synthetic construct
  source 1..21: mol_type = other RNA
ctacatggggatcttcctggt

SEQ ID NO: 40059 - RNA, 21 nt, synthetic construct
  source 1..21: mol_type = other RNA
atacgccaaccagacctgtgg

SEQ ID NO: 40060 - RNA, 21 nt, synthetic construct
  source 1..21: mol_type = other RNA
catctacacgcagctgcccct

SEQ ID NO: 40061 - RNA, 21 nt, synthetic construct
  source 1..21: mol_type = other RNA
tcttcgtggagagctacgagc

SEQ ID NO: 40062 - RNA, 21 nt, synthetic construct
  source 1..21: mol_type = other RNA
aggggccgtctgtgagcagcc

SEQ ID NO: 40063 - RNA, 21 nt, synthetic construct
  source 1..21: mol_type = other RNA
aggggccgtctgtgagcagcc

SEQ ID NO: 40064 - RNA, 21 nt, synthetic construct
  source 1..21: mol_type = other RNA
aggggccgtctgtgagcagcc

SEQ ID NO: 40065 - RNA, 21 nt, synthetic construct
  source 1..21: mol_type = other RNA
gccttcgccaacacctggaag

SEQ ID NO: 40066 - RNA, 21 nt, synthetic construct
  source 1..21: mol_type = other RNA
atcaagctcttcgtggagagc

SEQ ID NO: 40067 - RNA, 21 nt, synthetic construct
  source 1..21: mol_type = other RNA
ctcttcgtggagagctacgag

SEQ ID NO: 40068 - RNA, 21 nt, synthetic construct
  source 1..21: mol_type = other RNA
ccgctcccaggttgactccac

SEQ ID NO: 40069 - RNA, 21 nt, synthetic construct
  source 1..21: mol_type = other RNA
gcggactccggacacctgccc

SEQ ID NO: 40070 - RNA, 21 nt, synthetic construct
  source 1..21: mol_type = other RNA
ggaaccccagtgggcactgcc

SEQ ID NO: 40071 - RNA, 21 nt, synthetic construct
  source 1..21: mol_type = other RNA
acgtcatctacaacaccaccg

SEQ ID NO: 40072 - RNA, 21 nt, synthetic construct
  source 1..21: mol_type = other RNA
cagcaaccgaaaagaccaccc

SEQ ID NO: 40073 - RNA, 21 nt, synthetic construct
  source 1..21: mol_type = other RNA
gtggtttgacgtggacttccc

SEQ ID NO: 40074 - RNA, 21 nt, synthetic construct
  source 1..21: mol_type = other RNA
tggtttgacgtggacttccca

SEQ ID NO: 40075 - RNA, 21 nt, synthetic construct
  source 1..21: mol_type = other RNA
tggctggactacagctacccc

SEQ ID NO: 40076 - RNA, 21 nt, synthetic construct
  source 1..21: mol_type = other RNA
tggctggactacagctacccc

SEQ ID NO: 40077 - RNA, 21 nt, synthetic construct
  source 1..21: mol_type = other RNA
tggctggactacagctacccc

SEQ ID NO: 40078 - RNA, 21 nt, synthetic construct
  source 1..21: mol_type = other RNA
tggctggactacagctacccc

SEQ ID NO: 40079 - RNA, 21 nt, synthetic construct
  source 1..21: mol_type = other RNA
ctgcgtgaacaagcacctgcc

SEQ ID NO: 40080 - RNA, 21 nt, synthetic construct
  source 1..21: mol_type = other RNA
cagcaagaacggcgtgcttgt

SEQ ID NO: 40081 - RNA, 21 nt, synthetic construct
  source 1..21: mol_type = other RNA
gttccacccgtcactgtcttc

SEQ ID NO: 40082 - RNA, 21 nt, synthetic construct
  source 1..21: mol_type = other RNA
ctgtcttccccagcctgagcc

SEQ ID NO: 40083 - RNA, 21 nt, synthetic construct
  source 1..21: mol_type = other RNA
gccaaccagacctgtggcctg

SEQ ID NO: 40084 - RNA, 21 nt, synthetic construct
  source 1..21: mol_type = other RNA
tggatgggcccacggagcagt

SEQ ID NO: 40085 - RNA, 21 nt, synthetic construct
  source 1..21: mol_type = other RNA
acggagcagtgcccggacccg

SEQ ID NO: 40086 - RNA, 21 nt, synthetic construct
  source 1..21: mol_type = other RNA
cggagcagtgcccggacccgc

SEQ ID NO: 40087 - RNA, 21 nt, synthetic construct
  source 1..21: mol_type = other RNA
gtgcccggacccgctgccctt

SEQ ID NO: 40088 - RNA, 21 nt, synthetic construct
  source 1..21: mol_type = other RNA
aggacctgtgccgctgcccca

SEQ ID NO: 40089 - RNA, 21 nt, synthetic construct
  source 1..21: mol_type = other RNA
tgtgccgctgccccacctgcc

SEQ ID NO: 40090 - RNA, 21 nt, synthetic construct
  source 1..21: mol_type = other RNA
cacgcactctggctgcctgcc

SEQ ID NO: 40091 - RNA, 21 nt, synthetic construct
  source 1..21: mol_type = other RNA
ggacctgccgtgccctggcac

SEQ ID NO: 40092 - RNA, 21 nt, synthetic construct
  source 1..21: mol_type = other RNA
gtgacgctcagcctggacggc

SEQ ID NO: 40093 - RNA, 21 nt, synthetic construct
  source 1..21: mol_type = other RNA
ctccatctacacgcagctgcc

SEQ ID NO: 40094 - RNA, 21 nt, synthetic construct
  source 1..21: mol_type = other RNA
agctgcccctgtcggcagcca

SEQ ID NO: 40095 - RNA, 21 nt, synthetic construct
  source 1..21: mol_type = other RNA
tcatgcaggtgtttgtcaggc

SEQ ID NO: 40096 - RNA, 21 nt, synthetic construct
  source 1..21: mol_type = other RNA
cggcctgtgtgggaacttcaa

SEQ ID NO: 40097 - RNA, 21 nt, synthetic construct
  source 1..21: mol_type = other RNA
ggcctgtgtgggaacttcaac

SEQ ID NO: 40098 - RNA, 21 nt, synthetic construct
  source 1..21: mol_type = other RNA
gcctgtgtgggaacttcaacc

SEQ ID NO: 40099 - RNA, 21 nt, synthetic construct
  source 1..21: mol_type = other RNA
ggaacttcaaccagaaccagg

SEQ ID NO: 40100 - RNA, 21 nt, synthetic construct
  source 1..21: mol_type = other RNA
gaacttcaaccagaaccaggc

SEQ ID NO: 40101 - RNA, 21 nt, synthetic construct
  source 1..21: mol_type = other RNA
agccttcgccaacacctggaa

SEQ ID NO: 40102 - RNA, 21 nt, synthetic construct
  source 1..21: mol_type = other RNA
ccaacacctggaaggcccagg

SEQ ID NO: 40103 - RNA, 21 nt, synthetic construct
  source 1..21: mol_type = other RNA
caacacctggaaggcccaggc

SEQ ID NO: 40104 - RNA, 21 nt, synthetic construct
  source 1..21: mol_type = other RNA
tgtcctcctatgtgcacgcct

SEQ ID NO: 40105 - RNA, 21 nt, synthetic construct
  source 1..21: mol_type = other RNA
gtcctcctatgtgcacgcctg

SEQ ID NO: 40106 - RNA, 21 nt, synthetic construct
  source 1..21: mol_type = other RNA
tcctcctatgtgcacgcctgt

SEQ ID NO: 40107 - RNA, 21 nt, synthetic construct
  source 1..21: mol_type = other RNA
tcctatgtgcacgcctgtgcc

SEQ ID NO: 40108 - RNA, 21 nt, synthetic construct
  source 1..21: mol_type = other RNA
cctatgtgcacgcctgtgccg

SEQ ID NO: 40109 - RNA, 21 nt, synthetic construct
  source 1..21: mol_type = other RNA
ctatgtgcacgcctgtgccgc

SEQ ID NO: 40110 - RNA, 21 nt, synthetic construct
  source 1..21: mol_type = other RNA
gcaccaagtacatgcagaact

SEQ ID NO: 40111 - RNA, 21 nt, synthetic construct
  source 1..21: mol_type = other RNA
accaagtacatgcagaactgc

SEQ ID NO: 40112 - RNA, 21 nt, synthetic construct
  source 1..21: mol_type = other RNA
acgcgggcgcctgtgtgcccg

SEQ ID NO: 40113 - RNA, 21 nt, synthetic construct
  source 1..21: mol_type = other RNA
ctgccacacgctggacgtggg

SEQ ID NO: 40114 - RNA, 21 nt, synthetic construct
  source 1..21: mol_type = other RNA
gccacacgctggacgtgggct

SEQ ID NO: 40115 - RNA, 21 nt, synthetic construct
  source 1..21: mol_type = other RNA
ctggacgtgggctgtttcagc

SEQ ID NO: 40116 - RNA, 21 nt, synthetic construct
  source 1..21: mol_type = other RNA
acactgcgtgtccggctgtgt

SEQ ID NO: 40117 - RNA, 21 nt, synthetic construct
  source 1..21: mol_type = other RNA
gaggccacctacaagcctgga

SEQ ID NO: 40118 - RNA, 21 nt, synthetic construct
  source 1..21: mol_type = other RNA
ggccacctacaagcctggaga

SEQ ID NO: 40119 - RNA, 21 nt, synthetic construct
  source 1..21: mol_type = other RNA
tctgcctgggcacctgcgtgg

SEQ ID NO: 40120 - RNA, 21 nt, synthetic construct
  source 1..21: mol_type = other RNA
tggccacttcatcacctttga

SEQ ID NO: 40121 - RNA, 21 nt, synthetic construct
  source 1..21: mol_type = other RNA
ccacccacgggaccttccgca

SEQ ID NO: 40122 - RNA, 21 nt, synthetic construct
  source 1..21: mol_type = other RNA
ttccgcatcgtcaccgagaac

SEQ ID NO: 40123 - RNA, 21 nt, synthetic construct
  source 1..21: mol_type = other RNA
gaacatcccctgtgggaccac

SEQ ID NO: 40124 - RNA, 21 nt, synthetic construct
  source 1..21: mol_type = other RNA
gccatcaagctcttcgtggag

SEQ ID NO: 40125 - RNA, 21 nt, synthetic construct
  source 1..21: mol_type = other RNA
catcaagctcttcgtggagag

SEQ ID NO: 40126 - RNA, 21 nt, synthetic construct
  source 1..21: mol_type = other RNA
gctcttcgtggagagctacga

SEQ ID NO: 40127 - RNA, 21 nt, synthetic construct
  source 1..21: mol_type = other RNA
gtggagagctacgagctgatc

SEQ ID NO: 40128 - RNA, 21 nt, synthetic construct
  source 1..21: mol_type = other RNA
tcttcctggtcatcgagaccc

SEQ ID NO: 40129 - RNA, 21 nt, synthetic construct
  source 1..21: mol_type = other RNA
ccgactgcaccaggactacaa

SEQ ID NO: 40130 - RNA, 21 nt, synthetic construct
  source 1..21: mol_type = other RNA
gactacaagggcagggtctgc

SEQ ID NO: 40131 - RNA, 21 nt, synthetic construct
  source 1..21: mol_type = other RNA
atgccatcaatgactttgcca

SEQ ID NO: 40132 - RNA, 21 nt, synthetic construct
  source 1..21: mol_type = other RNA
ggttgactccaccaagtacta

SEQ ID NO: 40133 - RNA, 21 nt, synthetic construct
  source 1..21: mol_type = other RNA
ctgtggctgcctacgcccagg

SEQ ID NO: 40134 - RNA, 21 nt, synthetic construct
  source 1..21: mol_type = other RNA
tgtggctgcctacgcccaggc

SEQ ID NO: 40135 - RNA, 21 nt, synthetic construct
  source 1..21: mol_type = other RNA
ccacgacgcgggcctgtgtgt

SEQ ID NO: 40136 - RNA, 21 nt, synthetic construct
  source 1..21: mol_type = other RNA
ttgttctgtgacttctacaac

SEQ ID NO: 40137 - RNA, 21 nt, synthetic construct
  source 1..21: mol_type = other RNA
gctgtgagtggcactaccagc

SEQ ID NO: 40138 - RNA, 21 nt, synthetic construct
  source 1..21: mol_type = other RNA
ctaaaaacctgccggaacccc

SEQ ID NO: 40139 - RNA, 21 nt, synthetic construct
  source 1..21: mol_type = other RNA
taaaaacctgccggaacccca

SEQ ID NO: 40140 - RNA, 21 nt, synthetic construct
  source 1..21: mol_type = other RNA
agatgaagtgcgtggcccagt

SEQ ID NO: 40141 - RNA, 21 nt, synthetic construct
  source 1..21: mol_type = other RNA
cacctgcacctatgaggacag

SEQ ID NO: 40142 - RNA, 21 nt, synthetic construct
  source 1..21: mol_type = other RNA
ggtaccaccacctgccagccc

SEQ ID NO: 40143 - RNA, 21 nt, synthetic construct
  source 1..21: mol_type = other RNA
gccccggtgtcagtggacaga

SEQ ID NO: 40144 - RNA, 21 nt, synthetic construct
  source 1..21: mol_type = other RNA
ggtgtcagtggacagagtggt

SEQ ID NO: 40145 - RNA, 21 nt, synthetic construct
  source 1..21: mol_type = other RNA
gatgaggactaccccaagtct

SEQ ID NO: 40146 - RNA, 21 nt, synthetic construct
  source 1..21: mol_type = other RNA
tctgaacaacttggaggggac

SEQ ID NO: 40147 - RNA, 21 nt, synthetic construct
  source 1..21: mol_type = other RNA
cgttgagtcctacgataagat

SEQ ID NO: 40148 - RNA, 21 nt, synthetic construct
  source 1..21: mol_type = other RNA
gcagcctaaggacatagagtg

SEQ ID NO: 40149 - RNA, 21 nt, synthetic construct
  source 1..21: mol_type = other RNA
cgaagtgtgagtggacagagt

SEQ ID NO: 40150 - RNA, 21 nt, synthetic construct
  source 1..21: mol_type = other RNA
gaagtgtgagtggacagagtg

SEQ ID NO: 40151 - RNA, 21 nt, synthetic construct
  source 1..21: mol_type = other RNA
tccacggtgacttcccacacc

SEQ ID NO: 40152 - RNA, 21 nt, synthetic construct
  source 1..21: mol_type = other RNA
ccagcctggtgtccccctgcg

SEQ ID NO: 40153 - RNA, 21 nt, synthetic construct
  source 1..21: mol_type = other RNA
ggagttgggccaggtcgtgga

SEQ ID NO: 40154 - RNA, 21 nt, synthetic construct
  source 1..21: mol_type = other RNA
gggaagttcaagatgtgcttc

SEQ ID NO: 40155 - RNA, 21 nt, synthetic construct
  source 1..21: mol_type = other RNA
ccagcctggtgtccccctgcg

SEQ ID NO: 40156 - RNA, 21 nt, synthetic construct
  source 1..21: mol_type = other RNA
ggagttgggccaggtcgtgga

SEQ ID NO: 40157 - RNA, 21 nt, synthetic construct
  source 1..21: mol_type = other RNA
gggaagttcaagatgtgcttc

SEQ ID NO: 40158 - RNA, 21 nt, synthetic construct
  source 1..21: mol_type = other RNA
tccacggtgacttcccacacc

SEQ ID NO: 40159 - RNA, 21 nt, synthetic construct
  source 1..21: mol_type = other RNA
ccagcctggtgtccccctgcg

SEQ ID NO: 40160 - RNA, 21 nt, synthetic construct
  source 1..21: mol_type = other RNA
ggagttgggccaggtcgtgga

SEQ ID NO: 40161 - RNA, 21 nt, synthetic construct
  source 1..21: mol_type = other RNA
gggaagttcaagatgtgcttc

SEQ ID NO: 40162 - RNA, 21 nt, synthetic construct
  source 1..21: mol_type = other RNA
ggagttgggccaggtcgtgga

SEQ ID NO: 40163 - RNA, 21 nt, synthetic construct
  source 1..21: mol_type = other RNA
gggaagttcaagatgtgcttc

SEQ ID NO: 40164 - RNA, 21 nt, synthetic construct
  source 1..21: mol_type = other RNA
ccggcaggtgaatgagacctg

SEQ ID NO: 40165 - RNA, 21 nt, synthetic construct
  source 1..21: mol_type = other RNA
aggtgaatgagacctggaccc

SEQ ID NO: 40166 - RNA, 21 nt, synthetic construct
  source 1..21: mol_type = other RNA
gtgaatgagacctggaccctg

SEQ ID NO: 40167 - RNA, 21 nt, synthetic construct
  source 1..21: mol_type = other RNA
tgaatgagacctggaccctgg

SEQ ID NO: 40168 - RNA, 21 nt, synthetic construct
  source 1..21: mol_type = other RNA
cctgcgtgaacaagcacctgc

SEQ ID NO: 40169 - RNA, 21 nt, synthetic construct
  source 1..21: mol_type = other RNA
tgaacaagcacctgcccatca

SEQ ID NO: 40170 - RNA, 21 nt, synthetic construct
  source 1..21: mol_type = other RNA
gggcaactgcacctatgtcct

SEQ ID NO: 40171 - RNA, 21 nt, synthetic construct
  source 1..21: mol_type = other RNA
ggcaactgcacctatgtcctc

SEQ ID NO: 40172 - RNA, 21 nt, synthetic construct
  source 1..21: mol_type = other RNA
acctatgtcctcatgagagag

SEQ ID NO: 40173 - RNA, 21 nt, synthetic construct
  source 1..21: mol_type = other RNA
ggcccggctgccctacagcct

SEQ ID NO: 40174 - RNA, 21 nt, synthetic construct
  source 1..21: mol_type = other RNA
gcccggctgccctacagcctc

SEQ ID NO: 40175 - RNA, 21 nt, synthetic construct
  source 1..21: mol_type = other RNA
tccacaacaacaccgagggcc

SEQ ID NO: 40176 - RNA, 21 nt, synthetic construct
  source 1..21: mol_type = other RNA
gcggcacctgcaccaacaacc

SEQ ID NO: 40177 - RNA, 21 nt, synthetic construct
  source 1..21: mol_type = other RNA
cctgcaccaacaaccagaggg

SEQ ID NO: 40178 - RNA, 21 nt, synthetic construct
  source 1..21: mol_type = other RNA
cccggggagtgtgcagtgact

SEQ ID NO: 40179 - RNA, 21 nt, synthetic construct
  source 1..21: mol_type = other RNA
aactgccagtcctgcgtgtgt

SEQ ID NO: 40180 - RNA, 21 nt, synthetic construct
  source 1..21: mol_type = other RNA
gcctcaggaaaaccggctgct

SEQ ID NO: 40181 - RNA, 21 nt, synthetic construct
  source 1..21: mol_type = other RNA
catgcagcaccagtgcacctg

SEQ ID NO: 40182 - RNA, 21 nt, synthetic construct
  source 1..21: mol_type = other RNA
tccacgaggagacggtgccct

SEQ ID NO: 40183 - RNA, 21 nt, synthetic construct
  source 1..21: mol_type = other RNA
ccgcgctgtcctcctatgtgc

SEQ ID NO: 40184 - RNA, 21 nt, synthetic construct
  source 1..21: mol_type = other RNA
tgacgctcagcctggacggcg

SEQ ID NO: 40185 - RNA, 21 nt, synthetic construct
  source 1..21: mol_type = other RNA
cacctatgtcctcatgagaga

SEQ ID NO: 40186 - RNA, 21 nt, synthetic construct
  source 1..21: mol_type = other RNA
ccgagggccagtgcggcacct

SEQ ID NO: 40187 - RNA, 21 nt, synthetic construct
  source 1..21: mol_type = other RNA
ctgcggcctgtgcgggaactt

SEQ ID NO: 40188 - RNA, 21 nt, synthetic construct
  source 1..21: mol_type = other RNA
cgagggccagtgcggcacctg

SEQ ID NO: 40189 - RNA, 21 nt, synthetic construct
  source 1..21: mol_type = other RNA
gactgcgagtgtttctgcacg

SEQ ID NO: 40190 - RNA, 21 nt, synthetic construct
  source 1..21: mol_type = other RNA
gagggccagtgcggcacctgc

SEQ ID NO: 40191 - RNA, 21 nt, synthetic construct
  source 1..21: mol_type = other RNA
cctgtgcgggaacttcgacga

SEQ ID NO: 40192 - RNA, 21 nt, synthetic construct
  source 1..21: mol_type = other RNA
gcggcctgtgcgggaacttcg

SEQ ID NO: 40193 - RNA, 21 nt, synthetic construct
  source 1..21: mol_type = other RNA
cagatgtgcggcctgtgtggg

SEQ ID NO: 40194 - RNA, 21 nt, synthetic construct
  source 1..21: mol_type = other RNA
cggcctgtgcgggaacttcga

SEQ ID NO: 40195 - RNA, 21 nt, synthetic construct
  source 1..21: mol_type = other RNA
ggcctgtgcgggaacttcgac

SEQ ID NO: 40196 - RNA, 21 nt, synthetic construct
  source 1..21: mol_type = other RNA
cgagtgtttctgcacggctgt

SEQ ID NO: 40197 - RNA, 21 nt, synthetic construct
  source 1..21: mol_type = other RNA
gtgtttctgcacggctgtggc

SEQ ID NO: 40198 - RNA, 21 nt, synthetic construct
  source 1..21: mol_type = other RNA
acggctgtggctgcctacgcc

SEQ ID NO: 40199 - RNA, 21 nt, synthetic construct
  source 1..21: mol_type = other RNA
acgcgggcctgtgtgtgtcct

SEQ ID NO: 40200 - RNA, 21 nt, synthetic construct
  source 1..21: mol_type = other RNA
cactaccagccctgcggggca

SEQ ID NO: 40201 - RNA, 21 nt, synthetic construct
  source 1..21: mol_type = other RNA
agggccagtgcggcacctgca

SEQ ID NO: 40202 - RNA, 21 nt, synthetic construct
  source 1..21: mol_type = other RNA
gggccagtgcggcacctgcac

SEQ ID NO: 40203 - RNA, 21 nt, synthetic construct
  source 1..21: mol_type = other RNA
agtgcggcacctgcaccaaca

SEQ ID NO: 40204 - RNA, 21 nt, synthetic construct
  source 1..21: mol_type = other RNA
tgcagtgactggcgaggtgca

SEQ ID NO: 40205 - RNA, 21 nt, synthetic construct
  source 1..21: mol_type = other RNA
gcagtgactggcgaggtgcaa

SEQ ID NO: 40206 - RNA, 21 nt, synthetic construct
  source 1..21: mol_type = other RNA
cctgtttgaccaaattccggt

SEQ ID NO: 40207 - RNA, 21 nt, synthetic construct
  source 1..21: mol_type = other RNA
cacgggctgtgagccccagtg

SEQ ID NO: 40208 - RNA, 21 nt, synthetic construct
  source 1..21: mol_type = other RNA
cacgggctgtgagccccagtg

SEQ ID NO: 40209 - RNA, 21 nt, synthetic construct
  source 1..21: mol_type = other RNA
agaccacagcaaccgaaaaga

SEQ ID NO: 40210 - RNA, 21 nt, synthetic construct
  source 1..21: mol_type = other RNA
ggactgacatcccccagatac

SEQ ID NO: 40211 - RNA, 21 nt, synthetic construct
  source 1..21: mol_type = other RNA
aaggctgtggcatgtcctgga

SEQ ID NO: 40212 - RNA, 21 nt, synthetic construct
  source 1..21: mol_type = other RNA
agcagcctaaggacatagagt

SEQ ID NO: 40213 - RNA, 21 nt, synthetic construct
  source 1..21: mol_type = other RNA
aagttggatgggcccacggag

SEQ ID NO: 40214 - RNA, 21 nt, synthetic construct
  source 1..21: mol_type = other RNA
ctcatgcaggtgtttgtcagg

SEQ ID NO: 40215 - RNA, 21 nt, synthetic construct
  source 1..21: mol_type = other RNA
cgctcccaggttgactccacc

SEQ ID NO: 40216 - RNA, 21 nt, synthetic construct
  source 1..21: mol_type = other RNA
accacagcaaccgaaaagacc

SEQ ID NO: 40217 - RNA, 21 nt, synthetic construct
  source 1..21: mol_type = other RNA
tcagtggacagagtggtttga

SEQ ID NO: 40218 - RNA, 21 nt, synthetic construct
  source 1..21: mol_type = other RNA
gctgtgagccccagtgtgcct

SEQ ID NO: 40219 - RNA, 21 nt, synthetic construct
  source 1..21: mol_type = other RNA
gctgtgagccccagtgtgcct

SEQ ID NO: 40220 - RNA, 21 nt, synthetic construct
  source 1..21: mol_type = other RNA
gctgtgagccccagtgtgcct

SEQ ID NO: 40221 - RNA, 21 nt, synthetic construct
  source 1..21: mol_type = other RNA
gctgtgagccccagtgtgcct

SEQ ID NO: 40222 - RNA, 21 nt, synthetic construct
  source 1..21: mol_type = other RNA
cacctgccagccccggtgtca

SEQ ID NO: 40223 - RNA, 21 nt, synthetic construct
  source 1..21: mol_type = other RNA
agcccttcttcaatgaggacc

SEQ ID NO: 40224 - RNA, 21 nt, synthetic construct
  source 1..21: mol_type = other RNA
gagggacggcgtctgcaccaa

SEQ ID NO: 40225 - RNA, 21 nt, synthetic construct
  source 1..21: mol_type = other RNA
gcgggagttgggccaggtcgt

SEQ ID NO: 40226 - RNA, 21 nt, synthetic construct
  source 1..21: mol_type = other RNA
gcgggagttgggccaggtcgt

SEQ ID NO: 40227 - RNA, 21 nt, synthetic construct
  source 1..21: mol_type = other RNA
gcgggagttgggccaggtcgt

SEQ ID NO: 40228 - RNA, 21 nt, synthetic construct
  source 1..21: mol_type = other RNA
agggacggcgtctgcaccaag

SEQ ID NO: 40229 - RNA, 21 nt, synthetic construct
  source 1..21: mol_type = other RNA
cctgcacctatgaggacagga

SEQ ID NO: 40230 - RNA, 21 nt, synthetic construct
  source 1..21: mol_type = other RNA
cacacccccacagtgctgacc

SEQ ID NO: 40231 - RNA, 21 nt, synthetic construct
  source 1..21: mol_type = other RNA
cacacccccacagtgctgacc

SEQ ID NO: 40232 - RNA, 21 nt, synthetic construct
  source 1..21: mol_type = other RNA
ccctcgggcagtgcccctgca

SEQ ID NO: 40233 - RNA, 21 nt, synthetic construct
  source 1..21: mol_type = other RNA
ccaagtctgaacaacttggag

SEQ ID NO: 40234 - RNA, 21 nt, synthetic construct
  source 1..21: mol_type = other RNA
gagtgccaggccgagagcttc

SEQ ID NO: 40235 - RNA, 21 nt, synthetic construct
  source 1..21: mol_type = other RNA
agtgccaggccgagagcttcc

SEQ ID NO: 40236 - RNA, 21 nt, synthetic construct
  source 1..21: mol_type = other RNA
ctggactacagctaccccatg

SEQ ID NO: 40237 - RNA, 21 nt, synthetic construct
  source 1..21: mol_type = other RNA
ctggactacagctaccccatg

SEQ ID NO: 40238 - RNA, 21 nt, synthetic construct
  source 1..21: mol_type = other RNA
ctggactacagctaccccatg

SEQ ID NO: 40239 - RNA, 21 nt, synthetic construct
  source 1..21: mol_type = other RNA
ctggactacagctaccccatg

SEQ ID NO: 40240 - RNA, 21 nt, synthetic construct
  source 1..21: mol_type = other RNA
gtgttcctcaactccatctac

SEQ ID NO: 40241 - RNA, 21 nt, synthetic construct
  source 1..21: mol_type = other RNA
tgttcacaccctcgagcttct

SEQ ID NO: 40242 - RNA, 21 nt, synthetic construct
  source 1..21: mol_type = other RNA
ctaaggacatagagtgccagg

SEQ ID NO: 40243 - RNA, 21 nt, synthetic construct
  source 1..21: mol_type = other RNA
ggctgtgagccccagtgtgcc

SEQ ID NO: 40244 - RNA, 21 nt, synthetic construct
  source 1..21: mol_type = other RNA
ggctgtgagccccagtgtgcc

SEQ ID NO: 40245 - RNA, 21 nt, synthetic construct
  source 1..21: mol_type = other RNA
ggctgtgagccccagtgtgcc

SEQ ID NO: 40246 - RNA, 21 nt, synthetic construct
  source 1..21: mol_type = other RNA
ggctgtgagccccagtgtgcc

SEQ ID NO: 40247 - RNA, 21 nt, synthetic construct
  source 1..21: mol_type = other RNA
cctgtggaacggagaggacag

SEQ ID NO: 40248 - RNA, 21 nt, synthetic construct
  source 1..21: mol_type = other RNA
ggaggagctgccttacagccg

SEQ ID NO: 40249 - RNA, 21 nt, synthetic construct
  source 1..21: mol_type = other RNA
tgtgtctgtcccccggggctg

SEQ ID NO: 40250 - RNA, 21 nt, synthetic construct
  source 1..21: mol_type = other RNA
gtgtgtcctggcggactccgg

SEQ ID NO: 40251 - RNA, 21 nt, synthetic construct
  source 1..21: mol_type = other RNA
atcaaccccaagcccttccac

SEQ ID NO: 40252 - RNA, 21 nt, synthetic construct
  source 1..21: mol_type = other RNA
gtttctgcacggctgtggctg

SEQ ID NO: 40253 - RNA, 21 nt, synthetic construct
  source 1..21: mol_type = other RNA
ctgcctggtggacctgcctgg

SEQ ID NO: 40254 - RNA, 21 nt, synthetic construct
  source 1..21: mol_type = other RNA
cggcaggtgaatgagacctgg

SEQ ID NO: 40255 - RNA, 21 nt, synthetic construct
  source 1..21: mol_type = other RNA
accgtgaccaggccccgggcc

SEQ ID NO: 40256 - RNA, 21 nt, synthetic construct
  source 1..21: mol_type = other RNA
ctgctactcctgtgaggagga

SEQ ID NO: 40257 - RNA, 21 nt, synthetic construct
  source 1..21: mol_type = other RNA
acggagaggacagtgccctgc

SEQ ID NO: 40258 - RNA, 21 nt, synthetic construct
  source 1..21: mol_type = other RNA
ctgcttctgccccccaggcac

SEQ ID NO: 40259 - RNA, 21 nt, synthetic construct
  source 1..21: mol_type = other RNA
cctgcccctcgggcagtgccc

SEQ ID NO: 40260 - RNA, 21 nt, synthetic construct
  source 1..21: mol_type = other RNA
gccgtgccctggcacctgctc

SEQ ID NO: 40261 - RNA, 21 nt, synthetic construct
  source 1..21: mol_type = other RNA
cctcctatgtgcacgcctgtg

SEQ ID NO: 40262 - RNA, 21 nt, synthetic construct
  source 1..21: mol_type = other RNA
ctcctatgtgcacgcctgtgc

SEQ ID NO: 40263 - RNA, 21 nt, synthetic construct
  source 1..21: mol_type = other RNA
tgttctgtgacttctacaacc

SEQ ID NO: 40264 - RNA, 21 nt, synthetic construct
  source 1..21: mol_type = other RNA
ggctgtgagtggcactaccag

SEQ ID NO: 40265 - RNA, 21 nt, synthetic construct
  source 1..21: mol_type = other RNA
acgtgccctgtggcccctccc

SEQ ID NO: 40266 - RNA, 21 nt, synthetic construct
  source 1..21: mol_type = other RNA
gtgagccccagtgtgcctggt

SEQ ID NO: 40267 - RNA, 21 nt, synthetic construct
  source 1..21: mol_type = other RNA
ctggtgtccccctgcgggagt

SEQ ID NO: 40268 - RNA, 21 nt, synthetic construct
  source 1..21: mol_type = other RNA
gtgagccccagtgtgcctggt

SEQ ID NO: 40269 - RNA, 21 nt, synthetic construct
  source 1..21: mol_type = other RNA
ctggtgtccccctgcgggagt

SEQ ID NO: 40270 - RNA, 21 nt, synthetic construct
  source 1..21: mol_type = other RNA
gtgagccccagtgtgcctggt

SEQ ID NO: 40271 - RNA, 21 nt, synthetic construct
  source 1..21: mol_type = other RNA
ctggtgtccccctgcgggagt

SEQ ID NO: 40272 - RNA, 21 nt, synthetic construct
  source 1..21: mol_type = other RNA
gtgagccccagtgtgcctggt

SEQ ID NO: 40273 - RNA, 21 nt, synthetic construct
  source 1..21: mol_type = other RNA
tggcggagggctgcttctgcc

SEQ ID NO: 40274 - RNA, 21 nt, synthetic construct
  source 1..21: mol_type = other RNA
aaccggctgctgctactcctg

SEQ ID NO: 40275 - RNA, 21 nt, synthetic construct
  source 1..21: mol_type = other RNA
cgggtccacgaggagacggtg

SEQ ID NO: 40276 - RNA, 21 nt, synthetic construct
  source 1..21: mol_type = other RNA
gggtccacgaggagacggtgc

SEQ ID NO: 40277 - RNA, 21 nt, synthetic construct
  source 1..21: mol_type = other RNA
taccagctttacagccatccc

SEQ ID NO: 40278 - RNA, 21 nt, synthetic construct
  source 1..21: mol_type = other RNA
taccagctttacagccatccc

SEQ ID NO: 40279 - RNA, 21 nt, synthetic construct
  source 1..21: mol_type = other RNA
taccagctttacagccatccc

SEQ ID NO: 40280 - RNA, 21 nt, synthetic construct
  source 1..21: mol_type = other RNA
acggtgacttcccacacccca

SEQ ID NO: 40281 - RNA, 21 nt, synthetic construct
  source 1..21: mol_type = other RNA
cgttctgtccaagaaatgtgc

SEQ ID NO: 40282 - RNA, 21 nt, synthetic construct
  source 1..21: mol_type = other RNA
atctacacgcagctgcccctg

SEQ ID NO: 40283 - RNA, 21 nt, synthetic construct
  source 1..21: mol_type = other RNA
ctgcaccaagtacatgcagaa

SEQ ID NO: 40284 - RNA, 21 nt, synthetic construct
  source 1..21: mol_type = other RNA
tccccctgcgggagttgggcc

SEQ ID NO: 40285 - RNA, 21 nt, synthetic construct
  source 1..21: mol_type = other RNA
tccccctgcgggagttgggcc

SEQ ID NO: 40286 - RNA, 21 nt, synthetic construct
  source 1..21: mol_type = other RNA
tccccctgcgggagttgggcc

SEQ ID NO: 40287 - RNA, 21 nt, synthetic construct
  source 1..21: mol_type = other RNA
ctcgggcagtgcccctgcacc

SEQ ID NO: 40288 - RNA, 21 nt, synthetic construct
  source 1..21: mol_type = other RNA
gttcctcaactccatctacac

SEQ ID NO: 40289 - RNA, 21 nt, synthetic construct
  source 1..21: mol_type = other RNA
acctgcacctatgaggacagg

SEQ ID NO: 40290 - RNA, 21 nt, synthetic construct
  source 1..21: mol_type = other RNA
ccgtcactgtcttccccagcc

SEQ ID NO: 40291 - RNA, 21 nt, synthetic construct
  source 1..21: mol_type = other RNA
gccgctcccaggttgactcca

SEQ ID NO: 40292 - RNA, 21 nt, synthetic construct
  source 1..21: mol_type = other RNA
aagtgcgtggcccagtgtggc

SEQ ID NO: 40293 - RNA, 21 nt, synthetic construct
  source 1..21: mol_type = other RNA
ctcccacttctctactccctg

SEQ ID NO: 40294 - RNA, 21 nt, synthetic construct
  source 1..21: mol_type = other RNA
ggagggacggcgtctgcacca

SEQ ID NO: 40295 - RNA, 21 nt, synthetic construct
  source 1..21: mol_type = other RNA
ccacacccccacagtgctgac

SEQ ID NO: 40296 - RNA, 21 nt, synthetic construct
  source 1..21: mol_type = other RNA
ccacacccccacagtgctgac

SEQ ID NO: 40297 - RNA, 21 nt, synthetic construct
  source 1..21: mol_type = other RNA
aactgcacggtggccaggtgc

SEQ ID NO: 40298 - RNA, 21 nt, synthetic construct
  source 1..21: mol_type = other RNA
acacccaggacccaacggtgc

SEQ ID NO: 40299 - RNA, 21 nt, synthetic construct
  source 1..21: mol_type = other RNA
acctttgtggaatactcacgc

SEQ ID NO: 40300 - RNA, 21 nt, synthetic construct
  source 1..21: mol_type = other RNA
agcagccccacatcggccccc

SEQ ID NO: 40301 - RNA, 21 nt, synthetic construct
  source 1..21: mol_type = other RNA
agcagccccacatcggccccc

SEQ ID NO: 40302 - RNA, 21 nt, synthetic construct
  source 1..21: mol_type = other RNA
agcagccccacatcggccccc

SEQ ID NO: 40303 - RNA, 21 nt, synthetic construct
  source 1..21: mol_type = other RNA
actccacgacaagcccggccc

SEQ ID NO: 40304 - RNA, 21 nt, synthetic construct
  source 1..21: mol_type = other RNA
atagagtgccaggccgagagc

SEQ ID NO: 40305 - RNA, 21 nt, synthetic construct
  source 1..21: mol_type = other RNA
gctacatggggatcttcctgg

SEQ ID NO: 40306 - RNA, 21 nt, synthetic construct
  source 1..21: mol_type = other RNA
ccccggtgtcagtggacagag

SEQ ID NO: 40307 - RNA, 21 nt, synthetic construct
  source 1..21: mol_type = other RNA
cgctccagtttgggaacctgc

SEQ ID NO: 40308 - RNA, 21 nt, synthetic construct
  source 1..21: mol_type = other RNA
ctgccgtgccctggcacctgc

SEQ ID NO: 40309 - RNA, 21 nt, synthetic construct
  source 1..21: mol_type = other RNA
acatgcagaactgccccaagt

SEQ ID NO: 40310 - RNA, 21 nt, synthetic construct
  source 1..21: mol_type = other RNA
tgggagtgcagccaccggctc

SEQ ID NO: 40311 - RNA, 21 nt, synthetic construct
  source 1..21: mol_type = other RNA
ctccctcctctgccctaggga

SEQ ID NO: 40312 - RNA, 21 nt, synthetic construct
  source 1..21: mol_type = other RNA
ctccctcctctgccctaggga

SEQ ID NO: 40313 - RNA, 21 nt, synthetic construct
  source 1..21: mol_type = other RNA
ctccctcctctgccctaggga

SEQ ID NO: 40314 - RNA, 21 nt, synthetic construct
  source 1..21: mol_type = other RNA
ctccctcctctgccctaggga

SEQ ID NO: 40315 - RNA, 21 nt, synthetic construct
  source 1..21: mol_type = other RNA
tcccacttctctactccctgc

SEQ ID NO: 40316 - RNA, 21 nt, synthetic construct
  source 1..21: mol_type = other RNA
cctgtgaggaggactcctgtc

SEQ ID NO: 40317 - RNA, 21 nt, synthetic construct
  source 1..21: mol_type = other RNA
cctcgggcagtgcccctgcac

SEQ ID NO: 40318 - RNA, 21 nt, synthetic construct
  source 1..21: mol_type = other RNA
cgccaaccagacctgtggcct

SEQ ID NO: 40319 - RNA, 21 nt, synthetic construct
  source 1..21: mol_type = other RNA
cccactgtcccaggggtggcc

SEQ ID NO: 40320 - RNA, 21 nt, synthetic construct
  source 1..21: mol_type = other RNA
ccaagtacatgcagaactgcc

SEQ ID NO: 40321 - RNA, 21 nt, synthetic construct
  source 1..21: mol_type = other RNA
cacgctggacgtgggctgttt

SEQ ID NO: 40322 - RNA, 21 nt, synthetic construct
  source 1..21: mol_type = other RNA
ggagcctgctgtgcctacccc

SEQ ID NO: 40323 - RNA, 21 nt, synthetic construct
  source 1..21: mol_type = other RNA
cacccacacccccacagtgct

SEQ ID NO: 40324 - RNA, 21 nt, synthetic construct
  source 1..21: mol_type = other RNA
cacccacacccccacagtgct

SEQ ID NO: 40325 - RNA, 21 nt, synthetic construct
  source 1..21: mol_type = other RNA
agttgggccaggtcgtggaat

SEQ ID NO: 40326 - RNA, 21 nt, synthetic construct
  source 1..21: mol_type = other RNA
agttgggccaggtcgtggaat

SEQ ID NO: 40327 - RNA, 21 nt, synthetic construct
  source 1..21: mol_type = other RNA
agttgggccaggtcgtggaat

SEQ ID NO: 40328 - RNA, 21 nt, synthetic construct
  source 1..21: mol_type = other RNA
agttgggccaggtcgtggaat

SEQ ID NO: 40329 - RNA, 21 nt, synthetic construct
  source 1..21: mol_type = other RNA
tgagtgcgagtgcatctgcag

SEQ ID NO: 40330 - RNA, 21 nt, synthetic construct
  source 1..21: mol_type = other RNA
caatgacgcgggcgcctgtgt

SEQ ID NO: 40331 - RNA, 21 nt, synthetic construct
  source 1..21: mol_type = other RNA
gtgcgcccacgcggggggcca

SEQ ID NO: 40332 - RNA, 21 nt, synthetic construct
  source 1..21: mol_type = other RNA
aagcccttccactcgaactgc

SEQ ID NO: 40333 - RNA, 21 nt, synthetic construct
  source 1..21: mol_type = other RNA
cctgtggacggctgcacctgc

SEQ ID NO: 40334 - RNA, 21 nt, synthetic construct
  source 1..21: mol_type = other RNA
cccactattccacctttgacg

SEQ ID NO: 40335 - RNA, 21 nt, synthetic construct
  source 1..21: mol_type = other RNA
cagcctgagccccctgaaccc

SEQ ID NO: 40336 - RNA, 21 nt, synthetic construct
  source 1..21: mol_type = other RNA
ctgtggacggctgcacctgcc

SEQ ID NO: 40337 - RNA, 21 nt, synthetic construct
  source 1..21: mol_type = other RNA
acatcccctgtgggaccaccg

SEQ ID NO: 40338 - RNA, 21 nt, synthetic construct
  source 1..21: mol_type = other RNA
ctgcacctatgtcctcatgag

SEQ ID NO: 40339 - RNA, 21 nt, synthetic construct
  source 1..21: mol_type = other RNA
tgagcagcggtttcagcaaga

SEQ ID NO: 40340 - RNA, 21 nt, synthetic construct
  source 1..21: mol_type = other RNA
cggctgccctacagcctcttc

SEQ ID NO: 40341 - RNA, 21 nt, synthetic construct
  source 1..21: mol_type = other RNA
actgcacctatgtcctcatga

SEQ ID NO: 40342 - RNA, 21 nt, synthetic construct
  source 1..21: mol_type = other RNA
gtggacggctgcttctgcccc

SEQ ID NO: 40343 - RNA, 21 nt, synthetic construct
  source 1..21: mol_type = other RNA
ctgcctgcccctcgggcagtg

SEQ ID NO: 40344 - RNA, 21 nt, synthetic construct
  source 1..21: mol_type = other RNA
cccaccagggccagatgtgcg

SEQ ID NO: 40345 - RNA, 21 nt, synthetic construct
  source 1..21: mol_type = other RNA
acgctggacgtgggctgtttc

SEQ ID NO: 40346 - RNA, 21 nt, synthetic construct
  source 1..21: mol_type = other RNA
atggccacttcatcacctttg

SEQ ID NO: 40347 - RNA, 21 nt, synthetic construct
  source 1..21: mol_type = other RNA
ggaccaccggcaccacctgct

SEQ ID NO: 40348 - RNA, 21 nt, synthetic construct
  source 1..21: mol_type = other RNA
ggacctgcctggcctggaagg

SEQ ID NO: 40349 - RNA, 21 nt, synthetic construct
  source 1..21: mol_type = other RNA
tgcgctcacagccttgaggcc

SEQ ID NO: 40350 - RNA, 21 nt, synthetic construct
  source 1..21: mol_type = other RNA
acagccttgaggcctgcacct

SEQ ID NO: 40351 - RNA, 21 nt, synthetic construct
  source 1..21: mol_type = other RNA
gtctgccgctggtccagctgg

SEQ ID NO: 40352 - RNA, 21 nt, synthetic construct
  source 1..21: mol_type = other RNA
cagcacggagcctgctgtgcc

SEQ ID NO: 40353 - RNA, 21 nt, synthetic construct
  source 1..21: mol_type = other RNA
tagagtgccaggccgagagct

SEQ ID NO: 40354 - RNA, 21 nt, synthetic construct
  source 1..21: mol_type = other RNA
tcgaccctgctgcccagcagc

SEQ ID NO: 40355 - RNA, 21 nt, synthetic construct
  source 1..21: mol_type = other RNA
tgagccccagtgtgcctggtc

SEQ ID NO: 40356 - RNA, 21 nt, synthetic construct
  source 1..21: mol_type = other RNA
catgccctcctccactccggg

SEQ ID NO: 40357 - RNA, 21 nt, synthetic construct
  source 1..21: mol_type = other RNA
tcgaccctgctgcccagcagc

SEQ ID NO: 40358 - RNA, 21 nt, synthetic construct
  source 1..21: mol_type = other RNA
tgagccccagtgtgcctggtc

SEQ ID NO: 40359 - RNA, 21 nt, synthetic construct
  source 1..21: mol_type = other RNA
tcgaccctgctgcccagcagc

SEQ ID NO: 40360 - RNA, 21 nt, synthetic construct
  source 1..21: mol_type = other RNA
tgagccccagtgtgcctggtc

SEQ ID NO: 40361 - RNA, 21 nt, synthetic construct
  source 1..21: mol_type = other RNA
tcgaccctgctgcccagcagc

SEQ ID NO: 40362 - RNA, 21 nt, synthetic construct
  source 1..21: mol_type = other RNA
tgagccccagtgtgcctggtc

SEQ ID NO: 40363 - RNA, 21 nt, synthetic construct
  source 1..21: mol_type = other RNA
catgccctcctccactccggg

SEQ ID NO: 40364 - RNA, 21 nt, synthetic construct
  source 1..21: mol_type = other RNA
tgcttctgcagggcatttgga

SEQ ID NO: 40365 - RNA, 21 nt, synthetic construct
  source 1..21: mol_type = other RNA
cggggagtgtgcagtgactgg

SEQ ID NO: 40366 - RNA, 21 nt, synthetic construct
  source 1..21: mol_type = other RNA
gaccccacagcctgcatcctg

SEQ ID NO: 40367 - RNA, 21 nt, synthetic construct
  source 1..21: mol_type = other RNA
gcagggtctgcggcctgtgcg

SEQ ID NO: 40368 - RNA, 21 nt, synthetic construct
  source 1..21: mol_type = other RNA
tgcggcctgtgcgggaacttc

SEQ ID NO: 40369 - RNA, 21 nt, synthetic construct
  source 1..21: mol_type = other RNA
tgtccccctgcgggagttggg

SEQ ID NO: 40370 - RNA, 21 nt, synthetic construct
  source 1..21: mol_type = other RNA
gtccccctgcgggagttgggc

SEQ ID NO: 40371 - RNA, 21 nt, synthetic construct
  source 1..21: mol_type = other RNA
tgtccccctgcgggagttggg

SEQ ID NO: 40372 - RNA, 21 nt, synthetic construct
  source 1..21: mol_type = other RNA
gtccccctgcgggagttgggc

SEQ ID NO: 40373 - RNA, 21 nt, synthetic construct
  source 1..21: mol_type = other RNA
tgtccccctgcgggagttggg

SEQ ID NO: 40374 - RNA, 21 nt, synthetic construct
  source 1..21: mol_type = other RNA
gtccccctgcgggagttgggc

SEQ ID NO: 40375 - RNA, 21 nt, synthetic construct
  source 1..21: mol_type = other RNA
gccagtgcggcacctgcacca

SEQ ID NO: 40376 - RNA, 21 nt, synthetic construct
  source 1..21: mol_type = other RNA
agatgtgcggcctgtgtggga

SEQ ID NO: 40377 - RNA, 21 nt, synthetic construct
  source 1..21: mol_type = other RNA
cagtgcggcacctgcaccaac

SEQ ID NO: 40378 - RNA, 21 nt, synthetic construct
  source 1..21: mol_type = other RNA
ggagcctctctgcagaaaagc

SEQ ID NO: 40379 - RNA, 21 nt, synthetic construct
  source 1..21: mol_type = other RNA
gatctgatgctgagccaggtc

SEQ ID NO: 40380 - RNA, 21 nt, synthetic construct
  source 1..21: mol_type = other RNA
aagttcaagatgtgcttcaac

SEQ ID NO: 40381 - RNA, 21 nt, synthetic construct
  source 1..21: mol_type = other RNA
aagttcaagatgtgcttcaac

SEQ ID NO: 40382 - RNA, 21 nt, synthetic construct
  source 1..21: mol_type = other RNA
aagttcaagatgtgcttcaac

SEQ ID NO: 40383 - RNA, 21 nt, synthetic construct
  source 1..21: mol_type = other RNA
aagttcaagatgtgcttcaac

SEQ ID NO: 40384 - RNA, 21 nt, synthetic construct
  source 1..21: mol_type = other RNA
tttgccacgcgtagccggtcc

SEQ ID NO: 40385 - RNA, 21 nt, synthetic construct
  source 1..21: mol_type = other RNA
ggccaacgtcacctgcgtgaa

SEQ ID NO: 40386 - RNA, 21 nt, synthetic construct
  source 1..21: mol_type = other RNA
caacgtcacctgcgtgaacaa

SEQ ID NO: 40387 - RNA, 21 nt, synthetic construct
  source 1..21: mol_type = other RNA
gtagccggtccgtggtggggg

SEQ ID NO: 40388 - RNA, 21 nt, synthetic construct
  source 1..21: mol_type = other RNA
ctatgaaatccgtgtgttctg

SEQ ID NO: 40389 - RNA, 21 nt, synthetic construct
  source 1..21: mol_type = other RNA
ctatgaaatccgtgtgttctg

SEQ ID NO: 40390 - RNA, 21 nt, synthetic construct
  source 1..21: mol_type = other RNA
ctatgaaatccgtgtgttctg

SEQ ID NO: 40391 - RNA, 21 nt, synthetic construct
  source 1..21: mol_type = other RNA
ctatgaaatccgtgtgttctg

SEQ ID NO: 40392 - RNA, 21 nt, synthetic construct
  source 1..21: mol_type = other RNA
caactatgaaatccgtgtgtt

SEQ ID NO: 40393 - RNA, 21 nt, synthetic construct
  source 1..21: mol_type = other RNA
caactatgaaatccgtgtgtt

SEQ ID NO: 40394 - RNA, 21 nt, synthetic construct
  source 1..21: mol_type = other RNA
caactatgaaatccgtgtgtt

SEQ ID NO: 40395 - RNA, 21 nt, synthetic construct
  source 1..21: mol_type = other RNA
caactatgaaatccgtgtgtt

SEQ ID NO: 40396 - RNA, 21 nt, synthetic construct
  source 1..21: mol_type = other RNA
cccatcaaagtgtcggacccg

SEQ ID NO: 40397 - RNA, 21 nt, synthetic construct
  source 1..21: mol_type = other RNA
tgcggccccatacagcctgcc

SEQ ID NO: 40398 - RNA, 21 nt, synthetic construct
  source 1..21: mol_type = other RNA
tggccaacgtcacctgcgtga

SEQ ID NO: 40399 - RNA, 21 nt, synthetic construct
  source 1..21: mol_type = other RNA
tgcccacccaccaaagtgtac

SEQ ID NO: 40400 - RNA, 21 nt, synthetic construct
  source 1..21: mol_type = other RNA
gccgcgcccggggagtgtgca

SEQ ID NO: 40401 - RNA, 21 nt, synthetic construct
  source 1..21: mol_type = other RNA
tgcacgcccttctgtgtccct

SEQ ID NO: 40402 - RNA, 21 nt, synthetic construct
  source 1..21: mol_type = other RNA
tagccggtccgtggtggggga

SEQ ID NO: 40403 - RNA, 21 nt, synthetic construct
  source 1..21: mol_type = other RNA
agccggtccgtggtgggggac

SEQ ID NO: 40404 - RNA, 21 nt, synthetic construct
  source 1..21: mol_type = other RNA
ggagagcctgtggcccacctt

SEQ ID NO: 40405 - RNA, 21 nt, synthetic construct
  source 1..21: mol_type = other RNA
tatgaaatccgtgtgttctgc

SEQ ID NO: 40406 - RNA, 21 nt, synthetic construct
  source 1..21: mol_type = other RNA
tatgaaatccgtgtgttctgc

SEQ ID NO: 40407 - RNA, 21 nt, synthetic construct
  source 1..21: mol_type = other RNA
tatgaaatccgtgtgttctgc

SEQ ID NO: 40408 - RNA, 21 nt, synthetic construct
  source 1..21: mol_type = other RNA
tatgaaatccgtgtgttctgc

SEQ ID NO: 40409 - RNA, 21 nt, synthetic construct
  source 1..21: mol_type = other RNA
cgcgcccggggagtgtgcagt

SEQ ID NO: 40410 - RNA, 21 nt, synthetic construct
  source 1..21: mol_type = other RNA
cacccaccaaagtgtacaagc

SEQ ID NO: 40411 - RNA, 21 nt, synthetic construct
  source 1..21: mol_type = other RNA
aacgagttctatgcccacaac

SEQ ID NO: 40412 - RNA, 21 nt, synthetic construct
  source 1..21: mol_type = other RNA
caggtgcgtgggtgacaaccg

SEQ ID NO: 40413 - RNA, 21 nt, synthetic construct
  source 1..21: mol_type = other RNA
acgctggtgttggctctggcg

SEQ ID NO: 40414 - RNA, 21 nt, synthetic construct
  source 1..21: mol_type = other RNA
gtggccaacgtcacctgcgtg

SEQ ID NO: 40415 - RNA, 21 nt, synthetic construct
  source 1..21: mol_type = other RNA
ccggagctgccacacgctgga

SEQ ID NO: 40416 - RNA, 21 nt, synthetic construct
  source 1..21: mol_type = other RNA
agcaggtggactgtgaccgca

SEQ ID NO: 40417 - RNA, 21 nt, synthetic construct
  source 1..21: mol_type = other RNA
cgactgtctccagcgggacgg

SEQ ID NO: 40418 - RNA, 21 nt, synthetic construct
  source 1..21: mol_type = other RNA
tcggtgcagtgcaagcccctg

SEQ ID NO: 40419 - RNA, 21 nt, synthetic construct
  source 1..21: mol_type = other RNA
cttctgtgtccctgcgcccat

SEQ ID NO: 40420 - RNA, 21 nt, synthetic construct
  source 1..21: mol_type = other RNA
ccaacaaccagagggacgact

SEQ ID NO: 40421 - RNA, 21 nt, synthetic construct
  source 1..21: mol_type = other RNA
ccgagtgcctccggagctgcc

SEQ ID NO: 40422 - RNA, 21 nt, synthetic construct
  source 1..21: mol_type = other RNA
cttcagcgtgtccactgtgtc

SEQ ID NO: 40423 - RNA, 21 nt, synthetic construct
  source 1..21: mol_type = other RNA
ccacgcgtagccggtccgtgg

SEQ ID NO: 40424 - RNA, 21 nt, synthetic construct
  source 1..21: mol_type = other RNA
ccggtccgtggtgggggacgc

SEQ ID NO: 40425 - RNA, 21 nt, synthetic construct
  source 1..21: mol_type = other RNA
cgagtgcctccggagctgcca

SEQ ID NO: 40426 - RNA, 21 nt, synthetic construct
  source 1..21: mol_type = other RNA
gacgctggtgttggctctggc

SEQ ID NO: 40427 - RNA, 21 nt, synthetic construct
  source 1..21: mol_type = other RNA
acctactccaacatccgtgcg

SEQ ID NO: 40428 - RNA, 21 nt, synthetic construct
  source 1..21: mol_type = other RNA
acctactccaacatccgtgcg

SEQ ID NO: 40429 - RNA, 21 nt, synthetic construct
  source 1..21: mol_type = other RNA
acctactccaacatccgtgcg

SEQ ID NO: 40430 - RNA, 21 nt, synthetic construct
  source 1..21: mol_type = other RNA
acctactccaacatccgtgcg

SEQ ID NO: 40431 - RNA, 21 nt, synthetic construct
  source 1..21: mol_type = other RNA
gcccatcaaagtgtcggaccc

SEQ ID NO: 40432 - RNA, 21 nt, synthetic construct
  source 1..21: mol_type = other RNA
accagagggacgactgtctcc

SEQ ID NO: 40433 - RNA, 21 nt, synthetic construct
  source 1..21: mol_type = other RNA
gcgcccggggagtgtgcagtg

SEQ ID NO: 40434 - RNA, 21 nt, synthetic construct
  source 1..21: mol_type = other RNA
ccacccaccaaagtgtacaag

SEQ ID NO: 40435 - RNA, 21 nt, synthetic construct
  source 1..21: mol_type = other RNA
gaagggtgaggggccagcagg

SEQ ID NO: 40436 - RNA, 21 nt, synthetic construct
  source 1..21: mol_type = other RNA
cctctgctcaacccagcccag

SEQ ID NO: 40437 - RNA, 21 nt, synthetic construct
  source 1..21: mol_type = other RNA
gcccacccaccaaagtgtaca

SEQ ID NO: 40438 - RNA, 21 nt, synthetic construct
  source 1..21: mol_type = other RNA
gccgagtgcctccggagctgc

SEQ ID NO: 40439 - RNA, 21 nt, synthetic construct
  source 1..21: mol_type = other RNA
acgactgtctccagcgggacg

SEQ ID NO: 40440 - RNA, 21 nt, synthetic construct
  source 1..21: mol_type = other RNA
atgtcactgggacgccctgga

SEQ ID NO: 40441 - RNA, 21 nt, synthetic construct
  source 1..21: mol_type = other RNA
gccggtccgtggtgggggacg

SEQ ID NO: 40442 - RNA, 21 nt, synthetic construct
  source 1..21: mol_type = other RNA
gatgtcactgggacgccctgg

SEQ ID NO: 40443 - RNA, 21 nt, synthetic construct
  source 1..21: mol_type = other RNA
aactatgaaatccgtgtgttc

SEQ ID NO: 40444 - RNA, 21 nt, synthetic construct
  source 1..21: mol_type = other RNA
aactatgaaatccgtgtgttc

SEQ ID NO: 40445 - RNA, 21 nt, synthetic construct
  source 1..21: mol_type = other RNA
aactatgaaatccgtgtgttc

SEQ ID NO: 40446 - RNA, 21 nt, synthetic construct
  source 1..21: mol_type = other RNA
aactatgaaatccgtgtgttc

SEQ ID NO: 40447 - RNA, 21 nt, synthetic construct
  source 1..21: mol_type = other RNA
gcacgcccttctgtgtccctg

SEQ ID NO: 40448 - RNA, 21 nt, synthetic construct
  source 1..21: mol_type = other RNA
acaggctggtccaggcaaggc

SEQ ID NO: 40449 - RNA, 21 nt, synthetic construct
  source 1..21: mol_type = other RNA
cggtgcagtgcaagcccctgc

SEQ ID NO: 40450 - RNA, 21 nt, synthetic construct
  source 1..21: mol_type = other RNA
agtgcctccggagctgccaca

SEQ ID NO: 40451 - RNA, 21 nt, synthetic construct
  source 1..21: mol_type = other RNA
ccagggaccacctggatcctc

SEQ ID NO: 40452 - RNA, 21 nt, synthetic construct
  source 1..21: mol_type = other RNA
cagggaccacctggatcctca

SEQ ID NO: 40453 - RNA, 21 nt, synthetic construct
  source 1..21: mol_type = other RNA
ccagggaccacctggatcctc

SEQ ID NO: 40454 - RNA, 21 nt, synthetic construct
  source 1..21: mol_type = other RNA
cagggaccacctggatcctca

SEQ ID NO: 40455 - RNA, 21 nt, synthetic construct
  source 1..21: mol_type = other RNA
ccagggaccacctggatcctc

SEQ ID NO: 40456 - RNA, 21 nt, synthetic construct
  source 1..21: mol_type = other RNA
cagggaccacctggatcctca

SEQ ID NO: 40457 - RNA, 21 nt, synthetic construct
  source 1..21: mol_type = other RNA
ccagggaccacctggatcctc

SEQ ID NO: 40458 - RNA, 21 nt, synthetic construct
  source 1..21: mol_type = other RNA
cagggaccacctggatcctca

SEQ ID NO: 40459 - RNA, 21 nt, synthetic construct
  source 1..21: mol_type = other RNA
ccagggaccacctggatcctc

SEQ ID NO: 40460 - RNA, 21 nt, synthetic construct
  source 1..21: mol_type = other RNA
cagggaccacctggatcctca

SEQ ID NO: 40461 - RNA, 21 nt, synthetic construct
  source 1..21: mol_type = other RNA
ccagggaccacctggatcctc

SEQ ID NO: 40462 - RNA, 21 nt, synthetic construct
  source 1..21: mol_type = other RNA
cagggaccacctggatcctca

SEQ ID NO: 40463 - RNA, 21 nt, synthetic construct
  source 1..21: mol_type = other RNA
ggtgcagtgcaagcccctgcc

SEQ ID NO: 40464 - RNA, 21 nt, synthetic construct
  source 1..21: mol_type = other RNA
ccttctgtgtccctgcgccca

SEQ ID NO: 40465 - RNA, 21 nt, synthetic construct
  source 1..21: mol_type = other RNA
gagtgcctccggagctgccac

SEQ ID NO: 40466 - RNA, 21 nt, synthetic construct
  source 1..21: mol_type = other RNA
cggagctgccacacgctggac

SEQ ID NO: 40467 - RNA, 21 nt, synthetic construct
  source 1..21: mol_type = other RNA
tgcagtgcaagcccctgccct

SEQ ID NO: 40468 - RNA, 21 nt, synthetic construct
  source 1..21: mol_type = other RNA
agcctgtggcccaccttggcc

SEQ ID NO: 40469 - RNA, 21 nt, synthetic construct
  source 1..21: mol_type = other RNA
tggcccaccttggccttgccc

SEQ ID NO: 40470 - RNA, 21 nt, synthetic construct
  source 1..21: mol_type = other RNA
ctgatcctgtttgaccaaatt

SEQ ID NO: 40471 - RNA, 21 nt, synthetic construct
  source 1..21: mol_type = other RNA
cctgggagagcctgtggccca

SEQ ID NO: 40472 - RNA, 21 nt, synthetic construct
  source 1..21: mol_type = other RNA
tcacccgtgttgtcatcaagg

SEQ ID NO: 40473 - RNA, 21 nt, synthetic construct
  source 1..21: mol_type = other RNA
gcaactacggccactgcccca

SEQ ID NO: 40474 - RNA, 21 nt, synthetic construct
  source 1..21: mol_type = other RNA
gcaactacggccactgcccca

SEQ ID NO: 40475 - RNA, 21 nt, synthetic construct
  source 1..21: mol_type = other RNA
gcaactacggccactgcccca

SEQ ID NO: 40476 - RNA, 21 nt, synthetic construct
  source 1..21: mol_type = other RNA
gcaactacggccactgcccca

SEQ ID NO: 40477 - RNA, 21 nt, synthetic construct
  source 1..21: mol_type = other RNA
cacggccaccacaactggggc

SEQ ID NO: 40478 - RNA, 21 nt, synthetic construct
  source 1..21: mol_type = other RNA
gtggacaactgcaccgtgtac

SEQ ID NO: 40479 - RNA, 21 nt, synthetic construct
  source 1..21: mol_type = other RNA
tgagctctgcccccggacctg

SEQ ID NO: 40480 - RNA, 21 nt, synthetic construct
  source 1..21: mol_type = other RNA
cgacgtcacctgcagcgtttc

SEQ ID NO: 40481 - RNA, 21 nt, synthetic construct
  source 1..21: mol_type = other RNA
tgggagcctctctgcagaaaa

SEQ ID NO: 40482 - RNA, 21 nt, synthetic construct
  source 1..21: mol_type = other RNA
ccacggccaccacaactgggg

SEQ ID NO: 40483 - RNA, 21 nt, synthetic construct
  source 1..21: mol_type = other RNA
ccaaagtgctgactaccacaa

SEQ ID NO: 40484 - RNA, 21 nt, synthetic construct
  source 1..21: mol_type = other RNA
acggttcccagctcgtccacc

SEQ ID NO: 40485 - RNA, 21 nt, synthetic construct
  source 1..21: mol_type = other RNA
acgtcacctgcagcgtttcct

SEQ ID NO: 40486 - RNA, 21 nt, synthetic construct
  source 1..21: mol_type = other RNA
ggggacgcactggagtttggg

SEQ ID NO: 40487 - RNA, 21 nt, synthetic construct
  source 1..21: mol_type = other RNA
ggtcacccgtgttgtcatcaa

SEQ ID NO: 40488 - RNA, 21 nt, synthetic construct
  source 1..21: mol_type = other RNA
ctgagctctgcccccggacct

SEQ ID NO: 40489 - RNA, 21 nt, synthetic construct
  source 1..21: mol_type = other RNA
cggcggccgcacctacagccc

SEQ ID NO: 40490 - RNA, 21 nt, synthetic construct
  source 1..21: mol_type = other RNA
agtgcttaccaccacggccac

SEQ ID NO: 40491 - RNA, 21 nt, synthetic construct
  source 1..21: mol_type = other RNA
ctaccaaagtgctgactacca

SEQ ID NO: 40492 - RNA, 21 nt, synthetic construct
  source 1..21: mol_type = other RNA
agtgcttaccaccacggccac

SEQ ID NO: 40493 - RNA, 21 nt, synthetic construct
  source 1..21: mol_type = other RNA
ctgctgtcccaccttccgctg

SEQ ID NO: 40494 - RNA, 21 nt, synthetic construct
  source 1..21: mol_type = other RNA
tacggccactgccccagcacc

SEQ ID NO: 40495 - RNA, 21 nt, synthetic construct
  source 1..21: mol_type = other RNA
tacggccactgccccagcacc

SEQ ID NO: 40496 - RNA, 21 nt, synthetic construct
  source 1..21: mol_type = other RNA
tacggccactgccccagcacc

SEQ ID NO: 40497 - RNA, 21 nt, synthetic construct
  source 1..21: mol_type = other RNA
tacggccactgccccagcacc

SEQ ID NO: 40498 - RNA, 21 nt, synthetic construct
  source 1..21: mol_type = other RNA
ggcggccgcacctacagcccg

SEQ ID NO: 40499 - RNA, 21 nt, synthetic construct
  source 1..21: mol_type = other RNA
acggccaccacaactggggcc

SEQ ID NO: 40500 - RNA, 21 nt, synthetic construct
  source 1..21: mol_type = other RNA
gacgcactggagtttgggaac

SEQ ID NO: 40501 - RNA, 21 nt, synthetic construct
  source 1..21: mol_type = other RNA
caactacggccactgccccag

SEQ ID NO: 40502 - RNA, 21 nt, synthetic construct
  source 1..21: mol_type = other RNA
caactacggccactgccccag

SEQ ID NO: 40503 - RNA, 21 nt, synthetic construct
  source 1..21: mol_type = other RNA
caactacggccactgccccag

SEQ ID NO: 40504 - RNA, 21 nt, synthetic construct
  source 1..21: mol_type = other RNA
caactacggccactgccccag

SEQ ID NO: 40505 - RNA, 21 nt, synthetic construct
  source 1..21: mol_type = other RNA
aggagggcgactgctgtccca

SEQ ID NO: 40506 - RNA, 21 nt, synthetic construct
  source 1..21: mol_type = other RNA
caggcctgtggtcacccgtgt

SEQ ID NO: 40507 - RNA, 21 nt, synthetic construct
  source 1..21: mol_type = other RNA
ctgcacccacggcggccgcac

SEQ ID NO: 40508 - RNA, 21 nt, synthetic construct
  source 1..21: mol_type = other RNA
ccacggcggccgcacctacag

SEQ ID NO: 40509 - RNA, 21 nt, synthetic construct
  source 1..21: mol_type = other RNA
cacggcggccgcacctacagc

SEQ ID NO: 40510 - RNA, 21 nt, synthetic construct
  source 1..21: mol_type = other RNA
agcggagaactgccagagctg

SEQ ID NO: 40511 - RNA, 21 nt, synthetic construct
  source 1..21: mol_type = other RNA
gcggagaactgccagagctgt

SEQ ID NO: 40512 - RNA, 21 nt, synthetic construct
  source 1..21: mol_type = other RNA
ctccactccagagactgccca

SEQ ID NO: 40513 - RNA, 21 nt, synthetic construct
  source 1..21: mol_type = other RNA
ctccactccagagactgccca

SEQ ID NO: 40514 - RNA, 21 nt, synthetic construct
  source 1..21: mol_type = other RNA
ccgagccagccctgtgacttc

SEQ ID NO: 40515 - RNA, 21 nt, synthetic construct
  source 1..21: mol_type = other RNA
gagctctgcccccggacctgc

SEQ ID NO: 40516 - RNA, 21 nt, synthetic construct
  source 1..21: mol_type = other RNA
tccctcagtgtggagaatgag

SEQ ID NO: 40517 - RNA, 21 nt, synthetic construct
  source 1..21: mol_type = other RNA
cctcagtgtggagaatgagaa

SEQ ID NO: 40518 - RNA, 21 nt, synthetic construct
  source 1..21: mol_type = other RNA
ggagggcgactgctgtcccac

SEQ ID NO: 40519 - RNA, 21 nt, synthetic construct
  source 1..21: mol_type = other RNA
ctgtgacttccactatgagtg

SEQ ID NO: 40520 - RNA, 21 nt, synthetic construct
  source 1..21: mol_type = other RNA
agcccctgggcctcgagtgcc

SEQ ID NO: 40521 - RNA, 21 nt, synthetic construct
  source 1..21: mol_type = other RNA
agcccctgggcctcgagtgcc

SEQ ID NO: 40522 - RNA, 21 nt, synthetic construct
  source 1..21: mol_type = other RNA
agcccctgggcctcgagtgcc

SEQ ID NO: 40523 - RNA, 21 nt, synthetic construct
  source 1..21: mol_type = other RNA
agcccctgggcctcgagtgcc

SEQ ID NO: 40524 - RNA, 21 nt, synthetic construct
  source 1..21: mol_type = other RNA
cacccacggcggccgcaccta

SEQ ID NO: 40525 - RNA, 21 nt, synthetic construct
  source 1..21: mol_type = other RNA
ggcctgtggtcacccgtgttg

SEQ ID NO: 40526 - RNA, 21 nt, synthetic construct
  source 1..21: mol_type = other RNA
tggtgggggacgcactggagt

SEQ ID NO: 40527 - RNA, 21 nt, synthetic construct
  source 1..21: mol_type = other RNA
agtgcccctgcacccacggcg

SEQ ID NO: 40528 - RNA, 21 nt, synthetic construct
  source 1..21: mol_type = other RNA
cccacggcggccgcacctaca

SEQ ID NO: 40529 - RNA, 21 nt, synthetic construct
  source 1..21: mol_type = other RNA
tgcttaccaccacggccacca

SEQ ID NO: 40530 - RNA, 21 nt, synthetic construct
  source 1..21: mol_type = other RNA
tgcttaccaccacggccacca

SEQ ID NO: 40531 - RNA, 21 nt, synthetic construct
  source 1..21: mol_type = other RNA
cccgagccagccctgtgactt

SEQ ID NO: 40532 - RNA, 21 nt, synthetic construct
  source 1..21: mol_type = other RNA
gggaccacccacacccccaca

SEQ ID NO: 40533 - RNA, 21 nt, synthetic construct
  source 1..21: mol_type = other RNA
gggaccacccacacccccaca

SEQ ID NO: 40534 - RNA, 21 nt, synthetic construct
  source 1..21: mol_type = other RNA
aacccggcgcacaatgggcgg

SEQ ID NO: 40535 - RNA, 21 nt, synthetic construct
  source 1..21: mol_type = other RNA
tgtccaagaaatgtgccgaca

SEQ ID NO: 40536 - RNA, 21 nt, synthetic construct
  source 1..21: mol_type = other RNA
tgtgccgccaagggcgtacag

SEQ ID NO: 40537 - RNA, 21 nt, synthetic construct
  source 1..21: mol_type = other RNA
cggaaactactatgacgtcgg

SEQ ID NO: 40538 - RNA, 21 nt, synthetic construct
  source 1..21: mol_type = other RNA
ggaaactactatgacgtcggt

SEQ ID NO: 40539 - RNA, 21 nt, synthetic construct
  source 1..21: mol_type = other RNA
agagccgagcactatagccac

SEQ ID NO: 40540 - RNA, 21 nt, synthetic construct
  source 1..21: mol_type = other RNA
tgcaaccgtcccggcttcgta

SEQ ID NO: 40541 - RNA, 21 nt, synthetic construct
  source 1..21: mol_type = other RNA
cagagccgagcactatagcca

SEQ ID NO: 40542 - RNA, 21 nt, synthetic construct
  source 1..21: mol_type = other RNA
gtgccgccaagggcgtacagc

SEQ ID NO: 40543 - RNA, 21 nt, synthetic construct
  source 1..21: mol_type = other RNA
tgaacccggcgcacaatgggc

SEQ ID NO: 40544 - RNA, 21 nt, synthetic construct
  source 1..21: mol_type = other RNA
gtcggacccgagccagccctg

SEQ ID NO: 40545 - RNA, 21 nt, synthetic construct
  source 1..21: mol_type = other RNA
gaacgttctgcctccatcccc

SEQ ID NO: 40546 - RNA, 21 nt, synthetic construct
  source 1..21: mol_type = other RNA
ccgcatcaacacgaccatcct

SEQ ID NO: 40547 - RNA, 21 nt, synthetic construct
  source 1..21: mol_type = other RNA
aataaaccctgagcattgagt

SEQ ID NO: 40548 - RNA, 21 nt, synthetic construct
  source 1..21: mol_type = other RNA
cagctcacactaccaaagtgc

SEQ ID NO: 40549 - RNA, 21 nt, synthetic construct
  source 1..21: mol_type = other RNA
cagctcacactaccaaagtgc

SEQ ID NO: 40550 - RNA, 21 nt, synthetic construct
  source 1..21: mol_type = other RNA
cagctcacactaccaaagtgc

SEQ ID NO: 40551 - RNA, 21 nt, synthetic construct
  source 1..21: mol_type = other RNA
cagctcacactaccaaagtgc

SEQ ID NO: 40552 - RNA, 21 nt, synthetic construct
  source 1..21: mol_type = other RNA
cagctcacactaccaaagtgc

SEQ ID NO: 40553 - RNA, 21 nt, synthetic construct
  source 1..21: mol_type = other RNA
tcgacgacaatgccatcaatg

SEQ ID NO: 40554 - RNA, 21 nt, synthetic construct
  source 1..21: mol_type = other RNA
atggcggtgccccgacgtcct

SEQ ID NO: 40555 - RNA, 21 nt, synthetic construct
  source 1..21: mol_type = other RNA
gcgatcgctacagctttgaag

SEQ ID NO: 40556 - RNA, 21 nt, synthetic construct
  source 1..21: mol_type = other RNA
ttcgacgacaatgccatcaat

SEQ ID NO: 40557 - RNA, 21 nt, synthetic construct
  source 1..21: mol_type = other RNA
accagcgttacagccatcccc

SEQ ID NO: 40558 - RNA, 21 nt, synthetic construct
  source 1..21: mol_type = other RNA
tgtcggacccgagccagccct

SEQ ID NO: 40559 - RNA, 21 nt, synthetic construct
  source 1..21: mol_type = other RNA
agatacacaagcacccttggt

SEQ ID NO: 40560 - RNA, 21 nt, synthetic construct
  source 1..21: mol_type = other RNA
tcgagtgccgtgcccaggccc

SEQ ID NO: 40561 - RNA, 21 nt, synthetic construct
  source 1..21: mol_type = other RNA
gctctacggccatgccctcct

SEQ ID NO: 40562 - RNA, 21 nt, synthetic construct
  source 1..21: mol_type = other RNA
tcgagtgccgtgcccaggccc

SEQ ID NO: 40563 - RNA, 21 nt, synthetic construct
  source 1..21: mol_type = other RNA
tcgagtgccgtgcccaggccc

SEQ ID NO: 40564 - RNA, 21 nt, synthetic construct
  source 1..21: mol_type = other RNA
tcgagtgccgtgcccaggccc

SEQ ID NO: 40565 - RNA, 21 nt, synthetic construct
  source 1..21: mol_type = other RNA
gctctacggccatgccctcct

SEQ ID NO: 40566 - RNA, 21 nt, synthetic construct
  source 1..21: mol_type = other RNA
gacgaccactgcaggggacgt

SEQ ID NO: 40567 - RNA, 21 nt, synthetic construct
  source 1..21: mol_type = other RNA
taagaccgaccgagccggctg

SEQ ID NO: 40568 - RNA, 21 nt, synthetic construct
  source 1..21: mol_type = other RNA
ccgaaaagaccaccctatggg

SEQ ID NO: 40569 - RNA, 21 nt, synthetic construct
  source 1..21: mol_type = other RNA
gagcatccggtcgacggcggc

SEQ ID NO: 40570 - RNA, 21 nt, synthetic construct
  source 1..21: mol_type = other RNA
ctggcctttgcaactacgtgt

SEQ ID NO: 40571 - RNA, 21 nt, synthetic construct
  source 1..21: mol_type = other RNA
tgcgggcctatgtgtccctgc

SEQ ID NO: 40572 - RNA, 21 nt, synthetic construct
  source 1..21: mol_type = other RNA
ggcggagactttgagacgttt

SEQ ID NO: 40573 - RNA, 21 nt, synthetic construct
  source 1..21: mol_type = other RNA
gtgtggggacttcaacggcct

SEQ ID NO: 40574 - RNA, 21 nt, synthetic construct
  source 1..21: mol_type = other RNA
agtgcccctgctacgctcacg

SEQ ID NO: 40575 - RNA, 21 nt, synthetic construct
  source 1..21: mol_type = other RNA
gctgcgagtacatcttggccc

SEQ ID NO: 40576 - RNA, 21 nt, synthetic construct
  source 1..21: mol_type = other RNA
agggccaccaattccacggcc

SEQ ID NO: 40577 - RNA, 21 nt, synthetic construct
  source 1..21: mol_type = other RNA
agaccgaccgagccggctgcc

SEQ ID NO: 40578 - RNA, 21 nt, synthetic construct
  source 1..21: mol_type = other RNA
cacctatgatgagaaactcta

SEQ ID NO: 40579 - RNA, 21 nt, synthetic construct
  source 1..21: mol_type = other RNA
cgcctgaccgatcccaacagt

SEQ ID NO: 40580 - RNA, 21 nt, synthetic construct
  source 1..21: mol_type = other RNA
acggccactacgatcacagcc

SEQ ID NO: 40581 - RNA, 21 nt, synthetic construct
  source 1..21: mol_type = other RNA
ccgagccggctgccatttcta

SEQ ID NO: 40582 - RNA, 21 nt, synthetic construct
  source 1..21: mol_type = other RNA
agaccgaggtcaacatcacct

SEQ ID NO: 40583 - RNA, 21 nt, synthetic construct
  source 1..21: mol_type = other RNA
acgacctgcatggtgactgca

SEQ ID NO: 40584 - RNA, 21 nt, synthetic construct
  source 1..21: mol_type = other RNA
ccgcttccaaagagccgctga

SEQ ID NO: 40585 - RNA, 21 nt, synthetic construct
  source 1..21: mol_type = other RNA
ctcgtccaccgtggggaccac

SEQ ID NO: 40586 - RNA, 21 nt, synthetic construct
  source 1..21: mol_type = other RNA
cagcgaccactgcaggggccg

SEQ ID NO: 40587 - RNA, 21 nt, synthetic construct
  source 1..21: mol_type = other RNA
tgaggtcgcaacggccaggtc

SEQ ID NO: 40588 - RNA, 21 nt, synthetic construct
  source 1..21: mol_type = other RNA
cgacgcgtgtgcctgcgactc

SEQ ID NO: 40589 - RNA, 21 nt, synthetic construct
  source 1..21: mol_type = other RNA
cacgctttgggaatctcagcc

SEQ ID NO: 40590 - RNA, 21 nt, synthetic construct
  source 1..21: mol_type = other RNA
gtacaagccatgcggccccat

SEQ ID NO: 40591 - RNA, 21 nt, synthetic construct
  source 1..21: mol_type = other RNA
ccgaggtcaacatcaccttct

SEQ ID NO: 40592 - RNA, 21 nt, synthetic construct
  source 1..21: mol_type = other RNA
tcctaacggctcagccatcct

SEQ ID NO: 40593 - RNA, 21 nt, synthetic construct
  source 1..21: mol_type = other RNA
aacggctcagccatcctgcac

SEQ ID NO: 40594 - RNA, 21 nt, synthetic construct
  source 1..21: mol_type = other RNA
ccgcctacgaggacttcaacg

SEQ ID NO: 40595 - RNA, 21 nt, synthetic construct
  source 1..21: mol_type = other RNA
cgccgcctacgaggacttcaa

SEQ ID NO: 40596 - RNA, 21 nt, synthetic construct
  source 1..21: mol_type = other RNA
gtgcgggaacttcgacgacaa

SEQ ID NO: 40597 - RNA, 21 nt, synthetic construct
  source 1..21: mol_type = other RNA
gcgactgcgagtgtttctgca

SEQ ID NO: 40598 - RNA, 21 nt, synthetic construct
  source 1..21: mol_type = other RNA
actggcgaggtgcaaccggtg

SEQ ID NO: 40599 - RNA, 21 nt, synthetic construct
  source 1..21: mol_type = other RNA
cctgtgccgccaagggcgtac

SEQ ID NO: 40600 - RNA, 21 nt, synthetic construct
  source 1..21: mol_type = other RNA
tgccgccaagggcgtacagct

SEQ ID NO: 40601 - RNA, 21 nt, synthetic construct
  source 1..21: mol_type = other RNA
ttgatcgccatctgcggaagc

SEQ ID NO: 40602 - RNA, 21 nt, synthetic construct
  source 1..21: mol_type = other RNA
tggaactccagccacaacgcc

SEQ ID NO: 40603 - RNA, 21 nt, synthetic construct
  source 1..21: mol_type = other RNA
ccgtgatggtgcccaccggtt

SEQ ID NO: 40604 - RNA, 21 nt, synthetic construct
  source 1..21: mol_type = other RNA
ccggctgccatttctacgcag

SEQ ID NO: 40605 - RNA, 21 nt, synthetic construct
  source 1..21: mol_type = other RNA
gagcctggaggcttacgcaga

SEQ ID NO: 40606 - RNA, 21 nt, synthetic construct
  source 1..21: mol_type = other RNA
ctgatgtcactgggacgccct

SEQ ID NO: 40607 - RNA, 21 nt, synthetic construct
  source 1..21: mol_type = other RNA
ctgtgtgtggcaccccgcgct

SEQ ID NO: 40608 - RNA, 21 nt, synthetic construct
  source 1..21: mol_type = other RNA
tgatggtgcccaccggttcca

SEQ ID NO: 40609 - RNA, 21 nt, synthetic construct
  source 1..21: mol_type = other RNA
cagcactgtgacattgaccgc

SEQ ID NO: 40610 - RNA, 21 nt, synthetic construct
  source 1..21: mol_type = other RNA
tgcttgatcgccatctgcgga

SEQ ID NO: 40611 - RNA, 21 nt, synthetic construct
  source 1..21: mol_type = other RNA
ggctgccatttctacgcagtg

SEQ ID NO: 40612 - RNA, 21 nt, synthetic construct
  source 1..21: mol_type = other RNA
ccactgccgccagttgcaagg

SEQ ID NO: 40613 - RNA, 21 nt, synthetic construct
  source 1..21: mol_type = other RNA
ggtgccccgacgtcctcgccc

SEQ ID NO: 40614 - RNA, 21 nt, synthetic construct
  source 1..21: mol_type = other RNA
cacctacagcccgggcacctc

SEQ ID NO: 40615 - RNA, 21 nt, synthetic construct
  source 1..21: mol_type = other RNA
cctgatgtcactgggacgccc

SEQ ID NO: 40616 - RNA, 21 nt, synthetic construct
  source 1..21: mol_type = other RNA
acaaccacgggcttcacagcc

SEQ ID NO: 40617 - RNA, 21 nt, synthetic construct
  source 1..21: mol_type = other RNA
acaaccacgggcttcacagcc

SEQ ID NO: 40618 - RNA, 21 nt, synthetic construct
  source 1..21: mol_type = other RNA
acaaccacgggcttcacagcc

SEQ ID NO: 40619 - RNA, 21 nt, synthetic construct
  source 1..21: mol_type = other RNA
acaaccacgggcttcacagcc

SEQ ID NO: 40620 - RNA, 21 nt, synthetic construct
  source 1..21: mol_type = other RNA
tacaggatccgggtcctctgc

SEQ ID NO: 40621 - RNA, 21 nt, synthetic construct
  source 1..21: mol_type = other RNA
gaacccggcgcacaatgggcg

SEQ ID NO: 40622 - RNA, 21 nt, synthetic construct
  source 1..21: mol_type = other RNA
gtacatcttggcccaggacta

SEQ ID NO: 40623 - RNA, 21 nt, synthetic construct
  source 1..21: mol_type = other RNA
agctctacggccatgccctcc

SEQ ID NO: 40624 - RNA, 21 nt, synthetic construct
  source 1..21: mol_type = other RNA
agctctacggccatgccctcc

SEQ ID NO: 40625 - RNA, 21 nt, synthetic construct
  source 1..21: mol_type = other RNA
gtttttctcgcccggggaagt

SEQ ID NO: 40626 - RNA, 21 nt, synthetic construct
  source 1..21: mol_type = other RNA
ccccatacagcctgccacctg

SEQ ID NO: 40627 - RNA, 21 nt, synthetic construct
  source 1..21: mol_type = other RNA
ccagctacgccgaggcctagt

SEQ ID NO: 40628 - RNA, 21 nt, synthetic construct
  source 1..21: mol_type = other RNA
ccctgaacccggcgcacaatg

SEQ ID NO: 40629 - RNA, 21 nt, synthetic construct
  source 1..21: mol_type = other RNA
gaccaccatggccactatgcc

SEQ ID NO: 40630 - RNA, 21 nt, synthetic construct
  source 1..21: mol_type = other RNA
acgagaactgcctgaaagcgg

SEQ ID NO: 40631 - RNA, 21 nt, synthetic construct
  source 1..21: mol_type = other RNA
tcccaaatacgccaaccagac

SEQ ID NO: 40632 - RNA, 21 nt, synthetic construct
  source 1..21: mol_type = other RNA
cgactcgggtggcgactgcga

SEQ ID NO: 40633 - RNA, 21 nt, synthetic construct
  source 1..21: mol_type = other RNA
ggaactccagccacaacgcca

SEQ ID NO: 40634 - RNA, 21 nt, synthetic construct
  source 1..21: mol_type = other RNA
acccaacggtgcaatgtcagg

SEQ ID NO: 40635 - RNA, 21 nt, synthetic construct
  source 1..21: mol_type = other RNA
gcctgcctcacgcccgatggc

SEQ ID NO: 40636 - RNA, 21 nt, synthetic construct
  source 1..21: mol_type = other RNA
caccaccgatgggcttggcgc

SEQ ID NO: 40637 - RNA, 21 nt, synthetic construct
  source 1..21: mol_type = other RNA
caacgccgcagcctacgagta

SEQ ID NO: 40638 - RNA, 21 nt, synthetic construct
  source 1..21: mol_type = other RNA
catggccaccacacacgggcg

SEQ ID NO: 40639 - RNA, 21 nt, synthetic construct
  source 1..21: mol_type = other RNA
ggtcatcgagacccacgggat

SEQ ID NO: 40640 - RNA, 21 nt, synthetic construct
  source 1..21: mol_type = other RNA
gcctatgtgtccctgccacgg

SEQ ID NO: 40641 - RNA, 21 nt, synthetic construct
  source 1..21: mol_type = other RNA
ctcaacgccgcagcctacgag

SEQ ID NO: 40642 - RNA, 21 nt, synthetic construct
  source 1..21: mol_type = other RNA
aacggtgcaatgtcaggagga

SEQ ID NO: 40643 - RNA, 21 nt, synthetic construct
  source 1..21: mol_type = other RNA
gccgccaagggcgtacagctc

SEQ ID NO: 40644 - RNA, 21 nt, synthetic construct
  source 1..21: mol_type = other RNA
ataagatcagggccgctggag

SEQ ID NO: 40645 - RNA, 21 nt, synthetic construct
  source 1..21: mol_type = other RNA
cagtgcttaccaccacgacca

SEQ ID NO: 40646 - RNA, 21 nt, synthetic construct
  source 1..21: mol_type = other RNA
cttctacggggttggtgcaac

SEQ ID NO: 40647 - RNA, 21 nt, synthetic construct
  source 1..21: mol_type = other RNA
acgcgtgtgcctgcgactcgg

SEQ ID NO: 40648 - RNA, 21 nt, synthetic construct
  source 1..21: mol_type = other RNA
ctgaacccggcgcacaatggg

SEQ ID NO: 40649 - RNA, 21 nt, synthetic construct
  source 1..21: mol_type = other RNA
acgtccagctacgccgaggcc

SEQ ID NO: 40650 - RNA, 21 nt, synthetic construct
  source 1..21: mol_type = other RNA
gcttgatcgccatctgcggaa

SEQ ID NO: 40651 - RNA, 21 nt, synthetic construct
  source 1..21: mol_type = other RNA
tgcgggttctctgctgcgaat

SEQ ID NO: 40652 - RNA, 21 nt, synthetic construct
  source 1..21: mol_type = other RNA
aaatttcccggggagcggtgg

SEQ ID NO: 40653 - RNA, 21 nt, synthetic construct
  source 1..21: mol_type = other RNA
tgtgtggcaccccgcgctccg

SEQ ID NO: 40654 - RNA, 21 nt, synthetic construct
  source 1..21: mol_type = other RNA
gtgttggctctggcggccatg

SEQ ID NO: 40655 - RNA, 21 nt, synthetic construct
  source 1..21: mol_type = other RNA
tctggcggccatgctcgtggt

SEQ ID NO: 40656 - RNA, 21 nt, synthetic construct
  source 1..21: mol_type = other RNA
gtgccgcaggcagagacccag

SEQ ID NO: 40657 - RNA, 21 nt, synthetic construct
  source 1..21: mol_type = other RNA
gttctctgagcactgccgcgc

SEQ ID NO: 40658 - RNA, 21 nt, synthetic construct
  source 1..21: mol_type = other RNA
cattcctgtggaacggagagg

SEQ ID NO: 40659 - RNA, 21 nt, synthetic construct
  source 1..21: mol_type = other RNA
atcccaaatacgccaaccaga

SEQ ID NO: 40660 - RNA, 21 nt, synthetic construct
  source 1..21: mol_type = other RNA
tctatgcccacaacgccaggc

SEQ ID NO: 40661 - RNA, 21 nt, synthetic construct
  source 1..21: mol_type = other RNA
tgccccctcaacatgcagcac

SEQ ID NO: 40662 - RNA, 21 nt, synthetic construct
  source 1..21: mol_type = other RNA
tgtgccgacagcagcttcacc

SEQ ID NO: 40663 - RNA, 21 nt, synthetic construct
  source 1..21: mol_type = other RNA
ctcgagcttcttcatcgtggt

SEQ ID NO: 40664 - RNA, 21 nt, synthetic construct
  source 1..21: mol_type = other RNA
aatgccaggaacagctttgag

SEQ ID NO: 40665 - RNA, 21 nt, synthetic construct
  source 1..21: mol_type = other RNA
gcgctgccactccatcatcaa

SEQ ID NO: 40666 - RNA, 21 nt, synthetic construct
  source 1..21: mol_type = other RNA
ctgtgccgccaagggcgtaca

SEQ ID NO: 40667 - RNA, 21 nt, synthetic construct
  source 1..21: mol_type = other RNA
tactgtggggacaacaccacc

SEQ ID NO: 40668 - RNA, 21 nt, synthetic construct
  source 1..21: mol_type = other RNA
gggtggggacccaccctacaa

SEQ ID NO: 40669 - RNA, 21 nt, synthetic construct
  source 1..21: mol_type = other RNA
ggtggggacccaccctacaag

SEQ ID NO: 40670 - RNA, 21 nt, synthetic construct
  source 1..21: mol_type = other RNA
aactccagccacaacgccatt

SEQ ID NO: 40671 - RNA, 21 nt, synthetic construct
  source 1..21: mol_type = other RNA
gcagcttcccgacatgccgct

SEQ ID NO: 40672 - RNA, 21 nt, synthetic construct
  source 1..21: mol_type = other RNA
ccccgtgacggtcaccccctc

SEQ ID NO: 40673 - RNA, 21 nt, synthetic construct
  source 1..21: mol_type = other RNA
cctcggccccaggtaccacca

SEQ ID NO: 40674 - RNA, 21 nt, synthetic construct
  source 1..21: mol_type = other RNA
cgtcttcaagatgtgctacaa

SEQ ID NO: 40675 - RNA, 21 nt, synthetic construct
  source 1..21: mol_type = other RNA
gagtagcccggggctgaccag

SEQ ID NO: 40676 - RNA, 21 nt, synthetic construct
  source 1..21: mol_type = other RNA
cagaaggactgacatccccca

SEQ ID NO: 40677 - RNA, 21 nt, synthetic construct
  source 1..21: mol_type = other RNA
tacacaagcacccttggtaca

SEQ ID NO: 40678 - RNA, 21 nt, synthetic construct
  source 1..21: mol_type = other RNA
cacatccacccttccaacacg

SEQ ID NO: 40679 - RNA, 21 nt, synthetic construct
  source 1..21: mol_type = other RNA
gagcttgggcacatggcgccc

SEQ ID NO: 40680 - RNA, 21 nt, synthetic construct
  source 1..21: mol_type = other RNA
gcttgggcacatggcgcccct

SEQ ID NO: 40681 - RNA, 21 nt, synthetic construct
  source 1..21: mol_type = other RNA
ggccccaacaacaatggcaac

SEQ ID NO: 40682 - RNA, 21 nt, synthetic construct
  source 1..21: mol_type = other RNA
gtccacctctcaggccgagac

SEQ ID NO: 40683 - RNA, 21 nt, synthetic construct
  source 1..21: mol_type = other RNA
cacaaccacgggcttcacagc

SEQ ID NO: 40684 - RNA, 21 nt, synthetic construct
  source 1..21: mol_type = other RNA
agtgtggatcagcacaaccac

SEQ ID NO: 40685 - RNA, 21 nt, synthetic construct
  source 1..21: mol_type = other RNA
tggccactggttctatggcaa

SEQ ID NO: 40686 - RNA, 21 nt, synthetic construct
  source 1..21: mol_type = other RNA
ggccactggttctatggcaac

SEQ ID NO: 40687 - RNA, 21 nt, synthetic construct
  source 1..21: mol_type = other RNA
actcctgggacaactcccatc

SEQ ID NO: 40688 - RNA, 21 nt, synthetic construct
  source 1..21: mol_type = other RNA
cagtgctgaccaccaccgcca

SEQ ID NO: 40689 - RNA, 21 nt, synthetic construct
  source 1..21: mol_type = other RNA
gtgcgcacagcctggacttcg

SEQ ID NO: 40690 - RNA, 21 nt, synthetic construct
  source 1..21: mol_type = other RNA
ccctagcagcagaaccaccga

SEQ ID NO: 40691 - RNA, 21 nt, synthetic construct
  source 1..21: mol_type = other RNA
gccctctggcggggactttga

SEQ ID NO: 40692 - RNA, 21 nt, synthetic construct
  source 1..21: mol_type = other RNA
tgacacctactccaacatccg

SEQ ID NO: 40693 - RNA, 21 nt, synthetic construct
  source 1..21: mol_type = other RNA
gctttacagccatcccctcct

SEQ ID NO: 40694 - RNA, 21 nt, synthetic construct
  source 1..21: mol_type = other RNA
cacaaccacgggcttcacagc

SEQ ID NO: 40695 - RNA, 21 nt, synthetic construct
  source 1..21: mol_type = other RNA
acgcttccagtgtggatcagc

SEQ ID NO: 40696 - RNA, 21 nt, synthetic construct
  source 1..21: mol_type = other RNA
agtgtggatcagcacaaccac

SEQ ID NO: 40697 - RNA, 21 nt, synthetic construct
  source 1..21: mol_type = other RNA
tggccactggttctatggcaa

SEQ ID NO: 40698 - RNA, 21 nt, synthetic construct
  source 1..21: mol_type = other RNA
ggccactggttctatggcaac

SEQ ID NO: 40699 - RNA, 21 nt, synthetic construct
  source 1..21: mol_type = other RNA
cagtgctgaccaccaccgcca

SEQ ID NO: 40700 - RNA, 21 nt, synthetic construct
  source 1..21: mol_type = other RNA
gtgcgcacagcctggacttcg

SEQ ID NO: 40701 - RNA, 21 nt, synthetic construct
  source 1..21: mol_type = other RNA
gagccttccacggggacttcc

SEQ ID NO: 40702 - RNA, 21 nt, synthetic construct
  source 1..21: mol_type = other RNA
ctagcagcaggaccaccgagt

SEQ ID NO: 40703 - RNA, 21 nt, synthetic construct
  source 1..21: mol_type = other RNA
gccctctggcggggactttga

SEQ ID NO: 40704 - RNA, 21 nt, synthetic construct
  source 1..21: mol_type = other RNA
tgacacctactccaacatccg

SEQ ID NO: 40705 - RNA, 21 nt, synthetic construct
  source 1..21: mol_type = other RNA
acccttgggaccaccgggacc

SEQ ID NO: 40706 - RNA, 21 nt, synthetic construct
  source 1..21: mol_type = other RNA
cacgacaagggccaccagttc

SEQ ID NO: 40707 - RNA, 21 nt, synthetic construct
  source 1..21: mol_type = other RNA
gggcaccgcctggacccgcct

SEQ ID NO: 40708 - RNA, 21 nt, synthetic construct
  source 1..21: mol_type = other RNA
cacaaccacgggcttcacagc

SEQ ID NO: 40709 - RNA, 21 nt, synthetic construct
  source 1..21: mol_type = other RNA
agtgtggatcagcacaaccac

SEQ ID NO: 40710 - RNA, 21 nt, synthetic construct
  source 1..21: mol_type = other RNA
tggccactggttctatggcaa

SEQ ID NO: 40711 - RNA, 21 nt, synthetic construct
  source 1..21: mol_type = other RNA
ggccactggttctatggcaac

SEQ ID NO: 40712 - RNA, 21 nt, synthetic construct
  source 1..21: mol_type = other RNA
ctcaactccagggacaactcc

SEQ ID NO: 40713 - RNA, 21 nt, synthetic construct
  source 1..21: mol_type = other RNA
cagtgctgaccaccaccgcca

SEQ ID NO: 40714 - RNA, 21 nt, synthetic construct
  source 1..21: mol_type = other RNA
gtgcgcacagcctggacttcg

SEQ ID NO: 40715 - RNA, 21 nt, synthetic construct
  source 1..21: mol_type = other RNA
ctagcagcaggaccaccgagt

SEQ ID NO: 40716 - RNA, 21 nt, synthetic construct
  source 1..21: mol_type = other RNA
gccctctggcggggactttga

SEQ ID NO: 40717 - RNA, 21 nt, synthetic construct
  source 1..21: mol_type = other RNA
tgacacctactccaacatccg

SEQ ID NO: 40718 - RNA, 21 nt, synthetic construct
  source 1..21: mol_type = other RNA
gctttacagccatcccctcct

SEQ ID NO: 40719 - RNA, 21 nt, synthetic construct
  source 1..21: mol_type = other RNA
cacaaccacgggcttcacagt

SEQ ID NO: 40720 - RNA, 21 nt, synthetic construct
  source 1..21: mol_type = other RNA
agtgtggatcagcacaaccac

SEQ ID NO: 40721 - RNA, 21 nt, synthetic construct
  source 1..21: mol_type = other RNA
tggccactggttctatggcaa

SEQ ID NO: 40722 - RNA, 21 nt, synthetic construct
  source 1..21: mol_type = other RNA
ggccactggttctatggcaac

SEQ ID NO: 40723 - RNA, 21 nt, synthetic construct
  source 1..21: mol_type = other RNA
cagtgctgaccaccaccgcca

SEQ ID NO: 40724 - RNA, 21 nt, synthetic construct
  source 1..21: mol_type = other RNA
gtgcgcacagcctggacttcg

SEQ ID NO: 40725 - RNA, 21 nt, synthetic construct
  source 1..21: mol_type = other RNA
gagccttccacggggacttcc

SEQ ID NO: 40726 - RNA, 21 nt, synthetic construct
  source 1..21: mol_type = other RNA
ctagcagcaggaccaccgagt

SEQ ID NO: 40727 - RNA, 21 nt, synthetic construct
  source 1..21: mol_type = other RNA
gccctctggcggggactttga

SEQ ID NO: 40728 - RNA, 21 nt, synthetic construct
  source 1..21: mol_type = other RNA
tgacacctactccaacatccg

SEQ ID NO: 40729 - RNA, 21 nt, synthetic construct
  source 1..21: mol_type = other RNA
acccttgggaccaccgggacc

SEQ ID NO: 40730 - RNA, 21 nt, synthetic construct
  source 1..21: mol_type = other RNA
cacgacaagggccaccagttc

SEQ ID NO: 40731 - RNA, 21 nt, synthetic construct
  source 1..21: mol_type = other RNA
gctttacagccatcccctcct

SEQ ID NO: 40732 - RNA, 21 nt, synthetic construct
  source 1..21: mol_type = other RNA
cacaaccacgggcttcacagc

SEQ ID NO: 40733 - RNA, 21 nt, synthetic construct
  source 1..21: mol_type = other RNA
agtgtggatcagcacaaccac

SEQ ID NO: 40734 - RNA, 21 nt, synthetic construct
  source 1..21: mol_type = other RNA
tggccactggttctatggcaa

SEQ ID NO: 40735 - RNA, 21 nt, synthetic construct
  source 1..21: mol_type = other RNA
ggccactggttctatggcaac

SEQ ID NO: 40736 - RNA, 21 nt, synthetic construct
  source 1..21: mol_type = other RNA
acaaaatccacagctaccagc

SEQ ID NO: 40737 - RNA, 21 nt, synthetic construct
  source 1..21: mol_type = other RNA
tgtccacaatccacacctcct

SEQ ID NO: 40738 - RNA, 21 nt, synthetic construct
  source 1..21: mol_type = other RNA
gtccacaatccacacctcctc

SEQ ID NO: 40739 - RNA, 21 nt, synthetic construct
  source 1..21: mol_type = other RNA
ctccactctggggacgacccg

SEQ ID NO: 40740 - RNA, 21 nt, synthetic construct
  source 1..21: mol_type = other RNA
ggaacagctcacacccccaaa

SEQ ID NO: 40741 - RNA, 21 nt, synthetic construct
  source 1..21: mol_type = other RNA
tgcagggcatttggacagttt

SEQ ID NO: 40742 - RNA, 21 nt, synthetic construct
  source 1..21: mol_type = other RNA
ccggggaagtcatctacaata

SEQ ID NO: 40743 - RNA, 21 nt, synthetic construct
  source 1..21: mol_type = other RNA
cggctgccatttctacgcagt

SEQ ID NO: 40744 - RNA, 21 nt, synthetic construct
  source 1..21: mol_type = other RNA
tgtcgtcctgctggacccaaa

SEQ ID NO: 40745 - RNA, 21 nt, synthetic construct
  source 1..21: mol_type = other RNA
aaagcctgtggccaacgtcac

SEQ ID NO: 40746 - RNA, 21 nt, synthetic construct
  source 1..21: mol_type = other RNA
ctcatgagagagatccatgca

SEQ ID NO: 40747 - RNA, 21 nt, synthetic construct
  source 1..21: mol_type = other RNA
atgagagagatccatgcacgc

SEQ ID NO: 40748 - RNA, 21 nt, synthetic construct
  source 1..21: mol_type = other RNA
gaggagggcctgatcctgttt

SEQ ID NO: 40749 - RNA, 21 nt, synthetic construct
  source 1..21: mol_type = other RNA
aggagggcctgatcctgtttg

SEQ ID NO: 40750 - RNA, 21 nt, synthetic construct
  source 1..21: mol_type = other RNA
ggggaccaccaccatgcgtgt

SEQ ID NO: 40751 - RNA, 21 nt, synthetic construct
  source 1..21: mol_type = other RNA
cgcagccccggtgtctagcac

SEQ ID NO: 40752 - RNA, 21 nt, synthetic construct
  source 1..21: mol_type = other RNA
gcccattcttcaacgcctgca

SEQ ID NO: 40753 - RNA, 21 nt, synthetic construct
  source 1..21: mol_type = other RNA
acgcacacatgggcatctgcg

SEQ ID NO: 40754 - RNA, 21 nt, synthetic construct
  source 1..21: mol_type = other RNA
cggggttggtgcaaccttccc

SEQ ID NO: 40755 - RNA, 21 nt, synthetic construct
  source 1..21: mol_type = other RNA
cctcacgcccgatggccagcc

SEQ ID NO: 40756 - RNA, 21 nt, synthetic construct
  source 1..21: mol_type = other RNA
caccacgacaagggccaccag

SEQ ID NO: 40757 - RNA, 21 nt, synthetic construct
  source 1..21: mol_type = other RNA
caccacgacaagggccaccag

SEQ ID NO: 40758 - RNA, 21 nt, synthetic construct
  source 1..21: mol_type = other RNA
gtgacgtccacttcggcctgg

SEQ ID NO: 40759 - RNA, 21 nt, synthetic construct
  source 1..21: mol_type = other RNA
tgcgtgtggacattcctgccc

SEQ ID NO: 40760 - RNA, 21 nt, synthetic construct
  source 1..21: mol_type = other RNA
ccgactggcacaccccccact

SEQ ID NO: 40761 - RNA, 21 nt, synthetic construct
  source 1..21: mol_type = other RNA
ggccctgtggagccgagctgg

SEQ ID NO: 40762 - RNA, 21 nt, synthetic construct
  source 1..21: mol_type = other RNA
acccggcgcacaatgggcggg

SEQ ID NO: 40763 - RNA, 21 nt, synthetic construct
  source 1..21: mol_type = other RNA
tgatcctccaagaggggacct

SEQ ID NO: 40764 - RNA, 21 nt, synthetic construct
  source 1..21: mol_type = other RNA
tggggacccaccctacaagat

SEQ ID NO: 40765 - RNA, 21 nt, synthetic construct
  source 1..21: mol_type = other RNA
caacagagtcccccgctctgt

SEQ ID NO: 40766 - RNA, 21 nt, synthetic construct
  source 1..21: mol_type = other RNA
cgtgccacaaccccgccaccg

SEQ ID NO: 40767 - RNA, 21 nt, synthetic construct
  source 1..21: mol_type = other RNA
agaaggactgacatcccccag

SEQ ID NO: 40768 - RNA, 21 nt, synthetic construct
  source 1..21: mol_type = other RNA
cacagcctggacttcggccac

SEQ ID NO: 40769 - RNA, 21 nt, synthetic construct
  source 1..21: mol_type = other RNA
tggtctgcaggaaccgtgagc

SEQ ID NO: 40770 - RNA, 21 nt, synthetic construct
  source 1..21: mol_type = other RNA
cacagcctggacttcggccac

SEQ ID NO: 40771 - RNA, 21 nt, synthetic construct
  source 1..21: mol_type = other RNA
agccttccacggggacttccc

SEQ ID NO: 40772 - RNA, 21 nt, synthetic construct
  source 1..21: mol_type = other RNA
tggtctgcaggaaccgtgagc

SEQ ID NO: 40773 - RNA, 21 nt, synthetic construct
  source 1..21: mol_type = other RNA
cacagcctggacttcggccac

SEQ ID NO: 40774 - RNA, 21 nt, synthetic construct
  source 1..21: mol_type = other RNA
tggtctgcaggaaccgtgagc

SEQ ID NO: 40775 - RNA, 21 nt, synthetic construct
  source 1..21: mol_type = other RNA
cacagcctggacttcggccac

SEQ ID NO: 40776 - RNA, 21 nt, synthetic construct
  source 1..21: mol_type = other RNA
agccttccacggggacttccc

SEQ ID NO: 40777 - RNA, 21 nt, synthetic construct
  source 1..21: mol_type = other RNA
tggtctgcaggaaccgtgagc

SEQ ID NO: 40778 - RNA, 21 nt, synthetic construct
  source 1..21: mol_type = other RNA
ggggttggtgcaaccttccca

SEQ ID NO: 40779 - RNA, 21 nt, synthetic construct
  source 1..21: mol_type = other RNA
gaatgaaacctgggtcaacag

SEQ ID NO: 40780 - RNA, 21 nt, synthetic construct
  source 1..21: mol_type = other RNA
aactcagggctgaggtcgcaa

SEQ ID NO: 40781 - RNA, 21 nt, synthetic construct
  source 1..21: mol_type = other RNA
aaataaaccctgagcattgag

SEQ ID NO: 40782 - RNA, 21 nt, synthetic construct
  source 1..21: mol_type = other RNA
cacggtgacttcccacaccct

SEQ ID NO: 40783 - RNA, 21 nt, synthetic construct
  source 1..21: mol_type = other RNA
ggaagtgcggcctgacggaca

SEQ ID NO: 40784 - RNA, 21 nt, synthetic construct
  source 1..21: mol_type = other RNA
gtcacctgcagcgtttccttc

SEQ ID NO: 40785 - RNA, 21 nt, synthetic construct
  source 1..21: mol_type = other RNA
ggggctggtgtcggatgggag

SEQ ID NO: 40786 - RNA, 21 nt, synthetic construct
  source 1..21: mol_type = other RNA
gccacctacaagcctggagag

SEQ ID NO: 40787 - RNA, 21 nt, synthetic construct
  source 1..21: mol_type = other RNA
acgagctgcgggttctctgct

SEQ ID NO: 40788 - RNA, 21 nt, synthetic construct
  source 1..21: mol_type = other RNA
ctaccccatgccggggccctc

SEQ ID NO: 40789 - RNA, 21 nt, synthetic construct
  source 1..21: mol_type = other RNA
ctaccccatgccggggccctc

SEQ ID NO: 40790 - RNA, 21 nt, synthetic construct
  source 1..21: mol_type = other RNA
ctaccccatgccggggccctc

SEQ ID NO: 40791 - RNA, 21 nt, synthetic construct
  source 1..21: mol_type = other RNA
ctaccccatgccggggccctc

SEQ ID NO: 40792 - RNA, 21 nt, synthetic construct
  source 1..21: mol_type = other RNA
accgccagagtgctgaccacc

SEQ ID NO: 40793 - RNA, 21 nt, synthetic construct
  source 1..21: mol_type = other RNA
cccgactggcacaccccccac

SEQ ID NO: 40794 - RNA, 21 nt, synthetic construct
  source 1..21: mol_type = other RNA
cccattcttcaacgcctgcat

SEQ ID NO: 40795 - RNA, 21 nt, synthetic construct
  source 1..21: mol_type = other RNA
agcctggaggcttacgcagag

SEQ ID NO: 40796 - RNA, 21 nt, synthetic construct
  source 1..21: mol_type = other RNA
ggtgggtcagcaactgccagt

SEQ ID NO: 40797 - RNA, 21 nt, synthetic construct
  source 1..21: mol_type = other RNA
cttccctgccacatgtgtacc

SEQ ID NO: 40798 - RNA, 21 nt, synthetic construct
  source 1..21: mol_type = other RNA
cagggctgcgagaccgaggtc

SEQ ID NO: 40799 - RNA, 21 nt, synthetic construct
  source 1..21: mol_type = other RNA
cacgacgagggcgccgtgtgt

SEQ ID NO: 40800 - RNA, 21 nt, synthetic construct
  source 1..21: mol_type = other RNA
gctccggggggctatggcagt

SEQ ID NO: 40801 - RNA, 21 nt, synthetic construct
  source 1..21: mol_type = other RNA
aggtggtgcacgacgagggcg

SEQ ID NO: 40802 - RNA, 21 nt, synthetic construct
  source 1..21: mol_type = other RNA
gtgttcatgtacgggtgggaa

SEQ ID NO: 40803 - RNA, 21 nt, synthetic construct
  source 1..21: mol_type = other RNA
cgagcatccggtcgacggcgg

SEQ ID NO: 40804 - RNA, 21 nt, synthetic construct
  source 1..21: mol_type = other RNA
agctcacactaccaaagtgcc

SEQ ID NO: 40805 - RNA, 21 nt, synthetic construct
  source 1..21: mol_type = other RNA
gactacagctaccccatgccg

SEQ ID NO: 40806 - RNA, 21 nt, synthetic construct
  source 1..21: mol_type = other RNA
agctcacactaccaaagtgct

SEQ ID NO: 40807 - RNA, 21 nt, synthetic construct
  source 1..21: mol_type = other RNA
gactacagctaccccatgccg

SEQ ID NO: 40808 - RNA, 21 nt, synthetic construct
  source 1..21: mol_type = other RNA
agctcacactaccaaagtgcc

SEQ ID NO: 40809 - RNA, 21 nt, synthetic construct
  source 1..21: mol_type = other RNA
gactacagctaccccatgccg

SEQ ID NO: 40810 - RNA, 21 nt, synthetic construct
  source 1..21: mol_type = other RNA
agctcacactaccaaagtgcc

SEQ ID NO: 40811 - RNA, 21 nt, synthetic construct
  source 1..21: mol_type = other RNA
gactacagctaccccatgccg

SEQ ID NO: 40812 - RNA, 21 nt, synthetic construct
  source 1..21: mol_type = other RNA
agctcacactaccaaagtgcc

SEQ ID NO: 40813 - RNA, 21 nt, synthetic construct
  source 1..21: mol_type = other RNA
gaccacgtggaccgtcccagc

SEQ ID NO: 40814 - RNA, 21 nt, synthetic construct
  source 1..21: mol_type = other RNA
catgctcgtggtgccgcaggc

SEQ ID NO: 40815 - RNA, 21 nt, synthetic construct
  source 1..21: mol_type = other RNA
gggcacaccatggatggcggt

SEQ ID NO: 40816 - RNA, 21 nt, synthetic construct
  source 1..21: mol_type = other RNA
aagaaatgtgccgacagcagc

SEQ ID NO: 40817 - RNA, 21 nt, synthetic construct
  source 1..21: mol_type = other RNA
ctgccagcccacttgccgcgg

SEQ ID NO: 40818 - RNA, 21 nt, synthetic construct
  source 1..21: mol_type = other RNA
agcgtttccttcgtgcctgtg

SEQ ID NO: 40819 - RNA, 21 nt, synthetic construct
  source 1..21: mol_type = other RNA
cctgtgtgcccgcccaggagt

SEQ ID NO: 40820 - RNA, 21 nt, synthetic construct
  source 1..21: mol_type = other RNA
ccaggagtgcccctgctacgc

SEQ ID NO: 40821 - RNA, 21 nt, synthetic construct
  source 1..21: mol_type = other RNA
ctccagccacaacgccattca

SEQ ID NO: 40822 - RNA, 21 nt, synthetic construct
  source 1..21: mol_type = other RNA
cagctcaggccccgtgacggt

SEQ ID NO: 40823 - RNA, 21 nt, synthetic construct
  source 1..21: mol_type = other RNA
gacgtccacttcggcctggtg

SEQ ID NO: 40824 - RNA, 21 nt, synthetic construct
  source 1..21: mol_type = other RNA
ctacaggatccgggtcctctg

SEQ ID NO: 40825 - RNA, 21 nt, synthetic construct
  source 1..21: mol_type = other RNA
tgtccagccctcaccctagca

SEQ ID NO: 40826 - RNA, 21 nt, synthetic construct
  source 1..21: mol_type = other RNA
ccacacctccacagtgctgac

SEQ ID NO: 40827 - RNA, 21 nt, synthetic construct
  source 1..21: mol_type = other RNA
ctcaaagtgctgaccagcacg

SEQ ID NO: 40828 - RNA, 21 nt, synthetic construct
  source 1..21: mol_type = other RNA
cacacacgggcggtccctgcc

SEQ ID NO: 40829 - RNA, 21 nt, synthetic construct
  source 1..21: mol_type = other RNA
tgtccagccctcaccctagca

SEQ ID NO: 40830 - RNA, 21 nt, synthetic construct
  source 1..21: mol_type = other RNA
tgtccagccctcaccctagca

SEQ ID NO: 40831 - RNA, 21 nt, synthetic construct
  source 1..21: mol_type = other RNA
ccacacctccacagtgctgac

SEQ ID NO: 40832 - RNA, 21 nt, synthetic construct
  source 1..21: mol_type = other RNA
ccacacctccacagtgctgac

SEQ ID NO: 40833 - RNA, 21 nt, synthetic construct
  source 1..21: mol_type = other RNA
gccatttctacgcagtgtgca

SEQ ID NO: 40834 - RNA, 21 nt, synthetic construct
  source 1..21: mol_type = other RNA
ccatggatatcgtcctcactg

SEQ ID NO: 40835 - RNA, 21 nt, synthetic construct
  source 1..21: mol_type = other RNA
caccacagccgctctgtgatc

SEQ ID NO: 40836 - RNA, 21 nt, synthetic construct
  source 1..21: mol_type = other RNA
caaccttgtgcccccgggccc

SEQ ID NO: 40837 - RNA, 21 nt, synthetic construct
  source 1..21: mol_type = other RNA
gcctggaggcttacgcagagc

SEQ ID NO: 40838 - RNA, 21 nt, synthetic construct
  source 1..21: mol_type = other RNA
tggcctgtgcgacctcacctg

SEQ ID NO: 40839 - RNA, 21 nt, synthetic construct
  source 1..21: mol_type = other RNA
ccgatgggtttcctaaatttc

SEQ ID NO: 40840 - RNA, 21 nt, synthetic construct
  source 1..21: mol_type = other RNA
cgcctgcctcacgcccgatgg

SEQ ID NO: 40841 - RNA, 21 nt, synthetic construct
  source 1..21: mol_type = other RNA
cctgccccggagcgtccaagt

SEQ ID NO: 40842 - RNA, 21 nt, synthetic construct
  source 1..21: mol_type = other RNA
acccacgtggatgagtgtggc

SEQ ID NO: 40843 - RNA, 21 nt, synthetic construct
  source 1..21: mol_type = other RNA
atgaaaaccttgggcctcctc

SEQ ID NO: 40844 - RNA, 21 nt, synthetic construct
  source 1..21: mol_type = other RNA
cagctggccacgtccggccgc

SEQ ID NO: 40845 - RNA, 21 nt, synthetic construct
  source 1..21: mol_type = other RNA
cccgacctccaccctgagaac

SEQ ID NO: 40846 - RNA, 21 nt, synthetic construct
  source 1..21: mol_type = other RNA
gagcgcgtgccggacgctggt

SEQ ID NO: 40847 - RNA, 21 nt, synthetic construct
  source 1..21: mol_type = other RNA
gaagtgcggcctgacggacaa

SEQ ID NO: 40848 - RNA, 21 nt, synthetic construct
  source 1..21: mol_type = other RNA
ggggacccaccctacaagata

SEQ ID NO: 40849 - RNA, 21 nt, synthetic construct
  source 1..21: mol_type = other RNA
gtgacggtcaccccctcggcc

SEQ ID NO: 40850 - RNA, 21 nt, synthetic construct
  source 1..21: mol_type = other RNA
cccacgacgcctgcaggctcc

SEQ ID NO: 40851 - RNA, 21 nt, synthetic construct
  source 1..21: mol_type = other RNA
agtgcttaccgccacggccac

SEQ ID NO: 40852 - RNA, 21 nt, synthetic construct
  source 1..21: mol_type = other RNA
agtgcttaccgccacggccac

SEQ ID NO: 40853 - RNA, 21 nt, synthetic construct
  source 1..21: mol_type = other RNA
acacctatccccccagtgctg

SEQ ID NO: 40854 - RNA, 21 nt, synthetic construct
  source 1..21: mol_type = other RNA
acacctatccccccagtgctg

SEQ ID NO: 40855 - RNA, 21 nt, synthetic construct
  source 1..21: mol_type = other RNA
gcgggacggaaccactgccgc

SEQ ID NO: 40856 - RNA, 21 nt, synthetic construct
  source 1..21: mol_type = other RNA
gcgggttctctgctgcgaata

SEQ ID NO: 40857 - RNA, 21 nt, synthetic construct
  source 1..21: mol_type = other RNA
ccccacgacgcctgcaggctc

SEQ ID NO: 40858 - RNA, 21 nt, synthetic construct
  source 1..21: mol_type = other RNA
gtcctcatgagagagatccat

SEQ ID NO: 40859 - RNA, 21 nt, synthetic construct
  source 1..21: mol_type = other RNA
ccgaggcctagtgggctccag

SEQ ID NO: 40860 - RNA, 21 nt, synthetic construct
  source 1..21: mol_type = other RNA
aaagcggtgacgctcagcctg

SEQ ID NO: 40861 - RNA, 21 nt, synthetic construct
  source 1..21: mol_type = other RNA
caagggcgtacagctcagcga

SEQ ID NO: 40862 - RNA, 21 nt, synthetic construct
  source 1..21: mol_type = other RNA
tgagacgtttgaaaacctgag

SEQ ID NO: 40863 - RNA, 21 nt, synthetic construct
  source 1..21: mol_type = other RNA
tgacggtcaccccctcggccc

SEQ ID NO: 40864 - RNA, 21 nt, synthetic construct
  source 1..21: mol_type = other RNA
gagggcgtcttcaagatgtgc

SEQ ID NO: 40865 - RNA, 21 nt, synthetic construct
  source 1..21: mol_type = other RNA
ccacgacgcctgcaggctcca

SEQ ID NO: 40866 - RNA, 21 nt, synthetic construct
  source 1..21: mol_type = other RNA
cagggcacgacccgctgtcaa

SEQ ID NO: 40867 - RNA, 21 nt, synthetic construct
  source 1..21: mol_type = other RNA
agtgccaactaccacaaccac

SEQ ID NO: 40868 - RNA, 21 nt, synthetic construct
  source 1..21: mol_type = other RNA
ccacaccgccacagtgctgac

SEQ ID NO: 40869 - RNA, 21 nt, synthetic construct
  source 1..21: mol_type = other RNA
cacggccacgacacccacagt

SEQ ID NO: 40870 - RNA, 21 nt, synthetic construct
  source 1..21: mol_type = other RNA
acggccacgacacccacagtc

SEQ ID NO: 40871 - RNA, 21 nt, synthetic construct
  source 1..21: mol_type = other RNA
ccacaccgccacagtgctgac

SEQ ID NO: 40872 - RNA, 21 nt, synthetic construct
  source 1..21: mol_type = other RNA
cacggccacgacacccacagt

SEQ ID NO: 40873 - RNA, 21 nt, synthetic construct
  source 1..21: mol_type = other RNA
acggccacgacacccacagtc

SEQ ID NO: 40874 - RNA, 21 nt, synthetic construct
  source 1..21: mol_type = other RNA
cacggccacgacacccacagt

SEQ ID NO: 40875 - RNA, 21 nt, synthetic construct
  source 1..21: mol_type = other RNA
acggccacgacacccacagtc

SEQ ID NO: 40876 - RNA, 21 nt, synthetic construct
  source 1..21: mol_type = other RNA
ctatagccaccgtgatggtgc

SEQ ID NO: 40877 - RNA, 21 nt, synthetic construct
  source 1..21: mol_type = other RNA
caactgcaccgtgtacctctg

SEQ ID NO: 40878 - RNA, 21 nt, synthetic construct
  source 1..21: mol_type = other RNA
ggaacaaactaagcatgtgcg

SEQ ID NO: 40879 - RNA, 21 nt, synthetic construct
  source 1..21: mol_type = other RNA
ccatgctcgtggtgccgcagg

SEQ ID NO: 40880 - RNA, 21 nt, synthetic construct
  source 1..21: mol_type = other RNA
gatggcggtgccccgacgtcc

SEQ ID NO: 40881 - RNA, 21 nt, synthetic construct
  source 1..21: mol_type = other RNA
tggcggtgccccgacgtcctc

SEQ ID NO: 40882 - RNA, 21 nt, synthetic construct
  source 1..21: mol_type = other RNA
ctgagcactgccgcgccgcct

SEQ ID NO: 40883 - RNA, 21 nt, synthetic construct
  source 1..21: mol_type = other RNA
cagcatccggctggtgctgac

SEQ ID NO: 40884 - RNA, 21 nt, synthetic construct
  source 1..21: mol_type = other RNA
gacccgctgcccttgccggcc

SEQ ID NO: 40885 - RNA, 21 nt, synthetic construct
  source 1..21: mol_type = other RNA
gcggagtgccacgcactggtg

SEQ ID NO: 40886 - RNA, 21 nt, synthetic construct
  source 1..21: mol_type = other RNA
ggagtgccacgcactggtgga

SEQ ID NO: 40887 - RNA, 21 nt, synthetic construct
  source 1..21: mol_type = other RNA
gtgctggatgacatcacgcac

SEQ ID NO: 40888 - RNA, 21 nt, synthetic construct
  source 1..21: mol_type = other RNA
tgccttctcgcgctgccactc

SEQ ID NO: 40889 - RNA, 21 nt, synthetic construct
  source 1..21: mol_type = other RNA
ccaagggcgtacagctcagcg

SEQ ID NO: 40890 - RNA, 21 nt, synthetic construct
  source 1..21: mol_type = other RNA
gcccacttgccgcggcctgag

SEQ ID NO: 40891 - RNA, 21 nt, synthetic construct
  source 1..21: mol_type = other RNA
cggcctgagtgaggccgacgt

SEQ ID NO: 40892 - RNA, 21 nt, synthetic construct
  source 1..21: mol_type = other RNA
gcgtttccttcgtgcctgtgg

SEQ ID NO: 40893 - RNA, 21 nt, synthetic construct
  source 1..21: mol_type = other RNA
ccatggtgtacctggactgca

SEQ ID NO: 40894 - RNA, 21 nt, synthetic construct
  source 1..21: mol_type = other RNA
gaccatcagggtcgactgcaa

SEQ ID NO: 40895 - RNA, 21 nt, synthetic construct
  source 1..21: mol_type = other RNA
tcctgggaccggaagaccagc

SEQ ID NO: 40896 - RNA, 21 nt, synthetic construct
  source 1..21: mol_type = other RNA
tgtgcctgcgactcgggtggc

SEQ ID NO: 40897 - RNA, 21 nt, synthetic construct
  source 1..21: mol_type = other RNA
gactcgggtggcgactgcgag

SEQ ID NO: 40898 - RNA, 21 nt, synthetic construct
  source 1..21: mol_type = other RNA
gccatctgcggaagcaacggc

SEQ ID NO: 40899 - RNA, 21 nt, synthetic construct
  source 1..21: mol_type = other RNA
ccatctgcggaagcaacggca

SEQ ID NO: 40900 - RNA, 21 nt, synthetic construct
  source 1..21: mol_type = other RNA
atctgcggaagcaacggcacc

SEQ ID NO: 40901 - RNA, 21 nt, synthetic construct
  source 1..21: mol_type = other RNA
cggtctccaccgtgtgtgtcc

SEQ ID NO: 40902 - RNA, 21 nt, synthetic construct
  source 1..21: mol_type = other RNA
ggtctccaccgtgtgtgtccg

SEQ ID NO: 40903 - RNA, 21 nt, synthetic construct
  source 1..21: mol_type = other RNA
tcaacgccgcagcctacgagt

SEQ ID NO: 40904 - RNA, 21 nt, synthetic construct
  source 1..21: mol_type = other RNA
ccaccacgggaggccccacga

SEQ ID NO: 40905 - RNA, 21 nt, synthetic construct
  source 1..21: mol_type = other RNA
gccccacgacgcctgcaggct

SEQ ID NO: 40906 - RNA, 21 nt, synthetic construct
  source 1..21: mol_type = other RNA
cccttccaacacgctcagccc

SEQ ID NO: 40907 - RNA, 21 nt, synthetic construct
  source 1..21: mol_type = other RNA
gcaacctccagagctcgcccg

SEQ ID NO: 40908 - RNA, 21 nt, synthetic construct
  source 1..21: mol_type = other RNA
ctccagagctcgcccgacagg

SEQ ID NO: 40909 - RNA, 21 nt, synthetic construct
  source 1..21: mol_type = other RNA
gttacacccatcccctcttcc

SEQ ID NO: 40910 - RNA, 21 nt, synthetic construct
  source 1..21: mol_type = other RNA
acaactggggccaccggctct

SEQ ID NO: 40911 - RNA, 21 nt, synthetic construct
  source 1..21: mol_type = other RNA
ctaccacaaccacgggcttca

SEQ ID NO: 40912 - RNA, 21 nt, synthetic construct
  source 1..21: mol_type = other RNA
caaccagaggctccacggtga

SEQ ID NO: 40913 - RNA, 21 nt, synthetic construct
  source 1..21: mol_type = other RNA
aactgtggccactggttctat

SEQ ID NO: 40914 - RNA, 21 nt, synthetic construct
  source 1..21: mol_type = other RNA
ctgtggccactggttctatgg

SEQ ID NO: 40915 - RNA, 21 nt, synthetic construct
  source 1..21: mol_type = other RNA
tgtggccactggttctatggc

SEQ ID NO: 40916 - RNA, 21 nt, synthetic construct
  source 1..21: mol_type = other RNA
tgacttcccacaccctagcag

SEQ ID NO: 40917 - RNA, 21 nt, synthetic construct
  source 1..21: mol_type = other RNA
cgcacctcgaccctgctgccc

SEQ ID NO: 40918 - RNA, 21 nt, synthetic construct
  source 1..21: mol_type = other RNA
cccggccaccagctctacggc

SEQ ID NO: 40919 - RNA, 21 nt, synthetic construct
  source 1..21: mol_type = other RNA
ccggccaccagctctacggcc

SEQ ID NO: 40920 - RNA, 21 nt, synthetic construct
  source 1..21: mol_type = other RNA
cacagagccgagcactacagc

SEQ ID NO: 40921 - RNA, 21 nt, synthetic construct
  source 1..21: mol_type = other RNA
accgtgacggtgcccaccgga

SEQ ID NO: 40922 - RNA, 21 nt, synthetic construct
  source 1..21: mol_type = other RNA
cggatccacggccaccgcctc

SEQ ID NO: 40923 - RNA, 21 nt, synthetic construct
  source 1..21: mol_type = other RNA
ccaggcaactgctggcacccc

SEQ ID NO: 40924 - RNA, 21 nt, synthetic construct
  source 1..21: mol_type = other RNA
aactgctggcaccccacatgt

SEQ ID NO: 40925 - RNA, 21 nt, synthetic construct
  source 1..21: mol_type = other RNA
acgacacccacagtcaccagc

SEQ ID NO: 40926 - RNA, 21 nt, synthetic construct
  source 1..21: mol_type = other RNA
ctaccacaaccacgggcttca

SEQ ID NO: 40927 - RNA, 21 nt, synthetic construct
  source 1..21: mol_type = other RNA
aactgtggccactggttctat

SEQ ID NO: 40928 - RNA, 21 nt, synthetic construct
  source 1..21: mol_type = other RNA
ctgtggccactggttctatgg

SEQ ID NO: 40929 - RNA, 21 nt, synthetic construct
  source 1..21: mol_type = other RNA
tgtggccactggttctatggc

SEQ ID NO: 40930 - RNA, 21 nt, synthetic construct
  source 1..21: mol_type = other RNA
gacttcggccacctcaggcac

SEQ ID NO: 40931 - RNA, 21 nt, synthetic construct
  source 1..21: mol_type = other RNA
ccctagcagcaggaccaccga

SEQ ID NO: 40932 - RNA, 21 nt, synthetic construct
  source 1..21: mol_type = other RNA
cgcacctcgaccctgctgccc

SEQ ID NO: 40933 - RNA, 21 nt, synthetic construct
  source 1..21: mol_type = other RNA
cccggccaccagctctacggc

SEQ ID NO: 40934 - RNA, 21 nt, synthetic construct
  source 1..21: mol_type = other RNA
ccggccaccagctctacggcc

SEQ ID NO: 40935 - RNA, 21 nt, synthetic construct
  source 1..21: mol_type = other RNA
accctcccagaacagaccacc

SEQ ID NO: 40936 - RNA, 21 nt, synthetic construct
  source 1..21: mol_type = other RNA
caccatgtccacaatccaccc

SEQ ID NO: 40937 - RNA, 21 nt, synthetic construct
  source 1..21: mol_type = other RNA
acgaaggccaccacgacaagg

SEQ ID NO: 40938 - RNA, 21 nt, synthetic construct
  source 1..21: mol_type = other RNA
accgtgacggtgcccaccgga

SEQ ID NO: 40939 - RNA, 21 nt, synthetic construct
  source 1..21: mol_type = other RNA
cggatccacggccaccgcctc

SEQ ID NO: 40940 - RNA, 21 nt, synthetic construct
  source 1..21: mol_type = other RNA
ccgggcaactgctggcaccct

SEQ ID NO: 40941 - RNA, 21 nt, synthetic construct
  source 1..21: mol_type = other RNA
ccagcgttacagccatcccct

SEQ ID NO: 40942 - RNA, 21 nt, synthetic construct
  source 1..21: mol_type = other RNA
ccaaagtgccgactaccacaa

SEQ ID NO: 40943 - RNA, 21 nt, synthetic construct
  source 1..21: mol_type = other RNA
ctaccacaaccacgggcttca

SEQ ID NO: 40944 - RNA, 21 nt, synthetic construct
  source 1..21: mol_type = other RNA
caaccagaggctccacggtga

SEQ ID NO: 40945 - RNA, 21 nt, synthetic construct
  source 1..21: mol_type = other RNA
aactgtggccactggttctat

SEQ ID NO: 40946 - RNA, 21 nt, synthetic construct
  source 1..21: mol_type = other RNA
ctgtggccactggttctatgg

SEQ ID NO: 40947 - RNA, 21 nt, synthetic construct
  source 1..21: mol_type = other RNA
tgtggccactggttctatggc

SEQ ID NO: 40948 - RNA, 21 nt, synthetic construct
  source 1..21: mol_type = other RNA
ccctagcagcaggaccaccga

SEQ ID NO: 40949 - RNA, 21 nt, synthetic construct
  source 1..21: mol_type = other RNA
cgcacctcgaccctgctgccc

SEQ ID NO: 40950 - RNA, 21 nt, synthetic construct
  source 1..21: mol_type = other RNA
cccggccaccagctctacggc

SEQ ID NO: 40951 - RNA, 21 nt, synthetic construct
  source 1..21: mol_type = other RNA
ccggccaccagctctacggcc

SEQ ID NO: 40952 - RNA, 21 nt, synthetic construct
  source 1..21: mol_type = other RNA
cacagagccgagcactacagc

SEQ ID NO: 40953 - RNA, 21 nt, synthetic construct
  source 1..21: mol_type = other RNA
accgtgacggtgcccaccgga

SEQ ID NO: 40954 - RNA, 21 nt, synthetic construct
  source 1..21: mol_type = other RNA
cggatccacggccaccgcctc

SEQ ID NO: 40955 - RNA, 21 nt, synthetic construct
  source 1..21: mol_type = other RNA
ccaggcaactgctggcacccc

SEQ ID NO: 40956 - RNA, 21 nt, synthetic construct
  source 1..21: mol_type = other RNA
aactgctggcaccccacatgt

SEQ ID NO: 40957 - RNA, 21 nt, synthetic construct
  source 1..21: mol_type = other RNA
acgacacccacagtcaccagc

SEQ ID NO: 40958 - RNA, 21 nt, synthetic construct
  source 1..21: mol_type = other RNA
ccaaagtgccgactaccacaa

SEQ ID NO: 40959 - RNA, 21 nt, synthetic construct
  source 1..21: mol_type = other RNA
ctaccacaaccacgggcttca

SEQ ID NO: 40960 - RNA, 21 nt, synthetic construct
  source 1..21: mol_type = other RNA
accacacccacaaccagtggc

SEQ ID NO: 40961 - RNA, 21 nt, synthetic construct
  source 1..21: mol_type = other RNA
aactgtggccactggttctat

SEQ ID NO: 40962 - RNA, 21 nt, synthetic construct
  source 1..21: mol_type = other RNA
ctgtggccactggttctatgg

SEQ ID NO: 40963 - RNA, 21 nt, synthetic construct
  source 1..21: mol_type = other RNA
tgtggccactggttctatggc

SEQ ID NO: 40964 - RNA, 21 nt, synthetic construct
  source 1..21: mol_type = other RNA
gacttcggccacctcaggcac

SEQ ID NO: 40965 - RNA, 21 nt, synthetic construct
  source 1..21: mol_type = other RNA
ccctagcagcaggaccaccga

SEQ ID NO: 40966 - RNA, 21 nt, synthetic construct
  source 1..21: mol_type = other RNA
cgcacctcgaccctgctgccc

SEQ ID NO: 40967 - RNA, 21 nt, synthetic construct
  source 1..21: mol_type = other RNA
cccggccaccagctctacggc

SEQ ID NO: 40968 - RNA, 21 nt, synthetic construct
  source 1..21: mol_type = other RNA
ccggccaccagctctacggcc

SEQ ID NO: 40969 - RNA, 21 nt, synthetic construct
  source 1..21: mol_type = other RNA
accctcccagaacagaccacc

SEQ ID NO: 40970 - RNA, 21 nt, synthetic construct
  source 1..21: mol_type = other RNA
caccatgtccacaatccaccc

SEQ ID NO: 40971 - RNA, 21 nt, synthetic construct
  source 1..21: mol_type = other RNA
acgaaggccaccacgacaagg

SEQ ID NO: 40972 - RNA, 21 nt, synthetic construct
  source 1..21: mol_type = other RNA
cacagagccgagcactacagc

SEQ ID NO: 40973 - RNA, 21 nt, synthetic construct
  source 1..21: mol_type = other RNA
accgtgacggtgcccaccgga

SEQ ID NO: 40974 - RNA, 21 nt, synthetic construct
  source 1..21: mol_type = other RNA
cggatccacggccaccgcctc

SEQ ID NO: 40975 - RNA, 21 nt, synthetic construct
  source 1..21: mol_type = other RNA
ccaggcaactgctggcacccc

SEQ ID NO: 40976 - RNA, 21 nt, synthetic construct
  source 1..21: mol_type = other RNA
aactgctggcaccccacatgt

SEQ ID NO: 40977 - RNA, 21 nt, synthetic construct
  source 1..21: mol_type = other RNA
acgacacccacagtcaccagc

SEQ ID NO: 40978 - RNA, 21 nt, synthetic construct
  source 1..21: mol_type = other RNA
ccaaagtgccgactaccacaa

SEQ ID NO: 40979 - RNA, 21 nt, synthetic construct
  source 1..21: mol_type = other RNA
ctaccacaaccacgggcttca

SEQ ID NO: 40980 - RNA, 21 nt, synthetic construct
  source 1..21: mol_type = other RNA
accacacccacaaccagtggc

SEQ ID NO: 40981 - RNA, 21 nt, synthetic construct
  source 1..21: mol_type = other RNA
ccacaccgccagagtgctgac

SEQ ID NO: 40982 - RNA, 21 nt, synthetic construct
  source 1..21: mol_type = other RNA
aactgtggccactggttctat

SEQ ID NO: 40983 - RNA, 21 nt, synthetic construct
  source 1..21: mol_type = other RNA
ctgtggccactggttctatgg

SEQ ID NO: 40984 - RNA, 21 nt, synthetic construct
  source 1..21: mol_type = other RNA
tgtggccactggttctatggc

SEQ ID NO: 40985 - RNA, 21 nt, synthetic construct
  source 1..21: mol_type = other RNA
gacaacacccatcaccccagt

SEQ ID NO: 40986 - RNA, 21 nt, synthetic construct
  source 1..21: mol_type = other RNA
tatagccaccgtgatggtgcc

SEQ ID NO: 40987 - RNA, 21 nt, synthetic construct
  source 1..21: mol_type = other RNA
atggtgcccaccggttccacg

SEQ ID NO: 40988 - RNA, 21 nt, synthetic construct
  source 1..21: mol_type = other RNA
tggtgcccaccggttccacgg

SEQ ID NO: 40989 - RNA, 21 nt, synthetic construct
  source 1..21: mol_type = other RNA
ggtgcccaccggttccacggc

SEQ ID NO: 40990 - RNA, 21 nt, synthetic construct
  source 1..21: mol_type = other RNA
cccaaagtggtgaccaccatg

SEQ ID NO: 40991 - RNA, 21 nt, synthetic construct
  source 1..21: mol_type = other RNA
tctcgcccggggaagtcatct

SEQ ID NO: 40992 - RNA, 21 nt, synthetic construct
  source 1..21: mol_type = other RNA
ccaaagcctgtggccaacgtc

SEQ ID NO: 40993 - RNA, 21 nt, synthetic construct
  source 1..21: mol_type = other RNA
tcggacccgagccagccctgt

SEQ ID NO: 40994 - RNA, 21 nt, synthetic construct
  source 1..21: mol_type = other RNA
gcgagtgcatctgcagcatgt

SEQ ID NO: 40995 - RNA, 21 nt, synthetic construct
  source 1..21: mol_type = other RNA
acgtggctggtccccgacagc

SEQ ID NO: 40996 - RNA, 21 nt, synthetic construct
  source 1..21: mol_type = other RNA
aaccttgtgcccccgggccca

SEQ ID NO: 40997 - RNA, 21 nt, synthetic construct
  source 1..21: mol_type = other RNA
ccttgaggtgccctgccagag

SEQ ID NO: 40998 - RNA, 21 nt, synthetic construct
  source 1..21: mol_type = other RNA
cggtggcctgtgcgacctcac

SEQ ID NO: 40999 - RNA, 21 nt, synthetic construct
  source 1..21: mol_type = other RNA
ggccccatacagcctgccacc

SEQ ID NO: 41000 - RNA, 21 nt, synthetic construct
  source 1..21: mol_type = other RNA
ttggtgcaaccttcccaggcg

SEQ ID NO: 41001 - RNA, 21 nt, synthetic construct
  source 1..21: mol_type = other RNA
caacggtgcaatgtcaggagg

SEQ ID NO: 41002 - RNA, 21 nt, synthetic construct
  source 1..21: mol_type = other RNA
gagtgcgtccagaccgcctgc

SEQ ID NO: 41003 - RNA, 21 nt, synthetic construct
  source 1..21: mol_type = other RNA
caacagccatgtggacaactg

SEQ ID NO: 41004 - RNA, 21 nt, synthetic construct
  source 1..21: mol_type = other RNA
gcccagatgtgtccagctgca

SEQ ID NO: 41005 - RNA, 21 nt, synthetic construct
  source 1..21: mol_type = other RNA
aacatcaccttctgcgagggc

SEQ ID NO: 41006 - RNA, 21 nt, synthetic construct
  source 1..21: mol_type = other RNA
aaaaccttgggcctcctctgc

SEQ ID NO: 41007 - RNA, 21 nt, synthetic construct
  source 1..21: mol_type = other RNA
gcccaccccgtgggtgaaacc

SEQ ID NO: 41008 - RNA, 21 nt, synthetic construct
  source 1..21: mol_type = other RNA
gggtgaaaccggccccagaag

SEQ ID NO: 41009 - RNA, 21 nt, synthetic construct
  source 1..21: mol_type = other RNA
tcgggagggcgccactcagga

SEQ ID NO: 41010 - RNA, 21 nt, synthetic construct
  source 1..21: mol_type = other RNA
cgggagggcgccactcaggag

SEQ ID NO: 41011 - RNA, 21 nt, synthetic construct
  source 1..21: mol_type = other RNA
ggccgcctgtccatgcctgct

SEQ ID NO: 41012 - RNA, 21 nt, synthetic construct
  source 1..21: mol_type = other RNA
ctactccagagaccacccaca

SEQ ID NO: 41013 - RNA, 21 nt, synthetic construct
  source 1..21: mol_type = other RNA
ggggaccacccacaccgccac

SEQ ID NO: 41014 - RNA, 21 nt, synthetic construct
  source 1..21: mol_type = other RNA
ggggaccacccacaccgccac

SEQ ID NO: 41015 - RNA, 21 nt, synthetic construct
  source 1..21: mol_type = other RNA
ggggaccacccacaccgccag

SEQ ID NO: 41016 - RNA, 21 nt, synthetic construct
  source 1..21: mol_type = other RNA
gacttcaacggcctcccggcc

SEQ ID NO: 41017 - RNA, 21 nt, synthetic construct
  source 1..21: mol_type = other RNA
gccatgtggacaactgcaccg

SEQ ID NO: 41018 - RNA, 21 nt, synthetic construct
  source 1..21: mol_type = other RNA
catcacgcactctggctgcct

SEQ ID NO: 41019 - RNA, 21 nt, synthetic construct
  source 1..21: mol_type = other RNA
acttcaacggcctcccggcct

SEQ ID NO: 41020 - RNA, 21 nt, synthetic construct
  source 1..21: mol_type = other RNA
caacgagaactgcctgaaagc

SEQ ID NO: 41021 - RNA, 21 nt, synthetic construct
  source 1..21: mol_type = other RNA
ttcatcgtggtgcagacaggc

SEQ ID NO: 41022 - RNA, 21 nt, synthetic construct
  source 1..21: mol_type = other RNA
gagcggggactacatcaaggt

SEQ ID NO: 41023 - RNA, 21 nt, synthetic construct
  source 1..21: mol_type = other RNA
caccaattccacggccacacc

SEQ ID NO: 41024 - RNA, 21 nt, synthetic construct
  source 1..21: mol_type = other RNA
ttacaccttccggggcaactg

SEQ ID NO: 41025 - RNA, 21 nt, synthetic construct
  source 1..21: mol_type = other RNA
gaggtcgcaacggccaggtca

SEQ ID NO: 41026 - RNA, 21 nt, synthetic construct
  source 1..21: mol_type = other RNA
gtacctctgtgaggctgaggg

SEQ ID NO: 41027 - RNA, 21 nt, synthetic construct
  source 1..21: mol_type = other RNA
acgacgcgtgtgcctgcgact

SEQ ID NO: 41028 - RNA, 21 nt, synthetic construct
  source 1..21: mol_type = other RNA
agtacatcttggcccaggact

SEQ ID NO: 41029 - RNA, 21 nt, synthetic construct
  source 1..21: mol_type = other RNA
caatgggcgggtgtgcagcac

SEQ ID NO: 41030 - RNA, 21 nt, synthetic construct
  source 1..21: mol_type = other RNA
cggcaactgcacggacgagga

SEQ ID NO: 41031 - RNA, 21 nt, synthetic construct
  source 1..21: mol_type = other RNA
gacggtcaccccctcggcccc

SEQ ID NO: 41032 - RNA, 21 nt, synthetic construct
  source 1..21: mol_type = other RNA
ccagagctcgcccgacaggca

SEQ ID NO: 41033 - RNA, 21 nt, synthetic construct
  source 1..21: mol_type = other RNA
ggtgccccgagcgcgtgccgg

SEQ ID NO: 41034 - RNA, 21 nt, synthetic construct
  source 1..21: mol_type = other RNA
ggtggatgcctgccagcccac

SEQ ID NO: 41035 - RNA, 21 nt, synthetic construct
  source 1..21: mol_type = other RNA
gacctccaccctgagaacagc

SEQ ID NO: 41036 - RNA, 21 nt, synthetic construct
  source 1..21: mol_type = other RNA
cttccacggggacttcccaca

SEQ ID NO: 41037 - RNA, 21 nt, synthetic construct
  source 1..21: mol_type = other RNA
agtgcttaccaccacgaccac

SEQ ID NO: 41038 - RNA, 21 nt, synthetic construct
  source 1..21: mol_type = other RNA
gcggccggaggggcagtctgt

SEQ ID NO: 41039 - RNA, 21 nt, synthetic construct
  source 1..21: mol_type = other RNA
cttccacggggacttcccaca

SEQ ID NO: 41040 - RNA, 21 nt, synthetic construct
  source 1..21: mol_type = other RNA
agaccaccacacccatgtcca

SEQ ID NO: 41041 - RNA, 21 nt, synthetic construct
  source 1..21: mol_type = other RNA
gcagccactggatccacggcc

SEQ ID NO: 41042 - RNA, 21 nt, synthetic construct
  source 1..21: mol_type = other RNA
tatcgtcctcactgtcaccat

SEQ ID NO: 41043 - RNA, 21 nt, synthetic construct
  source 1..21: mol_type = other RNA
ttcctgccctgggcgtgagcg

SEQ ID NO: 41044 - RNA, 21 nt, synthetic construct
  source 1..21: mol_type = other RNA
gttcagtgtcggtgcagtgca

SEQ ID NO: 41045 - RNA, 21 nt, synthetic construct
  source 1..21: mol_type = other RNA
cagcaggacccctttcgggag

SEQ ID NO: 41046 - RNA, 21 nt, synthetic construct
  source 1..21: mol_type = other RNA
cttgccggccggcaactgcac

SEQ ID NO: 41047 - RNA, 21 nt, synthetic construct
  source 1..21: mol_type = other RNA
ccgtccccccacccgtgccag

SEQ ID NO: 41048 - RNA, 21 nt, synthetic construct
  source 1..21: mol_type = other RNA
gccgagaccagcacgcccagg

SEQ ID NO: 41049 - RNA, 21 nt, synthetic construct
  source 1..21: mol_type = other RNA
cccagcactcgactccagccc

SEQ ID NO: 41050 - RNA, 21 nt, synthetic construct
  source 1..21: mol_type = other RNA
cccagcactcgactccagccc

SEQ ID NO: 41051 - RNA, 21 nt, synthetic construct
  source 1..21: mol_type = other RNA
cccagcactcgactccagccc

SEQ ID NO: 41052 - RNA, 21 nt, synthetic construct
  source 1..21: mol_type = other RNA
cccagcactcgactccagccc

SEQ ID NO: 41053 - RNA, 21 nt, synthetic construct
  source 1..21: mol_type = other RNA
cctgtgccaatgccaggaaca

SEQ ID NO: 41054 - RNA, 21 nt, synthetic construct
  source 1..21: mol_type = other RNA
gggactttgacacctactcca

SEQ ID NO: 41055 - RNA, 21 nt, synthetic construct
  source 1..21: mol_type = other RNA
gggactttgacacctactcca

SEQ ID NO: 41056 - RNA, 21 nt, synthetic construct
  source 1..21: mol_type = other RNA
gggactttgacacctactcca

SEQ ID NO: 41057 - RNA, 21 nt, synthetic construct
  source 1..21: mol_type = other RNA
gggactttgacacctactcca

SEQ ID NO: 41058 - RNA, 21 nt, synthetic construct
  source 1..21: mol_type = other RNA
ccaccacacccgtggccacca

SEQ ID NO: 41059 - RNA, 21 nt, synthetic construct
  source 1..21: mol_type = other RNA
gatggtgcccaccggttccac

SEQ ID NO: 41060 - RNA, 21 nt, synthetic construct
  source 1..21: mol_type = other RNA
agccatgtggacaactgcacc

SEQ ID NO: 41061 - RNA, 21 nt, synthetic construct
  source 1..21: mol_type = other RNA
tgtccctgccacggccggagc

SEQ ID NO: 41062 - RNA, 21 nt, synthetic construct
  source 1..21: mol_type = other RNA
ggtgcacgacgagggcgccgt

SEQ ID NO: 41063 - RNA, 21 nt, synthetic construct
  source 1..21: mol_type = other RNA
ccaccgagtcacccccttccc

SEQ ID NO: 41064 - RNA, 21 nt, synthetic construct
  source 1..21: mol_type = other RNA
catcagcgaccactgcagggg

SEQ ID NO: 41065 - RNA, 21 nt, synthetic construct
  source 1..21: mol_type = other RNA
tgctgacattcctgtggaacg

SEQ ID NO: 41066 - RNA, 21 nt, synthetic construct
  source 1..21: mol_type = other RNA
aagcggtgacgctcagcctgg

SEQ ID NO: 41067 - RNA, 21 nt, synthetic construct
  source 1..21: mol_type = other RNA
tgtgccaatgccaggaacagc

SEQ ID NO: 41068 - RNA, 21 nt, synthetic construct
  source 1..21: mol_type = other RNA
caaccagaggttccacggtga

SEQ ID NO: 41069 - RNA, 21 nt, synthetic construct
  source 1..21: mol_type = other RNA
cgcaaccactggatccacggc

SEQ ID NO: 41070 - RNA, 21 nt, synthetic construct
  source 1..21: mol_type = other RNA
ggcctgtgcgacctcacctgc

SEQ ID NO: 41071 - RNA, 21 nt, synthetic construct
  source 1..21: mol_type = other RNA
ccccgtccccccacccgtgcc

SEQ ID NO: 41072 - RNA, 21 nt, synthetic construct
  source 1..21: mol_type = other RNA
acatcacgcactctggctgcc

SEQ ID NO: 41073 - RNA, 21 nt, synthetic construct
  source 1..21: mol_type = other RNA
aaatgtgccgacagcagcttc

SEQ ID NO: 41074 - RNA, 21 nt, synthetic construct
  source 1..21: mol_type = other RNA
ggcgtgttcctcaactccatc

SEQ ID NO: 41075 - RNA, 21 nt, synthetic construct
  source 1..21: mol_type = other RNA
ggtggaggccacgggcgcagc

SEQ ID NO: 41076 - RNA, 21 nt, synthetic construct
  source 1..21: mol_type = other RNA
gtggactgtgaccgcatgcgg

SEQ ID NO: 41077 - RNA, 21 nt, synthetic construct
  source 1..21: mol_type = other RNA
acggtcaccccctcggcccca

SEQ ID NO: 41078 - RNA, 21 nt, synthetic construct
  source 1..21: mol_type = other RNA
ggcaacaccctcctctagcac

SEQ ID NO: 41079 - RNA, 21 nt, synthetic construct
  source 1..21: mol_type = other RNA
acaccctcctctagcacacag

SEQ ID NO: 41080 - RNA, 21 nt, synthetic construct
  source 1..21: mol_type = other RNA
gctaccccatgccggggccct

SEQ ID NO: 41081 - RNA, 21 nt, synthetic construct
  source 1..21: mol_type = other RNA
ctggtctgcaggaaccgtgag

SEQ ID NO: 41082 - RNA, 21 nt, synthetic construct
  source 1..21: mol_type = other RNA
ggcaacaccctcctctagcac

SEQ ID NO: 41083 - RNA, 21 nt, synthetic construct
  source 1..21: mol_type = other RNA
acaccctcctctagcacacag

SEQ ID NO: 41084 - RNA, 21 nt, synthetic construct
  source 1..21: mol_type = other RNA
gctaccccatgccggggccct

SEQ ID NO: 41085 - RNA, 21 nt, synthetic construct
  source 1..21: mol_type = other RNA
ctggtctgcaggaaccgtgag

SEQ ID NO: 41086 - RNA, 21 nt, synthetic construct
  source 1..21: mol_type = other RNA
caagcacagccaccaaatcca

SEQ ID NO: 41087 - RNA, 21 nt, synthetic construct
  source 1..21: mol_type = other RNA
ctccggagaccacccacacct

SEQ ID NO: 41088 - RNA, 21 nt, synthetic construct
  source 1..21: mol_type = other RNA
cgttacagccatcccctcttc

SEQ ID NO: 41089 - RNA, 21 nt, synthetic construct
  source 1..21: mol_type = other RNA
ggcaacaccctcctctagcac

SEQ ID NO: 41090 - RNA, 21 nt, synthetic construct
  source 1..21: mol_type = other RNA
acaccctcctctagcacacag

SEQ ID NO: 41091 - RNA, 21 nt, synthetic construct
  source 1..21: mol_type = other RNA
gctaccccatgccggggccct

SEQ ID NO: 41092 - RNA, 21 nt, synthetic construct
  source 1..21: mol_type = other RNA
ctggtctgcaggaaccgtgag

SEQ ID NO: 41093 - RNA, 21 nt, synthetic construct
  source 1..21: mol_type = other RNA
ggcaacaccctcctctagcac

SEQ ID NO: 41094 - RNA, 21 nt, synthetic construct
  source 1..21: mol_type = other RNA
acaccctcctctagcacacag

SEQ ID NO: 41095 - RNA, 21 nt, synthetic construct
  source 1..21: mol_type = other RNA
gctaccccatgccggggccct

SEQ ID NO: 41096 - RNA, 21 nt, synthetic construct
  source 1..21: mol_type = other RNA
ctggtctgcaggaaccgtgag

SEQ ID NO: 41097 - RNA, 21 nt, synthetic construct
  source 1..21: mol_type = other RNA
caagcacagccaccaaatcca

SEQ ID NO: 41098 - RNA, 21 nt, synthetic construct
  source 1..21: mol_type = other RNA
ctccggagaccacccacacct

SEQ ID NO: 41099 - RNA, 21 nt, synthetic construct
  source 1..21: mol_type = other RNA
ggcaacaccctcctctagcac

SEQ ID NO: 41100 - RNA, 21 nt, synthetic construct
  source 1..21: mol_type = other RNA
acaccctcctctagcacacag

SEQ ID NO: 41101 - RNA, 21 nt, synthetic construct
  source 1..21: mol_type = other RNA
ggacaacacccatcaccccag

SEQ ID NO: 41102 - RNA, 21 nt, synthetic construct
  source 1..21: mol_type = other RNA
cccgacagcagaaaggatggc

SEQ ID NO: 41103 - RNA, 21 nt, synthetic construct
  source 1..21: mol_type = other RNA
atgtgtacctgcctctctggg

SEQ ID NO: 41104 - RNA, 21 nt, synthetic construct
  source 1..21: mol_type = other RNA
agtcctaccctgggagagcct

SEQ ID NO: 41105 - RNA, 21 nt, synthetic construct
  source 1..21: mol_type = other RNA
tggcctttgcaactacgtgtt

SEQ ID NO: 41106 - RNA, 21 nt, synthetic construct
  source 1..21: mol_type = other RNA
accacgtggaccgtcccagca

SEQ ID NO: 41107 - RNA, 21 nt, synthetic construct
  source 1..21: mol_type = other RNA
cgcgcctgaccgatcccaaca

SEQ ID NO: 41108 - RNA, 21 nt, synthetic construct
  source 1..21: mol_type = other RNA
ggagtgcccctgctacgctca

SEQ ID NO: 41109 - RNA, 21 nt, synthetic construct
  source 1..21: mol_type = other RNA
gtgcttaccaccacgaccacc

SEQ ID NO: 41110 - RNA, 21 nt, synthetic construct
  source 1..21: mol_type = other RNA
ccgtggggaccacccgcaccc

SEQ ID NO: 41111 - RNA, 21 nt, synthetic construct
  source 1..21: mol_type = other RNA
ttatgccagcagcctaaggac

SEQ ID NO: 41112 - RNA, 21 nt, synthetic construct
  source 1..21: mol_type = other RNA
cacctttgatggcgatcgcta

SEQ ID NO: 41113 - RNA, 21 nt, synthetic construct
  source 1..21: mol_type = other RNA
tgcgagaccgaggtcaacatc

SEQ ID NO: 41114 - RNA, 21 nt, synthetic construct
  source 1..21: mol_type = other RNA
gtgtcggatgggagtgggggc

SEQ ID NO: 41115 - RNA, 21 nt, synthetic construct
  source 1..21: mol_type = other RNA
catctgcggaagcaacggcac

SEQ ID NO: 41116 - RNA, 21 nt, synthetic construct
  source 1..21: mol_type = other RNA
agacggtgtgcgtgtgcaaca

SEQ ID NO: 41117 - RNA, 21 nt, synthetic construct
  source 1..21: mol_type = other RNA
ccgagctgggagaatgcaggg

SEQ ID NO: 41118 - RNA, 21 nt, synthetic construct
  source 1..21: mol_type = other RNA
cacaatgggcgggtgtgcagc

SEQ ID NO: 41119 - RNA, 21 nt, synthetic construct
  source 1..21: mol_type = other RNA
cacctacaagcctggagagac

SEQ ID NO: 41120 - RNA, 21 nt, synthetic construct
  source 1..21: mol_type = other RNA
cccgcctatcacagaccacca

SEQ ID NO: 41121 - RNA, 21 nt, synthetic construct
  source 1..21: mol_type = other RNA
ctcgagtgccgtgcccaggcc

SEQ ID NO: 41122 - RNA, 21 nt, synthetic construct
  source 1..21: mol_type = other RNA
cccgcctatcacagaccacca

SEQ ID NO: 41123 - RNA, 21 nt, synthetic construct
  source 1..21: mol_type = other RNA
ctcgagtgccgtgcccaggcc

SEQ ID NO: 41124 - RNA, 21 nt, synthetic construct
  source 1..21: mol_type = other RNA
cccgcctatcacagaccacca

SEQ ID NO: 41125 - RNA, 21 nt, synthetic construct
  source 1..21: mol_type = other RNA
ctcgagtgccgtgcccaggcc

SEQ ID NO: 41126 - RNA, 21 nt, synthetic construct
  source 1..21: mol_type = other RNA
cccgcctatcacagaccacca

SEQ ID NO: 41127 - RNA, 21 nt, synthetic construct
  source 1..21: mol_type = other RNA
ctcgagtgccgtgcccaggcc

SEQ ID NO: 41128 - RNA, 21 nt, synthetic construct
  source 1..21: mol_type = other RNA
cccgcctatcacagaccacca

SEQ ID NO: 41129 - RNA, 21 nt, synthetic construct
  source 1..21: mol_type = other RNA
tgcgacctcacctgcccaccc

SEQ ID NO: 41130 - RNA, 21 nt, synthetic construct
  source 1..21: mol_type = other RNA
cgtgtgttcatgtacgggtgg

SEQ ID NO: 41131 - RNA, 21 nt, synthetic construct
  source 1..21: mol_type = other RNA
gacctcagctgtgttcgtaca

SEQ ID NO: 41132 - RNA, 21 nt, synthetic construct
  source 1..21: mol_type = other RNA
acgtcggtgcaagggtcccca

SEQ ID NO: 41133 - RNA, 21 nt, synthetic construct
  source 1..21: mol_type = other RNA
acgggcgatccctgcccccca

SEQ ID NO: 41134 - RNA, 21 nt, synthetic construct
  source 1..21: mol_type = other RNA
gaatgcagggcacaccatgga

SEQ ID NO: 41135 - RNA, 21 nt, synthetic construct
  source 1..21: mol_type = other RNA
cgtgcctgtggacggctgcac

SEQ ID NO: 41136 - RNA, 21 nt, synthetic construct
  source 1..21: mol_type = other RNA
agtgggggctgcattgccgag

SEQ ID NO: 41137 - RNA, 21 nt, synthetic construct
  source 1..21: mol_type = other RNA
caacctccagagctcgcccga

SEQ ID NO: 41138 - RNA, 21 nt, synthetic construct
  source 1..21: mol_type = other RNA
ctgctggcaccccacatgtga

SEQ ID NO: 41139 - RNA, 21 nt, synthetic construct
  source 1..21: mol_type = other RNA
aaccacccttccagtgctgac

SEQ ID NO: 41140 - RNA, 21 nt, synthetic construct
  source 1..21: mol_type = other RNA
tcctccacccgggcaactgct

SEQ ID NO: 41141 - RNA, 21 nt, synthetic construct
  source 1..21: mol_type = other RNA
ctgctggcaccccacatgtga

SEQ ID NO: 41142 - RNA, 21 nt, synthetic construct
  source 1..21: mol_type = other RNA
aaccacccttccagtgctgac

SEQ ID NO: 41143 - RNA, 21 nt, synthetic construct
  source 1..21: mol_type = other RNA
ctgctggcaccccacatgtga

SEQ ID NO: 41144 - RNA, 21 nt, synthetic construct
  source 1..21: mol_type = other RNA
aaccacccttccagtgctgac

SEQ ID NO: 41145 - RNA, 21 nt, synthetic construct
  source 1..21: mol_type = other RNA
gggccccgactggcacacccc

SEQ ID NO: 41146 - RNA, 21 nt, synthetic construct
  source 1..21: mol_type = other RNA
ggccccgactggcacaccccc

SEQ ID NO: 41147 - RNA, 21 nt, synthetic construct
  source 1..21: mol_type = other RNA
aaaccggccccagaagggtga

SEQ ID NO: 41148 - RNA, 21 nt, synthetic construct
  source 1..21: mol_type = other RNA
agacctcagctgtgttcgtac

SEQ ID NO: 41149 - RNA, 21 nt, synthetic construct
  source 1..21: mol_type = other RNA
tgtggcaccccgcgctccgtg

SEQ ID NO: 41150 - RNA, 21 nt, synthetic construct
  source 1..21: mol_type = other RNA
cttacaccttccggggcaact

SEQ ID NO: 41151 - RNA, 21 nt, synthetic construct
  source 1..21: mol_type = other RNA
agccccttgactaacaccacc

SEQ ID NO: 41152 - RNA, 21 nt, synthetic construct
  source 1..21: mol_type = other RNA
ccccataaccacggtggtgac

SEQ ID NO: 41153 - RNA, 21 nt, synthetic construct
  source 1..21: mol_type = other RNA
ccccataaccacggtggtgac

SEQ ID NO: 41154 - RNA, 21 nt, synthetic construct
  source 1..21: mol_type = other RNA
ccccataaccacggtggtgac

SEQ ID NO: 41155 - RNA, 21 nt, synthetic construct
  source 1..21: mol_type = other RNA
cctccagagctcgcccgacag

SEQ ID NO: 41156 - RNA, 21 nt, synthetic construct
  source 1..21: mol_type = other RNA
ggtgacttcccacaccccagc

SEQ ID NO: 41157 - RNA, 21 nt, synthetic construct
  source 1..21: mol_type = other RNA
atgggtttcctaaatttcccg

SEQ ID NO: 41158 - RNA, 21 nt, synthetic construct
  source 1..21: mol_type = other RNA
tgcgagtacatcttggcccag

SEQ ID NO: 41159 - RNA, 21 nt, synthetic construct
  source 1..21: mol_type = other RNA
gtgtcgtcctgctggacccaa

SEQ ID NO: 41160 - RNA, 21 nt, synthetic construct
  source 1..21: mol_type = other RNA
cctggcctttgcaactacgtg

SEQ ID NO: 41161 - RNA, 21 nt, synthetic construct
  source 1..21: mol_type = other RNA
ggcctttgcaactacgtgttc

SEQ ID NO: 41162 - RNA, 21 nt, synthetic construct
  source 1..21: mol_type = other RNA
gcctttgcaactacgtgttct

SEQ ID NO: 41163 - RNA, 21 nt, synthetic construct
  source 1..21: mol_type = other RNA
cctttgcaactacgtgttctc

SEQ ID NO: 41164 - RNA, 21 nt, synthetic construct
  source 1..21: mol_type = other RNA
tccgtcctcatcaatgggcag

SEQ ID NO: 41165 - RNA, 21 nt, synthetic construct
  source 1..21: mol_type = other RNA
atcaatgggcagcgggaggag

SEQ ID NO: 41166 - RNA, 21 nt, synthetic construct
  source 1..21: mol_type = other RNA
ctccaacccccagcgcgcgca

SEQ ID NO: 41167 - RNA, 21 nt, synthetic construct
  source 1..21: mol_type = other RNA
ggtccccacagcggagaactg

SEQ ID NO: 41168 - RNA, 21 nt, synthetic construct
  source 1..21: mol_type = other RNA
ggttctatggcaacaccctcc

SEQ ID NO: 41169 - RNA, 21 nt, synthetic construct
  source 1..21: mol_type = other RNA
tcagagtggctggactacagc

SEQ ID NO: 41170 - RNA, 21 nt, synthetic construct
  source 1..21: mol_type = other RNA
caactgctggcaccccacatg

SEQ ID NO: 41171 - RNA, 21 nt, synthetic construct
  source 1..21: mol_type = other RNA
ggttctatggcaacaccctcc

SEQ ID NO: 41172 - RNA, 21 nt, synthetic construct
  source 1..21: mol_type = other RNA
tcagagtggctggactacagc

SEQ ID NO: 41173 - RNA, 21 nt, synthetic construct
  source 1..21: mol_type = other RNA
gtccaaggactgcaaccaccc

SEQ ID NO: 41174 - RNA, 21 nt, synthetic construct
  source 1..21: mol_type = other RNA
taccagctttacacccatccc

SEQ ID NO: 41175 - RNA, 21 nt, synthetic construct
  source 1..21: mol_type = other RNA
ggttctatggcaacaccctcc

SEQ ID NO: 41176 - RNA, 21 nt, synthetic construct
  source 1..21: mol_type = other RNA
tcagagtggctggactacagc

SEQ ID NO: 41177 - RNA, 21 nt, synthetic construct
  source 1..21: mol_type = other RNA
caactgctggcaccccacatg

SEQ ID NO: 41178 - RNA, 21 nt, synthetic construct
  source 1..21: mol_type = other RNA
ggttctatggcaacaccctcc

SEQ ID NO: 41179 - RNA, 21 nt, synthetic construct
  source 1..21: mol_type = other RNA
tcagagtggctggactacagc

SEQ ID NO: 41180 - RNA, 21 nt, synthetic construct
  source 1..21: mol_type = other RNA
gtccaaggactgcaaccaccc

SEQ ID NO: 41181 - RNA, 21 nt, synthetic construct
  source 1..21: mol_type = other RNA
caactgctggcaccccacatg

SEQ ID NO: 41182 - RNA, 21 nt, synthetic construct
  source 1..21: mol_type = other RNA
ggttctatggcaacaccctcc

SEQ ID NO: 41183 - RNA, 21 nt, synthetic construct
  source 1..21: mol_type = other RNA
gtccaaggactgcaaccaccc

SEQ ID NO: 41184 - RNA, 21 nt, synthetic construct
  source 1..21: mol_type = other RNA
taccagctttacacccatccc

SEQ ID NO: 41185 - RNA, 21 nt, synthetic construct
  source 1..21: mol_type = other RNA
actgtgacattgaccgcttcc

SEQ ID NO: 41186 - RNA, 21 nt, synthetic construct
  source 1..21: mol_type = other RNA
agagctctgccgcgcccgggg

SEQ ID NO: 41187 - RNA, 21 nt, synthetic construct
  source 1..21: mol_type = other RNA
aactctaggaaccagagccca

SEQ ID NO: 41188 - RNA, 21 nt, synthetic construct
  source 1..21: mol_type = other RNA
gagaccgaggtcaacatcacc

SEQ ID NO: 41189 - RNA, 21 nt, synthetic construct
  source 1..21: mol_type = other RNA
gtgaacgacgcgtgtgcctgc

SEQ ID NO: 41190 - RNA, 21 nt, synthetic construct
  source 1..21: mol_type = other RNA
gacgacaatgccatcaatgac

SEQ ID NO: 41191 - RNA, 21 nt, synthetic construct
  source 1..21: mol_type = other RNA
acggacgaggagggcatctgc

SEQ ID NO: 41192 - RNA, 21 nt, synthetic construct
  source 1..21: mol_type = other RNA
ggcacggtgctggatgacatc

SEQ ID NO: 41193 - RNA, 21 nt, synthetic construct
  source 1..21: mol_type = other RNA
gcctgaaagcggtgacgctca

SEQ ID NO: 41194 - RNA, 21 nt, synthetic construct
  source 1..21: mol_type = other RNA
cctgaaagcggtgacgctcag

SEQ ID NO: 41195 - RNA, 21 nt, synthetic construct
  source 1..21: mol_type = other RNA
ctgcttgatcgccatctgcgg

SEQ ID NO: 41196 - RNA, 21 nt, synthetic construct
  source 1..21: mol_type = other RNA
tacgatcacggccaccggctc

SEQ ID NO: 41197 - RNA, 21 nt, synthetic construct
  source 1..21: mol_type = other RNA
accgagtcacccccttctcca

SEQ ID NO: 41198 - RNA, 21 nt, synthetic construct
  source 1..21: mol_type = other RNA
tacgatcacggccaccggctc

SEQ ID NO: 41199 - RNA, 21 nt, synthetic construct
  source 1..21: mol_type = other RNA
accgagtcacccccttctcca

SEQ ID NO: 41200 - RNA, 21 nt, synthetic construct
  source 1..21: mol_type = other RNA
gctaccagctttacacccatc

SEQ ID NO: 41201 - RNA, 21 nt, synthetic construct
  source 1..21: mol_type = other RNA
accgagtcacccccttctcca

SEQ ID NO: 41202 - RNA, 21 nt, synthetic construct
  source 1..21: mol_type = other RNA
ccccatcactgatcaccacgg

SEQ ID NO: 41203 - RNA, 21 nt, synthetic construct
  source 1..21: mol_type = other RNA
tacgatcacggccaccggctc

SEQ ID NO: 41204 - RNA, 21 nt, synthetic construct
  source 1..21: mol_type = other RNA
ccaaagtgctgaccagcccgg

SEQ ID NO: 41205 - RNA, 21 nt, synthetic construct
  source 1..21: mol_type = other RNA
tacgatcacggccaccggctc

SEQ ID NO: 41206 - RNA, 21 nt, synthetic construct
  source 1..21: mol_type = other RNA
gctaccagctttacacccatc

SEQ ID NO: 41207 - RNA, 21 nt, synthetic construct
  source 1..21: mol_type = other RNA
gacccggatcctcactgagct

SEQ ID NO: 41208 - RNA, 21 nt, synthetic construct
  source 1..21: mol_type = other RNA
gtgcaaccggtggcctgtgcg

SEQ ID NO: 41209 - RNA, 21 nt, synthetic construct
  source 1..21: mol_type = other RNA
cctcagctgtgttcgtacaat

SEQ ID NO: 41210 - RNA, 21 nt, synthetic construct
  source 1..21: mol_type = other RNA
agcatgtgcgggcctatgtgt

SEQ ID NO: 41211 - RNA, 21 nt, synthetic construct
  source 1..21: mol_type = other RNA
tcgcaacggccaggtcagaga

SEQ ID NO: 41212 - RNA, 21 nt, synthetic construct
  source 1..21: mol_type = other RNA
agcacctggggtgacttccac

SEQ ID NO: 41213 - RNA, 21 nt, synthetic construct
  source 1..21: mol_type = other RNA
gcgacgtcttccgcttccctg

SEQ ID NO: 41214 - RNA, 21 nt, synthetic construct
  source 1..21: mol_type = other RNA
cgacgtcttccgcttccctgg

SEQ ID NO: 41215 - RNA, 21 nt, synthetic construct
  source 1..21: mol_type = other RNA
cactgccgcgccgcctacgag

SEQ ID NO: 41216 - RNA, 21 nt, synthetic construct
  source 1..21: mol_type = other RNA
gctccgtcctcatcaatgggc

SEQ ID NO: 41217 - RNA, 21 nt, synthetic construct
  source 1..21: mol_type = other RNA
ctgacattcctgtggaacgga

SEQ ID NO: 41218 - RNA, 21 nt, synthetic construct
  source 1..21: mol_type = other RNA
gtggcctgtgtggggacttca

SEQ ID NO: 41219 - RNA, 21 nt, synthetic construct
  source 1..21: mol_type = other RNA
tggcctgtgtggggacttcaa

SEQ ID NO: 41220 - RNA, 21 nt, synthetic construct
  source 1..21: mol_type = other RNA
tgtgtggggacttcaacggcc

SEQ ID NO: 41221 - RNA, 21 nt, synthetic construct
  source 1..21: mol_type = other RNA
cacgcggggggccagccgcgg

SEQ ID NO: 41222 - RNA, 21 nt, synthetic construct
  source 1..21: mol_type = other RNA
atgcagcaccaggagtgtggc

SEQ ID NO: 41223 - RNA, 21 nt, synthetic construct
  source 1..21: mol_type = other RNA
gctccaacccccagcgcgcgc

SEQ ID NO: 41224 - RNA, 21 nt, synthetic construct
  source 1..21: mol_type = other RNA
ctgtccaagaaatgtgccgac

SEQ ID NO: 41225 - RNA, 21 nt, synthetic construct
  source 1..21: mol_type = other RNA
gagcttcttcatcgtggtgca

SEQ ID NO: 41226 - RNA, 21 nt, synthetic construct
  source 1..21: mol_type = other RNA
cacggccctcagcggggtggt

SEQ ID NO: 41227 - RNA, 21 nt, synthetic construct
  source 1..21: mol_type = other RNA
tacagctcagcgactggaggg

SEQ ID NO: 41228 - RNA, 21 nt, synthetic construct
  source 1..21: mol_type = other RNA
aactgccccaagtcccagcgc

SEQ ID NO: 41229 - RNA, 21 nt, synthetic construct
  source 1..21: mol_type = other RNA
cagcaacagctcggcgggcac

SEQ ID NO: 41230 - RNA, 21 nt, synthetic construct
  source 1..21: mol_type = other RNA
caacagctcggcgggcacccc

SEQ ID NO: 41231 - RNA, 21 nt, synthetic construct
  source 1..21: mol_type = other RNA
ttcatcacctttgatggcgat

SEQ ID NO: 41232 - RNA, 21 nt, synthetic construct
  source 1..21: mol_type = other RNA
ggacaacaccacccacgggac

SEQ ID NO: 41233 - RNA, 21 nt, synthetic construct
  source 1..21: mol_type = other RNA
tgcgggaacttcgacgacaat

SEQ ID NO: 41234 - RNA, 21 nt, synthetic construct
  source 1..21: mol_type = other RNA
acgacaatgccatcaatgact

SEQ ID NO: 41235 - RNA, 21 nt, synthetic construct
  source 1..21: mol_type = other RNA
acaatgccatcaatgactttg

SEQ ID NO: 41236 - RNA, 21 nt, synthetic construct
  source 1..21: mol_type = other RNA
gtggcgactgcgagtgtttct

SEQ ID NO: 41237 - RNA, 21 nt, synthetic construct
  source 1..21: mol_type = other RNA
caccgcctgggtcccccactc

SEQ ID NO: 41238 - RNA, 21 nt, synthetic construct
  source 1..21: mol_type = other RNA
aaggtgcactgtgacgtccac

SEQ ID NO: 41239 - RNA, 21 nt, synthetic construct
  source 1..21: mol_type = other RNA
caggagggcgtcttcaagatg

SEQ ID NO: 41240 - RNA, 21 nt, synthetic construct
  source 1..21: mol_type = other RNA
tctgctgcagtgacgaccact

SEQ ID NO: 41241 - RNA, 21 nt, synthetic construct
  source 1..21: mol_type = other RNA
tgctgcagtgacgaccactgc

SEQ ID NO: 41242 - RNA, 21 nt, synthetic construct
  source 1..21: mol_type = other RNA
accacgggaggccccacgacg

SEQ ID NO: 41243 - RNA, 21 nt, synthetic construct
  source 1..21: mol_type = other RNA
gcccttccagggacgacgggg

SEQ ID NO: 41244 - RNA, 21 nt, synthetic construct
  source 1..21: mol_type = other RNA
cacgctggccccaacaacaat

SEQ ID NO: 41245 - RNA, 21 nt, synthetic construct
  source 1..21: mol_type = other RNA
gagctgtccacctctcaggcc

SEQ ID NO: 41246 - RNA, 21 nt, synthetic construct
  source 1..21: mol_type = other RNA
aatgagccccttgactaacac

SEQ ID NO: 41247 - RNA, 21 nt, synthetic construct
  source 1..21: mol_type = other RNA
caccagccagggcacgacccg

SEQ ID NO: 41248 - RNA, 21 nt, synthetic construct
  source 1..21: mol_type = other RNA
caccacaactggggccaccgg

SEQ ID NO: 41249 - RNA, 21 nt, synthetic construct
  source 1..21: mol_type = other RNA
aggaacagctcacactaccaa

SEQ ID NO: 41250 - RNA, 21 nt, synthetic construct
  source 1..21: mol_type = other RNA
acgcctccagtgtggatcagc

SEQ ID NO: 41251 - RNA, 21 nt, synthetic construct
  source 1..21: mol_type = other RNA
agcacaaccaccacacccaca

SEQ ID NO: 41252 - RNA, 21 nt, synthetic construct
  source 1..21: mol_type = other RNA
gccactggttctatggcaaca

SEQ ID NO: 41253 - RNA, 21 nt, synthetic construct
  source 1..21: mol_type = other RNA
aactcctgggacaactcccat

SEQ ID NO: 41254 - RNA, 21 nt, synthetic construct
  source 1..21: mol_type = other RNA
ggccacctcgggcatcttggg

SEQ ID NO: 41255 - RNA, 21 nt, synthetic construct
  source 1..21: mol_type = other RNA
gcagcaaccaccggtaccacc

SEQ ID NO: 41256 - RNA, 21 nt, synthetic construct
  source 1..21: mol_type = other RNA
actccaacatccgtgcggccg

SEQ ID NO: 41257 - RNA, 21 nt, synthetic construct
  source 1..21: mol_type = other RNA
cggccaccagctctacggcca

SEQ ID NO: 41258 - RNA, 21 nt, synthetic construct
  source 1..21: mol_type = other RNA
atccacggccaccccgtcctc

SEQ ID NO: 41259 - RNA, 21 nt, synthetic construct
  source 1..21: mol_type = other RNA
accccacatgtgagcaccacg

SEQ ID NO: 41260 - RNA, 21 nt, synthetic construct
  source 1..21: mol_type = other RNA
ccactccagagactgtccaca

SEQ ID NO: 41261 - RNA, 21 nt, synthetic construct
  source 1..21: mol_type = other RNA
cactccagagactgtccacac

SEQ ID NO: 41262 - RNA, 21 nt, synthetic construct
  source 1..21: mol_type = other RNA
aggaacagctcacactaccaa

SEQ ID NO: 41263 - RNA, 21 nt, synthetic construct
  source 1..21: mol_type = other RNA
agcacaaccaccacacccaca

SEQ ID NO: 41264 - RNA, 21 nt, synthetic construct
  source 1..21: mol_type = other RNA
gccactggttctatggcaaca

SEQ ID NO: 41265 - RNA, 21 nt, synthetic construct
  source 1..21: mol_type = other RNA
gcagcaaccaccggtaccacc

SEQ ID NO: 41266 - RNA, 21 nt, synthetic construct
  source 1..21: mol_type = other RNA
actccaacatccgtgcggccg

SEQ ID NO: 41267 - RNA, 21 nt, synthetic construct
  source 1..21: mol_type = other RNA
cggccaccagctctacggcca

SEQ ID NO: 41268 - RNA, 21 nt, synthetic construct
  source 1..21: mol_type = other RNA
cacagagcagaccacagcagc

SEQ ID NO: 41269 - RNA, 21 nt, synthetic construct
  source 1..21: mol_type = other RNA
cctccagtccaaggactgcaa

SEQ ID NO: 41270 - RNA, 21 nt, synthetic construct
  source 1..21: mol_type = other RNA
ctcctccacccgggcaactgc

SEQ ID NO: 41271 - RNA, 21 nt, synthetic construct
  source 1..21: mol_type = other RNA
gcaactgctggcaccctcaaa

SEQ ID NO: 41272 - RNA, 21 nt, synthetic construct
  source 1..21: mol_type = other RNA
aactgctggcaccctcaaagt

SEQ ID NO: 41273 - RNA, 21 nt, synthetic construct
  source 1..21: mol_type = other RNA
cacagctaccagcgttacagc

SEQ ID NO: 41274 - RNA, 21 nt, synthetic construct
  source 1..21: mol_type = other RNA
tactccagagactgtccacac

SEQ ID NO: 41275 - RNA, 21 nt, synthetic construct
  source 1..21: mol_type = other RNA
aggaacagctcacactaccaa

SEQ ID NO: 41276 - RNA, 21 nt, synthetic construct
  source 1..21: mol_type = other RNA
acgcctccagtgtggatcagc

SEQ ID NO: 41277 - RNA, 21 nt, synthetic construct
  source 1..21: mol_type = other RNA
agcacaaccaccacacccaca

SEQ ID NO: 41278 - RNA, 21 nt, synthetic construct
  source 1..21: mol_type = other RNA
gccactggttctatggcaaca

SEQ ID NO: 41279 - RNA, 21 nt, synthetic construct
  source 1..21: mol_type = other RNA
ggccacctcgggcatcttggg

SEQ ID NO: 41280 - RNA, 21 nt, synthetic construct
  source 1..21: mol_type = other RNA
actccaacatccgtgcggccg

SEQ ID NO: 41281 - RNA, 21 nt, synthetic construct
  source 1..21: mol_type = other RNA
cggccaccagctctacggcca

SEQ ID NO: 41282 - RNA, 21 nt, synthetic construct
  source 1..21: mol_type = other RNA
atccacggccaccccgtcctc

SEQ ID NO: 41283 - RNA, 21 nt, synthetic construct
  source 1..21: mol_type = other RNA
accccacatgtgagcaccacg

SEQ ID NO: 41284 - RNA, 21 nt, synthetic construct
  source 1..21: mol_type = other RNA
aggaacagctcacactaccaa

SEQ ID NO: 41285 - RNA, 21 nt, synthetic construct
  source 1..21: mol_type = other RNA
acgcctccagtgtggatcagc

SEQ ID NO: 41286 - RNA, 21 nt, synthetic construct
  source 1..21: mol_type = other RNA
agcacaaccaccacacccaca

SEQ ID NO: 41287 - RNA, 21 nt, synthetic construct
  source 1..21: mol_type = other RNA
gccactggttctatggcaaca

SEQ ID NO: 41288 - RNA, 21 nt, synthetic construct
  source 1..21: mol_type = other RNA
actgatcaccacggccactac

SEQ ID NO: 41289 - RNA, 21 nt, synthetic construct
  source 1..21: mol_type = other RNA
gcagcaaccaccggtaccacc

SEQ ID NO: 41290 - RNA, 21 nt, synthetic construct
  source 1..21: mol_type = other RNA
actccaacatccgtgcggccg

SEQ ID NO: 41291 - RNA, 21 nt, synthetic construct
  source 1..21: mol_type = other RNA
cggccaccagctctacggcca

SEQ ID NO: 41292 - RNA, 21 nt, synthetic construct
  source 1..21: mol_type = other RNA
atccacggccaccccgtcctc

SEQ ID NO: 41293 - RNA, 21 nt, synthetic construct
  source 1..21: mol_type = other RNA
cctccagtccaaggactgcaa

SEQ ID NO: 41294 - RNA, 21 nt, synthetic construct
  source 1..21: mol_type = other RNA
agaccaccacacccgtggcca

SEQ ID NO: 41295 - RNA, 21 nt, synthetic construct
  source 1..21: mol_type = other RNA
atccacggccaccccgtcctc

SEQ ID NO: 41296 - RNA, 21 nt, synthetic construct
  source 1..21: mol_type = other RNA
accccacatgtgagcaccacg

SEQ ID NO: 41297 - RNA, 21 nt, synthetic construct
  source 1..21: mol_type = other RNA
ccactccagagactgtccaca

SEQ ID NO: 41298 - RNA, 21 nt, synthetic construct
  source 1..21: mol_type = other RNA
cactccagagactgtccacac

SEQ ID NO: 41299 - RNA, 21 nt, synthetic construct
  source 1..21: mol_type = other RNA
aggaacagctcacactaccaa

SEQ ID NO: 41300 - RNA, 21 nt, synthetic construct
  source 1..21: mol_type = other RNA
acgcctccagtgtggatcagc

SEQ ID NO: 41301 - RNA, 21 nt, synthetic construct
  source 1..21: mol_type = other RNA
agcacaaccaccacacccaca

SEQ ID NO: 41302 - RNA, 21 nt, synthetic construct
  source 1..21: mol_type = other RNA
gccactggttctatggcaaca

SEQ ID NO: 41303 - RNA, 21 nt, synthetic construct
  source 1..21: mol_type = other RNA
cctccagtccaaggactgcaa

SEQ ID NO: 41304 - RNA, 21 nt, synthetic construct
  source 1..21: mol_type = other RNA
ggccaccaattccacggccac

SEQ ID NO: 41305 - RNA, 21 nt, synthetic construct
  source 1..21: mol_type = other RNA
cactatgcccacagccactgc

SEQ ID NO: 41306 - RNA, 21 nt, synthetic construct
  source 1..21: mol_type = other RNA
gtggggaccacccgcacccct

SEQ ID NO: 41307 - RNA, 21 nt, synthetic construct
  source 1..21: mol_type = other RNA
cgcacccctgcagtgctcccc

SEQ ID NO: 41308 - RNA, 21 nt, synthetic construct
  source 1..21: mol_type = other RNA
tgacattgaccgcttccaggg

SEQ ID NO: 41309 - RNA, 21 nt, synthetic construct
  source 1..21: mol_type = other RNA
ttgaccgcttccagggcgcct

SEQ ID NO: 41310 - RNA, 21 nt, synthetic construct
  source 1..21: mol_type = other RNA
ggcggctcccactattccacc

SEQ ID NO: 41311 - RNA, 21 nt, synthetic construct
  source 1..21: mol_type = other RNA
accttccggggcaactgcacc

SEQ ID NO: 41312 - RNA, 21 nt, synthetic construct
  source 1..21: mol_type = other RNA
ccttccggggcaactgcacct

SEQ ID NO: 41313 - RNA, 21 nt, synthetic construct
  source 1..21: mol_type = other RNA
ctggacaaccactactgcacg

SEQ ID NO: 41314 - RNA, 21 nt, synthetic construct
  source 1..21: mol_type = other RNA
cccgcgccctcagcatccact

SEQ ID NO: 41315 - RNA, 21 nt, synthetic construct
  source 1..21: mol_type = other RNA
ggaccaccaccatgcgtgtgg

SEQ ID NO: 41316 - RNA, 21 nt, synthetic construct
  source 1..21: mol_type = other RNA
acatggccaagacgtggctgg

SEQ ID NO: 41317 - RNA, 21 nt, synthetic construct
  source 1..21: mol_type = other RNA
cacaaccttgtgcccccgggc

SEQ ID NO: 41318 - RNA, 21 nt, synthetic construct
  source 1..21: mol_type = other RNA
gcagagctctgccgcgcccgg

SEQ ID NO: 41319 - RNA, 21 nt, synthetic construct
  source 1..21: mol_type = other RNA
cccaccaaagtgtacaagcca

SEQ ID NO: 41320 - RNA, 21 nt, synthetic construct
  source 1..21: mol_type = other RNA
gccacctgcaactctaggaac

SEQ ID NO: 41321 - RNA, 21 nt, synthetic construct
  source 1..21: mol_type = other RNA
ccacctgcaactctaggaacc

SEQ ID NO: 41322 - RNA, 21 nt, synthetic construct
  source 1..21: mol_type = other RNA
acctgcaactctaggaaccag

SEQ ID NO: 41323 - RNA, 21 nt, synthetic construct
  source 1..21: mol_type = other RNA
ccctgaggaccagatcctctt

SEQ ID NO: 41324 - RNA, 21 nt, synthetic construct
  source 1..21: mol_type = other RNA
gtttcctaaatttcccgggga

SEQ ID NO: 41325 - RNA, 21 nt, synthetic construct
  source 1..21: mol_type = other RNA
tcctgcgtgtgtgacgagggt

SEQ ID NO: 41326 - RNA, 21 nt, synthetic construct
  source 1..21: mol_type = other RNA
tgccacatgtgtacctgcctc

SEQ ID NO: 41327 - RNA, 21 nt, synthetic construct
  source 1..21: mol_type = other RNA
cctgcaacaatactacctgtc

SEQ ID NO: 41328 - RNA, 21 nt, synthetic construct
  source 1..21: mol_type = other RNA
catcaccttctgcgagggctc

SEQ ID NO: 41329 - RNA, 21 nt, synthetic construct
  source 1..21: mol_type = other RNA
tcaccttctgcgagggctcct

SEQ ID NO: 41330 - RNA, 21 nt, synthetic construct
  source 1..21: mol_type = other RNA
gacggtgcccttgcactgtcc

SEQ ID NO: 41331 - RNA, 21 nt, synthetic construct
  source 1..21: mol_type = other RNA
cccacacacccgtggcttccc

SEQ ID NO: 41332 - RNA, 21 nt, synthetic construct
  source 1..21: mol_type = other RNA
tggagccaggatgtgcattgt

SEQ ID NO: 41333 - RNA, 21 nt, synthetic construct
  source 1..21: mol_type = other RNA
ggagccaggatgtgcattgtc

SEQ ID NO: 41334 - RNA, 21 nt, synthetic construct
  source 1..21: mol_type = other RNA
aaggcggccgcctgtccatgc

SEQ ID NO: 41335 - RNA, 21 nt, synthetic construct
  source 1..21: mol_type = other RNA
acggtgcccttgcactgtcct

SEQ ID NO: 41336 - RNA, 21 nt, synthetic construct
  source 1..21: mol_type = other RNA
ccaacccccagcgcgcgcagc

SEQ ID NO: 41337 - RNA, 21 nt, synthetic construct
  source 1..21: mol_type = other RNA
cgcctgtgtgcccgcccagga

SEQ ID NO: 41338 - RNA, 21 nt, synthetic construct
  source 1..21: mol_type = other RNA
aaggctgctacccgaagtgcc

SEQ ID NO: 41339 - RNA, 21 nt, synthetic construct
  source 1..21: mol_type = other RNA
tgtggctgctacgacaaggac

SEQ ID NO: 41340 - RNA, 21 nt, synthetic construct
  source 1..21: mol_type = other RNA
cgagtgccgggcggcgcagct

SEQ ID NO: 41341 - RNA, 21 nt, synthetic construct
  source 1..21: mol_type = other RNA
gcggccctcacctcgcagact

SEQ ID NO: 41342 - RNA, 21 nt, synthetic construct
  source 1..21: mol_type = other RNA
ctcggccccaggtaccaccac

SEQ ID NO: 41343 - RNA, 21 nt, synthetic construct
  source 1..21: mol_type = other RNA
aggtgcactgtgacgtccact

SEQ ID NO: 41344 - RNA, 21 nt, synthetic construct
  source 1..21: mol_type = other RNA
ttccagggacgacggggagct

SEQ ID NO: 41345 - RNA, 21 nt, synthetic construct
  source 1..21: mol_type = other RNA
acatcggcccccataaccacg

SEQ ID NO: 41346 - RNA, 21 nt, synthetic construct
  source 1..21: mol_type = other RNA
ccacggggacttcccacaccc

SEQ ID NO: 41347 - RNA, 21 nt, synthetic construct
  source 1..21: mol_type = other RNA
cagccccacatcggccccaat

SEQ ID NO: 41348 - RNA, 21 nt, synthetic construct
  source 1..21: mol_type = other RNA
ccttgggaccaccgggaccct

SEQ ID NO: 41349 - RNA, 21 nt, synthetic construct
  source 1..21: mol_type = other RNA
acatcggcccccataaccacg

SEQ ID NO: 41350 - RNA, 21 nt, synthetic construct
  source 1..21: mol_type = other RNA
ccacggggacttcccacaccc

SEQ ID NO: 41351 - RNA, 21 nt, synthetic construct
  source 1..21: mol_type = other RNA
acatcggcccccataaccacg

SEQ ID NO: 41352 - RNA, 21 nt, synthetic construct
  source 1..21: mol_type = other RNA
ccttgggaccaccgggaccct

SEQ ID NO: 41353 - RNA, 21 nt, synthetic construct
  source 1..21: mol_type = other RNA
ccacacacccgtggcttcccg

SEQ ID NO: 41354 - RNA, 21 nt, synthetic construct
  source 1..21: mol_type = other RNA
ccggccttcaacgagttctat

SEQ ID NO: 41355 - RNA, 21 nt, synthetic construct
  source 1..21: mol_type = other RNA
gcgcctgaccgatcccaacag

SEQ ID NO: 41356 - RNA, 21 nt, synthetic construct
  source 1..21: mol_type = other RNA
cacggccatcccgtcctccac

SEQ ID NO: 41357 - RNA, 21 nt, synthetic construct
  source 1..21: mol_type = other RNA
tttacacccatcccctccttc

SEQ ID NO: 41358 - RNA, 21 nt, synthetic construct
  source 1..21: mol_type = other RNA
tgcccttgcactgtcctaacg

SEQ ID NO: 41359 - RNA, 21 nt, synthetic construct
  source 1..21: mol_type = other RNA
gtgggggctgcattgccgagg

SEQ ID NO: 41360 - RNA, 21 nt, synthetic construct
  source 1..21: mol_type = other RNA
ggactgcccctgtgtgcacaa

SEQ ID NO: 41361 - RNA, 21 nt, synthetic construct
  source 1..21: mol_type = other RNA
aggctgctacccgaagtgccc

SEQ ID NO: 41362 - RNA, 21 nt, synthetic construct
  source 1..21: mol_type = other RNA
gtggctgctacgacaaggacg

SEQ ID NO: 41363 - RNA, 21 nt, synthetic construct
  source 1..21: mol_type = other RNA
cgaaaagaccaccctatgggt

SEQ ID NO: 41364 - RNA, 21 nt, synthetic construct
  source 1..21: mol_type = other RNA
cggccctcacctcgcagactg

SEQ ID NO: 41365 - RNA, 21 nt, synthetic construct
  source 1..21: mol_type = other RNA
ctgctgcagtgacgaccactg

SEQ ID NO: 41366 - RNA, 21 nt, synthetic construct
  source 1..21: mol_type = other RNA
cgcctccagtgtggatcagca

SEQ ID NO: 41367 - RNA, 21 nt, synthetic construct
  source 1..21: mol_type = other RNA
caccctcctctagcacacaga

SEQ ID NO: 41368 - RNA, 21 nt, synthetic construct
  source 1..21: mol_type = other RNA
tctgccctagggaccacccac

SEQ ID NO: 41369 - RNA, 21 nt, synthetic construct
  source 1..21: mol_type = other RNA
ttcggccacctcgggcatctt

SEQ ID NO: 41370 - RNA, 21 nt, synthetic construct
  source 1..21: mol_type = other RNA
cagagtggctggactacagct

SEQ ID NO: 41371 - RNA, 21 nt, synthetic construct
  source 1..21: mol_type = other RNA
caccctcctctagcacacaga

SEQ ID NO: 41372 - RNA, 21 nt, synthetic construct
  source 1..21: mol_type = other RNA
tctgccctagggaccacccac

SEQ ID NO: 41373 - RNA, 21 nt, synthetic construct
  source 1..21: mol_type = other RNA
cagagtggctggactacagct

SEQ ID NO: 41374 - RNA, 21 nt, synthetic construct
  source 1..21: mol_type = other RNA
gcaaccacccttccagtgctg

SEQ ID NO: 41375 - RNA, 21 nt, synthetic construct
  source 1..21: mol_type = other RNA
accgcctggacccgcctatca

SEQ ID NO: 41376 - RNA, 21 nt, synthetic construct
  source 1..21: mol_type = other RNA
cgcctccagtgtggatcagca

SEQ ID NO: 41377 - RNA, 21 nt, synthetic construct
  source 1..21: mol_type = other RNA
caccctcctctagcacacaga

SEQ ID NO: 41378 - RNA, 21 nt, synthetic construct
  source 1..21: mol_type = other RNA
gatcacagccaccggctccac

SEQ ID NO: 41379 - RNA, 21 nt, synthetic construct
  source 1..21: mol_type = other RNA
tctgccctagggaccacccac

SEQ ID NO: 41380 - RNA, 21 nt, synthetic construct
  source 1..21: mol_type = other RNA
ttcggccacctcgggcatctt

SEQ ID NO: 41381 - RNA, 21 nt, synthetic construct
  source 1..21: mol_type = other RNA
cagagtggctggactacagct

SEQ ID NO: 41382 - RNA, 21 nt, synthetic construct
  source 1..21: mol_type = other RNA
cgcctccagtgtggatcagca

SEQ ID NO: 41383 - RNA, 21 nt, synthetic construct
  source 1..21: mol_type = other RNA
caccctcctctagcacacaga

SEQ ID NO: 41384 - RNA, 21 nt, synthetic construct
  source 1..21: mol_type = other RNA
tctgccctagggaccacccac

SEQ ID NO: 41385 - RNA, 21 nt, synthetic construct
  source 1..21: mol_type = other RNA
cagagtggctggactacagct

SEQ ID NO: 41386 - RNA, 21 nt, synthetic construct
  source 1..21: mol_type = other RNA
gcaaccacccttccagtgctg

SEQ ID NO: 41387 - RNA, 21 nt, synthetic construct
  source 1..21: mol_type = other RNA
cgcctccagtgtggatcagca

SEQ ID NO: 41388 - RNA, 21 nt, synthetic construct
  source 1..21: mol_type = other RNA
caccctcctctagcacacaga

SEQ ID NO: 41389 - RNA, 21 nt, synthetic construct
  source 1..21: mol_type = other RNA
gcaaccacccttccagtgctg

SEQ ID NO: 41390 - RNA, 21 nt, synthetic construct
  source 1..21: mol_type = other RNA
ctccagagaccacccacacct

SEQ ID NO: 41391 - RNA, 21 nt, synthetic construct
  source 1..21: mol_type = other RNA
cagagaccacccacacctcca

SEQ ID NO: 41392 - RNA, 21 nt, synthetic construct
  source 1..21: mol_type = other RNA
ggtggcctgtgcgacctcacc

SEQ ID NO: 41393 - RNA, 21 nt, synthetic construct
  source 1..21: mol_type = other RNA
ttgtctgatcatgaaaacctt

SEQ ID NO: 41394 - RNA, 21 nt, synthetic construct
  source 1..21: mol_type = other RNA
gcaacagctcggcgggcaccc

SEQ ID NO: 41395 - RNA, 21 nt, synthetic construct
  source 1..21: mol_type = other RNA
catctccacctatgatgagaa

SEQ ID NO: 41396 - RNA, 21 nt, synthetic construct
  source 1..21: mol_type = other RNA
gcgagaccgaggtcaacatca

SEQ ID NO: 41397 - RNA, 21 nt, synthetic construct
  source 1..21: mol_type = other RNA
ccacgcactggtggacagcac

SEQ ID NO: 41398 - RNA, 21 nt, synthetic construct
  source 1..21: mol_type = other RNA
gctgctacccgaagtgcccac

SEQ ID NO: 41399 - RNA, 21 nt, synthetic construct
  source 1..21: mol_type = other RNA
ggcgcagcttcccgacatgcc

SEQ ID NO: 41400 - RNA, 21 nt, synthetic construct
  source 1..21: mol_type = other RNA
catcactgaccaccacggcca

SEQ ID NO: 41401 - RNA, 21 nt, synthetic construct
  source 1..21: mol_type = other RNA
ccccgggccacaccacggcca

SEQ ID NO: 41402 - RNA, 21 nt, synthetic construct
  source 1..21: mol_type = other RNA
caagacccgcacctcgaccct

SEQ ID NO: 41403 - RNA, 21 nt, synthetic construct
  source 1..21: mol_type = other RNA
catcactgaccaccacggcca

SEQ ID NO: 41404 - RNA, 21 nt, synthetic construct
  source 1..21: mol_type = other RNA
caagacccgcacctcgaccct

SEQ ID NO: 41405 - RNA, 21 nt, synthetic construct
  source 1..21: mol_type = other RNA
ccactccggagaccacccaca

SEQ ID NO: 41406 - RNA, 21 nt, synthetic construct
  source 1..21: mol_type = other RNA
catcactgaccaccacggcca

SEQ ID NO: 41407 - RNA, 21 nt, synthetic construct
  source 1..21: mol_type = other RNA
caagacccgcacctcgaccct

SEQ ID NO: 41408 - RNA, 21 nt, synthetic construct
  source 1..21: mol_type = other RNA
ccccgggccacaccacggcca

SEQ ID NO: 41409 - RNA, 21 nt, synthetic construct
  source 1..21: mol_type = other RNA
caagacccgcacctcgaccct

SEQ ID NO: 41410 - RNA, 21 nt, synthetic construct
  source 1..21: mol_type = other RNA
gttacacccatcccctcctcc

SEQ ID NO: 41411 - RNA, 21 nt, synthetic construct
  source 1..21: mol_type = other RNA
ccactccggagaccacccaca

SEQ ID NO: 41412 - RNA, 21 nt, synthetic construct
  source 1..21: mol_type = other RNA
catcactgaccaccacggcca

SEQ ID NO: 41413 - RNA, 21 nt, synthetic construct
  source 1..21: mol_type = other RNA
tttacacccatcccctcctcc

SEQ ID NO: 41414 - RNA, 21 nt, synthetic construct
  source 1..21: mol_type = other RNA
tgtctgagaacgttctgcctc

SEQ ID NO: 41415 - RNA, 21 nt, synthetic construct
  source 1..21: mol_type = other RNA
ccaacggctccgtcctcatca

SEQ ID NO: 41416 - RNA, 21 nt, synthetic construct
  source 1..21: mol_type = other RNA
tcctcatcaatgggcagcggg

SEQ ID NO: 41417 - RNA, 21 nt, synthetic construct
  source 1..21: mol_type = other RNA
tccggctggtgctgacattcc

SEQ ID NO: 41418 - RNA, 21 nt, synthetic construct
  source 1..21: mol_type = other RNA
catgcagcaccaggagtgtgg

SEQ ID NO: 41419 - RNA, 21 nt, synthetic construct
  source 1..21: mol_type = other RNA
tgcgaggaccactgtgtggac

SEQ ID NO: 41420 - RNA, 21 nt, synthetic construct
  source 1..21: mol_type = other RNA
acggtgctggatgacatcacg

SEQ ID NO: 41421 - RNA, 21 nt, synthetic construct
  source 1..21: mol_type = other RNA
atctccacctatgatgagaaa

SEQ ID NO: 41422 - RNA, 21 nt, synthetic construct
  source 1..21: mol_type = other RNA
cctgacggacaacgagaactg

SEQ ID NO: 41423 - RNA, 21 nt, synthetic construct
  source 1..21: mol_type = other RNA
ctgcctgaaagcggtgacgct

SEQ ID NO: 41424 - RNA, 21 nt, synthetic construct
  source 1..21: mol_type = other RNA
ggtccaagcggacggcggcgt

SEQ ID NO: 41425 - RNA, 21 nt, synthetic construct
  source 1..21: mol_type = other RNA
catcgtggtgcagacaggcct

SEQ ID NO: 41426 - RNA, 21 nt, synthetic construct
  source 1..21: mol_type = other RNA
gtacagctcagcgactggagg

SEQ ID NO: 41427 - RNA, 21 nt, synthetic construct
  source 1..21: mol_type = other RNA
agaggtggtgcacgacgaggg

SEQ ID NO: 41428 - RNA, 21 nt, synthetic construct
  source 1..21: mol_type = other RNA
catcacctttgatggcgatcg

SEQ ID NO: 41429 - RNA, 21 nt, synthetic construct
  source 1..21: mol_type = other RNA
gcgagtacatcttggcccagg

SEQ ID NO: 41430 - RNA, 21 nt, synthetic construct
  source 1..21: mol_type = other RNA
caggcctgccacgacgcgggc

SEQ ID NO: 41431 - RNA, 21 nt, synthetic construct
  source 1..21: mol_type = other RNA
tgaggacaggacctacagcta

SEQ ID NO: 41432 - RNA, 21 nt, synthetic construct
  source 1..21: mol_type = other RNA
ggtggactgtgaccgcatgcg

SEQ ID NO: 41433 - RNA, 21 nt, synthetic construct
  source 1..21: mol_type = other RNA
tcggccccaggtaccaccacc

SEQ ID NO: 41434 - RNA, 21 nt, synthetic construct
  source 1..21: mol_type = other RNA
acgtccacttcggcctggtgt

SEQ ID NO: 41435 - RNA, 21 nt, synthetic construct
  source 1..21: mol_type = other RNA
cgagtagcccggggctgacca

SEQ ID NO: 41436 - RNA, 21 nt, synthetic construct
  source 1..21: mol_type = other RNA
tgacatcccccagatacacaa

SEQ ID NO: 41437 - RNA, 21 nt, synthetic construct
  source 1..21: mol_type = other RNA
caacacgctcagcccttccag

SEQ ID NO: 41438 - RNA, 21 nt, synthetic construct
  source 1..21: mol_type = other RNA
tcggccacctcgggcatcttg

SEQ ID NO: 41439 - RNA, 21 nt, synthetic construct
  source 1..21: mol_type = other RNA
caccgagtcacccccttctcc

SEQ ID NO: 41440 - RNA, 21 nt, synthetic construct
  source 1..21: mol_type = other RNA
caccgagtcacccccttctcc

SEQ ID NO: 41441 - RNA, 21 nt, synthetic construct
  source 1..21: mol_type = other RNA
gagaccacccacacctccaca

SEQ ID NO: 41442 - RNA, 21 nt, synthetic construct
  source 1..21: mol_type = other RNA
cctgggcaccgcctggacccg

SEQ ID NO: 41443 - RNA, 21 nt, synthetic construct
  source 1..21: mol_type = other RNA
tcggccacctcgggcatcttg

SEQ ID NO: 41444 - RNA, 21 nt, synthetic construct
  source 1..21: mol_type = other RNA
caccgagtcacccccttctcc

SEQ ID NO: 41445 - RNA, 21 nt, synthetic construct
  source 1..21: mol_type = other RNA
tgtccccctgggggagttggg

SEQ ID NO: 41446 - RNA, 21 nt, synthetic construct
  source 1..21: mol_type = other RNA
gagaccacccacacctccaca

SEQ ID NO: 41447 - RNA, 21 nt, synthetic construct
  source 1..21: mol_type = other RNA
gagaccacccacacctccaca

SEQ ID NO: 41448 - RNA, 21 nt, synthetic construct
  source 1..21: mol_type = other RNA
cggttccacggccaccgcctc

SEQ ID NO: 41449 - RNA, 21 nt, synthetic construct
  source 1..21: mol_type = other RNA
gtgacattgaccgcttccagg

SEQ ID NO: 41450 - RNA, 21 nt, synthetic construct
  source 1..21: mol_type = other RNA
cttccagggcgcctgtcccac

SEQ ID NO: 41451 - RNA, 21 nt, synthetic construct
  source 1..21: mol_type = other RNA
cagtgtcctccgccccgctgt

SEQ ID NO: 41452 - RNA, 21 nt, synthetic construct
  source 1..21: mol_type = other RNA
cctgtggccaacgtcacctgc

SEQ ID NO: 41453 - RNA, 21 nt, synthetic construct
  source 1..21: mol_type = other RNA
agatccatgcacgctttggga

SEQ ID NO: 41454 - RNA, 21 nt, synthetic construct
  source 1..21: mol_type = other RNA
catggccaagacgtggctggt

SEQ ID NO: 41455 - RNA, 21 nt, synthetic construct
  source 1..21: mol_type = other RNA
gtggcctgtgcgacctcacct

SEQ ID NO: 41456 - RNA, 21 nt, synthetic construct
  source 1..21: mol_type = other RNA
cctgcaactctaggaaccaga

SEQ ID NO: 41457 - RNA, 21 nt, synthetic construct
  source 1..21: mol_type = other RNA
cctgctgccccgagacggtgt

SEQ ID NO: 41458 - RNA, 21 nt, synthetic construct
  source 1..21: mol_type = other RNA
gaggagggcgactgctgtccc

SEQ ID NO: 41459 - RNA, 21 nt, synthetic construct
  source 1..21: mol_type = other RNA
cgtgtacctctgtgaggctga

SEQ ID NO: 41460 - RNA, 21 nt, synthetic construct
  source 1..21: mol_type = other RNA
ctgcgcccatggctcccccac

SEQ ID NO: 41461 - RNA, 21 nt, synthetic construct
  source 1..21: mol_type = other RNA
tgaaaccggccccagaagggt

SEQ ID NO: 41462 - RNA, 21 nt, synthetic construct
  source 1..21: mol_type = other RNA
ctgccacggccggagcgcccg

SEQ ID NO: 41463 - RNA, 21 nt, synthetic construct
  source 1..21: mol_type = other RNA
cggagcgcccgcgcagcacgg

SEQ ID NO: 41464 - RNA, 21 nt, synthetic construct
  source 1..21: mol_type = other RNA
gccgctggggcagacaggctg

SEQ ID NO: 41465 - RNA, 21 nt, synthetic construct
  source 1..21: mol_type = other RNA
gccgcctgtccatgcctgctg

SEQ ID NO: 41466 - RNA, 21 nt, synthetic construct
  source 1..21: mol_type = other RNA
cggcctgacggacaacgagaa

SEQ ID NO: 41467 - RNA, 21 nt, synthetic construct
  source 1..21: mol_type = other RNA
tggcgatcgctacagctttga

SEQ ID NO: 41468 - RNA, 21 nt, synthetic construct
  source 1..21: mol_type = other RNA
tacaatgggcaccgcccagag

SEQ ID NO: 41469 - RNA, 21 nt, synthetic construct
  source 1..21: mol_type = other RNA
tggcggggactttgacaccta

SEQ ID NO: 41470 - RNA, 21 nt, synthetic construct
  source 1..21: mol_type = other RNA
tggcggggactttgacaccta

SEQ ID NO: 41471 - RNA, 21 nt, synthetic construct
  source 1..21: mol_type = other RNA
tggcggggactttgacaccta

SEQ ID NO: 41472 - RNA, 21 nt, synthetic construct
  source 1..21: mol_type = other RNA
tggcggggactttgacaccta

SEQ ID NO: 41473 - RNA, 21 nt, synthetic construct
  source 1..21: mol_type = other RNA
ggggactacatcaaggtcagc

SEQ ID NO: 41474 - RNA, 21 nt, synthetic construct
  source 1..21: mol_type = other RNA
gcgtacctggccgcctgcgcc

SEQ ID NO: 41475 - RNA, 21 nt, synthetic construct
  source 1..21: mol_type = other RNA
tcgcgcctgaccgatcccaac

SEQ ID NO: 41476 - RNA, 21 nt, synthetic construct
  source 1..21: mol_type = other RNA
aatactacctgtccccagggc

SEQ ID NO: 41477 - RNA, 21 nt, synthetic construct
  source 1..21: mol_type = other RNA
gaccgaggtcaacatcacctt

SEQ ID NO: 41478 - RNA, 21 nt, synthetic construct
  source 1..21: mol_type = other RNA
ggtcgcaacggccaggtcaga

SEQ ID NO: 41479 - RNA, 21 nt, synthetic construct
  source 1..21: mol_type = other RNA
ctggtgtcggatgggagtggg

SEQ ID NO: 41480 - RNA, 21 nt, synthetic construct
  source 1..21: mol_type = other RNA
atgcggccccatacagcctgc

SEQ ID NO: 41481 - RNA, 21 nt, synthetic construct
  source 1..21: mol_type = other RNA
tgtggggacttcaacggcctc

SEQ ID NO: 41482 - RNA, 21 nt, synthetic construct
  source 1..21: mol_type = other RNA
cacggacgaggagggcatctg

SEQ ID NO: 41483 - RNA, 21 nt, synthetic construct
  source 1..21: mol_type = other RNA
agctctgcgaggaccactgtg

SEQ ID NO: 41484 - RNA, 21 nt, synthetic construct
  source 1..21: mol_type = other RNA
caacaccacccacgggacctt

SEQ ID NO: 41485 - RNA, 21 nt, synthetic construct
  source 1..21: mol_type = other RNA
ctgctacccgaagtgcccacc

SEQ ID NO: 41486 - RNA, 21 nt, synthetic construct
  source 1..21: mol_type = other RNA
tgctacccgaagtgcccaccc

SEQ ID NO: 41487 - RNA, 21 nt, synthetic construct
  source 1..21: mol_type = other RNA
gatcgccatctgcggaagcaa

SEQ ID NO: 41488 - RNA, 21 nt, synthetic construct
  source 1..21: mol_type = other RNA
ctcgcccgacaggcacagcca

SEQ ID NO: 41489 - RNA, 21 nt, synthetic construct
  source 1..21: mol_type = other RNA
ccgagtcacccccttctccag

SEQ ID NO: 41490 - RNA, 21 nt, synthetic construct
  source 1..21: mol_type = other RNA
catccgtgcggccggaggggc

SEQ ID NO: 41491 - RNA, 21 nt, synthetic construct
  source 1..21: mol_type = other RNA
ccgagtcacccccttctccag

SEQ ID NO: 41492 - RNA, 21 nt, synthetic construct
  source 1..21: mol_type = other RNA
catccgtgcggccggaggggc

SEQ ID NO: 41493 - RNA, 21 nt, synthetic construct
  source 1..21: mol_type = other RNA
ccgagtcacccccttctccag

SEQ ID NO: 41494 - RNA, 21 nt, synthetic construct
  source 1..21: mol_type = other RNA
catccgtgcggccggaggggc

SEQ ID NO: 41495 - RNA, 21 nt, synthetic construct
  source 1..21: mol_type = other RNA
catccgtgcggccggaggggc

SEQ ID NO: 41496 - RNA, 21 nt, synthetic construct
  source 1..21: mol_type = other RNA
gcgttacacccatcccctcct

SEQ ID NO: 41497 - RNA, 21 nt, synthetic construct
  source 1..21: mol_type = other RNA
gtgtgcaacacaaccacctgc

SEQ ID NO: 41498 - RNA, 21 nt, synthetic construct
  source 1..21: mol_type = other RNA
cgcacaatgggcgggtgtgca

SEQ ID NO: 41499 - RNA, 21 nt, synthetic construct
  source 1..21: mol_type = other RNA
gacgtcttccgcttccctggc

SEQ ID NO: 41500 - RNA, 21 nt, synthetic construct
  source 1..21: mol_type = other RNA
cgtccagctacgccgaggcct

SEQ ID NO: 41501 - RNA, 21 nt, synthetic construct
  source 1..21: mol_type = other RNA
cttacagccgcactggcctcc

SEQ ID NO: 41502 - RNA, 21 nt, synthetic construct
  source 1..21: mol_type = other RNA
agcggggactacatcaaggtc

SEQ ID NO: 41503 - RNA, 21 nt, synthetic construct
  source 1..21: mol_type = other RNA
ctgcgtacctggccgcctgcg

SEQ ID NO: 41504 - RNA, 21 nt, synthetic construct
  source 1..21: mol_type = other RNA
tgcgtacctggccgcctgcgc

SEQ ID NO: 41505 - RNA, 21 nt, synthetic construct
  source 1..21: mol_type = other RNA
ctacagcccgggcacctcctt

SEQ ID NO: 41506 - RNA, 21 nt, synthetic construct
  source 1..21: mol_type = other RNA
atgtgccgacagcagcttcac

SEQ ID NO: 41507 - RNA, 21 nt, synthetic construct
  source 1..21: mol_type = other RNA
cagctcagcgactggagggac

SEQ ID NO: 41508 - RNA, 21 nt, synthetic construct
  source 1..21: mol_type = other RNA
ctacgtggtggatgcctgcca

SEQ ID NO: 41509 - RNA, 21 nt, synthetic construct
  source 1..21: mol_type = other RNA
acgtggtggatgcctgccagc

SEQ ID NO: 41510 - RNA, 21 nt, synthetic construct
  source 1..21: mol_type = other RNA
ggaagctaagctgcctgggag

SEQ ID NO: 41511 - RNA, 21 nt, synthetic construct
  source 1..21: mol_type = other RNA
tggtgtcggatgggagtgggg

SEQ ID NO: 41512 - RNA, 21 nt, synthetic construct
  source 1..21: mol_type = other RNA
gtaactgcacacccagtggca

SEQ ID NO: 41513 - RNA, 21 nt, synthetic construct
  source 1..21: mol_type = other RNA
acgacaagcccggccctcccg

SEQ ID NO: 41514 - RNA, 21 nt, synthetic construct
  source 1..21: mol_type = other RNA
ttgagacgtttgaaaacctga

SEQ ID NO: 41515 - RNA, 21 nt, synthetic construct
  source 1..21: mol_type = other RNA
ctgtgaccgcatgcgggggct

SEQ ID NO: 41516 - RNA, 21 nt, synthetic construct
  source 1..21: mol_type = other RNA
acaagcacccttggtacagcc

SEQ ID NO: 41517 - RNA, 21 nt, synthetic construct
  source 1..21: mol_type = other RNA
ccccttgactaacaccaccac

SEQ ID NO: 41518 - RNA, 21 nt, synthetic construct
  source 1..21: mol_type = other RNA
caccccgacctccaccctgag

SEQ ID NO: 41519 - RNA, 21 nt, synthetic construct
  source 1..21: mol_type = other RNA
cagcactcgactccagccctt

SEQ ID NO: 41520 - RNA, 21 nt, synthetic construct
  source 1..21: mol_type = other RNA
acatccgtgcggccggagggg

SEQ ID NO: 41521 - RNA, 21 nt, synthetic construct
  source 1..21: mol_type = other RNA
cagcactcgactccagccctg

SEQ ID NO: 41522 - RNA, 21 nt, synthetic construct
  source 1..21: mol_type = other RNA
acatccgtgcggccggagggg

SEQ ID NO: 41523 - RNA, 21 nt, synthetic construct
  source 1..21: mol_type = other RNA
cagcactcgactccagccctg

SEQ ID NO: 41524 - RNA, 21 nt, synthetic construct
  source 1..21: mol_type = other RNA
acatccgtgcggccggagggg

SEQ ID NO: 41525 - RNA, 21 nt, synthetic construct
  source 1..21: mol_type = other RNA
cactgatcaccacggccacta

SEQ ID NO: 41526 - RNA, 21 nt, synthetic construct
  source 1..21: mol_type = other RNA
cagcactcgactccagccctg

SEQ ID NO: 41527 - RNA, 21 nt, synthetic construct
  source 1..21: mol_type = other RNA
acatccgtgcggccggagggg

SEQ ID NO: 41528 - RNA, 21 nt, synthetic construct
  source 1..21: mol_type = other RNA
cccccaaagtggtgaccacca

SEQ ID NO: 41529 - RNA, 21 nt, synthetic construct
  source 1..21: mol_type = other RNA
ctgcctccacggttcccagct

SEQ ID NO: 41530 - RNA, 21 nt, synthetic construct
  source 1..21: mol_type = other RNA
aagcctgtggccaacgtcacc

SEQ ID NO: 41531 - RNA, 21 nt, synthetic construct
  source 1..21: mol_type = other RNA
ttccggggcaactgcacctat

SEQ ID NO: 41532 - RNA, 21 nt, synthetic construct
  source 1..21: mol_type = other RNA
agcgaccactgcaggggccgc

SEQ ID NO: 41533 - RNA, 21 nt, synthetic construct
  source 1..21: mol_type = other RNA
ctggaggcttacgcagagctc

SEQ ID NO: 41534 - RNA, 21 nt, synthetic construct
  source 1..21: mol_type = other RNA
tggaggcttacgcagagctct

SEQ ID NO: 41535 - RNA, 21 nt, synthetic construct
  source 1..21: mol_type = other RNA
gagacggtgtgcgtgtgcaac

SEQ ID NO: 41536 - RNA, 21 nt, synthetic construct
  source 1..21: mol_type = other RNA
gcatcaacacgaccatcctgt

SEQ ID NO: 41537 - RNA, 21 nt, synthetic construct
  source 1..21: mol_type = other RNA
cgaggtcaacatcaccttctg

SEQ ID NO: 41538 - RNA, 21 nt, synthetic construct
  source 1..21: mol_type = other RNA
cccgtccccccacccgtgcca

SEQ ID NO: 41539 - RNA, 21 nt, synthetic construct
  source 1..21: mol_type = other RNA
cgtgccagcccccaggatggg

SEQ ID NO: 41540 - RNA, 21 nt, synthetic construct
  source 1..21: mol_type = other RNA
ggcggccatgctcgtggtgcc

SEQ ID NO: 41541 - RNA, 21 nt, synthetic construct
  source 1..21: mol_type = other RNA
gccgagctgggagaatgcagg

SEQ ID NO: 41542 - RNA, 21 nt, synthetic construct
  source 1..21: mol_type = other RNA
agaatgcagggcacaccatgg

SEQ ID NO: 41543 - RNA, 21 nt, synthetic construct
  source 1..21: mol_type = other RNA
gtgccccgacgtcctcgccca

SEQ ID NO: 41544 - RNA, 21 nt, synthetic construct
  source 1..21: mol_type = other RNA
gagccccctgaacccggcgca

SEQ ID NO: 41545 - RNA, 21 nt, synthetic construct
  source 1..21: mol_type = other RNA
gcgcacaatgggcgggtgtgc

SEQ ID NO: 41546 - RNA, 21 nt, synthetic construct
  source 1..21: mol_type = other RNA
gcacaatgggcgggtgtgcag

SEQ ID NO: 41547 - RNA, 21 nt, synthetic construct
  source 1..21: mol_type = other RNA
acgtcttccgcttccctggcc

SEQ ID NO: 41548 - RNA, 21 nt, synthetic construct
  source 1..21: mol_type = other RNA
cgtcttccgcttccctggcct

SEQ ID NO: 41549 - RNA, 21 nt, synthetic construct
  source 1..21: mol_type = other RNA
acgtgttctctgagcactgcc

SEQ ID NO: 41550 - RNA, 21 nt, synthetic construct
  source 1..21: mol_type = other RNA
tgagcactgccgcgccgccta

SEQ ID NO: 41551 - RNA, 21 nt, synthetic construct
  source 1..21: mol_type = other RNA
gcactgccgcgccgcctacga

SEQ ID NO: 41552 - RNA, 21 nt, synthetic construct
  source 1..21: mol_type = other RNA
aacggctccgtcctcatcaat

SEQ ID NO: 41553 - RNA, 21 nt, synthetic construct
  source 1..21: mol_type = other RNA
ctccgtcctcatcaatgggca

SEQ ID NO: 41554 - RNA, 21 nt, synthetic construct
  source 1..21: mol_type = other RNA
ctcatcaatgggcagcgggag

SEQ ID NO: 41555 - RNA, 21 nt, synthetic construct
  source 1..21: mol_type = other RNA
ggtgctgacattcctgtggaa

SEQ ID NO: 41556 - RNA, 21 nt, synthetic construct
  source 1..21: mol_type = other RNA
attcctgtggaacggagagga

SEQ ID NO: 41557 - RNA, 21 nt, synthetic construct
  source 1..21: mol_type = other RNA
ccggacccgctgcccttgccg

SEQ ID NO: 41558 - RNA, 21 nt, synthetic construct
  source 1..21: mol_type = other RNA
catctgccaccgcaccctgct

SEQ ID NO: 41559 - RNA, 21 nt, synthetic construct
  source 1..21: mol_type = other RNA
cctggccgcctgcgcccagga

SEQ ID NO: 41560 - RNA, 21 nt, synthetic construct
  source 1..21: mol_type = other RNA
cagccgcggaactggaggtgc

SEQ ID NO: 41561 - RNA, 21 nt, synthetic construct
  source 1..21: mol_type = other RNA
cctgcacggacacctgctcca

SEQ ID NO: 41562 - RNA, 21 nt, synthetic construct
  source 1..21: mol_type = other RNA
caacccccagcgcgcgcagct

SEQ ID NO: 41563 - RNA, 21 nt, synthetic construct
  source 1..21: mol_type = other RNA
tgtgtggacggctgcttctgc

SEQ ID NO: 41564 - RNA, 21 nt, synthetic construct
  source 1..21: mol_type = other RNA
cacggtgctggatgacatcac

SEQ ID NO: 41565 - RNA, 21 nt, synthetic construct
  source 1..21: mol_type = other RNA
ggtgctggatgacatcacgca

SEQ ID NO: 41566 - RNA, 21 nt, synthetic construct
  source 1..21: mol_type = other RNA
ccgggcacctccttcaacacc

SEQ ID NO: 41567 - RNA, 21 nt, synthetic construct
  source 1..21: mol_type = other RNA
ctgtgcagggcggggcccaca

SEQ ID NO: 41568 - RNA, 21 nt, synthetic construct
  source 1..21: mol_type = other RNA
cacatctccacctatgatgag

SEQ ID NO: 41569 - RNA, 21 nt, synthetic construct
  source 1..21: mol_type = other RNA
cgacagcagcttcaccgtgct

SEQ ID NO: 41570 - RNA, 21 nt, synthetic construct
  source 1..21: mol_type = other RNA
ggcctgacggacaacgagaac

SEQ ID NO: 41571 - RNA, 21 nt, synthetic construct
  source 1..21: mol_type = other RNA
gacaacgagaactgcctgaaa

SEQ ID NO: 41572 - RNA, 21 nt, synthetic construct
  source 1..21: mol_type = other RNA
tcgagcttcttcatcgtggtg

SEQ ID NO: 41573 - RNA, 21 nt, synthetic construct
  source 1..21: mol_type = other RNA
ctggtgccactcatgcaggtg

SEQ ID NO: 41574 - RNA, 21 nt, synthetic construct
  source 1..21: mol_type = other RNA
ggccctcagcggggtggtgga

SEQ ID NO: 41575 - RNA, 21 nt, synthetic construct
  source 1..21: mol_type = other RNA
cacgggcgcagccttcgccaa

SEQ ID NO: 41576 - RNA, 21 nt, synthetic construct
  source 1..21: mol_type = other RNA
cagtgccttctcgcgctgcca

SEQ ID NO: 41577 - RNA, 21 nt, synthetic construct
  source 1..21: mol_type = other RNA
agtgccttctcgcgctgccac

SEQ ID NO: 41578 - RNA, 21 nt, synthetic construct
  source 1..21: mol_type = other RNA
gccactccatcatcaacccca

SEQ ID NO: 41579 - RNA, 21 nt, synthetic construct
  source 1..21: mol_type = other RNA
ccactccatcatcaaccccaa

SEQ ID NO: 41580 - RNA, 21 nt, synthetic construct
  source 1..21: mol_type = other RNA
tacgtggtggatgcctgccag

SEQ ID NO: 41581 - RNA, 21 nt, synthetic construct
  source 1..21: mol_type = other RNA
cgtggtggatgcctgccagcc

SEQ ID NO: 41582 - RNA, 21 nt, synthetic construct
  source 1..21: mol_type = other RNA
gtggtggatgcctgccagccc

SEQ ID NO: 41583 - RNA, 21 nt, synthetic construct
  source 1..21: mol_type = other RNA
gcacctgccccgcgggcacct

SEQ ID NO: 41584 - RNA, 21 nt, synthetic construct
  source 1..21: mol_type = other RNA
cacctgccccgcgggcacctt

SEQ ID NO: 41585 - RNA, 21 nt, synthetic construct
  source 1..21: mol_type = other RNA
cgcgggcaccttcctcaatga

SEQ ID NO: 41586 - RNA, 21 nt, synthetic construct
  source 1..21: mol_type = other RNA
gggaagctaagctgcctggga

SEQ ID NO: 41587 - RNA, 21 nt, synthetic construct
  source 1..21: mol_type = other RNA
cccccatggtgtacctggact

SEQ ID NO: 41588 - RNA, 21 nt, synthetic construct
  source 1..21: mol_type = other RNA
cccatggtgtacctggactgc

SEQ ID NO: 41589 - RNA, 21 nt, synthetic construct
  source 1..21: mol_type = other RNA
catggtgtacctggactgcag

SEQ ID NO: 41590 - RNA, 21 nt, synthetic construct
  source 1..21: mol_type = other RNA
aacagctcggcgggcacccct

SEQ ID NO: 41591 - RNA, 21 nt, synthetic construct
  source 1..21: mol_type = other RNA
cggcgggcacccctggggccg

SEQ ID NO: 41592 - RNA, 21 nt, synthetic construct
  source 1..21: mol_type = other RNA
attgccgaggaggactgcccc

SEQ ID NO: 41593 - RNA, 21 nt, synthetic construct
  source 1..21: mol_type = other RNA
tgccgaggaggactgcccctg

SEQ ID NO: 41594 - RNA, 21 nt, synthetic construct
  source 1..21: mol_type = other RNA
acctacaagcctggagagacc

SEQ ID NO: 41595 - RNA, 21 nt, synthetic construct
  source 1..21: mol_type = other RNA
tcatcacctttgatggcgatc

SEQ ID NO: 41596 - RNA, 21 nt, synthetic construct
  source 1..21: mol_type = other RNA
ttgaaggcagctgcgagtaca

SEQ ID NO: 41597 - RNA, 21 nt, synthetic construct
  source 1..21: mol_type = other RNA
gaaggcagctgcgagtacatc

SEQ ID NO: 41598 - RNA, 21 nt, synthetic construct
  source 1..21: mol_type = other RNA
cccaggactactgtggggaca

SEQ ID NO: 41599 - RNA, 21 nt, synthetic construct
  source 1..21: mol_type = other RNA
ctgtggggacaacaccaccca

SEQ ID NO: 41600 - RNA, 21 nt, synthetic construct
  source 1..21: mol_type = other RNA
tgtggggacaacaccacccac

SEQ ID NO: 41601 - RNA, 21 nt, synthetic construct
  source 1..21: mol_type = other RNA
tggggacaacaccacccacgg

SEQ ID NO: 41602 - RNA, 21 nt, synthetic construct
  source 1..21: mol_type = other RNA
ggccgggtggggacccaccct

SEQ ID NO: 41603 - RNA, 21 nt, synthetic construct
  source 1..21: mol_type = other RNA
agacccacgggatggccgtgt

SEQ ID NO: 41604 - RNA, 21 nt, synthetic construct
  source 1..21: mol_type = other RNA
gaagaccagcgtgttcatccg

SEQ ID NO: 41605 - RNA, 21 nt, synthetic construct
  source 1..21: mol_type = other RNA
cgtggtgggggacgcactgga

SEQ ID NO: 41606 - RNA, 21 nt, synthetic construct
  source 1..21: mol_type = other RNA
gccctggcacccaaggacccc

SEQ ID NO: 41607 - RNA, 21 nt, synthetic construct
  source 1..21: mol_type = other RNA
aacgacgcgtgtgcctgcgac

SEQ ID NO: 41608 - RNA, 21 nt, synthetic construct
  source 1..21: mol_type = other RNA
gtggctgcctacgcccaggcc

SEQ ID NO: 41609 - RNA, 21 nt, synthetic construct
  source 1..21: mol_type = other RNA
aggcctgccacgacgcgggcc

SEQ ID NO: 41610 - RNA, 21 nt, synthetic construct
  source 1..21: mol_type = other RNA
ggcctgccacgacgcgggcct

SEQ ID NO: 41611 - RNA, 21 nt, synthetic construct
  source 1..21: mol_type = other RNA
gccccttgttctgtgacttct

SEQ ID NO: 41612 - RNA, 21 nt, synthetic construct
  source 1..21: mol_type = other RNA
aactgcacacccagtggcatc

SEQ ID NO: 41613 - RNA, 21 nt, synthetic construct
  source 1..21: mol_type = other RNA
cctgcttgatcgccatctgcg

SEQ ID NO: 41614 - RNA, 21 nt, synthetic construct
  source 1..21: mol_type = other RNA
gaagcaacggcaccatcatca

SEQ ID NO: 41615 - RNA, 21 nt, synthetic construct
  source 1..21: mol_type = other RNA
tggcatgtcctggaactccag

SEQ ID NO: 41616 - RNA, 21 nt, synthetic construct
  source 1..21: mol_type = other RNA
caccttcaccaccgcctgggt

SEQ ID NO: 41617 - RNA, 21 nt, synthetic construct
  source 1..21: mol_type = other RNA
ccggtctccaccgtgtgtgtc

SEQ ID NO: 41618 - RNA, 21 nt, synthetic construct
  source 1..21: mol_type = other RNA
cgacatgccgctggaggagct

SEQ ID NO: 41619 - RNA, 21 nt, synthetic construct
  source 1..21: mol_type = other RNA
gacatgccgctggaggagctg

SEQ ID NO: 41620 - RNA, 21 nt, synthetic construct
  source 1..21: mol_type = other RNA
cgcatgcgggggctgatgtgc

SEQ ID NO: 41621 - RNA, 21 nt, synthetic construct
  source 1..21: mol_type = other RNA
tacgagctgcgggttctctgc

SEQ ID NO: 41622 - RNA, 21 nt, synthetic construct
  source 1..21: mol_type = other RNA
taccccaacccagaccacagc

SEQ ID NO: 41623 - RNA, 21 nt, synthetic construct
  source 1..21: mol_type = other RNA
gtcgacggcggccctcacctc

SEQ ID NO: 41624 - RNA, 21 nt, synthetic construct
  source 1..21: mol_type = other RNA
cggtcaccccctcggccccag

SEQ ID NO: 41625 - RNA, 21 nt, synthetic construct
  source 1..21: mol_type = other RNA
ggtcaccccctcggccccagg

SEQ ID NO: 41626 - RNA, 21 nt, synthetic construct
  source 1..21: mol_type = other RNA
ccgagagcttccccaactgga

SEQ ID NO: 41627 - RNA, 21 nt, synthetic construct
  source 1..21: mol_type = other RNA
agagcttccccaactggaccc

SEQ ID NO: 41628 - RNA, 21 nt, synthetic construct
  source 1..21: mol_type = other RNA
aactggaccctggcacaggtg

SEQ ID NO: 41629 - RNA, 21 nt, synthetic construct
  source 1..21: mol_type = other RNA
gcacaggtggggcagaaggtg

SEQ ID NO: 41630 - RNA, 21 nt, synthetic construct
  source 1..21: mol_type = other RNA
cacaggtggggcagaaggtgc

SEQ ID NO: 41631 - RNA, 21 nt, synthetic construct
  source 1..21: mol_type = other RNA
acttcggcctggtgtgcagga

SEQ ID NO: 41632 - RNA, 21 nt, synthetic construct
  source 1..21: mol_type = other RNA
ggagcaggagggcgtcttcaa

SEQ ID NO: 41633 - RNA, 21 nt, synthetic construct
  source 1..21: mol_type = other RNA
agtagcccggggctgaccagg

SEQ ID NO: 41634 - RNA, 21 nt, synthetic construct
  source 1..21: mol_type = other RNA
cacaagcacccttggtacagc

SEQ ID NO: 41635 - RNA, 21 nt, synthetic construct
  source 1..21: mol_type = other RNA
caagcacccttggtacagcca

SEQ ID NO: 41636 - RNA, 21 nt, synthetic construct
  source 1..21: mol_type = other RNA
ggaggccccacgacgcctgca

SEQ ID NO: 41637 - RNA, 21 nt, synthetic construct
  source 1..21: mol_type = other RNA
catggcgcccctcacagccac

SEQ ID NO: 41638 - RNA, 21 nt, synthetic construct
  source 1..21: mol_type = other RNA
tcacagccacccacgctggcc

SEQ ID NO: 41639 - RNA, 21 nt, synthetic construct
  source 1..21: mol_type = other RNA
tggccccaacaacaatggcaa

SEQ ID NO: 41640 - RNA, 21 nt, synthetic construct
  source 1..21: mol_type = other RNA
acaacaatggcaacctccaga

SEQ ID NO: 41641 - RNA, 21 nt, synthetic construct
  source 1..21: mol_type = other RNA
cgcttccaaagagccgctgac

SEQ ID NO: 41642 - RNA, 21 nt, synthetic construct
  source 1..21: mol_type = other RNA
tgaccacgagcctggcgccaa

SEQ ID NO: 41643 - RNA, 21 nt, synthetic construct
  source 1..21: mol_type = other RNA
cacgagcgagctgtccacctc

SEQ ID NO: 41644 - RNA, 21 nt, synthetic construct
  source 1..21: mol_type = other RNA
cgagctgtccacctctcaggc

SEQ ID NO: 41645 - RNA, 21 nt, synthetic construct
  source 1..21: mol_type = other RNA
ccgagaccagcacgcccagga

SEQ ID NO: 41646 - RNA, 21 nt, synthetic construct
  source 1..21: mol_type = other RNA
cagcacgcccaggacagagac

SEQ ID NO: 41647 - RNA, 21 nt, synthetic construct
  source 1..21: mol_type = other RNA
agcacgcccaggacagagacg

SEQ ID NO: 41648 - RNA, 21 nt, synthetic construct
  source 1..21: mol_type = other RNA
gcgtccactggatccacggcc

SEQ ID NO: 41649 - RNA, 21 nt, synthetic construct
  source 1..21: mol_type = other RNA
acccacagctaccagcgttac

SEQ ID NO: 41650 - RNA, 21 nt, synthetic construct
  source 1..21: mol_type = other RNA
cccacagctaccagcgttaca

SEQ ID NO: 41651 - RNA, 21 nt, synthetic construct
  source 1..21: mol_type = other RNA
ccaccacaactggggccaccg

SEQ ID NO: 41652 - RNA, 21 nt, synthetic construct
  source 1..21: mol_type = other RNA
gtgccaactaccacaaccacg

SEQ ID NO: 41653 - RNA, 21 nt, synthetic construct
  source 1..21: mol_type = other RNA
gggcttcacagccaccccctc

SEQ ID NO: 41654 - RNA, 21 nt, synthetic construct
  source 1..21: mol_type = other RNA
gcactcacgcctccagtgtgg

SEQ ID NO: 41655 - RNA, 21 nt, synthetic construct
  source 1..21: mol_type = other RNA
cactcacgcctccagtgtgga

SEQ ID NO: 41656 - RNA, 21 nt, synthetic construct
  source 1..21: mol_type = other RNA
cagtgctgaccaccaccacca

SEQ ID NO: 41657 - RNA, 21 nt, synthetic construct
  source 1..21: mol_type = other RNA
tggttctatggcaacaccctc

SEQ ID NO: 41658 - RNA, 21 nt, synthetic construct
  source 1..21: mol_type = other RNA
cgatcacggccaccggctcca

SEQ ID NO: 41659 - RNA, 21 nt, synthetic construct
  source 1..21: mol_type = other RNA
agtgctgaccaccaccgccac

SEQ ID NO: 41660 - RNA, 21 nt, synthetic construct
  source 1..21: mol_type = other RNA
caacacagtgactccctcctc

SEQ ID NO: 41661 - RNA, 21 nt, synthetic construct
  source 1..21: mol_type = other RNA
ggaccacccacacacccccag

SEQ ID NO: 41662 - RNA, 21 nt, synthetic construct
  source 1..21: mol_type = other RNA
cagtgccgaacaccatggcca

SEQ ID NO: 41663 - RNA, 21 nt, synthetic construct
  source 1..21: mol_type = other RNA
cagcagtccccacacggtgcg

SEQ ID NO: 41664 - RNA, 21 nt, synthetic construct
  source 1..21: mol_type = other RNA
cacggtgcgcacagcctggac

SEQ ID NO: 41665 - RNA, 21 nt, synthetic construct
  source 1..21: mol_type = other RNA
gcacagcctggacttcggcca

SEQ ID NO: 41666 - RNA, 21 nt, synthetic construct
  source 1..21: mol_type = other RNA
cggccacctcgggcatcttgg

SEQ ID NO: 41667 - RNA, 21 nt, synthetic construct
  source 1..21: mol_type = other RNA
catcttgggcaccacccacat

SEQ ID NO: 41668 - RNA, 21 nt, synthetic construct
  source 1..21: mol_type = other RNA
tcttgggcaccacccacatca

SEQ ID NO: 41669 - RNA, 21 nt, synthetic construct
  source 1..21: mol_type = other RNA
gagccttccacggtgacttcc

SEQ ID NO: 41670 - RNA, 21 nt, synthetic construct
  source 1..21: mol_type = other RNA
tcaccctagcagcagaaccac

SEQ ID NO: 41671 - RNA, 21 nt, synthetic construct
  source 1..21: mol_type = other RNA
cgagtcacccccttctccagg

SEQ ID NO: 41672 - RNA, 21 nt, synthetic construct
  source 1..21: mol_type = other RNA
ggactttgacacctactccaa

SEQ ID NO: 41673 - RNA, 21 nt, synthetic construct
  source 1..21: mol_type = other RNA
gactttgacacctactccaac

SEQ ID NO: 41674 - RNA, 21 nt, synthetic construct
  source 1..21: mol_type = other RNA
actttgacacctactccaaca

SEQ ID NO: 41675 - RNA, 21 nt, synthetic construct
  source 1..21: mol_type = other RNA
tttgacacctactccaacatc

SEQ ID NO: 41676 - RNA, 21 nt, synthetic construct
  source 1..21: mol_type = other RNA
ccgtgcggccggaggggccgt

SEQ ID NO: 41677 - RNA, 21 nt, synthetic construct
  source 1..21: mol_type = other RNA
ctacggccatgccctcctcca

SEQ ID NO: 41678 - RNA, 21 nt, synthetic construct
  source 1..21: mol_type = other RNA
gagtccactggatccacggcc

SEQ ID NO: 41679 - RNA, 21 nt, synthetic construct
  source 1..21: mol_type = other RNA
cagccaccgtgacggtgccca

SEQ ID NO: 41680 - RNA, 21 nt, synthetic construct
  source 1..21: mol_type = other RNA
agccaccgtgacggtgcccac

SEQ ID NO: 41681 - RNA, 21 nt, synthetic construct
  source 1..21: mol_type = other RNA
tccactccagagactgtccac

SEQ ID NO: 41682 - RNA, 21 nt, synthetic construct
  source 1..21: mol_type = other RNA
caaccggggccaccggctctg

SEQ ID NO: 41683 - RNA, 21 nt, synthetic construct
  source 1..21: mol_type = other RNA
agtgctgactaccacaaccac

SEQ ID NO: 41684 - RNA, 21 nt, synthetic construct
  source 1..21: mol_type = other RNA
gggcttcacagccaccccctc

SEQ ID NO: 41685 - RNA, 21 nt, synthetic construct
  source 1..21: mol_type = other RNA
gttccacggtgaccccctcct

SEQ ID NO: 41686 - RNA, 21 nt, synthetic construct
  source 1..21: mol_type = other RNA
cagtgctgaccaccaccacca

SEQ ID NO: 41687 - RNA, 21 nt, synthetic construct
  source 1..21: mol_type = other RNA
tggttctatggcaacaccctc

SEQ ID NO: 41688 - RNA, 21 nt, synthetic construct
  source 1..21: mol_type = other RNA
cgatcacggccaccggctcca

SEQ ID NO: 41689 - RNA, 21 nt, synthetic construct
  source 1..21: mol_type = other RNA
agtgctgaccaccaccgccac

SEQ ID NO: 41690 - RNA, 21 nt, synthetic construct
  source 1..21: mol_type = other RNA
ggaccacccacacacccccag

SEQ ID NO: 41691 - RNA, 21 nt, synthetic construct
  source 1..21: mol_type = other RNA
cagcagtccccacacggtgcg

SEQ ID NO: 41692 - RNA, 21 nt, synthetic construct
  source 1..21: mol_type = other RNA
cacggtgcgcacagcctggac

SEQ ID NO: 41693 - RNA, 21 nt, synthetic construct
  source 1..21: mol_type = other RNA
gcacagcctggacttcggcca

SEQ ID NO: 41694 - RNA, 21 nt, synthetic construct
  source 1..21: mol_type = other RNA
cttcggccacctcaggcacct

SEQ ID NO: 41695 - RNA, 21 nt, synthetic construct
  source 1..21: mol_type = other RNA
ccttgggcaccacccacatca

SEQ ID NO: 41696 - RNA, 21 nt, synthetic construct
  source 1..21: mol_type = other RNA
cgagtcacccccttctccagg

SEQ ID NO: 41697 - RNA, 21 nt, synthetic construct
  source 1..21: mol_type = other RNA
ccaccccgggccacaccaggg

SEQ ID NO: 41698 - RNA, 21 nt, synthetic construct
  source 1..21: mol_type = other RNA
caccccgggccacaccagggc

SEQ ID NO: 41699 - RNA, 21 nt, synthetic construct
  source 1..21: mol_type = other RNA
ggactttgacacctactccaa

SEQ ID NO: 41700 - RNA, 21 nt, synthetic construct
  source 1..21: mol_type = other RNA
gactttgacacctactccaac

SEQ ID NO: 41701 - RNA, 21 nt, synthetic construct
  source 1..21: mol_type = other RNA
actttgacacctactccaaca

SEQ ID NO: 41702 - RNA, 21 nt, synthetic construct
  source 1..21: mol_type = other RNA
tttgacacctactccaacatc

SEQ ID NO: 41703 - RNA, 21 nt, synthetic construct
  source 1..21: mol_type = other RNA
ccgtgcggccggaggggccgt

SEQ ID NO: 41704 - RNA, 21 nt, synthetic construct
  source 1..21: mol_type = other RNA
ccactccagggacgacctgga

SEQ ID NO: 41705 - RNA, 21 nt, synthetic construct
  source 1..21: mol_type = other RNA
gcaaccactggatccacggcc

SEQ ID NO: 41706 - RNA, 21 nt, synthetic construct
  source 1..21: mol_type = other RNA
caaccactggatccacggcca

SEQ ID NO: 41707 - RNA, 21 nt, synthetic construct
  source 1..21: mol_type = other RNA
accacccttccagtgctgaca

SEQ ID NO: 41708 - RNA, 21 nt, synthetic construct
  source 1..21: mol_type = other RNA
ttacacccatcccctccttca

SEQ ID NO: 41709 - RNA, 21 nt, synthetic construct
  source 1..21: mol_type = other RNA
gggaccaccgggaccctccca

SEQ ID NO: 41710 - RNA, 21 nt, synthetic construct
  source 1..21: mol_type = other RNA
gtccacaatccacccctcctc

SEQ ID NO: 41711 - RNA, 21 nt, synthetic construct
  source 1..21: mol_type = other RNA
cactccggagaccacccacac

SEQ ID NO: 41712 - RNA, 21 nt, synthetic construct
  source 1..21: mol_type = other RNA
ggagaccacccacacctccac

SEQ ID NO: 41713 - RNA, 21 nt, synthetic construct
  source 1..21: mol_type = other RNA
acgacaagggccaccagttcc

SEQ ID NO: 41714 - RNA, 21 nt, synthetic construct
  source 1..21: mol_type = other RNA
cgacaagggccaccagttcca

SEQ ID NO: 41715 - RNA, 21 nt, synthetic construct
  source 1..21: mol_type = other RNA
cagccactggccccacggcca

SEQ ID NO: 41716 - RNA, 21 nt, synthetic construct
  source 1..21: mol_type = other RNA
tggatcctcacagagcccagc

SEQ ID NO: 41717 - RNA, 21 nt, synthetic construct
  source 1..21: mol_type = other RNA
agagcccagcactacagccac

SEQ ID NO: 41718 - RNA, 21 nt, synthetic construct
  source 1..21: mol_type = other RNA
cagccaccgtgacggtgccca

SEQ ID NO: 41719 - RNA, 21 nt, synthetic construct
  source 1..21: mol_type = other RNA
agccaccgtgacggtgcccac

SEQ ID NO: 41720 - RNA, 21 nt, synthetic construct
  source 1..21: mol_type = other RNA
tccacccgggcaactgctggc

SEQ ID NO: 41721 - RNA, 21 nt, synthetic construct
  source 1..21: mol_type = other RNA
tgctggcaccctcaaagtgct

SEQ ID NO: 41722 - RNA, 21 nt, synthetic construct
  source 1..21: mol_type = other RNA
acccacagctaccagcgttac

SEQ ID NO: 41723 - RNA, 21 nt, synthetic construct
  source 1..21: mol_type = other RNA
cccacagctaccagcgttaca

SEQ ID NO: 41724 - RNA, 21 nt, synthetic construct
  source 1..21: mol_type = other RNA
tctactccagagactgtccac

SEQ ID NO: 41725 - RNA, 21 nt, synthetic construct
  source 1..21: mol_type = other RNA
gcttaccaccacgaccaccac

SEQ ID NO: 41726 - RNA, 21 nt, synthetic construct
  source 1..21: mol_type = other RNA
gtgccgactaccacaaccacg

SEQ ID NO: 41727 - RNA, 21 nt, synthetic construct
  source 1..21: mol_type = other RNA
gggcttcacagccaccccctc

SEQ ID NO: 41728 - RNA, 21 nt, synthetic construct
  source 1..21: mol_type = other RNA
gcactcacgcctccagtgtgg

SEQ ID NO: 41729 - RNA, 21 nt, synthetic construct
  source 1..21: mol_type = other RNA
cactcacgcctccagtgtgga

SEQ ID NO: 41730 - RNA, 21 nt, synthetic construct
  source 1..21: mol_type = other RNA
cagtgctgaccaccaccacca

SEQ ID NO: 41731 - RNA, 21 nt, synthetic construct
  source 1..21: mol_type = other RNA
tggttctatggcaacaccctc

SEQ ID NO: 41732 - RNA, 21 nt, synthetic construct
  source 1..21: mol_type = other RNA
agtgctgaccaccaccgccac

SEQ ID NO: 41733 - RNA, 21 nt, synthetic construct
  source 1..21: mol_type = other RNA
ggaccacccacacacccccag

SEQ ID NO: 41734 - RNA, 21 nt, synthetic construct
  source 1..21: mol_type = other RNA
cagcagtccccacacggtgcg

SEQ ID NO: 41735 - RNA, 21 nt, synthetic construct
  source 1..21: mol_type = other RNA
cacggtgcgcacagcctggac

SEQ ID NO: 41736 - RNA, 21 nt, synthetic construct
  source 1..21: mol_type = other RNA
gcacagcctggacttcggcca

SEQ ID NO: 41737 - RNA, 21 nt, synthetic construct
  source 1..21: mol_type = other RNA
cggccacctcgggcatcttgg

SEQ ID NO: 41738 - RNA, 21 nt, synthetic construct
  source 1..21: mol_type = other RNA
catcttgggcaccacccacat

SEQ ID NO: 41739 - RNA, 21 nt, synthetic construct
  source 1..21: mol_type = other RNA
tcttgggcaccacccacatca

SEQ ID NO: 41740 - RNA, 21 nt, synthetic construct
  source 1..21: mol_type = other RNA
gagccttccacggtgacttcc

SEQ ID NO: 41741 - RNA, 21 nt, synthetic construct
  source 1..21: mol_type = other RNA
agcaaccaccagtaccaccca

SEQ ID NO: 41742 - RNA, 21 nt, synthetic construct
  source 1..21: mol_type = other RNA
cgagtcacccccttctccagg

SEQ ID NO: 41743 - RNA, 21 nt, synthetic construct
  source 1..21: mol_type = other RNA
ccaccccgggccacaccaggg

SEQ ID NO: 41744 - RNA, 21 nt, synthetic construct
  source 1..21: mol_type = other RNA
caccccgggccacaccagggg

SEQ ID NO: 41745 - RNA, 21 nt, synthetic construct
  source 1..21: mol_type = other RNA
ggactttgacacctactccaa

SEQ ID NO: 41746 - RNA, 21 nt, synthetic construct
  source 1..21: mol_type = other RNA
gactttgacacctactccaac

SEQ ID NO: 41747 - RNA, 21 nt, synthetic construct
  source 1..21: mol_type = other RNA
actttgacacctactccaaca

SEQ ID NO: 41748 - RNA, 21 nt, synthetic construct
  source 1..21: mol_type = other RNA
tttgacacctactccaacatc

SEQ ID NO: 41749 - RNA, 21 nt, synthetic construct
  source 1..21: mol_type = other RNA
aggggcagtctgtgagcagcc

SEQ ID NO: 41750 - RNA, 21 nt, synthetic construct
  source 1..21: mol_type = other RNA
ggggcagtctgtgagcagccc

SEQ ID NO: 41751 - RNA, 21 nt, synthetic construct
  source 1..21: mol_type = other RNA
gagtccactggatccacggcc

SEQ ID NO: 41752 - RNA, 21 nt, synthetic construct
  source 1..21: mol_type = other RNA
cagccaccgtgacggtgccca

SEQ ID NO: 41753 - RNA, 21 nt, synthetic construct
  source 1..21: mol_type = other RNA
agccaccgtgacggtgcccac

SEQ ID NO: 41754 - RNA, 21 nt, synthetic construct
  source 1..21: mol_type = other RNA
gtgccgactaccacaaccacg

SEQ ID NO: 41755 - RNA, 21 nt, synthetic construct
  source 1..21: mol_type = other RNA
cacgggcttcacagtcacccc

SEQ ID NO: 41756 - RNA, 21 nt, synthetic construct
  source 1..21: mol_type = other RNA
cgggcttcacagtcaccccct

SEQ ID NO: 41757 - RNA, 21 nt, synthetic construct
  source 1..21: mol_type = other RNA
cctcctccgtcccggggacca

SEQ ID NO: 41758 - RNA, 21 nt, synthetic construct
  source 1..21: mol_type = other RNA
ctcctccgtcccggggaccac

SEQ ID NO: 41759 - RNA, 21 nt, synthetic construct
  source 1..21: mol_type = other RNA
cctccgtcccggggaccaccc

SEQ ID NO: 41760 - RNA, 21 nt, synthetic construct
  source 1..21: mol_type = other RNA
cagtgctgaccaccaccacca

SEQ ID NO: 41761 - RNA, 21 nt, synthetic construct
  source 1..21: mol_type = other RNA
tggttctatggcaacaccctc

SEQ ID NO: 41762 - RNA, 21 nt, synthetic construct
  source 1..21: mol_type = other RNA
tcactgatcaccacggccact

SEQ ID NO: 41763 - RNA, 21 nt, synthetic construct
  source 1..21: mol_type = other RNA
cgatcacggccaccggctcca

SEQ ID NO: 41764 - RNA, 21 nt, synthetic construct
  source 1..21: mol_type = other RNA
agtgctgaccaccaccgccac

SEQ ID NO: 41765 - RNA, 21 nt, synthetic construct
  source 1..21: mol_type = other RNA
ggaccacccacacacccccag

SEQ ID NO: 41766 - RNA, 21 nt, synthetic construct
  source 1..21: mol_type = other RNA
cagcagtccccacacggtgcg

SEQ ID NO: 41767 - RNA, 21 nt, synthetic construct
  source 1..21: mol_type = other RNA
cacggtgcgcacagcctggac

SEQ ID NO: 41768 - RNA, 21 nt, synthetic construct
  source 1..21: mol_type = other RNA
gcacagcctggacttcggcca

SEQ ID NO: 41769 - RNA, 21 nt, synthetic construct
  source 1..21: mol_type = other RNA
cttcggccacctcaggcacct

SEQ ID NO: 41770 - RNA, 21 nt, synthetic construct
  source 1..21: mol_type = other RNA
ccttgggcaccacccacatca

SEQ ID NO: 41771 - RNA, 21 nt, synthetic construct
  source 1..21: mol_type = other RNA
accgagtcacccccttcccca

SEQ ID NO: 41772 - RNA, 21 nt, synthetic construct
  source 1..21: mol_type = other RNA
ggactttgacacctactccaa

SEQ ID NO: 41773 - RNA, 21 nt, synthetic construct
  source 1..21: mol_type = other RNA
gactttgacacctactccaac

SEQ ID NO: 41774 - RNA, 21 nt, synthetic construct
  source 1..21: mol_type = other RNA
actttgacacctactccaaca

SEQ ID NO: 41775 - RNA, 21 nt, synthetic construct
  source 1..21: mol_type = other RNA
tttgacacctactccaacatc

SEQ ID NO: 41776 - RNA, 21 nt, synthetic construct
  source 1..21: mol_type = other RNA
ccgtgcggccggaggggccgt

SEQ ID NO: 41777 - RNA, 21 nt, synthetic construct
  source 1..21: mol_type = other RNA
ccagcctggtgtccccctggg

SEQ ID NO: 41778 - RNA, 21 nt, synthetic construct
  source 1..21: mol_type = other RNA
ctacggccatgccctcctcca

SEQ ID NO: 41779 - RNA, 21 nt, synthetic construct
  source 1..21: mol_type = other RNA
accacccttccagtgctgaca

SEQ ID NO: 41780 - RNA, 21 nt, synthetic construct
  source 1..21: mol_type = other RNA
tccacagctaccagcgttaca

SEQ ID NO: 41781 - RNA, 21 nt, synthetic construct
  source 1..21: mol_type = other RNA
ttacacccatcccctcctcca

SEQ ID NO: 41782 - RNA, 21 nt, synthetic construct
  source 1..21: mol_type = other RNA
gggaccaccgggaccctccca

SEQ ID NO: 41783 - RNA, 21 nt, synthetic construct
  source 1..21: mol_type = other RNA
gtccacaatccacccctcctc

SEQ ID NO: 41784 - RNA, 21 nt, synthetic construct
  source 1..21: mol_type = other RNA
cactccggagaccacccacac

SEQ ID NO: 41785 - RNA, 21 nt, synthetic construct
  source 1..21: mol_type = other RNA
ggagaccacccacacctccac

SEQ ID NO: 41786 - RNA, 21 nt, synthetic construct
  source 1..21: mol_type = other RNA
acgacaagggccaccagttcc

SEQ ID NO: 41787 - RNA, 21 nt, synthetic construct
  source 1..21: mol_type = other RNA
cgacaagggccaccagttcca

SEQ ID NO: 41788 - RNA, 21 nt, synthetic construct
  source 1..21: mol_type = other RNA
cagccactggccccacggcca

SEQ ID NO: 41789 - RNA, 21 nt, synthetic construct
  source 1..21: mol_type = other RNA
gcgtccactggatccacggcc

SEQ ID NO: 41790 - RNA, 21 nt, synthetic construct
  source 1..21: mol_type = other RNA
cagccaccgtgacggtgccca

SEQ ID NO: 41791 - RNA, 21 nt, synthetic construct
  source 1..21: mol_type = other RNA
agccaccgtgacggtgcccac

SEQ ID NO: 41792 - RNA, 21 nt, synthetic construct
  source 1..21: mol_type = other RNA
ggactgcaactgcccttccag

SEQ ID NO: 41793 - RNA, 21 nt, synthetic construct
  source 1..21: mol_type = other RNA
tccactccagagactgtccac

SEQ ID NO: 41794 - RNA, 21 nt, synthetic construct
  source 1..21: mol_type = other RNA
caaccggggccaccggctctg

SEQ ID NO: 41795 - RNA, 21 nt, synthetic construct
  source 1..21: mol_type = other RNA
gtgccgactaccacaaccacg

SEQ ID NO: 41796 - RNA, 21 nt, synthetic construct
  source 1..21: mol_type = other RNA
gggcttcacagccaccccctc

SEQ ID NO: 41797 - RNA, 21 nt, synthetic construct
  source 1..21: mol_type = other RNA
gcactcacgcctccagtgtgg

SEQ ID NO: 41798 - RNA, 21 nt, synthetic construct
  source 1..21: mol_type = other RNA
cactcacgcctccagtgtgga

SEQ ID NO: 41799 - RNA, 21 nt, synthetic construct
  source 1..21: mol_type = other RNA
gagtgctgaccaccaccacca

SEQ ID NO: 41800 - RNA, 21 nt, synthetic construct
  source 1..21: mol_type = other RNA
tggttctatggcaacaccctc

SEQ ID NO: 41801 - RNA, 21 nt, synthetic construct
  source 1..21: mol_type = other RNA
cgatcacggccaccggctcca

SEQ ID NO: 41802 - RNA, 21 nt, synthetic construct
  source 1..21: mol_type = other RNA
accacccttccagtgctgaca

SEQ ID NO: 41803 - RNA, 21 nt, synthetic construct
  source 1..21: mol_type = other RNA
ttacacccatcccctcctcca

SEQ ID NO: 41804 - RNA, 21 nt, synthetic construct
  source 1..21: mol_type = other RNA
ccaccctgtggaccacgtgga

SEQ ID NO: 41805 - RNA, 21 nt, synthetic construct
  source 1..21: mol_type = other RNA
cctgtggaccacgtggaccgt

SEQ ID NO: 41806 - RNA, 21 nt, synthetic construct
  source 1..21: mol_type = other RNA
cacacccatgtccaccatgtc

SEQ ID NO: 41807 - RNA, 21 nt, synthetic construct
  source 1..21: mol_type = other RNA
caccatgtccacaatccacac

SEQ ID NO: 41808 - RNA, 21 nt, synthetic construct
  source 1..21: mol_type = other RNA
agagaccacccacacctccac

SEQ ID NO: 41809 - RNA, 21 nt, synthetic construct
  source 1..21: mol_type = other RNA
ccaccatgacaagggccacca

SEQ ID NO: 41810 - RNA, 21 nt, synthetic construct
  source 1..21: mol_type = other RNA
cagccactggatccacggcca

SEQ ID NO: 41811 - RNA, 21 nt, synthetic construct
  source 1..21: mol_type = other RNA
agccaccgtgatggtgcccac

SEQ ID NO: 41812 - RNA, 21 nt, synthetic construct
  source 1..21: mol_type = other RNA
acacccccaaagtggtgacca

SEQ ID NO: 41813 - RNA, 21 nt, synthetic construct
  source 1..21: mol_type = other RNA
cacccccaaagtggtgaccac

SEQ ID NO: 41814 - RNA, 21 nt, synthetic construct
  source 1..21: mol_type = other RNA
ccccaaagtggtgaccaccat

SEQ ID NO: 41815 - RNA, 21 nt, synthetic construct
  source 1..21: mol_type = other RNA
agtggtgaccaccatggccac

SEQ ID NO: 41816 - RNA, 21 nt, synthetic construct
  source 1..21: mol_type = other RNA
ccaccatggccactatgccca

SEQ ID NO: 41817 - RNA, 21 nt, synthetic construct
  source 1..21: mol_type = other RNA
caccatggccactatgcccac

SEQ ID NO: 41818 - RNA, 21 nt, synthetic construct
  source 1..21: mol_type = other RNA
gctcgtccaccgtggggacca

SEQ ID NO: 41819 - RNA, 21 nt, synthetic construct
  source 1..21: mol_type = other RNA
cgtggggaccacccgcacccc

SEQ ID NO: 41820 - RNA, 21 nt, synthetic construct
  source 1..21: mol_type = other RNA
gcagggcatttggacagtttt

SEQ ID NO: 41821 - RNA, 21 nt, synthetic construct
  source 1..21: mol_type = other RNA
atcagcactgtgacattgacc

SEQ ID NO: 41822 - RNA, 21 nt, synthetic construct
  source 1..21: mol_type = other RNA
ctgtgacattgaccgcttcca

SEQ ID NO: 41823 - RNA, 21 nt, synthetic construct
  source 1..21: mol_type = other RNA
aatgccatccctctccggcag

SEQ ID NO: 41824 - RNA, 21 nt, synthetic construct
  source 1..21: mol_type = other RNA
ctctccggcaggtgaatgaga

SEQ ID NO: 41825 - RNA, 21 nt, synthetic construct
  source 1..21: mol_type = other RNA
aaccgtgtcgtcctgctggac

SEQ ID NO: 41826 - RNA, 21 nt, synthetic construct
  source 1..21: mol_type = other RNA
ggacccaaagcctgtggccaa

SEQ ID NO: 41827 - RNA, 21 nt, synthetic construct
  source 1..21: mol_type = other RNA
gcctgtggccaacgtcacctg

SEQ ID NO: 41828 - RNA, 21 nt, synthetic construct
  source 1..21: mol_type = other RNA
ctgtggccaacgtcacctgcg

SEQ ID NO: 41829 - RNA, 21 nt, synthetic construct
  source 1..21: mol_type = other RNA
cgagtgcatctgcagcatgtg

SEQ ID NO: 41830 - RNA, 21 nt, synthetic construct
  source 1..21: mol_type = other RNA
gggcggctcccactattccac

SEQ ID NO: 41831 - RNA, 21 nt, synthetic construct
  source 1..21: mol_type = other RNA
gcggctcccactattccacct

SEQ ID NO: 41832 - RNA, 21 nt, synthetic construct
  source 1..21: mol_type = other RNA
cttccggggcaactgcaccta

SEQ ID NO: 41833 - RNA, 21 nt, synthetic construct
  source 1..21: mol_type = other RNA
ccggggcaactgcacctatgt

SEQ ID NO: 41834 - RNA, 21 nt, synthetic construct
  source 1..21: mol_type = other RNA
cggggcaactgcacctatgtc

SEQ ID NO: 41835 - RNA, 21 nt, synthetic construct
  source 1..21: mol_type = other RNA
ggggcaactgcacctatgtcc

SEQ ID NO: 41836 - RNA, 21 nt, synthetic construct
  source 1..21: mol_type = other RNA
acgctttgggaatctcagcct

SEQ ID NO: 41837 - RNA, 21 nt, synthetic construct
  source 1..21: mol_type = other RNA
ctcagcctctacctggacaac

SEQ ID NO: 41838 - RNA, 21 nt, synthetic construct
  source 1..21: mol_type = other RNA
agcctctacctggacaaccac

SEQ ID NO: 41839 - RNA, 21 nt, synthetic construct
  source 1..21: mol_type = other RNA
actactgcacggcctctgcca

SEQ ID NO: 41840 - RNA, 21 nt, synthetic construct
  source 1..21: mol_type = other RNA
ggcctgatcctgtttgaccaa

SEQ ID NO: 41841 - RNA, 21 nt, synthetic construct
  source 1..21: mol_type = other RNA
gggaccaccaccatgcgtgtg

SEQ ID NO: 41842 - RNA, 21 nt, synthetic construct
  source 1..21: mol_type = other RNA
cgtgtggacattcctgccctg

SEQ ID NO: 41843 - RNA, 21 nt, synthetic construct
  source 1..21: mol_type = other RNA
gtgtggacattcctgccctgg

SEQ ID NO: 41844 - RNA, 21 nt, synthetic construct
  source 1..21: mol_type = other RNA
tgtggacattcctgccctggg

SEQ ID NO: 41845 - RNA, 21 nt, synthetic construct
  source 1..21: mol_type = other RNA
agcgtcaccttcaatggccaa

SEQ ID NO: 41846 - RNA, 21 nt, synthetic construct
  source 1..21: mol_type = other RNA
tgcaaggacatggccaagacg

SEQ ID NO: 41847 - RNA, 21 nt, synthetic construct
  source 1..21: mol_type = other RNA
gtccccgacagcagaaaggat

SEQ ID NO: 41848 - RNA, 21 nt, synthetic construct
  source 1..21: mol_type = other RNA
ggtctttgctgagtgccacaa

SEQ ID NO: 41849 - RNA, 21 nt, synthetic construct
  source 1..21: mol_type = other RNA
gctgagtgccacaaccttgtg

SEQ ID NO: 41850 - RNA, 21 nt, synthetic construct
  source 1..21: mol_type = other RNA
cattcttcaacgcctgcatca

SEQ ID NO: 41851 - RNA, 21 nt, synthetic construct
  source 1..21: mol_type = other RNA
tcttcaacgcctgcatcagcg

SEQ ID NO: 41852 - RNA, 21 nt, synthetic construct
  source 1..21: mol_type = other RNA
cgaccactgcaggggccgcct

SEQ ID NO: 41853 - RNA, 21 nt, synthetic construct
  source 1..21: mol_type = other RNA
gaggtgcaaccggtggcctgt

SEQ ID NO: 41854 - RNA, 21 nt, synthetic construct
  source 1..21: mol_type = other RNA
actctaggaaccagagcccac

SEQ ID NO: 41855 - RNA, 21 nt, synthetic construct
  source 1..21: mol_type = other RNA
catctgcgtgcaggcctgccc

SEQ ID NO: 41856 - RNA, 21 nt, synthetic construct
  source 1..21: mol_type = other RNA
atctgcgtgcaggcctgcccc

SEQ ID NO: 41857 - RNA, 21 nt, synthetic construct
  source 1..21: mol_type = other RNA
gcgtgcaggcctgcccctgcg

SEQ ID NO: 41858 - RNA, 21 nt, synthetic construct
  source 1..21: mol_type = other RNA
cgtgcaggcctgcccctgcgt

SEQ ID NO: 41859 - RNA, 21 nt, synthetic construct
  source 1..21: mol_type = other RNA
cctgcccctgcgtgggacccg

SEQ ID NO: 41860 - RNA, 21 nt, synthetic construct
  source 1..21: mol_type = other RNA
ggtcagcccccgccgtgcaac

SEQ ID NO: 41861 - RNA, 21 nt, synthetic construct
  source 1..21: mol_type = other RNA
ggccgagaacccctgctgccc

SEQ ID NO: 41862 - RNA, 21 nt, synthetic construct
  source 1..21: mol_type = other RNA
ctgctgccccgagacggtgtg

SEQ ID NO: 41863 - RNA, 21 nt, synthetic construct
  source 1..21: mol_type = other RNA
cgtgtgcaacacaaccacctg

SEQ ID NO: 41864 - RNA, 21 nt, synthetic construct
  source 1..21: mol_type = other RNA
caggagtccatctgcacccag

SEQ ID NO: 41865 - RNA, 21 nt, synthetic construct
  source 1..21: mol_type = other RNA
ggagtccatctgcacccagga

SEQ ID NO: 41866 - RNA, 21 nt, synthetic construct
  source 1..21: mol_type = other RNA
catctgcacccaggaggaggg

SEQ ID NO: 41867 - RNA, 21 nt, synthetic construct
  source 1..21: mol_type = other RNA
caatggcaccttctacggggt

SEQ ID NO: 41868 - RNA, 21 nt, synthetic construct
  source 1..21: mol_type = other RNA
aatgtcaggaggatgcctgca

SEQ ID NO: 41869 - RNA, 21 nt, synthetic construct
  source 1..21: mol_type = other RNA
agaccgcctgcctcacgcccg

SEQ ID NO: 41870 - RNA, 21 nt, synthetic construct
  source 1..21: mol_type = other RNA
acgcccgatggccagccagtc

SEQ ID NO: 41871 - RNA, 21 nt, synthetic construct
  source 1..21: mol_type = other RNA
agtccagctgaatgaaacctg

SEQ ID NO: 41872 - RNA, 21 nt, synthetic construct
  source 1..21: mol_type = other RNA
ctgaatgaaacctgggtcaac

SEQ ID NO: 41873 - RNA, 21 nt, synthetic construct
  source 1..21: mol_type = other RNA
aacctgggtcaacagccatgt

SEQ ID NO: 41874 - RNA, 21 nt, synthetic construct
  source 1..21: mol_type = other RNA
tgtacctctgtgaggctgagg

SEQ ID NO: 41875 - RNA, 21 nt, synthetic construct
  source 1..21: mol_type = other RNA
cgcatcaacacgaccatcctg

SEQ ID NO: 41876 - RNA, 21 nt, synthetic construct
  source 1..21: mol_type = other RNA
cgtccaagtactcagcagagg

SEQ ID NO: 41877 - RNA, 21 nt, synthetic construct
  source 1..21: mol_type = other RNA
cacctgctgccaggagaggcg

SEQ ID NO: 41878 - RNA, 21 nt, synthetic construct
  source 1..21: mol_type = other RNA
ggagaggcgggtccacgagga

SEQ ID NO: 41879 - RNA, 21 nt, synthetic construct
  source 1..21: mol_type = other RNA
gagaggcgggtccacgaggag

SEQ ID NO: 41880 - RNA, 21 nt, synthetic construct
  source 1..21: mol_type = other RNA
cttgcactgtcctaacggctc

SEQ ID NO: 41881 - RNA, 21 nt, synthetic construct
  source 1..21: mol_type = other RNA
agccatcctgcacacctacac

SEQ ID NO: 41882 - RNA, 21 nt, synthetic construct
  source 1..21: mol_type = other RNA
gccatcctgcacacctacacc

SEQ ID NO: 41883 - RNA, 21 nt, synthetic construct
  source 1..21: mol_type = other RNA
ctgagaacgttctgcctccat

SEQ ID NO: 41884 - RNA, 21 nt, synthetic construct
  source 1..21: mol_type = other RNA
gagccaggatgtgcattgtct

SEQ ID NO: 41885 - RNA, 21 nt, synthetic construct
  source 1..21: mol_type = other RNA
tgcattgtctgatcatgaaaa

SEQ ID NO: 41886 - RNA, 21 nt, synthetic construct
  source 1..21: mol_type = other RNA
tgaaaaccttgggcctcctct

SEQ ID NO: 41887 - RNA, 21 nt, synthetic construct
  source 1..21: mol_type = other RNA
cccggcctgtgtgtggcaccc

SEQ ID NO: 41888 - RNA, 21 nt, synthetic construct
  source 1..21: mol_type = other RNA
ccggcctgtgtgtggcacccc

SEQ ID NO: 41889 - RNA, 21 nt, synthetic construct
  source 1..21: mol_type = other RNA
gtgtggcaccccgcgctccgt

SEQ ID NO: 41890 - RNA, 21 nt, synthetic construct
  source 1..21: mol_type = other RNA
gccacggccggagcgcccgcg

SEQ ID NO: 41891 - RNA, 21 nt, synthetic construct
  source 1..21: mol_type = other RNA
ggcagacaggctggtccaggc

SEQ ID NO: 41892 - RNA, 21 nt, synthetic construct
  source 1..21: mol_type = other RNA
ctgtccatgcctgctgcaggg

SEQ ID NO: 41893 - RNA, 21 nt, synthetic construct
  source 1..21: mol_type = other RNA
tgtccatgcctgctgcagggt

SEQ ID NO: 41894 - RNA, 21 nt, synthetic construct
  source 1..21: mol_type = other RNA
ctgcagggtaactcagggctg

SEQ ID NO: 41895 - RNA, 21 nt, synthetic construct
  source 1..21: mol_type = other RNA
gcaactacgtgttctctgagc

SEQ ID NO: 41896 - RNA, 21 nt, synthetic construct
  source 1..21: mol_type = other RNA
ttcaacgtccagctacgccga

SEQ ID NO: 41897 - RNA, 21 nt, synthetic construct
  source 1..21: mol_type = other RNA
ggtgggaagctaagctgcctg

SEQ ID NO: 41898 - RNA, 21 nt, synthetic construct
  source 1..21: mol_type = other RNA
gtgggaagctaagctgcctgg

SEQ ID NO: 41899 - RNA, 21 nt, synthetic construct
  source 1..21: mol_type = other RNA
ccaccagttccaaagccactt

SEQ ID NO: 41900 - RNA, 21 nt, synthetic construct
  source 1..21: mol_type = other RNA
ccaccagttccaaagccactt

SEQ ID NO: 41901 - RNA, 21 nt, synthetic construct
  source 1..21: mol_type = other RNA
gttgcaaggacatggccaaga

SEQ ID NO: 41902 - RNA, 21 nt, synthetic construct
  source 1..21: mol_type = other RNA
caactacgtgttctctgagca

SEQ ID NO: 41903 - RNA, 21 nt, synthetic construct
  source 1..21: mol_type = other RNA
gggtccccacagcggagaact

SEQ ID NO: 41904 - RNA, 21 nt, synthetic construct
  source 1..21: mol_type = other RNA
cgcgccgcctacgaggacttc

SEQ ID NO: 41905 - RNA, 21 nt, synthetic construct
  source 1..21: mol_type = other RNA
ccttgactaacaccaccacca

SEQ ID NO: 41906 - RNA, 21 nt, synthetic construct
  source 1..21: mol_type = other RNA
cgcagagctctgccgcgcccg

SEQ ID NO: 41907 - RNA, 21 nt, synthetic construct
  source 1..21: mol_type = other RNA
catgtggacaactgcaccgtg

SEQ ID NO: 41908 - RNA, 21 nt, synthetic construct
  source 1..21: mol_type = other RNA
ccgaccacagagctggagacg

SEQ ID NO: 41909 - RNA, 21 nt, synthetic construct
  source 1..21: mol_type = other RNA
gccgcgccgcctacgaggact

SEQ ID NO: 41910 - RNA, 21 nt, synthetic construct
  source 1..21: mol_type = other RNA
ctctgcgaggaccactgtgtg

SEQ ID NO: 41911 - RNA, 21 nt, synthetic construct
  source 1..21: mol_type = other RNA
gcgccgcctacgaggacttca

SEQ ID NO: 41912 - RNA, 21 nt, synthetic construct
  source 1..21: mol_type = other RNA
ctgcgaggaccactgtgtgga

SEQ ID NO: 41913 - RNA, 21 nt, synthetic construct
  source 1..21: mol_type = other RNA
agaactgccccaagtcccagc

SEQ ID NO: 41914 - RNA, 21 nt, synthetic construct
  source 1..21: mol_type = other RNA
ggcgactgcgagtgtttctgc

SEQ ID NO: 41915 - RNA, 21 nt, synthetic construct
  source 1..21: mol_type = other RNA
cagcctggactttggcctggt

SEQ ID NO: 41916 - RNA, 21 nt, synthetic construct
  source 1..21: mol_type = other RNA
cagcctggactttggcctggt

SEQ ID NO: 41917 - RNA, 21 nt, synthetic construct
  source 1..21: mol_type = other RNA
cactacaactgcagccactgg

SEQ ID NO: 41918 - RNA, 21 nt, synthetic construct
  source 1..21: mol_type = other RNA
cagcctggactttggcctggt

SEQ ID NO: 41919 - RNA, 21 nt, synthetic construct
  source 1..21: mol_type = other RNA
cagcctggactttggcctggt

SEQ ID NO: 41920 - RNA, 21 nt, synthetic construct
  source 1..21: mol_type = other RNA
cactacaactgcagccactgg

SEQ ID NO: 41921 - RNA, 21 nt, synthetic construct
  source 1..21: mol_type = other RNA
cactacaactgcagccactgg

SEQ ID NO: 41922 - RNA, 21 nt, synthetic construct
  source 1..21: mol_type = other RNA
cccgccagggcaggagtccat

SEQ ID NO: 41923 - RNA, 21 nt, synthetic construct
  source 1..21: mol_type = other RNA
cctgccacggccggagcgccc

SEQ ID NO: 41924 - RNA, 21 nt, synthetic construct
  source 1..21: mol_type = other RNA
actcagggctgaggtcgcaac

SEQ ID NO: 41925 - RNA, 21 nt, synthetic construct
  source 1..21: mol_type = other RNA
cacggccaccacacacgggcg

SEQ ID NO: 41926 - RNA, 21 nt, synthetic construct
  source 1..21: mol_type = other RNA
cacggccaccacacacgggcg

SEQ ID NO: 41927 - RNA, 21 nt, synthetic construct
  source 1..21: mol_type = other RNA
cacggccaccacacacgggcg

SEQ ID NO: 41928 - RNA, 21 nt, synthetic construct
  source 1..21: mol_type = other RNA
ccgccaccgaccacagagctg

SEQ ID NO: 41929 - RNA, 21 nt, synthetic construct
  source 1..21: mol_type = other RNA
gcccgtgtgccacctttgtgg

SEQ ID NO: 41930 - RNA, 21 nt, synthetic construct
  source 1..21: mol_type = other RNA
caacggcctcccggccttcaa

SEQ ID NO: 41931 - RNA, 21 nt, synthetic construct
  source 1..21: mol_type = other RNA
cctcaacatgcagcaccagga

SEQ ID NO: 41932 - RNA, 21 nt, synthetic construct
  source 1..21: mol_type = other RNA
tccccacacggtgcgcacagc

SEQ ID NO: 41933 - RNA, 21 nt, synthetic construct
  source 1..21: mol_type = other RNA
tccccacacggtgcgcacagc

SEQ ID NO: 41934 - RNA, 21 nt, synthetic construct
  source 1..21: mol_type = other RNA
tccccacacggtgcgcacagc

SEQ ID NO: 41935 - RNA, 21 nt, synthetic construct
  source 1..21: mol_type = other RNA
gggcttcacagtcaccccctc

SEQ ID NO: 41936 - RNA, 21 nt, synthetic construct
  source 1..21: mol_type = other RNA
tccccacacggtgcgcacagc

SEQ ID NO: 41937 - RNA, 21 nt, synthetic construct
  source 1..21: mol_type = other RNA
tccactctgggaacagctcac

SEQ ID NO: 41938 - RNA, 21 nt, synthetic construct
  source 1..21: mol_type = other RNA
cctgtgcgacctcacctgccc

SEQ ID NO: 41939 - RNA, 21 nt, synthetic construct
  source 1..21: mol_type = other RNA
agggtcagcccccgccgtgca

SEQ ID NO: 41940 - RNA, 21 nt, synthetic construct
  source 1..21: mol_type = other RNA
agcacagccaccaaatccaca

SEQ ID NO: 41941 - RNA, 21 nt, synthetic construct
  source 1..21: mol_type = other RNA
agcacagccaccaaatccaca

SEQ ID NO: 41942 - RNA, 21 nt, synthetic construct
  source 1..21: mol_type = other RNA
cctgccctgtgacgcccaggg

SEQ ID NO: 41943 - RNA, 21 nt, synthetic construct
  source 1..21: mol_type = other RNA
gtgcaaccgtcccggcttcgt

SEQ ID NO: 41944 - RNA, 21 nt, synthetic construct
  source 1..21: mol_type = other RNA
caccccgcgctccgtgctcct

SEQ ID NO: 41945 - RNA, 21 nt, synthetic construct
  source 1..21: mol_type = other RNA
gaggtggtgcacgacgagggc

SEQ ID NO: 41946 - RNA, 21 nt, synthetic construct
  source 1..21: mol_type = other RNA
ttccctggcctttgcaactac

SEQ ID NO: 41947 - RNA, 21 nt, synthetic construct
  source 1..21: mol_type = other RNA
aacggcctcccggccttcaac

SEQ ID NO: 41948 - RNA, 21 nt, synthetic construct
  source 1..21: mol_type = other RNA
atcgtggtgcagacaggcctg

SEQ ID NO: 41949 - RNA, 21 nt, synthetic construct
  source 1..21: mol_type = other RNA
gtccagctacgccgaggccta

SEQ ID NO: 41950 - RNA, 21 nt, synthetic construct
  source 1..21: mol_type = other RNA
ccaccatgcgtgtggacattc

SEQ ID NO: 41951 - RNA, 21 nt, synthetic construct
  source 1..21: mol_type = other RNA
tcgtggtgcagacaggcctgg

SEQ ID NO: 41952 - RNA, 21 nt, synthetic construct
  source 1..21: mol_type = other RNA
tgtgcgccaacagccaacaga

SEQ ID NO: 41953 - RNA, 21 nt, synthetic construct
  source 1..21: mol_type = other RNA
ccactggttctatggcaacac

SEQ ID NO: 41954 - RNA, 21 nt, synthetic construct
  source 1..21: mol_type = other RNA
gacttcccacaccctagcagc

SEQ ID NO: 41955 - RNA, 21 nt, synthetic construct
  source 1..21: mol_type = other RNA
ccactggttctatggcaacac

SEQ ID NO: 41956 - RNA, 21 nt, synthetic construct
  source 1..21: mol_type = other RNA
ccactggttctatggcaacac

SEQ ID NO: 41957 - RNA, 21 nt, synthetic construct
  source 1..21: mol_type = other RNA
ccactggttctatggcaacac

SEQ ID NO: 41958 - RNA, 21 nt, synthetic construct
  source 1..21: mol_type = other RNA
ccactggttctatggcaacac

SEQ ID NO: 41959 - RNA, 21 nt, synthetic construct
  source 1..21: mol_type = other RNA
cacctccccaccgccagtgtc

SEQ ID NO: 41960 - RNA, 21 nt, synthetic construct
  source 1..21: mol_type = other RNA
tcatgagagagatccatgcac

SEQ ID NO: 41961 - RNA, 21 nt, synthetic construct
  source 1..21: mol_type = other RNA
gagaacccctgctgccccgag

SEQ ID NO: 41962 - RNA, 21 nt, synthetic construct
  source 1..21: mol_type = other RNA
ggctcctgccccggagcgtcc

SEQ ID NO: 41963 - RNA, 21 nt, synthetic construct
  source 1..21: mol_type = other RNA
tggcaccccgcgctccgtgct

SEQ ID NO: 41964 - RNA, 21 nt, synthetic construct
  source 1..21: mol_type = other RNA
gatcctcacagagccgagcac

SEQ ID NO: 41965 - RNA, 21 nt, synthetic construct
  source 1..21: mol_type = other RNA
gatcctcacagagccgagcac

SEQ ID NO: 41966 - RNA, 21 nt, synthetic construct
  source 1..21: mol_type = other RNA
gatcctcacagagccgagcac

SEQ ID NO: 41967 - RNA, 21 nt, synthetic construct
  source 1..21: mol_type = other RNA
gatcctcacagagccgagcac

SEQ ID NO: 41968 - RNA, 21 nt, synthetic construct
  source 1..21: mol_type = other RNA
ccggcctttgcggagtgccac

SEQ ID NO: 41969 - RNA, 21 nt, synthetic construct
  source 1..21: mol_type = other RNA
tcacactaccaaagtgctgac

SEQ ID NO: 41970 - RNA, 21 nt, synthetic construct
  source 1..21: mol_type = other RNA
ccctagggaccacccacacac

SEQ ID NO: 41971 - RNA, 21 nt, synthetic construct
  source 1..21: mol_type = other RNA
ccctagggaccacccacacac

SEQ ID NO: 41972 - RNA, 21 nt, synthetic construct
  source 1..21: mol_type = other RNA
ccctagggaccacccacacac

SEQ ID NO: 41973 - RNA, 21 nt, synthetic construct
  source 1..21: mol_type = other RNA
ccctagggaccacccacacac

SEQ ID NO: 41974 - RNA, 21 nt, synthetic construct
  source 1..21: mol_type = other RNA
aagcaacggcaccatcatcag

SEQ ID NO: 41975 - RNA, 21 nt, synthetic construct
  source 1..21: mol_type = other RNA
gggtgaccccgagcatccggt

SEQ ID NO: 41976 - RNA, 21 nt, synthetic construct
  source 1..21: mol_type = other RNA
ggaggatgcctgcaacaatac

SEQ ID NO: 41977 - RNA, 21 nt, synthetic construct
  source 1..21: mol_type = other RNA
ggcaaggcggccgcctgtcca

SEQ ID NO: 41978 - RNA, 21 nt, synthetic construct
  source 1..21: mol_type = other RNA
tggggcagaaggtgcactgtg

SEQ ID NO: 41979 - RNA, 21 nt, synthetic construct
  source 1..21: mol_type = other RNA
cacacctcctctactccagag

SEQ ID NO: 41980 - RNA, 21 nt, synthetic construct
  source 1..21: mol_type = other RNA
ctccagcccagggacggcact

SEQ ID NO: 41981 - RNA, 21 nt, synthetic construct
  source 1..21: mol_type = other RNA
ctccagcccagggacggcacg

SEQ ID NO: 41982 - RNA, 21 nt, synthetic construct
  source 1..21: mol_type = other RNA
ctccagcccagggacggcact

SEQ ID NO: 41983 - RNA, 21 nt, synthetic construct
  source 1..21: mol_type = other RNA
tacgatcacagccaccggctc

SEQ ID NO: 41984 - RNA, 21 nt, synthetic construct
  source 1..21: mol_type = other RNA
ctccagcccagggacggcacg

SEQ ID NO: 41985 - RNA, 21 nt, synthetic construct
  source 1..21: mol_type = other RNA
ctccagcccagggacggcact

SEQ ID NO: 41986 - RNA, 21 nt, synthetic construct
  source 1..21: mol_type = other RNA
ctcccggtctccaccgtgtgt

SEQ ID NO: 41987 - RNA, 21 nt, synthetic construct
  source 1..21: mol_type = other RNA
gcccacaacgccaggctgacc

SEQ ID NO: 41988 - RNA, 21 nt, synthetic construct
  source 1..21: mol_type = other RNA
ctccggggggctatggcagtg

SEQ ID NO: 41989 - RNA, 21 nt, synthetic construct
  source 1..21: mol_type = other RNA
ctcacactaccaaagtgctga

SEQ ID NO: 41990 - RNA, 21 nt, synthetic construct
  source 1..21: mol_type = other RNA
ccagtccaaggactgcaacca

SEQ ID NO: 41991 - RNA, 21 nt, synthetic construct
  source 1..21: mol_type = other RNA
cagggccaccggctctgtggc

SEQ ID NO: 41992 - RNA, 21 nt, synthetic construct
  source 1..21: mol_type = other RNA
cagggccaccggctctgtggc

SEQ ID NO: 41993 - RNA, 21 nt, synthetic construct
  source 1..21: mol_type = other RNA
ccagtccaaggactgcaacca

SEQ ID NO: 41994 - RNA, 21 nt, synthetic construct
  source 1..21: mol_type = other RNA
ccagtccaaggactgcaacca

SEQ ID NO: 41995 - RNA, 21 nt, synthetic construct
  source 1..21: mol_type = other RNA
ccgtcccagcacagaccacca

SEQ ID NO: 41996 - RNA, 21 nt, synthetic construct
  source 1..21: mol_type = other RNA
caaccttcagcgtgtccactg

SEQ ID NO: 41997 - RNA, 21 nt, synthetic construct
  source 1..21: mol_type = other RNA
gccctcagcatccactacaag

SEQ ID NO: 41998 - RNA, 21 nt, synthetic construct
  source 1..21: mol_type = other RNA
ccgctctgtgatctgatgctg

SEQ ID NO: 41999 - RNA, 21 nt, synthetic construct
  source 1..21: mol_type = other RNA
ctctaggaaccagagcccaca

SEQ ID NO: 42000 - RNA, 21 nt, synthetic construct
  source 1..21: mol_type = other RNA
cttgggcctcctctgcggagc

SEQ ID NO: 42001 - RNA, 21 nt, synthetic construct
  source 1..21: mol_type = other RNA
gggtaactcagggctgaggtc

SEQ ID NO: 42002 - RNA, 21 nt, synthetic construct
  source 1..21: mol_type = other RNA
tgcacgacgagggcgccgtgt

SEQ ID NO: 42003 - RNA, 21 nt, synthetic construct
  source 1..21: mol_type = other RNA
acctatccccccagtgctgac

SEQ ID NO: 42004 - RNA, 21 nt, synthetic construct
  source 1..21: mol_type = other RNA
acctatccccccagtgctgac

SEQ ID NO: 42005 - RNA, 21 nt, synthetic construct
  source 1..21: mol_type = other RNA
ggtgctggaggcgtccaacgg

SEQ ID NO: 42006 - RNA, 21 nt, synthetic construct
  source 1..21: mol_type = other RNA
tggtcatcgagacccacggga

SEQ ID NO: 42007 - RNA, 21 nt, synthetic construct
  source 1..21: mol_type = other RNA
ctgggagcaggagggcgtctt

SEQ ID NO: 42008 - RNA, 21 nt, synthetic construct
  source 1..21: mol_type = other RNA
gggcgtcttcaagatgtgcta

SEQ ID NO: 42009 - RNA, 21 nt, synthetic construct
  source 1..21: mol_type = other RNA
cctctgctgcagtgacgacca

SEQ ID NO: 42010 - RNA, 21 nt, synthetic construct
  source 1..21: mol_type = other RNA
agccaccacgggaggccccac

SEQ ID NO: 42011 - RNA, 21 nt, synthetic construct
  source 1..21: mol_type = other RNA
cacacccacagtcaccagctc

SEQ ID NO: 42012 - RNA, 21 nt, synthetic construct
  source 1..21: mol_type = other RNA
ccagagactgcccacacctcc

SEQ ID NO: 42013 - RNA, 21 nt, synthetic construct
  source 1..21: mol_type = other RNA
ctcccccatcactgaccacca

SEQ ID NO: 42014 - RNA, 21 nt, synthetic construct
  source 1..21: mol_type = other RNA
ccatggccaccacacacgggc

SEQ ID NO: 42015 - RNA, 21 nt, synthetic construct
  source 1..21: mol_type = other RNA
gacacccacagtcaccagctc

SEQ ID NO: 42016 - RNA, 21 nt, synthetic construct
  source 1..21: mol_type = other RNA
ctcccccatcactgaccacca

SEQ ID NO: 42017 - RNA, 21 nt, synthetic construct
  source 1..21: mol_type = other RNA
ctcccccatcactgaccacca

SEQ ID NO: 42018 - RNA, 21 nt, synthetic construct
  source 1..21: mol_type = other RNA
gacacccacagtcaccagctc

SEQ ID NO: 42019 - RNA, 21 nt, synthetic construct
  source 1..21: mol_type = other RNA
ccagagactgcccacacctcc

SEQ ID NO: 42020 - RNA, 21 nt, synthetic construct
  source 1..21: mol_type = other RNA
gacacccacagtcaccagctc

SEQ ID NO: 42021 - RNA, 21 nt, synthetic construct
  source 1..21: mol_type = other RNA
tccagggactgcaactgccct

SEQ ID NO: 42022 - RNA, 21 nt, synthetic construct
  source 1..21: mol_type = other RNA
ctcccccatcactgaccacca

SEQ ID NO: 42023 - RNA, 21 nt, synthetic construct
  source 1..21: mol_type = other RNA
acatcaccttctgcgagggct

SEQ ID NO: 42024 - RNA, 21 nt, synthetic construct
  source 1..21: mol_type = other RNA
gtgtccctgccacggccggag

SEQ ID NO: 42025 - RNA, 21 nt, synthetic construct
  source 1..21: mol_type = other RNA
caggaagctgcgacaggcaag

SEQ ID NO: 42026 - RNA, 21 nt, synthetic construct
  source 1..21: mol_type = other RNA
tctgagcactgccgcgccgcc

SEQ ID NO: 42027 - RNA, 21 nt, synthetic construct
  source 1..21: mol_type = other RNA
tggtggacagcactgcgtacc

SEQ ID NO: 42028 - RNA, 21 nt, synthetic construct
  source 1..21: mol_type = other RNA
ctttacagccatcccctcctc

SEQ ID NO: 42029 - RNA, 21 nt, synthetic construct
  source 1..21: mol_type = other RNA
ctttacagccatcccctcctc

SEQ ID NO: 42030 - RNA, 21 nt, synthetic construct
  source 1..21: mol_type = other RNA
ctttacagccatcccctcctc

SEQ ID NO: 42031 - RNA, 21 nt, synthetic construct
  source 1..21: mol_type = other RNA
ctcagctgtgttcgtacaatg

SEQ ID NO: 42032 - RNA, 21 nt, synthetic construct
  source 1..21: mol_type = other RNA
gagccgctgaccacgagcctg

SEQ ID NO: 42033 - RNA, 21 nt, synthetic construct
  source 1..21: mol_type = other RNA
cactgcctccacggttcccag

SEQ ID NO: 42034 - RNA, 21 nt, synthetic construct
  source 1..21: mol_type = other RNA
tcaacgcctgcatcagcgacc

SEQ ID NO: 42035 - RNA, 21 nt, synthetic construct
  source 1..21: mol_type = other RNA
acacccacaaccagaggttcc

SEQ ID NO: 42036 - RNA, 21 nt, synthetic construct
  source 1..21: mol_type = other RNA
agaaatgtgccgacagcagct

SEQ ID NO: 42037 - RNA, 21 nt, synthetic construct
  source 1..21: mol_type = other RNA
ccggaagaccagcgtgttcat

SEQ ID NO: 42038 - RNA, 21 nt, synthetic construct
  source 1..21: mol_type = other RNA
tgcacacccagtggcatccag

SEQ ID NO: 42039 - RNA, 21 nt, synthetic construct
  source 1..21: mol_type = other RNA
actccagccacaacgccattc

SEQ ID NO: 42040 - RNA, 21 nt, synthetic construct
  source 1..21: mol_type = other RNA
ccgggcggcgcagcttcccga

SEQ ID NO: 42041 - RNA, 21 nt, synthetic construct
  source 1..21: mol_type = other RNA
tttccagccctcaccctagca

SEQ ID NO: 42042 - RNA, 21 nt, synthetic construct
  source 1..21: mol_type = other RNA
aagcacagccaccaaatccac

SEQ ID NO: 42043 - RNA, 21 nt, synthetic construct
  source 1..21: mol_type = other RNA
caccctcaaagtgctgaccag

SEQ ID NO: 42044 - RNA, 21 nt, synthetic construct
  source 1..21: mol_type = other RNA
aagcacagccaccaaatccac

SEQ ID NO: 42045 - RNA, 21 nt, synthetic construct
  source 1..21: mol_type = other RNA
ctgcgtgcaggcctgcccctg

SEQ ID NO: 42046 - RNA, 21 nt, synthetic construct
  source 1..21: mol_type = other RNA
ccgcctgcctcacgcccgatg

SEQ ID NO: 42047 - RNA, 21 nt, synthetic construct
  source 1..21: mol_type = other RNA
ttccgcttccctggcctttgc

SEQ ID NO: 42048 - RNA, 21 nt, synthetic construct
  source 1..21: mol_type = other RNA
ctcccagaacagaccaccaca

SEQ ID NO: 42049 - RNA, 21 nt, synthetic construct
  source 1..21: mol_type = other RNA
ctcccagaacagaccaccaca

SEQ ID NO: 42050 - RNA, 21 nt, synthetic construct
  source 1..21: mol_type = other RNA
cgtaaccgtgaccaggccccg

SEQ ID NO: 42051 - RNA, 21 nt, synthetic construct
  source 1..21: mol_type = other RNA
cctatgtgtccctgccacggc

SEQ ID NO: 42052 - RNA, 21 nt, synthetic construct
  source 1..21: mol_type = other RNA
cttccctggcctttgcaacta

SEQ ID NO: 42053 - RNA, 21 nt, synthetic construct
  source 1..21: mol_type = other RNA
acggctccgtcctcatcaatg

SEQ ID NO: 42054 - RNA, 21 nt, synthetic construct
  source 1..21: mol_type = other RNA
ccaggcacggtgctggatgac

SEQ ID NO: 42055 - RNA, 21 nt, synthetic construct
  source 1..21: mol_type = other RNA
ctgtgccaatgccaggaacag

SEQ ID NO: 42056 - RNA, 21 nt, synthetic construct
  source 1..21: mol_type = other RNA
gctggtgtcggatgggagtgg

SEQ ID NO: 42057 - RNA, 21 nt, synthetic construct
  source 1..21: mol_type = other RNA
gccgggtggggacccacccta

SEQ ID NO: 42058 - RNA, 21 nt, synthetic construct
  source 1..21: mol_type = other RNA
ccctcccggtctccaccgtgt

SEQ ID NO: 42059 - RNA, 21 nt, synthetic construct
  source 1..21: mol_type = other RNA
caccctctcagaaggactgac

SEQ ID NO: 42060 - RNA, 21 nt, synthetic construct
  source 1..21: mol_type = other RNA
caccacgggaggccccacgac

SEQ ID NO: 42061 - RNA, 21 nt, synthetic construct
  source 1..21: mol_type = other RNA
ctcagcccttccagggacgac

SEQ ID NO: 42062 - RNA, 21 nt, synthetic construct
  source 1..21: mol_type = other RNA
agccagggcacgacccgctgt

SEQ ID NO: 42063 - RNA, 21 nt, synthetic construct
  source 1..21: mol_type = other RNA
agagactgcccacacctccac

SEQ ID NO: 42064 - RNA, 21 nt, synthetic construct
  source 1..21: mol_type = other RNA
taccccatgccggggccctct

SEQ ID NO: 42065 - RNA, 21 nt, synthetic construct
  source 1..21: mol_type = other RNA
aaccgtgagcaggtggggaag

SEQ ID NO: 42066 - RNA, 21 nt, synthetic construct
  source 1..21: mol_type = other RNA
caccccacatgtgagcaccac

SEQ ID NO: 42067 - RNA, 21 nt, synthetic construct
  source 1..21: mol_type = other RNA
taccccatgccggggccctct

SEQ ID NO: 42068 - RNA, 21 nt, synthetic construct
  source 1..21: mol_type = other RNA
aaccgtgagcaggtggggaag

SEQ ID NO: 42069 - RNA, 21 nt, synthetic construct
  source 1..21: mol_type = other RNA
taccccatgccggggccctct

SEQ ID NO: 42070 - RNA, 21 nt, synthetic construct
  source 1..21: mol_type = other RNA
aaccgtgagcaggtggggaag

SEQ ID NO: 42071 - RNA, 21 nt, synthetic construct
  source 1..21: mol_type = other RNA
caccccacatgtgagcaccac

SEQ ID NO: 42072 - RNA, 21 nt, synthetic construct
  source 1..21: mol_type = other RNA
agagactgcccacacctccac

SEQ ID NO: 42073 - RNA, 21 nt, synthetic construct
  source 1..21: mol_type = other RNA
taccccatgccggggccctct

SEQ ID NO: 42074 - RNA, 21 nt, synthetic construct
  source 1..21: mol_type = other RNA
aaccgtgagcaggtggggaag

SEQ ID NO: 42075 - RNA, 21 nt, synthetic construct
  source 1..21: mol_type = other RNA
caccccacatgtgagcaccac

SEQ ID NO: 42076 - RNA, 21 nt, synthetic construct
  source 1..21: mol_type = other RNA
cgtcccagcacagaccaccac

SEQ ID NO: 42077 - RNA, 21 nt, synthetic construct
  source 1..21: mol_type = other RNA
ctccactctgggaacagctca

SEQ ID NO: 42078 - RNA, 21 nt, synthetic construct
  source 1..21: mol_type = other RNA
gcatcagcgaccactgcaggg

SEQ ID NO: 42079 - RNA, 21 nt, synthetic construct
  source 1..21: mol_type = other RNA
gcaggggccgccttgaggtgc

SEQ ID NO: 42080 - RNA, 21 nt, synthetic construct
  source 1..21: mol_type = other RNA
ggcgaggtgcaaccggtggcc

SEQ ID NO: 42081 - RNA, 21 nt, synthetic construct
  source 1..21: mol_type = other RNA
gccccatacagcctgccacct

SEQ ID NO: 42082 - RNA, 21 nt, synthetic construct
  source 1..21: mol_type = other RNA
cctgtgacgcccagggtcagc

SEQ ID NO: 42083 - RNA, 21 nt, synthetic construct
  source 1..21: mol_type = other RNA
ttcgtacaatggcaccttcta

SEQ ID NO: 42084 - RNA, 21 nt, synthetic construct
  source 1..21: mol_type = other RNA
aacgttctgcctccatcccca

SEQ ID NO: 42085 - RNA, 21 nt, synthetic construct
  source 1..21: mol_type = other RNA
tgcagggtaactcagggctga

SEQ ID NO: 42086 - RNA, 21 nt, synthetic construct
  source 1..21: mol_type = other RNA
gcgccaacagccaacagagtc

SEQ ID NO: 42087 - RNA, 21 nt, synthetic construct
  source 1..21: mol_type = other RNA
ctggatccacggccatcccgt

SEQ ID NO: 42088 - RNA, 21 nt, synthetic construct
  source 1..21: mol_type = other RNA
cccctgccctgtgacgcccag

SEQ ID NO: 42089 - RNA, 21 nt, synthetic construct
  source 1..21: mol_type = other RNA
ccctgccctgtgacgcccagg

SEQ ID NO: 42090 - RNA, 21 nt, synthetic construct
  source 1..21: mol_type = other RNA
gtgaccaggccccgggccgag

SEQ ID NO: 42091 - RNA, 21 nt, synthetic construct
  source 1..21: mol_type = other RNA
ggaccgtcccagcacagacca

SEQ ID NO: 42092 - RNA, 21 nt, synthetic construct
  source 1..21: mol_type = other RNA
cagctcacacccccaaagtgg

SEQ ID NO: 42093 - RNA, 21 nt, synthetic construct
  source 1..21: mol_type = other RNA
cgaggcctagtgggctccagg

SEQ ID NO: 42094 - RNA, 21 nt, synthetic construct
  source 1..21: mol_type = other RNA
caccaccgcctgggtccccca

SEQ ID NO: 42095 - RNA, 21 nt, synthetic construct
  source 1..21: mol_type = other RNA
gggatggcggagggctgcttc

SEQ ID NO: 42096 - RNA, 21 nt, synthetic construct
  source 1..21: mol_type = other RNA
gggccctgtggagccgagctg

SEQ ID NO: 42097 - RNA, 21 nt, synthetic construct
  source 1..21: mol_type = other RNA
tgtacctggactgcagcaaca

SEQ ID NO: 42098 - RNA, 21 nt, synthetic construct
  source 1..21: mol_type = other RNA
cacggccaccatgtccacagc

SEQ ID NO: 42099 - RNA, 21 nt, synthetic construct
  source 1..21: mol_type = other RNA
cacggccaccatgtccacagc

SEQ ID NO: 42100 - RNA, 21 nt, synthetic construct
  source 1..21: mol_type = other RNA
cacggccaccatgtccacagc

SEQ ID NO: 42101 - RNA, 21 nt, synthetic construct
  source 1..21: mol_type = other RNA
cacggccaccatgtccacagc

SEQ ID NO: 42102 - RNA, 21 nt, synthetic construct
  source 1..21: mol_type = other RNA
cacggccaccatgtccacagc

SEQ ID NO: 42103 - RNA, 21 nt, synthetic construct
  source 1..21: mol_type = other RNA
gaaacctgggtcaacagccat

SEQ ID NO: 42104 - RNA, 21 nt, synthetic construct
  source 1..21: mol_type = other RNA
ctgccgcgccgcctacgagga

SEQ ID NO: 42105 - RNA, 21 nt, synthetic construct
  source 1..21: mol_type = other RNA
gcctgccacgacgcgggcctg

SEQ ID NO: 42106 - RNA, 21 nt, synthetic construct
  source 1..21: mol_type = other RNA
actgccgcgccgcctacgagg

SEQ ID NO: 42107 - RNA, 21 nt, synthetic construct
  source 1..21: mol_type = other RNA
cctatgatgagaaactctacg

SEQ ID NO: 42108 - RNA, 21 nt, synthetic construct
  source 1..21: mol_type = other RNA
ggcgcctgtgtgcccgcccag

SEQ ID NO: 42109 - RNA, 21 nt, synthetic construct
  source 1..21: mol_type = other RNA
cactggttctatggcaacacc

SEQ ID NO: 42110 - RNA, 21 nt, synthetic construct
  source 1..21: mol_type = other RNA
cactggttctatggcaacacc

SEQ ID NO: 42111 - RNA, 21 nt, synthetic construct
  source 1..21: mol_type = other RNA
cactggttctatggcaacacc

SEQ ID NO: 42112 - RNA, 21 nt, synthetic construct
  source 1..21: mol_type = other RNA
cactggttctatggcaacacc

SEQ ID NO: 42113 - RNA, 21 nt, synthetic construct
  source 1..21: mol_type = other RNA
cactggttctatggcaacacc

SEQ ID NO: 42114 - RNA, 21 nt, synthetic construct
  source 1..21: mol_type = other RNA
cccgcacccctgcagtgctcc

SEQ ID NO: 42115 - RNA, 21 nt, synthetic construct
  source 1..21: mol_type = other RNA
gggaagtcatctacaataaga

SEQ ID NO: 42116 - RNA, 21 nt, synthetic construct
  source 1..21: mol_type = other RNA
ggaagtcatctacaataagac

SEQ ID NO: 42117 - RNA, 21 nt, synthetic construct
  source 1..21: mol_type = other RNA
ctgaggaccagatcctcttca

SEQ ID NO: 42118 - RNA, 21 nt, synthetic construct
  source 1..21: mol_type = other RNA
ggccccgggccgagaacccct

SEQ ID NO: 42119 - RNA, 21 nt, synthetic construct
  source 1..21: mol_type = other RNA
gaccactgtgtggacggctgc

SEQ ID NO: 42120 - RNA, 21 nt, synthetic construct
  source 1..21: mol_type = other RNA
atcatcaaccccaagcccttc

SEQ ID NO: 42121 - RNA, 21 nt, synthetic construct
  source 1..21: mol_type = other RNA
aggactgcccctgtgtgcaca

SEQ ID NO: 42122 - RNA, 21 nt, synthetic construct
  source 1..21: mol_type = other RNA
atgaggacaggacctacagct

SEQ ID NO: 42123 - RNA, 21 nt, synthetic construct
  source 1..21: mol_type = other RNA
aaaggatggctgctgggcccc

SEQ ID NO: 42124 - RNA, 21 nt, synthetic construct
  source 1..21: mol_type = other RNA
cagtccagctgaatgaaacct

SEQ ID NO: 42125 - RNA, 21 nt, synthetic construct
  source 1..21: mol_type = other RNA
acggctcagccatcctgcaca

SEQ ID NO: 42126 - RNA, 21 nt, synthetic construct
  source 1..21: mol_type = other RNA
acattcctgtggaacggagag

SEQ ID NO: 42127 - RNA, 21 nt, synthetic construct
  source 1..21: mol_type = other RNA
acctatgatgagaaactctac

SEQ ID NO: 42128 - RNA, 21 nt, synthetic construct
  source 1..21: mol_type = other RNA
cgggtgggaagctaagctgcc

SEQ ID NO: 42129 - RNA, 21 nt, synthetic construct
  source 1..21: mol_type = other RNA
gaccaccacacccgtggccac

SEQ ID NO: 42130 - RNA, 21 nt, synthetic construct
  source 1..21: mol_type = other RNA
cactgtgtggacggctgcttc

SEQ ID NO: 42131 - RNA, 21 nt, synthetic construct
  source 1..21: mol_type = other RNA
gcatggtgactgcagctacgt

SEQ ID NO: 42132 - RNA, 21 nt, synthetic construct
  source 1..21: mol_type = other RNA
gggaccacccacacaccccca

SEQ ID NO: 42133 - RNA, 21 nt, synthetic construct
  source 1..21: mol_type = other RNA
gggaccacccacacaccccca

SEQ ID NO: 42134 - RNA, 21 nt, synthetic construct
  source 1..21: mol_type = other RNA
gtcctccaccccgggaacagc

SEQ ID NO: 42135 - RNA, 21 nt, synthetic construct
  source 1..21: mol_type = other RNA
gaccaccgggaccctcccaga

SEQ ID NO: 42136 - RNA, 21 nt, synthetic construct
  source 1..21: mol_type = other RNA
gggaccacccacacaccccca

SEQ ID NO: 42137 - RNA, 21 nt, synthetic construct
  source 1..21: mol_type = other RNA
gggaccacccacacaccccca

SEQ ID NO: 42138 - RNA, 21 nt, synthetic construct
  source 1..21: mol_type = other RNA
gtcctccaccccgggaacagc

SEQ ID NO: 42139 - RNA, 21 nt, synthetic construct
  source 1..21: mol_type = other RNA
gaccaccgggaccctcccaga

SEQ ID NO: 42140 - RNA, 21 nt, synthetic construct
  source 1..21: mol_type = other RNA
gggaccacccacaccgccaga

SEQ ID NO: 42141 - RNA, 21 nt, synthetic construct
  source 1..21: mol_type = other RNA
ggtccccgacagcagaaagga

SEQ ID NO: 42142 - RNA, 21 nt, synthetic construct
  source 1..21: mol_type = other RNA
aaaccttgggcctcctctgcg

SEQ ID NO: 42143 - RNA, 21 nt, synthetic construct
  source 1..21: mol_type = other RNA
tgtgaccgcatgcgggggctg

SEQ ID NO: 42144 - RNA, 21 nt, synthetic construct
  source 1..21: mol_type = other RNA
cccgcgggcaccttcctcaat

SEQ ID NO: 42145 - RNA, 21 nt, synthetic construct
  source 1..21: mol_type = other RNA
tggctgctacgacaaggacgg

SEQ ID NO: 42146 - RNA, 21 nt, synthetic construct
  source 1..21: mol_type = other RNA
aacggcaccatcatcaggaag

SEQ ID NO: 42147 - RNA, 21 nt, synthetic construct
  source 1..21: mol_type = other RNA
cccgccaccgaccacagagct

SEQ ID NO: 42148 - RNA, 21 nt, synthetic construct
  source 1..21: mol_type = other RNA
tggcctcctggtggagcagag

SEQ ID NO: 42149 - RNA, 21 nt, synthetic construct
  source 1..21: mol_type = other RNA
accactgtgtggacggctgct

SEQ ID NO: 42150 - RNA, 21 nt, synthetic construct
  source 1..21: mol_type = other RNA
ctgtgtggacggctgcttctg

SEQ ID NO: 42151 - RNA, 21 nt, synthetic construct
  source 1..21: mol_type = other RNA
ccccgcgggcaccttcctcaa

SEQ ID NO: 42152 - RNA, 21 nt, synthetic construct
  source 1..21: mol_type = other RNA
agggtgtgcagcccccatggt

SEQ ID NO: 42153 - RNA, 21 nt, synthetic construct
  source 1..21: mol_type = other RNA
ggaggactgcccctgtgtgca

SEQ ID NO: 42154 - RNA, 21 nt, synthetic construct
  source 1..21: mol_type = other RNA
caggactactgtggggacaac

SEQ ID NO: 42155 - RNA, 21 nt, synthetic construct
  source 1..21: mol_type = other RNA
ccctggcacccaaggacccct

SEQ ID NO: 42156 - RNA, 21 nt, synthetic construct
  source 1..21: mol_type = other RNA
aatgggcaccgcccagagccc

SEQ ID NO: 42157 - RNA, 21 nt, synthetic construct
  source 1..21: mol_type = other RNA
gcttccccaactggaccctgg

SEQ ID NO: 42158 - RNA, 21 nt, synthetic construct
  source 1..21: mol_type = other RNA
ccgggtcctctgctgcagtga

SEQ ID NO: 42159 - RNA, 21 nt, synthetic construct
  source 1..21: mol_type = other RNA
ccacggccaccccgacctcca

SEQ ID NO: 42160 - RNA, 21 nt, synthetic construct
  source 1..21: mol_type = other RNA
acccacggccaccatgtccac

SEQ ID NO: 42161 - RNA, 21 nt, synthetic construct
  source 1..21: mol_type = other RNA
ccacaactggggccaccggct

SEQ ID NO: 42162 - RNA, 21 nt, synthetic construct
  source 1..21: mol_type = other RNA
ggaacagctcacactaccaaa

SEQ ID NO: 42163 - RNA, 21 nt, synthetic construct
  source 1..21: mol_type = other RNA
aagtgccaactaccacaacca

SEQ ID NO: 42164 - RNA, 21 nt, synthetic construct
  source 1..21: mol_type = other RNA
gggaccacccacaccgccaca

SEQ ID NO: 42165 - RNA, 21 nt, synthetic construct
  source 1..21: mol_type = other RNA
tgctgaccaccaccgccacca

SEQ ID NO: 42166 - RNA, 21 nt, synthetic construct
  source 1..21: mol_type = other RNA
caccctagcagcagaaccacc

SEQ ID NO: 42167 - RNA, 21 nt, synthetic construct
  source 1..21: mol_type = other RNA
accctagcagcagaaccaccg

SEQ ID NO: 42168 - RNA, 21 nt, synthetic construct
  source 1..21: mol_type = other RNA
ctagcagcagaaccaccgagt

SEQ ID NO: 42169 - RNA, 21 nt, synthetic construct
  source 1..21: mol_type = other RNA
agtggctggactacagctacc

SEQ ID NO: 42170 - RNA, 21 nt, synthetic construct
  source 1..21: mol_type = other RNA
accccatgccggggccctctg

SEQ ID NO: 42171 - RNA, 21 nt, synthetic construct
  source 1..21: mol_type = other RNA
acccacggccaccatgtccac

SEQ ID NO: 42172 - RNA, 21 nt, synthetic construct
  source 1..21: mol_type = other RNA
cctccactccagagactgtcc

SEQ ID NO: 42173 - RNA, 21 nt, synthetic construct
  source 1..21: mol_type = other RNA
ggaacagctcacactaccaaa

SEQ ID NO: 42174 - RNA, 21 nt, synthetic construct
  source 1..21: mol_type = other RNA
cttccagtgtggatcagcaca

SEQ ID NO: 42175 - RNA, 21 nt, synthetic construct
  source 1..21: mol_type = other RNA
tgctgaccaccaccgccacca

SEQ ID NO: 42176 - RNA, 21 nt, synthetic construct
  source 1..21: mol_type = other RNA
acaccccagcagcaaccaccg

SEQ ID NO: 42177 - RNA, 21 nt, synthetic construct
  source 1..21: mol_type = other RNA
agtggctggactacagctacc

SEQ ID NO: 42178 - RNA, 21 nt, synthetic construct
  source 1..21: mol_type = other RNA
accccatgccggggccctctg

SEQ ID NO: 42179 - RNA, 21 nt, synthetic construct
  source 1..21: mol_type = other RNA
cgtcctccaccccgggaacag

SEQ ID NO: 42180 - RNA, 21 nt, synthetic construct
  source 1..21: mol_type = other RNA
acccacggccaccatgtccac

SEQ ID NO: 42181 - RNA, 21 nt, synthetic construct
  source 1..21: mol_type = other RNA
ggaacagctcacactaccaaa

SEQ ID NO: 42182 - RNA, 21 nt, synthetic construct
  source 1..21: mol_type = other RNA
gggaccacccacaccgccaca

SEQ ID NO: 42183 - RNA, 21 nt, synthetic construct
  source 1..21: mol_type = other RNA
cacagccaccggctccaccac

SEQ ID NO: 42184 - RNA, 21 nt, synthetic construct
  source 1..21: mol_type = other RNA
tgctgaccaccaccgccacca

SEQ ID NO: 42185 - RNA, 21 nt, synthetic construct
  source 1..21: mol_type = other RNA
acaccccagcagcaaccacca

SEQ ID NO: 42186 - RNA, 21 nt, synthetic construct
  source 1..21: mol_type = other RNA
agtggctggactacagctacc

SEQ ID NO: 42187 - RNA, 21 nt, synthetic construct
  source 1..21: mol_type = other RNA
accccatgccggggccctctg

SEQ ID NO: 42188 - RNA, 21 nt, synthetic construct
  source 1..21: mol_type = other RNA
acccacggccaccatgtccac

SEQ ID NO: 42189 - RNA, 21 nt, synthetic construct
  source 1..21: mol_type = other RNA
ggaacagctcacactaccaaa

SEQ ID NO: 42190 - RNA, 21 nt, synthetic construct
  source 1..21: mol_type = other RNA
tgctgaccaccaccgccacca

SEQ ID NO: 42191 - RNA, 21 nt, synthetic construct
  source 1..21: mol_type = other RNA
acaccccagcagcaaccaccg

SEQ ID NO: 42192 - RNA, 21 nt, synthetic construct
  source 1..21: mol_type = other RNA
agtggctggactacagctacc

SEQ ID NO: 42193 - RNA, 21 nt, synthetic construct
  source 1..21: mol_type = other RNA
accccatgccggggccctctg

SEQ ID NO: 42194 - RNA, 21 nt, synthetic construct
  source 1..21: mol_type = other RNA
cgtcctccaccccgggaacag

SEQ ID NO: 42195 - RNA, 21 nt, synthetic construct
  source 1..21: mol_type = other RNA
acccacggccaccatgtccac

SEQ ID NO: 42196 - RNA, 21 nt, synthetic construct
  source 1..21: mol_type = other RNA
cctccactccagagactgtcc

SEQ ID NO: 42197 - RNA, 21 nt, synthetic construct
  source 1..21: mol_type = other RNA
ggaacagctcacactaccaaa

SEQ ID NO: 42198 - RNA, 21 nt, synthetic construct
  source 1..21: mol_type = other RNA
ggggaagtcatctacaataag

SEQ ID NO: 42199 - RNA, 21 nt, synthetic construct
  source 1..21: mol_type = other RNA
gcctgcctgtgtgcccgccag

SEQ ID NO: 42200 - RNA, 21 nt, synthetic construct
  source 1..21: mol_type = other RNA
ctgtcccaccttccgctgcag

SEQ ID NO: 42201 - RNA, 21 nt, synthetic construct
  source 1..21: mol_type = other RNA
tccggagaccacccacacctc

SEQ ID NO: 42202 - RNA, 21 nt, synthetic construct
  source 1..21: mol_type = other RNA
tccggagaccacccacacctc

SEQ ID NO: 42203 - RNA, 21 nt, synthetic construct
  source 1..21: mol_type = other RNA
tgcccacaacgccaggctgac

SEQ ID NO: 42204 - RNA, 21 nt, synthetic construct
  source 1..21: mol_type = other RNA
cacaatccacccctcctccac

SEQ ID NO: 42205 - RNA, 21 nt, synthetic construct
  source 1..21: mol_type = other RNA
cacaatccacccctcctccac

SEQ ID NO: 42206 - RNA, 21 nt, synthetic construct
  source 1..21: mol_type = other RNA
gcctgtgcgacctcacctgcc

SEQ ID NO: 42207 - RNA, 21 nt, synthetic construct
  source 1..21: mol_type = other RNA
acgtccggccgctggggcaga

SEQ ID NO: 42208 - RNA, 21 nt, synthetic construct
  source 1..21: mol_type = other RNA
acgtcctcgcccacccggcgc

SEQ ID NO: 42209 - RNA, 21 nt, synthetic construct
  source 1..21: mol_type = other RNA
tcatcgtggtgcagacaggcc

SEQ ID NO: 42210 - RNA, 21 nt, synthetic construct
  source 1..21: mol_type = other RNA
ccactgcctccacggttccca

SEQ ID NO: 42211 - RNA, 21 nt, synthetic construct
  source 1..21: mol_type = other RNA
tggtgccgcaggcagagaccc

SEQ ID NO: 42212 - RNA, 21 nt, synthetic construct
  source 1..21: mol_type = other RNA
ccggccccagaagggtgaggg

SEQ ID NO: 42213 - RNA, 21 nt, synthetic construct
  source 1..21: mol_type = other RNA
gacatcacgcactctggctgc

SEQ ID NO: 42214 - RNA, 21 nt, synthetic construct
  source 1..21: mol_type = other RNA
cctggagaggtggtgcacgac

SEQ ID NO: 42215 - RNA, 21 nt, synthetic construct
  source 1..21: mol_type = other RNA
taccacaaccacgggcttcac

SEQ ID NO: 42216 - RNA, 21 nt, synthetic construct
  source 1..21: mol_type = other RNA
taccacaaccacgggcttcac

SEQ ID NO: 42217 - RNA, 21 nt, synthetic construct
  source 1..21: mol_type = other RNA
taccacaaccacgggcttcac

SEQ ID NO: 42218 - RNA, 21 nt, synthetic construct
  source 1..21: mol_type = other RNA
taccacaaccacgggcttcac

SEQ ID NO: 42219 - RNA, 21 nt, synthetic construct
  source 1..21: mol_type = other RNA
taccacaaccacgggcttcac

SEQ ID NO: 42220 - RNA, 21 nt, synthetic construct
  source 1..21: mol_type = other RNA
gccactgcctccacggttccc

SEQ ID NO: 42221 - RNA, 21 nt, synthetic construct
  source 1..21: mol_type = other RNA
gtacaatgggcaccgcccaga

SEQ ID NO: 42222 - RNA, 21 nt, synthetic construct
  source 1..21: mol_type = other RNA
gggaccggaagaccagcgtgt

SEQ ID NO: 42223 - RNA, 21 nt, synthetic construct
  source 1..21: mol_type = other RNA
gctgaccagggctcccccggc

SEQ ID NO: 42224 - RNA, 21 nt, synthetic construct
  source 1..21: mol_type = other RNA
tggacccaaagcctgtggcca

SEQ ID NO: 42225 - RNA, 21 nt, synthetic construct
  source 1..21: mol_type = other RNA
ccctgtgctggctgacatcga

SEQ ID NO: 42226 - RNA, 21 nt, synthetic construct
  source 1..21: mol_type = other RNA
accccaacccagaccacagca

SEQ ID NO: 42227 - RNA, 21 nt, synthetic construct
  source 1..21: mol_type = other RNA
ggcggccctcacctcgcagac

SEQ ID NO: 42228 - RNA, 21 nt, synthetic construct
  source 1..21: mol_type = other RNA
tccgggtcctctgctgcagtg

SEQ ID NO: 42229 - RNA, 21 nt, synthetic construct
  source 1..21: mol_type = other RNA
ttgggaccaccgggaccctcc

SEQ ID NO: 42230 - RNA, 21 nt, synthetic construct
  source 1..21: mol_type = other RNA
ttgggaccaccgggaccctcc

SEQ ID NO: 42231 - RNA, 21 nt, synthetic construct
  source 1..21: mol_type = other RNA
caagcccctgccctgtgacgc

SEQ ID NO: 42232 - RNA, 21 nt, synthetic construct
  source 1..21: mol_type = other RNA
gcaaggcggccgcctgtccat

SEQ ID NO: 42233 - RNA, 21 nt, synthetic construct
  source 1..21: mol_type = other RNA
agcagccccacatcggcccca

SEQ ID NO: 42234 - RNA, 21 nt, synthetic construct
  source 1..21: mol_type = other RNA
ggaccaccgggaccctcccag

SEQ ID NO: 42235 - RNA, 21 nt, synthetic construct
  source 1..21: mol_type = other RNA
ggaccaccgggaccctcccag

SEQ ID NO: 42236 - RNA, 21 nt, synthetic construct
  source 1..21: mol_type = other RNA
ttcccgacatgccgctggagg

SEQ ID NO: 42237 - RNA, 21 nt, synthetic construct
  source 1..21: mol_type = other RNA
acggtgacttcccacacccta

SEQ ID NO: 42238 - RNA, 21 nt, synthetic construct
  source 1..21: mol_type = other RNA
gatccacggccaccccgacct

SEQ ID NO: 42239 - RNA, 21 nt, synthetic construct
  source 1..21: mol_type = other RNA
ccccagtgccgaacaccatgg

SEQ ID NO: 42240 - RNA, 21 nt, synthetic construct
  source 1..21: mol_type = other RNA
ttccacggtgacttcccacac

SEQ ID NO: 42241 - RNA, 21 nt, synthetic construct
  source 1..21: mol_type = other RNA
cacggccacacccagcaagac

SEQ ID NO: 42242 - RNA, 21 nt, synthetic construct
  source 1..21: mol_type = other RNA
cacggccacacccagcaagac

SEQ ID NO: 42243 - RNA, 21 nt, synthetic construct
  source 1..21: mol_type = other RNA
ttccacggtgacttcccacac

SEQ ID NO: 42244 - RNA, 21 nt, synthetic construct
  source 1..21: mol_type = other RNA
cacggccacacccagcaagac

SEQ ID NO: 42245 - RNA, 21 nt, synthetic construct
  source 1..21: mol_type = other RNA
cacacccccaaagtggtgacc

SEQ ID NO: 42246 - RNA, 21 nt, synthetic construct
  source 1..21: mol_type = other RNA
ttgggcctcctctgcggagcc

SEQ ID NO: 42247 - RNA, 21 nt, synthetic construct
  source 1..21: mol_type = other RNA
gcacctcgaccctgctgccca

SEQ ID NO: 42248 - RNA, 21 nt, synthetic construct
  source 1..21: mol_type = other RNA
gcacctcgaccctgctgccca

SEQ ID NO: 42249 - RNA, 21 nt, synthetic construct
  source 1..21: mol_type = other RNA
gcacctcgaccctgctgccca

SEQ ID NO: 42250 - RNA, 21 nt, synthetic construct
  source 1..21: mol_type = other RNA
gcacctcgaccctgctgccca

SEQ ID NO: 42251 - RNA, 21 nt, synthetic construct
  source 1..21: mol_type = other RNA
ggtgtcggatgggagtggggg

SEQ ID NO: 42252 - RNA, 21 nt, synthetic construct
  source 1..21: mol_type = other RNA
ccccctcaacatgcagcacca

SEQ ID NO: 42253 - RNA, 21 nt, synthetic construct
  source 1..21: mol_type = other RNA
cggggggctatggcagtgcca

SEQ ID NO: 42254 - RNA, 21 nt, synthetic construct
  source 1..21: mol_type = other RNA
acacccacaaccagtggctcc

SEQ ID NO: 42255 - RNA, 21 nt, synthetic construct
  source 1..21: mol_type = other RNA
acacccacaaccagtggctcc

SEQ ID NO: 42256 - RNA, 21 nt, synthetic construct
  source 1..21: mol_type = other RNA
ccgtccccgtccccccacccg

SEQ ID NO: 42257 - RNA, 21 nt, synthetic construct
  source 1..21: mol_type = other RNA
accctgcacggacacctgctc

SEQ ID NO: 42258 - RNA, 21 nt, synthetic construct
  source 1..21: mol_type = other RNA
acggacacctgctccaacccc

SEQ ID NO: 42259 - RNA, 21 nt, synthetic construct
  source 1..21: mol_type = other RNA
cgacctgcatggtgactgcag

SEQ ID NO: 42260 - RNA, 21 nt, synthetic construct
  source 1..21: mol_type = other RNA
aacgagaactgcctgaaagcg

SEQ ID NO: 42261 - RNA, 21 nt, synthetic construct
  source 1..21: mol_type = other RNA
tcagcggggtggtggaggcca

SEQ ID NO: 42262 - RNA, 21 nt, synthetic construct
  source 1..21: mol_type = other RNA
tacaacccacatgggggctgt

SEQ ID NO: 42263 - RNA, 21 nt, synthetic construct
  source 1..21: mol_type = other RNA
ggcaccatcatcaggaaggct

SEQ ID NO: 42264 - RNA, 21 nt, synthetic construct
  source 1..21: mol_type = other RNA
ctcagccctccctcagtgcca

SEQ ID NO: 42265 - RNA, 21 nt, synthetic construct
  source 1..21: mol_type = other RNA
tgtgcctaccccaacccagac

SEQ ID NO: 42266 - RNA, 21 nt, synthetic construct
  source 1..21: mol_type = other RNA
gccccaacaacaatggcaacc

SEQ ID NO: 42267 - RNA, 21 nt, synthetic construct
  source 1..21: mol_type = other RNA
ccccaacaacaatggcaacct

SEQ ID NO: 42268 - RNA, 21 nt, synthetic construct
  source 1..21: mol_type = other RNA
caacaatggcaacctccagag

SEQ ID NO: 42269 - RNA, 21 nt, synthetic construct
  source 1..21: mol_type = other RNA
tccacggccaccccgacctcc

SEQ ID NO: 42270 - RNA, 21 nt, synthetic construct
  source 1..21: mol_type = other RNA
cagcacaaccaccacacccac

SEQ ID NO: 42271 - RNA, 21 nt, synthetic construct
  source 1..21: mol_type = other RNA
accaccacaactgtggccact

SEQ ID NO: 42272 - RNA, 21 nt, synthetic construct
  source 1..21: mol_type = other RNA
ctgggacaactcccatccccc

SEQ ID NO: 42273 - RNA, 21 nt, synthetic construct
  source 1..21: mol_type = other RNA
cttccacggtgacttcccaca

SEQ ID NO: 42274 - RNA, 21 nt, synthetic construct
  source 1..21: mol_type = other RNA
tccgtgcggccggaggggccg

SEQ ID NO: 42275 - RNA, 21 nt, synthetic construct
  source 1..21: mol_type = other RNA
cagcacaaccaccacacccac

SEQ ID NO: 42276 - RNA, 21 nt, synthetic construct
  source 1..21: mol_type = other RNA
accaccacaactgtggccact

SEQ ID NO: 42277 - RNA, 21 nt, synthetic construct
  source 1..21: mol_type = other RNA
tccgtgcggccggaggggccg

SEQ ID NO: 42278 - RNA, 21 nt, synthetic construct
  source 1..21: mol_type = other RNA
ccgggaacagctccccctccc

SEQ ID NO: 42279 - RNA, 21 nt, synthetic construct
  source 1..21: mol_type = other RNA
cagcacaaccaccacacccac

SEQ ID NO: 42280 - RNA, 21 nt, synthetic construct
  source 1..21: mol_type = other RNA
accaccacaactgtggccact

SEQ ID NO: 42281 - RNA, 21 nt, synthetic construct
  source 1..21: mol_type = other RNA
cttccacggtgacttcccaca

SEQ ID NO: 42282 - RNA, 21 nt, synthetic construct
  source 1..21: mol_type = other RNA
cagcacaaccaccacacccac

SEQ ID NO: 42283 - RNA, 21 nt, synthetic construct
  source 1..21: mol_type = other RNA
acccacaaccagtggctccac

SEQ ID NO: 42284 - RNA, 21 nt, synthetic construct
  source 1..21: mol_type = other RNA
accaccacaactgtggccact

SEQ ID NO: 42285 - RNA, 21 nt, synthetic construct
  source 1..21: mol_type = other RNA
tcccccatcactgatcaccac

SEQ ID NO: 42286 - RNA, 21 nt, synthetic construct
  source 1..21: mol_type = other RNA
tccgtgcggccggaggggccg

SEQ ID NO: 42287 - RNA, 21 nt, synthetic construct
  source 1..21: mol_type = other RNA
ccgggaacagctccccctccc

SEQ ID NO: 42288 - RNA, 21 nt, synthetic construct
  source 1..21: mol_type = other RNA
gggccaccagttccacgtcca

SEQ ID NO: 42289 - RNA, 21 nt, synthetic construct
  source 1..21: mol_type = other RNA
gactgcaactgcccttccagc

SEQ ID NO: 42290 - RNA, 21 nt, synthetic construct
  source 1..21: mol_type = other RNA
cagcacaaccaccacacccac

SEQ ID NO: 42291 - RNA, 21 nt, synthetic construct
  source 1..21: mol_type = other RNA
acccacaaccagtggctccac

SEQ ID NO: 42292 - RNA, 21 nt, synthetic construct
  source 1..21: mol_type = other RNA
accaccacaactgtggccact

SEQ ID NO: 42293 - RNA, 21 nt, synthetic construct
  source 1..21: mol_type = other RNA
ggacccgagccagccctgtga

SEQ ID NO: 42294 - RNA, 21 nt, synthetic construct
  source 1..21: mol_type = other RNA
cccccgcgccctcagcatcca

SEQ ID NO: 42295 - RNA, 21 nt, synthetic construct
  source 1..21: mol_type = other RNA
aagacgtggctggtccccgac

SEQ ID NO: 42296 - RNA, 21 nt, synthetic construct
  source 1..21: mol_type = other RNA
cagagctctgccgcgcccggg

SEQ ID NO: 42297 - RNA, 21 nt, synthetic construct
  source 1..21: mol_type = other RNA
cccacagctggaggggatggc

SEQ ID NO: 42298 - RNA, 21 nt, synthetic construct
  source 1..21: mol_type = other RNA
gcctgcccctgcgtgggaccc

SEQ ID NO: 42299 - RNA, 21 nt, synthetic construct
  source 1..21: mol_type = other RNA
aggagtccatctgcacccagg

SEQ ID NO: 42300 - RNA, 21 nt, synthetic construct
  source 1..21: mol_type = other RNA
agaggcgggtccacgaggaga

SEQ ID NO: 42301 - RNA, 21 nt, synthetic construct
  source 1..21: mol_type = other RNA
ccgtgctcctgctgcccaccc

SEQ ID NO: 42302 - RNA, 21 nt, synthetic construct
  source 1..21: mol_type = other RNA
cgacaggcaaggcggccgcct

SEQ ID NO: 42303 - RNA, 21 nt, synthetic construct
  source 1..21: mol_type = other RNA
caggcaaggcggccgcctgtc

SEQ ID NO: 42304 - RNA, 21 nt, synthetic construct
  source 1..21: mol_type = other RNA
aggcggccgcctgtccatgcc

SEQ ID NO: 42305 - RNA, 21 nt, synthetic construct
  source 1..21: mol_type = other RNA
ataaccacggtggtgaccacg

SEQ ID NO: 42306 - RNA, 21 nt, synthetic construct
  source 1..21: mol_type = other RNA
ataaccacggtggtgaccacg

SEQ ID NO: 42307 - RNA, 21 nt, synthetic construct
  source 1..21: mol_type = other RNA
ctggccgcctgcgcccaggac

SEQ ID NO: 42308 - RNA, 21 nt, synthetic construct
  source 1..21: mol_type = other RNA
atcctcacagagccgagcact

SEQ ID NO: 42309 - RNA, 21 nt, synthetic construct
  source 1..21: mol_type = other RNA
atcctcacagagccgagcact

SEQ ID NO: 42310 - RNA, 21 nt, synthetic construct
  source 1..21: mol_type = other RNA
atcctcacagagccgagcact

SEQ ID NO: 42311 - RNA, 21 nt, synthetic construct
  source 1..21: mol_type = other RNA
cacccatgtccaccatgtcca

SEQ ID NO: 42312 - RNA, 21 nt, synthetic construct
  source 1..21: mol_type = other RNA
atcctcacagagccgagcact

SEQ ID NO: 42313 - RNA, 21 nt, synthetic construct
  source 1..21: mol_type = other RNA
actgcctccacggttcccagc

SEQ ID NO: 42314 - RNA, 21 nt, synthetic construct
  source 1..21: mol_type = other RNA
ctcctccactccggagaccac

SEQ ID NO: 42315 - RNA, 21 nt, synthetic construct
  source 1..21: mol_type = other RNA
cagcctggtgtccccctgggg

SEQ ID NO: 42316 - RNA, 21 nt, synthetic construct
  source 1..21: mol_type = other RNA
ctcctccactccggagaccac

SEQ ID NO: 42317 - RNA, 21 nt, synthetic construct
  source 1..21: mol_type = other RNA
caaccacgggcttcacagcca

SEQ ID NO: 42318 - RNA, 21 nt, synthetic construct
  source 1..21: mol_type = other RNA
caaccacgggcttcacagcca

SEQ ID NO: 42319 - RNA, 21 nt, synthetic construct
  source 1..21: mol_type = other RNA
caaccacgggcttcacagcca

SEQ ID NO: 42320 - RNA, 21 nt, synthetic construct
  source 1..21: mol_type = other RNA
caaccacgggcttcacagcca

SEQ ID NO: 42321 - RNA, 21 nt, synthetic construct
  source 1..21: mol_type = other RNA
ggaggccacgggcgcagcctt

SEQ ID NO: 42322 - RNA, 21 nt, synthetic construct
  source 1..21: mol_type = other RNA
cagccaccagctccaaagcca

SEQ ID NO: 42323 - RNA, 21 nt, synthetic construct
  source 1..21: mol_type = other RNA
ccacgggatggccgtgtcctg

SEQ ID NO: 42324 - RNA, 21 nt, synthetic construct
  source 1..21: mol_type = other RNA
cctatccccccagtgctgacc

SEQ ID NO: 42325 - RNA, 21 nt, synthetic construct
  source 1..21: mol_type = other RNA
cctatccccccagtgctgacc

SEQ ID NO: 42326 - RNA, 21 nt, synthetic construct
  source 1..21: mol_type = other RNA
aaagagccgctgaccacgagc

SEQ ID NO: 42327 - RNA, 21 nt, synthetic construct
  source 1..21: mol_type = other RNA
aaccagaggctccacggtgac

SEQ ID NO: 42328 - RNA, 21 nt, synthetic construct
  source 1..21: mol_type = other RNA
aaccagaggctccacggtgac

SEQ ID NO: 42329 - RNA, 21 nt, synthetic construct
  source 1..21: mol_type = other RNA
cccctcctccgtcccggggac

SEQ ID NO: 42330 - RNA, 21 nt, synthetic construct
  source 1..21: mol_type = other RNA
tctactccagagaccacccac

SEQ ID NO: 42331 - RNA, 21 nt, synthetic construct
  source 1..21: mol_type = other RNA
cactctgggaacagctcacac

SEQ ID NO: 42332 - RNA, 21 nt, synthetic construct
  source 1..21: mol_type = other RNA
ccctgagacccactggcttcc

SEQ ID NO: 42333 - RNA, 21 nt, synthetic construct
  source 1..21: mol_type = other RNA
cctcactgtcaccatggtgca

SEQ ID NO: 42334 - RNA, 21 nt, synthetic construct
  source 1..21: mol_type = other RNA
tgaaacctgggtcaacagcca

SEQ ID NO: 42335 - RNA, 21 nt, synthetic construct
  source 1..21: mol_type = other RNA
gacgccctggaacaaactaag

SEQ ID NO: 42336 - RNA, 21 nt, synthetic construct
  source 1..21: mol_type = other RNA
ccgtgtacctctgtgaggctg

SEQ ID NO: 42337 - RNA, 21 nt, synthetic construct
  source 1..21: mol_type = other RNA
ctaccagctttacacccatcc

SEQ ID NO: 42338 - RNA, 21 nt, synthetic construct
  source 1..21: mol_type = other RNA
ctaccagctttacacccatcc

SEQ ID NO: 42339 - RNA, 21 nt, synthetic construct
  source 1..21: mol_type = other RNA
gtgccccgagcgcgtgccgga

SEQ ID NO: 42340 - RNA, 21 nt, synthetic construct
  source 1..21: mol_type = other RNA
cacaacgccaggctgaccccg

SEQ ID NO: 42341 - RNA, 21 nt, synthetic construct
  source 1..21: mol_type = other RNA
acaacgccaggctgaccccgc

SEQ ID NO: 42342 - RNA, 21 nt, synthetic construct
  source 1..21: mol_type = other RNA
gccaatgccaggaacagcttt

SEQ ID NO: 42343 - RNA, 21 nt, synthetic construct
  source 1..21: mol_type = other RNA
gtgtgcagcccccatggtgta

SEQ ID NO: 42344 - RNA, 21 nt, synthetic construct
  source 1..21: mol_type = other RNA
cgaggaggactgcccctgtgt

SEQ ID NO: 42345 - RNA, 21 nt, synthetic construct
  source 1..21: mol_type = other RNA
gaggaggactgcccctgtgtg

SEQ ID NO: 42346 - RNA, 21 nt, synthetic construct
  source 1..21: mol_type = other RNA
cccgaagtgcccacccagcca

SEQ ID NO: 42347 - RNA, 21 nt, synthetic construct
  source 1..21: mol_type = other RNA
ctgcacacccagtggcatcca

SEQ ID NO: 42348 - RNA, 21 nt, synthetic construct
  source 1..21: mol_type = other RNA
gtagcccggggctgaccaggg

SEQ ID NO: 42349 - RNA, 21 nt, synthetic construct
  source 1..21: mol_type = other RNA
gctcagcccttccagggacga

SEQ ID NO: 42350 - RNA, 21 nt, synthetic construct
  source 1..21: mol_type = other RNA
cactgagaagcacagccacca

SEQ ID NO: 42351 - RNA, 21 nt, synthetic construct
  source 1..21: mol_type = other RNA
ccatcactgaccaccacggcc

SEQ ID NO: 42352 - RNA, 21 nt, synthetic construct
  source 1..21: mol_type = other RNA
atcactgaccaccacggccac

SEQ ID NO: 42353 - RNA, 21 nt, synthetic construct
  source 1..21: mol_type = other RNA
atcacggccaccggctccacc

SEQ ID NO: 42354 - RNA, 21 nt, synthetic construct
  source 1..21: mol_type = other RNA
gtgagcaccacggccacgaca

SEQ ID NO: 42355 - RNA, 21 nt, synthetic construct
  source 1..21: mol_type = other RNA
cactgagaagcacagccacca

SEQ ID NO: 42356 - RNA, 21 nt, synthetic construct
  source 1..21: mol_type = other RNA
ccatcactgaccaccacggcc

SEQ ID NO: 42357 - RNA, 21 nt, synthetic construct
  source 1..21: mol_type = other RNA
atcactgaccaccacggccac

SEQ ID NO: 42358 - RNA, 21 nt, synthetic construct
  source 1..21: mol_type = other RNA
atcacggccaccggctccacc

SEQ ID NO: 42359 - RNA, 21 nt, synthetic construct
  source 1..21: mol_type = other RNA
cactgagaagcacagccacca

SEQ ID NO: 42360 - RNA, 21 nt, synthetic construct
  source 1..21: mol_type = other RNA
ccatcactgaccaccacggcc

SEQ ID NO: 42361 - RNA, 21 nt, synthetic construct
  source 1..21: mol_type = other RNA
atcactgaccaccacggccac

SEQ ID NO: 42362 - RNA, 21 nt, synthetic construct
  source 1..21: mol_type = other RNA
gcaaccaccagtaccacccag

SEQ ID NO: 42363 - RNA, 21 nt, synthetic construct
  source 1..21: mol_type = other RNA
gtgagcaccacggccacgaca

SEQ ID NO: 42364 - RNA, 21 nt, synthetic construct
  source 1..21: mol_type = other RNA
cactgagaagcacagccacca

SEQ ID NO: 42365 - RNA, 21 nt, synthetic construct
  source 1..21: mol_type = other RNA
atcacggccaccggctccacc

SEQ ID NO: 42366 - RNA, 21 nt, synthetic construct
  source 1..21: mol_type = other RNA
gtgagcaccacggccacgaca

SEQ ID NO: 42367 - RNA, 21 nt, synthetic construct
  source 1..21: mol_type = other RNA
aactgcccttccagcactgag

SEQ ID NO: 42368 - RNA, 21 nt, synthetic construct
  source 1..21: mol_type = other RNA
cactgagaagcacagccacca

SEQ ID NO: 42369 - RNA, 21 nt, synthetic construct
  source 1..21: mol_type = other RNA
ccatcactgaccaccacggcc

SEQ ID NO: 42370 - RNA, 21 nt, synthetic construct
  source 1..21: mol_type = other RNA
atcactgaccaccacggccac

SEQ ID NO: 42371 - RNA, 21 nt, synthetic construct
  source 1..21: mol_type = other RNA
atcacggccaccggctccacc

SEQ ID NO: 42372 - RNA, 21 nt, synthetic construct
  source 1..21: mol_type = other RNA
agcacagccacaaaatccaca

SEQ ID NO: 42373 - RNA, 21 nt, synthetic construct
  source 1..21: mol_type = other RNA
cagggcgcctgtcccacctcc

SEQ ID NO: 42374 - RNA, 21 nt, synthetic construct
  source 1..21: mol_type = other RNA
gcatgtggggcggctcccact

SEQ ID NO: 42375 - RNA, 21 nt, synthetic construct
  source 1..21: mol_type = other RNA
ggatggcggagggctgcttct

SEQ ID NO: 42376 - RNA, 21 nt, synthetic construct
  source 1..21: mol_type = other RNA
ccgtggcttcccggcccagga

SEQ ID NO: 42377 - RNA, 21 nt, synthetic construct
  source 1..21: mol_type = other RNA
ggtgtacctggactgcagcaa

SEQ ID NO: 42378 - RNA, 21 nt, synthetic construct
  source 1..21: mol_type = other RNA
cgggtggcgactgcgagtgtt

SEQ ID NO: 42379 - RNA, 21 nt, synthetic construct
  source 1..21: mol_type = other RNA
gagactttgagacgtttgaaa

SEQ ID NO: 42380 - RNA, 21 nt, synthetic construct
  source 1..21: mol_type = other RNA
ccagatacacaagcacccttg

SEQ ID NO: 42381 - RNA, 21 nt, synthetic construct
  source 1..21: mol_type = other RNA
cacagagccttccacggggac

SEQ ID NO: 42382 - RNA, 21 nt, synthetic construct
  source 1..21: mol_type = other RNA
cacagagccttccacggggac

SEQ ID NO: 42383 - RNA, 21 nt, synthetic construct
  source 1..21: mol_type = other RNA
acatgggcatctgcgtgcagg

SEQ ID NO: 42384 - RNA, 21 nt, synthetic construct
  source 1..21: mol_type = other RNA
ggaccacccacaccgccagag

SEQ ID NO: 42385 - RNA, 21 nt, synthetic construct
  source 1..21: mol_type = other RNA
ataaccacggtggtgaccatg

SEQ ID NO: 42386 - RNA, 21 nt, synthetic construct
  source 1..21: mol_type = other RNA
ataaccacggtggtgaccatg

SEQ ID NO: 42387 - RNA, 21 nt, synthetic construct
  source 1..21: mol_type = other RNA
acgcggggggccagccgcgga

SEQ ID NO: 42388 - RNA, 21 nt, synthetic construct
  source 1..21: mol_type = other RNA
tgctgtgcctaccccaaccca

SEQ ID NO: 42389 - RNA, 21 nt, synthetic construct
  source 1..21: mol_type = other RNA
gaccagggctcccccggccag

SEQ ID NO: 42390 - RNA, 21 nt, synthetic construct
  source 1..21: mol_type = other RNA
gtgacaatgccatccctctcc

SEQ ID NO: 42391 - RNA, 21 nt, synthetic construct
  source 1..21: mol_type = other RNA
caggggccgccttgaggtgcc

SEQ ID NO: 42392 - RNA, 21 nt, synthetic construct
  source 1..21: mol_type = other RNA
cacacctacacccacgtggat

SEQ ID NO: 42393 - RNA, 21 nt, synthetic construct
  source 1..21: mol_type = other RNA
caattccacggccacaccctc

SEQ ID NO: 42394 - RNA, 21 nt, synthetic construct
  source 1..21: mol_type = other RNA
gggtgacttccactacaagac

SEQ ID NO: 42395 - RNA, 21 nt, synthetic construct
  source 1..21: mol_type = other RNA
tgctggaggcgtccaacggct

SEQ ID NO: 42396 - RNA, 21 nt, synthetic construct
  source 1..21: mol_type = other RNA
tcaccctgcacggacacctgc

SEQ ID NO: 42397 - RNA, 21 nt, synthetic construct
  source 1..21: mol_type = other RNA
gggcacctccttcaacaccac

SEQ ID NO: 42398 - RNA, 21 nt, synthetic construct
  source 1..21: mol_type = other RNA
ccgcccaggagtgcccctgct

SEQ ID NO: 42399 - RNA, 21 nt, synthetic construct
  source 1..21: mol_type = other RNA
aggaggactgcccctgtgtgc

SEQ ID NO: 42400 - RNA, 21 nt, synthetic construct
  source 1..21: mol_type = other RNA
acaacccacatgggggctgtg

SEQ ID NO: 42401 - RNA, 21 nt, synthetic construct
  source 1..21: mol_type = other RNA
ggctgctacccgaagtgccca

SEQ ID NO: 42402 - RNA, 21 nt, synthetic construct
  source 1..21: mol_type = other RNA
acacccagtggcatccagtgc

SEQ ID NO: 42403 - RNA, 21 nt, synthetic construct
  source 1..21: mol_type = other RNA
caccaacccctcctcaactcc

SEQ ID NO: 42404 - RNA, 21 nt, synthetic construct
  source 1..21: mol_type = other RNA
tgccgaacaccatggccacca

SEQ ID NO: 42405 - RNA, 21 nt, synthetic construct
  source 1..21: mol_type = other RNA
caccaacccctcctcaactcc

SEQ ID NO: 42406 - RNA, 21 nt, synthetic construct
  source 1..21: mol_type = other RNA
ggccccacggccaccccgtcc

SEQ ID NO: 42407 - RNA, 21 nt, synthetic construct
  source 1..21: mol_type = other RNA
caccaacccctcctcaactcc

SEQ ID NO: 42408 - RNA, 21 nt, synthetic construct
  source 1..21: mol_type = other RNA
accagtaccacccagcactcg

SEQ ID NO: 42409 - RNA, 21 nt, synthetic construct
  source 1..21: mol_type = other RNA
cggccaccacaaccagggcca

SEQ ID NO: 42410 - RNA, 21 nt, synthetic construct
  source 1..21: mol_type = other RNA
ctgatcaccacggccactacg

SEQ ID NO: 42411 - RNA, 21 nt, synthetic construct
  source 1..21: mol_type = other RNA
caccaacccctcctcaactcc

SEQ ID NO: 42412 - RNA, 21 nt, synthetic construct
  source 1..21: mol_type = other RNA
ggccccacggccaccccgtcc

SEQ ID NO: 42413 - RNA, 21 nt, synthetic construct
  source 1..21: mol_type = other RNA
caccaacccctcctcaactcc

SEQ ID NO: 42414 - RNA, 21 nt, synthetic construct
  source 1..21: mol_type = other RNA
tccgccccgctgtcctcgccc

SEQ ID NO: 42415 - RNA, 21 nt, synthetic construct
  source 1..21: mol_type = other RNA
ccccgggccgagaacccctgc

SEQ ID NO: 42416 - RNA, 21 nt, synthetic construct
  source 1..21: mol_type = other RNA
cgtgggtgaaaccggccccag

SEQ ID NO: 42417 - RNA, 21 nt, synthetic construct
  source 1..21: mol_type = other RNA
ggtgacgctcagcctggacgg

SEQ ID NO: 42418 - RNA, 21 nt, synthetic construct
  source 1..21: mol_type = other RNA
ggaccacccacaccgccacag

SEQ ID NO: 42419 - RNA, 21 nt, synthetic construct
  source 1..21: mol_type = other RNA
ggaccacccacaccgccacag

SEQ ID NO: 42420 - RNA, 21 nt, synthetic construct
  source 1..21: mol_type = other RNA
tcctccgtcccggggaccacc

SEQ ID NO: 42421 - RNA, 21 nt, synthetic construct
  source 1..21: mol_type = other RNA
aggactactgtggggacaaca

SEQ ID NO: 42422 - RNA, 21 nt, synthetic construct
  source 1..21: mol_type = other RNA
tacgagctgatcctccaagag

SEQ ID NO: 42423 - RNA, 21 nt, synthetic construct
  source 1..21: mol_type = other RNA
catcccggggaccacccacac

SEQ ID NO: 42424 - RNA, 21 nt, synthetic construct
  source 1..21: mol_type = other RNA
ccgccacagtgctgaccacca

SEQ ID NO: 42425 - RNA, 21 nt, synthetic construct
  source 1..21: mol_type = other RNA
catcccggggaccacccacac

SEQ ID NO: 42426 - RNA, 21 nt, synthetic construct
  source 1..21: mol_type = other RNA
agaccacccacacctccacag

SEQ ID NO: 42427 - RNA, 21 nt, synthetic construct
  source 1..21: mol_type = other RNA
catcccggggaccacccacac

SEQ ID NO: 42428 - RNA, 21 nt, synthetic construct
  source 1..21: mol_type = other RNA
ccgccacagtgctgaccacca

SEQ ID NO: 42429 - RNA, 21 nt, synthetic construct
  source 1..21: mol_type = other RNA
agaccacccacacctccacag

SEQ ID NO: 42430 - RNA, 21 nt, synthetic construct
  source 1..21: mol_type = other RNA
catcccggggaccacccacac

SEQ ID NO: 42431 - RNA, 21 nt, synthetic construct
  source 1..21: mol_type = other RNA
agaccacccacacctccacag

SEQ ID NO: 42432 - RNA, 21 nt, synthetic construct
  source 1..21: mol_type = other RNA
cccccacccgtgccagccccc

SEQ ID NO: 42433 - RNA, 21 nt, synthetic construct
  source 1..21: mol_type = other RNA
ccaggatgggtgccccgagcg

SEQ ID NO: 42434 - RNA, 21 nt, synthetic construct
  source 1..21: mol_type = other RNA
ttggctctggcggccatgctc

SEQ ID NO: 42435 - RNA, 21 nt, synthetic construct
  source 1..21: mol_type = other RNA
ccgcttccctggcctttgcaa

SEQ ID NO: 42436 - RNA, 21 nt, synthetic construct
  source 1..21: mol_type = other RNA
ccgtcctcatcaatgggcagc

SEQ ID NO: 42437 - RNA, 21 nt, synthetic construct
  source 1..21: mol_type = other RNA
cagacctgtggcctgtgtggg

SEQ ID NO: 42438 - RNA, 21 nt, synthetic construct
  source 1..21: mol_type = other RNA
agacctgtggcctgtgtgggg

SEQ ID NO: 42439 - RNA, 21 nt, synthetic construct
  source 1..21: mol_type = other RNA
cctgtgtggggacttcaacgg

SEQ ID NO: 42440 - RNA, 21 nt, synthetic construct
  source 1..21: mol_type = other RNA
cggacccgctgcccttgccgg

SEQ ID NO: 42441 - RNA, 21 nt, synthetic construct
  source 1..21: mol_type = other RNA
ggagggcatctgccaccgcac

SEQ ID NO: 42442 - RNA, 21 nt, synthetic construct
  source 1..21: mol_type = other RNA
gccccacctgcccgtgtgcca

SEQ ID NO: 42443 - RNA, 21 nt, synthetic construct
  source 1..21: mol_type = other RNA
gcagcaccaggagtgtggctc

SEQ ID NO: 42444 - RNA, 21 nt, synthetic construct
  source 1..21: mol_type = other RNA
gcgcgcgcagctctgcgagga

SEQ ID NO: 42445 - RNA, 21 nt, synthetic construct
  source 1..21: mol_type = other RNA
gaggccacgggcgcagccttc

SEQ ID NO: 42446 - RNA, 21 nt, synthetic construct
  source 1..21: mol_type = other RNA
cttccactcgaactgcatgtt

SEQ ID NO: 42447 - RNA, 21 nt, synthetic construct
  source 1..21: mol_type = other RNA
gctgcacctgccccgcgggca

SEQ ID NO: 42448 - RNA, 21 nt, synthetic construct
  source 1..21: mol_type = other RNA
ctccccctcctgcccggacgc

SEQ ID NO: 42449 - RNA, 21 nt, synthetic construct
  source 1..21: mol_type = other RNA
tacccgaagtgcccacccagc

SEQ ID NO: 42450 - RNA, 21 nt, synthetic construct
  source 1..21: mol_type = other RNA
ccgaagtgcccacccagccag

SEQ ID NO: 42451 - RNA, 21 nt, synthetic construct
  source 1..21: mol_type = other RNA
gtggcatgtcctggaactcca

SEQ ID NO: 42452 - RNA, 21 nt, synthetic construct
  source 1..21: mol_type = other RNA
cttcaccaccgcctgggtccc

SEQ ID NO: 42453 - RNA, 21 nt, synthetic construct
  source 1..21: mol_type = other RNA
caccgcccagagcccggcctg

SEQ ID NO: 42454 - RNA, 21 nt, synthetic construct
  source 1..21: mol_type = other RNA
gcatgcgggggctgatgtgcg

SEQ ID NO: 42455 - RNA, 21 nt, synthetic construct
  source 1..21: mol_type = other RNA
tgcgccaacagccaacagagt

SEQ ID NO: 42456 - RNA, 21 nt, synthetic construct
  source 1..21: mol_type = other RNA
agcctgctgtgcctaccccaa

SEQ ID NO: 42457 - RNA, 21 nt, synthetic construct
  source 1..21: mol_type = other RNA
gcaggagggcgtcttcaagat

SEQ ID NO: 42458 - RNA, 21 nt, synthetic construct
  source 1..21: mol_type = other RNA
caccgaccacagagctggaga

SEQ ID NO: 42459 - RNA, 21 nt, synthetic construct
  source 1..21: mol_type = other RNA
gaccacagagctggagacggc

SEQ ID NO: 42460 - RNA, 21 nt, synthetic construct
  source 1..21: mol_type = other RNA
ccccaccctctcagaaggact

SEQ ID NO: 42461 - RNA, 21 nt, synthetic construct
  source 1..21: mol_type = other RNA
gtggccacatccacccttcca

SEQ ID NO: 42462 - RNA, 21 nt, synthetic construct
  source 1..21: mol_type = other RNA
ctccctcctccagtccaggga

SEQ ID NO: 42463 - RNA, 21 nt, synthetic construct
  source 1..21: mol_type = other RNA
gagaagcacagccaccacacc

SEQ ID NO: 42464 - RNA, 21 nt, synthetic construct
  source 1..21: mol_type = other RNA
gaagcacagccaccacaccca

SEQ ID NO: 42465 - RNA, 21 nt, synthetic construct
  source 1..21: mol_type = other RNA
catgtccacagccacaccctc

SEQ ID NO: 42466 - RNA, 21 nt, synthetic construct
  source 1..21: mol_type = other RNA
tccactccagagactgcccac

SEQ ID NO: 42467 - RNA, 21 nt, synthetic construct
  source 1..21: mol_type = other RNA
gagactgcccacacctccaca

SEQ ID NO: 42468 - RNA, 21 nt, synthetic construct
  source 1..21: mol_type = other RNA
caccgccacagtgctgaccac

SEQ ID NO: 42469 - RNA, 21 nt, synthetic construct
  source 1..21: mol_type = other RNA
cgccacagtgctgaccaccac

SEQ ID NO: 42470 - RNA, 21 nt, synthetic construct
  source 1..21: mol_type = other RNA
agtgctgaccaccaccaccac

SEQ ID NO: 42471 - RNA, 21 nt, synthetic construct
  source 1..21: mol_type = other RNA
tgggacaactcccatcccccc

SEQ ID NO: 42472 - RNA, 21 nt, synthetic construct
  source 1..21: mol_type = other RNA
gggacaactcccatcccccca

SEQ ID NO: 42473 - RNA, 21 nt, synthetic construct
  source 1..21: mol_type = other RNA
ggcgatccctgccccccagca

SEQ ID NO: 42474 - RNA, 21 nt, synthetic construct
  source 1..21: mol_type = other RNA
ccacccacatcacagagcctt

SEQ ID NO: 42475 - RNA, 21 nt, synthetic construct
  source 1..21: mol_type = other RNA
tcgactccagccctttccagc

SEQ ID NO: 42476 - RNA, 21 nt, synthetic construct
  source 1..21: mol_type = other RNA
acacccagcaagacccgcacc

SEQ ID NO: 42477 - RNA, 21 nt, synthetic construct
  source 1..21: mol_type = other RNA
ccacggtggtgaccatgggct

SEQ ID NO: 42478 - RNA, 21 nt, synthetic construct
  source 1..21: mol_type = other RNA
ccatgggctgtgagccccagt

SEQ ID NO: 42479 - RNA, 21 nt, synthetic construct
  source 1..21: mol_type = other RNA
tctggcggggactttgacacc

SEQ ID NO: 42480 - RNA, 21 nt, synthetic construct
  source 1..21: mol_type = other RNA
ccaccgtgacggtgcccaccg

SEQ ID NO: 42481 - RNA, 21 nt, synthetic construct
  source 1..21: mol_type = other RNA
gagaagcacagccaccacacc

SEQ ID NO: 42482 - RNA, 21 nt, synthetic construct
  source 1..21: mol_type = other RNA
gaagcacagccaccacaccca

SEQ ID NO: 42483 - RNA, 21 nt, synthetic construct
  source 1..21: mol_type = other RNA
tttacagccatcccctcctcc

SEQ ID NO: 42484 - RNA, 21 nt, synthetic construct
  source 1..21: mol_type = other RNA
catgtccacagccacaccctc

SEQ ID NO: 42485 - RNA, 21 nt, synthetic construct
  source 1..21: mol_type = other RNA
aaccggggccaccggctctgt

SEQ ID NO: 42486 - RNA, 21 nt, synthetic construct
  source 1..21: mol_type = other RNA
agtgctgaccaccaccaccac

SEQ ID NO: 42487 - RNA, 21 nt, synthetic construct
  source 1..21: mol_type = other RNA
ccacccacatcacagagcctt

SEQ ID NO: 42488 - RNA, 21 nt, synthetic construct
  source 1..21: mol_type = other RNA
cccacaccccagcagcaacca

SEQ ID NO: 42489 - RNA, 21 nt, synthetic construct
  source 1..21: mol_type = other RNA
acacccagcaagacccgcacc

SEQ ID NO: 42490 - RNA, 21 nt, synthetic construct
  source 1..21: mol_type = other RNA
ccacggtggtgaccatgggct

SEQ ID NO: 42491 - RNA, 21 nt, synthetic construct
  source 1..21: mol_type = other RNA
ccatgggctgtgagccccagt

SEQ ID NO: 42492 - RNA, 21 nt, synthetic construct
  source 1..21: mol_type = other RNA
tctggcggggactttgacacc

SEQ ID NO: 42493 - RNA, 21 nt, synthetic construct
  source 1..21: mol_type = other RNA
ccgtcctccaccccgggaaca

SEQ ID NO: 42494 - RNA, 21 nt, synthetic construct
  source 1..21: mol_type = other RNA
cgggaacagctccccctccca

SEQ ID NO: 42495 - RNA, 21 nt, synthetic construct
  source 1..21: mol_type = other RNA
gaacagaccaccacacccatg

SEQ ID NO: 42496 - RNA, 21 nt, synthetic construct
  source 1..21: mol_type = other RNA
cacccacacctccacagtgct

SEQ ID NO: 42497 - RNA, 21 nt, synthetic construct
  source 1..21: mol_type = other RNA
ccactacaactgcagccactg

SEQ ID NO: 42498 - RNA, 21 nt, synthetic construct
  source 1..21: mol_type = other RNA
gagcccagcactacagccacc

SEQ ID NO: 42499 - RNA, 21 nt, synthetic construct
  source 1..21: mol_type = other RNA
ccaccgtgacggtgcccaccg

SEQ ID NO: 42500 - RNA, 21 nt, synthetic construct
  source 1..21: mol_type = other RNA
caccacacccacagtcatcag

SEQ ID NO: 42501 - RNA, 21 nt, synthetic construct
  source 1..21: mol_type = other RNA
ctccctcctccagtccaggga

SEQ ID NO: 42502 - RNA, 21 nt, synthetic construct
  source 1..21: mol_type = other RNA
gagaagcacagccaccacacc

SEQ ID NO: 42503 - RNA, 21 nt, synthetic construct
  source 1..21: mol_type = other RNA
gaagcacagccaccacaccca

SEQ ID NO: 42504 - RNA, 21 nt, synthetic construct
  source 1..21: mol_type = other RNA
catgtccacagccacaccctc

SEQ ID NO: 42505 - RNA, 21 nt, synthetic construct
  source 1..21: mol_type = other RNA
acaccctcctctactccagag

SEQ ID NO: 42506 - RNA, 21 nt, synthetic construct
  source 1..21: mol_type = other RNA
tgcttaccaccacgaccacca

SEQ ID NO: 42507 - RNA, 21 nt, synthetic construct
  source 1..21: mol_type = other RNA
caccgccacagtgctgaccac

SEQ ID NO: 42508 - RNA, 21 nt, synthetic construct
  source 1..21: mol_type = other RNA
cgccacagtgctgaccaccac

SEQ ID NO: 42509 - RNA, 21 nt, synthetic construct
  source 1..21: mol_type = other RNA
agtgctgaccaccaccaccac

SEQ ID NO: 42510 - RNA, 21 nt, synthetic construct
  source 1..21: mol_type = other RNA
cagggacaactcccatccccc

SEQ ID NO: 42511 - RNA, 21 nt, synthetic construct
  source 1..21: mol_type = other RNA
agggacaactcccatcccccc

SEQ ID NO: 42512 - RNA, 21 nt, synthetic construct
  source 1..21: mol_type = other RNA
gggacaactcccatcccccca

SEQ ID NO: 42513 - RNA, 21 nt, synthetic construct
  source 1..21: mol_type = other RNA
ccacccacatcacagagcctt

SEQ ID NO: 42514 - RNA, 21 nt, synthetic construct
  source 1..21: mol_type = other RNA
cccacaccccagcagcaacca

SEQ ID NO: 42515 - RNA, 21 nt, synthetic construct
  source 1..21: mol_type = other RNA
cagcaaccaccagtaccaccc

SEQ ID NO: 42516 - RNA, 21 nt, synthetic construct
  source 1..21: mol_type = other RNA
acacccagcaagacccgcacc

SEQ ID NO: 42517 - RNA, 21 nt, synthetic construct
  source 1..21: mol_type = other RNA
tctggcggggactttgacacc

SEQ ID NO: 42518 - RNA, 21 nt, synthetic construct
  source 1..21: mol_type = other RNA
ccaccgtgacggtgcccaccg

SEQ ID NO: 42519 - RNA, 21 nt, synthetic construct
  source 1..21: mol_type = other RNA
gagaagcacagccaccacacc

SEQ ID NO: 42520 - RNA, 21 nt, synthetic construct
  source 1..21: mol_type = other RNA
gaagcacagccaccacaccca

SEQ ID NO: 42521 - RNA, 21 nt, synthetic construct
  source 1..21: mol_type = other RNA
tttacagccatcccctcctcc

SEQ ID NO: 42522 - RNA, 21 nt, synthetic construct
  source 1..21: mol_type = other RNA
catgtccacagccacaccctc

SEQ ID NO: 42523 - RNA, 21 nt, synthetic construct
  source 1..21: mol_type = other RNA
tccactccagagactgcccac

SEQ ID NO: 42524 - RNA, 21 nt, synthetic construct
  source 1..21: mol_type = other RNA
gagactgcccacacctccaca

SEQ ID NO: 42525 - RNA, 21 nt, synthetic construct
  source 1..21: mol_type = other RNA
gtgaccccctcctccgtcccg

SEQ ID NO: 42526 - RNA, 21 nt, synthetic construct
  source 1..21: mol_type = other RNA
ccctcctccgtcccggggacc

SEQ ID NO: 42527 - RNA, 21 nt, synthetic construct
  source 1..21: mol_type = other RNA
agtgctgaccaccaccaccac

SEQ ID NO: 42528 - RNA, 21 nt, synthetic construct
  source 1..21: mol_type = other RNA
ccacccacatcacagagcctt

SEQ ID NO: 42529 - RNA, 21 nt, synthetic construct
  source 1..21: mol_type = other RNA
cccacaccccagcagcaacca

SEQ ID NO: 42530 - RNA, 21 nt, synthetic construct
  source 1..21: mol_type = other RNA
ccgagtcacccccttccccag

SEQ ID NO: 42531 - RNA, 21 nt, synthetic construct
  source 1..21: mol_type = other RNA
acacccagcaagacccgcacc

SEQ ID NO: 42532 - RNA, 21 nt, synthetic construct
  source 1..21: mol_type = other RNA
tctggcggggactttgacacc

SEQ ID NO: 42533 - RNA, 21 nt, synthetic construct
  source 1..21: mol_type = other RNA
gcatccactggatccacggcc

SEQ ID NO: 42534 - RNA, 21 nt, synthetic construct
  source 1..21: mol_type = other RNA
catccactggatccacggcca

SEQ ID NO: 42535 - RNA, 21 nt, synthetic construct
  source 1..21: mol_type = other RNA
ccgtcctccaccccgggaaca

SEQ ID NO: 42536 - RNA, 21 nt, synthetic construct
  source 1..21: mol_type = other RNA
cgggaacagctccccctccca

SEQ ID NO: 42537 - RNA, 21 nt, synthetic construct
  source 1..21: mol_type = other RNA
cacccacacctccacagtgct

SEQ ID NO: 42538 - RNA, 21 nt, synthetic construct
  source 1..21: mol_type = other RNA
ccactacaactgcagccactg

SEQ ID NO: 42539 - RNA, 21 nt, synthetic construct
  source 1..21: mol_type = other RNA
ccaccgtgacggtgcccaccg

SEQ ID NO: 42540 - RNA, 21 nt, synthetic construct
  source 1..21: mol_type = other RNA
ctccctcctccagtccaggga

SEQ ID NO: 42541 - RNA, 21 nt, synthetic construct
  source 1..21: mol_type = other RNA
gagaagcacagccaccacacc

SEQ ID NO: 42542 - RNA, 21 nt, synthetic construct
  source 1..21: mol_type = other RNA
gaagcacagccaccacaccca

SEQ ID NO: 42543 - RNA, 21 nt, synthetic construct
  source 1..21: mol_type = other RNA
tttacagccatcccctcctcc

SEQ ID NO: 42544 - RNA, 21 nt, synthetic construct
  source 1..21: mol_type = other RNA
catgtccacagccacaccctc

SEQ ID NO: 42545 - RNA, 21 nt, synthetic construct
  source 1..21: mol_type = other RNA
aaccggggccaccggctctgt

SEQ ID NO: 42546 - RNA, 21 nt, synthetic construct
  source 1..21: mol_type = other RNA
agtgctgaccaccaccaccac

SEQ ID NO: 42547 - RNA, 21 nt, synthetic construct
  source 1..21: mol_type = other RNA
cacccacacctccacagtgct

SEQ ID NO: 42548 - RNA, 21 nt, synthetic construct
  source 1..21: mol_type = other RNA
ccactacaactgcagccactg

SEQ ID NO: 42549 - RNA, 21 nt, synthetic construct
  source 1..21: mol_type = other RNA
ctctgggaacagctcacaccc

SEQ ID NO: 42550 - RNA, 21 nt, synthetic construct
  source 1..21: mol_type = other RNA
cccagcagcctgccaaccttc

SEQ ID NO: 42551 - RNA, 21 nt, synthetic construct
  source 1..21: mol_type = other RNA
accgtgtcgtcctgctggacc

SEQ ID NO: 42552 - RNA, 21 nt, synthetic construct
  source 1..21: mol_type = other RNA
ttgtgtctgtgctggggacca

SEQ ID NO: 42553 - RNA, 21 nt, synthetic construct
  source 1..21: mol_type = other RNA
caccccccactgccagccccg

SEQ ID NO: 42554 - RNA, 21 nt, synthetic construct
  source 1..21: mol_type = other RNA
gtctagcacacccacccccac

SEQ ID NO: 42555 - RNA, 21 nt, synthetic construct
  source 1..21: mol_type = other RNA
tgctgagtgccacaaccttgt

SEQ ID NO: 42556 - RNA, 21 nt, synthetic construct
  source 1..21: mol_type = other RNA
gcgaccactgcaggggccgcc

SEQ ID NO: 42557 - RNA, 21 nt, synthetic construct
  source 1..21: mol_type = other RNA
tacaagccatgcggccccata

SEQ ID NO: 42558 - RNA, 21 nt, synthetic construct
  source 1..21: mol_type = other RNA
cagcctgccacctgcaactct

SEQ ID NO: 42559 - RNA, 21 nt, synthetic construct
  source 1..21: mol_type = other RNA
tgaggaccagatcctcttcaa

SEQ ID NO: 42560 - RNA, 21 nt, synthetic construct
  source 1..21: mol_type = other RNA
tgcgtgcaggcctgcccctgc

SEQ ID NO: 42561 - RNA, 21 nt, synthetic construct
  source 1..21: mol_type = other RNA
tgcccctgcgtgggacccgat

SEQ ID NO: 42562 - RNA, 21 nt, synthetic construct
  source 1..21: mol_type = other RNA
cacccaggaggagggcgactg

SEQ ID NO: 42563 - RNA, 21 nt, synthetic construct
  source 1..21: mol_type = other RNA
ttccgctgcagacctcagctg

SEQ ID NO: 42564 - RNA, 21 nt, synthetic construct
  source 1..21: mol_type = other RNA
ccctgccacatgtgtacctgc

SEQ ID NO: 42565 - RNA, 21 nt, synthetic construct
  source 1..21: mol_type = other RNA
gaccgcctgcctcacgcccga

SEQ ID NO: 42566 - RNA, 21 nt, synthetic construct
  source 1..21: mol_type = other RNA
ttctgcgagggctcctgcccc

SEQ ID NO: 42567 - RNA, 21 nt, synthetic construct
  source 1..21: mol_type = other RNA
cgagggctcctgccccggagc

SEQ ID NO: 42568 - RNA, 21 nt, synthetic construct
  source 1..21: mol_type = other RNA
agtactcagcagaggcccagg

SEQ ID NO: 42569 - RNA, 21 nt, synthetic construct
  source 1..21: mol_type = other RNA
gtactcagcagaggcccaggc

SEQ ID NO: 42570 - RNA, 21 nt, synthetic construct
  source 1..21: mol_type = other RNA
gcacctgctgccaggagaggc

SEQ ID NO: 42571 - RNA, 21 nt, synthetic construct
  source 1..21: mol_type = other RNA
cggcctgtgtgtggcaccccg

SEQ ID NO: 42572 - RNA, 21 nt, synthetic construct
  source 1..21: mol_type = other RNA
ccgcgctccgtgctcctgctg

SEQ ID NO: 42573 - RNA, 21 nt, synthetic construct
  source 1..21: mol_type = other RNA
tgcaactacgtgttctctgag

SEQ ID NO: 42574 - RNA, 21 nt, synthetic construct
  source 1..21: mol_type = other RNA
tttgcaactacgtgttctctg

SEQ ID NO: 42575 - RNA, 21 nt, synthetic construct
  source 1..21: mol_type = other RNA
aactacgtgttctctgagcac

SEQ ID NO: 42576 - RNA, 21 nt, synthetic construct
  source 1..21: mol_type = other RNA
gggtgggaagctaagctgcct

SEQ ID NO: 42577 - RNA, 21 nt, synthetic construct
  source 1..21: mol_type = other RNA
ttgcaactacgtgttctctga

SEQ ID NO: 42578 - RNA, 21 nt, synthetic construct
  source 1..21: mol_type = other RNA
cgcgcagctctgcgaggacca

SEQ ID NO: 42579 - RNA, 21 nt, synthetic construct
  source 1..21: mol_type = other RNA
caactggaccctggcacaggt

SEQ ID NO: 42580 - RNA, 21 nt, synthetic construct
  source 1..21: mol_type = other RNA
tacagccgcactggcctcctg

SEQ ID NO: 42581 - RNA, 21 nt, synthetic construct
  source 1..21: mol_type = other RNA
catcaccccagtgctgaccag

SEQ ID NO: 42582 - RNA, 21 nt, synthetic construct
  source 1..21: mol_type = other RNA
tgccccacctgcccgtgtgcc

SEQ ID NO: 42583 - RNA, 21 nt, synthetic construct
  source 1..21: mol_type = other RNA
gtgcaaccttcccaggcgccc

SEQ ID NO: 42584 - RNA, 21 nt, synthetic construct
  source 1..21: mol_type = other RNA
ctcgactccagccctttccag

SEQ ID NO: 42585 - RNA, 21 nt, synthetic construct
  source 1..21: mol_type = other RNA
tcacagccaccggctccacca

SEQ ID NO: 42586 - RNA, 21 nt, synthetic construct
  source 1..21: mol_type = other RNA
accgaccacagagctggagac

SEQ ID NO: 42587 - RNA, 21 nt, synthetic construct
  source 1..21: mol_type = other RNA
gcgatccctgccccccagcag

SEQ ID NO: 42588 - RNA, 21 nt, synthetic construct
  source 1..21: mol_type = other RNA
ccgaacaccacggccaccaca

SEQ ID NO: 42589 - RNA, 21 nt, synthetic construct
  source 1..21: mol_type = other RNA
cgatcacagccaccggctcca

SEQ ID NO: 42590 - RNA, 21 nt, synthetic construct
  source 1..21: mol_type = other RNA
ccgaacaccacggccaccaca

SEQ ID NO: 42591 - RNA, 21 nt, synthetic construct
  source 1..21: mol_type = other RNA
ccgaacaccacggccaccaca

SEQ ID NO: 42592 - RNA, 21 nt, synthetic construct
  source 1..21: mol_type = other RNA
gatccacggccaccctgtcct

SEQ ID NO: 42593 - RNA, 21 nt, synthetic construct
  source 1..21: mol_type = other RNA
catgggctgtgagccccagtg

SEQ ID NO: 42594 - RNA, 21 nt, synthetic construct
  source 1..21: mol_type = other RNA
catgggctgtgagccccagtg

SEQ ID NO: 42595 - RNA, 21 nt, synthetic construct
  source 1..21: mol_type = other RNA
cccccagtgccgaacaccatg

SEQ ID NO: 42596 - RNA, 21 nt, synthetic construct
  source 1..21: mol_type = other RNA
caaccttcccaggcgcccttc

SEQ ID NO: 42597 - RNA, 21 nt, synthetic construct
  source 1..21: mol_type = other RNA
agcagagcggggactacatca

SEQ ID NO: 42598 - RNA, 21 nt, synthetic construct
  source 1..21: mol_type = other RNA
atggctgctgggccccgactg

SEQ ID NO: 42599 - RNA, 21 nt, synthetic construct
  source 1..21: mol_type = other RNA
cagagcctgcctgtgtgcccg

SEQ ID NO: 42600 - RNA, 21 nt, synthetic construct
  source 1..21: mol_type = other RNA
cctgtgtgcacaacgaggcca

SEQ ID NO: 42601 - RNA, 21 nt, synthetic construct
  source 1..21: mol_type = other RNA
ctgtgtgcacaacgaggccac

SEQ ID NO: 42602 - RNA, 21 nt, synthetic construct
  source 1..21: mol_type = other RNA
cacatgggcatctgcgtgcag

SEQ ID NO: 42603 - RNA, 21 nt, synthetic construct
  source 1..21: mol_type = other RNA
cacccacaccgccacagtgct

SEQ ID NO: 42604 - RNA, 21 nt, synthetic construct
  source 1..21: mol_type = other RNA
cacccacaccgccacagtgct

SEQ ID NO: 42605 - RNA, 21 nt, synthetic construct
  source 1..21: mol_type = other RNA
ccacccacaccgccacagtgc

SEQ ID NO: 42606 - RNA, 21 nt, synthetic construct
  source 1..21: mol_type = other RNA
caccaccaacccctcctcaac

SEQ ID NO: 42607 - RNA, 21 nt, synthetic construct
  source 1..21: mol_type = other RNA
caccaccaacccctcctcaac

SEQ ID NO: 42608 - RNA, 21 nt, synthetic construct
  source 1..21: mol_type = other RNA
ccacccacaccgccacagtgc

SEQ ID NO: 42609 - RNA, 21 nt, synthetic construct
  source 1..21: mol_type = other RNA
caccaccaacccctcctcaac

SEQ ID NO: 42610 - RNA, 21 nt, synthetic construct
  source 1..21: mol_type = other RNA
caccaccaacccctcctcaac

SEQ ID NO: 42611 - RNA, 21 nt, synthetic construct
  source 1..21: mol_type = other RNA
caccaccaacccctcctcaac

SEQ ID NO: 42612 - RNA, 21 nt, synthetic construct
  source 1..21: mol_type = other RNA
ggcctgcgtgaacgacgcgtg

SEQ ID NO: 42613 - RNA, 21 nt, synthetic construct
  source 1..21: mol_type = other RNA
actacgaggcctgcgtgaacg

SEQ ID NO: 42614 - RNA, 21 nt, synthetic construct
  source 1..21: mol_type = other RNA
cagagactgtccacacctcca

SEQ ID NO: 42615 - RNA, 21 nt, synthetic construct
  source 1..21: mol_type = other RNA
cagagactgtccacacctcca

SEQ ID NO: 42616 - RNA, 21 nt, synthetic construct
  source 1..21: mol_type = other RNA
gcctgcgtgaacgacgcgtgt

SEQ ID NO: 42617 - RNA, 21 nt, synthetic construct
  source 1..21: mol_type = other RNA
aggcctgcgtgaacgacgcgt

SEQ ID NO: 42618 - RNA, 21 nt, synthetic construct
  source 1..21: mol_type = other RNA
gtggcctacggggatggccac

SEQ ID NO: 42619 - RNA, 21 nt, synthetic construct
  source 1..21: mol_type = other RNA
agttggatgggcccacggagc

SEQ ID NO: 42620 - RNA, 21 nt, synthetic construct
  source 1..21: mol_type = other RNA
gggaacttcaaccagaaccag

SEQ ID NO: 42621 - RNA, 21 nt, synthetic construct
  source 1..21: mol_type = other RNA
gcctgtgcgccgcgctgtcct

SEQ ID NO: 42622 - RNA, 21 nt, synthetic construct
  source 1..21: mol_type = other RNA
caagtactacgaggcctgcgt

SEQ ID NO: 42623 - RNA, 21 nt, synthetic construct
  source 1..21: mol_type = other RNA
tactacgaggcctgcgtgaac

SEQ ID NO: 42624 - RNA, 21 nt, synthetic construct
  source 1..21: mol_type = other RNA
gtcgtggaatgcagcctggac

SEQ ID NO: 42625 - RNA, 21 nt, synthetic construct
  source 1..21: mol_type = other RNA
gtcgtggaatgcagcctggac

SEQ ID NO: 42626 - RNA, 21 nt, synthetic construct
  source 1..21: mol_type = other RNA
gtcgtggaatgcagcctggac

SEQ ID NO: 42627 - RNA, 21 nt, synthetic construct
  source 1..21: mol_type = other RNA
gtcgtggaatgcagcctggac

SEQ ID NO: 42628 - RNA, 21 nt, synthetic construct
  source 1..21: mol_type = other RNA
gttggatgggcccacggagca

SEQ ID NO: 42629 - RNA, 21 nt, synthetic construct
  source 1..21: mol_type = other RNA
cggcagccaacatcaccctgt

SEQ ID NO: 42630 - RNA, 21 nt, synthetic construct
  source 1..21: mol_type = other RNA
tgcggcctgtgtgggaacttc

SEQ ID NO: 42631 - RNA, 21 nt, synthetic construct
  source 1..21: mol_type = other RNA
gcggcctgtgtgggaacttca

SEQ ID NO: 42632 - RNA, 21 nt, synthetic construct
  source 1..21: mol_type = other RNA
gactgcctgtgcgccgcgctg

SEQ ID NO: 42633 - RNA, 21 nt, synthetic construct
  source 1..21: mol_type = other RNA
actgcctgtgcgccgcgctgt

SEQ ID NO: 42634 - RNA, 21 nt, synthetic construct
  source 1..21: mol_type = other RNA
ctgcctgtgcgccgcgctgtc

SEQ ID NO: 42635 - RNA, 21 nt, synthetic construct
  source 1..21: mol_type = other RNA
cctgtgcgccgcgctgtcctc

SEQ ID NO: 42636 - RNA, 21 nt, synthetic construct
  source 1..21: mol_type = other RNA
tgtgcgccgcgctgtcctcct

SEQ ID NO: 42637 - RNA, 21 nt, synthetic construct
  source 1..21: mol_type = other RNA
tgtgcacgcctgtgccgccaa

SEQ ID NO: 42638 - RNA, 21 nt, synthetic construct
  source 1..21: mol_type = other RNA
gtgcacgcctgtgccgccaag

SEQ ID NO: 42639 - RNA, 21 nt, synthetic construct
  source 1..21: mol_type = other RNA
acgcctgtgccgccaagggcg

SEQ ID NO: 42640 - RNA, 21 nt, synthetic construct
  source 1..21: mol_type = other RNA
aggccacctacaagcctggag

SEQ ID NO: 42641 - RNA, 21 nt, synthetic construct
  source 1..21: mol_type = other RNA
ctacgaggcctgcgtgaacga

SEQ ID NO: 42642 - RNA, 21 nt, synthetic construct
  source 1..21: mol_type = other RNA
tacgaggcctgcgtgaacgac

SEQ ID NO: 42643 - RNA, 21 nt, synthetic construct
  source 1..21: mol_type = other RNA
gaggcctgcgtgaacgacgcg

SEQ ID NO: 42644 - RNA, 21 nt, synthetic construct
  source 1..21: mol_type = other RNA
cagagtggtttgacgtggact

SEQ ID NO: 42645 - RNA, 21 nt, synthetic construct
  source 1..21: mol_type = other RNA
agagtggtttgacgtggactt

SEQ ID NO: 42646 - RNA, 21 nt, synthetic construct
  source 1..21: mol_type = other RNA
gagtggtttgacgtggacttc

SEQ ID NO: 42647 - RNA, 21 nt, synthetic construct
  source 1..21: mol_type = other RNA
cggtgagcagcggtttcagca

SEQ ID NO: 42648 - RNA, 21 nt, synthetic construct
  source 1..21: mol_type = other RNA
gagaactacgcccggcactgg

SEQ ID NO: 42649 - RNA, 21 nt, synthetic construct
  source 1..21: mol_type = other RNA
cacggccaaccccttccgcaa

SEQ ID NO: 42650 - RNA, 21 nt, synthetic construct
  source 1..21: mol_type = other RNA
ctacgcccggcactggtgctc

SEQ ID NO: 42651 - RNA, 21 nt, synthetic construct
  source 1..21: mol_type = other RNA
tgtgagcggagcgaggactgc

SEQ ID NO: 42652 - RNA, 21 nt, synthetic construct
  source 1..21: mol_type = other RNA
gaggactgcctgtgcgccgcg

SEQ ID NO: 42653 - RNA, 21 nt, synthetic construct
  source 1..21: mol_type = other RNA
cagaagcagtgcagcatcctc

SEQ ID NO: 42654 - RNA, 21 nt, synthetic construct
  source 1..21: mol_type = other RNA
gctgtcaaccgaagtgtgagt

SEQ ID NO: 42655 - RNA, 21 nt, synthetic construct
  source 1..21: mol_type = other RNA
cacctgcaggaaccggaggtg

SEQ ID NO: 42656 - RNA, 21 nt, synthetic construct
  source 1..21: mol_type = other RNA
gcctgaccgatcccaacagtg

SEQ ID NO: 42657 - RNA, 21 nt, synthetic construct
  source 1..21: mol_type = other RNA
gctgccttacagccgcactgg

SEQ ID NO: 42658 - RNA, 21 nt, synthetic construct
  source 1..21: mol_type = other RNA
gcctggacggcggggacacgg

SEQ ID NO: 42659 - RNA, 21 nt, synthetic construct
  source 1..21: mol_type = other RNA
agatgtgctacaactacagga

SEQ ID NO: 42660 - RNA, 21 nt, synthetic construct
  source 1..21: mol_type = other RNA
acgtgggctgtttcagcacac

SEQ ID NO: 42661 - RNA, 21 nt, synthetic construct
  source 1..21: mol_type = other RNA
ggtgagcagcggtttcagcaa

SEQ ID NO: 42662 - RNA, 21 nt, synthetic construct
  source 1..21: mol_type = other RNA
aactccatctacacgcagctg

SEQ ID NO: 42663 - RNA, 21 nt, synthetic construct
  source 1..21: mol_type = other RNA
acctgcaccaacaaccagagg

SEQ ID NO: 42664 - RNA, 21 nt, synthetic construct
  source 1..21: mol_type = other RNA
gcaccaggactacaagggcag

SEQ ID NO: 42665 - RNA, 21 nt, synthetic construct
  source 1..21: mol_type = other RNA
cctctcaggccgagaccagca

SEQ ID NO: 42666 - RNA, 21 nt, synthetic construct
  source 1..21: mol_type = other RNA
gaaatccgtgtgttctgctgc

SEQ ID NO: 42667 - RNA, 21 nt, synthetic construct
  source 1..21: mol_type = other RNA
gaaatccgtgtgttctgctgc

SEQ ID NO: 42668 - RNA, 21 nt, synthetic construct
  source 1..21: mol_type = other RNA
gaaatccgtgtgttctgctgc

SEQ ID NO: 42669 - RNA, 21 nt, synthetic construct
  source 1..21: mol_type = other RNA
gaaatccgtgtgttctgctgc

SEQ ID NO: 42670 - RNA, 21 nt, synthetic construct
  source 1..21: mol_type = other RNA
gtcctacgataagatcagggc

SEQ ID NO: 42671 - RNA, 21 nt, synthetic construct
  source 1..21: mol_type = other RNA
tgtcttccccagcctgagccc

SEQ ID NO: 42672 - RNA, 21 nt, synthetic construct
  source 1..21: mol_type = other RNA
ctgtgagtggcactaccagcc

SEQ ID NO: 42673 - RNA, 21 nt, synthetic construct
  source 1..21: mol_type = other RNA
cggaaccccagtgggcactgc

SEQ ID NO: 42674 - RNA, 21 nt, synthetic construct
  source 1..21: mol_type = other RNA
gctaccagctttacagccatc

SEQ ID NO: 42675 - RNA, 21 nt, synthetic construct
  source 1..21: mol_type = other RNA
gctaccagctttacagccatc

SEQ ID NO: 42676 - RNA, 21 nt, synthetic construct
  source 1..21: mol_type = other RNA
gctaccagctttacagccatc

SEQ ID NO: 42677 - RNA, 21 nt, synthetic construct
  source 1..21: mol_type = other RNA
cacgcctgtgccgccaagggc

SEQ ID NO: 42678 - RNA, 21 nt, synthetic construct
  source 1..21: mol_type = other RNA
caacaacaccgagggccagtg

SEQ ID NO: 42679 - RNA, 21 nt, synthetic construct
  source 1..21: mol_type = other RNA
aagtactacgaggcctgcgtg

SEQ ID NO: 42680 - RNA, 21 nt, synthetic construct
  source 1..21: mol_type = other RNA
acaacaacaccgagggccagt

SEQ ID NO: 42681 - RNA, 21 nt, synthetic construct
  source 1..21: mol_type = other RNA
gtgcggcctgtgtgggaactt

SEQ ID NO: 42682 - RNA, 21 nt, synthetic construct
  source 1..21: mol_type = other RNA
aactgtgagcggagcgaggac

SEQ ID NO: 42683 - RNA, 21 nt, synthetic construct
  source 1..21: mol_type = other RNA
gcacgcctgtgccgccaaggg

SEQ ID NO: 42684 - RNA, 21 nt, synthetic construct
  source 1..21: mol_type = other RNA
aggccatcaagctcttcgtgg

SEQ ID NO: 42685 - RNA, 21 nt, synthetic construct
  source 1..21: mol_type = other RNA
tgagtggcactaccagccctg

SEQ ID NO: 42686 - RNA, 21 nt, synthetic construct
  source 1..21: mol_type = other RNA
aacaacaccgagggccagtgc

SEQ ID NO: 42687 - RNA, 21 nt, synthetic construct
  source 1..21: mol_type = other RNA
tgtgcggcctgtgtgggaact

SEQ ID NO: 42688 - RNA, 21 nt, synthetic construct
  source 1..21: mol_type = other RNA
ttcgccaacacctggaaggcc

SEQ ID NO: 42689 - RNA, 21 nt, synthetic construct
  source 1..21: mol_type = other RNA
cctgcaactgtgagcggagcg

SEQ ID NO: 42690 - RNA, 21 nt, synthetic construct
  source 1..21: mol_type = other RNA
ctgcaactgtgagcggagcga

SEQ ID NO: 42691 - RNA, 21 nt, synthetic construct
  source 1..21: mol_type = other RNA
tgcaactgtgagcggagcgag

SEQ ID NO: 42692 - RNA, 21 nt, synthetic construct
  source 1..21: mol_type = other RNA
gcaactgtgagcggagcgagg

SEQ ID NO: 42693 - RNA, 21 nt, synthetic construct
  source 1..21: mol_type = other RNA
caactgtgagcggagcgagga

SEQ ID NO: 42694 - RNA, 21 nt, synthetic construct
  source 1..21: mol_type = other RNA
ctgtgagcggagcgaggactg

SEQ ID NO: 42695 - RNA, 21 nt, synthetic construct
  source 1..21: mol_type = other RNA
gtgagcggagcgaggactgcc

SEQ ID NO: 42696 - RNA, 21 nt, synthetic construct
  source 1..21: mol_type = other RNA
cgaggactgcctgtgcgccgc

SEQ ID NO: 42697 - RNA, 21 nt, synthetic construct
  source 1..21: mol_type = other RNA
cgcctgtgccgccaagggcgt

SEQ ID NO: 42698 - RNA, 21 nt, synthetic construct
  source 1..21: mol_type = other RNA
ggccatcaagctcttcgtgga

SEQ ID NO: 42699 - RNA, 21 nt, synthetic construct
  source 1..21: mol_type = other RNA
tgccatcaatgactttgccac

SEQ ID NO: 42700 - RNA, 21 nt, synthetic construct
  source 1..21: mol_type = other RNA
aggacccctgcacggccaacc

SEQ ID NO: 42701 - RNA, 21 nt, synthetic construct
  source 1..21: mol_type = other RNA
gacccctgcacggccaacccc

SEQ ID NO: 42702 - RNA, 21 nt, synthetic construct
  source 1..21: mol_type = other RNA
acggccaaccccttccgcaag

SEQ ID NO: 42703 - RNA, 21 nt, synthetic construct
  source 1..21: mol_type = other RNA
ggccaaccccttccgcaagtc

SEQ ID NO: 42704 - RNA, 21 nt, synthetic construct
  source 1..21: mol_type = other RNA
caaccccttccgcaagtcctg

SEQ ID NO: 42705 - RNA, 21 nt, synthetic construct
  source 1..21: mol_type = other RNA
ccgcaagtcctgggcccagaa

SEQ ID NO: 42706 - RNA, 21 nt, synthetic construct
  source 1..21: mol_type = other RNA
tgtttctgcacggctgtggct

SEQ ID NO: 42707 - RNA, 21 nt, synthetic construct
  source 1..21: mol_type = other RNA
gagtggcactaccagccctgc

SEQ ID NO: 42708 - RNA, 21 nt, synthetic construct
  source 1..21: mol_type = other RNA
gcactaccagccctgcggggc

SEQ ID NO: 42709 - RNA, 21 nt, synthetic construct
  source 1..21: mol_type = other RNA
ctggaccctggagaactgcac

SEQ ID NO: 42710 - RNA, 21 nt, synthetic construct
  source 1..21: mol_type = other RNA
ccctggagaactgcacggtgg

SEQ ID NO: 42711 - RNA, 21 nt, synthetic construct
  source 1..21: mol_type = other RNA
ccacaacaacaccgagggcca

SEQ ID NO: 42712 - RNA, 21 nt, synthetic construct
  source 1..21: mol_type = other RNA
cacaacaacaccgagggccag

SEQ ID NO: 42713 - RNA, 21 nt, synthetic construct
  source 1..21: mol_type = other RNA
acaacaccgagggccagtgcg

SEQ ID NO: 42714 - RNA, 21 nt, synthetic construct
  source 1..21: mol_type = other RNA
caacaccgagggccagtgcgg

SEQ ID NO: 42715 - RNA, 21 nt, synthetic construct
  source 1..21: mol_type = other RNA
aacaccgagggccagtgcggc

SEQ ID NO: 42716 - RNA, 21 nt, synthetic construct
  source 1..21: mol_type = other RNA
accgagggccagtgcggcacc

SEQ ID NO: 42717 - RNA, 21 nt, synthetic construct
  source 1..21: mol_type = other RNA
gtgatctgatgctgagccagg

SEQ ID NO: 42718 - RNA, 21 nt, synthetic construct
  source 1..21: mol_type = other RNA
cccagggctttgagtacaaga

SEQ ID NO: 42719 - RNA, 21 nt, synthetic construct
  source 1..21: mol_type = other RNA
tcaaccagaaccaggctgacg

SEQ ID NO: 42720 - RNA, 21 nt, synthetic construct
  source 1..21: mol_type = other RNA
tcctgtggaacggagaggaca

SEQ ID NO: 42721 - RNA, 21 nt, synthetic construct
  source 1..21: mol_type = other RNA
ggactgcctgtgcgccgcgct

SEQ ID NO: 42722 - RNA, 21 nt, synthetic construct
  source 1..21: mol_type = other RNA
ggggagtgtgcagtgactggc

SEQ ID NO: 42723 - RNA, 21 nt, synthetic construct
  source 1..21: mol_type = other RNA
tggagggacggcgtctgcacc

SEQ ID NO: 42724 - RNA, 21 nt, synthetic construct
  source 1..21: mol_type = other RNA
cacagcctgcatcctgcccag

SEQ ID NO: 42725 - RNA, 21 nt, synthetic construct
  source 1..21: mol_type = other RNA
tgcgccgcgctgtcctcctat

SEQ ID NO: 42726 - RNA, 21 nt, synthetic construct
  source 1..21: mol_type = other RNA
tacatggggatcttcctggtc

SEQ ID NO: 42727 - RNA, 21 nt, synthetic construct
  source 1..21: mol_type = other RNA
acatggggatcttcctggtca

SEQ ID NO: 42728 - RNA, 21 nt, synthetic construct
  source 1..21: mol_type = other RNA
gcgtggcccagtgtggctgct

SEQ ID NO: 42729 - RNA, 21 nt, synthetic construct
  source 1..21: mol_type = other RNA
ctcaggaaaaccggctgctgc

SEQ ID NO: 42730 - RNA, 21 nt, synthetic construct
  source 1..21: mol_type = other RNA
gctgccctacagcctcttcca

SEQ ID NO: 42731 - RNA, 21 nt, synthetic construct
  source 1..21: mol_type = other RNA
ctgtgatctgatgctgagcca

SEQ ID NO: 42732 - RNA, 21 nt, synthetic construct
  source 1..21: mol_type = other RNA
aggactacaagggcagggtct

SEQ ID NO: 42733 - RNA, 21 nt, synthetic construct
  source 1..21: mol_type = other RNA
tccagtttgggaacctgcaga

SEQ ID NO: 42734 - RNA, 21 nt, synthetic construct
  source 1..21: mol_type = other RNA
acctgcaactgtgagcggagc

SEQ ID NO: 42735 - RNA, 21 nt, synthetic construct
  source 1..21: mol_type = other RNA
gctgtggctgcctacgcccag

SEQ ID NO: 42736 - RNA, 21 nt, synthetic construct
  source 1..21: mol_type = other RNA
ccggtgtcagtggacagagtg

SEQ ID NO: 42737 - RNA, 21 nt, synthetic construct
  source 1..21: mol_type = other RNA
acggcaccgtgctggctcctg

SEQ ID NO: 42738 - RNA, 21 nt, synthetic construct
  source 1..21: mol_type = other RNA
gaggtctgccgctggtccagc

SEQ ID NO: 42739 - RNA, 21 nt, synthetic construct
  source 1..21: mol_type = other RNA
cccctgcgggagttgggccag

SEQ ID NO: 42740 - RNA, 21 nt, synthetic construct
  source 1..21: mol_type = other RNA
cccctgcgggagttgggccag

SEQ ID NO: 42741 - RNA, 21 nt, synthetic construct
  source 1..21: mol_type = other RNA
cccctgcgggagttgggccag

SEQ ID NO: 42742 - RNA, 21 nt, synthetic construct
  source 1..21: mol_type = other RNA
gccacaacgccattcaccttc

SEQ ID NO: 42743 - RNA, 21 nt, synthetic construct
  source 1..21: mol_type = other RNA
tgccccccaggcacggtgctg

SEQ ID NO: 42744 - RNA, 21 nt, synthetic construct
  source 1..21: mol_type = other RNA
agtactacgaggcctgcgtga

SEQ ID NO: 42745 - RNA, 21 nt, synthetic construct
  source 1..21: mol_type = other RNA
cttccgcaagtcctgggccca

SEQ ID NO: 42746 - RNA, 21 nt, synthetic construct
  source 1..21: mol_type = other RNA
tgtgagtggcactaccagccc

SEQ ID NO: 42747 - RNA, 21 nt, synthetic construct
  source 1..21: mol_type = other RNA
gtgagtggcactaccagccct

SEQ ID NO: 42748 - RNA, 21 nt, synthetic construct
  source 1..21: mol_type = other RNA
acaccgagggccagtgcggca

SEQ ID NO: 42749 - RNA, 21 nt, synthetic construct
  source 1..21: mol_type = other RNA
caccgagggccagtgcggcac

SEQ ID NO: 42750 - RNA, 21 nt, synthetic construct
  source 1..21: mol_type = other RNA
ggcggagggctgcttctgccc

SEQ ID NO: 42751 - RNA, 21 nt, synthetic construct
  source 1..21: mol_type = other RNA
ccccagggctttgagtacaag

SEQ ID NO: 42752 - RNA, 21 nt, synthetic construct
  source 1..21: mol_type = other RNA
agctcccacttctctactccc

SEQ ID NO: 42753 - RNA, 21 nt, synthetic construct
  source 1..21: mol_type = other RNA
cctgatcctgtttgaccaaat

SEQ ID NO: 42754 - RNA, 21 nt, synthetic construct
  source 1..21: mol_type = other RNA
aagatgtgcttcaactatgaa

SEQ ID NO: 42755 - RNA, 21 nt, synthetic construct
  source 1..21: mol_type = other RNA
aagatgtgcttcaactatgaa

SEQ ID NO: 42756 - RNA, 21 nt, synthetic construct
  source 1..21: mol_type = other RNA
aagatgtgcttcaactatgaa

SEQ ID NO: 42757 - RNA, 21 nt, synthetic construct
  source 1..21: mol_type = other RNA
aagatgtgcttcaactatgaa

SEQ ID NO: 42758 - RNA, 21 nt, synthetic construct
  source 1..21: mol_type = other RNA
tggggccgagtgcctccggag

SEQ ID NO: 42759 - RNA, 21 nt, synthetic construct
  source 1..21: mol_type = other RNA
acacatgggcatctgcgtgca

SEQ ID NO: 42760 - RNA, 21 nt, synthetic construct
  source 1..21: mol_type = other RNA
ccagagggacgactgtctcca

SEQ ID NO: 42761 - RNA, 21 nt, synthetic construct
  source 1..21: mol_type = other RNA
gagagcctgtggcccaccttg

SEQ ID NO: 42762 - RNA, 21 nt, synthetic construct
  source 1..21: mol_type = other RNA
gtggtgggggacgcactggag

SEQ ID NO: 42763 - RNA, 21 nt, synthetic construct
  source 1..21: mol_type = other RNA
gacccgagccagccctgtgac

SEQ ID NO: 42764 - RNA, 21 nt, synthetic construct
  source 1..21: mol_type = other RNA
ggcgactgctgtcccaccttc

SEQ ID NO: 42765 - RNA, 21 nt, synthetic construct
  source 1..21: mol_type = other RNA
ctgcaactacggccactgccc

SEQ ID NO: 42766 - RNA, 21 nt, synthetic construct
  source 1..21: mol_type = other RNA
ctgcaactacggccactgccc

SEQ ID NO: 42767 - RNA, 21 nt, synthetic construct
  source 1..21: mol_type = other RNA
ctgcaactacggccactgccc

SEQ ID NO: 42768 - RNA, 21 nt, synthetic construct
  source 1..21: mol_type = other RNA
ctgcaactacggccactgccc

SEQ ID NO: 42769 - RNA, 21 nt, synthetic construct
  source 1..21: mol_type = other RNA
ccctgtgacttccactatgag

SEQ ID NO: 42770 - RNA, 21 nt, synthetic construct
  source 1..21: mol_type = other RNA
gacttccactacaagaccttc

SEQ ID NO: 42771 - RNA, 21 nt, synthetic construct
  source 1..21: mol_type = other RNA
cttccactacaagaccttcga

SEQ ID NO: 42772 - RNA, 21 nt, synthetic construct
  source 1..21: mol_type = other RNA
ttccactacaagaccttcgac

SEQ ID NO: 42773 - RNA, 21 nt, synthetic construct
  source 1..21: mol_type = other RNA
ccctcagtgtggagaatgaga

SEQ ID NO: 42774 - RNA, 21 nt, synthetic construct
  source 1..21: mol_type = other RNA
cctccactccagagactgccc

SEQ ID NO: 42775 - RNA, 21 nt, synthetic construct
  source 1..21: mol_type = other RNA
cctccactccagagactgccc

SEQ ID NO: 42776 - RNA, 21 nt, synthetic construct
  source 1..21: mol_type = other RNA
gtggtcacccgtgttgtcatc

SEQ ID NO: 42777 - RNA, 21 nt, synthetic construct
  source 1..21: mol_type = other RNA
tcgcccggggaagtcatctac

SEQ ID NO: 42778 - RNA, 21 nt, synthetic construct
  source 1..21: mol_type = other RNA
tgcctgcaacaatactacctg

SEQ ID NO: 42779 - RNA, 21 nt, synthetic construct
  source 1..21: mol_type = other RNA
cccggcgcgtgagctttgttc

SEQ ID NO: 42780 - RNA, 21 nt, synthetic construct
  source 1..21: mol_type = other RNA
actacgagctgcgggttctct

SEQ ID NO: 42781 - RNA, 21 nt, synthetic construct
  source 1..21: mol_type = other RNA
tacgcctacgtggtggatgcc

SEQ ID NO: 42782 - RNA, 21 nt, synthetic construct
  source 1..21: mol_type = other RNA
cacgcccgatggccagccagt

SEQ ID NO: 42783 - RNA, 21 nt, synthetic construct
  source 1..21: mol_type = other RNA
caagaccttcgacggcgacgt

SEQ ID NO: 42784 - RNA, 21 nt, synthetic construct
  source 1..21: mol_type = other RNA
ctacaagaccttcgacggcga

SEQ ID NO: 42785 - RNA, 21 nt, synthetic construct
  source 1..21: mol_type = other RNA
agaccttcgacggcgacgtct

SEQ ID NO: 42786 - RNA, 21 nt, synthetic construct
  source 1..21: mol_type = other RNA
cggcgacgtcttccgcttccc

SEQ ID NO: 42787 - RNA, 21 nt, synthetic construct
  source 1..21: mol_type = other RNA
caaagcctgtggccaacgtca

SEQ ID NO: 42788 - RNA, 21 nt, synthetic construct
  source 1..21: mol_type = other RNA
ccgacagcagaaaggatggct

SEQ ID NO: 42789 - RNA, 21 nt, synthetic construct
  source 1..21: mol_type = other RNA
agttgcaaggacatggccaag

SEQ ID NO: 42790 - RNA, 21 nt, synthetic construct
  source 1..21: mol_type = other RNA
ctcgcccggggaagtcatcta

SEQ ID NO: 42791 - RNA, 21 nt, synthetic construct
  source 1..21: mol_type = other RNA
gccgagaacccctgctgcccc

SEQ ID NO: 42792 - RNA, 21 nt, synthetic construct
  source 1..21: mol_type = other RNA
ccgagaacccctgctgccccg

SEQ ID NO: 42793 - RNA, 21 nt, synthetic construct
  source 1..21: mol_type = other RNA
cgtacctggccgcctgcgccc

SEQ ID NO: 42794 - RNA, 21 nt, synthetic construct
  source 1..21: mol_type = other RNA
ttgccgaggaggactgcccct

SEQ ID NO: 42795 - RNA, 21 nt, synthetic construct
  source 1..21: mol_type = other RNA
ggggacaacaccacccacggg

SEQ ID NO: 42796 - RNA, 21 nt, synthetic construct
  source 1..21: mol_type = other RNA
ccacggccccaccttcgccgc

SEQ ID NO: 42797 - RNA, 21 nt, synthetic construct
  source 1..21: mol_type = other RNA
accgtgagcaggtggggaagt

SEQ ID NO: 42798 - RNA, 21 nt, synthetic construct
  source 1..21: mol_type = other RNA
accgtgagcaggtggggaagt

SEQ ID NO: 42799 - RNA, 21 nt, synthetic construct
  source 1..21: mol_type = other RNA
accgtgagcaggtggggaagt

SEQ ID NO: 42800 - RNA, 21 nt, synthetic construct
  source 1..21: mol_type = other RNA
accgtgagcaggtggggaagt

SEQ ID NO: 42801 - RNA, 21 nt, synthetic construct
  source 1..21: mol_type = other RNA
accctgtggaccacgtggacc

SEQ ID NO: 42802 - RNA, 21 nt, synthetic construct
  source 1..21: mol_type = other RNA
tcacacccccaaagtggtgac

SEQ ID NO: 42803 - RNA, 21 nt, synthetic construct
  source 1..21: mol_type = other RNA
tgaccaccatggccactatgc

SEQ ID NO: 42804 - RNA, 21 nt, synthetic construct
  source 1..21: mol_type = other RNA
ggaccacccgcacccctgcag

SEQ ID NO: 42805 - RNA, 21 nt, synthetic construct
  source 1..21: mol_type = other RNA
cgcccggggaagtcatctaca

SEQ ID NO: 42806 - RNA, 21 nt, synthetic construct
  source 1..21: mol_type = other RNA
gcccggggaagtcatctacaa

SEQ ID NO: 42807 - RNA, 21 nt, synthetic construct
  source 1..21: mol_type = other RNA
cccggggaagtcatctacaat

SEQ ID NO: 42808 - RNA, 21 nt, synthetic construct
  source 1..21: mol_type = other RNA
catcctgcccagatgtgtcca

SEQ ID NO: 42809 - RNA, 21 nt, synthetic construct
  source 1..21: mol_type = other RNA
tctgcgagggctcctgccccg

SEQ ID NO: 42810 - RNA, 21 nt, synthetic construct
  source 1..21: mol_type = other RNA
actaccccaagtctgaacaac

SEQ ID NO: 42811 - RNA, 21 nt, synthetic construct
  source 1..21: mol_type = other RNA
gacggacaacgagaactgcct

SEQ ID NO: 42812 - RNA, 21 nt, synthetic construct
  source 1..21: mol_type = other RNA
gagcgtccaagtactcagcag

SEQ ID NO: 42813 - RNA, 21 nt, synthetic construct
  source 1..21: mol_type = other RNA
aggtcgcaacggccaggtcag

SEQ ID NO: 42814 - RNA, 21 nt, synthetic construct
  source 1..21: mol_type = other RNA
tgcccgcccaggagtgcccct

SEQ ID NO: 42815 - RNA, 21 nt, synthetic construct
  source 1..21: mol_type = other RNA
tgcctacgcccaggcctgcca

SEQ ID NO: 42816 - RNA, 21 nt, synthetic construct
  source 1..21: mol_type = other RNA
gatcgctacagctttgaaggc

SEQ ID NO: 42817 - RNA, 21 nt, synthetic construct
  source 1..21: mol_type = other RNA
cggggactacatcaaggtcag

SEQ ID NO: 42818 - RNA, 21 nt, synthetic construct
  source 1..21: mol_type = other RNA
ccaggacccaacggtgcaatg

SEQ ID NO: 42819 - RNA, 21 nt, synthetic construct
  source 1..21: mol_type = other RNA
cctcaggaaaaccggctgctg

SEQ ID NO: 42820 - RNA, 21 nt, synthetic construct
  source 1..21: mol_type = other RNA
aagtgtcggacccgagccagc

SEQ ID NO: 42821 - RNA, 21 nt, synthetic construct
  source 1..21: mol_type = other RNA
ctacgaccgcaaccactggat

SEQ ID NO: 42822 - RNA, 21 nt, synthetic construct
  source 1..21: mol_type = other RNA
accatgcgtgtggacattcct

SEQ ID NO: 42823 - RNA, 21 nt, synthetic construct
  source 1..21: mol_type = other RNA
caacaccctcctctagcacac

SEQ ID NO: 42824 - RNA, 21 nt, synthetic construct
  source 1..21: mol_type = other RNA
acgtggaccgtcccagcacag

SEQ ID NO: 42825 - RNA, 21 nt, synthetic construct
  source 1..21: mol_type = other RNA
ccgaccgagccggctgccatt

SEQ ID NO: 42826 - RNA, 21 nt, synthetic construct
  source 1..21: mol_type = other RNA
atcagcgaccactgcaggggc

SEQ ID NO: 42827 - RNA, 21 nt, synthetic construct
  source 1..21: mol_type = other RNA
agtgacgaccactgcagggga

SEQ ID NO: 42828 - RNA, 21 nt, synthetic construct
  source 1..21: mol_type = other RNA
gacggcacctcttacaccttc

SEQ ID NO: 42829 - RNA, 21 nt, synthetic construct
  source 1..21: mol_type = other RNA
gaaatgtgccgacagcagctt

SEQ ID NO: 42830 - RNA, 21 nt, synthetic construct
  source 1..21: mol_type = other RNA
ggtggtgcacgacgagggcgc

SEQ ID NO: 42831 - RNA, 21 nt, synthetic construct
  source 1..21: mol_type = other RNA
atgacgtcggtgcaagggtcc

SEQ ID NO: 42832 - RNA, 21 nt, synthetic construct
  source 1..21: mol_type = other RNA
gacagagacgacaatgagccc

SEQ ID NO: 42833 - RNA, 21 nt, synthetic construct
  source 1..21: mol_type = other RNA
gtggaccacgtggaccgtccc

SEQ ID NO: 42834 - RNA, 21 nt, synthetic construct
  source 1..21: mol_type = other RNA
tccccgacagcagaaaggatg

SEQ ID NO: 42835 - RNA, 21 nt, synthetic construct
  source 1..21: mol_type = other RNA
caccaaagtgtacaagccatg

SEQ ID NO: 42836 - RNA, 21 nt, synthetic construct
  source 1..21: mol_type = other RNA
acaactgcaccgtgtacctct

SEQ ID NO: 42837 - RNA, 21 nt, synthetic construct
  source 1..21: mol_type = other RNA
agccgagctgggagaatgcag

SEQ ID NO: 42838 - RNA, 21 nt, synthetic construct
  source 1..21: mol_type = other RNA
ggcgtccaacggctccgtcct

SEQ ID NO: 42839 - RNA, 21 nt, synthetic construct
  source 1..21: mol_type = other RNA
aacccccagcgcgcgcagctc

SEQ ID NO: 42840 - RNA, 21 nt, synthetic construct
  source 1..21: mol_type = other RNA
cttcctggtcatcgagaccca

SEQ ID NO: 42841 - RNA, 21 nt, synthetic construct
  source 1..21: mol_type = other RNA
tgggaggcggagactttgaga

SEQ ID NO: 42842 - RNA, 21 nt, synthetic construct
  source 1..21: mol_type = other RNA
agagtcccccgctctgtcacg

SEQ ID NO: 42843 - RNA, 21 nt, synthetic construct
  source 1..21: mol_type = other RNA
acctcgcagactgggtccagc

SEQ ID NO: 42844 - RNA, 21 nt, synthetic construct
  source 1..21: mol_type = other RNA
cccgtgacggtcaccccctcg

SEQ ID NO: 42845 - RNA, 21 nt, synthetic construct
  source 1..21: mol_type = other RNA
aggatccgggtcctctgctgc

SEQ ID NO: 42846 - RNA, 21 nt, synthetic construct
  source 1..21: mol_type = other RNA
accctctcagaaggactgaca

SEQ ID NO: 42847 - RNA, 21 nt, synthetic construct
  source 1..21: mol_type = other RNA
gctggcaccccacatgtgagc

SEQ ID NO: 42848 - RNA, 21 nt, synthetic construct
  source 1..21: mol_type = other RNA
atgtccacaatccacccctcc

SEQ ID NO: 42849 - RNA, 21 nt, synthetic construct
  source 1..21: mol_type = other RNA
ggccaccacgacaagggccac

SEQ ID NO: 42850 - RNA, 21 nt, synthetic construct
  source 1..21: mol_type = other RNA
gctggcaccccacatgtgagc

SEQ ID NO: 42851 - RNA, 21 nt, synthetic construct
  source 1..21: mol_type = other RNA
atgtccacaatccacccctcc

SEQ ID NO: 42852 - RNA, 21 nt, synthetic construct
  source 1..21: mol_type = other RNA
ggccaccacgacaagggccac

SEQ ID NO: 42853 - RNA, 21 nt, synthetic construct
  source 1..21: mol_type = other RNA
gctggcaccccacatgtgagc

SEQ ID NO: 42854 - RNA, 21 nt, synthetic construct
  source 1..21: mol_type = other RNA
atgacaagggccaccaattcc

SEQ ID NO: 42855 - RNA, 21 nt, synthetic construct
  source 1..21: mol_type = other RNA
gcagtgtgcaatcagcactgt

SEQ ID NO: 42856 - RNA, 21 nt, synthetic construct
  source 1..21: mol_type = other RNA
agtgtgcaatcagcactgtga

SEQ ID NO: 42857 - RNA, 21 nt, synthetic construct
  source 1..21: mol_type = other RNA
agctttacagccatcccctcc

SEQ ID NO: 42858 - RNA, 21 nt, synthetic construct
  source 1..21: mol_type = other RNA
agctttacagccatcccctcc

SEQ ID NO: 42859 - RNA, 21 nt, synthetic construct
  source 1..21: mol_type = other RNA
agctttacagccatcccctcc

SEQ ID NO: 42860 - RNA, 21 nt, synthetic construct
  source 1..21: mol_type = other RNA
acaaccgtgtcgtcctgctgg

SEQ ID NO: 42861 - RNA, 21 nt, synthetic construct
  source 1..21: mol_type = other RNA
acaacgagaactgcctgaaag

SEQ ID NO: 42862 - RNA, 21 nt, synthetic construct
  source 1..21: mol_type = other RNA
ccgtgtgttcatgtacgggtg

SEQ ID NO: 42863 - RNA, 21 nt, synthetic construct
  source 1..21: mol_type = other RNA
gtccccacacggtgcgcacag

SEQ ID NO: 42864 - RNA, 21 nt, synthetic construct
  source 1..21: mol_type = other RNA
tgctggcaccccacatgtgag

SEQ ID NO: 42865 - RNA, 21 nt, synthetic construct
  source 1..21: mol_type = other RNA
gtccccacacggtgcgcacag

SEQ ID NO: 42866 - RNA, 21 nt, synthetic construct
  source 1..21: mol_type = other RNA
gtccccacacggtgcgcacag

SEQ ID NO: 42867 - RNA, 21 nt, synthetic construct
  source 1..21: mol_type = other RNA
tgctggcaccccacatgtgag

SEQ ID NO: 42868 - RNA, 21 nt, synthetic construct
  source 1..21: mol_type = other RNA
gtccccacacggtgcgcacag

SEQ ID NO: 42869 - RNA, 21 nt, synthetic construct
  source 1..21: mol_type = other RNA
tgctggcaccccacatgtgag

SEQ ID NO: 42870 - RNA, 21 nt, synthetic construct
  source 1..21: mol_type = other RNA
tgacaatgccatccctctccg

SEQ ID NO: 42871 - RNA, 21 nt, synthetic construct
  source 1..21: mol_type = other RNA
tcgtcctgctggacccaaagc

SEQ ID NO: 42872 - RNA, 21 nt, synthetic construct
  source 1..21: mol_type = other RNA
gtgcaatgtcaggaggatgcc

SEQ ID NO: 42873 - RNA, 21 nt, synthetic construct
  source 1..21: mol_type = other RNA
cccctgggggagttgggccag

SEQ ID NO: 42874 - RNA, 21 nt, synthetic construct
  source 1..21: mol_type = other RNA
ggctcccactattccaccttt

SEQ ID NO: 42875 - RNA, 21 nt, synthetic construct
  source 1..21: mol_type = other RNA
accccgcgctccgtgctcctg

SEQ ID NO: 42876 - RNA, 21 nt, synthetic construct
  source 1..21: mol_type = other RNA
cgtgttctctgagcactgccg

SEQ ID NO: 42877 - RNA, 21 nt, synthetic construct
  source 1..21: mol_type = other RNA
cgtacagctcagcgactggag

SEQ ID NO: 42878 - RNA, 21 nt, synthetic construct
  source 1..21: mol_type = other RNA
gggctggtgtcggatgggagt

SEQ ID NO: 42879 - RNA, 21 nt, synthetic construct
  source 1..21: mol_type = other RNA
cccgcacctcgaccctgctgc

SEQ ID NO: 42880 - RNA, 21 nt, synthetic construct
  source 1..21: mol_type = other RNA
ctgcaggaaccgtgagcaggt

SEQ ID NO: 42881 - RNA, 21 nt, synthetic construct
  source 1..21: mol_type = other RNA
cccgcacctcgaccctgctgc

SEQ ID NO: 42882 - RNA, 21 nt, synthetic construct
  source 1..21: mol_type = other RNA
ctgcaggaaccgtgagcaggt

SEQ ID NO: 42883 - RNA, 21 nt, synthetic construct
  source 1..21: mol_type = other RNA
cccgcacctcgaccctgctgc

SEQ ID NO: 42884 - RNA, 21 nt, synthetic construct
  source 1..21: mol_type = other RNA
ctgcaggaaccgtgagcaggt

SEQ ID NO: 42885 - RNA, 21 nt, synthetic construct
  source 1..21: mol_type = other RNA
cccgcacctcgaccctgctgc

SEQ ID NO: 42886 - RNA, 21 nt, synthetic construct
  source 1..21: mol_type = other RNA
ctgcaggaaccgtgagcaggt

SEQ ID NO: 42887 - RNA, 21 nt, synthetic construct
  source 1..21: mol_type = other RNA
gatccacggccatcccgtcct

SEQ ID NO: 42888 - RNA, 21 nt, synthetic construct
  source 1..21: mol_type = other RNA
ctccacccgggcaactgctgg

SEQ ID NO: 42889 - RNA, 21 nt, synthetic construct
  source 1..21: mol_type = other RNA
agcgggacggaaccactgccg

SEQ ID NO: 42890 - RNA, 21 nt, synthetic construct
  source 1..21: mol_type = other RNA
gcaccgtgtacctctgtgagg

SEQ ID NO: 42891 - RNA, 21 nt, synthetic construct
  source 1..21: mol_type = other RNA
tacgtgttctctgagcactgc

SEQ ID NO: 42892 - RNA, 21 nt, synthetic construct
  source 1..21: mol_type = other RNA
atgccaggaacagctttgagg

SEQ ID NO: 42893 - RNA, 21 nt, synthetic construct
  source 1..21: mol_type = other RNA
cgagagcttccccaactggac

SEQ ID NO: 42894 - RNA, 21 nt, synthetic construct
  source 1..21: mol_type = other RNA
cactccctcctccagtccagg

SEQ ID NO: 42895 - RNA, 21 nt, synthetic construct
  source 1..21: mol_type = other RNA
ttacacccatcccctcttcct

SEQ ID NO: 42896 - RNA, 21 nt, synthetic construct
  source 1..21: mol_type = other RNA
ccggaggggccgtctgtgagc

SEQ ID NO: 42897 - RNA, 21 nt, synthetic construct
  source 1..21: mol_type = other RNA
ggccaccacaaccggggccac

SEQ ID NO: 42898 - RNA, 21 nt, synthetic construct
  source 1..21: mol_type = other RNA
ccggaggggccgtctgtgagc

SEQ ID NO: 42899 - RNA, 21 nt, synthetic construct
  source 1..21: mol_type = other RNA
cactccctcctccagtccagg

SEQ ID NO: 42900 - RNA, 21 nt, synthetic construct
  source 1..21: mol_type = other RNA
gtgaccacgggctgtgagccc

SEQ ID NO: 42901 - RNA, 21 nt, synthetic construct
  source 1..21: mol_type = other RNA
gccggaggggcagtctgtgag

SEQ ID NO: 42902 - RNA, 21 nt, synthetic construct
  source 1..21: mol_type = other RNA
gtgaccacgggctgtgagccc

SEQ ID NO: 42903 - RNA, 21 nt, synthetic construct
  source 1..21: mol_type = other RNA
ccggaggggccgtctgtgagc

SEQ ID NO: 42904 - RNA, 21 nt, synthetic construct
  source 1..21: mol_type = other RNA
cactccctcctccagtccagg

SEQ ID NO: 42905 - RNA, 21 nt, synthetic construct
  source 1..21: mol_type = other RNA
caactgcccttccagcactga

SEQ ID NO: 42906 - RNA, 21 nt, synthetic construct
  source 1..21: mol_type = other RNA
ggccaccacaaccggggccac

SEQ ID NO: 42907 - RNA, 21 nt, synthetic construct
  source 1..21: mol_type = other RNA
cttgaggtgccctgccagagc

SEQ ID NO: 42908 - RNA, 21 nt, synthetic construct
  source 1..21: mol_type = other RNA
caccttctgcgagggctcctg

SEQ ID NO: 42909 - RNA, 21 nt, synthetic construct
  source 1..21: mol_type = other RNA
aactgcatgtttgacacctgc

SEQ ID NO: 42910 - RNA, 21 nt, synthetic construct
  source 1..21: mol_type = other RNA
actcgaactgcatgtttgaca

SEQ ID NO: 42911 - RNA, 21 nt, synthetic construct
  source 1..21: mol_type = other RNA
ctcgaactgcatgtttgacac

SEQ ID NO: 42912 - RNA, 21 nt, synthetic construct
  source 1..21: mol_type = other RNA
acggcgacgtcttccgcttcc

SEQ ID NO: 42913 - RNA, 21 nt, synthetic construct
  source 1..21: mol_type = other RNA
ctttgcaactacgtgttctct

SEQ ID NO: 42914 - RNA, 21 nt, synthetic construct
  source 1..21: mol_type = other RNA
cttcttcatcgtggtgcagac

SEQ ID NO: 42915 - RNA, 21 nt, synthetic construct
  source 1..21: mol_type = other RNA
acaatgggcaccgcccagagc

SEQ ID NO: 42916 - RNA, 21 nt, synthetic construct
  source 1..21: mol_type = other RNA
tgacttccactacaagacctt

SEQ ID NO: 42917 - RNA, 21 nt, synthetic construct
  source 1..21: mol_type = other RNA
actacaagaccttcgacggcg

SEQ ID NO: 42918 - RNA, 21 nt, synthetic construct
  source 1..21: mol_type = other RNA
tacaagaccttcgacggcgac

SEQ ID NO: 42919 - RNA, 21 nt, synthetic construct
  source 1..21: mol_type = other RNA
aagaccttcgacggcgacgtc

SEQ ID NO: 42920 - RNA, 21 nt, synthetic construct
  source 1..21: mol_type = other RNA
gtacctggccgcctgcgccca

SEQ ID NO: 42921 - RNA, 21 nt, synthetic construct
  source 1..21: mol_type = other RNA
ggggggctatggcagtgccag

SEQ ID NO: 42922 - RNA, 21 nt, synthetic construct
  source 1..21: mol_type = other RNA
tccactcgaactgcatgtttg

SEQ ID NO: 42923 - RNA, 21 nt, synthetic construct
  source 1..21: mol_type = other RNA
ccactcgaactgcatgtttga

SEQ ID NO: 42924 - RNA, 21 nt, synthetic construct
  source 1..21: mol_type = other RNA
gaactgcatgtttgacacctg

SEQ ID NO: 42925 - RNA, 21 nt, synthetic construct
  source 1..21: mol_type = other RNA
actgcatgtttgacacctgca

SEQ ID NO: 42926 - RNA, 21 nt, synthetic construct
  source 1..21: mol_type = other RNA
ctgcatgtttgacacctgcaa

SEQ ID NO: 42927 - RNA, 21 nt, synthetic construct
  source 1..21: mol_type = other RNA
agtgcagcatcctccacggcc

SEQ ID NO: 42928 - RNA, 21 nt, synthetic construct
  source 1..21: mol_type = other RNA
cattcaccttcaccaccgcct

SEQ ID NO: 42929 - RNA, 21 nt, synthetic construct
  source 1..21: mol_type = other RNA
caatgggcaccgcccagagcc

SEQ ID NO: 42930 - RNA, 21 nt, synthetic construct
  source 1..21: mol_type = other RNA
ctaccccaacccagaccacag

SEQ ID NO: 42931 - RNA, 21 nt, synthetic construct
  source 1..21: mol_type = other RNA
cggggctgaccagggctcccc

SEQ ID NO: 42932 - RNA, 21 nt, synthetic construct
  source 1..21: mol_type = other RNA
cttctccagggacgaccaccc

SEQ ID NO: 42933 - RNA, 21 nt, synthetic construct
  source 1..21: mol_type = other RNA
cttctccagggacgaccaccc

SEQ ID NO: 42934 - RNA, 21 nt, synthetic construct
  source 1..21: mol_type = other RNA
cttctccagggacgaccaccc

SEQ ID NO: 42935 - RNA, 21 nt, synthetic construct
  source 1..21: mol_type = other RNA
agagtgctgaccaccaccacc

SEQ ID NO: 42936 - RNA, 21 nt, synthetic construct
  source 1..21: mol_type = other RNA
ggctgctgggccccgactggc

SEQ ID NO: 42937 - RNA, 21 nt, synthetic construct
  source 1..21: mol_type = other RNA
tttgctgagtgccacaacctt

SEQ ID NO: 42938 - RNA, 21 nt, synthetic construct
  source 1..21: mol_type = other RNA
agggcgtcttcaagatgtgct

SEQ ID NO: 42939 - RNA, 21 nt, synthetic construct
  source 1..21: mol_type = other RNA
gggtcctctgctgcagtgacg

SEQ ID NO: 42940 - RNA, 21 nt, synthetic construct
  source 1..21: mol_type = other RNA
ggccagcaccacagcagtccc

SEQ ID NO: 42941 - RNA, 21 nt, synthetic construct
  source 1..21: mol_type = other RNA
acgaccatcctgtggcaccag

SEQ ID NO: 42942 - RNA, 21 nt, synthetic construct
  source 1..21: mol_type = other RNA
acggccccaccttcgccgcct

SEQ ID NO: 42943 - RNA, 21 nt, synthetic construct
  source 1..21: mol_type = other RNA
tctaggaaccagagcccacag

SEQ ID NO: 42944 - RNA, 21 nt, synthetic construct
  source 1..21: mol_type = other RNA
gcctgtgccgccaagggcgta

SEQ ID NO: 42945 - RNA, 21 nt, synthetic construct
  source 1..21: mol_type = other RNA
ctgtgtggggacttcaacggc

SEQ ID NO: 42946 - RNA, 21 nt, synthetic construct
  source 1..21: mol_type = other RNA
cacggccccaccttcgccgcc

SEQ ID NO: 42947 - RNA, 21 nt, synthetic construct
  source 1..21: mol_type = other RNA
gccccaccttcgccgcctgcc

SEQ ID NO: 42948 - RNA, 21 nt, synthetic construct
  source 1..21: mol_type = other RNA
cttaccaccacgaccaccaca

SEQ ID NO: 42949 - RNA, 21 nt, synthetic construct
  source 1..21: mol_type = other RNA
ggtcaacagccatgtggacaa

SEQ ID NO: 42950 - RNA, 21 nt, synthetic construct
  source 1..21: mol_type = other RNA
acgttctgcctccatccccat

SEQ ID NO: 42951 - RNA, 21 nt, synthetic construct
  source 1..21: mol_type = other RNA
caacaccctcctctagcacac

SEQ ID NO: 42952 - RNA, 21 nt, synthetic construct
  source 1..21: mol_type = other RNA
tcacactaccaaagtgccaac

SEQ ID NO: 42953 - RNA, 21 nt, synthetic construct
  source 1..21: mol_type = other RNA
cagccccggtgtctagcacac

SEQ ID NO: 42954 - RNA, 21 nt, synthetic construct
  source 1..21: mol_type = other RNA
cctgtgtgcccgccagggcag

SEQ ID NO: 42955 - RNA, 21 nt, synthetic construct
  source 1..21: mol_type = other RNA
ccggaggggcagtctgtgagc

SEQ ID NO: 42956 - RNA, 21 nt, synthetic construct
  source 1..21: mol_type = other RNA
cattgccgaggaggactgccc

SEQ ID NO: 42957 - RNA, 21 nt, synthetic construct
  source 1..21: mol_type = other RNA
ccgcctgtccatgcctgctgc

SEQ ID NO: 42958 - RNA, 21 nt, synthetic construct
  source 1..21: mol_type = other RNA
cgggccgagaacccctgctgc

SEQ ID NO: 42959 - RNA, 21 nt, synthetic construct
  source 1..21: mol_type = other RNA
gggccgagaacccctgctgcc

SEQ ID NO: 42960 - RNA, 21 nt, synthetic construct
  source 1..21: mol_type = other RNA
aggcacggtgctggatgacat

SEQ ID NO: 42961 - RNA, 21 nt, synthetic construct
  source 1..21: mol_type = other RNA
ccactgtgtggacggctgctt

SEQ ID NO: 42962 - RNA, 21 nt, synthetic construct
  source 1..21: mol_type = other RNA
ccatcatcaaccccaagccct

SEQ ID NO: 42963 - RNA, 21 nt, synthetic construct
  source 1..21: mol_type = other RNA
catcatcaaccccaagccctt

SEQ ID NO: 42964 - RNA, 21 nt, synthetic construct
  source 1..21: mol_type = other RNA
gtggctggactacagctaccc

SEQ ID NO: 42965 - RNA, 21 nt, synthetic construct
  source 1..21: mol_type = other RNA
gtggctggactacagctaccc

SEQ ID NO: 42966 - RNA, 21 nt, synthetic construct
  source 1..21: mol_type = other RNA
gtggctggactacagctaccc

SEQ ID NO: 42967 - RNA, 21 nt, synthetic construct
  source 1..21: mol_type = other RNA
gtggctggactacagctaccc

SEQ ID NO: 42968 - RNA, 21 nt, synthetic construct
  source 1..21: mol_type = other RNA
gctgctgggccccgactggca

SEQ ID NO: 42969 - RNA, 21 nt, synthetic construct
  source 1..21: mol_type = other RNA
ctgctgggccccgactggcac

SEQ ID NO: 42970 - RNA, 21 nt, synthetic construct
  source 1..21: mol_type = other RNA
tgcagccactggatccacggc

SEQ ID NO: 42971 - RNA, 21 nt, synthetic construct
  source 1..21: mol_type = other RNA
gcctacgcccaggcctgccac

SEQ ID NO: 42972 - RNA, 21 nt, synthetic construct
  source 1..21: mol_type = other RNA
cctgggaccggaagaccagcg

SEQ ID NO: 42973 - RNA, 21 nt, synthetic construct
  source 1..21: mol_type = other RNA
agctgcgggttctctgctgcg

SEQ ID NO: 42974 - RNA, 21 nt, synthetic construct
  source 1..21: mol_type = other RNA
ttccttcgtgcctgtggacgg

SEQ ID NO: 42975 - RNA, 21 nt, synthetic construct
  source 1..21: mol_type = other RNA
gagtcacccccttctccaggg

SEQ ID NO: 42976 - RNA, 21 nt, synthetic construct
  source 1..21: mol_type = other RNA
gagtcacccccttctccaggg

SEQ ID NO: 42977 - RNA, 21 nt, synthetic construct
  source 1..21: mol_type = other RNA
gagtcacccccttctccaggg

SEQ ID NO: 42978 - RNA, 21 nt, synthetic construct
  source 1..21: mol_type = other RNA
ccagggcgcctgtcccacctc

SEQ ID NO: 42979 - RNA, 21 nt, synthetic construct
  source 1..21: mol_type = other RNA
ctgcctacgcccaggcctgcc

SEQ ID NO: 42980 - RNA, 21 nt, synthetic construct
  source 1..21: mol_type = other RNA
cctgcacctgcaggaaccgga

SEQ ID NO: 42981 - RNA, 21 nt, synthetic construct
  source 1..21: mol_type = other RNA
aggccccacgacgcctgcagg

SEQ ID NO: 42982 - RNA, 21 nt, synthetic construct
  source 1..21: mol_type = other RNA
gcctccagtgtggatcagcac

SEQ ID NO: 42983 - RNA, 21 nt, synthetic construct
  source 1..21: mol_type = other RNA
gggacgaccaccccgggccac

SEQ ID NO: 42984 - RNA, 21 nt, synthetic construct
  source 1..21: mol_type = other RNA
gggacgaccaccccgggccac

SEQ ID NO: 42985 - RNA, 21 nt, synthetic construct
  source 1..21: mol_type = other RNA
gcctccagtgtggatcagcac

SEQ ID NO: 42986 - RNA, 21 nt, synthetic construct
  source 1..21: mol_type = other RNA
gggacgaccaccccgggccac

SEQ ID NO: 42987 - RNA, 21 nt, synthetic construct
  source 1..21: mol_type = other RNA
gcctccagtgtggatcagcac

SEQ ID NO: 42988 - RNA, 21 nt, synthetic construct
  source 1..21: mol_type = other RNA
gggacgaccaccccgggccac

SEQ ID NO: 42989 - RNA, 21 nt, synthetic construct
  source 1..21: mol_type = other RNA
gcctccagtgtggatcagcac

SEQ ID NO: 42990 - RNA, 21 nt, synthetic construct
  source 1..21: mol_type = other RNA
caggagtcctaccctgggaga

SEQ ID NO: 42991 - RNA, 21 nt, synthetic construct
  source 1..21: mol_type = other RNA
gccccacggccaccccgtcct

SEQ ID NO: 42992 - RNA, 21 nt, synthetic construct
  source 1..21: mol_type = other RNA
gccccacggccaccccgtcct

SEQ ID NO: 42993 - RNA, 21 nt, synthetic construct
  source 1..21: mol_type = other RNA
ttgggcacatggcgcccctca

SEQ ID NO: 42994 - RNA, 21 nt, synthetic construct
  source 1..21: mol_type = other RNA
gggccagccgcggaactggag

SEQ ID NO: 42995 - RNA, 21 nt, synthetic construct
  source 1..21: mol_type = other RNA
cgcctgtccatgcctgctgca

SEQ ID NO: 42996 - RNA, 21 nt, synthetic construct
  source 1..21: mol_type = other RNA
cgaagtgcccacccagccagc

SEQ ID NO: 42997 - RNA, 21 nt, synthetic construct
  source 1..21: mol_type = other RNA
ggctccctccctgcccgtccc

SEQ ID NO: 42998 - RNA, 21 nt, synthetic construct
  source 1..21: mol_type = other RNA
acctgcccgtgtgccaccttt

SEQ ID NO: 42999 - RNA, 21 nt, synthetic construct
  source 1..21: mol_type = other RNA
ggggcagaaggtgcactgtga

SEQ ID NO: 43000 - RNA, 21 nt, synthetic construct
  source 1..21: mol_type = other RNA
agttccacgtccaccccctcc

SEQ ID NO: 43001 - RNA, 21 nt, synthetic construct
  source 1..21: mol_type = other RNA
tgcaactctaggaaccagagc

SEQ ID NO: 43002 - RNA, 21 nt, synthetic construct
  source 1..21: mol_type = other RNA
cgcgctccgtgctcctgctgc

SEQ ID NO: 43003 - RNA, 21 nt, synthetic construct
  source 1..21: mol_type = other RNA
cccagaagggtgaggggccag

SEQ ID NO: 43004 - RNA, 21 nt, synthetic construct
  source 1..21: mol_type = other RNA
ggcgacgtcttccgcttccct

SEQ ID NO: 43005 - RNA, 21 nt, synthetic construct
  source 1..21: mol_type = other RNA
ccggctccaccaccaacccct

SEQ ID NO: 43006 - RNA, 21 nt, synthetic construct
  source 1..21: mol_type = other RNA
ccggctccaccaccaacccct

SEQ ID NO: 43007 - RNA, 21 nt, synthetic construct
  source 1..21: mol_type = other RNA
ccggctccaccaccaacccct

SEQ ID NO: 43008 - RNA, 21 nt, synthetic construct
  source 1..21: mol_type = other RNA
ccggctccaccaccaacccct

SEQ ID NO: 43009 - RNA, 21 nt, synthetic construct
  source 1..21: mol_type = other RNA
ccggctccaccaccaacccct

SEQ ID NO: 43010 - RNA, 21 nt, synthetic construct
  source 1..21: mol_type = other RNA
caccacaactgtggccactgg

SEQ ID NO: 43011 - RNA, 21 nt, synthetic construct
  source 1..21: mol_type = other RNA
gccgaacaccacggccaccac

SEQ ID NO: 43012 - RNA, 21 nt, synthetic construct
  source 1..21: mol_type = other RNA
gccacaccacggccacctcca

SEQ ID NO: 43013 - RNA, 21 nt, synthetic construct
  source 1..21: mol_type = other RNA
cgtgcggccggaggggccgtc

SEQ ID NO: 43014 - RNA, 21 nt, synthetic construct
  source 1..21: mol_type = other RNA
gaacagaccaccacacccgtg

SEQ ID NO: 43015 - RNA, 21 nt, synthetic construct
  source 1..21: mol_type = other RNA
caccacaactgtggccactgg

SEQ ID NO: 43016 - RNA, 21 nt, synthetic construct
  source 1..21: mol_type = other RNA
tccacagctaccagctttaca

SEQ ID NO: 43017 - RNA, 21 nt, synthetic construct
  source 1..21: mol_type = other RNA
tgcccaccggttccacggcca

SEQ ID NO: 43018 - RNA, 21 nt, synthetic construct
  source 1..21: mol_type = other RNA
ggaatctcagcctctacctgg

SEQ ID NO: 43019 - RNA, 21 nt, synthetic construct
  source 1..21: mol_type = other RNA
tcagcctctacctggacaacc

SEQ ID NO: 43020 - RNA, 21 nt, synthetic construct
  source 1..21: mol_type = other RNA
gagtgccacaaccttgtgccc

SEQ ID NO: 43021 - RNA, 21 nt, synthetic construct
  source 1..21: mol_type = other RNA
gaggggatggcggagggctgc

SEQ ID NO: 43022 - RNA, 21 nt, synthetic construct
  source 1..21: mol_type = other RNA
gcatctgcgtgcaggcctgcc

SEQ ID NO: 43023 - RNA, 21 nt, synthetic construct
  source 1..21: mol_type = other RNA
gcaggcctgcccctgcgtggg

SEQ ID NO: 43024 - RNA, 21 nt, synthetic construct
  source 1..21: mol_type = other RNA
cgagacggtgtgcgtgtgcaa

SEQ ID NO: 43025 - RNA, 21 nt, synthetic construct
  source 1..21: mol_type = other RNA
acatgtgtacctgcctctctg

SEQ ID NO: 43026 - RNA, 21 nt, synthetic construct
  source 1..21: mol_type = other RNA
ggtggagtccatttgctgacc

SEQ ID NO: 43027 - RNA, 21 nt, synthetic construct
  source 1..21: mol_type = other RNA
gtggagtccatttgctgaccc

SEQ ID NO: 43028 - RNA, 21 nt, synthetic construct
  source 1..21: mol_type = other RNA
cccccggcctgtgtgtggcac

SEQ ID NO: 43029 - RNA, 21 nt, synthetic construct
  source 1..21: mol_type = other RNA
ccgtgggtgaaaccggcccca

SEQ ID NO: 43030 - RNA, 21 nt, synthetic construct
  source 1..21: mol_type = other RNA
gccttgcccctccctgatgtc

SEQ ID NO: 43031 - RNA, 21 nt, synthetic construct
  source 1..21: mol_type = other RNA
tgccacggccggagcgcccgc

SEQ ID NO: 43032 - RNA, 21 nt, synthetic construct
  source 1..21: mol_type = other RNA
gcaacggccaggtcagagagg

SEQ ID NO: 43033 - RNA, 21 nt, synthetic construct
  source 1..21: mol_type = other RNA
ccgcgccgcctacgaggactt

SEQ ID NO: 43034 - RNA, 21 nt, synthetic construct
  source 1..21: mol_type = other RNA
aggactgcaaccacccttcca

SEQ ID NO: 43035 - RNA, 21 nt, synthetic construct
  source 1..21: mol_type = other RNA
aggactgcaaccacccttcca

SEQ ID NO: 43036 - RNA, 21 nt, synthetic construct
  source 1..21: mol_type = other RNA
aggactgcaaccacccttcca

SEQ ID NO: 43037 - RNA, 21 nt, synthetic construct
  source 1..21: mol_type = other RNA
ggagcagagcggggactacat

SEQ ID NO: 43038 - RNA, 21 nt, synthetic construct
  source 1..21: mol_type = other RNA
cccccatcactgatcaccacg

SEQ ID NO: 43039 - RNA, 21 nt, synthetic construct
  source 1..21: mol_type = other RNA
gcaggggacgtgccacaaccc

SEQ ID NO: 43040 - RNA, 21 nt, synthetic construct
  source 1..21: mol_type = other RNA
caacaccctcctctagcacac

SEQ ID NO: 43041 - RNA, 21 nt, synthetic construct
  source 1..21: mol_type = other RNA
caacaccctcctctagcacac

SEQ ID NO: 43042 - RNA, 21 nt, synthetic construct
  source 1..21: mol_type = other RNA
caacaccctcctctagcacac

SEQ ID NO: 43043 - RNA, 21 nt, synthetic construct
  source 1..21: mol_type = other RNA
gggctgcgagaccgaggtcaa

SEQ ID NO: 43044 - RNA, 21 nt, synthetic construct
  source 1..21: mol_type = other RNA
ctgccccacctgcccgtgtgc

SEQ ID NO: 43045 - RNA, 21 nt, synthetic construct
  source 1..21: mol_type = other RNA
acgcgtagccggtccgtggtg

SEQ ID NO: 43046 - RNA, 21 nt, synthetic construct
  source 1..21: mol_type = other RNA
cctactccaacatccgtgcgg

SEQ ID NO: 43047 - RNA, 21 nt, synthetic construct
  source 1..21: mol_type = other RNA
cctactccaacatccgtgcgg

SEQ ID NO: 43048 - RNA, 21 nt, synthetic construct
  source 1..21: mol_type = other RNA
cctactccaacatccgtgcgg

SEQ ID NO: 43049 - RNA, 21 nt, synthetic construct
  source 1..21: mol_type = other RNA
cctactccaacatccgtgcgg

SEQ ID NO: 43050 - RNA, 21 nt, synthetic construct
  source 1..21: mol_type = other RNA
ctactccaacatccgtgcggc

SEQ ID NO: 43051 - RNA, 21 nt, synthetic construct
  source 1..21: mol_type = other RNA
ctactccaacatccgtgcggc

SEQ ID NO: 43052 - RNA, 21 nt, synthetic construct
  source 1..21: mol_type = other RNA
ctactccaacatccgtgcggc

SEQ ID NO: 43053 - RNA, 21 nt, synthetic construct
  source 1..21: mol_type = other RNA
ctactccaacatccgtgcggc

SEQ ID NO: 43054 - RNA, 21 nt, synthetic construct
  source 1..21: mol_type = other RNA
ccggtaccacccagcactcga

SEQ ID NO: 43055 - RNA, 21 nt, synthetic construct
  source 1..21: mol_type = other RNA
ccggtaccacccagcactcga

SEQ ID NO: 43056 - RNA, 21 nt, synthetic construct
  source 1..21: mol_type = other RNA
ccggtaccacccagcactcga

SEQ ID NO: 43057 - RNA, 21 nt, synthetic construct
  source 1..21: mol_type = other RNA
accagatcctcttcaacgcac

SEQ ID NO: 43058 - RNA, 21 nt, synthetic construct
  source 1..21: mol_type = other RNA
cccacatcggccccaataacc

SEQ ID NO: 43059 - RNA, 21 nt, synthetic construct
  source 1..21: mol_type = other RNA
cacagagccgagcactatagc

SEQ ID NO: 43060 - RNA, 21 nt, synthetic construct
  source 1..21: mol_type = other RNA
acccaccctacaagatacgct

SEQ ID NO: 43061 - RNA, 21 nt, synthetic construct
  source 1..21: mol_type = other RNA
cgggttctctgctgcgaatac

SEQ ID NO: 43062 - RNA, 21 nt, synthetic construct
  source 1..21: mol_type = other RNA
actgtgacgtccacttcggcc

SEQ ID NO: 43063 - RNA, 21 nt, synthetic construct
  source 1..21: mol_type = other RNA
cccttgcactgtcctaacggc

SEQ ID NO: 43064 - RNA, 21 nt, synthetic construct
  source 1..21: mol_type = other RNA
aggcggagactttgagacgtt

SEQ ID NO: 43065 - RNA, 21 nt, synthetic construct
  source 1..21: mol_type = other RNA
tggggagtgcgtccagaccgc

SEQ ID NO: 43066 - RNA, 21 nt, synthetic construct
  source 1..21: mol_type = other RNA
accacggccactacgatcacg

SEQ ID NO: 43067 - RNA, 21 nt, synthetic construct
  source 1..21: mol_type = other RNA
accacggccactacgatcacg

SEQ ID NO: 43068 - RNA, 21 nt, synthetic construct
  source 1..21: mol_type = other RNA
accacggccactacgatcaca

SEQ ID NO: 43069 - RNA, 21 nt, synthetic construct
  source 1..21: mol_type = other RNA
accacggccactacgatcacg

SEQ ID NO: 43070 - RNA, 21 nt, synthetic construct
  source 1..21: mol_type = other RNA
accacggccactacgatcacg

SEQ ID NO: 43071 - RNA, 21 nt, synthetic construct
  source 1..21: mol_type = other RNA
ccgccgtgcaaccgtcccggc

SEQ ID NO: 43072 - RNA, 21 nt, synthetic construct
  source 1..21: mol_type = other RNA
aacactcacgagcgagctgtc

SEQ ID NO: 43073 - RNA, 21 nt, synthetic construct
  source 1..21: mol_type = other RNA
gatcccaaatacgccaaccag

SEQ ID NO: 43074 - RNA, 21 nt, synthetic construct
  source 1..21: mol_type = other RNA
agagcctggaggcttacgcag

SEQ ID NO: 43075 - RNA, 21 nt, synthetic construct
  source 1..21: mol_type = other RNA
ctgatcctccaagaggggacc

SEQ ID NO: 43076 - RNA, 21 nt, synthetic construct
  source 1..21: mol_type = other RNA
ccaggccctgttctcaacgcc

SEQ ID NO: 43077 - RNA, 21 nt, synthetic construct
  source 1..21: mol_type = other RNA
caggccctgttctcaacgccg

SEQ ID NO: 43078 - RNA, 21 nt, synthetic construct
  source 1..21: mol_type = other RNA
ccagtaccacccagcactcga

SEQ ID NO: 43079 - RNA, 21 nt, synthetic construct
  source 1..21: mol_type = other RNA
gatccatgcacgctttgggaa

SEQ ID NO: 43080 - RNA, 21 nt, synthetic construct
  source 1..21: mol_type = other RNA
agatcctcttcaacgcacaca

SEQ ID NO: 43081 - RNA, 21 nt, synthetic construct
  source 1..21: mol_type = other RNA
caagccatgcggccccataca

SEQ ID NO: 43082 - RNA, 21 nt, synthetic construct
  source 1..21: mol_type = other RNA
gtgcccctgctacgctcacgg

SEQ ID NO: 43083 - RNA, 21 nt, synthetic construct
  source 1..21: mol_type = other RNA
ctgcccctgtgtgcacaacga

SEQ ID NO: 43084 - RNA, 21 nt, synthetic construct
  source 1..21: mol_type = other RNA
cctccactctggggacgaccc

SEQ ID NO: 43085 - RNA, 21 nt, synthetic construct
  source 1..21: mol_type = other RNA
tccacccttccaacacgctca

SEQ ID NO: 43086 - RNA, 21 nt, synthetic construct
  source 1..21: mol_type = other RNA
gcgccaacactcacgagcgag

SEQ ID NO: 43087 - RNA, 21 nt, synthetic construct
  source 1..21: mol_type = other RNA
ggcgccaacactcacgagcga

SEQ ID NO: 43088 - RNA, 21 nt, synthetic construct
  source 1..21: mol_type = other RNA
gtgcggcctgacggacaacga

SEQ ID NO: 43089 - RNA, 21 nt, synthetic construct
  source 1..21: mol_type = other RNA
ccccacatcggcccccataac

SEQ ID NO: 43090 - RNA, 21 nt, synthetic construct
  source 1..21: mol_type = other RNA
ccccacatcggcccccataac

SEQ ID NO: 43091 - RNA, 21 nt, synthetic construct
  source 1..21: mol_type = other RNA
ccccacatcggcccccataac

SEQ ID NO: 43092 - RNA, 21 nt, synthetic construct
  source 1..21: mol_type = other RNA
ccacgaaggccaccacgacaa

SEQ ID NO: 43093 - RNA, 21 nt, synthetic construct
  source 1..21: mol_type = other RNA
ccacgaaggccaccacgacaa

SEQ ID NO: 43094 - RNA, 21 nt, synthetic construct
  source 1..21: mol_type = other RNA
gtgtgttcatgtacgggtggg

SEQ ID NO: 43095 - RNA, 21 nt, synthetic construct
  source 1..21: mol_type = other RNA
cccaggccctgttctcaacgc

SEQ ID NO: 43096 - RNA, 21 nt, synthetic construct
  source 1..21: mol_type = other RNA
cggccccaataaccacggtgg

SEQ ID NO: 43097 - RNA, 21 nt, synthetic construct
  source 1..21: mol_type = other RNA
gccggctgccatttctacgca

SEQ ID NO: 43098 - RNA, 21 nt, synthetic construct
  source 1..21: mol_type = other RNA
caaggacatggccaagacgtg

SEQ ID NO: 43099 - RNA, 21 nt, synthetic construct
  source 1..21: mol_type = other RNA
ccagggtcagcccccgccgtg

SEQ ID NO: 43100 - RNA, 21 nt, synthetic construct
  source 1..21: mol_type = other RNA
ccccaataaccacggtggtga

SEQ ID NO: 43101 - RNA, 21 nt, synthetic construct
  source 1..21: mol_type = other RNA
tggtgactgcagctacgttct

SEQ ID NO: 43102 - RNA, 21 nt, synthetic construct
  source 1..21: mol_type = other RNA
tgagagagatccatgcacgct

SEQ ID NO: 43103 - RNA, 21 nt, synthetic construct
  source 1..21: mol_type = other RNA
ccccaagtcccagcgctacgc

SEQ ID NO: 43104 - RNA, 21 nt, synthetic construct
  source 1..21: mol_type = other RNA
ccagtgtggctgctacgacaa

SEQ ID NO: 43105 - RNA, 21 nt, synthetic construct
  source 1..21: mol_type = other RNA
tgccccaagtcccagcgctac

SEQ ID NO: 43106 - RNA, 21 nt, synthetic construct
  source 1..21: mol_type = other RNA
gtttgatgaggactaccccaa

SEQ ID NO: 43107 - RNA, 21 nt, synthetic construct
  source 1..21: mol_type = other RNA
tgcgtgaacaagcacctgccc

SEQ ID NO: 43108 - RNA, 21 nt, synthetic construct
  source 1..21: mol_type = other RNA
ctcctccactccggggacgac

SEQ ID NO: 43109 - RNA, 21 nt, synthetic construct
  source 1..21: mol_type = other RNA
tgaggactaccccaagtctga

SEQ ID NO: 43110 - RNA, 21 nt, synthetic construct
  source 1..21: mol_type = other RNA
caaccgaagtgtgagtggaca

SEQ ID NO: 43111 - RNA, 21 nt, synthetic construct
  source 1..21: mol_type = other RNA
caccccgtgggtgaaaccggc

SEQ ID NO: 43112 - RNA, 21 nt, synthetic construct
  source 1..21: mol_type = other RNA
cccctgtgtgcacaacgaggc

SEQ ID NO: 43113 - RNA, 21 nt, synthetic construct
  source 1..21: mol_type = other RNA
acctgcagaagttggatgggc

SEQ ID NO: 43114 - RNA, 21 nt, synthetic construct
  source 1..21: mol_type = other RNA
cccccagtgccgaacaccacg

SEQ ID NO: 43115 - RNA, 21 nt, synthetic construct
  source 1..21: mol_type = other RNA
agcagtgcccggacccgctgc

SEQ ID NO: 43116 - RNA, 21 nt, synthetic construct
  source 1..21: mol_type = other RNA
cccccagtgccgaacaccacg

SEQ ID NO: 43117 - RNA, 21 nt, synthetic construct
  source 1..21: mol_type = other RNA
ggacggcggggacacggccat

SEQ ID NO: 43118 - RNA, 21 nt, synthetic construct
  source 1..21: mol_type = other RNA
cccccagtgccgaacaccacg

SEQ ID NO: 43119 - RNA, 21 nt, synthetic construct
  source 1..21: mol_type = other RNA
cccagtggcatccagtgcgct

SEQ ID NO: 43120 - RNA, 21 nt, synthetic construct
  source 1..21: mol_type = other RNA
ggagaatgagaactacgcccg

SEQ ID NO: 43121 - RNA, 21 nt, synthetic construct
  source 1..21: mol_type = other RNA
cttgtgcccccgggcccattc

SEQ ID NO: 43122 - RNA, 21 nt, synthetic construct
  source 1..21: mol_type = other RNA
gcagctacgttctgtccaaga

SEQ ID NO: 43123 - RNA, 21 nt, synthetic construct
  source 1..21: mol_type = other RNA
ctaccagctttacagccatcc

SEQ ID NO: 43124 - RNA, 21 nt, synthetic construct
  source 1..21: mol_type = other RNA
ctaccagctttacagccatcc

SEQ ID NO: 43125 - RNA, 21 nt, synthetic construct
  source 1..21: mol_type = other RNA
ctaccagctttacagccatcc

SEQ ID NO: 43126 - RNA, 21 nt, synthetic construct
  source 1..21: mol_type = other RNA
ctgcagaagttggatgggccc

SEQ ID NO: 43127 - RNA, 21 nt, synthetic construct
  source 1..21: mol_type = other RNA
gccaacatcaccctgttcaca

SEQ ID NO: 43128 - RNA, 21 nt, synthetic construct
  source 1..21: mol_type = other RNA
cctgccgtgccctggcacctg

SEQ ID NO: 43129 - RNA, 21 nt, synthetic construct
  source 1..21: mol_type = other RNA
ctctggctgcctgcccctcgg

SEQ ID NO: 43130 - RNA, 21 nt, synthetic construct
  source 1..21: mol_type = other RNA
accagaaccaggctgacgact

SEQ ID NO: 43131 - RNA, 21 nt, synthetic construct
  source 1..21: mol_type = other RNA
aaggactgacatcccccagat

SEQ ID NO: 43132 - RNA, 21 nt, synthetic construct
  source 1..21: mol_type = other RNA
ggccgtctgtgagcagcccct

SEQ ID NO: 43133 - RNA, 21 nt, synthetic construct
  source 1..21: mol_type = other RNA
ccaggtcgtggaatgcagcct

SEQ ID NO: 43134 - RNA, 21 nt, synthetic construct
  source 1..21: mol_type = other RNA
cagccccggtgtcagtggaca

SEQ ID NO: 43135 - RNA, 21 nt, synthetic construct
  source 1..21: mol_type = other RNA
ggccgtctgtgagcagcccct

SEQ ID NO: 43136 - RNA, 21 nt, synthetic construct
  source 1..21: mol_type = other RNA
ccaggtcgtggaatgcagcct

SEQ ID NO: 43137 - RNA, 21 nt, synthetic construct
  source 1..21: mol_type = other RNA
gcaccaacaaccagagggacg

SEQ ID NO: 43138 - RNA, 21 nt, synthetic construct
  source 1..21: mol_type = other RNA
ccaggtcgtggaatgcagcct

SEQ ID NO: 43139 - RNA, 21 nt, synthetic construct
  source 1..21: mol_type = other RNA
caacgccattcaccttcacca

SEQ ID NO: 43140 - RNA, 21 nt, synthetic construct
  source 1..21: mol_type = other RNA
ggccgtctgtgagcagcccct

SEQ ID NO: 43141 - RNA, 21 nt, synthetic construct
  source 1..21: mol_type = other RNA
ccaggtcgtggaatgcagcct

SEQ ID NO: 43142 - RNA, 21 nt, synthetic construct
  source 1..21: mol_type = other RNA
ccgtgtgttctgctgcaacta

SEQ ID NO: 43143 - RNA, 21 nt, synthetic construct
  source 1..21: mol_type = other RNA
ctgatgctgagccaggtcttt

SEQ ID NO: 43144 - RNA, 21 nt, synthetic construct
  source 1..21: mol_type = other RNA
accttgtgcccccgggcccat

SEQ ID NO: 43145 - RNA, 21 nt, synthetic construct
  source 1..21: mol_type = other RNA
gagcagtgcccggacccgctg

SEQ ID NO: 43146 - RNA, 21 nt, synthetic construct
  source 1..21: mol_type = other RNA
ggccaggtcgtggaatgcagc

SEQ ID NO: 43147 - RNA, 21 nt, synthetic construct
  source 1..21: mol_type = other RNA
ggccaggtcgtggaatgcagc

SEQ ID NO: 43148 - RNA, 21 nt, synthetic construct
  source 1..21: mol_type = other RNA
ggccaggtcgtggaatgcagc

SEQ ID NO: 43149 - RNA, 21 nt, synthetic construct
  source 1..21: mol_type = other RNA
ggccaggtcgtggaatgcagc

SEQ ID NO: 43150 - RNA, 21 nt, synthetic construct
  source 1..21: mol_type = other RNA
ccgtgtgttctgctgcaacta

SEQ ID NO: 43151 - RNA, 21 nt, synthetic construct
  source 1..21: mol_type = other RNA
gagtgtgcagtgactggcgag

SEQ ID NO: 43152 - RNA, 21 nt, synthetic construct
  source 1..21: mol_type = other RNA
ccccgctccagtttgggaacc

SEQ ID NO: 43153 - RNA, 21 nt, synthetic construct
  source 1..21: mol_type = other RNA
tgcagaagttggatgggccca

SEQ ID NO: 43154 - RNA, 21 nt, synthetic construct
  source 1..21: mol_type = other RNA
ccaggacctgtgccgctgccc

SEQ ID NO: 43155 - RNA, 21 nt, synthetic construct
  source 1..21: mol_type = other RNA
cggcggggacacggccatccg

SEQ ID NO: 43156 - RNA, 21 nt, synthetic construct
  source 1..21: mol_type = other RNA
ccgtgtgttctgctgcaacta

SEQ ID NO: 43157 - RNA, 21 nt, synthetic construct
  source 1..21: mol_type = other RNA
ccgtgtgttctgctgcaacta

SEQ ID NO: 43158 - RNA, 21 nt, synthetic construct
  source 1..21: mol_type = other RNA
ctcctccactccggggacgac

SEQ ID NO: 43159 - RNA, 21 nt, synthetic construct
  source 1..21: mol_type = other RNA
cctgggcacctgcgtggccta

SEQ ID NO: 43160 - RNA, 21 nt, synthetic construct
  source 1..21: mol_type = other RNA
ctacggggatggccacttcat

SEQ ID NO: 43161 - RNA, 21 nt, synthetic construct
  source 1..21: mol_type = other RNA
cacccacgggaccttccgcat

SEQ ID NO: 43162 - RNA, 21 nt, synthetic construct
  source 1..21: mol_type = other RNA
gctgtggcatgtcctggaact

SEQ ID NO: 43163 - RNA, 21 nt, synthetic construct
  source 1..21: mol_type = other RNA
ttcatccgactgcaccaggac

SEQ ID NO: 43164 - RNA, 21 nt, synthetic construct
  source 1..21: mol_type = other RNA
ctgcacggtggccaggtgcgt

SEQ ID NO: 43165 - RNA, 21 nt, synthetic construct
  source 1..21: mol_type = other RNA
accctgcctaaaaacctgccg

SEQ ID NO: 43166 - RNA, 21 nt, synthetic construct
  source 1..21: mol_type = other RNA
cagtggcatccagtgcgctca

SEQ ID NO: 43167 - RNA, 21 nt, synthetic construct
  source 1..21: mol_type = other RNA
accaggacgtcatctacaaca

SEQ ID NO: 43168 - RNA, 21 nt, synthetic construct
  source 1..21: mol_type = other RNA
ccacggagcagtgcccggacc

SEQ ID NO: 43169 - RNA, 21 nt, synthetic construct
  source 1..21: mol_type = other RNA
ccctgcctaaaaacctgccgg

SEQ ID NO: 43170 - RNA, 21 nt, synthetic construct
  source 1..21: mol_type = other RNA
gggctgatgtgcgccaacagc

SEQ ID NO: 43171 - RNA, 21 nt, synthetic construct
  source 1..21: mol_type = other RNA
gggatggccacttcatcacct

SEQ ID NO: 43172 - RNA, 21 nt, synthetic construct
  source 1..21: mol_type = other RNA
gccagccccggtgtcagtgga

SEQ ID NO: 43173 - RNA, 21 nt, synthetic construct
  source 1..21: mol_type = other RNA
tggggaagttcaagatgtgct

SEQ ID NO: 43174 - RNA, 21 nt, synthetic construct
  source 1..21: mol_type = other RNA
tggggaagttcaagatgtgct

SEQ ID NO: 43175 - RNA, 21 nt, synthetic construct
  source 1..21: mol_type = other RNA
tggggaagttcaagatgtgct

SEQ ID NO: 43176 - RNA, 21 nt, synthetic construct
  source 1..21: mol_type = other RNA
tggggaagttcaagatgtgct

SEQ ID NO: 43177 - RNA, 21 nt, synthetic construct
  source 1..21: mol_type = other RNA
ttctgcagggcatttggacag

SEQ ID NO: 43178 - RNA, 21 nt, synthetic construct
  source 1..21: mol_type = other RNA
caggcccggctgccctacagc

SEQ ID NO: 43179 - RNA, 21 nt, synthetic construct
  source 1..21: mol_type = other RNA
tgccggaaccccagtgggcac

SEQ ID NO: 43180 - RNA, 21 nt, synthetic construct
  source 1..21: mol_type = other RNA
gctactcctgtgaggaggact

SEQ ID NO: 43181 - RNA, 21 nt, synthetic construct
  source 1..21: mol_type = other RNA
cgtgtccggctgtgtctgtcc

SEQ ID NO: 43182 - RNA, 21 nt, synthetic construct
  source 1..21: mol_type = other RNA
tggcccaggactactgtgggg

SEQ ID NO: 43183 - RNA, 21 nt, synthetic construct
  source 1..21: mol_type = other RNA
cacgaggagacggtgcccttg

SEQ ID NO: 43184 - RNA, 21 nt, synthetic construct
  source 1..21: mol_type = other RNA
tgccaggccgagagcttcccc

SEQ ID NO: 43185 - RNA, 21 nt, synthetic construct
  source 1..21: mol_type = other RNA
gtccgcgaggtctgccgctgg

SEQ ID NO: 43186 - RNA, 21 nt, synthetic construct
  source 1..21: mol_type = other RNA
acggcggggacacggccatcc

SEQ ID NO: 43187 - RNA, 21 nt, synthetic construct
  source 1..21: mol_type = other RNA
gcacggagcctgctgtgccta

SEQ ID NO: 43188 - RNA, 21 nt, synthetic construct
  source 1..21: mol_type = other RNA
tccagtgcgctcacagccttg

SEQ ID NO: 43189 - RNA, 21 nt, synthetic construct
  source 1..21: mol_type = other RNA
acaacgccattcaccttcacc

SEQ ID NO: 43190 - RNA, 21 nt, synthetic construct
  source 1..21: mol_type = other RNA
gggcccacggagcagtgcccg

SEQ ID NO: 43191 - RNA, 21 nt, synthetic construct
  source 1..21: mol_type = other RNA
ccacgggctgtgagccccagt

SEQ ID NO: 43192 - RNA, 21 nt, synthetic construct
  source 1..21: mol_type = other RNA
ccacgggctgtgagccccagt

SEQ ID NO: 43193 - RNA, 21 nt, synthetic construct
  source 1..21: mol_type = other RNA
gcacctgcaccaacaaccaga

SEQ ID NO: 43194 - RNA, 21 nt, synthetic construct
  source 1..21: mol_type = other RNA
acttggaggggacgttgagtc

SEQ ID NO: 43195 - RNA, 21 nt, synthetic construct
  source 1..21: mol_type = other RNA
tggcggactccggacacctgc

SEQ ID NO: 43196 - RNA, 21 nt, synthetic construct
  source 1..21: mol_type = other RNA
tgacttccactatgagtgcga

SEQ ID NO: 43197 - RNA, 21 nt, synthetic construct
  source 1..21: mol_type = other RNA
tggagaactgcacggtggcca

SEQ ID NO: 43198 - RNA, 21 nt, synthetic construct
  source 1..21: mol_type = other RNA
ctgtgtctgtcccccggggct

SEQ ID NO: 43199 - RNA, 21 nt, synthetic construct
  source 1..21: mol_type = other RNA
aaaaacctgccggaaccccag

SEQ ID NO: 43200 - RNA, 21 nt, synthetic construct
  source 1..21: mol_type = other RNA
tgcaggctccacagaacccac

SEQ ID NO: 43201 - RNA, 21 nt, synthetic construct
  source 1..21: mol_type = other RNA
gaacaagcacctgcccatcaa

SEQ ID NO: 43202 - RNA, 21 nt, synthetic construct
  source 1..21: mol_type = other RNA
tgcaccaacaaccagagggac

SEQ ID NO: 43203 - RNA, 21 nt, synthetic construct
  source 1..21: mol_type = other RNA
gcccaggactactgtggggac

SEQ ID NO: 43204 - RNA, 21 nt, synthetic construct
  source 1..21: mol_type = other RNA
ctgtgtgggaacttcaaccag

SEQ ID NO: 43205 - RNA, 21 nt, synthetic construct
  source 1..21: mol_type = other RNA
tcaactccatctacacgcagc

SEQ ID NO: 43206 - RNA, 21 nt, synthetic construct
  source 1..21: mol_type = other RNA
gtgggaccaccggcaccacct

SEQ ID NO: 43207 - RNA, 21 nt, synthetic construct
  source 1..21: mol_type = other RNA
gtgtccgcgaggtctgccgct

SEQ ID NO: 43208 - RNA, 21 nt, synthetic construct
  source 1..21: mol_type = other RNA
atacgtgccctgtggcccctc

SEQ ID NO: 43209 - RNA, 21 nt, synthetic construct
  source 1..21: mol_type = other RNA
gcaggctccacagaacccact

SEQ ID NO: 43210 - RNA, 21 nt, synthetic construct
  source 1..21: mol_type = other RNA
gctccacagaacccactgtcc

SEQ ID NO: 43211 - RNA, 21 nt, synthetic construct
  source 1..21: mol_type = other RNA
cttcttcaatgaggaccagat

SEQ ID NO: 43212 - RNA, 21 nt, synthetic construct
  source 1..21: mol_type = other RNA
cgggagttgggccaggtcgtg

SEQ ID NO: 43213 - RNA, 21 nt, synthetic construct
  source 1..21: mol_type = other RNA
gtggacagagtggtttgatga

SEQ ID NO: 43214 - RNA, 21 nt, synthetic construct
  source 1..21: mol_type = other RNA
ggcggggacacggccatccgg

SEQ ID NO: 43215 - RNA, 21 nt, synthetic construct
  source 1..21: mol_type = other RNA
cgggagttgggccaggtcgtg

SEQ ID NO: 43216 - RNA, 21 nt, synthetic construct
  source 1..21: mol_type = other RNA
cgggagttgggccaggtcgtg

SEQ ID NO: 43217 - RNA, 21 nt, synthetic construct
  source 1..21: mol_type = other RNA
tcctctgccctagggaccacc

SEQ ID NO: 43218 - RNA, 21 nt, synthetic construct
  source 1..21: mol_type = other RNA
gcagaaggtgcactgtgacgt

SEQ ID NO: 43219 - RNA, 21 nt, synthetic construct
  source 1..21: mol_type = other RNA
tgggcccacggagcagtgccc

SEQ ID NO: 43220 - RNA, 21 nt, synthetic construct
  source 1..21: mol_type = other RNA
agtggcatccagtgcgctcac

SEQ ID NO: 43221 - RNA, 21 nt, synthetic construct
  source 1..21: mol_type = other RNA
gtgtgcagtgactggcgaggt

SEQ ID NO: 43222 - RNA, 21 nt, synthetic construct
  source 1..21: mol_type = other RNA
gactgcagctacgttctgtcc

SEQ ID NO: 43223 - RNA, 21 nt, synthetic construct
  source 1..21: mol_type = other RNA
gtgcctgtggacggctgcacc

SEQ ID NO: 43224 - RNA, 21 nt, synthetic construct
  source 1..21: mol_type = other RNA
caggtaccaccacctgccagc

SEQ ID NO: 43225 - RNA, 21 nt, synthetic construct
  source 1..21: mol_type = other RNA
cctgcggggcaccctgcctaa

SEQ ID NO: 43226 - RNA, 21 nt, synthetic construct
  source 1..21: mol_type = other RNA
tcctctgccctagggaccacc

SEQ ID NO: 43227 - RNA, 21 nt, synthetic construct
  source 1..21: mol_type = other RNA
tcctctgccctagggaccacc

SEQ ID NO: 43228 - RNA, 21 nt, synthetic construct
  source 1..21: mol_type = other RNA
tcctctgccctagggaccacc

SEQ ID NO: 43229 - RNA, 21 nt, synthetic construct
  source 1..21: mol_type = other RNA
ggaatactcacgccagtgcgc

SEQ ID NO: 43230 - RNA, 21 nt, synthetic construct
  source 1..21: mol_type = other RNA
cactattccacctttgacggc

SEQ ID NO: 43231 - RNA, 21 nt, synthetic construct
  source 1..21: mol_type = other RNA
acctgcgtggcctacggggat

SEQ ID NO: 43232 - RNA, 21 nt, synthetic construct
  source 1..21: mol_type = other RNA
tctgtgacttctacaacccac

SEQ ID NO: 43233 - RNA, 21 nt, synthetic construct
  source 1..21: mol_type = other RNA
cggtgacttcccacaccccag

SEQ ID NO: 43234 - RNA, 21 nt, synthetic construct
  source 1..21: mol_type = other RNA
ccaggtgcgtgggtgacaacc

SEQ ID NO: 43235 - RNA, 21 nt, synthetic construct
  source 1..21: mol_type = other RNA
tgaggccgacgtcacctgcag

SEQ ID NO: 43236 - RNA, 21 nt, synthetic construct
  source 1..21: mol_type = other RNA
acagcaaccgaaaagaccacc

SEQ ID NO: 43237 - RNA, 21 nt, synthetic construct
  source 1..21: mol_type = other RNA
ccagcccttcttcaatgagga

SEQ ID NO: 43238 - RNA, 21 nt, synthetic construct
  source 1..21: mol_type = other RNA
ccaggcctgtggtcacccgtg

SEQ ID NO: 43239 - RNA, 21 nt, synthetic construct
  source 1..21: mol_type = other RNA
gaggtgggagtgcagccaccg

SEQ ID NO: 43240 - RNA, 21 nt, synthetic construct
  source 1..21: mol_type = other RNA
gcccagtgtggctgctacgac

SEQ ID NO: 43241 - RNA, 21 nt, synthetic construct
  source 1..21: mol_type = other RNA
ggccgtgtcctgggaccggaa

SEQ ID NO: 43242 - RNA, 21 nt, synthetic construct
  source 1..21: mol_type = other RNA
tgagctttgttccacccgtca

SEQ ID NO: 43243 - RNA, 21 nt, synthetic construct
  source 1..21: mol_type = other RNA
tcctgtgaggaggactcctgt

SEQ ID NO: 43244 - RNA, 21 nt, synthetic construct
  source 1..21: mol_type = other RNA
gtgttctgctgcaactacggc

SEQ ID NO: 43245 - RNA, 21 nt, synthetic construct
  source 1..21: mol_type = other RNA
gtgttctgctgcaactacggc

SEQ ID NO: 43246 - RNA, 21 nt, synthetic construct
  source 1..21: mol_type = other RNA
gtgttctgctgcaactacggc

SEQ ID NO: 43247 - RNA, 21 nt, synthetic construct
  source 1..21: mol_type = other RNA
gtgttctgctgcaactacggc

SEQ ID NO: 43248 - RNA, 21 nt, synthetic construct
  source 1..21: mol_type = other RNA
ccttgtgcccccgggcccatt

SEQ ID NO: 43249 - RNA, 21 nt, synthetic construct
  source 1..21: mol_type = other RNA
tgtgtccctgcgcccatggct

SEQ ID NO: 43250 - RNA, 21 nt, synthetic construct
  source 1..21: mol_type = other RNA
gagctttgttccacccgtcac

SEQ ID NO: 43251 - RNA, 21 nt, synthetic construct
  source 1..21: mol_type = other RNA
cttccactatgagtgcgagtg

SEQ ID NO: 43252 - RNA, 21 nt, synthetic construct
  source 1..21: mol_type = other RNA
tgcacggtggccaggtgcgtg

SEQ ID NO: 43253 - RNA, 21 nt, synthetic construct
  source 1..21: mol_type = other RNA
acctgccagccccggtgtcag

SEQ ID NO: 43254 - RNA, 21 nt, synthetic construct
  source 1..21: mol_type = other RNA
tgggccaggtcgtggaatgca

SEQ ID NO: 43255 - RNA, 21 nt, synthetic construct
  source 1..21: mol_type = other RNA
cggtttcagcaagaacggcgt

SEQ ID NO: 43256 - RNA, 21 nt, synthetic construct
  source 1..21: mol_type = other RNA
tgggccaggtcgtggaatgca

SEQ ID NO: 43257 - RNA, 21 nt, synthetic construct
  source 1..21: mol_type = other RNA
gcgcccacgcggggggccagc

SEQ ID NO: 43258 - RNA, 21 nt, synthetic construct
  source 1..21: mol_type = other RNA
ggacacggccatccgggtcca

SEQ ID NO: 43259 - RNA, 21 nt, synthetic construct
  source 1..21: mol_type = other RNA
tgggccaggtcgtggaatgca

SEQ ID NO: 43260 - RNA, 21 nt, synthetic construct
  source 1..21: mol_type = other RNA
actgcgtgtccggctgtgtct

SEQ ID NO: 43261 - RNA, 21 nt, synthetic construct
  source 1..21: mol_type = other RNA
tgggccaggtcgtggaatgca

SEQ ID NO: 43262 - RNA, 21 nt, synthetic construct
  source 1..21: mol_type = other RNA
caagcccttccactcgaactg

SEQ ID NO: 43263 - RNA, 21 nt, synthetic construct
  source 1..21: mol_type = other RNA
gcccagcagccccacatcggc

SEQ ID NO: 43264 - RNA, 21 nt, synthetic construct
  source 1..21: mol_type = other RNA
gcccagcagccccacatcggc

SEQ ID NO: 43265 - RNA, 21 nt, synthetic construct
  source 1..21: mol_type = other RNA
gccaggacctgccgtgccctg

SEQ ID NO: 43266 - RNA, 21 nt, synthetic construct
  source 1..21: mol_type = other RNA
gcccagcagccccacatcggc

SEQ ID NO: 43267 - RNA, 21 nt, synthetic construct
  source 1..21: mol_type = other RNA
tgtgtgggaacttcaaccaga

SEQ ID NO: 43268 - RNA, 21 nt, synthetic construct
  source 1..21: mol_type = other RNA
accaggactacaagggcaggg

SEQ ID NO: 43269 - RNA, 21 nt, synthetic construct
  source 1..21: mol_type = other RNA
gcccagcagccccacatcggc

SEQ ID NO: 43270 - RNA, 21 nt, synthetic construct
  source 1..21: mol_type = other RNA
ttcgtggagagctacgagctg

SEQ ID NO: 43271 - RNA, 21 nt, synthetic construct
  source 1..21: mol_type = other RNA
ctcagtgccagcacggagcct

SEQ ID NO: 43272 - RNA, 21 nt, synthetic construct
  source 1..21: mol_type = other RNA
cagtggacagagtggtttgat

SEQ ID NO: 43273 - RNA, 21 nt, synthetic construct
  source 1..21: mol_type = other RNA
aggactgacatcccccagata

SEQ ID NO: 43274 - RNA, 21 nt, synthetic construct
  source 1..21: mol_type = other RNA
gagtggacagagtggtttgac

SEQ ID NO: 43275 - RNA, 21 nt, synthetic construct
  source 1..21: mol_type = other RNA
gtgtgttctgctgcaactacg

SEQ ID NO: 43276 - RNA, 21 nt, synthetic construct
  source 1..21: mol_type = other RNA
acccacagctaccagctttac

SEQ ID NO: 43277 - RNA, 21 nt, synthetic construct
  source 1..21: mol_type = other RNA
gtgtgttctgctgcaactacg

SEQ ID NO: 43278 - RNA, 21 nt, synthetic construct
  source 1..21: mol_type = other RNA
gtgtgttctgctgcaactacg

SEQ ID NO: 43279 - RNA, 21 nt, synthetic construct
  source 1..21: mol_type = other RNA
acccacagctaccagctttac

SEQ ID NO: 43280 - RNA, 21 nt, synthetic construct
  source 1..21: mol_type = other RNA
gtgtgttctgctgcaactacg

SEQ ID NO: 43281 - RNA, 21 nt, synthetic construct
  source 1..21: mol_type = other RNA
acccacagctaccagctttac

SEQ ID NO: 43282 - RNA, 21 nt, synthetic construct
  source 1..21: mol_type = other RNA
ggggacacccaggacccaacg

SEQ ID NO: 43283 - RNA, 21 nt, synthetic construct
  source 1..21: mol_type = other RNA
caacaccaccgatgggcttgg

SEQ ID NO: 43284 - RNA, 21 nt, synthetic construct
  source 1..21: mol_type = other RNA
cagccaacatcaccctgttca

SEQ ID NO: 43285 - RNA, 21 nt, synthetic construct
  source 1..21: mol_type = other RNA
gaggggccgtctgtgagcagc

SEQ ID NO: 43286 - RNA, 21 nt, synthetic construct
  source 1..21: mol_type = other RNA
ggcctgagtgaggccgacgtc

SEQ ID NO: 43287 - RNA, 21 nt, synthetic construct
  source 1..21: mol_type = other RNA
gaggggccgtctgtgagcagc

SEQ ID NO: 43288 - RNA, 21 nt, synthetic construct
  source 1..21: mol_type = other RNA
tttcagcacacactgcgtgtc

SEQ ID NO: 43289 - RNA, 21 nt, synthetic construct
  source 1..21: mol_type = other RNA
tgtcctgggaccggaagacca

SEQ ID NO: 43290 - RNA, 21 nt, synthetic construct
  source 1..21: mol_type = other RNA
gaggggccgtctgtgagcagc

SEQ ID NO: 43291 - RNA, 21 nt, synthetic construct
  source 1..21: mol_type = other RNA
cctgtgtgggaacttcaacca

SEQ ID NO: 43292 - RNA, 21 nt, synthetic construct
  source 1..21: mol_type = other RNA
taaggacatagagtgccaggc

SEQ ID NO: 43293 - RNA, 21 nt, synthetic construct
  source 1..21: mol_type = other RNA
tgtcctggcggactccggaca

SEQ ID NO: 43294 - RNA, 21 nt, synthetic construct
  source 1..21: mol_type = other RNA
tgtgtccgcgaggtctgccgc

SEQ ID NO: 43295 - RNA, 21 nt, synthetic construct
  source 1..21: mol_type = other RNA
tgggccagcaggtggactgtg

SEQ ID NO: 43296 - RNA, 21 nt, synthetic construct
  source 1..21: mol_type = other RNA
tgccagccccggtgtcagtgg

SEQ ID NO: 43297 - RNA, 21 nt, synthetic construct
  source 1..21: mol_type = other RNA
agcagcggtttcagcaagaac

SEQ ID NO: 43298 - RNA, 21 nt, synthetic construct
  source 1..21: mol_type = other RNA
ggaaaaccggctgctgctact

SEQ ID NO: 43299 - RNA, 21 nt, synthetic construct
  source 1..21: mol_type = other RNA
caacatcaccctgttcacacc

SEQ ID NO: 43300 - RNA, 21 nt, synthetic construct
  source 1..21: mol_type = other RNA
ctgccgctcccaggttgactc

SEQ ID NO: 43301 - RNA, 21 nt, synthetic construct
  source 1..21: mol_type = other RNA
cagagtggtttgatgaggact

SEQ ID NO: 43302 - RNA, 21 nt, synthetic construct
  source 1..21: mol_type = other RNA
tgtccactgtgtcctcctcag

SEQ ID NO: 43303 - RNA, 21 nt, synthetic construct
  source 1..21: mol_type = other RNA
ccacttctctactccctgctt

SEQ ID NO: 43304 - RNA, 21 nt, synthetic construct
  source 1..21: mol_type = other RNA
gagaactgcacggtggccagg

SEQ ID NO: 43305 - RNA, 21 nt, synthetic construct
  source 1..21: mol_type = other RNA
gcacctgcccatcaaagtgtc

SEQ ID NO: 43306 - RNA, 21 nt, synthetic construct
  source 1..21: mol_type = other RNA
ctgcgcccaggacctgtgccg

SEQ ID NO: 43307 - RNA, 21 nt, synthetic construct
  source 1..21: mol_type = other RNA
tgtgcagtgactggcgaggtg

SEQ ID NO: 43308 - RNA, 21 nt, synthetic construct
  source 1..21: mol_type = other RNA
gcccacgcggggggccagccg

SEQ ID NO: 43309 - RNA, 21 nt, synthetic construct
  source 1..21: mol_type = other RNA
gaaaaccggctgctgctactc

SEQ ID NO: 43310 - RNA, 21 nt, synthetic construct
  source 1..21: mol_type = other RNA
cgcagccttcgccaacacctg

SEQ ID NO: 43311 - RNA, 21 nt, synthetic construct
  source 1..21: mol_type = other RNA
aacatcaccctgttcacaccc

SEQ ID NO: 43312 - RNA, 21 nt, synthetic construct
  source 1..21: mol_type = other RNA
caggtgtttgtcaggctggac

SEQ ID NO: 43313 - RNA, 21 nt, synthetic construct
  source 1..21: mol_type = other RNA
acttcaaccagaaccaggctg

SEQ ID NO: 43314 - RNA, 21 nt, synthetic construct
  source 1..21: mol_type = other RNA
ccacagcaaccgaaaagacca

SEQ ID NO: 43315 - RNA, 21 nt, synthetic construct
  source 1..21: mol_type = other RNA
ctggagaactgcacggtggcc

SEQ ID NO: 43316 - RNA, 21 nt, synthetic construct
  source 1..21: mol_type = other RNA
gagaacatcccctgtgggacc

SEQ ID NO: 43317 - RNA, 21 nt, synthetic construct
  source 1..21: mol_type = other RNA
gccagcccttcttcaatgagg

SEQ ID NO: 43318 - RNA, 21 nt, synthetic construct
  source 1..21: mol_type = other RNA
tggaatactcacgccagtgcg

SEQ ID NO: 43319 - RNA, 21 nt, synthetic construct
  source 1..21: mol_type = other RNA
tccacgacaagcccggccctc

SEQ ID NO: 43320 - RNA, 21 nt, synthetic construct
  source 1..21: mol_type = other RNA
cctgcacctgcacctatgagg

SEQ ID NO: 43321 - RNA, 21 nt, synthetic construct
  source 1..21: mol_type = other RNA
ccctcagtgccagcacggagc

SEQ ID NO: 43322 - RNA, 21 nt, synthetic construct
  source 1..21: mol_type = other RNA
gtggggaagttcaagatgtgc

SEQ ID NO: 43323 - RNA, 21 nt, synthetic construct
  source 1..21: mol_type = other RNA
aaggacatagagtgccaggcc

SEQ ID NO: 43324 - RNA, 21 nt, synthetic construct
  source 1..21: mol_type = other RNA
gccaggccgagagcttcccca

SEQ ID NO: 43325 - RNA, 21 nt, synthetic construct
  source 1..21: mol_type = other RNA
gtggggaagttcaagatgtgc

SEQ ID NO: 43326 - RNA, 21 nt, synthetic construct
  source 1..21: mol_type = other RNA
agccgctgaccacgagcctgg

SEQ ID NO: 43327 - RNA, 21 nt, synthetic construct
  source 1..21: mol_type = other RNA
gtggggaagttcaagatgtgc

SEQ ID NO: 43328 - RNA, 21 nt, synthetic construct
  source 1..21: mol_type = other RNA
gtggggaagttcaagatgtgc

SEQ ID NO: 43329 - RNA, 21 nt, synthetic construct
  source 1..21: mol_type = other RNA
acacccacagctaccagcttt

SEQ ID NO: 43330 - RNA, 21 nt, synthetic construct
  source 1..21: mol_type = other RNA
accacccacacccccacagtg

SEQ ID NO: 43331 - RNA, 21 nt, synthetic construct
  source 1..21: mol_type = other RNA
tgtgttctgctgcaactacgg

SEQ ID NO: 43332 - RNA, 21 nt, synthetic construct
  source 1..21: mol_type = other RNA
tgtgttctgctgcaactacgg

SEQ ID NO: 43333 - RNA, 21 nt, synthetic construct
  source 1..21: mol_type = other RNA
tgtgttctgctgcaactacgg

SEQ ID NO: 43334 - RNA, 21 nt, synthetic construct
  source 1..21: mol_type = other RNA
tgtgttctgctgcaactacgg

SEQ ID NO: 43335 - RNA, 21 nt, synthetic construct
  source 1..21: mol_type = other RNA
acacccacagctaccagcttt

SEQ ID NO: 43336 - RNA, 21 nt, synthetic construct
  source 1..21: mol_type = other RNA
accacccacacccccacagtg

SEQ ID NO: 43337 - RNA, 21 nt, synthetic construct
  source 1..21: mol_type = other RNA
cctgctggggccggcctttgc

SEQ ID NO: 43338 - RNA, 21 nt, synthetic construct
  source 1..21: mol_type = other RNA
gctggggccggcctttgcgga

SEQ ID NO: 43339 - RNA, 21 nt, synthetic construct
  source 1..21: mol_type = other RNA
acacccacagctaccagcttt

SEQ ID NO: 43340 - RNA, 21 nt, synthetic construct
  source 1..21: mol_type = other RNA
cccagctcccacttctctact

SEQ ID NO: 43341 - RNA, 21 nt, synthetic construct
  source 1..21: mol_type = other RNA
acttccactatgagtgcgagt

SEQ ID NO: 43342 - RNA, 21 nt, synthetic construct
  source 1..21: mol_type = other RNA
gcctgcgcccaggacctgtgc

SEQ ID NO: 43343 - RNA, 21 nt, synthetic construct
  source 1..21: mol_type = other RNA
aggaaaaccggctgctgctac

SEQ ID NO: 43344 - RNA, 21 nt, synthetic construct
  source 1..21: mol_type = other RNA
tctgccccccaggcacggtgc

SEQ ID NO: 43345 - RNA, 21 nt, synthetic construct
  source 1..21: mol_type = other RNA
acgcagctgcccctgtcggca

SEQ ID NO: 43346 - RNA, 21 nt, synthetic construct
  source 1..21: mol_type = other RNA
ggaggtgggagtgcagccacc

SEQ ID NO: 43347 - RNA, 21 nt, synthetic construct
  source 1..21: mol_type = other RNA
gcgcagccttcgccaacacct

SEQ ID NO: 43348 - RNA, 21 nt, synthetic construct
  source 1..21: mol_type = other RNA
cagctaccagctttacagcca

SEQ ID NO: 43349 - RNA, 21 nt, synthetic construct
  source 1..21: mol_type = other RNA
cagctaccagctttacagcca

SEQ ID NO: 43350 - RNA, 21 nt, synthetic construct
  source 1..21: mol_type = other RNA
cagctaccagctttacagcca

SEQ ID NO: 43351 - RNA, 21 nt, synthetic construct
  source 1..21: mol_type = other RNA
cctgcgtggcctacggggatg

SEQ ID NO: 43352 - RNA, 21 nt, synthetic construct
  source 1..21: mol_type = other RNA
ctgcaccaacaaccagaggga

SEQ ID NO: 43353 - RNA, 21 nt, synthetic construct
  source 1..21: mol_type = other RNA
aactgccagagctgtaactgc

SEQ ID NO: 43354 - RNA, 21 nt, synthetic construct
  source 1..21: mol_type = other RNA
actgccagagctgtaactgca

SEQ ID NO: 43355 - RNA, 21 nt, synthetic construct
  source 1..21: mol_type = other RNA
cctgaggcagagagggtacca

SEQ ID NO: 43356 - RNA, 21 nt, synthetic construct
  source 1..21: mol_type = other RNA
acagagtggtttgatgaggac

SEQ ID NO: 43357 - RNA, 21 nt, synthetic construct
  source 1..21: mol_type = other RNA
aacccactgtcccaggggtgg

SEQ ID NO: 43358 - RNA, 21 nt, synthetic construct
  source 1..21: mol_type = other RNA
cccagtgtggctgctacgaca

SEQ ID NO: 43359 - RNA, 21 nt, synthetic construct
  source 1..21: mol_type = other RNA
ccaacatcaccctgttcacac

SEQ ID NO: 43360 - RNA, 21 nt, synthetic construct
  source 1..21: mol_type = other RNA
gagccccagtgtgcctggtca

SEQ ID NO: 43361 - RNA, 21 nt, synthetic construct
  source 1..21: mol_type = other RNA
cgcctgccgctcccaggttga

SEQ ID NO: 43362 - RNA, 21 nt, synthetic construct
  source 1..21: mol_type = other RNA
atcaccctgttcacaccctcg

SEQ ID NO: 43363 - RNA, 21 nt, synthetic construct
  source 1..21: mol_type = other RNA
ggcagaaggtgcactgtgacg

SEQ ID NO: 43364 - RNA, 21 nt, synthetic construct
  source 1..21: mol_type = other RNA
ttgggccaggtcgtggaatgc

SEQ ID NO: 43365 - RNA, 21 nt, synthetic construct
  source 1..21: mol_type = other RNA
gctgtttcagcacacactgcg

SEQ ID NO: 43366 - RNA, 21 nt, synthetic construct
  source 1..21: mol_type = other RNA
gagccccagtgtgcctggtca

SEQ ID NO: 43367 - RNA, 21 nt, synthetic construct
  source 1..21: mol_type = other RNA
ttgggccaggtcgtggaatgc

SEQ ID NO: 43368 - RNA, 21 nt, synthetic construct
  source 1..21: mol_type = other RNA
gagccccagtgtgcctggtca

SEQ ID NO: 43369 - RNA, 21 nt, synthetic construct
  source 1..21: mol_type = other RNA
ttgggccaggtcgtggaatgc

SEQ ID NO: 43370 - RNA, 21 nt, synthetic construct
  source 1..21: mol_type = other RNA
gagccccagtgtgcctggtca

SEQ ID NO: 43371 - RNA, 21 nt, synthetic construct
  source 1..21: mol_type = other RNA
ttgggccaggtcgtggaatgc

SEQ ID NO: 43372 - RNA, 21 nt, synthetic construct
  source 1..21: mol_type = other RNA
tgcccccgggcccattcttca

SEQ ID NO: 43373 - RNA, 21 nt, synthetic construct
  source 1..21: mol_type = other RNA
cggaggtgggagtgcagccac

SEQ ID NO: 43374 - RNA, 21 nt, synthetic construct
  source 1..21: mol_type = other RNA
gcaactgccagtcctgcgtgt

SEQ ID NO: 43375 - RNA, 21 nt, synthetic construct
  source 1..21: mol_type = other RNA
ccaggccatgcagcaccagtg

SEQ ID NO: 43376 - RNA, 21 nt, synthetic construct
  source 1..21: mol_type = other RNA
ggatgagtgtggctgcacgcc

SEQ ID NO: 43377 - RNA, 21 nt, synthetic construct
  source 1..21: mol_type = other RNA
agaaggtgcactgtgacgtcc

SEQ ID NO: 43378 - RNA, 21 nt, synthetic construct
  source 1..21: mol_type = other RNA
aggagctgccttacagccgca

SEQ ID NO: 43379 - RNA, 21 nt, synthetic construct
  source 1..21: mol_type = other RNA
tggcccagtgtggctgctacg

SEQ ID NO: 43380 - RNA, 21 nt, synthetic construct
  source 1..21: mol_type = other RNA
cggacaacgagaactgcctga

SEQ ID NO: 43381 - RNA, 21 nt, synthetic construct
  source 1..21: mol_type = other RNA
ctgggcacctgcgtggcctac

SEQ ID NO: 43382 - RNA, 21 nt, synthetic construct
  source 1..21: mol_type = other RNA
tgcgggagttgggccaggtcg

SEQ ID NO: 43383 - RNA, 21 nt, synthetic construct
  source 1..21: mol_type = other RNA
tgcgggagttgggccaggtcg

SEQ ID NO: 43384 - RNA, 21 nt, synthetic construct
  source 1..21: mol_type = other RNA
tgcgggagttgggccaggtcg

SEQ ID NO: 43385 - RNA, 21 nt, synthetic construct
  source 1..21: mol_type = other RNA
ggggctgtgagtggcactacc

SEQ ID NO: 43386 - RNA, 21 nt, synthetic construct
  source 1..21: mol_type = other RNA
cctgcgggagttgggccaggt

SEQ ID NO: 43387 - RNA, 21 nt, synthetic construct
  source 1..21: mol_type = other RNA
ctgcgggagttgggccaggtc

SEQ ID NO: 43388 - RNA, 21 nt, synthetic construct
  source 1..21: mol_type = other RNA
agtgcgctcacagccttgagg

SEQ ID NO: 43389 - RNA, 21 nt, synthetic construct
  source 1..21: mol_type = other RNA
cctgcgggagttgggccaggt

SEQ ID NO: 43390 - RNA, 21 nt, synthetic construct
  source 1..21: mol_type = other RNA
ctgcgggagttgggccaggtc

SEQ ID NO: 43391 - RNA, 21 nt, synthetic construct
  source 1..21: mol_type = other RNA
cctggtgtccccctgcgggag

SEQ ID NO: 43392 - RNA, 21 nt, synthetic construct
  source 1..21: mol_type = other RNA
cctgcgggagttgggccaggt

SEQ ID NO: 43393 - RNA, 21 nt, synthetic construct
  source 1..21: mol_type = other RNA
ctgcgggagttgggccaggtc

SEQ ID NO: 43394 - RNA, 21 nt, synthetic construct
  source 1..21: mol_type = other RNA
cctggtgtccccctgcgggag

SEQ ID NO: 43395 - RNA, 21 nt, synthetic construct
  source 1..21: mol_type = other RNA
cacgccctcctccactccagg

SEQ ID NO: 43396 - RNA, 21 nt, synthetic construct
  source 1..21: mol_type = other RNA
cctggtgtccccctgcgggag

SEQ ID NO: 43397 - RNA, 21 nt, synthetic construct
  source 1..21: mol_type = other RNA
gtgcccccgggcccattcttc

SEQ ID NO: 43398 - RNA, 21 nt, synthetic construct
  source 1..21: mol_type = other RNA
accagggccagatgtgcggcc

SEQ ID NO: 43399 - RNA, 21 nt, synthetic construct
  source 1..21: mol_type = other RNA
actcctgtgaggaggactcct

SEQ ID NO: 43400 - RNA, 21 nt, synthetic construct
  source 1..21: mol_type = other RNA
gcctacggggatggccacttc

SEQ ID NO: 43401 - RNA, 21 nt, synthetic construct
  source 1..21: mol_type = other RNA
ctgggtcccccactccacgac

SEQ ID NO: 43402 - RNA, 21 nt, synthetic construct
  source 1..21: mol_type = other RNA
gctaccaggacgtcatctaca

SEQ ID NO: 43403 - RNA, 21 nt, synthetic construct
  source 1..21: mol_type = other RNA
caccaacaaccagagggacga

SEQ ID NO: 43404 - RNA, 21 nt, synthetic construct
  source 1..21: mol_type = other RNA
cctcctccactccggggacga

SEQ ID NO: 43405 - RNA, 21 nt, synthetic construct
  source 1..21: mol_type = other RNA
gaagtgcgtggcccagtgtgg

SEQ ID NO: 43406 - RNA, 21 nt, synthetic construct
  source 1..21: mol_type = other RNA
cctcctccactccggggacga

SEQ ID NO: 43407 - RNA, 21 nt, synthetic construct
  source 1..21: mol_type = other RNA
cagaacccactgtcccagggg

SEQ ID NO: 43408 - RNA, 21 nt, synthetic construct
  source 1..21: mol_type = other RNA
cctcctccactccggggacga

SEQ ID NO: 43409 - RNA, 21 nt, synthetic construct
  source 1..21: mol_type = other RNA
cctcctccactccggggacga

SEQ ID NO: 43410 - RNA, 21 nt, synthetic construct
  source 1..21: mol_type = other RNA
gcttctgcagggcatttggac

SEQ ID NO: 43411 - RNA, 21 nt, synthetic construct
  source 1..21: mol_type = other RNA
gaggtgccctgccagagcctg

SEQ ID NO: 43412 - RNA, 21 nt, synthetic construct
  source 1..21: mol_type = other RNA
tgggaccaccggcaccacctg

SEQ ID NO: 43413 - RNA, 21 nt, synthetic construct
  source 1..21: mol_type = other RNA
ctgccgctggtccagctggta

SEQ ID NO: 43414 - RNA, 21 nt, synthetic construct
  source 1..21: mol_type = other RNA
cccaggacctgtgccgctgcc

SEQ ID NO: 43415 - RNA, 21 nt, synthetic construct
  source 1..21: mol_type = other RNA
cgcccacgcggggggccagcc

SEQ ID NO: 43416 - RNA, 21 nt, synthetic construct
  source 1..21: mol_type = other RNA
tgcccctcgggcagtgcccct

SEQ ID NO: 43417 - RNA, 21 nt, synthetic construct
  source 1..21: mol_type = other RNA
acctgccgtgccctggcacct

SEQ ID NO: 43418 - RNA, 21 nt, synthetic construct
  source 1..21: mol_type = other RNA
ggtgtttgtcaggctggaccc

SEQ ID NO: 43419 - RNA, 21 nt, synthetic construct
  source 1..21: mol_type = other RNA
tttgtcaggctggaccccgcc

SEQ ID NO: 43420 - RNA, 21 nt, synthetic construct
  source 1..21: mol_type = other RNA
caccagggccagatgtgcggc

SEQ ID NO: 43421 - RNA, 21 nt, synthetic construct
  source 1..21: mol_type = other RNA
cccctggggccgagtgcctcc

SEQ ID NO: 43422 - RNA, 21 nt, synthetic construct
  source 1..21: mol_type = other RNA
ccggctgtgtctgtcccccgg

SEQ ID NO: 43423 - RNA, 21 nt, synthetic construct
  source 1..21: mol_type = other RNA
accaccggcaccacctgctcc

SEQ ID NO: 43424 - RNA, 21 nt, synthetic construct
  source 1..21: mol_type = other RNA
accagccctgcggggcaccct

SEQ ID NO: 43425 - RNA, 21 nt, synthetic construct
  source 1..21: mol_type = other RNA
gggcaccctgcctaaaaacct

SEQ ID NO: 43426 - RNA, 21 nt, synthetic construct
  source 1..21: mol_type = other RNA
caggaaggctgtggcatgtcc

SEQ ID NO: 43427 - RNA, 21 nt, synthetic construct
  source 1..21: mol_type = other RNA
tgccgctggtccagctggtac

SEQ ID NO: 43428 - RNA, 21 nt, synthetic construct
  source 1..21: mol_type = other RNA
acctgaggcagagagggtacc

SEQ ID NO: 43429 - RNA, 21 nt, synthetic construct
  source 1..21: mol_type = other RNA
ctccacagaacccactgtccc

SEQ ID NO: 43430 - RNA, 21 nt, synthetic construct
  source 1..21: mol_type = other RNA
ccacagctaccagctttacag

SEQ ID NO: 43431 - RNA, 21 nt, synthetic construct
  source 1..21: mol_type = other RNA
cctccaggaccacggccacgg

SEQ ID NO: 43432 - RNA, 21 nt, synthetic construct
  source 1..21: mol_type = other RNA
ctccaggaccacggccacggc

SEQ ID NO: 43433 - RNA, 21 nt, synthetic construct
  source 1..21: mol_type = other RNA
tccaggaccacggccacggcc

SEQ ID NO: 43434 - RNA, 21 nt, synthetic construct
  source 1..21: mol_type = other RNA
ccaggaccacggccacggcca

SEQ ID NO: 43435 - RNA, 21 nt, synthetic construct
  source 1..21: mol_type = other RNA
ccacagctaccagctttacag

SEQ ID NO: 43436 - RNA, 21 nt, synthetic construct
  source 1..21: mol_type = other RNA
cctccaggaccacggccacgg

SEQ ID NO: 43437 - RNA, 21 nt, synthetic construct
  source 1..21: mol_type = other RNA
ctccaggaccacggccacggc

SEQ ID NO: 43438 - RNA, 21 nt, synthetic construct
  source 1..21: mol_type = other RNA
tccaggaccacggccacggcc

SEQ ID NO: 43439 - RNA, 21 nt, synthetic construct
  source 1..21: mol_type = other RNA
ccaggaccacggccacggcca

SEQ ID NO: 43440 - RNA, 21 nt, synthetic construct
  source 1..21: mol_type = other RNA
ccacagctaccagctttacag

SEQ ID NO: 43441 - RNA, 21 nt, synthetic construct
  source 1..21: mol_type = other RNA
aacaagcacctgcccatcaaa

SEQ ID NO: 43442 - RNA, 21 nt, synthetic construct
  source 1..21: mol_type = other RNA
aggtgccctgccagagcctgg

SEQ ID NO: 43443 - RNA, 21 nt, synthetic construct
  source 1..21: mol_type = other RNA
tccagctgcagggggagcctc

SEQ ID NO: 43444 - RNA, 21 nt, synthetic construct
  source 1..21: mol_type = other RNA
gccccaggtaccaccacctgc

SEQ ID NO: 43445 - RNA, 21 nt, synthetic construct
  source 1..21: mol_type = other RNA
ccggctctgcctgggcacctg

SEQ ID NO: 43446 - RNA, 21 nt, synthetic construct
  source 1..21: mol_type = other RNA
ccctgcccctggctgtgacaa

SEQ ID NO: 43447 - RNA, 21 nt, synthetic construct
  source 1..21: mol_type = other RNA
gtccggctgtgtctgtccccc

SEQ ID NO: 43448 - RNA, 21 nt, synthetic construct
  source 1..21: mol_type = other RNA
cagcacacactgcgtgtccgg

SEQ ID NO: 43449 - RNA, 21 nt, synthetic construct
  source 1..21: mol_type = other RNA
gcccaggcccagcctggtgtc

SEQ ID NO: 43450 - RNA, 21 nt, synthetic construct
  source 1..21: mol_type = other RNA
gcccaggcccagcctggtgtc

SEQ ID NO: 43451 - RNA, 21 nt, synthetic construct
  source 1..21: mol_type = other RNA
gcccaggcccagcctggtgtc

SEQ ID NO: 43452 - RNA, 21 nt, synthetic construct
  source 1..21: mol_type = other RNA
gcccaggcccagcctggtgtc

SEQ ID NO: 43453 - RNA, 21 nt, synthetic construct
  source 1..21: mol_type = other RNA
caaccagagggacgactgtct

SEQ ID NO: 43454 - RNA, 21 nt, synthetic construct
  source 1..21: mol_type = other RNA
tgccacgcgtagccggtccgt

SEQ ID NO: 43455 - RNA, 21 nt, synthetic construct
  source 1..21: mol_type = other RNA
agttctatgcccacaacgcca

SEQ ID NO: 43456 - RNA, 21 nt, synthetic construct
  source 1..21: mol_type = other RNA
tctccagcgggacggaaccac

SEQ ID NO: 43457 - RNA, 21 nt, synthetic construct
  source 1..21: mol_type = other RNA
gtgtggctgcacgcccttctg

SEQ ID NO: 43458 - RNA, 21 nt, synthetic construct
  source 1..21: mol_type = other RNA
gccggacgctggtgttggctc

SEQ ID NO: 43459 - RNA, 21 nt, synthetic construct
  source 1..21: mol_type = other RNA
cgcgtagccggtccgtggtgg

SEQ ID NO: 43460 - RNA, 21 nt, synthetic construct
  source 1..21: mol_type = other RNA
aacaaccagagggacgactgt

SEQ ID NO: 43461 - RNA, 21 nt, synthetic construct
  source 1..21: mol_type = other RNA
cagcgtgtccactgtgtcctc

SEQ ID NO: 43462 - RNA, 21 nt, synthetic construct
  source 1..21: mol_type = other RNA
caaagccccctctgctcaacc

SEQ ID NO: 43463 - RNA, 21 nt, synthetic construct
  source 1..21: mol_type = other RNA
ttgccacgcgtagccggtccg

SEQ ID NO: 43464 - RNA, 21 nt, synthetic construct
  source 1..21: mol_type = other RNA
gcaggtggactgtgaccgcat

SEQ ID NO: 43465 - RNA, 21 nt, synthetic construct
  source 1..21: mol_type = other RNA
ctgcccatcaaagtgtcggac

SEQ ID NO: 43466 - RNA, 21 nt, synthetic construct
  source 1..21: mol_type = other RNA
tgcccatcaaagtgtcggacc

SEQ ID NO: 43467 - RNA, 21 nt, synthetic construct
  source 1..21: mol_type = other RNA
gagtgtggctgcacgcccttc

SEQ ID NO: 43468 - RNA, 21 nt, synthetic construct
  source 1..21: mol_type = other RNA
cactgggacgccctggaacaa

SEQ ID NO: 43469 - RNA, 21 nt, synthetic construct
  source 1..21: mol_type = other RNA
ggaccacctggatcctcacag

SEQ ID NO: 43470 - RNA, 21 nt, synthetic construct
  source 1..21: mol_type = other RNA
ggaccacctggatcctcacag

SEQ ID NO: 43471 - RNA, 21 nt, synthetic construct
  source 1..21: mol_type = other RNA
ggaccacctggatcctcacag

SEQ ID NO: 43472 - RNA, 21 nt, synthetic construct
  source 1..21: mol_type = other RNA
ggaccacctggatcctcacag

SEQ ID NO: 43473 - RNA, 21 nt, synthetic construct
  source 1..21: mol_type = other RNA
ggaccacctggatcctcacag

SEQ ID NO: 43474 - RNA, 21 nt, synthetic construct
  source 1..21: mol_type = other RNA
ggaccacctggatcctcacag

SEQ ID NO: 43475 - RNA, 21 nt, synthetic construct
  source 1..21: mol_type = other RNA
cccatgctctgtccacctgga

SEQ ID NO: 43476 - RNA, 21 nt, synthetic construct
  source 1..21: mol_type = other RNA
tcaaagtgtcggacccgagcc

SEQ ID NO: 43477 - RNA, 21 nt, synthetic construct
  source 1..21: mol_type = other RNA
catcaaagtgtcggacccgag

SEQ ID NO: 43478 - RNA, 21 nt, synthetic construct
  source 1..21: mol_type = other RNA
tgtcactgggacgccctggaa

SEQ ID NO: 43479 - RNA, 21 nt, synthetic construct
  source 1..21: mol_type = other RNA
catgctctgtccacctggagc

SEQ ID NO: 43480 - RNA, 21 nt, synthetic construct
  source 1..21: mol_type = other RNA
gtgcttcaactatgaaatccg

SEQ ID NO: 43481 - RNA, 21 nt, synthetic construct
  source 1..21: mol_type = other RNA
gtgcttcaactatgaaatccg

SEQ ID NO: 43482 - RNA, 21 nt, synthetic construct
  source 1..21: mol_type = other RNA
gtgcttcaactatgaaatccg

SEQ ID NO: 43483 - RNA, 21 nt, synthetic construct
  source 1..21: mol_type = other RNA
gtgcttcaactatgaaatccg

SEQ ID NO: 43484 - RNA, 21 nt, synthetic construct
  source 1..21: mol_type = other RNA
cagacaggctggtccaggcaa

SEQ ID NO: 43485 - RNA, 21 nt, synthetic construct
  source 1..21: mol_type = other RNA
agtgtggctgcacgcccttct

SEQ ID NO: 43486 - RNA, 21 nt, synthetic construct
  source 1..21: mol_type = other RNA
cgtgccggacgctggtgttgg

SEQ ID NO: 43487 - RNA, 21 nt, synthetic construct
  source 1..21: mol_type = other RNA
tcctccactccagggacgacc

SEQ ID NO: 43488 - RNA, 21 nt, synthetic construct
  source 1..21: mol_type = other RNA
tgccgcgcccggggagtgtgc

SEQ ID NO: 43489 - RNA, 21 nt, synthetic construct
  source 1..21: mol_type = other RNA
tccccatgctctgtccacctg

SEQ ID NO: 43490 - RNA, 21 nt, synthetic construct
  source 1..21: mol_type = other RNA
cgtgtccactgtgtcctcctc

SEQ ID NO: 43491 - RNA, 21 nt, synthetic construct
  source 1..21: mol_type = other RNA
tgccggacgctggtgttggct

SEQ ID NO: 43492 - RNA, 21 nt, synthetic construct
  source 1..21: mol_type = other RNA
ccggacgctggtgttggctct

SEQ ID NO: 43493 - RNA, 21 nt, synthetic construct
  source 1..21: mol_type = other RNA
cggacgctggtgttggctctg

SEQ ID NO: 43494 - RNA, 21 nt, synthetic construct
  source 1..21: mol_type = other RNA
tgcctccggagctgccacacg

SEQ ID NO: 43495 - RNA, 21 nt, synthetic construct
  source 1..21: mol_type = other RNA
cctccactccagggacgacct

SEQ ID NO: 43496 - RNA, 21 nt, synthetic construct
  source 1..21: mol_type = other RNA
acctgcccacccaccaaagtg

SEQ ID NO: 43497 - RNA, 21 nt, synthetic construct
  source 1..21: mol_type = other RNA
tgctctgtccacctggagcca

SEQ ID NO: 43498 - RNA, 21 nt, synthetic construct
  source 1..21: mol_type = other RNA
cccagggaccacctggatcct

SEQ ID NO: 43499 - RNA, 21 nt, synthetic construct
  source 1..21: mol_type = other RNA
cccagggaccacctggatcct

SEQ ID NO: 43500 - RNA, 21 nt, synthetic construct
  source 1..21: mol_type = other RNA
cccagggaccacctggatcct

SEQ ID NO: 43501 - RNA, 21 nt, synthetic construct
  source 1..21: mol_type = other RNA
cccagggaccacctggatcct

SEQ ID NO: 43502 - RNA, 21 nt, synthetic construct
  source 1..21: mol_type = other RNA
cccagggaccacctggatcct

SEQ ID NO: 43503 - RNA, 21 nt, synthetic construct
  source 1..21: mol_type = other RNA
cccagggaccacctggatcct

SEQ ID NO: 43504 - RNA, 21 nt, synthetic construct
  source 1..21: mol_type = other RNA
gcctccggagctgccacacgc

SEQ ID NO: 43505 - RNA, 21 nt, synthetic construct
  source 1..21: mol_type = other RNA
tcactgggacgccctggaaca

SEQ ID NO: 43506 - RNA, 21 nt, synthetic construct
  source 1..21: mol_type = other RNA
gtgcctccggagctgccacac

SEQ ID NO: 43507 - RNA, 21 nt, synthetic construct
  source 1..21: mol_type = other RNA
tggctgcacgcccttctgtgt

SEQ ID NO: 43508 - RNA, 21 nt, synthetic construct
  source 1..21: mol_type = other RNA
agatgtgcttcaactatgaaa

SEQ ID NO: 43509 - RNA, 21 nt, synthetic construct
  source 1..21: mol_type = other RNA
agatgtgcttcaactatgaaa

SEQ ID NO: 43510 - RNA, 21 nt, synthetic construct
  source 1..21: mol_type = other RNA
cccacagccaccagttccaaa

SEQ ID NO: 43511 - RNA, 21 nt, synthetic construct
  source 1..21: mol_type = other RNA
agatgtgcttcaactatgaaa

SEQ ID NO: 43512 - RNA, 21 nt, synthetic construct
  source 1..21: mol_type = other RNA
agatgtgcttcaactatgaaa

SEQ ID NO: 43513 - RNA, 21 nt, synthetic construct
  source 1..21: mol_type = other RNA
cccacagccaccagttccaaa

SEQ ID NO: 43514 - RNA, 21 nt, synthetic construct
  source 1..21: mol_type = other RNA
ctcctccactctggggacgac

SEQ ID NO: 43515 - RNA, 21 nt, synthetic construct
  source 1..21: mol_type = other RNA
tctgcctccatccccatgctc

SEQ ID NO: 43516 - RNA, 21 nt, synthetic construct
  source 1..21: mol_type = other RNA
aggggccagcaggaccccttt

SEQ ID NO: 43517 - RNA, 21 nt, synthetic construct
  source 1..21: mol_type = other RNA
gtgcttaccaccacggccacc

SEQ ID NO: 43518 - RNA, 21 nt, synthetic construct
  source 1..21: mol_type = other RNA
gtgcttaccaccacggccacc

SEQ ID NO: 43519 - RNA, 21 nt, synthetic construct
  source 1..21: mol_type = other RNA
cgtgttgtcatcaaggcccag

SEQ ID NO: 43520 - RNA, 21 nt, synthetic construct
  source 1..21: mol_type = other RNA
tgtggagaatgagaactacgc

SEQ ID NO: 43521 - RNA, 21 nt, synthetic construct
  source 1..21: mol_type = other RNA
gtcacccgtgttgtcatcaag

SEQ ID NO: 43522 - RNA, 21 nt, synthetic construct
  source 1..21: mol_type = other RNA
cactcgactccagccctgtcc

SEQ ID NO: 43523 - RNA, 21 nt, synthetic construct
  source 1..21: mol_type = other RNA
cactcgactccagccctgtcc

SEQ ID NO: 43524 - RNA, 21 nt, synthetic construct
  source 1..21: mol_type = other RNA
cactcgactccagccctgtcc

SEQ ID NO: 43525 - RNA, 21 nt, synthetic construct
  source 1..21: mol_type = other RNA
ccacggttcccagctcgtcca

SEQ ID NO: 43526 - RNA, 21 nt, synthetic construct
  source 1..21: mol_type = other RNA
tcagtgtggagaatgagaact

SEQ ID NO: 43527 - RNA, 21 nt, synthetic construct
  source 1..21: mol_type = other RNA
cacagtgcttaccaccacggc

SEQ ID NO: 43528 - RNA, 21 nt, synthetic construct
  source 1..21: mol_type = other RNA
cacagtgcttaccaccacggc

SEQ ID NO: 43529 - RNA, 21 nt, synthetic construct
  source 1..21: mol_type = other RNA
cctgtgacttccactatgagt

SEQ ID NO: 43530 - RNA, 21 nt, synthetic construct
  source 1..21: mol_type = other RNA
gtgcccctgcacccacggcgg

SEQ ID NO: 43531 - RNA, 21 nt, synthetic construct
  source 1..21: mol_type = other RNA
ctccacggttcccagctcgtc

SEQ ID NO: 43532 - RNA, 21 nt, synthetic construct
  source 1..21: mol_type = other RNA
tccacggttcccagctcgtcc

SEQ ID NO: 43533 - RNA, 21 nt, synthetic construct
  source 1..21: mol_type = other RNA
taccaaagtgctgactaccac

SEQ ID NO: 43534 - RNA, 21 nt, synthetic construct
  source 1..21: mol_type = other RNA
acccagaccacagcaaccgaa

SEQ ID NO: 43535 - RNA, 21 nt, synthetic construct
  source 1..21: mol_type = other RNA
tgttgtcatcaaggcccaggg

SEQ ID NO: 43536 - RNA, 21 nt, synthetic construct
  source 1..21: mol_type = other RNA
tgcacccacggcggccgcacc

SEQ ID NO: 43537 - RNA, 21 nt, synthetic construct
  source 1..21: mol_type = other RNA
acccgagccagccctgtgact

SEQ ID NO: 43538 - RNA, 21 nt, synthetic construct
  source 1..21: mol_type = other RNA
caccccaggaacagctcacac

SEQ ID NO: 43539 - RNA, 21 nt, synthetic construct
  source 1..21: mol_type = other RNA
caccccaggaacagctcacac

SEQ ID NO: 43540 - RNA, 21 nt, synthetic construct
  source 1..21: mol_type = other RNA
caccccaggaacagctcacac

SEQ ID NO: 43541 - RNA, 21 nt, synthetic construct
  source 1..21: mol_type = other RNA
caccccaggaacagctcacac

SEQ ID NO: 43542 - RNA, 21 nt, synthetic construct
  source 1..21: mol_type = other RNA
caccccaggaacagctcacac

SEQ ID NO: 43543 - RNA, 21 nt, synthetic construct
  source 1..21: mol_type = other RNA
tctgctgcaactacggccact

SEQ ID NO: 43544 - RNA, 21 nt, synthetic construct
  source 1..21: mol_type = other RNA
tctgctgcaactacggccact

SEQ ID NO: 43545 - RNA, 21 nt, synthetic construct
  source 1..21: mol_type = other RNA
tctgctgcaactacggccact

SEQ ID NO: 43546 - RNA, 21 nt, synthetic construct
  source 1..21: mol_type = other RNA
tctgctgcaactacggccact

SEQ ID NO: 43547 - RNA, 21 nt, synthetic construct
  source 1..21: mol_type = other RNA
tcatctacaataagaccgacc

SEQ ID NO: 43548 - RNA, 21 nt, synthetic construct
  source 1..21: mol_type = other RNA
agtgcggcctgacggacaacg

SEQ ID NO: 43549 - RNA, 21 nt, synthetic construct
  source 1..21: mol_type = other RNA
gccactacgatcacggccacc

SEQ ID NO: 43550 - RNA, 21 nt, synthetic construct
  source 1..21: mol_type = other RNA
gccactacgatcacggccacc

SEQ ID NO: 43551 - RNA, 21 nt, synthetic construct
  source 1..21: mol_type = other RNA
gccactacgatcacggccacc

SEQ ID NO: 43552 - RNA, 21 nt, synthetic construct
  source 1..21: mol_type = other RNA
gccactacgatcacggccacc

SEQ ID NO: 43553 - RNA, 21 nt, synthetic construct
  source 1..21: mol_type = other RNA
cgagggttcagtgtcggtgca

SEQ ID NO: 43554 - RNA, 21 nt, synthetic construct
  source 1..21: mol_type = other RNA
aagtgcggcctgacggacaac

SEQ ID NO: 43555 - RNA, 21 nt, synthetic construct
  source 1..21: mol_type = other RNA
agacgacaatgagccccttga

SEQ ID NO: 43556 - RNA, 21 nt, synthetic construct
  source 1..21: mol_type = other RNA
acgagcctggcgccaacactc

SEQ ID NO: 43557 - RNA, 21 nt, synthetic construct
  source 1..21: mol_type = other RNA
tgcggagtgccacgcactggt

SEQ ID NO: 43558 - RNA, 21 nt, synthetic construct
  source 1..21: mol_type = other RNA
accgcatgcgggggctgatgt

SEQ ID NO: 43559 - RNA, 21 nt, synthetic construct
  source 1..21: mol_type = other RNA
acgactgagtccactggatcc

SEQ ID NO: 43560 - RNA, 21 nt, synthetic construct
  source 1..21: mol_type = other RNA
acgactgagtccactggatcc

SEQ ID NO: 43561 - RNA, 21 nt, synthetic construct
  source 1..21: mol_type = other RNA
ccctatgggtgaccccgagca

SEQ ID NO: 43562 - RNA, 21 nt, synthetic construct
  source 1..21: mol_type = other RNA
cactcgactccagccctttcc

SEQ ID NO: 43563 - RNA, 21 nt, synthetic construct
  source 1..21: mol_type = other RNA
cacaaccggggccaccggctc

SEQ ID NO: 43564 - RNA, 21 nt, synthetic construct
  source 1..21: mol_type = other RNA
cacgcttccagtgtggatcag

SEQ ID NO: 43565 - RNA, 21 nt, synthetic construct
  source 1..21: mol_type = other RNA
cacaaccggggccaccggctc

SEQ ID NO: 43566 - RNA, 21 nt, synthetic construct
  source 1..21: mol_type = other RNA
ccatgcgtgtggacattcctg

SEQ ID NO: 43567 - RNA, 21 nt, synthetic construct
  source 1..21: mol_type = other RNA
ttctacaacccacatgggggc

SEQ ID NO: 43568 - RNA, 21 nt, synthetic construct
  source 1..21: mol_type = other RNA
tctacggccatgccctcctcc

SEQ ID NO: 43569 - RNA, 21 nt, synthetic construct
  source 1..21: mol_type = other RNA
tctacggccatgccctcctcc

SEQ ID NO: 43570 - RNA, 21 nt, synthetic construct
  source 1..21: mol_type = other RNA
cactacgactgagtccactgg

SEQ ID NO: 43571 - RNA, 21 nt, synthetic construct
  source 1..21: mol_type = other RNA
cactacgactgagtccactgg

SEQ ID NO: 43572 - RNA, 21 nt, synthetic construct
  source 1..21: mol_type = other RNA
tggactacagctaccccatgc

SEQ ID NO: 43573 - RNA, 21 nt, synthetic construct
  source 1..21: mol_type = other RNA
tggactacagctaccccatgc

SEQ ID NO: 43574 - RNA, 21 nt, synthetic construct
  source 1..21: mol_type = other RNA
tggactacagctaccccatgc

SEQ ID NO: 43575 - RNA, 21 nt, synthetic construct
  source 1..21: mol_type = other RNA
tggactacagctaccccatgc

SEQ ID NO: 43576 - RNA, 21 nt, synthetic construct
  source 1..21: mol_type = other RNA
cgtccaacggctccgtcctca

SEQ ID NO: 43577 - RNA, 21 nt, synthetic construct
  source 1..21: mol_type = other RNA
ccctgggcctcgagtgccgtg

SEQ ID NO: 43578 - RNA, 21 nt, synthetic construct
  source 1..21: mol_type = other RNA
ccctgggcctcgagtgccgtg

SEQ ID NO: 43579 - RNA, 21 nt, synthetic construct
  source 1..21: mol_type = other RNA
ccctgggcctcgagtgccgtg

SEQ ID NO: 43580 - RNA, 21 nt, synthetic construct
  source 1..21: mol_type = other RNA
ccctgggcctcgagtgccgtg

SEQ ID NO: 43581 - RNA, 21 nt, synthetic construct
  source 1..21: mol_type = other RNA
gacccaccctacaagatacgc

SEQ ID NO: 43582 - RNA, 21 nt, synthetic construct
  source 1..21: mol_type = other RNA
cactgtgacgtccacttcggc

SEQ ID NO: 43583 - RNA, 21 nt, synthetic construct
  source 1..21: mol_type = other RNA
gcttggcgcctgcttgatcgc

SEQ ID NO: 43584 - RNA, 21 nt, synthetic construct
  source 1..21: mol_type = other RNA
atggatggcggtgccccgacg

SEQ ID NO: 43585 - RNA, 21 nt, synthetic construct
  source 1..21: mol_type = other RNA
gcccagggacggcacgcacgc

SEQ ID NO: 43586 - RNA, 21 nt, synthetic construct
  source 1..21: mol_type = other RNA
gcccagggacggcacgcacgc

SEQ ID NO: 43587 - RNA, 21 nt, synthetic construct
  source 1..21: mol_type = other RNA
agcgcccgcgcagcacggatt

SEQ ID NO: 43588 - RNA, 21 nt, synthetic construct
  source 1..21: mol_type = other RNA
ggcttggcgcctgcttgatcg

SEQ ID NO: 43589 - RNA, 21 nt, synthetic construct
  source 1..21: mol_type = other RNA
actcctgtcaagtccgcatca

SEQ ID NO: 43590 - RNA, 21 nt, synthetic construct
  source 1..21: mol_type = other RNA
gaggggacctttaaggcggtg

SEQ ID NO: 43591 - RNA, 21 nt, synthetic construct
  source 1..21: mol_type = other RNA
gcaaggacatggccaagacgt

SEQ ID NO: 43592 - RNA, 21 nt, synthetic construct
  source 1..21: mol_type = other RNA
agggacgacggggagcttggg

SEQ ID NO: 43593 - RNA, 21 nt, synthetic construct
  source 1..21: mol_type = other RNA
tcctccaagaggggaccttta

SEQ ID NO: 43594 - RNA, 21 nt, synthetic construct
  source 1..21: mol_type = other RNA
ctccactccggggacgacctg

SEQ ID NO: 43595 - RNA, 21 nt, synthetic construct
  source 1..21: mol_type = other RNA
ctccactccggggacgacctg

SEQ ID NO: 43596 - RNA, 21 nt, synthetic construct
  source 1..21: mol_type = other RNA
ctccactccggggacgacctg

SEQ ID NO: 43597 - RNA, 21 nt, synthetic construct
  source 1..21: mol_type = other RNA
ctccactccggggacgacctg

SEQ ID NO: 43598 - RNA, 21 nt, synthetic construct
  source 1..21: mol_type = other RNA
accactgccgccagttgcaag

SEQ ID NO: 43599 - RNA, 21 nt, synthetic construct
  source 1..21: mol_type = other RNA
ggacccaacggtgcaatgtca

SEQ ID NO: 43600 - RNA, 21 nt, synthetic construct
  source 1..21: mol_type = other RNA
cctatgaggacaggacctaca

SEQ ID NO: 43601 - RNA, 21 nt, synthetic construct
  source 1..21: mol_type = other RNA
agcggacggcggcgtgttcct

SEQ ID NO: 43602 - RNA, 21 nt, synthetic construct
  source 1..21: mol_type = other RNA
caccctatgggtgaccccgag

SEQ ID NO: 43603 - RNA, 21 nt, synthetic construct
  source 1..21: mol_type = other RNA
cttcgtgcctgtggacggctg

SEQ ID NO: 43604 - RNA, 21 nt, synthetic construct
  source 1..21: mol_type = other RNA
agcaccgcttccaaagagccg

SEQ ID NO: 43605 - RNA, 21 nt, synthetic construct
  source 1..21: mol_type = other RNA
aaccgcccttccagcactgag

SEQ ID NO: 43606 - RNA, 21 nt, synthetic construct
  source 1..21: mol_type = other RNA
aaccgcccttccagcactgag

SEQ ID NO: 43607 - RNA, 21 nt, synthetic construct
  source 1..21: mol_type = other RNA
agctctacggccacgccctcc

SEQ ID NO: 43608 - RNA, 21 nt, synthetic construct
  source 1..21: mol_type = other RNA
aaccgcccttccagcactgag

SEQ ID NO: 43609 - RNA, 21 nt, synthetic construct
  source 1..21: mol_type = other RNA
agctctacggccacgccctcc

SEQ ID NO: 43610 - RNA, 21 nt, synthetic construct
  source 1..21: mol_type = other RNA
aaccgcccttccagcactgag

SEQ ID NO: 43611 - RNA, 21 nt, synthetic construct
  source 1..21: mol_type = other RNA
actatagccaccgtgatggtg

SEQ ID NO: 43612 - RNA, 21 nt, synthetic construct
  source 1..21: mol_type = other RNA
caacgcacacatgggcatctg

SEQ ID NO: 43613 - RNA, 21 nt, synthetic construct
  source 1..21: mol_type = other RNA
catcttggcccaggactactg

SEQ ID NO: 43614 - RNA, 21 nt, synthetic construct
  source 1..21: mol_type = other RNA
accctatgggtgaccccgagc

SEQ ID NO: 43615 - RNA, 21 nt, synthetic construct
  source 1..21: mol_type = other RNA
ctatgggtgaccccgagcatc

SEQ ID NO: 43616 - RNA, 21 nt, synthetic construct
  source 1..21: mol_type = other RNA
cctcgagtgccgtgcccaggc

SEQ ID NO: 43617 - RNA, 21 nt, synthetic construct
  source 1..21: mol_type = other RNA
cctcgagtgccgtgcccaggc

SEQ ID NO: 43618 - RNA, 21 nt, synthetic construct
  source 1..21: mol_type = other RNA
cctcgagtgccgtgcccaggc

SEQ ID NO: 43619 - RNA, 21 nt, synthetic construct
  source 1..21: mol_type = other RNA
cctcgagtgccgtgcccaggc

SEQ ID NO: 43620 - RNA, 21 nt, synthetic construct
  source 1..21: mol_type = other RNA
tccggtcgacggcggccctca

SEQ ID NO: 43621 - RNA, 21 nt, synthetic construct
  source 1..21: mol_type = other RNA
ctggatcctcacagagccgag

SEQ ID NO: 43622 - RNA, 21 nt, synthetic construct
  source 1..21: mol_type = other RNA
ctggatcctcacagagccgag

SEQ ID NO: 43623 - RNA, 21 nt, synthetic construct
  source 1..21: mol_type = other RNA
ctggatcctcacagagccgag

SEQ ID NO: 43624 - RNA, 21 nt, synthetic construct
  source 1..21: mol_type = other RNA
ctggatcctcacagagccgag

SEQ ID NO: 43625 - RNA, 21 nt, synthetic construct
  source 1..21: mol_type = other RNA
ctgctgcgaatacgtgccctg

SEQ ID NO: 43626 - RNA, 21 nt, synthetic construct
  source 1..21: mol_type = other RNA
ccaccccgtgggtgaaaccgg

SEQ ID NO: 43627 - RNA, 21 nt, synthetic construct
  source 1..21: mol_type = other RNA
tcagcccttccagggacgacg

SEQ ID NO: 43628 - RNA, 21 nt, synthetic construct
  source 1..21: mol_type = other RNA
gcagccactacgaccgcaacc

SEQ ID NO: 43629 - RNA, 21 nt, synthetic construct
  source 1..21: mol_type = other RNA
aggacccaacggtgcaatgtc

SEQ ID NO: 43630 - RNA, 21 nt, synthetic construct
  source 1..21: mol_type = other RNA
ctgggaccggaagaccagcgt

SEQ ID NO: 43631 - RNA, 21 nt, synthetic construct
  source 1..21: mol_type = other RNA
ctcacgcctccagtgtggatc

SEQ ID NO: 43632 - RNA, 21 nt, synthetic construct
  source 1..21: mol_type = other RNA
ctcacgcctccagtgtggatc

SEQ ID NO: 43633 - RNA, 21 nt, synthetic construct
  source 1..21: mol_type = other RNA
ctcacgcctccagtgtggatc

SEQ ID NO: 43634 - RNA, 21 nt, synthetic construct
  source 1..21: mol_type = other RNA
cgtgtcgtcctgctggaccca

SEQ ID NO: 43635 - RNA, 21 nt, synthetic construct
  source 1..21: mol_type = other RNA
tgacgaccactgcaggggacg

SEQ ID NO: 43636 - RNA, 21 nt, synthetic construct
  source 1..21: mol_type = other RNA
gggttcagtgtcggtgcagtg

SEQ ID NO: 43637 - RNA, 21 nt, synthetic construct
  source 1..21: mol_type = other RNA
gccactacgactgagtccact

SEQ ID NO: 43638 - RNA, 21 nt, synthetic construct
  source 1..21: mol_type = other RNA
gccactacgactgagtccact

SEQ ID NO: 43639 - RNA, 21 nt, synthetic construct
  source 1..21: mol_type = other RNA
cacctgcagcgtttccttcgt

SEQ ID NO: 43640 - RNA, 21 nt, synthetic construct
  source 1..21: mol_type = other RNA
atccacccttccaacacgctc

SEQ ID NO: 43641 - RNA, 21 nt, synthetic construct
  source 1..21: mol_type = other RNA
cccagggacggcacgcacgct

SEQ ID NO: 43642 - RNA, 21 nt, synthetic construct
  source 1..21: mol_type = other RNA
cccagggacggcacgcacgcc

SEQ ID NO: 43643 - RNA, 21 nt, synthetic construct
  source 1..21: mol_type = other RNA
aaccagaggttccacggtgac

SEQ ID NO: 43644 - RNA, 21 nt, synthetic construct
  source 1..21: mol_type = other RNA
tgcaggggccgccttgaggtg

SEQ ID NO: 43645 - RNA, 21 nt, synthetic construct
  source 1..21: mol_type = other RNA
gatacacaagcacccttggta

SEQ ID NO: 43646 - RNA, 21 nt, synthetic construct
  source 1..21: mol_type = other RNA
tccctctccggcaggtgaatg

SEQ ID NO: 43647 - RNA, 21 nt, synthetic construct
  source 1..21: mol_type = other RNA
ctggaacaaactaagcatgtg

SEQ ID NO: 43648 - RNA, 21 nt, synthetic construct
  source 1..21: mol_type = other RNA
ggagctggatcccaaatacgc

SEQ ID NO: 43649 - RNA, 21 nt, synthetic construct
  source 1..21: mol_type = other RNA
ccagggacggcacgcacgcct

SEQ ID NO: 43650 - RNA, 21 nt, synthetic construct
  source 1..21: mol_type = other RNA
gccggcaactgcacggacgag

SEQ ID NO: 43651 - RNA, 21 nt, synthetic construct
  source 1..21: mol_type = other RNA
ctacgacaaggacggaaacta

SEQ ID NO: 43652 - RNA, 21 nt, synthetic construct
  source 1..21: mol_type = other RNA
ggtccgtggtgggggacgcac

SEQ ID NO: 43653 - RNA, 21 nt, synthetic construct
  source 1..21: mol_type = other RNA
aagtcccagcgctacgcctac

SEQ ID NO: 43654 - RNA, 21 nt, synthetic construct
  source 1..21: mol_type = other RNA
acagaccagtggtactccccc

SEQ ID NO: 43655 - RNA, 21 nt, synthetic construct
  source 1..21: mol_type = other RNA
acagaccagtggtactccccc

SEQ ID NO: 43656 - RNA, 21 nt, synthetic construct
  source 1..21: mol_type = other RNA
acagaccagtggtactccccc

SEQ ID NO: 43657 - RNA, 21 nt, synthetic construct
  source 1..21: mol_type = other RNA
acagaccagtggtactccccc

SEQ ID NO: 43658 - RNA, 21 nt, synthetic construct
  source 1..21: mol_type = other RNA
acagaccagtggtactccccc

SEQ ID NO: 43659 - RNA, 21 nt, synthetic construct
  source 1..21: mol_type = other RNA
accgtgtgtgtccgcgaggtc

SEQ ID NO: 43660 - RNA, 21 nt, synthetic construct
  source 1..21: mol_type = other RNA
cagccaacagagtcccccgct

SEQ ID NO: 43661 - RNA, 21 nt, synthetic construct
  source 1..21: mol_type = other RNA
cggtaccacccagcactcgac

SEQ ID NO: 43662 - RNA, 21 nt, synthetic construct
  source 1..21: mol_type = other RNA
cggtaccacccagcactcgac

SEQ ID NO: 43663 - RNA, 21 nt, synthetic construct
  source 1..21: mol_type = other RNA
cggtaccacccagcactcgac

SEQ ID NO: 43664 - RNA, 21 nt, synthetic construct
  source 1..21: mol_type = other RNA
agtcatctacaataagaccga

SEQ ID NO: 43665 - RNA, 21 nt, synthetic construct
  source 1..21: mol_type = other RNA
cggcactggtgctcgcgcctg

SEQ ID NO: 43666 - RNA, 21 nt, synthetic construct
  source 1..21: mol_type = other RNA
acggcggcgtgttcctcaact

SEQ ID NO: 43667 - RNA, 21 nt, synthetic construct
  source 1..21: mol_type = other RNA
tgccagcccacttgccgcggc

SEQ ID NO: 43668 - RNA, 21 nt, synthetic construct
  source 1..21: mol_type = other RNA
gggacgacggggagcttgggc

SEQ ID NO: 43669 - RNA, 21 nt, synthetic construct
  source 1..21: mol_type = other RNA
atggcaccttctacggggttg

SEQ ID NO: 43670 - RNA, 21 nt, synthetic construct
  source 1..21: mol_type = other RNA
ccagggactgcaaccgccctt

SEQ ID NO: 43671 - RNA, 21 nt, synthetic construct
  source 1..21: mol_type = other RNA
aacagccactacgactgagtc

SEQ ID NO: 43672 - RNA, 21 nt, synthetic construct
  source 1..21: mol_type = other RNA
ccagggactgcaaccgccctt

SEQ ID NO: 43673 - RNA, 21 nt, synthetic construct
  source 1..21: mol_type = other RNA
ccagggactgcaaccgccctt

SEQ ID NO: 43674 - RNA, 21 nt, synthetic construct
  source 1..21: mol_type = other RNA
aacagccactacgactgagtc

SEQ ID NO: 43675 - RNA, 21 nt, synthetic construct
  source 1..21: mol_type = other RNA
ccagggactgcaaccgccctt

SEQ ID NO: 43676 - RNA, 21 nt, synthetic construct
  source 1..21: mol_type = other RNA
aggacccctttcgggagggcg

SEQ ID NO: 43677 - RNA, 21 nt, synthetic construct
  source 1..21: mol_type = other RNA
tcacctgcagcgtttccttcg

SEQ ID NO: 43678 - RNA, 21 nt, synthetic construct
  source 1..21: mol_type = other RNA
cagagctcgcccgacaggcac

SEQ ID NO: 43679 - RNA, 21 nt, synthetic construct
  source 1..21: mol_type = other RNA
cctccactccggggacgacct

SEQ ID NO: 43680 - RNA, 21 nt, synthetic construct
  source 1..21: mol_type = other RNA
caagatacgctacatggggat

SEQ ID NO: 43681 - RNA, 21 nt, synthetic construct
  source 1..21: mol_type = other RNA
cgtgttcatccgactgcacca

SEQ ID NO: 43682 - RNA, 21 nt, synthetic construct
  source 1..21: mol_type = other RNA
gacctttaaggcggtggcgag

SEQ ID NO: 43683 - RNA, 21 nt, synthetic construct
  source 1..21: mol_type = other RNA
acaaccccgccaccgaccaca

SEQ ID NO: 43684 - RNA, 21 nt, synthetic construct
  source 1..21: mol_type = other RNA
gctggatgacatcacgcactc

SEQ ID NO: 43685 - RNA, 21 nt, synthetic construct
  source 1..21: mol_type = other RNA
tgggaccggaagaccagcgtg

SEQ ID NO: 43686 - RNA, 21 nt, synthetic construct
  source 1..21: mol_type = other RNA
cccggggaccacccacaccgc

SEQ ID NO: 43687 - RNA, 21 nt, synthetic construct
  source 1..21: mol_type = other RNA
cccggggaccacccacaccgc

SEQ ID NO: 43688 - RNA, 21 nt, synthetic construct
  source 1..21: mol_type = other RNA
cccggggaccacccacaccgc

SEQ ID NO: 43689 - RNA, 21 nt, synthetic construct
  source 1..21: mol_type = other RNA
cctgggcgtgagcgtcacctt

SEQ ID NO: 43690 - RNA, 21 nt, synthetic construct
  source 1..21: mol_type = other RNA
cagcccccgccgtgcaaccgt

SEQ ID NO: 43691 - RNA, 21 nt, synthetic construct
  source 1..21: mol_type = other RNA
ggactcctgtcaagtccgcat

SEQ ID NO: 43692 - RNA, 21 nt, synthetic construct
  source 1..21: mol_type = other RNA
ccctgatgtcactgggacgcc

SEQ ID NO: 43693 - RNA, 21 nt, synthetic construct
  source 1..21: mol_type = other RNA
gctggaggcgtccaacggctc

SEQ ID NO: 43694 - RNA, 21 nt, synthetic construct
  source 1..21: mol_type = other RNA
actgcctgaaagcggtgacgc

SEQ ID NO: 43695 - RNA, 21 nt, synthetic construct
  source 1..21: mol_type = other RNA
ggacggcggcgtgttcctcaa

SEQ ID NO: 43696 - RNA, 21 nt, synthetic construct
  source 1..21: mol_type = other RNA
gaaccaggctgacgacttcac

SEQ ID NO: 43697 - RNA, 21 nt, synthetic construct
  source 1..21: mol_type = other RNA
gcactggtgctcgcgcctgac

SEQ ID NO: 43698 - RNA, 21 nt, synthetic construct
  source 1..21: mol_type = other RNA
cgctcacggcaccgtgctggc

SEQ ID NO: 43699 - RNA, 21 nt, synthetic construct
  source 1..21: mol_type = other RNA
cctccaagaggggacctttaa

SEQ ID NO: 43700 - RNA, 21 nt, synthetic construct
  source 1..21: mol_type = other RNA
gtggggacccaccctacaaga

SEQ ID NO: 43701 - RNA, 21 nt, synthetic construct
  source 1..21: mol_type = other RNA
ccaccctatgggtgaccccga

SEQ ID NO: 43702 - RNA, 21 nt, synthetic construct
  source 1..21: mol_type = other RNA
catcccccagatacacaagca

SEQ ID NO: 43703 - RNA, 21 nt, synthetic construct
  source 1..21: mol_type = other RNA
gaggccccacgacgcctgcag

SEQ ID NO: 43704 - RNA, 21 nt, synthetic construct
  source 1..21: mol_type = other RNA
cttgggcacatggcgcccctc

SEQ ID NO: 43705 - RNA, 21 nt, synthetic construct
  source 1..21: mol_type = other RNA
ccagtgtggatcagcacaacc

SEQ ID NO: 43706 - RNA, 21 nt, synthetic construct
  source 1..21: mol_type = other RNA
cagtgtggatcagcacaacca

SEQ ID NO: 43707 - RNA, 21 nt, synthetic construct
  source 1..21: mol_type = other RNA
ggtgcccaccggatccacggc

SEQ ID NO: 43708 - RNA, 21 nt, synthetic construct
  source 1..21: mol_type = other RNA
ccagggacggcacgcacgctt

SEQ ID NO: 43709 - RNA, 21 nt, synthetic construct
  source 1..21: mol_type = other RNA
ccagtgtggatcagcacaacc

SEQ ID NO: 43710 - RNA, 21 nt, synthetic construct
  source 1..21: mol_type = other RNA
cagtgtggatcagcacaacca

SEQ ID NO: 43711 - RNA, 21 nt, synthetic construct
  source 1..21: mol_type = other RNA
ggtgcccaccggatccacggc

SEQ ID NO: 43712 - RNA, 21 nt, synthetic construct
  source 1..21: mol_type = other RNA
ccagtgtggatcagcacaacc

SEQ ID NO: 43713 - RNA, 21 nt, synthetic construct
  source 1..21: mol_type = other RNA
cagtgtggatcagcacaacca

SEQ ID NO: 43714 - RNA, 21 nt, synthetic construct
  source 1..21: mol_type = other RNA
ggtgcccaccggatccacggc

SEQ ID NO: 43715 - RNA, 21 nt, synthetic construct
  source 1..21: mol_type = other RNA
ccagtgtggatcagcacaacc

SEQ ID NO: 43716 - RNA, 21 nt, synthetic construct
  source 1..21: mol_type = other RNA
cagtgtggatcagcacaacca

SEQ ID NO: 43717 - RNA, 21 nt, synthetic construct
  source 1..21: mol_type = other RNA
ctccacccttgggaccaccgg

SEQ ID NO: 43718 - RNA, 21 nt, synthetic construct
  source 1..21: mol_type = other RNA
ggtgcccaccggatccacggc

SEQ ID NO: 43719 - RNA, 21 nt, synthetic construct
  source 1..21: mol_type = other RNA
ccagtgtggatcagcacaacc

SEQ ID NO: 43720 - RNA, 21 nt, synthetic construct
  source 1..21: mol_type = other RNA
cagtgtggatcagcacaacca

SEQ ID NO: 43721 - RNA, 21 nt, synthetic construct
  source 1..21: mol_type = other RNA
ggcggtgccccgacgtcctcg

SEQ ID NO: 43722 - RNA, 21 nt, synthetic construct
  source 1..21: mol_type = other RNA
tggggacttcaacggcctccc

SEQ ID NO: 43723 - RNA, 21 nt, synthetic construct
  source 1..21: mol_type = other RNA
gacgaggagggcatctgccac

SEQ ID NO: 43724 - RNA, 21 nt, synthetic construct
  source 1..21: mol_type = other RNA
gggcgcagccttcgccaacac

SEQ ID NO: 43725 - RNA, 21 nt, synthetic construct
  source 1..21: mol_type = other RNA
cgccaagggcgtacagctcag

SEQ ID NO: 43726 - RNA, 21 nt, synthetic construct
  source 1..21: mol_type = other RNA
agggcgtacagctcagcgact

SEQ ID NO: 43727 - RNA, 21 nt, synthetic construct
  source 1..21: mol_type = other RNA
ccttcgtgcctgtggacggct

SEQ ID NO: 43728 - RNA, 21 nt, synthetic construct
  source 1..21: mol_type = other RNA
ggcggtggcgagagggccggg

SEQ ID NO: 43729 - RNA, 21 nt, synthetic construct
  source 1..21: mol_type = other RNA
cgtgtgcctgcgactcgggtg

SEQ ID NO: 43730 - RNA, 21 nt, synthetic construct
  source 1..21: mol_type = other RNA
ctggaactccagccacaacgc

SEQ ID NO: 43731 - RNA, 21 nt, synthetic construct
  source 1..21: mol_type = other RNA
agagagggtaccaggtatgcc

SEQ ID NO: 43732 - RNA, 21 nt, synthetic construct
  source 1..21: mol_type = other RNA
gagagggtaccaggtatgccc

SEQ ID NO: 43733 - RNA, 21 nt, synthetic construct
  source 1..21: mol_type = other RNA
ccaggtatgccctgtgctggc

SEQ ID NO: 43734 - RNA, 21 nt, synthetic construct
  source 1..21: mol_type = other RNA
caggtatgccctgtgctggct

SEQ ID NO: 43735 - RNA, 21 nt, synthetic construct
  source 1..21: mol_type = other RNA
ccctcggccccaggtaccacc

SEQ ID NO: 43736 - RNA, 21 nt, synthetic construct
  source 1..21: mol_type = other RNA
taagatcagggccgctggagg

SEQ ID NO: 43737 - RNA, 21 nt, synthetic construct
  source 1..21: mol_type = other RNA
gagggcacttatgccagcagc

SEQ ID NO: 43738 - RNA, 21 nt, synthetic construct
  source 1..21: mol_type = other RNA
ggcgtcttcaagatgtgctac

SEQ ID NO: 43739 - RNA, 21 nt, synthetic construct
  source 1..21: mol_type = other RNA
ggtacagccaccacgggaggc

SEQ ID NO: 43740 - RNA, 21 nt, synthetic construct
  source 1..21: mol_type = other RNA
acgacgcctgcaggctccaca

SEQ ID NO: 43741 - RNA, 21 nt, synthetic construct
  source 1..21: mol_type = other RNA
ggacgacggggagcttgggca

SEQ ID NO: 43742 - RNA, 21 nt, synthetic construct
  source 1..21: mol_type = other RNA
tcacgagcgagctgtccacct

SEQ ID NO: 43743 - RNA, 21 nt, synthetic construct
  source 1..21: mol_type = other RNA
gcgagctgtccacctctcagg

SEQ ID NO: 43744 - RNA, 21 nt, synthetic construct
  source 1..21: mol_type = other RNA
acccgcctatcacagaccacc

SEQ ID NO: 43745 - RNA, 21 nt, synthetic construct
  source 1..21: mol_type = other RNA
accacaaccacgggcttcaca

SEQ ID NO: 43746 - RNA, 21 nt, synthetic construct
  source 1..21: mol_type = other RNA
gacggcactcacgcctccagt

SEQ ID NO: 43747 - RNA, 21 nt, synthetic construct
  source 1..21: mol_type = other RNA
cggcactcacgcctccagtgt

SEQ ID NO: 43748 - RNA, 21 nt, synthetic construct
  source 1..21: mol_type = other RNA
ctccacggtgaccccctcctc

SEQ ID NO: 43749 - RNA, 21 nt, synthetic construct
  source 1..21: mol_type = other RNA
ctctggcggggactttgacac

SEQ ID NO: 43750 - RNA, 21 nt, synthetic construct
  source 1..21: mol_type = other RNA
cctgggcctcgagtgccgtgc

SEQ ID NO: 43751 - RNA, 21 nt, synthetic construct
  source 1..21: mol_type = other RNA
ctgggcctcgagtgccgtgcc

SEQ ID NO: 43752 - RNA, 21 nt, synthetic construct
  source 1..21: mol_type = other RNA
tgggcctcgagtgccgtgccc

SEQ ID NO: 43753 - RNA, 21 nt, synthetic construct
  source 1..21: mol_type = other RNA
tccactccggggacgacctgg

SEQ ID NO: 43754 - RNA, 21 nt, synthetic construct
  source 1..21: mol_type = other RNA
agccgagcactacagccaccg

SEQ ID NO: 43755 - RNA, 21 nt, synthetic construct
  source 1..21: mol_type = other RNA
gccgagcactacagccaccgt

SEQ ID NO: 43756 - RNA, 21 nt, synthetic construct
  source 1..21: mol_type = other RNA
acccgcctatcacagaccacc

SEQ ID NO: 43757 - RNA, 21 nt, synthetic construct
  source 1..21: mol_type = other RNA
caccacaaccggggccaccgg

SEQ ID NO: 43758 - RNA, 21 nt, synthetic construct
  source 1..21: mol_type = other RNA
accacaaccggggccaccggc

SEQ ID NO: 43759 - RNA, 21 nt, synthetic construct
  source 1..21: mol_type = other RNA
accacaaccacgggcttcaca

SEQ ID NO: 43760 - RNA, 21 nt, synthetic construct
  source 1..21: mol_type = other RNA
ttccacggtgaccccctcctc

SEQ ID NO: 43761 - RNA, 21 nt, synthetic construct
  source 1..21: mol_type = other RNA
acggccaccacacacgggcga

SEQ ID NO: 43762 - RNA, 21 nt, synthetic construct
  source 1..21: mol_type = other RNA
ctctggcggggactttgacac

SEQ ID NO: 43763 - RNA, 21 nt, synthetic construct
  source 1..21: mol_type = other RNA
cctgggcctcgagtgccgtgc

SEQ ID NO: 43764 - RNA, 21 nt, synthetic construct
  source 1..21: mol_type = other RNA
ctgggcctcgagtgccgtgcc

SEQ ID NO: 43765 - RNA, 21 nt, synthetic construct
  source 1..21: mol_type = other RNA
tgggcctcgagtgccgtgccc

SEQ ID NO: 43766 - RNA, 21 nt, synthetic construct
  source 1..21: mol_type = other RNA
cagctctacggccacgccctc

SEQ ID NO: 43767 - RNA, 21 nt, synthetic construct
  source 1..21: mol_type = other RNA
ctctacggccacgccctcctc

SEQ ID NO: 43768 - RNA, 21 nt, synthetic construct
  source 1..21: mol_type = other RNA
cacagcagccactacgaccgc

SEQ ID NO: 43769 - RNA, 21 nt, synthetic construct
  source 1..21: mol_type = other RNA
ggatccacggccatcccgtcc

SEQ ID NO: 43770 - RNA, 21 nt, synthetic construct
  source 1..21: mol_type = other RNA
tccactccggggacgacctgg

SEQ ID NO: 43771 - RNA, 21 nt, synthetic construct
  source 1..21: mol_type = other RNA
cacccgggcaactgctggcac

SEQ ID NO: 43772 - RNA, 21 nt, synthetic construct
  source 1..21: mol_type = other RNA
acccgcctatcacagaccacc

SEQ ID NO: 43773 - RNA, 21 nt, synthetic construct
  source 1..21: mol_type = other RNA
cacaaccagggccaccggctc

SEQ ID NO: 43774 - RNA, 21 nt, synthetic construct
  source 1..21: mol_type = other RNA
accacaaccacgggcttcaca

SEQ ID NO: 43775 - RNA, 21 nt, synthetic construct
  source 1..21: mol_type = other RNA
gacggcactcacgcctccagt

SEQ ID NO: 43776 - RNA, 21 nt, synthetic construct
  source 1..21: mol_type = other RNA
cggcactcacgcctccagtgt

SEQ ID NO: 43777 - RNA, 21 nt, synthetic construct
  source 1..21: mol_type = other RNA
ctccacggtgaccccctcctc

SEQ ID NO: 43778 - RNA, 21 nt, synthetic construct
  source 1..21: mol_type = other RNA
ggccactacgatcacagccac

SEQ ID NO: 43779 - RNA, 21 nt, synthetic construct
  source 1..21: mol_type = other RNA
acggccaccacacacgggcgg

SEQ ID NO: 43780 - RNA, 21 nt, synthetic construct
  source 1..21: mol_type = other RNA
ctctggcggggactttgacac

SEQ ID NO: 43781 - RNA, 21 nt, synthetic construct
  source 1..21: mol_type = other RNA
cctgggcctcgagtgccgtgc

SEQ ID NO: 43782 - RNA, 21 nt, synthetic construct
  source 1..21: mol_type = other RNA
ctgggcctcgagtgccgtgcc

SEQ ID NO: 43783 - RNA, 21 nt, synthetic construct
  source 1..21: mol_type = other RNA
tgggcctcgagtgccgtgccc

SEQ ID NO: 43784 - RNA, 21 nt, synthetic construct
  source 1..21: mol_type = other RNA
cagctctacggccacgccctc

SEQ ID NO: 43785 - RNA, 21 nt, synthetic construct
  source 1..21: mol_type = other RNA
ctctacggccacgccctcctc

SEQ ID NO: 43786 - RNA, 21 nt, synthetic construct
  source 1..21: mol_type = other RNA
agccgagcactacagccaccg

SEQ ID NO: 43787 - RNA, 21 nt, synthetic construct
  source 1..21: mol_type = other RNA
gccgagcactacagccaccgt

SEQ ID NO: 43788 - RNA, 21 nt, synthetic construct
  source 1..21: mol_type = other RNA
acccgcctatcacagaccacc

SEQ ID NO: 43789 - RNA, 21 nt, synthetic construct
  source 1..21: mol_type = other RNA
cacaaccagggccaccggctc

SEQ ID NO: 43790 - RNA, 21 nt, synthetic construct
  source 1..21: mol_type = other RNA
accacaaccacgggcttcaca

SEQ ID NO: 43791 - RNA, 21 nt, synthetic construct
  source 1..21: mol_type = other RNA
ctccacggtgaccccctcctc

SEQ ID NO: 43792 - RNA, 21 nt, synthetic construct
  source 1..21: mol_type = other RNA
acggccaccacacacgggcga

SEQ ID NO: 43793 - RNA, 21 nt, synthetic construct
  source 1..21: mol_type = other RNA
ctctggcggggactttgacac

SEQ ID NO: 43794 - RNA, 21 nt, synthetic construct
  source 1..21: mol_type = other RNA
cctgggcctcgagtgccgtgc

SEQ ID NO: 43795 - RNA, 21 nt, synthetic construct
  source 1..21: mol_type = other RNA
ctgggcctcgagtgccgtgcc

SEQ ID NO: 43796 - RNA, 21 nt, synthetic construct
  source 1..21: mol_type = other RNA
tgggcctcgagtgccgtgccc

SEQ ID NO: 43797 - RNA, 21 nt, synthetic construct
  source 1..21: mol_type = other RNA
tccactccggggacgacctgg

SEQ ID NO: 43798 - RNA, 21 nt, synthetic construct
  source 1..21: mol_type = other RNA
tccactccggggacgacctgg

SEQ ID NO: 43799 - RNA, 21 nt, synthetic construct
  source 1..21: mol_type = other RNA
agccgagcactacagccaccg

SEQ ID NO: 43800 - RNA, 21 nt, synthetic construct
  source 1..21: mol_type = other RNA
gccgagcactacagccaccgt

SEQ ID NO: 43801 - RNA, 21 nt, synthetic construct
  source 1..21: mol_type = other RNA
acccgcctatcacagaccacc

SEQ ID NO: 43802 - RNA, 21 nt, synthetic construct
  source 1..21: mol_type = other RNA
caccacaaccggggccaccgg

SEQ ID NO: 43803 - RNA, 21 nt, synthetic construct
  source 1..21: mol_type = other RNA
accacaaccggggccaccggc

SEQ ID NO: 43804 - RNA, 21 nt, synthetic construct
  source 1..21: mol_type = other RNA
accacaaccacgggcttcaca

SEQ ID NO: 43805 - RNA, 21 nt, synthetic construct
  source 1..21: mol_type = other RNA
gacggcactcacgcctccagt

SEQ ID NO: 43806 - RNA, 21 nt, synthetic construct
  source 1..21: mol_type = other RNA
cggcactcacgcctccagtgt

SEQ ID NO: 43807 - RNA, 21 nt, synthetic construct
  source 1..21: mol_type = other RNA
ctccacggtgaccccctcctc

SEQ ID NO: 43808 - RNA, 21 nt, synthetic construct
  source 1..21: mol_type = other RNA
acccacaccgccagagtgctg

SEQ ID NO: 43809 - RNA, 21 nt, synthetic construct
  source 1..21: mol_type = other RNA
cacaccgccagagtgctgacc

SEQ ID NO: 43810 - RNA, 21 nt, synthetic construct
  source 1..21: mol_type = other RNA
ccaaccttcagcgtgtccact

SEQ ID NO: 43811 - RNA, 21 nt, synthetic construct
  source 1..21: mol_type = other RNA
ctgagacccactggcttcccc

SEQ ID NO: 43812 - RNA, 21 nt, synthetic construct
  source 1..21: mol_type = other RNA
tcagcactgtgacattgaccg

SEQ ID NO: 43813 - RNA, 21 nt, synthetic construct
  source 1..21: mol_type = other RNA
gacaatgccatccctctccgg

SEQ ID NO: 43814 - RNA, 21 nt, synthetic construct
  source 1..21: mol_type = other RNA
ccctctccggcaggtgaatga

SEQ ID NO: 43815 - RNA, 21 nt, synthetic construct
  source 1..21: mol_type = other RNA
gagggcctgatcctgtttgac

SEQ ID NO: 43816 - RNA, 21 nt, synthetic construct
  source 1..21: mol_type = other RNA
caccatgcgtgtggacattcc

SEQ ID NO: 43817 - RNA, 21 nt, synthetic construct
  source 1..21: mol_type = other RNA
caggtctttgctgagtgccac

SEQ ID NO: 43818 - RNA, 21 nt, synthetic construct
  source 1..21: mol_type = other RNA
cttcaacgcctgcatcagcga

SEQ ID NO: 43819 - RNA, 21 nt, synthetic construct
  source 1..21: mol_type = other RNA
ttcaacgcctgcatcagcgac

SEQ ID NO: 43820 - RNA, 21 nt, synthetic construct
  source 1..21: mol_type = other RNA
gtgcgacctcacctgcccacc

SEQ ID NO: 43821 - RNA, 21 nt, synthetic construct
  source 1..21: mol_type = other RNA
ttcaacgcacacatgggcatc

SEQ ID NO: 43822 - RNA, 21 nt, synthetic construct
  source 1..21: mol_type = other RNA
tgggcatctgcgtgcaggcct

SEQ ID NO: 43823 - RNA, 21 nt, synthetic construct
  source 1..21: mol_type = other RNA
cccgggccgagaacccctgct

SEQ ID NO: 43824 - RNA, 21 nt, synthetic construct
  source 1..21: mol_type = other RNA
cagaccgcctgcctcacgccc

SEQ ID NO: 43825 - RNA, 21 nt, synthetic construct
  source 1..21: mol_type = other RNA
ggtgcccttgcactgtcctaa

SEQ ID NO: 43826 - RNA, 21 nt, synthetic construct
  source 1..21: mol_type = other RNA
tctgagaacgttctgcctcca

SEQ ID NO: 43827 - RNA, 21 nt, synthetic construct
  source 1..21: mol_type = other RNA
tggaacaaactaagcatgtgc

SEQ ID NO: 43828 - RNA, 21 nt, synthetic construct
  source 1..21: mol_type = other RNA
tgtgtccctgccacggccgga

SEQ ID NO: 43829 - RNA, 21 nt, synthetic construct
  source 1..21: mol_type = other RNA
gcacggattccagctggccac

SEQ ID NO: 43830 - RNA, 21 nt, synthetic construct
  source 1..21: mol_type = other RNA
cacggattccagctggccacg

SEQ ID NO: 43831 - RNA, 21 nt, synthetic construct
  source 1..21: mol_type = other RNA
caacggccaggtcagagaggg

SEQ ID NO: 43832 - RNA, 21 nt, synthetic construct
  source 1..21: mol_type = other RNA
cggctccgtcctcatcaatgg

SEQ ID NO: 43833 - RNA, 21 nt, synthetic construct
  source 1..21: mol_type = other RNA
tacgacctgcatggtgactgc

SEQ ID NO: 43834 - RNA, 21 nt, synthetic construct
  source 1..21: mol_type = other RNA
cggacgccctggcacccaagg

SEQ ID NO: 43835 - RNA, 21 nt, synthetic construct
  source 1..21: mol_type = other RNA
ctatgaggacaggacctacag

SEQ ID NO: 43836 - RNA, 21 nt, synthetic construct
  source 1..21: mol_type = other RNA
aacaccaccgatgggcttggc

SEQ ID NO: 43837 - RNA, 21 nt, synthetic construct
  source 1..21: mol_type = other RNA
cgcctgcttgatcgccatctg

SEQ ID NO: 43838 - RNA, 21 nt, synthetic construct
  source 1..21: mol_type = other RNA
ccacaaccccgccaccgacca

SEQ ID NO: 43839 - RNA, 21 nt, synthetic construct
  source 1..21: mol_type = other RNA
aaccacgggcttcacagccac

SEQ ID NO: 43840 - RNA, 21 nt, synthetic construct
  source 1..21: mol_type = other RNA
acaactgtggccactggttct

SEQ ID NO: 43841 - RNA, 21 nt, synthetic construct
  source 1..21: mol_type = other RNA
caaccaccggtaccacccagc

SEQ ID NO: 43842 - RNA, 21 nt, synthetic construct
  source 1..21: mol_type = other RNA
aaccaccggtaccacccagca

SEQ ID NO: 43843 - RNA, 21 nt, synthetic construct
  source 1..21: mol_type = other RNA
aaccacgggcttcacagccac

SEQ ID NO: 43844 - RNA, 21 nt, synthetic construct
  source 1..21: mol_type = other RNA
acaactgtggccactggttct

SEQ ID NO: 43845 - RNA, 21 nt, synthetic construct
  source 1..21: mol_type = other RNA
agggacaacacctatcccccc

SEQ ID NO: 43846 - RNA, 21 nt, synthetic construct
  source 1..21: mol_type = other RNA
caaccaccggtaccacccagc

SEQ ID NO: 43847 - RNA, 21 nt, synthetic construct
  source 1..21: mol_type = other RNA
aaccaccggtaccacccagca

SEQ ID NO: 43848 - RNA, 21 nt, synthetic construct
  source 1..21: mol_type = other RNA
aaccacgggcttcacagccac

SEQ ID NO: 43849 - RNA, 21 nt, synthetic construct
  source 1..21: mol_type = other RNA
acaactgtggccactggttct

SEQ ID NO: 43850 - RNA, 21 nt, synthetic construct
  source 1..21: mol_type = other RNA
acaactgtggccactggttct

SEQ ID NO: 43851 - RNA, 21 nt, synthetic construct
  source 1..21: mol_type = other RNA
agggacaacacctatcccccc

SEQ ID NO: 43852 - RNA, 21 nt, synthetic construct
  source 1..21: mol_type = other RNA
caaccaccggtaccacccagc

SEQ ID NO: 43853 - RNA, 21 nt, synthetic construct
  source 1..21: mol_type = other RNA
aaccaccggtaccacccagca

SEQ ID NO: 43854 - RNA, 21 nt, synthetic construct
  source 1..21: mol_type = other RNA
aaccacgggcttcacagccac

SEQ ID NO: 43855 - RNA, 21 nt, synthetic construct
  source 1..21: mol_type = other RNA
acaactgtggccactggttct

SEQ ID NO: 43856 - RNA, 21 nt, synthetic construct
  source 1..21: mol_type = other RNA
gacgacccggatcctcactga

SEQ ID NO: 43857 - RNA, 21 nt, synthetic construct
  source 1..21: mol_type = other RNA
ttctcgcccggggaagtcatc

SEQ ID NO: 43858 - RNA, 21 nt, synthetic construct
  source 1..21: mol_type = other RNA
cggtgtgcgtgtgcaacacaa

SEQ ID NO: 43859 - RNA, 21 nt, synthetic construct
  source 1..21: mol_type = other RNA
tgcgtgtgcaacacaaccacc

SEQ ID NO: 43860 - RNA, 21 nt, synthetic construct
  source 1..21: mol_type = other RNA
atgaaacctgggtcaacagcc

SEQ ID NO: 43861 - RNA, 21 nt, synthetic construct
  source 1..21: mol_type = other RNA
cactggtggacagcactgcgt

SEQ ID NO: 43862 - RNA, 21 nt, synthetic construct
  source 1..21: mol_type = other RNA
agcaacagctcggcgggcacc

SEQ ID NO: 43863 - RNA, 21 nt, synthetic construct
  source 1..21: mol_type = other RNA
ggctgcattgccgaggaggac

SEQ ID NO: 43864 - RNA, 21 nt, synthetic construct
  source 1..21: mol_type = other RNA
acatcccccagatacacaagc

SEQ ID NO: 43865 - RNA, 21 nt, synthetic construct
  source 1..21: mol_type = other RNA
gcaaccaccggtaccacccag

SEQ ID NO: 43866 - RNA, 21 nt, synthetic construct
  source 1..21: mol_type = other RNA
tacgactgagtccactggatc

SEQ ID NO: 43867 - RNA, 21 nt, synthetic construct
  source 1..21: mol_type = other RNA
gcccaccggatccacggccac

SEQ ID NO: 43868 - RNA, 21 nt, synthetic construct
  source 1..21: mol_type = other RNA
gcaaccaccggtaccacccag

SEQ ID NO: 43869 - RNA, 21 nt, synthetic construct
  source 1..21: mol_type = other RNA
gccaccacgacaagggccacc

SEQ ID NO: 43870 - RNA, 21 nt, synthetic construct
  source 1..21: mol_type = other RNA
gcccaccggatccacggccac

SEQ ID NO: 43871 - RNA, 21 nt, synthetic construct
  source 1..21: mol_type = other RNA
gcaccgcctggacccgcctat

SEQ ID NO: 43872 - RNA, 21 nt, synthetic construct
  source 1..21: mol_type = other RNA
cacaaagctgaccacaacagc

SEQ ID NO: 43873 - RNA, 21 nt, synthetic construct
  source 1..21: mol_type = other RNA
tacgactgagtccactggatc

SEQ ID NO: 43874 - RNA, 21 nt, synthetic construct
  source 1..21: mol_type = other RNA
gcccaccggatccacggccac

SEQ ID NO: 43875 - RNA, 21 nt, synthetic construct
  source 1..21: mol_type = other RNA
gcaaccaccggtaccacccag

SEQ ID NO: 43876 - RNA, 21 nt, synthetic construct
  source 1..21: mol_type = other RNA
gccaccacgacaagggccacc

SEQ ID NO: 43877 - RNA, 21 nt, synthetic construct
  source 1..21: mol_type = other RNA
gcccaccggatccacggccac

SEQ ID NO: 43878 - RNA, 21 nt, synthetic construct
  source 1..21: mol_type = other RNA
gcacctcttacaccttccggg

SEQ ID NO: 43879 - RNA, 21 nt, synthetic construct
  source 1..21: mol_type = other RNA
ccaccaccatgcgtgtggaca

SEQ ID NO: 43880 - RNA, 21 nt, synthetic construct
  source 1..21: mol_type = other RNA
gactcctgtcaagtccgcatc

SEQ ID NO: 43881 - RNA, 21 nt, synthetic construct
  source 1..21: mol_type = other RNA
gacttcacggccctcagcggg

SEQ ID NO: 43882 - RNA, 21 nt, synthetic construct
  source 1..21: mol_type = other RNA
cactggtgctcgcgcctgacc

SEQ ID NO: 43883 - RNA, 21 nt, synthetic construct
  source 1..21: mol_type = other RNA
ggagagaccatcagggtcgac

SEQ ID NO: 43884 - RNA, 21 nt, synthetic construct
  source 1..21: mol_type = other RNA
gagtacatcttggcccaggac

SEQ ID NO: 43885 - RNA, 21 nt, synthetic construct
  source 1..21: mol_type = other RNA
ccaccctctcagaaggactga

SEQ ID NO: 43886 - RNA, 21 nt, synthetic construct
  source 1..21: mol_type = other RNA
ggccccacgacgcctgcaggc

SEQ ID NO: 43887 - RNA, 21 nt, synthetic construct
  source 1..21: mol_type = other RNA
cagggactgcaaccgcccttc

SEQ ID NO: 43888 - RNA, 21 nt, synthetic construct
  source 1..21: mol_type = other RNA
agggactgcaaccgcccttcc

SEQ ID NO: 43889 - RNA, 21 nt, synthetic construct
  source 1..21: mol_type = other RNA
gactgcaaccgcccttccagc

SEQ ID NO: 43890 - RNA, 21 nt, synthetic construct
  source 1..21: mol_type = other RNA
cagcccagggacggcactcac

SEQ ID NO: 43891 - RNA, 21 nt, synthetic construct
  source 1..21: mol_type = other RNA
ccacacggtgcgcacagcctg

SEQ ID NO: 43892 - RNA, 21 nt, synthetic construct
  source 1..21: mol_type = other RNA
cacacggtgcgcacagcctgg

SEQ ID NO: 43893 - RNA, 21 nt, synthetic construct
  source 1..21: mol_type = other RNA
ccctcaccctagcagcagaac

SEQ ID NO: 43894 - RNA, 21 nt, synthetic construct
  source 1..21: mol_type = other RNA
ctccagggacgaccaccccgg

SEQ ID NO: 43895 - RNA, 21 nt, synthetic construct
  source 1..21: mol_type = other RNA
cggccggaggggccgtctgtg

SEQ ID NO: 43896 - RNA, 21 nt, synthetic construct
  source 1..21: mol_type = other RNA
ggccggaggggccgtctgtga

SEQ ID NO: 43897 - RNA, 21 nt, synthetic construct
  source 1..21: mol_type = other RNA
actacgactgagtccactgga

SEQ ID NO: 43898 - RNA, 21 nt, synthetic construct
  source 1..21: mol_type = other RNA
ggccacgacacccacagtcac

SEQ ID NO: 43899 - RNA, 21 nt, synthetic construct
  source 1..21: mol_type = other RNA
cagggactgcaaccgcccttc

SEQ ID NO: 43900 - RNA, 21 nt, synthetic construct
  source 1..21: mol_type = other RNA
agggactgcaaccgcccttcc

SEQ ID NO: 43901 - RNA, 21 nt, synthetic construct
  source 1..21: mol_type = other RNA
gactgcaaccgcccttccagc

SEQ ID NO: 43902 - RNA, 21 nt, synthetic construct
  source 1..21: mol_type = other RNA
ccacacggtgcgcacagcctg

SEQ ID NO: 43903 - RNA, 21 nt, synthetic construct
  source 1..21: mol_type = other RNA
cacacggtgcgcacagcctgg

SEQ ID NO: 43904 - RNA, 21 nt, synthetic construct
  source 1..21: mol_type = other RNA
gccttccacggggacttccca

SEQ ID NO: 43905 - RNA, 21 nt, synthetic construct
  source 1..21: mol_type = other RNA
ccctcaccctagcagcaggac

SEQ ID NO: 43906 - RNA, 21 nt, synthetic construct
  source 1..21: mol_type = other RNA
caccctagcagcaggaccacc

SEQ ID NO: 43907 - RNA, 21 nt, synthetic construct
  source 1..21: mol_type = other RNA
accctagcagcaggaccaccg

SEQ ID NO: 43908 - RNA, 21 nt, synthetic construct
  source 1..21: mol_type = other RNA
ctccagggacgaccaccccgg

SEQ ID NO: 43909 - RNA, 21 nt, synthetic construct
  source 1..21: mol_type = other RNA
cggccggaggggccgtctgtg

SEQ ID NO: 43910 - RNA, 21 nt, synthetic construct
  source 1..21: mol_type = other RNA
ggccggaggggccgtctgtga

SEQ ID NO: 43911 - RNA, 21 nt, synthetic construct
  source 1..21: mol_type = other RNA
caccagctctacggccacgcc

SEQ ID NO: 43912 - RNA, 21 nt, synthetic construct
  source 1..21: mol_type = other RNA
accagttccatgtccaccccc

SEQ ID NO: 43913 - RNA, 21 nt, synthetic construct
  source 1..21: mol_type = other RNA
cagttccatgtccaccccctc

SEQ ID NO: 43914 - RNA, 21 nt, synthetic construct
  source 1..21: mol_type = other RNA
actgctggcaccctcaaagtg

SEQ ID NO: 43915 - RNA, 21 nt, synthetic construct
  source 1..21: mol_type = other RNA
cagggactgcaaccgcccttc

SEQ ID NO: 43916 - RNA, 21 nt, synthetic construct
  source 1..21: mol_type = other RNA
agggactgcaaccgcccttcc

SEQ ID NO: 43917 - RNA, 21 nt, synthetic construct
  source 1..21: mol_type = other RNA
gactgcaaccgcccttccagc

SEQ ID NO: 43918 - RNA, 21 nt, synthetic construct
  source 1..21: mol_type = other RNA
cagcccagggacggcactcac

SEQ ID NO: 43919 - RNA, 21 nt, synthetic construct
  source 1..21: mol_type = other RNA
ccacacggtgcgcacagcctg

SEQ ID NO: 43920 - RNA, 21 nt, synthetic construct
  source 1..21: mol_type = other RNA
cacacggtgcgcacagcctgg

SEQ ID NO: 43921 - RNA, 21 nt, synthetic construct
  source 1..21: mol_type = other RNA
ccctcaccctagcagcaggac

SEQ ID NO: 43922 - RNA, 21 nt, synthetic construct
  source 1..21: mol_type = other RNA
caccctagcagcaggaccacc

SEQ ID NO: 43923 - RNA, 21 nt, synthetic construct
  source 1..21: mol_type = other RNA
accctagcagcaggaccaccg

SEQ ID NO: 43924 - RNA, 21 nt, synthetic construct
  source 1..21: mol_type = other RNA
ctccagggacgaccaccccgg

SEQ ID NO: 43925 - RNA, 21 nt, synthetic construct
  source 1..21: mol_type = other RNA
caccagctctacggccacgcc

SEQ ID NO: 43926 - RNA, 21 nt, synthetic construct
  source 1..21: mol_type = other RNA
actacgactgagtccactgga

SEQ ID NO: 43927 - RNA, 21 nt, synthetic construct
  source 1..21: mol_type = other RNA
ggccacgacacccacagtcac

SEQ ID NO: 43928 - RNA, 21 nt, synthetic construct
  source 1..21: mol_type = other RNA
cagggactgcaaccgcccttc

SEQ ID NO: 43929 - RNA, 21 nt, synthetic construct
  source 1..21: mol_type = other RNA
agggactgcaaccgcccttcc

SEQ ID NO: 43930 - RNA, 21 nt, synthetic construct
  source 1..21: mol_type = other RNA
gactgcaaccgcccttccagc

SEQ ID NO: 43931 - RNA, 21 nt, synthetic construct
  source 1..21: mol_type = other RNA
ccacacggtgcgcacagcctg

SEQ ID NO: 43932 - RNA, 21 nt, synthetic construct
  source 1..21: mol_type = other RNA
cacacggtgcgcacagcctgg

SEQ ID NO: 43933 - RNA, 21 nt, synthetic construct
  source 1..21: mol_type = other RNA
gccttccacggggacttccca

SEQ ID NO: 43934 - RNA, 21 nt, synthetic construct
  source 1..21: mol_type = other RNA
ccctcaccctagcagcaggac

SEQ ID NO: 43935 - RNA, 21 nt, synthetic construct
  source 1..21: mol_type = other RNA
caccctagcagcaggaccacc

SEQ ID NO: 43936 - RNA, 21 nt, synthetic construct
  source 1..21: mol_type = other RNA
accctagcagcaggaccaccg

SEQ ID NO: 43937 - RNA, 21 nt, synthetic construct
  source 1..21: mol_type = other RNA
cggccggaggggccgtctgtg

SEQ ID NO: 43938 - RNA, 21 nt, synthetic construct
  source 1..21: mol_type = other RNA
ggccggaggggccgtctgtga

SEQ ID NO: 43939 - RNA, 21 nt, synthetic construct
  source 1..21: mol_type = other RNA
ggccacgacacccacagtcac

SEQ ID NO: 43940 - RNA, 21 nt, synthetic construct
  source 1..21: mol_type = other RNA
cagcccagggacggcactcac

SEQ ID NO: 43941 - RNA, 21 nt, synthetic construct
  source 1..21: mol_type = other RNA
gggacgacccggatcctcact

SEQ ID NO: 43942 - RNA, 21 nt, synthetic construct
  source 1..21: mol_type = other RNA
gccaagacgtggctggtcccc

SEQ ID NO: 43943 - RNA, 21 nt, synthetic construct
  source 1..21: mol_type = other RNA
ggctttgagtacaagagagtg

SEQ ID NO: 43944 - RNA, 21 nt, synthetic construct
  source 1..21: mol_type = other RNA
tcacgcccgatggccagccag

SEQ ID NO: 43945 - RNA, 21 nt, synthetic construct
  source 1..21: mol_type = other RNA
atcaccttctgcgagggctcc

SEQ ID NO: 43946 - RNA, 21 nt, synthetic construct
  source 1..21: mol_type = other RNA
ccacgtggatgagtgtggctg

SEQ ID NO: 43947 - RNA, 21 nt, synthetic construct
  source 1..21: mol_type = other RNA
gccctggaacaaactaagcat

SEQ ID NO: 43948 - RNA, 21 nt, synthetic construct
  source 1..21: mol_type = other RNA
cacgtccggccgctggggcag

SEQ ID NO: 43949 - RNA, 21 nt, synthetic construct
  source 1..21: mol_type = other RNA
aggatgggtgccccgagcgcg

SEQ ID NO: 43950 - RNA, 21 nt, synthetic construct
  source 1..21: mol_type = other RNA
gagcactgccgcgccgcctac

SEQ ID NO: 43951 - RNA, 21 nt, synthetic construct
  source 1..21: mol_type = other RNA
gtggagcagagcggggactac

SEQ ID NO: 43952 - RNA, 21 nt, synthetic construct
  source 1..21: mol_type = other RNA
aggctgaccccgctccagttt

SEQ ID NO: 43953 - RNA, 21 nt, synthetic construct
  source 1..21: mol_type = other RNA
ccccacctgcccgtgtgccac

SEQ ID NO: 43954 - RNA, 21 nt, synthetic construct
  source 1..21: mol_type = other RNA
tacagcccgggcacctccttc

SEQ ID NO: 43955 - RNA, 21 nt, synthetic construct
  source 1..21: mol_type = other RNA
gagaaactctacgacctgcat

SEQ ID NO: 43956 - RNA, 21 nt, synthetic construct
  source 1..21: mol_type = other RNA
ttctgtccaagaaatgtgccg

SEQ ID NO: 43957 - RNA, 21 nt, synthetic construct
  source 1..21: mol_type = other RNA
actcatgcaggtgtttgtcag

SEQ ID NO: 43958 - RNA, 21 nt, synthetic construct
  source 1..21: mol_type = other RNA
aaccaggctgacgacttcacg

SEQ ID NO: 43959 - RNA, 21 nt, synthetic construct
  source 1..21: mol_type = other RNA
cgggcgcagccttcgccaaca

SEQ ID NO: 43960 - RNA, 21 nt, synthetic construct
  source 1..21: mol_type = other RNA
ggcactggtgctcgcgcctga

SEQ ID NO: 43961 - RNA, 21 nt, synthetic construct
  source 1..21: mol_type = other RNA
gccaagggcgtacagctcagc

SEQ ID NO: 43962 - RNA, 21 nt, synthetic construct
  source 1..21: mol_type = other RNA
gccgcggcctgagtgaggccg

SEQ ID NO: 43963 - RNA, 21 nt, synthetic construct
  source 1..21: mol_type = other RNA
ccgcggcctgagtgaggccga

SEQ ID NO: 43964 - RNA, 21 nt, synthetic construct
  source 1..21: mol_type = other RNA
gctcacggcaccgtgctggct

SEQ ID NO: 43965 - RNA, 21 nt, synthetic construct
  source 1..21: mol_type = other RNA
ctggtcatcgagacccacggg

SEQ ID NO: 43966 - RNA, 21 nt, synthetic construct
  source 1..21: mol_type = other RNA
gtgtgcctgcgactcgggtgg

SEQ ID NO: 43967 - RNA, 21 nt, synthetic construct
  source 1..21: mol_type = other RNA
gtgcaagggtccccacagcgg

SEQ ID NO: 43968 - RNA, 21 nt, synthetic construct
  source 1..21: mol_type = other RNA
acaggacctacagctaccagg

SEQ ID NO: 43969 - RNA, 21 nt, synthetic construct
  source 1..21: mol_type = other RNA
cctacagctaccaggacgtca

SEQ ID NO: 43970 - RNA, 21 nt, synthetic construct
  source 1..21: mol_type = other RNA
tccagccacaacgccattcac

SEQ ID NO: 43971 - RNA, 21 nt, synthetic construct
  source 1..21: mol_type = other RNA
gctggtacaatgggcaccgcc

SEQ ID NO: 43972 - RNA, 21 nt, synthetic construct
  source 1..21: mol_type = other RNA
gggttctctgctgcgaatacg

SEQ ID NO: 43973 - RNA, 21 nt, synthetic construct
  source 1..21: mol_type = other RNA
cgctggagggcacttatgcca

SEQ ID NO: 43974 - RNA, 21 nt, synthetic construct
  source 1..21: mol_type = other RNA
tggagggcacttatgccagca

SEQ ID NO: 43975 - RNA, 21 nt, synthetic construct
  source 1..21: mol_type = other RNA
gagagcttccccaactggacc

SEQ ID NO: 43976 - RNA, 21 nt, synthetic construct
  source 1..21: mol_type = other RNA
tccccaactggaccctggcac

SEQ ID NO: 43977 - RNA, 21 nt, synthetic construct
  source 1..21: mol_type = other RNA
agcagtccccaccctctcaga

SEQ ID NO: 43978 - RNA, 21 nt, synthetic construct
  source 1..21: mol_type = other RNA
cacgggaggccccacgacgcc

SEQ ID NO: 43979 - RNA, 21 nt, synthetic construct
  source 1..21: mol_type = other RNA
cgggaggccccacgacgcctg

SEQ ID NO: 43980 - RNA, 21 nt, synthetic construct
  source 1..21: mol_type = other RNA
cggggagcttgggcacatggc

SEQ ID NO: 43981 - RNA, 21 nt, synthetic construct
  source 1..21: mol_type = other RNA
ctcaggccgagaccagcacgc

SEQ ID NO: 43982 - RNA, 21 nt, synthetic construct
  source 1..21: mol_type = other RNA
cacgcccaggacagagacgac

SEQ ID NO: 43983 - RNA, 21 nt, synthetic construct
  source 1..21: mol_type = other RNA
cacaactggggccaccggctc

SEQ ID NO: 43984 - RNA, 21 nt, synthetic construct
  source 1..21: mol_type = other RNA
caggaacagctcacactacca

SEQ ID NO: 43985 - RNA, 21 nt, synthetic construct
  source 1..21: mol_type = other RNA
acggcactcacgcctccagtg

SEQ ID NO: 43986 - RNA, 21 nt, synthetic construct
  source 1..21: mol_type = other RNA
gtggtactcccccatcactga

SEQ ID NO: 43987 - RNA, 21 nt, synthetic construct
  source 1..21: mol_type = other RNA
tactcccccatcactgaccac

SEQ ID NO: 43988 - RNA, 21 nt, synthetic construct
  source 1..21: mol_type = other RNA
cacacacccccagtgccgaac

SEQ ID NO: 43989 - RNA, 21 nt, synthetic construct
  source 1..21: mol_type = other RNA
gtgacttcccacaccctagca

SEQ ID NO: 43990 - RNA, 21 nt, synthetic construct
  source 1..21: mol_type = other RNA
cagcaagacccgcacctcgac

SEQ ID NO: 43991 - RNA, 21 nt, synthetic construct
  source 1..21: mol_type = other RNA
gtcagagtggctggactacag

SEQ ID NO: 43992 - RNA, 21 nt, synthetic construct
  source 1..21: mol_type = other RNA
agccactacgactgagtccac

SEQ ID NO: 43993 - RNA, 21 nt, synthetic construct
  source 1..21: mol_type = other RNA
ggatcctcacagagccgagca

SEQ ID NO: 43994 - RNA, 21 nt, synthetic construct
  source 1..21: mol_type = other RNA
caccggatccacggccaccgc

SEQ ID NO: 43995 - RNA, 21 nt, synthetic construct
  source 1..21: mol_type = other RNA
accggatccacggccaccgcc

SEQ ID NO: 43996 - RNA, 21 nt, synthetic construct
  source 1..21: mol_type = other RNA
ggcaactgctggcaccccaca

SEQ ID NO: 43997 - RNA, 21 nt, synthetic construct
  source 1..21: mol_type = other RNA
ggcaccccacatgtgagcacc

SEQ ID NO: 43998 - RNA, 21 nt, synthetic construct
  source 1..21: mol_type = other RNA
caggaacagctcacactacca

SEQ ID NO: 43999 - RNA, 21 nt, synthetic construct
  source 1..21: mol_type = other RNA
gtggtactcccccatcactga

SEQ ID NO: 44000 - RNA, 21 nt, synthetic construct
  source 1..21: mol_type = other RNA
tactcccccatcactgaccac

SEQ ID NO: 44001 - RNA, 21 nt, synthetic construct
  source 1..21: mol_type = other RNA
cacacacccccagtgccgaac

SEQ ID NO: 44002 - RNA, 21 nt, synthetic construct
  source 1..21: mol_type = other RNA
acttcggccacctcaggcacc

SEQ ID NO: 44003 - RNA, 21 nt, synthetic construct
  source 1..21: mol_type = other RNA
cagagccttccacggggactt

SEQ ID NO: 44004 - RNA, 21 nt, synthetic construct
  source 1..21: mol_type = other RNA
cagcaagacccgcacctcgac

SEQ ID NO: 44005 - RNA, 21 nt, synthetic construct
  source 1..21: mol_type = other RNA
gtcagagtggctggactacag

SEQ ID NO: 44006 - RNA, 21 nt, synthetic construct
  source 1..21: mol_type = other RNA
accagctctacggccacgccc

SEQ ID NO: 44007 - RNA, 21 nt, synthetic construct
  source 1..21: mol_type = other RNA
ccactggatccacggccatcc

SEQ ID NO: 44008 - RNA, 21 nt, synthetic construct
  source 1..21: mol_type = other RNA
gccatcccgtcctccaccccg

SEQ ID NO: 44009 - RNA, 21 nt, synthetic construct
  source 1..21: mol_type = other RNA
ccatcccgtcctccaccccgg

SEQ ID NO: 44010 - RNA, 21 nt, synthetic construct
  source 1..21: mol_type = other RNA
caccggatccacggccaccgc

SEQ ID NO: 44011 - RNA, 21 nt, synthetic construct
  source 1..21: mol_type = other RNA
accggatccacggccaccgcc

SEQ ID NO: 44012 - RNA, 21 nt, synthetic construct
  source 1..21: mol_type = other RNA
caggaacagctcacactacca

SEQ ID NO: 44013 - RNA, 21 nt, synthetic construct
  source 1..21: mol_type = other RNA
acggcactcacgcctccagtg

SEQ ID NO: 44014 - RNA, 21 nt, synthetic construct
  source 1..21: mol_type = other RNA
gtggtactcccccatcactga

SEQ ID NO: 44015 - RNA, 21 nt, synthetic construct
  source 1..21: mol_type = other RNA
tactcccccatcactgaccac

SEQ ID NO: 44016 - RNA, 21 nt, synthetic construct
  source 1..21: mol_type = other RNA
cacacacccccagtgccgaac

SEQ ID NO: 44017 - RNA, 21 nt, synthetic construct
  source 1..21: mol_type = other RNA
cagcaagacccgcacctcgac

SEQ ID NO: 44018 - RNA, 21 nt, synthetic construct
  source 1..21: mol_type = other RNA
gtcagagtggctggactacag

SEQ ID NO: 44019 - RNA, 21 nt, synthetic construct
  source 1..21: mol_type = other RNA
cggaggggcagtctgtgagca

SEQ ID NO: 44020 - RNA, 21 nt, synthetic construct
  source 1..21: mol_type = other RNA
accagctctacggccacgccc

SEQ ID NO: 44021 - RNA, 21 nt, synthetic construct
  source 1..21: mol_type = other RNA
agccactacgactgagtccac

SEQ ID NO: 44022 - RNA, 21 nt, synthetic construct
  source 1..21: mol_type = other RNA
ggatcctcacagagccgagca

SEQ ID NO: 44023 - RNA, 21 nt, synthetic construct
  source 1..21: mol_type = other RNA
caccggatccacggccaccgc

SEQ ID NO: 44024 - RNA, 21 nt, synthetic construct
  source 1..21: mol_type = other RNA
accggatccacggccaccgcc

SEQ ID NO: 44025 - RNA, 21 nt, synthetic construct
  source 1..21: mol_type = other RNA
ggcaactgctggcaccccaca

SEQ ID NO: 44026 - RNA, 21 nt, synthetic construct
  source 1..21: mol_type = other RNA
ggcaccccacatgtgagcacc

SEQ ID NO: 44027 - RNA, 21 nt, synthetic construct
  source 1..21: mol_type = other RNA
caggaacagctcacactacca

SEQ ID NO: 44028 - RNA, 21 nt, synthetic construct
  source 1..21: mol_type = other RNA
gtggtactcccccatcactga

SEQ ID NO: 44029 - RNA, 21 nt, synthetic construct
  source 1..21: mol_type = other RNA
atcaccacggccactacgatc

SEQ ID NO: 44030 - RNA, 21 nt, synthetic construct
  source 1..21: mol_type = other RNA
cacacacccccagtgccgaac

SEQ ID NO: 44031 - RNA, 21 nt, synthetic construct
  source 1..21: mol_type = other RNA
acttcggccacctcaggcacc

SEQ ID NO: 44032 - RNA, 21 nt, synthetic construct
  source 1..21: mol_type = other RNA
cagagccttccacggggactt

SEQ ID NO: 44033 - RNA, 21 nt, synthetic construct
  source 1..21: mol_type = other RNA
cagcaagacccgcacctcgac

SEQ ID NO: 44034 - RNA, 21 nt, synthetic construct
  source 1..21: mol_type = other RNA
gtcagagtggctggactacag

SEQ ID NO: 44035 - RNA, 21 nt, synthetic construct
  source 1..21: mol_type = other RNA
agggccaccagttccacgtcc

SEQ ID NO: 44036 - RNA, 21 nt, synthetic construct
  source 1..21: mol_type = other RNA
ggatcctcacagagccgagca

SEQ ID NO: 44037 - RNA, 21 nt, synthetic construct
  source 1..21: mol_type = other RNA
caccggatccacggccaccgc

SEQ ID NO: 44038 - RNA, 21 nt, synthetic construct
  source 1..21: mol_type = other RNA
accggatccacggccaccgcc

SEQ ID NO: 44039 - RNA, 21 nt, synthetic construct
  source 1..21: mol_type = other RNA
ggcaactgctggcaccccaca

SEQ ID NO: 44040 - RNA, 21 nt, synthetic construct
  source 1..21: mol_type = other RNA
ggcaccccacatgtgagcacc

SEQ ID NO: 44041 - RNA, 21 nt, synthetic construct
  source 1..21: mol_type = other RNA
agggactgcaactgcccttcc

SEQ ID NO: 44042 - RNA, 21 nt, synthetic construct
  source 1..21: mol_type = other RNA
caggaacagctcacactacca

SEQ ID NO: 44043 - RNA, 21 nt, synthetic construct
  source 1..21: mol_type = other RNA
acggcactcacgcctccagtg

SEQ ID NO: 44044 - RNA, 21 nt, synthetic construct
  source 1..21: mol_type = other RNA
caccgccagagtgctgaccac

SEQ ID NO: 44045 - RNA, 21 nt, synthetic construct
  source 1..21: mol_type = other RNA
gtggtactcccccatcactga

SEQ ID NO: 44046 - RNA, 21 nt, synthetic construct
  source 1..21: mol_type = other RNA
tactcccccatcactgaccac

SEQ ID NO: 44047 - RNA, 21 nt, synthetic construct
  source 1..21: mol_type = other RNA
gaccgtcccagcacagaccac

SEQ ID NO: 44048 - RNA, 21 nt, synthetic construct
  source 1..21: mol_type = other RNA
acaacagccactacaactgca

SEQ ID NO: 44049 - RNA, 21 nt, synthetic construct
  source 1..21: mol_type = other RNA
ggatcctcacagagccgagca

SEQ ID NO: 44050 - RNA, 21 nt, synthetic construct
  source 1..21: mol_type = other RNA
ttcccagctcgtccaccgtgg

SEQ ID NO: 44051 - RNA, 21 nt, synthetic construct
  source 1..21: mol_type = other RNA
cgcagtgtgcaatcagcactg

SEQ ID NO: 44052 - RNA, 21 nt, synthetic construct
  source 1..21: mol_type = other RNA
ccagtgtcctccgccccgctg

SEQ ID NO: 44053 - RNA, 21 nt, synthetic construct
  source 1..21: mol_type = other RNA
cggctcccactattccacctt

SEQ ID NO: 44054 - RNA, 21 nt, synthetic construct
  source 1..21: mol_type = other RNA
acaccttccggggcaactgca

SEQ ID NO: 44055 - RNA, 21 nt, synthetic construct
  source 1..21: mol_type = other RNA
atccatgcacgctttgggaat

SEQ ID NO: 44056 - RNA, 21 nt, synthetic construct
  source 1..21: mol_type = other RNA
ctgtcaccatggtgcatggga

SEQ ID NO: 44057 - RNA, 21 nt, synthetic construct
  source 1..21: mol_type = other RNA
gtcaccttcaatggccaagtc

SEQ ID NO: 44058 - RNA, 21 nt, synthetic construct
  source 1..21: mol_type = other RNA
gtgccacaaccttgtgccccc

SEQ ID NO: 44059 - RNA, 21 nt, synthetic construct
  source 1..21: mol_type = other RNA
agccatgcggccccatacagc

SEQ ID NO: 44060 - RNA, 21 nt, synthetic construct
  source 1..21: mol_type = other RNA
atcctcttcaacgcacacatg

SEQ ID NO: 44061 - RNA, 21 nt, synthetic construct
  source 1..21: mol_type = other RNA
ctgccacatgtgtacctgcct

SEQ ID NO: 44062 - RNA, 21 nt, synthetic construct
  source 1..21: mol_type = other RNA
gacccaacggtgcaatgtcag

SEQ ID NO: 44063 - RNA, 21 nt, synthetic construct
  source 1..21: mol_type = other RNA
ttgagtacaagagagtggccg

SEQ ID NO: 44064 - RNA, 21 nt, synthetic construct
  source 1..21: mol_type = other RNA
agtacaagagagtggccgggc

SEQ ID NO: 44065 - RNA, 21 nt, synthetic construct
  source 1..21: mol_type = other RNA
gagtggccgggcagtgctgtg

SEQ ID NO: 44066 - RNA, 21 nt, synthetic construct
  source 1..21: mol_type = other RNA
ccagtccagctgaatgaaacc

SEQ ID NO: 44067 - RNA, 21 nt, synthetic construct
  source 1..21: mol_type = other RNA
attgtctgatcatgaaaacct

SEQ ID NO: 44068 - RNA, 21 nt, synthetic construct
  source 1..21: mol_type = other RNA
cctggaacaaactaagcatgt

SEQ ID NO: 44069 - RNA, 21 nt, synthetic construct
  source 1..21: mol_type = other RNA
gattccagctggccacgtccg

SEQ ID NO: 44070 - RNA, 21 nt, synthetic construct
  source 1..21: mol_type = other RNA
gcggccgcctgtccatgcctg

SEQ ID NO: 44071 - RNA, 21 nt, synthetic construct
  source 1..21: mol_type = other RNA
catgcgtgtggacattcctgc

SEQ ID NO: 44072 - RNA, 21 nt, synthetic construct
  source 1..21: mol_type = other RNA
ccccggtgtctagcacaccca

SEQ ID NO: 44073 - RNA, 21 nt, synthetic construct
  source 1..21: mol_type = other RNA
cagagccgagcactacagcca

SEQ ID NO: 44074 - RNA, 21 nt, synthetic construct
  source 1..21: mol_type = other RNA
cagagccgagcactacagcca

SEQ ID NO: 44075 - RNA, 21 nt, synthetic construct
  source 1..21: mol_type = other RNA
cagagccgagcactacagcca

SEQ ID NO: 44076 - RNA, 21 nt, synthetic construct
  source 1..21: mol_type = other RNA
tggggacgacccggatcctca

SEQ ID NO: 44077 - RNA, 21 nt, synthetic construct
  source 1..21: mol_type = other RNA
gcgtgttcatccgactgcacc

SEQ ID NO: 44078 - RNA, 21 nt, synthetic construct
  source 1..21: mol_type = other RNA
gctgcccaccccgtgggtgaa

SEQ ID NO: 44079 - RNA, 21 nt, synthetic construct
  source 1..21: mol_type = other RNA
aggacagagacgacaatgagc

SEQ ID NO: 44080 - RNA, 21 nt, synthetic construct
  source 1..21: mol_type = other RNA
caaccccgccaccgaccacag

SEQ ID NO: 44081 - RNA, 21 nt, synthetic construct
  source 1..21: mol_type = other RNA
cacagaccagtggtactcccc

SEQ ID NO: 44082 - RNA, 21 nt, synthetic construct
  source 1..21: mol_type = other RNA
cacagaccagtggtactcccc

SEQ ID NO: 44083 - RNA, 21 nt, synthetic construct
  source 1..21: mol_type = other RNA
cacagaccagtggtactcccc

SEQ ID NO: 44084 - RNA, 21 nt, synthetic construct
  source 1..21: mol_type = other RNA
cacagaccagtggtactcccc

SEQ ID NO: 44085 - RNA, 21 nt, synthetic construct
  source 1..21: mol_type = other RNA
cacagaccagtggtactcccc

SEQ ID NO: 44086 - RNA, 21 nt, synthetic construct
  source 1..21: mol_type = other RNA
acctgcatggtgactgcagct

SEQ ID NO: 44087 - RNA, 21 nt, synthetic construct
  source 1..21: mol_type = other RNA
gctggtgccactcatgcaggt

SEQ ID NO: 44088 - RNA, 21 nt, synthetic construct
  source 1..21: mol_type = other RNA
cagtggtactcccccatcact

SEQ ID NO: 44089 - RNA, 21 nt, synthetic construct
  source 1..21: mol_type = other RNA
cctggtctgcaggaaccgtga

SEQ ID NO: 44090 - RNA, 21 nt, synthetic construct
  source 1..21: mol_type = other RNA
actccagagactgtccacacc

SEQ ID NO: 44091 - RNA, 21 nt, synthetic construct
  source 1..21: mol_type = other RNA
cagtggtactcccccatcact

SEQ ID NO: 44092 - RNA, 21 nt, synthetic construct
  source 1..21: mol_type = other RNA
cctggtctgcaggaaccgtga

SEQ ID NO: 44093 - RNA, 21 nt, synthetic construct
  source 1..21: mol_type = other RNA
actccagagactgtccacacc

SEQ ID NO: 44094 - RNA, 21 nt, synthetic construct
  source 1..21: mol_type = other RNA
cagtggtactcccccatcact

SEQ ID NO: 44095 - RNA, 21 nt, synthetic construct
  source 1..21: mol_type = other RNA
cctggtctgcaggaaccgtga

SEQ ID NO: 44096 - RNA, 21 nt, synthetic construct
  source 1..21: mol_type = other RNA
cagtggtactcccccatcact

SEQ ID NO: 44097 - RNA, 21 nt, synthetic construct
  source 1..21: mol_type = other RNA
cctggtctgcaggaaccgtga

SEQ ID NO: 44098 - RNA, 21 nt, synthetic construct
  source 1..21: mol_type = other RNA
actccagagactgtccacacc

SEQ ID NO: 44099 - RNA, 21 nt, synthetic construct
  source 1..21: mol_type = other RNA
cagtggtactcccccatcact

SEQ ID NO: 44100 - RNA, 21 nt, synthetic construct
  source 1..21: mol_type = other RNA
gaacttcgacgacaatgccat

SEQ ID NO: 44101 - RNA, 21 nt, synthetic construct
  source 1..21: mol_type = other RNA
tctccacctatgatgagaaac

SEQ ID NO: 44102 - RNA, 21 nt, synthetic construct
  source 1..21: mol_type = other RNA
atcctccaagaggggaccttt

SEQ ID NO: 44103 - RNA, 21 nt, synthetic construct
  source 1..21: mol_type = other RNA
agagccttccacggggacttc

SEQ ID NO: 44104 - RNA, 21 nt, synthetic construct
  source 1..21: mol_type = other RNA
agagccttccacggggacttc

SEQ ID NO: 44105 - RNA, 21 nt, synthetic construct
  source 1..21: mol_type = other RNA
caatccacacctcctctactc

SEQ ID NO: 44106 - RNA, 21 nt, synthetic construct
  source 1..21: mol_type = other RNA
gtgcatctgcagcatgtgggg

SEQ ID NO: 44107 - RNA, 21 nt, synthetic construct
  source 1..21: mol_type = other RNA
gtacaagagagtggccgggca

SEQ ID NO: 44108 - RNA, 21 nt, synthetic construct
  source 1..21: mol_type = other RNA
tgggtgccccgagcgcgtgcc

SEQ ID NO: 44109 - RNA, 21 nt, synthetic construct
  source 1..21: mol_type = other RNA
ggcacctccttcaacaccacc

SEQ ID NO: 44110 - RNA, 21 nt, synthetic construct
  source 1..21: mol_type = other RNA
gcggtgacgctcagcctggac

SEQ ID NO: 44111 - RNA, 21 nt, synthetic construct
  source 1..21: mol_type = other RNA
ccagagctgtaactgcacacc

SEQ ID NO: 44112 - RNA, 21 nt, synthetic construct
  source 1..21: mol_type = other RNA
ccggtcgacggcggccctcac

SEQ ID NO: 44113 - RNA, 21 nt, synthetic construct
  source 1..21: mol_type = other RNA
ccaacacgctcagcccttcca

SEQ ID NO: 44114 - RNA, 21 nt, synthetic construct
  source 1..21: mol_type = other RNA
ctccaccctgagaacagctcc

SEQ ID NO: 44115 - RNA, 21 nt, synthetic construct
  source 1..21: mol_type = other RNA
ctccactccagagactgtcca

SEQ ID NO: 44116 - RNA, 21 nt, synthetic construct
  source 1..21: mol_type = other RNA
aagtgctgaccagcacggcca

SEQ ID NO: 44117 - RNA, 21 nt, synthetic construct
  source 1..21: mol_type = other RNA
cacagagcccagcactacagc

SEQ ID NO: 44118 - RNA, 21 nt, synthetic construct
  source 1..21: mol_type = other RNA
aagtgctgaccagcacggcca

SEQ ID NO: 44119 - RNA, 21 nt, synthetic construct
  source 1..21: mol_type = other RNA
tactcccccatcactgatcac

SEQ ID NO: 44120 - RNA, 21 nt, synthetic construct
  source 1..21: mol_type = other RNA
ctccactccagagactgtcca

SEQ ID NO: 44121 - RNA, 21 nt, synthetic construct
  source 1..21: mol_type = other RNA
cagtgctgaccagcacggcca

SEQ ID NO: 44122 - RNA, 21 nt, synthetic construct
  source 1..21: mol_type = other RNA
tgcctccacggttcccagctc

SEQ ID NO: 44123 - RNA, 21 nt, synthetic construct
  source 1..21: mol_type = other RNA
ttgggaatctcagcctctacc

SEQ ID NO: 44124 - RNA, 21 nt, synthetic construct
  source 1..21: mol_type = other RNA
attcctgccctgggcgtgagc

SEQ ID NO: 44125 - RNA, 21 nt, synthetic construct
  source 1..21: mol_type = other RNA
ctgcaacaatactacctgtcc

SEQ ID NO: 44126 - RNA, 21 nt, synthetic construct
  source 1..21: mol_type = other RNA
gggctttgagtacaagagagt

SEQ ID NO: 44127 - RNA, 21 nt, synthetic construct
  source 1..21: mol_type = other RNA
gagggtggagtccatttgctg

SEQ ID NO: 44128 - RNA, 21 nt, synthetic construct
  source 1..21: mol_type = other RNA
ccactacgactgagtccactg

SEQ ID NO: 44129 - RNA, 21 nt, synthetic construct
  source 1..21: mol_type = other RNA
ccactacgactgagtccactg

SEQ ID NO: 44130 - RNA, 21 nt, synthetic construct
  source 1..21: mol_type = other RNA
cgggcaactgctggcaccctc

SEQ ID NO: 44131 - RNA, 21 nt, synthetic construct
  source 1..21: mol_type = other RNA
cccgcagccccggtgtctagc

SEQ ID NO: 44132 - RNA, 21 nt, synthetic construct
  source 1..21: mol_type = other RNA
cctggtcatcgagacccacgg

SEQ ID NO: 44133 - RNA, 21 nt, synthetic construct
  source 1..21: mol_type = other RNA
gatcctcttcaacgcacacat

SEQ ID NO: 44134 - RNA, 21 nt, synthetic construct
  source 1..21: mol_type = other RNA
gcgcgtgccggacgctggtgt

SEQ ID NO: 44135 - RNA, 21 nt, synthetic construct
  source 1..21: mol_type = other RNA
tggtgccactcatgcaggtgt

SEQ ID NO: 44136 - RNA, 21 nt, synthetic construct
  source 1..21: mol_type = other RNA
cggccaccacaaccggggcca

SEQ ID NO: 44137 - RNA, 21 nt, synthetic construct
  source 1..21: mol_type = other RNA
cggccaccacaaccggggcca

SEQ ID NO: 44138 - RNA, 21 nt, synthetic construct
  source 1..21: mol_type = other RNA
agctgcgacaggcaaggcggc

SEQ ID NO: 44139 - RNA, 21 nt, synthetic construct
  source 1..21: mol_type = other RNA
accagtggtactcccccatca

SEQ ID NO: 44140 - RNA, 21 nt, synthetic construct
  source 1..21: mol_type = other RNA
accagtggtactcccccatca

SEQ ID NO: 44141 - RNA, 21 nt, synthetic construct
  source 1..21: mol_type = other RNA
accagtggtactcccccatca

SEQ ID NO: 44142 - RNA, 21 nt, synthetic construct
  source 1..21: mol_type = other RNA
accagtggtactcccccatca

SEQ ID NO: 44143 - RNA, 21 nt, synthetic construct
  source 1..21: mol_type = other RNA
accagtggtactcccccatca

SEQ ID NO: 44144 - RNA, 21 nt, synthetic construct
  source 1..21: mol_type = other RNA
ggacgacccggatcctcactg

SEQ ID NO: 44145 - RNA, 21 nt, synthetic construct
  source 1..21: mol_type = other RNA
ccaccttccgctgcagacctc

SEQ ID NO: 44146 - RNA, 21 nt, synthetic construct
  source 1..21: mol_type = other RNA
ggccttcaacgagttctatgc

SEQ ID NO: 44147 - RNA, 21 nt, synthetic construct
  source 1..21: mol_type = other RNA
tatgcccacaacgccaggctg

SEQ ID NO: 44148 - RNA, 21 nt, synthetic construct
  source 1..21: mol_type = other RNA
gactgcaaccacccttccagt

SEQ ID NO: 44149 - RNA, 21 nt, synthetic construct
  source 1..21: mol_type = other RNA
aactccagggacaactcccat

SEQ ID NO: 44150 - RNA, 21 nt, synthetic construct
  source 1..21: mol_type = other RNA
gactgcaaccacccttccagt

SEQ ID NO: 44151 - RNA, 21 nt, synthetic construct
  source 1..21: mol_type = other RNA
gactgcaaccacccttccagt

SEQ ID NO: 44152 - RNA, 21 nt, synthetic construct
  source 1..21: mol_type = other RNA
gtgactgcagctacgttctgt

SEQ ID NO: 44153 - RNA, 21 nt, synthetic construct
  source 1..21: mol_type = other RNA
cactcatgcaggtgtttgtca

SEQ ID NO: 44154 - RNA, 21 nt, synthetic construct
  source 1..21: mol_type = other RNA
cagaaaagcacagggtgtgca

SEQ ID NO: 44155 - RNA, 21 nt, synthetic construct
  source 1..21: mol_type = other RNA
agaaaagcacagggtgtgcag

SEQ ID NO: 44156 - RNA, 21 nt, synthetic construct
  source 1..21: mol_type = other RNA
gctcggcgggcacccctgggg

SEQ ID NO: 44157 - RNA, 21 nt, synthetic construct
  source 1..21: mol_type = other RNA
tatgggtgaccccgagcatcc

SEQ ID NO: 44158 - RNA, 21 nt, synthetic construct
  source 1..21: mol_type = other RNA
cagaccaccacacccacggcc

SEQ ID NO: 44159 - RNA, 21 nt, synthetic construct
  source 1..21: mol_type = other RNA
gggcgatccctgccccccagc

SEQ ID NO: 44160 - RNA, 21 nt, synthetic construct
  source 1..21: mol_type = other RNA
cagaccaccacacccacggcc

SEQ ID NO: 44161 - RNA, 21 nt, synthetic construct
  source 1..21: mol_type = other RNA
tcaactccagggacaacacct

SEQ ID NO: 44162 - RNA, 21 nt, synthetic construct
  source 1..21: mol_type = other RNA
cctcctccagtccaaggactg

SEQ ID NO: 44163 - RNA, 21 nt, synthetic construct
  source 1..21: mol_type = other RNA
cagaccaccacacccacggcc

SEQ ID NO: 44164 - RNA, 21 nt, synthetic construct
  source 1..21: mol_type = other RNA
cagaccaccacacccacggcc

SEQ ID NO: 44165 - RNA, 21 nt, synthetic construct
  source 1..21: mol_type = other RNA
tcaactccagggacaacacct

SEQ ID NO: 44166 - RNA, 21 nt, synthetic construct
  source 1..21: mol_type = other RNA
cctcctccagtccaaggactg

SEQ ID NO: 44167 - RNA, 21 nt, synthetic construct
  source 1..21: mol_type = other RNA
cagaccaccacacccacggcc

SEQ ID NO: 44168 - RNA, 21 nt, synthetic construct
  source 1..21: mol_type = other RNA
tcaactccagggacaacaccc

SEQ ID NO: 44169 - RNA, 21 nt, synthetic construct
  source 1..21: mol_type = other RNA
cctcctccagtccaaggactg

SEQ ID NO: 44170 - RNA, 21 nt, synthetic construct
  source 1..21: mol_type = other RNA
tggggaccacccgcacccctg

SEQ ID NO: 44171 - RNA, 21 nt, synthetic construct
  source 1..21: mol_type = other RNA
tttcccggggagcggtgggtc

SEQ ID NO: 44172 - RNA, 21 nt, synthetic construct
  source 1..21: mol_type = other RNA
gtacaatggcaccttctacgg

SEQ ID NO: 44173 - RNA, 21 nt, synthetic construct
  source 1..21: mol_type = other RNA
tacaatggcaccttctacggg

SEQ ID NO: 44174 - RNA, 21 nt, synthetic construct
  source 1..21: mol_type = other RNA
ctggccacgtccggccgctgg

SEQ ID NO: 44175 - RNA, 21 nt, synthetic construct
  source 1..21: mol_type = other RNA
ggaacttcgacgacaatgcca

SEQ ID NO: 44176 - RNA, 21 nt, synthetic construct
  source 1..21: mol_type = other RNA
cacggccaccacaaccggggc

SEQ ID NO: 44177 - RNA, 21 nt, synthetic construct
  source 1..21: mol_type = other RNA
cacggccaccacaaccggggc

SEQ ID NO: 44178 - RNA, 21 nt, synthetic construct
  source 1..21: mol_type = other RNA
ctatgatgagaaactctacga

SEQ ID NO: 44179 - RNA, 21 nt, synthetic construct
  source 1..21: mol_type = other RNA
caccacggccacgacacccac

SEQ ID NO: 44180 - RNA, 21 nt, synthetic construct
  source 1..21: mol_type = other RNA
caccacggccacgacacccac

SEQ ID NO: 44181 - RNA, 21 nt, synthetic construct
  source 1..21: mol_type = other RNA
caccacggccacgacacccac

SEQ ID NO: 44182 - RNA, 21 nt, synthetic construct
  source 1..21: mol_type = other RNA
tgccggccggcaactgcacgg

SEQ ID NO: 44183 - RNA, 21 nt, synthetic construct
  source 1..21: mol_type = other RNA
ccaaggactgcaaccaccctt

SEQ ID NO: 44184 - RNA, 21 nt, synthetic construct
  source 1..21: mol_type = other RNA
ccaaggactgcaaccaccctt

SEQ ID NO: 44185 - RNA, 21 nt, synthetic construct
  source 1..21: mol_type = other RNA
ccaaggactgcaaccaccctt

SEQ ID NO: 44186 - RNA, 21 nt, synthetic construct
  source 1..21: mol_type = other RNA
agccactggatccacggccac

SEQ ID NO: 44187 - RNA, 21 nt, synthetic construct
  source 1..21: mol_type = other RNA
aggcagagagggtaccaggta

SEQ ID NO: 44188 - RNA, 21 nt, synthetic construct
  source 1..21: mol_type = other RNA
acggccatcccgtcctccacc

SEQ ID NO: 44189 - RNA, 21 nt, synthetic construct
  source 1..21: mol_type = other RNA
catggatggcggtgccccgac

SEQ ID NO: 44190 - RNA, 21 nt, synthetic construct
  source 1..21: mol_type = other RNA
tgccacctttgtggaatactc

SEQ ID NO: 44191 - RNA, 21 nt, synthetic construct
  source 1..21: mol_type = other RNA
gagacccacgggatggccgtg

SEQ ID NO: 44192 - RNA, 21 nt, synthetic construct
  source 1..21: mol_type = other RNA
atggcaacctccagagctcgc

SEQ ID NO: 44193 - RNA, 21 nt, synthetic construct
  source 1..21: mol_type = other RNA
tgcttaccgccacggccacca

SEQ ID NO: 44194 - RNA, 21 nt, synthetic construct
  source 1..21: mol_type = other RNA
gttctatggcaacaccctcct

SEQ ID NO: 44195 - RNA, 21 nt, synthetic construct
  source 1..21: mol_type = other RNA
ctcaactcctgggacaactcc

SEQ ID NO: 44196 - RNA, 21 nt, synthetic construct
  source 1..21: mol_type = other RNA
cctgggacaactcccatcccc

SEQ ID NO: 44197 - RNA, 21 nt, synthetic construct
  source 1..21: mol_type = other RNA
gttctatggcaacaccctcct

SEQ ID NO: 44198 - RNA, 21 nt, synthetic construct
  source 1..21: mol_type = other RNA
agcactcgactccagccctgt

SEQ ID NO: 44199 - RNA, 21 nt, synthetic construct
  source 1..21: mol_type = other RNA
gctctacggccacgccctcct

SEQ ID NO: 44200 - RNA, 21 nt, synthetic construct
  source 1..21: mol_type = other RNA
caactgctggcaccctcaaag

SEQ ID NO: 44201 - RNA, 21 nt, synthetic construct
  source 1..21: mol_type = other RNA
gttctatggcaacaccctcct

SEQ ID NO: 44202 - RNA, 21 nt, synthetic construct
  source 1..21: mol_type = other RNA
agcactcgactccagccctgt

SEQ ID NO: 44203 - RNA, 21 nt, synthetic construct
  source 1..21: mol_type = other RNA
gctctacggccacgccctcct

SEQ ID NO: 44204 - RNA, 21 nt, synthetic construct
  source 1..21: mol_type = other RNA
gttctatggcaacaccctcct

SEQ ID NO: 44205 - RNA, 21 nt, synthetic construct
  source 1..21: mol_type = other RNA
agcactcgactccagccctgt

SEQ ID NO: 44206 - RNA, 21 nt, synthetic construct
  source 1..21: mol_type = other RNA
tgcttaccgccacggccacca

SEQ ID NO: 44207 - RNA, 21 nt, synthetic construct
  source 1..21: mol_type = other RNA
gttctatggcaacaccctcct

SEQ ID NO: 44208 - RNA, 21 nt, synthetic construct
  source 1..21: mol_type = other RNA
acccggatcctcactgagctg

SEQ ID NO: 44209 - RNA, 21 nt, synthetic construct
  source 1..21: mol_type = other RNA
tcctccactctgggaacagct

SEQ ID NO: 44210 - RNA, 21 nt, synthetic construct
  source 1..21: mol_type = other RNA
caactctaggaaccagagccc

SEQ ID NO: 44211 - RNA, 21 nt, synthetic construct
  source 1..21: mol_type = other RNA
caagagagtggccgggcagtg

SEQ ID NO: 44212 - RNA, 21 nt, synthetic construct
  source 1..21: mol_type = other RNA
agagagtggccgggcagtgct

SEQ ID NO: 44213 - RNA, 21 nt, synthetic construct
  source 1..21: mol_type = other RNA
tccagctgaatgaaacctggg

SEQ ID NO: 44214 - RNA, 21 nt, synthetic construct
  source 1..21: mol_type = other RNA
gtgtacctctgtgaggctgag

SEQ ID NO: 44215 - RNA, 21 nt, synthetic construct
  source 1..21: mol_type = other RNA
cggtgcccttgcactgtccta

SEQ ID NO: 44216 - RNA, 21 nt, synthetic construct
  source 1..21: mol_type = other RNA
cacacacccgtggcttcccgg

SEQ ID NO: 44217 - RNA, 21 nt, synthetic construct
  source 1..21: mol_type = other RNA
ccctgccacggccggagcgcc

SEQ ID NO: 44218 - RNA, 21 nt, synthetic construct
  source 1..21: mol_type = other RNA
ctgggagaatgcagggcacac

SEQ ID NO: 44219 - RNA, 21 nt, synthetic construct
  source 1..21: mol_type = other RNA
tttgagacgtttgaaaacctg

SEQ ID NO: 44220 - RNA, 21 nt, synthetic construct
  source 1..21: mol_type = other RNA
aggagggcgtcttcaagatgt

SEQ ID NO: 44221 - RNA, 21 nt, synthetic construct
  source 1..21: mol_type = other RNA
cgcacagcctggacttcggcc

SEQ ID NO: 44222 - RNA, 21 nt, synthetic construct
  source 1..21: mol_type = other RNA
cgcacagcctggacttcggcc

SEQ ID NO: 44223 - RNA, 21 nt, synthetic construct
  source 1..21: mol_type = other RNA
cgcacagcctggacttcggcc

SEQ ID NO: 44224 - RNA, 21 nt, synthetic construct
  source 1..21: mol_type = other RNA
cgcacagcctggacttcggcc

SEQ ID NO: 44225 - RNA, 21 nt, synthetic construct
  source 1..21: mol_type = other RNA
aagggccaccagttccacgtc

SEQ ID NO: 44226 - RNA, 21 nt, synthetic construct
  source 1..21: mol_type = other RNA
agggcacaccatggatggcgg

SEQ ID NO: 44227 - RNA, 21 nt, synthetic construct
  source 1..21: mol_type = other RNA
gccaccacaaccggggccacc

SEQ ID NO: 44228 - RNA, 21 nt, synthetic construct
  source 1..21: mol_type = other RNA
gccaccacaaccggggccacc

SEQ ID NO: 44229 - RNA, 21 nt, synthetic construct
  source 1..21: mol_type = other RNA
agctgaatgaaacctgggtca

SEQ ID NO: 44230 - RNA, 21 nt, synthetic construct
  source 1..21: mol_type = other RNA
ctttgagacgtttgaaaacct

SEQ ID NO: 44231 - RNA, 21 nt, synthetic construct
  source 1..21: mol_type = other RNA
cacgggcgatccctgcccccc

SEQ ID NO: 44232 - RNA, 21 nt, synthetic construct
  source 1..21: mol_type = other RNA
accccgggccacaccacggcc

SEQ ID NO: 44233 - RNA, 21 nt, synthetic construct
  source 1..21: mol_type = other RNA
accccgggccacaccacggcc

SEQ ID NO: 44234 - RNA, 21 nt, synthetic construct
  source 1..21: mol_type = other RNA
cacctggggtgacttccacta

SEQ ID NO: 44235 - RNA, 21 nt, synthetic construct
  source 1..21: mol_type = other RNA
tatgatgagaaactctacgac

SEQ ID NO: 44236 - RNA, 21 nt, synthetic construct
  source 1..21: mol_type = other RNA
cgcggcctgagtgaggccgac

SEQ ID NO: 44237 - RNA, 21 nt, synthetic construct
  source 1..21: mol_type = other RNA
aggaaccggaggtgggagtgc

SEQ ID NO: 44238 - RNA, 21 nt, synthetic construct
  source 1..21: mol_type = other RNA
cggactccggacacctgcccc

SEQ ID NO: 44239 - RNA, 21 nt, synthetic construct
  source 1..21: mol_type = other RNA
gaggacaggacctacagctac

SEQ ID NO: 44240 - RNA, 21 nt, synthetic construct
  source 1..21: mol_type = other RNA
cagagagggtaccaggtatgc

SEQ ID NO: 44241 - RNA, 21 nt, synthetic construct
  source 1..21: mol_type = other RNA
gtgctggctgacatcgagtgc

SEQ ID NO: 44242 - RNA, 21 nt, synthetic construct
  source 1..21: mol_type = other RNA
ggccctcacctcgcagactgg

SEQ ID NO: 44243 - RNA, 21 nt, synthetic construct
  source 1..21: mol_type = other RNA
aagatcagggccgctggaggg

SEQ ID NO: 44244 - RNA, 21 nt, synthetic construct
  source 1..21: mol_type = other RNA
ctgcagtgacgaccactgcag

SEQ ID NO: 44245 - RNA, 21 nt, synthetic construct
  source 1..21: mol_type = other RNA
gaccactgcaggggacgtgcc

SEQ ID NO: 44246 - RNA, 21 nt, synthetic construct
  source 1..21: mol_type = other RNA
gcacagccagcaccgcttcca

SEQ ID NO: 44247 - RNA, 21 nt, synthetic construct
  source 1..21: mol_type = other RNA
tgcgtccactggatccacggc

SEQ ID NO: 44248 - RNA, 21 nt, synthetic construct
  source 1..21: mol_type = other RNA
ggcactcacgcctccagtgtg

SEQ ID NO: 44249 - RNA, 21 nt, synthetic construct
  source 1..21: mol_type = other RNA
gcatcttgggcaccacccaca

SEQ ID NO: 44250 - RNA, 21 nt, synthetic construct
  source 1..21: mol_type = other RNA
ctacagctaccccatgccggg

SEQ ID NO: 44251 - RNA, 21 nt, synthetic construct
  source 1..21: mol_type = other RNA
tggcaccccacatgtgagcac

SEQ ID NO: 44252 - RNA, 21 nt, synthetic construct
  source 1..21: mol_type = other RNA
acggccaccacaaccggggcc

SEQ ID NO: 44253 - RNA, 21 nt, synthetic construct
  source 1..21: mol_type = other RNA
caactccagggacaacaccta

SEQ ID NO: 44254 - RNA, 21 nt, synthetic construct
  source 1..21: mol_type = other RNA
ctacagctaccccatgccggg

SEQ ID NO: 44255 - RNA, 21 nt, synthetic construct
  source 1..21: mol_type = other RNA
aaggactgcaaccacccttcc

SEQ ID NO: 44256 - RNA, 21 nt, synthetic construct
  source 1..21: mol_type = other RNA
gcacagccaccaaatccacag

SEQ ID NO: 44257 - RNA, 21 nt, synthetic construct
  source 1..21: mol_type = other RNA
cgaaggccaccacgacaaggg

SEQ ID NO: 44258 - RNA, 21 nt, synthetic construct
  source 1..21: mol_type = other RNA
ggcactcacgcctccagtgtg

SEQ ID NO: 44259 - RNA, 21 nt, synthetic construct
  source 1..21: mol_type = other RNA
gcatcttgggcaccacccaca

SEQ ID NO: 44260 - RNA, 21 nt, synthetic construct
  source 1..21: mol_type = other RNA
ctacagctaccccatgccggg

SEQ ID NO: 44261 - RNA, 21 nt, synthetic construct
  source 1..21: mol_type = other RNA
tggcaccccacatgtgagcac

SEQ ID NO: 44262 - RNA, 21 nt, synthetic construct
  source 1..21: mol_type = other RNA
caactccagggacaacaccta

SEQ ID NO: 44263 - RNA, 21 nt, synthetic construct
  source 1..21: mol_type = other RNA
ctacagctaccccatgccggg

SEQ ID NO: 44264 - RNA, 21 nt, synthetic construct
  source 1..21: mol_type = other RNA
aaggactgcaaccacccttcc

SEQ ID NO: 44265 - RNA, 21 nt, synthetic construct
  source 1..21: mol_type = other RNA
gcacagccaccaaatccacag

SEQ ID NO: 44266 - RNA, 21 nt, synthetic construct
  source 1..21: mol_type = other RNA
cgaaggccaccacgacaaggg

SEQ ID NO: 44267 - RNA, 21 nt, synthetic construct
  source 1..21: mol_type = other RNA
tgcgtccactggatccacggc

SEQ ID NO: 44268 - RNA, 21 nt, synthetic construct
  source 1..21: mol_type = other RNA
tggcaccccacatgtgagcac

SEQ ID NO: 44269 - RNA, 21 nt, synthetic construct
  source 1..21: mol_type = other RNA
acggccaccacaaccggggcc

SEQ ID NO: 44270 - RNA, 21 nt, synthetic construct
  source 1..21: mol_type = other RNA
ggcactcacgcctccagtgtg

SEQ ID NO: 44271 - RNA, 21 nt, synthetic construct
  source 1..21: mol_type = other RNA
aaggactgcaaccacccttcc

SEQ ID NO: 44272 - RNA, 21 nt, synthetic construct
  source 1..21: mol_type = other RNA
acggcacctcttacaccttcc

SEQ ID NO: 44273 - RNA, 21 nt, synthetic construct
  source 1..21: mol_type = other RNA
cagcatccactacaagtccat

SEQ ID NO: 44274 - RNA, 21 nt, synthetic construct
  source 1..21: mol_type = other RNA
gtcagcccccgccgtgcaacc

SEQ ID NO: 44275 - RNA, 21 nt, synthetic construct
  source 1..21: mol_type = other RNA
tgcgtccagaccgcctgcctc

SEQ ID NO: 44276 - RNA, 21 nt, synthetic construct
  source 1..21: mol_type = other RNA
tcagccatcctgcacacctac

SEQ ID NO: 44277 - RNA, 21 nt, synthetic construct
  source 1..21: mol_type = other RNA
gaaaccggccccagaagggtg

SEQ ID NO: 44278 - RNA, 21 nt, synthetic construct
  source 1..21: mol_type = other RNA
ctgccaggaagctgcgacagg

SEQ ID NO: 44279 - RNA, 21 nt, synthetic construct
  source 1..21: mol_type = other RNA
ctcctccactctgggaacagc

SEQ ID NO: 44280 - RNA, 21 nt, synthetic construct
  source 1..21: mol_type = other RNA
ttctacggggttggtgcaacc

SEQ ID NO: 44281 - RNA, 21 nt, synthetic construct
  source 1..21: mol_type = other RNA
aagaggggacctttaaggcgg

SEQ ID NO: 44282 - RNA, 21 nt, synthetic construct
  source 1..21: mol_type = other RNA
gcggcgcagcttcccgacatg

SEQ ID NO: 44283 - RNA, 21 nt, synthetic construct
  source 1..21: mol_type = other RNA
cacagtgcttaccaccacgac

SEQ ID NO: 44284 - RNA, 21 nt, synthetic construct
  source 1..21: mol_type = other RNA
gccaccagctctacggccatg

SEQ ID NO: 44285 - RNA, 21 nt, synthetic construct
  source 1..21: mol_type = other RNA
gccaccagctctacggccatg

SEQ ID NO: 44286 - RNA, 21 nt, synthetic construct
  source 1..21: mol_type = other RNA
tggcaccttctacggggttgg

SEQ ID NO: 44287 - RNA, 21 nt, synthetic construct
  source 1..21: mol_type = other RNA
gtcctctgctgcagtgacgac

SEQ ID NO: 44288 - RNA, 21 nt, synthetic construct
  source 1..21: mol_type = other RNA
cacgaaggccaccacgacaag

SEQ ID NO: 44289 - RNA, 21 nt, synthetic construct
  source 1..21: mol_type = other RNA
cacgaaggccaccacgacaag

SEQ ID NO: 44290 - RNA, 21 nt, synthetic construct
  source 1..21: mol_type = other RNA
ggcacgacccgctgtcaaccg

SEQ ID NO: 44291 - RNA, 21 nt, synthetic construct
  source 1..21: mol_type = other RNA
ctggatgacatcacgcactct

SEQ ID NO: 44292 - RNA, 21 nt, synthetic construct
  source 1..21: mol_type = other RNA
tgagcaccacggccacgacac

SEQ ID NO: 44293 - RNA, 21 nt, synthetic construct
  source 1..21: mol_type = other RNA
tgagcaccacggccacgacac

SEQ ID NO: 44294 - RNA, 21 nt, synthetic construct
  source 1..21: mol_type = other RNA
tgagcaccacggccacgacac

SEQ ID NO: 44295 - RNA, 21 nt, synthetic construct
  source 1..21: mol_type = other RNA
gaccacgaaggccaccacgac

SEQ ID NO: 44296 - RNA, 21 nt, synthetic construct
  source 1..21: mol_type = other RNA
gaccacgaaggccaccacgac

SEQ ID NO: 44297 - RNA, 21 nt, synthetic construct
  source 1..21: mol_type = other RNA
cctccacggttcccagctcgt

SEQ ID NO: 44298 - RNA, 21 nt, synthetic construct
  source 1..21: mol_type = other RNA
tggggaccaccaccatgcgtg

SEQ ID NO: 44299 - RNA, 21 nt, synthetic construct
  source 1..21: mol_type = other RNA
ggatgcctgcaacaatactac

SEQ ID NO: 44300 - RNA, 21 nt, synthetic construct
  source 1..21: mol_type = other RNA
gtgcgtgtgcaacacaaccac

SEQ ID NO: 44301 - RNA, 21 nt, synthetic construct
  source 1..21: mol_type = other RNA
cggggaccacccacaccgcca

SEQ ID NO: 44302 - RNA, 21 nt, synthetic construct
  source 1..21: mol_type = other RNA
cggggaccacccacaccgcca

SEQ ID NO: 44303 - RNA, 21 nt, synthetic construct
  source 1..21: mol_type = other RNA
cggggaccacccacaccgcca

SEQ ID NO: 44304 - RNA, 21 nt, synthetic construct
  source 1..21: mol_type = other RNA
cagagcctggaggcttacgca

SEQ ID NO: 44305 - RNA, 21 nt, synthetic construct
  source 1..21: mol_type = other RNA
caggatgggtgccccgagcgc

SEQ ID NO: 44306 - RNA, 21 nt, synthetic construct
  source 1..21: mol_type = other RNA
caaggactgcaaccacccttc

SEQ ID NO: 44307 - RNA, 21 nt, synthetic construct
  source 1..21: mol_type = other RNA
caaggactgcaaccacccttc

SEQ ID NO: 44308 - RNA, 21 nt, synthetic construct
  source 1..21: mol_type = other RNA
caaggactgcaaccacccttc

SEQ ID NO: 44309 - RNA, 21 nt, synthetic construct
  source 1..21: mol_type = other RNA
cagaaccaccgagtcaccccc

SEQ ID NO: 44310 - RNA, 21 nt, synthetic construct
  source 1..21: mol_type = other RNA
tccgtggtgggggacgcactg

SEQ ID NO: 44311 - RNA, 21 nt, synthetic construct
  source 1..21: mol_type = other RNA
ggggagcttgggcacatggcg

SEQ ID NO: 44312 - RNA, 21 nt, synthetic construct
  source 1..21: mol_type = other RNA
ttcccacaccctagcagcaac

SEQ ID NO: 44313 - RNA, 21 nt, synthetic construct
  source 1..21: mol_type = other RNA
ccccttccccagggacgacca

SEQ ID NO: 44314 - RNA, 21 nt, synthetic construct
  source 1..21: mol_type = other RNA
ctgcatggtgactgcagctac

SEQ ID NO: 44315 - RNA, 21 nt, synthetic construct
  source 1..21: mol_type = other RNA
gacttctacaacccacatggg

SEQ ID NO: 44316 - RNA, 21 nt, synthetic construct
  source 1..21: mol_type = other RNA
ctggttctatggcaacaccct

SEQ ID NO: 44317 - RNA, 21 nt, synthetic construct
  source 1..21: mol_type = other RNA
ttctatggcaacaccctcctc

SEQ ID NO: 44318 - RNA, 21 nt, synthetic construct
  source 1..21: mol_type = other RNA
agcaccacggccacgacaccc

SEQ ID NO: 44319 - RNA, 21 nt, synthetic construct
  source 1..21: mol_type = other RNA
ctggttctatggcaacaccct

SEQ ID NO: 44320 - RNA, 21 nt, synthetic construct
  source 1..21: mol_type = other RNA
ttctatggcaacaccctcctc

SEQ ID NO: 44321 - RNA, 21 nt, synthetic construct
  source 1..21: mol_type = other RNA
ctggttctatggcaacaccct

SEQ ID NO: 44322 - RNA, 21 nt, synthetic construct
  source 1..21: mol_type = other RNA
ttctatggcaacaccctcctc

SEQ ID NO: 44323 - RNA, 21 nt, synthetic construct
  source 1..21: mol_type = other RNA
agcaccacggccacgacaccc

SEQ ID NO: 44324 - RNA, 21 nt, synthetic construct
  source 1..21: mol_type = other RNA
ctggttctatggcaacaccct

SEQ ID NO: 44325 - RNA, 21 nt, synthetic construct
  source 1..21: mol_type = other RNA
ttctatggcaacaccctcctc

SEQ ID NO: 44326 - RNA, 21 nt, synthetic construct
  source 1..21: mol_type = other RNA
agcaccacggccacgacaccc

SEQ ID NO: 44327 - RNA, 21 nt, synthetic construct
  source 1..21: mol_type = other RNA
ctggttctatggcaacaccct

SEQ ID NO: 44328 - RNA, 21 nt, synthetic construct
  source 1..21: mol_type = other RNA
ttctatggcaacaccctcctc

SEQ ID NO: 44329 - RNA, 21 nt, synthetic construct
  source 1..21: mol_type = other RNA
gtccgtggtgggggacgcact

SEQ ID NO: 44330 - RNA, 21 nt, synthetic construct
  source 1..21: mol_type = other RNA
atacacaagcacccttggtac

SEQ ID NO: 44331 - RNA, 21 nt, synthetic construct
  source 1..21: mol_type = other RNA
acactaccaaagtgccaacta

SEQ ID NO: 44332 - RNA, 21 nt, synthetic construct
  source 1..21: mol_type = other RNA
tgggcaccgcctggacccgcc

SEQ ID NO: 44333 - RNA, 21 nt, synthetic construct
  source 1..21: mol_type = other RNA
ccggacgccctggcacccaag

SEQ ID NO: 44334 - RNA, 21 nt, synthetic construct
  source 1..21: mol_type = other RNA
agggacaacacccatcacccc

SEQ ID NO: 44335 - RNA, 21 nt, synthetic construct
  source 1..21: mol_type = other RNA
aagtcatctacaataagaccg

SEQ ID NO: 44336 - RNA, 21 nt, synthetic construct
  source 1..21: mol_type = other RNA
ccttggtacagccaccacggg

SEQ ID NO: 44337 - RNA, 21 nt, synthetic construct
  source 1..21: mol_type = other RNA
tcagcccccgccgtgcaaccg

SEQ ID NO: 44338 - RNA, 21 nt, synthetic construct
  source 1..21: mol_type = other RNA
ccggcaactgcacggacgagg

SEQ ID NO: 44339 - RNA, 21 nt, synthetic construct
  source 1..21: mol_type = other RNA
cacctgctccggggggctatg

SEQ ID NO: 44340 - RNA, 21 nt, synthetic construct
  source 1..21: mol_type = other RNA
tgcatggtgactgcagctacg

SEQ ID NO: 44341 - RNA, 21 nt, synthetic construct
  source 1..21: mol_type = other RNA
tgcagctggtgccactcatgc

SEQ ID NO: 44342 - RNA, 21 nt, synthetic construct
  source 1..21: mol_type = other RNA
cgatcccaacagtgccttctc

SEQ ID NO: 44343 - RNA, 21 nt, synthetic construct
  source 1..21: mol_type = other RNA
gccttctcgcgctgccactcc

SEQ ID NO: 44344 - RNA, 21 nt, synthetic construct
  source 1..21: mol_type = other RNA
cagctcggcgggcacccctgg

SEQ ID NO: 44345 - RNA, 21 nt, synthetic construct
  source 1..21: mol_type = other RNA
ggggctgcattgccgaggagg

SEQ ID NO: 44346 - RNA, 21 nt, synthetic construct
  source 1..21: mol_type = other RNA
aggacctacagctaccaggac

SEQ ID NO: 44347 - RNA, 21 nt, synthetic construct
  source 1..21: mol_type = other RNA
cctgggaggcggagactttga

SEQ ID NO: 44348 - RNA, 21 nt, synthetic construct
  source 1..21: mol_type = other RNA
gcacacagaccagtggtactc

SEQ ID NO: 44349 - RNA, 21 nt, synthetic construct
  source 1..21: mol_type = other RNA
tcctgggacaactcccatccc

SEQ ID NO: 44350 - RNA, 21 nt, synthetic construct
  source 1..21: mol_type = other RNA
agacccgcacctcgaccctgc

SEQ ID NO: 44351 - RNA, 21 nt, synthetic construct
  source 1..21: mol_type = other RNA
gcaactgctggcaccccacat

SEQ ID NO: 44352 - RNA, 21 nt, synthetic construct
  source 1..21: mol_type = other RNA
ccacgacacccacagtcacca

SEQ ID NO: 44353 - RNA, 21 nt, synthetic construct
  source 1..21: mol_type = other RNA
ctccacagtgcttaccaccac

SEQ ID NO: 44354 - RNA, 21 nt, synthetic construct
  source 1..21: mol_type = other RNA
cggcacgcacgcttccagtgt

SEQ ID NO: 44355 - RNA, 21 nt, synthetic construct
  source 1..21: mol_type = other RNA
gcacacagaccagtggtactc

SEQ ID NO: 44356 - RNA, 21 nt, synthetic construct
  source 1..21: mol_type = other RNA
agacccgcacctcgaccctgc

SEQ ID NO: 44357 - RNA, 21 nt, synthetic construct
  source 1..21: mol_type = other RNA
ggatcctcacagagcagacca

SEQ ID NO: 44358 - RNA, 21 nt, synthetic construct
  source 1..21: mol_type = other RNA
ctccaccccgggaacagctcc

SEQ ID NO: 44359 - RNA, 21 nt, synthetic construct
  source 1..21: mol_type = other RNA
ctccacagtgcttaccaccac

SEQ ID NO: 44360 - RNA, 21 nt, synthetic construct
  source 1..21: mol_type = other RNA
gcacacagaccagtggtactc

SEQ ID NO: 44361 - RNA, 21 nt, synthetic construct
  source 1..21: mol_type = other RNA
actacgatcacagccaccggc

SEQ ID NO: 44362 - RNA, 21 nt, synthetic construct
  source 1..21: mol_type = other RNA
agacccgcacctcgaccctgc

SEQ ID NO: 44363 - RNA, 21 nt, synthetic construct
  source 1..21: mol_type = other RNA
gcaactgctggcaccccacat

SEQ ID NO: 44364 - RNA, 21 nt, synthetic construct
  source 1..21: mol_type = other RNA
ccacgacacccacagtcacca

SEQ ID NO: 44365 - RNA, 21 nt, synthetic construct
  source 1..21: mol_type = other RNA
ctccacagtgcttaccaccac

SEQ ID NO: 44366 - RNA, 21 nt, synthetic construct
  source 1..21: mol_type = other RNA
gcacacagaccagtggtactc

SEQ ID NO: 44367 - RNA, 21 nt, synthetic construct
  source 1..21: mol_type = other RNA
agacccgcacctcgaccctgc

SEQ ID NO: 44368 - RNA, 21 nt, synthetic construct
  source 1..21: mol_type = other RNA
ctccaccccgggaacagctcc

SEQ ID NO: 44369 - RNA, 21 nt, synthetic construct
  source 1..21: mol_type = other RNA
tccacccttgggaccaccggg

SEQ ID NO: 44370 - RNA, 21 nt, synthetic construct
  source 1..21: mol_type = other RNA
gcaactgctggcaccccacat

SEQ ID NO: 44371 - RNA, 21 nt, synthetic construct
  source 1..21: mol_type = other RNA
ccacgacacccacagtcacca

SEQ ID NO: 44372 - RNA, 21 nt, synthetic construct
  source 1..21: mol_type = other RNA
gcacacagaccagtggtactc

SEQ ID NO: 44373 - RNA, 21 nt, synthetic construct
  source 1..21: mol_type = other RNA
gccaccatgacaagggccacc

SEQ ID NO: 44374 - RNA, 21 nt, synthetic construct
  source 1..21: mol_type = other RNA
ctccccaccgccagtgtcctc

SEQ ID NO: 44375 - RNA, 21 nt, synthetic construct
  source 1..21: mol_type = other RNA
ggcgggtccacgaggagacgg

SEQ ID NO: 44376 - RNA, 21 nt, synthetic construct
  source 1..21: mol_type = other RNA
ggcctatgtgtccctgccacg

SEQ ID NO: 44377 - RNA, 21 nt, synthetic construct
  source 1..21: mol_type = other RNA
acagccactacgactgagtcc

SEQ ID NO: 44378 - RNA, 21 nt, synthetic construct
  source 1..21: mol_type = other RNA
acagccactacgactgagtcc

SEQ ID NO: 44379 - RNA, 21 nt, synthetic construct
  source 1..21: mol_type = other RNA
cctgccacctgcaactctagg

SEQ ID NO: 44380 - RNA, 21 nt, synthetic construct
  source 1..21: mol_type = other RNA
cagcgtttccttcgtgcctgt

SEQ ID NO: 44381 - RNA, 21 nt, synthetic construct
  source 1..21: mol_type = other RNA
cagaccagtggtactccccca

SEQ ID NO: 44382 - RNA, 21 nt, synthetic construct
  source 1..21: mol_type = other RNA
cagaccagtggtactccccca

SEQ ID NO: 44383 - RNA, 21 nt, synthetic construct
  source 1..21: mol_type = other RNA
cagaccagtggtactccccca

SEQ ID NO: 44384 - RNA, 21 nt, synthetic construct
  source 1..21: mol_type = other RNA
cagaccagtggtactccccca

SEQ ID NO: 44385 - RNA, 21 nt, synthetic construct
  source 1..21: mol_type = other RNA
cagaccagtggtactccccca

SEQ ID NO: 44386 - RNA, 21 nt, synthetic construct
  source 1..21: mol_type = other RNA
agccccctgaacccggcgcac

SEQ ID NO: 44387 - RNA, 21 nt, synthetic construct
  source 1..21: mol_type = other RNA
gggtaccaggtatgccctgtg

SEQ ID NO: 44388 - RNA, 21 nt, synthetic construct
  source 1..21: mol_type = other RNA
ggatggcggtgccccgacgtc

SEQ ID NO: 44389 - RNA, 21 nt, synthetic construct
  source 1..21: mol_type = other RNA
gaaggccaccacgacaagggc

SEQ ID NO: 44390 - RNA, 21 nt, synthetic construct
  source 1..21: mol_type = other RNA
gaaggccaccacgacaagggc

SEQ ID NO: 44391 - RNA, 21 nt, synthetic construct
  source 1..21: mol_type = other RNA
ggaaccactgccgccagttgc

SEQ ID NO: 44392 - RNA, 21 nt, synthetic construct
  source 1..21: mol_type = other RNA
cgcacacatgggcatctgcgt

SEQ ID NO: 44393 - RNA, 21 nt, synthetic construct
  source 1..21: mol_type = other RNA
gccagcaggacccctttcggg

SEQ ID NO: 44394 - RNA, 21 nt, synthetic construct
  source 1..21: mol_type = other RNA
atcgagtgccgggcggcgcag

SEQ ID NO: 44395 - RNA, 21 nt, synthetic construct
  source 1..21: mol_type = other RNA
gctgtccacctctcaggccga

SEQ ID NO: 44396 - RNA, 21 nt, synthetic construct
  source 1..21: mol_type = other RNA
ttctcaacgccgcagcctacg

SEQ ID NO: 44397 - RNA, 21 nt, synthetic construct
  source 1..21: mol_type = other RNA
agggacggcacgcacgcctcc

SEQ ID NO: 44398 - RNA, 21 nt, synthetic construct
  source 1..21: mol_type = other RNA
tcccaccttccgctgcagacc

SEQ ID NO: 44399 - RNA, 21 nt, synthetic construct
  source 1..21: mol_type = other RNA
cactccatcatcaaccccaag

SEQ ID NO: 44400 - RNA, 21 nt, synthetic construct
  source 1..21: mol_type = other RNA
gtgacgaccactgcaggggac

SEQ ID NO: 44401 - RNA, 21 nt, synthetic construct
  source 1..21: mol_type = other RNA
ccagcacgcccaggacagaga

SEQ ID NO: 44402 - RNA, 21 nt, synthetic construct
  source 1..21: mol_type = other RNA
cccacacctccacagtgctta

SEQ ID NO: 44403 - RNA, 21 nt, synthetic construct
  source 1..21: mol_type = other RNA
gccacggccaccacaactggg

SEQ ID NO: 44404 - RNA, 21 nt, synthetic construct
  source 1..21: mol_type = other RNA
tccacacctccacagtgctta

SEQ ID NO: 44405 - RNA, 21 nt, synthetic construct
  source 1..21: mol_type = other RNA
tccacacctccacagtgctta

SEQ ID NO: 44406 - RNA, 21 nt, synthetic construct
  source 1..21: mol_type = other RNA
cccacacctccacagtgctta

SEQ ID NO: 44407 - RNA, 21 nt, synthetic construct
  source 1..21: mol_type = other RNA
tccacacctccacagtgctta

SEQ ID NO: 44408 - RNA, 21 nt, synthetic construct
  source 1..21: mol_type = other RNA
agtgcgagtgcatctgcagca

SEQ ID NO: 44409 - RNA, 21 nt, synthetic construct
  source 1..21: mol_type = other RNA
cgctctgtgatctgatgctga

SEQ ID NO: 44410 - RNA, 21 nt, synthetic construct
  source 1..21: mol_type = other RNA
acacacccgtggcttcccggc

SEQ ID NO: 44411 - RNA, 21 nt, synthetic construct
  source 1..21: mol_type = other RNA
cctcccggtctccaccgtgtg

SEQ ID NO: 44412 - RNA, 21 nt, synthetic construct
  source 1..21: mol_type = other RNA
tgcctaccccaacccagacca

SEQ ID NO: 44413 - RNA, 21 nt, synthetic construct
  source 1..21: mol_type = other RNA
cggccaggtcagagaggggtc

SEQ ID NO: 44414 - RNA, 21 nt, synthetic construct
  source 1..21: mol_type = other RNA
cggaagtgcggcctgacggac

SEQ ID NO: 44415 - RNA, 21 nt, synthetic construct
  source 1..21: mol_type = other RNA
acacccacaaccagaggctcc

SEQ ID NO: 44416 - RNA, 21 nt, synthetic construct
  source 1..21: mol_type = other RNA
ctgagtccactggatccacgg

SEQ ID NO: 44417 - RNA, 21 nt, synthetic construct
  source 1..21: mol_type = other RNA
accaccgggaccctcccagaa

SEQ ID NO: 44418 - RNA, 21 nt, synthetic construct
  source 1..21: mol_type = other RNA
acacccacaaccagaggctcc

SEQ ID NO: 44419 - RNA, 21 nt, synthetic construct
  source 1..21: mol_type = other RNA
ctcacaaagctgaccacaaca

SEQ ID NO: 44420 - RNA, 21 nt, synthetic construct
  source 1..21: mol_type = other RNA
ctgagtccactggatccacgg

SEQ ID NO: 44421 - RNA, 21 nt, synthetic construct
  source 1..21: mol_type = other RNA
accaccgggaccctcccagaa

SEQ ID NO: 44422 - RNA, 21 nt, synthetic construct
  source 1..21: mol_type = other RNA
ccactcaggagtcctaccctg

SEQ ID NO: 44423 - RNA, 21 nt, synthetic construct
  source 1..21: mol_type = other RNA
cccacaacgccaggctgaccc

SEQ ID NO: 44424 - RNA, 21 nt, synthetic construct
  source 1..21: mol_type = other RNA
tgcacctgccccgcgggcacc

SEQ ID NO: 44425 - RNA, 21 nt, synthetic construct
  source 1..21: mol_type = other RNA
gggggctgcattgccgaggag

SEQ ID NO: 44426 - RNA, 21 nt, synthetic construct
  source 1..21: mol_type = other RNA
cccacatgggggctgtgagtg

SEQ ID NO: 44427 - RNA, 21 nt, synthetic construct
  source 1..21: mol_type = other RNA
ctggtacaatgggcaccgccc

SEQ ID NO: 44428 - RNA, 21 nt, synthetic construct
  source 1..21: mol_type = other RNA
gggaggccccacgacgcctgc

SEQ ID NO: 44429 - RNA, 21 nt, synthetic construct
  source 1..21: mol_type = other RNA
cacagccagcaccgcttccaa

SEQ ID NO: 44430 - RNA, 21 nt, synthetic construct
  source 1..21: mol_type = other RNA
accagctctacggccatgccc

SEQ ID NO: 44431 - RNA, 21 nt, synthetic construct
  source 1..21: mol_type = other RNA
tgggaccaccgggaccctccc

SEQ ID NO: 44432 - RNA, 21 nt, synthetic construct
  source 1..21: mol_type = other RNA
accagctctacggccatgccc

SEQ ID NO: 44433 - RNA, 21 nt, synthetic construct
  source 1..21: mol_type = other RNA
tgggaccaccgggaccctccc

SEQ ID NO: 44434 - RNA, 21 nt, synthetic construct
  source 1..21: mol_type = other RNA
gacaagggccaccaattccac

SEQ ID NO: 44435 - RNA, 21 nt, synthetic construct
  source 1..21: mol_type = other RNA
ctcagtcctcaccaccctgag

SEQ ID NO: 44436 - RNA, 21 nt, synthetic construct
  source 1..21: mol_type = other RNA
cagcatgtggggcggctccca

SEQ ID NO: 44437 - RNA, 21 nt, synthetic construct
  source 1..21: mol_type = other RNA
agtccatttgctgaccccaca

SEQ ID NO: 44438 - RNA, 21 nt, synthetic construct
  source 1..21: mol_type = other RNA
ccttgggcctcctctgcggag

SEQ ID NO: 44439 - RNA, 21 nt, synthetic construct
  source 1..21: mol_type = other RNA
cgctccgtgctcctgctgccc

SEQ ID NO: 44440 - RNA, 21 nt, synthetic construct
  source 1..21: mol_type = other RNA
cagaagggtgaggggccagca

SEQ ID NO: 44441 - RNA, 21 nt, synthetic construct
  source 1..21: mol_type = other RNA
gagaggggtcagcatcccaaa

SEQ ID NO: 44442 - RNA, 21 nt, synthetic construct
  source 1..21: mol_type = other RNA
acctacagctaccaggacgtc

SEQ ID NO: 44443 - RNA, 21 nt, synthetic construct
  source 1..21: mol_type = other RNA
ttggcgcctgcttgatcgcca

SEQ ID NO: 44444 - RNA, 21 nt, synthetic construct
  source 1..21: mol_type = other RNA
tggtgcaaccttcccaggcgc

SEQ ID NO: 44445 - RNA, 21 nt, synthetic construct
  source 1..21: mol_type = other RNA
tccagggactgcaaccgccct

SEQ ID NO: 44446 - RNA, 21 nt, synthetic construct
  source 1..21: mol_type = other RNA
tccagggactgcaaccgccct

SEQ ID NO: 44447 - RNA, 21 nt, synthetic construct
  source 1..21: mol_type = other RNA
tccagggactgcaaccgccct

SEQ ID NO: 44448 - RNA, 21 nt, synthetic construct
  source 1..21: mol_type = other RNA
tccagggactgcaaccgccct

SEQ ID NO: 44449 - RNA, 21 nt, synthetic construct
  source 1..21: mol_type = other RNA
cgccgtgtgttcatgtacggg

SEQ ID NO: 44450 - RNA, 21 nt, synthetic construct
  source 1..21: mol_type = other RNA
tggcgccaacactcacgagcg

SEQ ID NO: 44451 - RNA, 21 nt, synthetic construct
  source 1..21: mol_type = other RNA
ttccagctggccacgtccggc

SEQ ID NO: 44452 - RNA, 21 nt, synthetic construct
  source 1..21: mol_type = other RNA
tccagctggccacgtccggcc

SEQ ID NO: 44453 - RNA, 21 nt, synthetic construct
  source 1..21: mol_type = other RNA
tgcctgctgcagggtaactca

SEQ ID NO: 44454 - RNA, 21 nt, synthetic construct
  source 1..21: mol_type = other RNA
ccacccttccaacacgctcag

SEQ ID NO: 44455 - RNA, 21 nt, synthetic construct
  source 1..21: mol_type = other RNA
cctccacagtgcttaccgcca

SEQ ID NO: 44456 - RNA, 21 nt, synthetic construct
  source 1..21: mol_type = other RNA
cctccacagtgcttaccgcca

SEQ ID NO: 44457 - RNA, 21 nt, synthetic construct
  source 1..21: mol_type = other RNA
tgtggggagtgcgtccagacc

SEQ ID NO: 44458 - RNA, 21 nt, synthetic construct
  source 1..21: mol_type = other RNA
cccttccccagggacgaccac

SEQ ID NO: 44459 - RNA, 21 nt, synthetic construct
  source 1..21: mol_type = other RNA
agccaacagagtcccccgctc

SEQ ID NO: 44460 - RNA, 21 nt, synthetic construct
  source 1..21: mol_type = other RNA
ggttcccagctcgtccaccgt

SEQ ID NO: 44461 - RNA, 21 nt, synthetic construct
  source 1..21: mol_type = other RNA
gctttgaaggcagctgcgagt

SEQ ID NO: 44462 - RNA, 21 nt, synthetic construct
  source 1..21: mol_type = other RNA
accacctggacccgcctatca

SEQ ID NO: 44463 - RNA, 21 nt, synthetic construct
  source 1..21: mol_type = other RNA
accacctggacccgcctatca

SEQ ID NO: 44464 - RNA, 21 nt, synthetic construct
  source 1..21: mol_type = other RNA
accacctggacccgcctatca

SEQ ID NO: 44465 - RNA, 21 nt, synthetic construct
  source 1..21: mol_type = other RNA
accacctggacccgcctatca

SEQ ID NO: 44466 - RNA, 21 nt, synthetic construct
  source 1..21: mol_type = other RNA
cgccagtgtcctccgccccgc

SEQ ID NO: 44467 - RNA, 21 nt, synthetic construct
  source 1..21: mol_type = other RNA
cggggctggtgtcggatggga

SEQ ID NO: 44468 - RNA, 21 nt, synthetic construct
  source 1..21: mol_type = other RNA
cagagctgtaactgcacaccc

SEQ ID NO: 44469 - RNA, 21 nt, synthetic construct
  source 1..21: mol_type = other RNA
gagggtaccaggtatgccctg

SEQ ID NO: 44470 - RNA, 21 nt, synthetic construct
  source 1..21: mol_type = other RNA
gggccgctggagggcacttat

SEQ ID NO: 44471 - RNA, 21 nt, synthetic construct
  source 1..21: mol_type = other RNA
actggatccacggccatcccg

SEQ ID NO: 44472 - RNA, 21 nt, synthetic construct
  source 1..21: mol_type = other RNA
gttcccagctcgtccaccgtg

SEQ ID NO: 44473 - RNA, 21 nt, synthetic construct
  source 1..21: mol_type = other RNA
accactgcaggggccgccttg

SEQ ID NO: 44474 - RNA, 21 nt, synthetic construct
  source 1..21: mol_type = other RNA
ggtcaacatcaccttctgcga

SEQ ID NO: 44475 - RNA, 21 nt, synthetic construct
  source 1..21: mol_type = other RNA
tgccacaaccccgccaccgac

SEQ ID NO: 44476 - RNA, 21 nt, synthetic construct
  source 1..21: mol_type = other RNA
gcctggcgccaacactcacga

SEQ ID NO: 44477 - RNA, 21 nt, synthetic construct
  source 1..21: mol_type = other RNA
aaccaccgagtcacccccttc

SEQ ID NO: 44478 - RNA, 21 nt, synthetic construct
  source 1..21: mol_type = other RNA
gaccaccgagtcacccccttc

SEQ ID NO: 44479 - RNA, 21 nt, synthetic construct
  source 1..21: mol_type = other RNA
gaccaccgagtcacccccttc

SEQ ID NO: 44480 - RNA, 21 nt, synthetic construct
  source 1..21: mol_type = other RNA
gaccaccgagtcacccccttc

SEQ ID NO: 44481 - RNA, 21 nt, synthetic construct
  source 1..21: mol_type = other RNA
agcccagggacggcactcacg

SEQ ID NO: 44482 - RNA, 21 nt, synthetic construct
  source 1..21: mol_type = other RNA
agcccagggacggcactcacg

SEQ ID NO: 44483 - RNA, 21 nt, synthetic construct
  source 1..21: mol_type = other RNA
agcccagggacggcactcacg

SEQ ID NO: 44484 - RNA, 21 nt, synthetic construct
  source 1..21: mol_type = other RNA
gcggacggcggcgtgttcctc

SEQ ID NO: 44485 - RNA, 21 nt, synthetic construct
  source 1..21: mol_type = other RNA
cgtcggtgcaagggtccccac

SEQ ID NO: 44486 - RNA, 21 nt, synthetic construct
  source 1..21: mol_type = other RNA
tgggtgaccccgagcatccgg

SEQ ID NO: 44487 - RNA, 21 nt, synthetic construct
  source 1..21: mol_type = other RNA
ctggcgccaacactcacgagc

SEQ ID NO: 44488 - RNA, 21 nt, synthetic construct
  source 1..21: mol_type = other RNA
ccataaccacggtggtgacca

SEQ ID NO: 44489 - RNA, 21 nt, synthetic construct
  source 1..21: mol_type = other RNA
ccataaccacggtggtgacca

SEQ ID NO: 44490 - RNA, 21 nt, synthetic construct
  source 1..21: mol_type = other RNA
ccataaccacggtggtgacca

SEQ ID NO: 44491 - RNA, 21 nt, synthetic construct
  source 1..21: mol_type = other RNA
gtggggagtgcgtccagaccg

SEQ ID NO: 44492 - RNA, 21 nt, synthetic construct
  source 1..21: mol_type = other RNA
tgctcgtggtgccgcaggcag

SEQ ID NO: 44493 - RNA, 21 nt, synthetic construct
  source 1..21: mol_type = other RNA
gacacggccatccgggtccaa

SEQ ID NO: 44494 - RNA, 21 nt, synthetic construct
  source 1..21: mol_type = other RNA
acctgcagcgtttccttcgtg

SEQ ID NO: 44495 - RNA, 21 nt, synthetic construct
  source 1..21: mol_type = other RNA
ctttgaaggcagctgcgagta

SEQ ID NO: 44496 - RNA, 21 nt, synthetic construct
  source 1..21: mol_type = other RNA
tttgaaggcagctgcgagtac

SEQ ID NO: 44497 - RNA, 21 nt, synthetic construct
  source 1..21: mol_type = other RNA
agtgtggctgctacgacaagg

SEQ ID NO: 44498 - RNA, 21 nt, synthetic construct
  source 1..21: mol_type = other RNA
agagctcgcccgacaggcaca

SEQ ID NO: 44499 - RNA, 21 nt, synthetic construct
  source 1..21: mol_type = other RNA
gcagtccccacacggtgcgca

SEQ ID NO: 44500 - RNA, 21 nt, synthetic construct
  source 1..21: mol_type = other RNA
ccaccagctctacggccatgc

SEQ ID NO: 44501 - RNA, 21 nt, synthetic construct
  source 1..21: mol_type = other RNA
caccagctctacggccatgcc

SEQ ID NO: 44502 - RNA, 21 nt, synthetic construct
  source 1..21: mol_type = other RNA
gcagtccccacacggtgcgca

SEQ ID NO: 44503 - RNA, 21 nt, synthetic construct
  source 1..21: mol_type = other RNA
cttcacccttgggaccaccgg

SEQ ID NO: 44504 - RNA, 21 nt, synthetic construct
  source 1..21: mol_type = other RNA
gcagtccccacacggtgcgca

SEQ ID NO: 44505 - RNA, 21 nt, synthetic construct
  source 1..21: mol_type = other RNA
gcagtccccacacggtgcgca

SEQ ID NO: 44506 - RNA, 21 nt, synthetic construct
  source 1..21: mol_type = other RNA
ccaccagctctacggccatgc

SEQ ID NO: 44507 - RNA, 21 nt, synthetic construct
  source 1..21: mol_type = other RNA
caccagctctacggccatgcc

SEQ ID NO: 44508 - RNA, 21 nt, synthetic construct
  source 1..21: mol_type = other RNA
gccaccagttccacgtccacc

SEQ ID NO: 44509 - RNA, 21 nt, synthetic construct
  source 1..21: mol_type = other RNA
tgccatccctctccggcaggt

SEQ ID NO: 44510 - RNA, 21 nt, synthetic construct
  source 1..21: mol_type = other RNA
aaggacatggccaagacgtgg

SEQ ID NO: 44511 - RNA, 21 nt, synthetic construct
  source 1..21: mol_type = other RNA
gggtttcctaaatttcccggg

SEQ ID NO: 44512 - RNA, 21 nt, synthetic construct
  source 1..21: mol_type = other RNA
cagtgctgtggggagtgcgtc

SEQ ID NO: 44513 - RNA, 21 nt, synthetic construct
  source 1..21: mol_type = other RNA
ggatgtgcattgtctgatcat

SEQ ID NO: 44514 - RNA, 21 nt, synthetic construct
  source 1..21: mol_type = other RNA
attccagctggccacgtccgg

SEQ ID NO: 44515 - RNA, 21 nt, synthetic construct
  source 1..21: mol_type = other RNA
cagcgcgcgcagctctgcgag

SEQ ID NO: 44516 - RNA, 21 nt, synthetic construct
  source 1..21: mol_type = other RNA
ctctacgacctgcatggtgac

SEQ ID NO: 44517 - RNA, 21 nt, synthetic construct
  source 1..21: mol_type = other RNA
ggctgagctgcggaagtgcgg

SEQ ID NO: 44518 - RNA, 21 nt, synthetic construct
  source 1..21: mol_type = other RNA
aggccacgggcgcagccttcg

SEQ ID NO: 44519 - RNA, 21 nt, synthetic construct
  source 1..21: mol_type = other RNA
ctcgcgctgccactccatcat

SEQ ID NO: 44520 - RNA, 21 nt, synthetic construct
  source 1..21: mol_type = other RNA
aagggcgtacagctcagcgac

SEQ ID NO: 44521 - RNA, 21 nt, synthetic construct
  source 1..21: mol_type = other RNA
gccccgcgggcaccttcctca

SEQ ID NO: 44522 - RNA, 21 nt, synthetic construct
  source 1..21: mol_type = other RNA
gaaccggaggtgggagtgcag

SEQ ID NO: 44523 - RNA, 21 nt, synthetic construct
  source 1..21: mol_type = other RNA
gactactgtggggacaacacc

SEQ ID NO: 44524 - RNA, 21 nt, synthetic construct
  source 1..21: mol_type = other RNA
cctgcccggacgccctggcac

SEQ ID NO: 44525 - RNA, 21 nt, synthetic construct
  source 1..21: mol_type = other RNA
agggtaccaggtatgccctgt

SEQ ID NO: 44526 - RNA, 21 nt, synthetic construct
  source 1..21: mol_type = other RNA
gccctgtgctggctgacatcg

SEQ ID NO: 44527 - RNA, 21 nt, synthetic construct
  source 1..21: mol_type = other RNA
ccccctcggccccaggtacca

SEQ ID NO: 44528 - RNA, 21 nt, synthetic construct
  source 1..21: mol_type = other RNA
ccccaactggaccctggcaca

SEQ ID NO: 44529 - RNA, 21 nt, synthetic construct
  source 1..21: mol_type = other RNA
acccaggccctgttctcaacg

SEQ ID NO: 44530 - RNA, 21 nt, synthetic construct
  source 1..21: mol_type = other RNA
tggtacagccaccacgggagg

SEQ ID NO: 44531 - RNA, 21 nt, synthetic construct
  source 1..21: mol_type = other RNA
gctggccccaacaacaatggc

SEQ ID NO: 44532 - RNA, 21 nt, synthetic construct
  source 1..21: mol_type = other RNA
gcaaccgcccttccagcactg

SEQ ID NO: 44533 - RNA, 21 nt, synthetic construct
  source 1..21: mol_type = other RNA
cgttacacccatcccctcttc

SEQ ID NO: 44534 - RNA, 21 nt, synthetic construct
  source 1..21: mol_type = other RNA
cgcctatcacagaccaccaca

SEQ ID NO: 44535 - RNA, 21 nt, synthetic construct
  source 1..21: mol_type = other RNA
accaccacacccacggccacc

SEQ ID NO: 44536 - RNA, 21 nt, synthetic construct
  source 1..21: mol_type = other RNA
cagagactgcccacacctcca

SEQ ID NO: 44537 - RNA, 21 nt, synthetic construct
  source 1..21: mol_type = other RNA
ccctcctctagcacacagacc

SEQ ID NO: 44538 - RNA, 21 nt, synthetic construct
  source 1..21: mol_type = other RNA
actacgatcacggccaccggc

SEQ ID NO: 44539 - RNA, 21 nt, synthetic construct
  source 1..21: mol_type = other RNA
caactcccatccccccagtgc

SEQ ID NO: 44540 - RNA, 21 nt, synthetic construct
  source 1..21: mol_type = other RNA
gccacctcgggcatcttgggc

SEQ ID NO: 44541 - RNA, 21 nt, synthetic construct
  source 1..21: mol_type = other RNA
ggacgaccaccccgggccaca

SEQ ID NO: 44542 - RNA, 21 nt, synthetic construct
  source 1..21: mol_type = other RNA
ggaaccgtgagcaggtgggga

SEQ ID NO: 44543 - RNA, 21 nt, synthetic construct
  source 1..21: mol_type = other RNA
cactacagccaccgtgacggt

SEQ ID NO: 44544 - RNA, 21 nt, synthetic construct
  source 1..21: mol_type = other RNA
gcaaccgcccttccagcactg

SEQ ID NO: 44545 - RNA, 21 nt, synthetic construct
  source 1..21: mol_type = other RNA
cgcctatcacagaccaccaca

SEQ ID NO: 44546 - RNA, 21 nt, synthetic construct
  source 1..21: mol_type = other RNA
accaccacacccacggccacc

SEQ ID NO: 44547 - RNA, 21 nt, synthetic construct
  source 1..21: mol_type = other RNA
cgcacgcttccagtgtggatc

SEQ ID NO: 44548 - RNA, 21 nt, synthetic construct
  source 1..21: mol_type = other RNA
ccctcctctagcacacagacc

SEQ ID NO: 44549 - RNA, 21 nt, synthetic construct
  source 1..21: mol_type = other RNA
actacgatcacggccaccggc

SEQ ID NO: 44550 - RNA, 21 nt, synthetic construct
  source 1..21: mol_type = other RNA
gtgccgaacaccacggccacc

SEQ ID NO: 44551 - RNA, 21 nt, synthetic construct
  source 1..21: mol_type = other RNA
ctggacttcggccacctcagg

SEQ ID NO: 44552 - RNA, 21 nt, synthetic construct
  source 1..21: mol_type = other RNA
ggacgaccaccccgggccaca

SEQ ID NO: 44553 - RNA, 21 nt, synthetic construct
  source 1..21: mol_type = other RNA
ggaaccgtgagcaggtgggga

SEQ ID NO: 44554 - RNA, 21 nt, synthetic construct
  source 1..21: mol_type = other RNA
tcccaaagtgctgaccagcac

SEQ ID NO: 44555 - RNA, 21 nt, synthetic construct
  source 1..21: mol_type = other RNA
cttccagtgctgacaagcaca

SEQ ID NO: 44556 - RNA, 21 nt, synthetic construct
  source 1..21: mol_type = other RNA
cccagcactacagccaccgtg

SEQ ID NO: 44557 - RNA, 21 nt, synthetic construct
  source 1..21: mol_type = other RNA
cactacagccaccgtgacggt

SEQ ID NO: 44558 - RNA, 21 nt, synthetic construct
  source 1..21: mol_type = other RNA
gcaaccgcccttccagcactg

SEQ ID NO: 44559 - RNA, 21 nt, synthetic construct
  source 1..21: mol_type = other RNA
cgcctatcacagaccaccaca

SEQ ID NO: 44560 - RNA, 21 nt, synthetic construct
  source 1..21: mol_type = other RNA
accaccacacccacggccacc

SEQ ID NO: 44561 - RNA, 21 nt, synthetic construct
  source 1..21: mol_type = other RNA
ccctcctctagcacacagacc

SEQ ID NO: 44562 - RNA, 21 nt, synthetic construct
  source 1..21: mol_type = other RNA
caactcccatccccccagtgc

SEQ ID NO: 44563 - RNA, 21 nt, synthetic construct
  source 1..21: mol_type = other RNA
gtgccgaacaccacggccacc

SEQ ID NO: 44564 - RNA, 21 nt, synthetic construct
  source 1..21: mol_type = other RNA
cacacgggcggtccctgcccc

SEQ ID NO: 44565 - RNA, 21 nt, synthetic construct
  source 1..21: mol_type = other RNA
gccacctcgggcatcttgggc

SEQ ID NO: 44566 - RNA, 21 nt, synthetic construct
  source 1..21: mol_type = other RNA
ggacgaccaccccgggccaca

SEQ ID NO: 44567 - RNA, 21 nt, synthetic construct
  source 1..21: mol_type = other RNA
ggaaccgtgagcaggtgggga

SEQ ID NO: 44568 - RNA, 21 nt, synthetic construct
  source 1..21: mol_type = other RNA
cactacagccaccgtgacggt

SEQ ID NO: 44569 - RNA, 21 nt, synthetic construct
  source 1..21: mol_type = other RNA
gcaaccgcccttccagcactg

SEQ ID NO: 44570 - RNA, 21 nt, synthetic construct
  source 1..21: mol_type = other RNA
cgcctatcacagaccaccaca

SEQ ID NO: 44571 - RNA, 21 nt, synthetic construct
  source 1..21: mol_type = other RNA
accaccacacccacggccacc

SEQ ID NO: 44572 - RNA, 21 nt, synthetic construct
  source 1..21: mol_type = other RNA
cagagactgcccacacctcca

SEQ ID NO: 44573 - RNA, 21 nt, synthetic construct
  source 1..21: mol_type = other RNA
accagtggctccacggtgacc

SEQ ID NO: 44574 - RNA, 21 nt, synthetic construct
  source 1..21: mol_type = other RNA
ccctcctctagcacacagacc

SEQ ID NO: 44575 - RNA, 21 nt, synthetic construct
  source 1..21: mol_type = other RNA
actacgatcacggccaccggc

SEQ ID NO: 44576 - RNA, 21 nt, synthetic construct
  source 1..21: mol_type = other RNA
gtgccgaacaccacggccacc

SEQ ID NO: 44577 - RNA, 21 nt, synthetic construct
  source 1..21: mol_type = other RNA
ctggacttcggccacctcagg

SEQ ID NO: 44578 - RNA, 21 nt, synthetic construct
  source 1..21: mol_type = other RNA
ggacgaccaccccgggccaca

SEQ ID NO: 44579 - RNA, 21 nt, synthetic construct
  source 1..21: mol_type = other RNA
ggaaccgtgagcaggtgggga

SEQ ID NO: 44580 - RNA, 21 nt, synthetic construct
  source 1..21: mol_type = other RNA
cttccagtgctgacaagcaca

SEQ ID NO: 44581 - RNA, 21 nt, synthetic construct
  source 1..21: mol_type = other RNA
cactacagccaccgtgacggt

SEQ ID NO: 44582 - RNA, 21 nt, synthetic construct
  source 1..21: mol_type = other RNA
cgcctatcacagaccaccaca

SEQ ID NO: 44583 - RNA, 21 nt, synthetic construct
  source 1..21: mol_type = other RNA
accaccacacccacggccacc

SEQ ID NO: 44584 - RNA, 21 nt, synthetic construct
  source 1..21: mol_type = other RNA
accagtggctccacggtgacc

SEQ ID NO: 44585 - RNA, 21 nt, synthetic construct
  source 1..21: mol_type = other RNA
ccctcctctagcacacagacc

SEQ ID NO: 44586 - RNA, 21 nt, synthetic construct
  source 1..21: mol_type = other RNA
actacgatcacggccaccggc

SEQ ID NO: 44587 - RNA, 21 nt, synthetic construct
  source 1..21: mol_type = other RNA
cttccagtgctgacaagcaca

SEQ ID NO: 44588 - RNA, 21 nt, synthetic construct
  source 1..21: mol_type = other RNA
gacaagcacagccacaaaatc

SEQ ID NO: 44589 - RNA, 21 nt, synthetic construct
  source 1..21: mol_type = other RNA
tcagtcctcaccaccctgaga

SEQ ID NO: 44590 - RNA, 21 nt, synthetic construct
  source 1..21: mol_type = other RNA
gtgcaatcagcactgtgacat

SEQ ID NO: 44591 - RNA, 21 nt, synthetic construct
  source 1..21: mol_type = other RNA
attgaccgcttccagggcgcc

SEQ ID NO: 44592 - RNA, 21 nt, synthetic construct
  source 1..21: mol_type = other RNA
cgtcctcactgtcaccatggt

SEQ ID NO: 44593 - RNA, 21 nt, synthetic construct
  source 1..21: mol_type = other RNA
tcaccatggtgcatgggaagg

SEQ ID NO: 44594 - RNA, 21 nt, synthetic construct
  source 1..21: mol_type = other RNA
agggcctgatcctgtttgacc

SEQ ID NO: 44595 - RNA, 21 nt, synthetic construct
  source 1..21: mol_type = other RNA
tggacattcctgccctgggcg

SEQ ID NO: 44596 - RNA, 21 nt, synthetic construct
  source 1..21: mol_type = other RNA
ccagttgcaaggacatggcca

SEQ ID NO: 44597 - RNA, 21 nt, synthetic construct
  source 1..21: mol_type = other RNA
acagccgctctgtgatctgat

SEQ ID NO: 44598 - RNA, 21 nt, synthetic construct
  source 1..21: mol_type = other RNA
ttgaggtgccctgccagagcc

SEQ ID NO: 44599 - RNA, 21 nt, synthetic construct
  source 1..21: mol_type = other RNA
gggagcggtgggtcagcaact

SEQ ID NO: 44600 - RNA, 21 nt, synthetic construct
  source 1..21: mol_type = other RNA
ccaggcgcccttccctgccac

SEQ ID NO: 44601 - RNA, 21 nt, synthetic construct
  source 1..21: mol_type = other RNA
gccacatgtgtacctgcctct

SEQ ID NO: 44602 - RNA, 21 nt, synthetic construct
  source 1..21: mol_type = other RNA
cacatgtgtacctgcctctct

SEQ ID NO: 44603 - RNA, 21 nt, synthetic construct
  source 1..21: mol_type = other RNA
gtccagaccgcctgcctcacg

SEQ ID NO: 44604 - RNA, 21 nt, synthetic construct
  source 1..21: mol_type = other RNA
caagtactcagcagaggccca

SEQ ID NO: 44605 - RNA, 21 nt, synthetic construct
  source 1..21: mol_type = other RNA
cacacccgtggcttcccggcc

SEQ ID NO: 44606 - RNA, 21 nt, synthetic construct
  source 1..21: mol_type = other RNA
gccactgctgtctgagaacgt

SEQ ID NO: 44607 - RNA, 21 nt, synthetic construct
  source 1..21: mol_type = other RNA
gagaacgttctgcctccatcc

SEQ ID NO: 44608 - RNA, 21 nt, synthetic construct
  source 1..21: mol_type = other RNA
gggacgccctggaacaaacta

SEQ ID NO: 44609 - RNA, 21 nt, synthetic construct
  source 1..21: mol_type = other RNA
tccagctacgccgaggcctag

SEQ ID NO: 44610 - RNA, 21 nt, synthetic construct
  source 1..21: mol_type = other RNA
actctacgacctgcatggtga

SEQ ID NO: 44611 - RNA, 21 nt, synthetic construct
  source 1..21: mol_type = other RNA
gcttcaccgtgctggctgagc

SEQ ID NO: 44612 - RNA, 21 nt, synthetic construct
  source 1..21: mol_type = other RNA
acgggcgcagccttcgccaac

SEQ ID NO: 44613 - RNA, 21 nt, synthetic construct
  source 1..21: mol_type = other RNA
gcgtcttcaagatgtgctaca

SEQ ID NO: 44614 - RNA, 21 nt, synthetic construct
  source 1..21: mol_type = other RNA
cagagacgacaatgagcccct

SEQ ID NO: 44615 - RNA, 21 nt, synthetic construct
  source 1..21: mol_type = other RNA
ccggggaccacccacaccgcc

SEQ ID NO: 44616 - RNA, 21 nt, synthetic construct
  source 1..21: mol_type = other RNA
ccccatcactgaccaccacgg

SEQ ID NO: 44617 - RNA, 21 nt, synthetic construct
  source 1..21: mol_type = other RNA
acttcccacaccctagcagca

SEQ ID NO: 44618 - RNA, 21 nt, synthetic construct
  source 1..21: mol_type = other RNA
gcggccggaggggccgtctgt

SEQ ID NO: 44619 - RNA, 21 nt, synthetic construct
  source 1..21: mol_type = other RNA
ccccatcactgaccaccacgg

SEQ ID NO: 44620 - RNA, 21 nt, synthetic construct
  source 1..21: mol_type = other RNA
gcggccggaggggccgtctgt

SEQ ID NO: 44621 - RNA, 21 nt, synthetic construct
  source 1..21: mol_type = other RNA
ccagctctacggccacgccct

SEQ ID NO: 44622 - RNA, 21 nt, synthetic construct
  source 1..21: mol_type = other RNA
cagccaccaaatccacagcta

SEQ ID NO: 44623 - RNA, 21 nt, synthetic construct
  source 1..21: mol_type = other RNA
ttcacccttgggaccaccggg

SEQ ID NO: 44624 - RNA, 21 nt, synthetic construct
  source 1..21: mol_type = other RNA
ccggggaccacccacaccgcc

SEQ ID NO: 44625 - RNA, 21 nt, synthetic construct
  source 1..21: mol_type = other RNA
ccccatcactgaccaccacgg

SEQ ID NO: 44626 - RNA, 21 nt, synthetic construct
  source 1..21: mol_type = other RNA
ccagctctacggccacgccct

SEQ ID NO: 44627 - RNA, 21 nt, synthetic construct
  source 1..21: mol_type = other RNA
ccatcactgatcaccacggcc

SEQ ID NO: 44628 - RNA, 21 nt, synthetic construct
  source 1..21: mol_type = other RNA
gcggccggaggggccgtctgt

SEQ ID NO: 44629 - RNA, 21 nt, synthetic construct
  source 1..21: mol_type = other RNA
ggggagttgggccaggtcgtg

SEQ ID NO: 44630 - RNA, 21 nt, synthetic construct
  source 1..21: mol_type = other RNA
cagccaccaaatccacagcta

SEQ ID NO: 44631 - RNA, 21 nt, synthetic construct
  source 1..21: mol_type = other RNA
ccggggaccacccacaccgcc

SEQ ID NO: 44632 - RNA, 21 nt, synthetic construct
  source 1..21: mol_type = other RNA
ccccatcactgaccaccacgg

SEQ ID NO: 44633 - RNA, 21 nt, synthetic construct
  source 1..21: mol_type = other RNA
ggatatcgtcctcactgtcac

SEQ ID NO: 44634 - RNA, 21 nt, synthetic construct
  source 1..21: mol_type = other RNA
gcaactctaggaaccagagcc

SEQ ID NO: 44635 - RNA, 21 nt, synthetic construct
  source 1..21: mol_type = other RNA
ccagaccgcctgcctcacgcc

SEQ ID NO: 44636 - RNA, 21 nt, synthetic construct
  source 1..21: mol_type = other RNA
gtccatttgctgaccccacag

SEQ ID NO: 44637 - RNA, 21 nt, synthetic construct
  source 1..21: mol_type = other RNA
ctgcccaccccgtgggtgaaa

SEQ ID NO: 44638 - RNA, 21 nt, synthetic construct
  source 1..21: mol_type = other RNA
cggcctcccggccttcaacga

SEQ ID NO: 44639 - RNA, 21 nt, synthetic construct
  source 1..21: mol_type = other RNA
agcccttccactcgaactgca

SEQ ID NO: 44640 - RNA, 21 nt, synthetic construct
  source 1..21: mol_type = other RNA
acgcctacgtggtggatgcct

SEQ ID NO: 44641 - RNA, 21 nt, synthetic construct
  source 1..21: mol_type = other RNA
ccacttgccgcggcctgagtg

SEQ ID NO: 44642 - RNA, 21 nt, synthetic construct
  source 1..21: mol_type = other RNA
cccaggagtgcccctgctacg

SEQ ID NO: 44643 - RNA, 21 nt, synthetic construct
  source 1..21: mol_type = other RNA
gtggtgcacgacgagggcgcc

SEQ ID NO: 44644 - RNA, 21 nt, synthetic construct
  source 1..21: mol_type = other RNA
gccagcaccgcttccaaagag

SEQ ID NO: 44645 - RNA, 21 nt, synthetic construct
  source 1..21: mol_type = other RNA
cccaggcaactgctggcaccc

SEQ ID NO: 44646 - RNA, 21 nt, synthetic construct
  source 1..21: mol_type = other RNA
agtgccgaacaccacggccac

SEQ ID NO: 44647 - RNA, 21 nt, synthetic construct
  source 1..21: mol_type = other RNA
accaccccgggccacaccagg

SEQ ID NO: 44648 - RNA, 21 nt, synthetic construct
  source 1..21: mol_type = other RNA
ctgggcaccgcctggacccgc

SEQ ID NO: 44649 - RNA, 21 nt, synthetic construct
  source 1..21: mol_type = other RNA
agtgccgaacaccacggccac

SEQ ID NO: 44650 - RNA, 21 nt, synthetic construct
  source 1..21: mol_type = other RNA
accaccccgggccacaccagg

SEQ ID NO: 44651 - RNA, 21 nt, synthetic construct
  source 1..21: mol_type = other RNA
cccaggcaactgctggcaccc

SEQ ID NO: 44652 - RNA, 21 nt, synthetic construct
  source 1..21: mol_type = other RNA
ccagtggctccacggtgaccc

SEQ ID NO: 44653 - RNA, 21 nt, synthetic construct
  source 1..21: mol_type = other RNA
agtgccgaacaccacggccac

SEQ ID NO: 44654 - RNA, 21 nt, synthetic construct
  source 1..21: mol_type = other RNA
cccaggcaactgctggcaccc

SEQ ID NO: 44655 - RNA, 21 nt, synthetic construct
  source 1..21: mol_type = other RNA
ccagtggctccacggtgaccc

SEQ ID NO: 44656 - RNA, 21 nt, synthetic construct
  source 1..21: mol_type = other RNA
tggccactatgcccacagcca

SEQ ID NO: 44657 - RNA, 21 nt, synthetic construct
  source 1..21: mol_type = other RNA
cgccactcaggagtcctaccc

SEQ ID NO: 44658 - RNA, 21 nt, synthetic construct
  source 1..21: mol_type = other RNA
gcgtgccggacgctggtgttg

SEQ ID NO: 44659 - RNA, 21 nt, synthetic construct
  source 1..21: mol_type = other RNA
cggccatgctcgtggtgccgc

SEQ ID NO: 44660 - RNA, 21 nt, synthetic construct
  source 1..21: mol_type = other RNA
cgtgagctttgttccacccgt

SEQ ID NO: 44661 - RNA, 21 nt, synthetic construct
  source 1..21: mol_type = other RNA
ccttcaacaccacctgcagct

SEQ ID NO: 44662 - RNA, 21 nt, synthetic construct
  source 1..21: mol_type = other RNA
tggatgcctgccagcccactt

SEQ ID NO: 44663 - RNA, 21 nt, synthetic construct
  source 1..21: mol_type = other RNA
cctgccacgacgcgggcctgt

SEQ ID NO: 44664 - RNA, 21 nt, synthetic construct
  source 1..21: mol_type = other RNA
gtcggtgcaagggtccccaca

SEQ ID NO: 44665 - RNA, 21 nt, synthetic construct
  source 1..21: mol_type = other RNA
ccaccgatgggcttggcgcct

SEQ ID NO: 44666 - RNA, 21 nt, synthetic construct
  source 1..21: mol_type = other RNA
cggcgcagcttcccgacatgc

SEQ ID NO: 44667 - RNA, 21 nt, synthetic construct
  source 1..21: mol_type = other RNA
aggccccgtgacggtcacccc

SEQ ID NO: 44668 - RNA, 21 nt, synthetic construct
  source 1..21: mol_type = other RNA
accccgccaccgaccacagag

SEQ ID NO: 44669 - RNA, 21 nt, synthetic construct
  source 1..21: mol_type = other RNA
agagctggagacggccaccac

SEQ ID NO: 44670 - RNA, 21 nt, synthetic construct
  source 1..21: mol_type = other RNA
agggcacgacccgctgtcaac

SEQ ID NO: 44671 - RNA, 21 nt, synthetic construct
  source 1..21: mol_type = other RNA
cacacccacggccaccatgtc

SEQ ID NO: 44672 - RNA, 21 nt, synthetic construct
  source 1..21: mol_type = other RNA
tagggaccacccacacacccc

SEQ ID NO: 44673 - RNA, 21 nt, synthetic construct
  source 1..21: mol_type = other RNA
tccagggacgaccaccccggg

SEQ ID NO: 44674 - RNA, 21 nt, synthetic construct
  source 1..21: mol_type = other RNA
ccagggacgaccaccccgggc

SEQ ID NO: 44675 - RNA, 21 nt, synthetic construct
  source 1..21: mol_type = other RNA
cacacccacggccaccatgtc

SEQ ID NO: 44676 - RNA, 21 nt, synthetic construct
  source 1..21: mol_type = other RNA
tagggaccacccacacacccc

SEQ ID NO: 44677 - RNA, 21 nt, synthetic construct
  source 1..21: mol_type = other RNA
caccacggccaccacacacgg

SEQ ID NO: 44678 - RNA, 21 nt, synthetic construct
  source 1..21: mol_type = other RNA
cctcaccctagcagcaggacc

SEQ ID NO: 44679 - RNA, 21 nt, synthetic construct
  source 1..21: mol_type = other RNA
tccagggacgaccaccccggg

SEQ ID NO: 44680 - RNA, 21 nt, synthetic construct
  source 1..21: mol_type = other RNA
ccagggacgaccaccccgggc

SEQ ID NO: 44681 - RNA, 21 nt, synthetic construct
  source 1..21: mol_type = other RNA
aaggccaccacgacaagggcc

SEQ ID NO: 44682 - RNA, 21 nt, synthetic construct
  source 1..21: mol_type = other RNA
aggccaccacgacaagggcca

SEQ ID NO: 44683 - RNA, 21 nt, synthetic construct
  source 1..21: mol_type = other RNA
cacacccacggccaccatgtc

SEQ ID NO: 44684 - RNA, 21 nt, synthetic construct
  source 1..21: mol_type = other RNA
tagggaccacccacacacccc

SEQ ID NO: 44685 - RNA, 21 nt, synthetic construct
  source 1..21: mol_type = other RNA
caccacggccaccacacacgg

SEQ ID NO: 44686 - RNA, 21 nt, synthetic construct
  source 1..21: mol_type = other RNA
cctcaccctagcagcaggacc

SEQ ID NO: 44687 - RNA, 21 nt, synthetic construct
  source 1..21: mol_type = other RNA
tccagggacgaccaccccggg

SEQ ID NO: 44688 - RNA, 21 nt, synthetic construct
  source 1..21: mol_type = other RNA
ccagggacgaccaccccgggc

SEQ ID NO: 44689 - RNA, 21 nt, synthetic construct
  source 1..21: mol_type = other RNA
accacggtggtgaccacgggc

SEQ ID NO: 44690 - RNA, 21 nt, synthetic construct
  source 1..21: mol_type = other RNA
cacacccacggccaccatgtc

SEQ ID NO: 44691 - RNA, 21 nt, synthetic construct
  source 1..21: mol_type = other RNA
tagggaccacccacacacccc

SEQ ID NO: 44692 - RNA, 21 nt, synthetic construct
  source 1..21: mol_type = other RNA
caccacggccaccacacacgg

SEQ ID NO: 44693 - RNA, 21 nt, synthetic construct
  source 1..21: mol_type = other RNA
cctcaccctagcagcaggacc

SEQ ID NO: 44694 - RNA, 21 nt, synthetic construct
  source 1..21: mol_type = other RNA
cccagggacgaccaccccggg

SEQ ID NO: 44695 - RNA, 21 nt, synthetic construct
  source 1..21: mol_type = other RNA
ccagggacgaccaccccgggc

SEQ ID NO: 44696 - RNA, 21 nt, synthetic construct
  source 1..21: mol_type = other RNA
accacggtggtgaccacgggc

SEQ ID NO: 44697 - RNA, 21 nt, synthetic construct
  source 1..21: mol_type = other RNA
aaggccaccacgacaagggcc

SEQ ID NO: 44698 - RNA, 21 nt, synthetic construct
  source 1..21: mol_type = other RNA
aggccaccacgacaagggcca

SEQ ID NO: 44699 - RNA, 21 nt, synthetic construct
  source 1..21: mol_type = other RNA
cacacccacggccaccatgtc

SEQ ID NO: 44700 - RNA, 21 nt, synthetic construct
  source 1..21: mol_type = other RNA
ccagagtgctgaccaccacca

SEQ ID NO: 44701 - RNA, 21 nt, synthetic construct
  source 1..21: mol_type = other RNA
ccatgtccacaatccacacct

SEQ ID NO: 44702 - RNA, 21 nt, synthetic construct
  source 1..21: mol_type = other RNA
ccaccaattccacggccacac

SEQ ID NO: 44703 - RNA, 21 nt, synthetic construct
  source 1..21: mol_type = other RNA
ccaattccacggccacaccct

SEQ ID NO: 44704 - RNA, 21 nt, synthetic construct
  source 1..21: mol_type = other RNA
ggggacgacccggatcctcac

SEQ ID NO: 44705 - RNA, 21 nt, synthetic construct
  source 1..21: mol_type = other RNA
gacattgaccgcttccagggc

SEQ ID NO: 44706 - RNA, 21 nt, synthetic construct
  source 1..21: mol_type = other RNA
acaatgccatccctctccggc

SEQ ID NO: 44707 - RNA, 21 nt, synthetic construct
  source 1..21: mol_type = other RNA
ggcgtgagcgtcaccttcaat

SEQ ID NO: 44708 - RNA, 21 nt, synthetic construct
  source 1..21: mol_type = other RNA
ttcttcaacgcctgcatcagc

SEQ ID NO: 44709 - RNA, 21 nt, synthetic construct
  source 1..21: mol_type = other RNA
gctgggagaatgcagggcaca

SEQ ID NO: 44710 - RNA, 21 nt, synthetic construct
  source 1..21: mol_type = other RNA
tcctcgcccacccggcgcgtg

SEQ ID NO: 44711 - RNA, 21 nt, synthetic construct
  source 1..21: mol_type = other RNA
cctcgcccacccggcgcgtga

SEQ ID NO: 44712 - RNA, 21 nt, synthetic construct
  source 1..21: mol_type = other RNA
gccccctgaacccggcgcaca

SEQ ID NO: 44713 - RNA, 21 nt, synthetic construct
  source 1..21: mol_type = other RNA
tacatcaaggtcagcatccgg

SEQ ID NO: 44714 - RNA, 21 nt, synthetic construct
  source 1..21: mol_type = other RNA
acatcaaggtcagcatccggc

SEQ ID NO: 44715 - RNA, 21 nt, synthetic construct
  source 1..21: mol_type = other RNA
aaggtcagcatccggctggtg

SEQ ID NO: 44716 - RNA, 21 nt, synthetic construct
  source 1..21: mol_type = other RNA
gccaccgcaccctgctggggc

SEQ ID NO: 44717 - RNA, 21 nt, synthetic construct
  source 1..21: mol_type = other RNA
gcacctgctccggggggctat

SEQ ID NO: 44718 - RNA, 21 nt, synthetic construct
  source 1..21: mol_type = other RNA
ctctgtgcagggcggggccca

SEQ ID NO: 44719 - RNA, 21 nt, synthetic construct
  source 1..21: mol_type = other RNA
cccacatctccacctatgatg

SEQ ID NO: 44720 - RNA, 21 nt, synthetic construct
  source 1..21: mol_type = other RNA
gcagcttcaccgtgctggctg

SEQ ID NO: 44721 - RNA, 21 nt, synthetic construct
  source 1..21: mol_type = other RNA
tcttcatcgtggtgcagacag

SEQ ID NO: 44722 - RNA, 21 nt, synthetic construct
  source 1..21: mol_type = other RNA
gcagctggtgccactcatgca

SEQ ID NO: 44723 - RNA, 21 nt, synthetic construct
  source 1..21: mol_type = other RNA
gctgacgacttcacggccctc

SEQ ID NO: 44724 - RNA, 21 nt, synthetic construct
  source 1..21: mol_type = other RNA
atcccaacagtgccttctcgc

SEQ ID NO: 44725 - RNA, 21 nt, synthetic construct
  source 1..21: mol_type = other RNA
agcccacttgccgcggcctga

SEQ ID NO: 44726 - RNA, 21 nt, synthetic construct
  source 1..21: mol_type = other RNA
gcccaggagtgcccctgctac

SEQ ID NO: 44727 - RNA, 21 nt, synthetic construct
  source 1..21: mol_type = other RNA
cccccggggctggtgtcggat

SEQ ID NO: 44728 - RNA, 21 nt, synthetic construct
  source 1..21: mol_type = other RNA
ccccggggctggtgtcggatg

SEQ ID NO: 44729 - RNA, 21 nt, synthetic construct
  source 1..21: mol_type = other RNA
agaccatcagggtcgactgca

SEQ ID NO: 44730 - RNA, 21 nt, synthetic construct
  source 1..21: mol_type = other RNA
agctttgaaggcagctgcgag

SEQ ID NO: 44731 - RNA, 21 nt, synthetic construct
  source 1..21: mol_type = other RNA
actactgtggggacaacacca

SEQ ID NO: 44732 - RNA, 21 nt, synthetic construct
  source 1..21: mol_type = other RNA
agctgatcctccaagagggga

SEQ ID NO: 44733 - RNA, 21 nt, synthetic construct
  source 1..21: mol_type = other RNA
gacaatgccatcaatgacttt

SEQ ID NO: 44734 - RNA, 21 nt, synthetic construct
  source 1..21: mol_type = other RNA
aatgccatcaatgactttgcc

SEQ ID NO: 44735 - RNA, 21 nt, synthetic construct
  source 1..21: mol_type = other RNA
acgcccaggcctgccacgacg

SEQ ID NO: 44736 - RNA, 21 nt, synthetic construct
  source 1..21: mol_type = other RNA
cgcccaggcctgccacgacgc

SEQ ID NO: 44737 - RNA, 21 nt, synthetic construct
  source 1..21: mol_type = other RNA
ctccggacacctgccccttgt

SEQ ID NO: 44738 - RNA, 21 nt, synthetic construct
  source 1..21: mol_type = other RNA
gtgtggctgctacgacaagga

SEQ ID NO: 44739 - RNA, 21 nt, synthetic construct
  source 1..21: mol_type = other RNA
cggtgcaagggtccccacagc

SEQ ID NO: 44740 - RNA, 21 nt, synthetic construct
  source 1..21: mol_type = other RNA
gctgtaactgcacacccagtg

SEQ ID NO: 44741 - RNA, 21 nt, synthetic construct
  source 1..21: mol_type = other RNA
ccagctggtacaatgggcacc

SEQ ID NO: 44742 - RNA, 21 nt, synthetic construct
  source 1..21: mol_type = other RNA
ggcggcgcagcttcccgacat

SEQ ID NO: 44743 - RNA, 21 nt, synthetic construct
  source 1..21: mol_type = other RNA
acagccaacagagtcccccgc

SEQ ID NO: 44744 - RNA, 21 nt, synthetic construct
  source 1..21: mol_type = other RNA
gctgtgcctaccccaacccag

SEQ ID NO: 44745 - RNA, 21 nt, synthetic construct
  source 1..21: mol_type = other RNA
cacctcgcagactgggtccag

SEQ ID NO: 44746 - RNA, 21 nt, synthetic construct
  source 1..21: mol_type = other RNA
agggcacttatgccagcagcc

SEQ ID NO: 44747 - RNA, 21 nt, synthetic construct
  source 1..21: mol_type = other RNA
cacttatgccagcagcctaag

SEQ ID NO: 44748 - RNA, 21 nt, synthetic construct
  source 1..21: mol_type = other RNA
gccagcagcctaaggacatag

SEQ ID NO: 44749 - RNA, 21 nt, synthetic construct
  source 1..21: mol_type = other RNA
tgggagcaggagggcgtcttc

SEQ ID NO: 44750 - RNA, 21 nt, synthetic construct
  source 1..21: mol_type = other RNA
cccaccctctcagaaggactg

SEQ ID NO: 44751 - RNA, 21 nt, synthetic construct
  source 1..21: mol_type = other RNA
ctctcagaaggactgacatcc

SEQ ID NO: 44752 - RNA, 21 nt, synthetic construct
  source 1..21: mol_type = other RNA
tcagaaggactgacatccccc

SEQ ID NO: 44753 - RNA, 21 nt, synthetic construct
  source 1..21: mol_type = other RNA
acacaagcacccttggtacag

SEQ ID NO: 44754 - RNA, 21 nt, synthetic construct
  source 1..21: mol_type = other RNA
cgacgcctgcaggctccacag

SEQ ID NO: 44755 - RNA, 21 nt, synthetic construct
  source 1..21: mol_type = other RNA
ggtggccacatccacccttcc

SEQ ID NO: 44756 - RNA, 21 nt, synthetic construct
  source 1..21: mol_type = other RNA
gccacatccacccttccaaca

SEQ ID NO: 44757 - RNA, 21 nt, synthetic construct
  source 1..21: mol_type = other RNA
ccttccagggacgacggggag

SEQ ID NO: 44758 - RNA, 21 nt, synthetic construct
  source 1..21: mol_type = other RNA
cgacggggagcttgggcacat

SEQ ID NO: 44759 - RNA, 21 nt, synthetic construct
  source 1..21: mol_type = other RNA
agcttgggcacatggcgcccc

SEQ ID NO: 44760 - RNA, 21 nt, synthetic construct
  source 1..21: mol_type = other RNA
gagctcgcccgacaggcacag

SEQ ID NO: 44761 - RNA, 21 nt, synthetic construct
  source 1..21: mol_type = other RNA
cgagcctggcgccaacactca

SEQ ID NO: 44762 - RNA, 21 nt, synthetic construct
  source 1..21: mol_type = other RNA
gagcctggcgccaacactcac

SEQ ID NO: 44763 - RNA, 21 nt, synthetic construct
  source 1..21: mol_type = other RNA
tgagccccttgactaacacca

SEQ ID NO: 44764 - RNA, 21 nt, synthetic construct
  source 1..21: mol_type = other RNA
cagccagggcacgacccgctg

SEQ ID NO: 44765 - RNA, 21 nt, synthetic construct
  source 1..21: mol_type = other RNA
ctcccaaagtgctgaccacca

SEQ ID NO: 44766 - RNA, 21 nt, synthetic construct
  source 1..21: mol_type = other RNA
gtccagggactgcaaccgccc

SEQ ID NO: 44767 - RNA, 21 nt, synthetic construct
  source 1..21: mol_type = other RNA
acctccacagtgcttaccgcc

SEQ ID NO: 44768 - RNA, 21 nt, synthetic construct
  source 1..21: mol_type = other RNA
ccaggaacagctcacactacc

SEQ ID NO: 44769 - RNA, 21 nt, synthetic construct
  source 1..21: mol_type = other RNA
ccagcccagggacggcactca

SEQ ID NO: 44770 - RNA, 21 nt, synthetic construct
  source 1..21: mol_type = other RNA
tccacggtgaccccctcctcc

SEQ ID NO: 44771 - RNA, 21 nt, synthetic construct
  source 1..21: mol_type = other RNA
tcccggggaccacccacaccg

SEQ ID NO: 44772 - RNA, 21 nt, synthetic construct
  source 1..21: mol_type = other RNA
cacggccaccggctccaccac

SEQ ID NO: 44773 - RNA, 21 nt, synthetic construct
  source 1..21: mol_type = other RNA
cccctcctcaactcctgggac

SEQ ID NO: 44774 - RNA, 21 nt, synthetic construct
  source 1..21: mol_type = other RNA
acaccatggccaccacacacg

SEQ ID NO: 44775 - RNA, 21 nt, synthetic construct
  source 1..21: mol_type = other RNA
tggccaccacacacgggcgat

SEQ ID NO: 44776 - RNA, 21 nt, synthetic construct
  source 1..21: mol_type = other RNA
cccagcagtccccacacggtg

SEQ ID NO: 44777 - RNA, 21 nt, synthetic construct
  source 1..21: mol_type = other RNA
agcagtccccacacggtgcgc

SEQ ID NO: 44778 - RNA, 21 nt, synthetic construct
  source 1..21: mol_type = other RNA
tgcgcacagcctggacttcgg

SEQ ID NO: 44779 - RNA, 21 nt, synthetic construct
  source 1..21: mol_type = other RNA
tggacttcggccacctcgggc

SEQ ID NO: 44780 - RNA, 21 nt, synthetic construct
  source 1..21: mol_type = other RNA
ggacttcggccacctcgggca

SEQ ID NO: 44781 - RNA, 21 nt, synthetic construct
  source 1..21: mol_type = other RNA
acctcgggcatcttgggcacc

SEQ ID NO: 44782 - RNA, 21 nt, synthetic construct
  source 1..21: mol_type = other RNA
cacatcacagagccttccacg

SEQ ID NO: 44783 - RNA, 21 nt, synthetic construct
  source 1..21: mol_type = other RNA
acatcacagagccttccacgg

SEQ ID NO: 44784 - RNA, 21 nt, synthetic construct
  source 1..21: mol_type = other RNA
cacaccctagcagcaaccacc

SEQ ID NO: 44785 - RNA, 21 nt, synthetic construct
  source 1..21: mol_type = other RNA
gtgcctggtcagagtggctgg

SEQ ID NO: 44786 - RNA, 21 nt, synthetic construct
  source 1..21: mol_type = other RNA
acagctaccccatgccggggc

SEQ ID NO: 44787 - RNA, 21 nt, synthetic construct
  source 1..21: mol_type = other RNA
ccggggccctctggcggggac

SEQ ID NO: 44788 - RNA, 21 nt, synthetic construct
  source 1..21: mol_type = other RNA
acacctactccaacatccgtg

SEQ ID NO: 44789 - RNA, 21 nt, synthetic construct
  source 1..21: mol_type = other RNA
gcctggtctgcaggaaccgtg

SEQ ID NO: 44790 - RNA, 21 nt, synthetic construct
  source 1..21: mol_type = other RNA
gagcaggtggggaagttcaag

SEQ ID NO: 44791 - RNA, 21 nt, synthetic construct
  source 1..21: mol_type = other RNA
ctctacggccatgccctcctc

SEQ ID NO: 44792 - RNA, 21 nt, synthetic construct
  source 1..21: mol_type = other RNA
tggatcctcacagagccgagc

SEQ ID NO: 44793 - RNA, 21 nt, synthetic construct
  source 1..21: mol_type = other RNA
caccgtgacggtgcccaccgg

SEQ ID NO: 44794 - RNA, 21 nt, synthetic construct
  source 1..21: mol_type = other RNA
acccaggcaactgctggcacc

SEQ ID NO: 44795 - RNA, 21 nt, synthetic construct
  source 1..21: mol_type = other RNA
gccacgacacccacagtcacc

SEQ ID NO: 44796 - RNA, 21 nt, synthetic construct
  source 1..21: mol_type = other RNA
gtccagggactgcaaccgccc

SEQ ID NO: 44797 - RNA, 21 nt, synthetic construct
  source 1..21: mol_type = other RNA
ccaggaacagctcacactacc

SEQ ID NO: 44798 - RNA, 21 nt, synthetic construct
  source 1..21: mol_type = other RNA
accagaggttccacggtgacc

SEQ ID NO: 44799 - RNA, 21 nt, synthetic construct
  source 1..21: mol_type = other RNA
tccacggtgaccccctcctcc

SEQ ID NO: 44800 - RNA, 21 nt, synthetic construct
  source 1..21: mol_type = other RNA
tcccggggaccacccacaccc

SEQ ID NO: 44801 - RNA, 21 nt, synthetic construct
  source 1..21: mol_type = other RNA
cacggccaccggctccaccac

SEQ ID NO: 44802 - RNA, 21 nt, synthetic construct
  source 1..21: mol_type = other RNA
accagcagcacagtgactccc

SEQ ID NO: 44803 - RNA, 21 nt, synthetic construct
  source 1..21: mol_type = other RNA
cggccaccacacacgggcgat

SEQ ID NO: 44804 - RNA, 21 nt, synthetic construct
  source 1..21: mol_type = other RNA
cccagcagtccccacacggtg

SEQ ID NO: 44805 - RNA, 21 nt, synthetic construct
  source 1..21: mol_type = other RNA
agcagtccccacacggtgcgc

SEQ ID NO: 44806 - RNA, 21 nt, synthetic construct
  source 1..21: mol_type = other RNA
tgcgcacagcctggacttcgg

SEQ ID NO: 44807 - RNA, 21 nt, synthetic construct
  source 1..21: mol_type = other RNA
tggacttcggccacctcaggc

SEQ ID NO: 44808 - RNA, 21 nt, synthetic construct
  source 1..21: mol_type = other RNA
ggacttcggccacctcaggca

SEQ ID NO: 44809 - RNA, 21 nt, synthetic construct
  source 1..21: mol_type = other RNA
acctcaggcaccttgggcacc

SEQ ID NO: 44810 - RNA, 21 nt, synthetic construct
  source 1..21: mol_type = other RNA
caggcaccttgggcaccaccc

SEQ ID NO: 44811 - RNA, 21 nt, synthetic construct
  source 1..21: mol_type = other RNA
cacatcacagagccttccacg

SEQ ID NO: 44812 - RNA, 21 nt, synthetic construct
  source 1..21: mol_type = other RNA
acatcacagagccttccacgg

SEQ ID NO: 44813 - RNA, 21 nt, synthetic construct
  source 1..21: mol_type = other RNA
gtgcctggtcagagtggctgg

SEQ ID NO: 44814 - RNA, 21 nt, synthetic construct
  source 1..21: mol_type = other RNA
acagctaccccatgccggggc

SEQ ID NO: 44815 - RNA, 21 nt, synthetic construct
  source 1..21: mol_type = other RNA
ccggggccctctggcggggac

SEQ ID NO: 44816 - RNA, 21 nt, synthetic construct
  source 1..21: mol_type = other RNA
acacctactccaacatccgtg

SEQ ID NO: 44817 - RNA, 21 nt, synthetic construct
  source 1..21: mol_type = other RNA
gcctggtctgcaggaaccgtg

SEQ ID NO: 44818 - RNA, 21 nt, synthetic construct
  source 1..21: mol_type = other RNA
gagcaggtggggaagttcaag

SEQ ID NO: 44819 - RNA, 21 nt, synthetic construct
  source 1..21: mol_type = other RNA
tggatcctcacagagcagacc

SEQ ID NO: 44820 - RNA, 21 nt, synthetic construct
  source 1..21: mol_type = other RNA
gaccacagcagccactacgac

SEQ ID NO: 44821 - RNA, 21 nt, synthetic construct
  source 1..21: mol_type = other RNA
agccaccagttccaaagccac

SEQ ID NO: 44822 - RNA, 21 nt, synthetic construct
  source 1..21: mol_type = other RNA
caccaaatccacagctaccag

SEQ ID NO: 44823 - RNA, 21 nt, synthetic construct
  source 1..21: mol_type = other RNA
atccacagctaccagctttac

SEQ ID NO: 44824 - RNA, 21 nt, synthetic construct
  source 1..21: mol_type = other RNA
ccttcacccttgggaccaccg

SEQ ID NO: 44825 - RNA, 21 nt, synthetic construct
  source 1..21: mol_type = other RNA
atggccaccatgtccacaatc

SEQ ID NO: 44826 - RNA, 21 nt, synthetic construct
  source 1..21: mol_type = other RNA
tggccaccatgtccacaatcc

SEQ ID NO: 44827 - RNA, 21 nt, synthetic construct
  source 1..21: mol_type = other RNA
accatgtccacaatccacccc

SEQ ID NO: 44828 - RNA, 21 nt, synthetic construct
  source 1..21: mol_type = other RNA
ccctcctccactccggagacc

SEQ ID NO: 44829 - RNA, 21 nt, synthetic construct
  source 1..21: mol_type = other RNA
ctccacagtgctgaccacgaa

SEQ ID NO: 44830 - RNA, 21 nt, synthetic construct
  source 1..21: mol_type = other RNA
caagggccaccagttccatgt

SEQ ID NO: 44831 - RNA, 21 nt, synthetic construct
  source 1..21: mol_type = other RNA
acagagcccagcactacagcc

SEQ ID NO: 44832 - RNA, 21 nt, synthetic construct
  source 1..21: mol_type = other RNA
ccagcactacagccaccgtga

SEQ ID NO: 44833 - RNA, 21 nt, synthetic construct
  source 1..21: mol_type = other RNA
caccgtgacggtgcccaccgg

SEQ ID NO: 44834 - RNA, 21 nt, synthetic construct
  source 1..21: mol_type = other RNA
gtccagggactgcaaccgccc

SEQ ID NO: 44835 - RNA, 21 nt, synthetic construct
  source 1..21: mol_type = other RNA
ggcaccgcctggacccgccta

SEQ ID NO: 44836 - RNA, 21 nt, synthetic construct
  source 1..21: mol_type = other RNA
ccaggaacagctcacactacc

SEQ ID NO: 44837 - RNA, 21 nt, synthetic construct
  source 1..21: mol_type = other RNA
ccagcccagggacggcactca

SEQ ID NO: 44838 - RNA, 21 nt, synthetic construct
  source 1..21: mol_type = other RNA
tccacggtgaccccctcctcc

SEQ ID NO: 44839 - RNA, 21 nt, synthetic construct
  source 1..21: mol_type = other RNA
tcccggggaccacccacaccg

SEQ ID NO: 44840 - RNA, 21 nt, synthetic construct
  source 1..21: mol_type = other RNA
ccactacgatcacagccaccg

SEQ ID NO: 44841 - RNA, 21 nt, synthetic construct
  source 1..21: mol_type = other RNA
accagcagcacagtgactccc

SEQ ID NO: 44842 - RNA, 21 nt, synthetic construct
  source 1..21: mol_type = other RNA
cccagcagtccccacacggtg

SEQ ID NO: 44843 - RNA, 21 nt, synthetic construct
  source 1..21: mol_type = other RNA
agcagtccccacacggtgcgc

SEQ ID NO: 44844 - RNA, 21 nt, synthetic construct
  source 1..21: mol_type = other RNA
tgcgcacagcctggacttcgg

SEQ ID NO: 44845 - RNA, 21 nt, synthetic construct
  source 1..21: mol_type = other RNA
tggacttcggccacctcgggc

SEQ ID NO: 44846 - RNA, 21 nt, synthetic construct
  source 1..21: mol_type = other RNA
ggacttcggccacctcgggca

SEQ ID NO: 44847 - RNA, 21 nt, synthetic construct
  source 1..21: mol_type = other RNA
acctcgggcatcttgggcacc

SEQ ID NO: 44848 - RNA, 21 nt, synthetic construct
  source 1..21: mol_type = other RNA
cacatcacagagccttccacg

SEQ ID NO: 44849 - RNA, 21 nt, synthetic construct
  source 1..21: mol_type = other RNA
acatcacagagccttccacgg

SEQ ID NO: 44850 - RNA, 21 nt, synthetic construct
  source 1..21: mol_type = other RNA
acagccacacccagcaagacc

SEQ ID NO: 44851 - RNA, 21 nt, synthetic construct
  source 1..21: mol_type = other RNA
taaccacggtggtgaccacgg

SEQ ID NO: 44852 - RNA, 21 nt, synthetic construct
  source 1..21: mol_type = other RNA
cggtggtgaccacgggctgtg

SEQ ID NO: 44853 - RNA, 21 nt, synthetic construct
  source 1..21: mol_type = other RNA
accacgggctgtgagccccag

SEQ ID NO: 44854 - RNA, 21 nt, synthetic construct
  source 1..21: mol_type = other RNA
gtgcctggtcagagtggctgg

SEQ ID NO: 44855 - RNA, 21 nt, synthetic construct
  source 1..21: mol_type = other RNA
acagctaccccatgccggggc

SEQ ID NO: 44856 - RNA, 21 nt, synthetic construct
  source 1..21: mol_type = other RNA
ccggggccctctggcggggac

SEQ ID NO: 44857 - RNA, 21 nt, synthetic construct
  source 1..21: mol_type = other RNA
acacctactccaacatccgtg

SEQ ID NO: 44858 - RNA, 21 nt, synthetic construct
  source 1..21: mol_type = other RNA
cggccggaggggcagtctgtg

SEQ ID NO: 44859 - RNA, 21 nt, synthetic construct
  source 1..21: mol_type = other RNA
ggccggaggggcagtctgtga

SEQ ID NO: 44860 - RNA, 21 nt, synthetic construct
  source 1..21: mol_type = other RNA
gcctggtctgcaggaaccgtg

SEQ ID NO: 44861 - RNA, 21 nt, synthetic construct
  source 1..21: mol_type = other RNA
gagcaggtggggaagttcaag

SEQ ID NO: 44862 - RNA, 21 nt, synthetic construct
  source 1..21: mol_type = other RNA
tggatcctcacagagccgagc

SEQ ID NO: 44863 - RNA, 21 nt, synthetic construct
  source 1..21: mol_type = other RNA
caccgtgacggtgcccaccgg

SEQ ID NO: 44864 - RNA, 21 nt, synthetic construct
  source 1..21: mol_type = other RNA
acccaggcaactgctggcacc

SEQ ID NO: 44865 - RNA, 21 nt, synthetic construct
  source 1..21: mol_type = other RNA
gccacgacacccacagtcacc

SEQ ID NO: 44866 - RNA, 21 nt, synthetic construct
  source 1..21: mol_type = other RNA
gtccagggactgcaaccgccc

SEQ ID NO: 44867 - RNA, 21 nt, synthetic construct
  source 1..21: mol_type = other RNA
ccctcttccaccccaggaaca

SEQ ID NO: 44868 - RNA, 21 nt, synthetic construct
  source 1..21: mol_type = other RNA
ccaggaacagctcacactacc

SEQ ID NO: 44869 - RNA, 21 nt, synthetic construct
  source 1..21: mol_type = other RNA
accacgggcttcacagtcacc

SEQ ID NO: 44870 - RNA, 21 nt, synthetic construct
  source 1..21: mol_type = other RNA
aaccagtggctccacggtgac

SEQ ID NO: 44871 - RNA, 21 nt, synthetic construct
  source 1..21: mol_type = other RNA
tccacggtgaccccctcctcc

SEQ ID NO: 44872 - RNA, 21 nt, synthetic construct
  source 1..21: mol_type = other RNA
tcccggggaccacccacaccc

SEQ ID NO: 44873 - RNA, 21 nt, synthetic construct
  source 1..21: mol_type = other RNA
cacggccaccggctccaccac

SEQ ID NO: 44874 - RNA, 21 nt, synthetic construct
  source 1..21: mol_type = other RNA
accagcagcacagtgactccc

SEQ ID NO: 44875 - RNA, 21 nt, synthetic construct
  source 1..21: mol_type = other RNA
cggccaccacacacgggcgat

SEQ ID NO: 44876 - RNA, 21 nt, synthetic construct
  source 1..21: mol_type = other RNA
cccagcagtccccacacggtg

SEQ ID NO: 44877 - RNA, 21 nt, synthetic construct
  source 1..21: mol_type = other RNA
agcagtccccacacggtgcgc

SEQ ID NO: 44878 - RNA, 21 nt, synthetic construct
  source 1..21: mol_type = other RNA
tgcgcacagcctggacttcgg

SEQ ID NO: 44879 - RNA, 21 nt, synthetic construct
  source 1..21: mol_type = other RNA
tggacttcggccacctcaggc

SEQ ID NO: 44880 - RNA, 21 nt, synthetic construct
  source 1..21: mol_type = other RNA
ggacttcggccacctcaggca

SEQ ID NO: 44881 - RNA, 21 nt, synthetic construct
  source 1..21: mol_type = other RNA
acctcaggcaccttgggcacc

SEQ ID NO: 44882 - RNA, 21 nt, synthetic construct
  source 1..21: mol_type = other RNA
caggcaccttgggcaccaccc

SEQ ID NO: 44883 - RNA, 21 nt, synthetic construct
  source 1..21: mol_type = other RNA
cacatcacagagccttccacg

SEQ ID NO: 44884 - RNA, 21 nt, synthetic construct
  source 1..21: mol_type = other RNA
acatcacagagccttccacgg

SEQ ID NO: 44885 - RNA, 21 nt, synthetic construct
  source 1..21: mol_type = other RNA
ccttccccagggacgaccacc

SEQ ID NO: 44886 - RNA, 21 nt, synthetic construct
  source 1..21: mol_type = other RNA
ccccagggacgaccaccccgg

SEQ ID NO: 44887 - RNA, 21 nt, synthetic construct
  source 1..21: mol_type = other RNA
taaccacggtggtgaccacgg

SEQ ID NO: 44888 - RNA, 21 nt, synthetic construct
  source 1..21: mol_type = other RNA
cggtggtgaccacgggctgtg

SEQ ID NO: 44889 - RNA, 21 nt, synthetic construct
  source 1..21: mol_type = other RNA
accacgggctgtgagccccag

SEQ ID NO: 44890 - RNA, 21 nt, synthetic construct
  source 1..21: mol_type = other RNA
gtgcctggtcagagtggctgg

SEQ ID NO: 44891 - RNA, 21 nt, synthetic construct
  source 1..21: mol_type = other RNA
acagctaccccatgccggggc

SEQ ID NO: 44892 - RNA, 21 nt, synthetic construct
  source 1..21: mol_type = other RNA
ccggggccctctggcggggac

SEQ ID NO: 44893 - RNA, 21 nt, synthetic construct
  source 1..21: mol_type = other RNA
acacctactccaacatccgtg

SEQ ID NO: 44894 - RNA, 21 nt, synthetic construct
  source 1..21: mol_type = other RNA
gcctggtctgcaggaaccgtg

SEQ ID NO: 44895 - RNA, 21 nt, synthetic construct
  source 1..21: mol_type = other RNA
gagcaggtggggaagttcaag

SEQ ID NO: 44896 - RNA, 21 nt, synthetic construct
  source 1..21: mol_type = other RNA
ctctacggccatgccctcctc

SEQ ID NO: 44897 - RNA, 21 nt, synthetic construct
  source 1..21: mol_type = other RNA
agccaccagttccaaagccac

SEQ ID NO: 44898 - RNA, 21 nt, synthetic construct
  source 1..21: mol_type = other RNA
caccaaatccacagctaccag

SEQ ID NO: 44899 - RNA, 21 nt, synthetic construct
  source 1..21: mol_type = other RNA
caaatccacagctaccagcgt

SEQ ID NO: 44900 - RNA, 21 nt, synthetic construct
  source 1..21: mol_type = other RNA
aatccacagctaccagcgtta

SEQ ID NO: 44901 - RNA, 21 nt, synthetic construct
  source 1..21: mol_type = other RNA
gtggccaccatgtccacaatc

SEQ ID NO: 44902 - RNA, 21 nt, synthetic construct
  source 1..21: mol_type = other RNA
tggccaccatgtccacaatcc

SEQ ID NO: 44903 - RNA, 21 nt, synthetic construct
  source 1..21: mol_type = other RNA
accatgtccacaatccacccc

SEQ ID NO: 44904 - RNA, 21 nt, synthetic construct
  source 1..21: mol_type = other RNA
ccctcctccactccggagacc

SEQ ID NO: 44905 - RNA, 21 nt, synthetic construct
  source 1..21: mol_type = other RNA
ctccacagtgctgaccacgaa

SEQ ID NO: 44906 - RNA, 21 nt, synthetic construct
  source 1..21: mol_type = other RNA
tggatcctcacagagccgagc

SEQ ID NO: 44907 - RNA, 21 nt, synthetic construct
  source 1..21: mol_type = other RNA
caccgtgacggtgcccaccgg

SEQ ID NO: 44908 - RNA, 21 nt, synthetic construct
  source 1..21: mol_type = other RNA
acccaggcaactgctggcacc

SEQ ID NO: 44909 - RNA, 21 nt, synthetic construct
  source 1..21: mol_type = other RNA
gccacgacacccacagtcacc

SEQ ID NO: 44910 - RNA, 21 nt, synthetic construct
  source 1..21: mol_type = other RNA
cagggactgcaactgcccttc

SEQ ID NO: 44911 - RNA, 21 nt, synthetic construct
  source 1..21: mol_type = other RNA
acctccacagtgcttaccgcc

SEQ ID NO: 44912 - RNA, 21 nt, synthetic construct
  source 1..21: mol_type = other RNA
ccaggaacagctcacactacc

SEQ ID NO: 44913 - RNA, 21 nt, synthetic construct
  source 1..21: mol_type = other RNA
ccagcccagggacggcactca

SEQ ID NO: 44914 - RNA, 21 nt, synthetic construct
  source 1..21: mol_type = other RNA
aaccagtggctccacggtgac

SEQ ID NO: 44915 - RNA, 21 nt, synthetic construct
  source 1..21: mol_type = other RNA
tccacggtgaccccctcctcc

SEQ ID NO: 44916 - RNA, 21 nt, synthetic construct
  source 1..21: mol_type = other RNA
tcccggggaccacccacaccg

SEQ ID NO: 44917 - RNA, 21 nt, synthetic construct
  source 1..21: mol_type = other RNA
cacggccaccggctccaccac

SEQ ID NO: 44918 - RNA, 21 nt, synthetic construct
  source 1..21: mol_type = other RNA
ccagggacaacacccatcacc

SEQ ID NO: 44919 - RNA, 21 nt, synthetic construct
  source 1..21: mol_type = other RNA
ctgacaagcacagccacaaaa

SEQ ID NO: 44920 - RNA, 21 nt, synthetic construct
  source 1..21: mol_type = other RNA
gccacaaaatccacagctacc

SEQ ID NO: 44921 - RNA, 21 nt, synthetic construct
  source 1..21: mol_type = other RNA
atccacagctaccagctttac

SEQ ID NO: 44922 - RNA, 21 nt, synthetic construct
  source 1..21: mol_type = other RNA
accgtcccagcacagaccacc

SEQ ID NO: 44923 - RNA, 21 nt, synthetic construct
  source 1..21: mol_type = other RNA
tgtccaccatgtccacaatcc

SEQ ID NO: 44924 - RNA, 21 nt, synthetic construct
  source 1..21: mol_type = other RNA
accatgtccacaatccacacc

SEQ ID NO: 44925 - RNA, 21 nt, synthetic construct
  source 1..21: mol_type = other RNA
atgtccacaatccacacctcc

SEQ ID NO: 44926 - RNA, 21 nt, synthetic construct
  source 1..21: mol_type = other RNA
ccacaatccacacctcctcta

SEQ ID NO: 44927 - RNA, 21 nt, synthetic construct
  source 1..21: mol_type = other RNA
cacagccaccatgacaagggc

SEQ ID NO: 44928 - RNA, 21 nt, synthetic construct
  source 1..21: mol_type = other RNA
tacaactgcagccactggatc

SEQ ID NO: 44929 - RNA, 21 nt, synthetic construct
  source 1..21: mol_type = other RNA
tccacggccaccctgtcctcc

SEQ ID NO: 44930 - RNA, 21 nt, synthetic construct
  source 1..21: mol_type = other RNA
tggatcctcacagagccgagc

SEQ ID NO: 44931 - RNA, 21 nt, synthetic construct
  source 1..21: mol_type = other RNA
tcacagagccgagcactatag

SEQ ID NO: 44932 - RNA, 21 nt, synthetic construct
  source 1..21: mol_type = other RNA
accgtgatggtgcccaccggt

SEQ ID NO: 44933 - RNA, 21 nt, synthetic construct
  source 1..21: mol_type = other RNA
accaccatggccactatgccc

SEQ ID NO: 44934 - RNA, 21 nt, synthetic construct
  source 1..21: mol_type = other RNA
catggccactatgcccacagc

SEQ ID NO: 44935 - RNA, 21 nt, synthetic construct
  source 1..21: mol_type = other RNA
atggccactatgcccacagcc

SEQ ID NO: 44936 - RNA, 21 nt, synthetic construct
  source 1..21: mol_type = other RNA
cggttcccagctcgtccaccg

SEQ ID NO: 44937 - RNA, 21 nt, synthetic construct
  source 1..21: mol_type = other RNA
tcccagctcgtccaccgtggg

SEQ ID NO: 44938 - RNA, 21 nt, synthetic construct
  source 1..21: mol_type = other RNA
ccagctcgtccaccgtgggga

SEQ ID NO: 44939 - RNA, 21 nt, synthetic construct
  source 1..21: mol_type = other RNA
agctcgtccaccgtggggacc

SEQ ID NO: 44940 - RNA, 21 nt, synthetic construct
  source 1..21: mol_type = other RNA
tccaccgtggggaccacccgc

SEQ ID NO: 44941 - RNA, 21 nt, synthetic construct
  source 1..21: mol_type = other RNA
tcaccaccctgagacccactg

SEQ ID NO: 44942 - RNA, 21 nt, synthetic construct
  source 1..21: mol_type = other RNA
catttggacagtttttctcgc

SEQ ID NO: 44943 - RNA, 21 nt, synthetic construct
  source 1..21: mol_type = other RNA
acctccccaccgccagtgtcc

SEQ ID NO: 44944 - RNA, 21 nt, synthetic construct
  source 1..21: mol_type = other RNA
gccatccctctccggcaggtg

SEQ ID NO: 44945 - RNA, 21 nt, synthetic construct
  source 1..21: mol_type = other RNA
cacggcctctgccactgccgc

SEQ ID NO: 44946 - RNA, 21 nt, synthetic construct
  source 1..21: mol_type = other RNA
ctcactgtcaccatggtgcat

SEQ ID NO: 44947 - RNA, 21 nt, synthetic construct
  source 1..21: mol_type = other RNA
gtcaccatggtgcatgggaag

SEQ ID NO: 44948 - RNA, 21 nt, synthetic construct
  source 1..21: mol_type = other RNA
ctggggaccaccaccatgcgt

SEQ ID NO: 44949 - RNA, 21 nt, synthetic construct
  source 1..21: mol_type = other RNA
accaccaccatgcgtgtggac

SEQ ID NO: 44950 - RNA, 21 nt, synthetic construct
  source 1..21: mol_type = other RNA
ttcaatggccaagtcttccag

SEQ ID NO: 44951 - RNA, 21 nt, synthetic construct
  source 1..21: mol_type = other RNA
ggccaagtcttccaggcccgg

SEQ ID NO: 44952 - RNA, 21 nt, synthetic construct
  source 1..21: mol_type = other RNA
aggacatggccaagacgtggc

SEQ ID NO: 44953 - RNA, 21 nt, synthetic construct
  source 1..21: mol_type = other RNA
cagccgctctgtgatctgatg

SEQ ID NO: 44954 - RNA, 21 nt, synthetic construct
  source 1..21: mol_type = other RNA
accaaagtgtacaagccatgc

SEQ ID NO: 44955 - RNA, 21 nt, synthetic construct
  source 1..21: mol_type = other RNA
gcctgccacctgcaactctag

SEQ ID NO: 44956 - RNA, 21 nt, synthetic construct
  source 1..21: mol_type = other RNA
cagctggaggggatggcggag

SEQ ID NO: 44957 - RNA, 21 nt, synthetic construct
  source 1..21: mol_type = other RNA
gagcggtgggtcagcaactgc

SEQ ID NO: 44958 - RNA, 21 nt, synthetic construct
  source 1..21: mol_type = other RNA
ccaggccccgggccgagaacc

SEQ ID NO: 44959 - RNA, 21 nt, synthetic construct
  source 1..21: mol_type = other RNA
gcaatgtcaggaggatgcctg

SEQ ID NO: 44960 - RNA, 21 nt, synthetic construct
  source 1..21: mol_type = other RNA
tgagtacaagagagtggccgg

SEQ ID NO: 44961 - RNA, 21 nt, synthetic construct
  source 1..21: mol_type = other RNA
gtgaggctgagggtggagtcc

SEQ ID NO: 44962 - RNA, 21 nt, synthetic construct
  source 1..21: mol_type = other RNA
cccagatgtgtccagctgcag

SEQ ID NO: 44963 - RNA, 21 nt, synthetic construct
  source 1..21: mol_type = other RNA
gctcctgccccggagcgtcca

SEQ ID NO: 44964 - RNA, 21 nt, synthetic construct
  source 1..21: mol_type = other RNA
ccaggagaggcgggtccacga

SEQ ID NO: 44965 - RNA, 21 nt, synthetic construct
  source 1..21: mol_type = other RNA
caggagaggcgggtccacgag

SEQ ID NO: 44966 - RNA, 21 nt, synthetic construct
  source 1..21: mol_type = other RNA
aggcgggtccacgaggagacg

SEQ ID NO: 44967 - RNA, 21 nt, synthetic construct
  source 1..21: mol_type = other RNA
cccccacacacccgtggcttc

SEQ ID NO: 44968 - RNA, 21 nt, synthetic construct
  source 1..21: mol_type = other RNA
ccccacacacccgtggcttcc

SEQ ID NO: 44969 - RNA, 21 nt, synthetic construct
  source 1..21: mol_type = other RNA
ccaggatgtgcattgtctgat

SEQ ID NO: 44970 - RNA, 21 nt, synthetic construct
  source 1..21: mol_type = other RNA
caggatgtgcattgtctgatc

SEQ ID NO: 44971 - RNA, 21 nt, synthetic construct
  source 1..21: mol_type = other RNA
ctgatcatgaaaaccttgggc

SEQ ID NO: 44972 - RNA, 21 nt, synthetic construct
  source 1..21: mol_type = other RNA
atcatgaaaaccttgggcctc

SEQ ID NO: 44973 - RNA, 21 nt, synthetic construct
  source 1..21: mol_type = other RNA
tcaggagtcctaccctgggag

SEQ ID NO: 44974 - RNA, 21 nt, synthetic construct
  source 1..21: mol_type = other RNA
gcgcagcacggattccagctg

SEQ ID NO: 44975 - RNA, 21 nt, synthetic construct
  source 1..21: mol_type = other RNA
gctggccacgtccggccgctg

SEQ ID NO: 44976 - RNA, 21 nt, synthetic construct
  source 1..21: mol_type = other RNA
gccacgtccggccgctggggc

SEQ ID NO: 44977 - RNA, 21 nt, synthetic construct
  source 1..21: mol_type = other RNA
cagggtaactcagggctgagg

SEQ ID NO: 44978 - RNA, 21 nt, synthetic construct
  source 1..21: mol_type = other RNA
ggccaggtcagagaggggtca

SEQ ID NO: 44979 - RNA, 21 nt, synthetic construct
  source 1..21: mol_type = other RNA
agagaggggtcagcatcccaa

SEQ ID NO: 44980 - RNA, 21 nt, synthetic construct
  source 1..21: mol_type = other RNA
tttgcaaataaaccctgagca

SEQ ID NO: 44981 - RNA, 21 nt, synthetic construct
  source 1..21: mol_type = other RNA
tccagggacaactcccatccc

SEQ ID NO: 44982 - RNA, 21 nt, synthetic construct
  source 1..21: mol_type = other RNA
gggacaacacccatcacccca

SEQ ID NO: 44983 - RNA, 21 nt, synthetic construct
  source 1..21: mol_type = other RNA
ccagcccccaggatgggtgcc

SEQ ID NO: 44984 - RNA, 21 nt, synthetic construct
  source 1..21: mol_type = other RNA
acttcgacgacaatgccatca

SEQ ID NO: 44985 - RNA, 21 nt, synthetic construct
  source 1..21: mol_type = other RNA
ctgggaggcggagactttgag

SEQ ID NO: 44986 - RNA, 21 nt, synthetic construct
  source 1..21: mol_type = other RNA
agcctgccacctgcaactcta

SEQ ID NO: 44987 - RNA, 21 nt, synthetic construct
  source 1..21: mol_type = other RNA
atccctctccggcaggtgaat

SEQ ID NO: 44988 - RNA, 21 nt, synthetic construct
  source 1..21: mol_type = other RNA
acggccctcagcggggtggtg

SEQ ID NO: 44989 - RNA, 21 nt, synthetic construct
  source 1..21: mol_type = other RNA
gaagtcatctacaataagacc

SEQ ID NO: 44990 - RNA, 21 nt, synthetic construct
  source 1..21: mol_type = other RNA
gtccagctgaatgaaacctgg

SEQ ID NO: 44991 - RNA, 21 nt, synthetic construct
  source 1..21: mol_type = other RNA
tcctaccctgggagagcctgt

SEQ ID NO: 44992 - RNA, 21 nt, synthetic construct
  source 1..21: mol_type = other RNA
ggtgactgcagctacgttctg

SEQ ID NO: 44993 - RNA, 21 nt, synthetic construct
  source 1..21: mol_type = other RNA
agggccctgtggagccgagct

SEQ ID NO: 44994 - RNA, 21 nt, synthetic construct
  source 1..21: mol_type = other RNA
ccttccaacacgctcagccct

SEQ ID NO: 44995 - RNA, 21 nt, synthetic construct
  source 1..21: mol_type = other RNA
tccaacacgctcagcccttcc

SEQ ID NO: 44996 - RNA, 21 nt, synthetic construct
  source 1..21: mol_type = other RNA
accccgacctccaccctgaga

SEQ ID NO: 44997 - RNA, 21 nt, synthetic construct
  source 1..21: mol_type = other RNA
ccccgggccacaccagggcca

SEQ ID NO: 44998 - RNA, 21 nt, synthetic construct
  source 1..21: mol_type = other RNA
tccaaggactgcaaccaccct

SEQ ID NO: 44999 - RNA, 21 nt, synthetic construct
  source 1..21: mol_type = other RNA
gtgcggccggaggggcagtct

SEQ ID NO: 45000 - RNA, 21 nt, synthetic construct
  source 1..21: mol_type = other RNA
tccaaggactgcaaccaccct

SEQ ID NO: 45001 - RNA, 21 nt, synthetic construct
  source 1..21: mol_type = other RNA
tccaaggactgcaaccaccct

SEQ ID NO: 45002 - RNA, 21 nt, synthetic construct
  source 1..21: mol_type = other RNA
aggccccgggccgagaacccc

SEQ ID NO: 45003 - RNA, 21 nt, synthetic construct
  source 1..21: mol_type = other RNA
cctgcctgtgtgcccgccagg

SEQ ID NO: 45004 - RNA, 21 nt, synthetic construct
  source 1..21: mol_type = other RNA
tgggagaatgcagggcacacc

SEQ ID NO: 45005 - RNA, 21 nt, synthetic construct
  source 1..21: mol_type = other RNA
tgtctgatcatgaaaaccttg

SEQ ID NO: 45006 - RNA, 21 nt, synthetic construct
  source 1..21: mol_type = other RNA
tgccgcgccgcctacgaggac

SEQ ID NO: 45007 - RNA, 21 nt, synthetic construct
  source 1..21: mol_type = other RNA
gagcagagcggggactacatc

SEQ ID NO: 45008 - RNA, 21 nt, synthetic construct
  source 1..21: mol_type = other RNA
caggagtgtggctcaccctgc

SEQ ID NO: 45009 - RNA, 21 nt, synthetic construct
  source 1..21: mol_type = other RNA
agctcggcgggcacccctggg

SEQ ID NO: 45010 - RNA, 21 nt, synthetic construct
  source 1..21: mol_type = other RNA
actgcccctgtgtgcacaacg

SEQ ID NO: 45011 - RNA, 21 nt, synthetic construct
  source 1..21: mol_type = other RNA
ctgcccggacgccctggcacc

SEQ ID NO: 45012 - RNA, 21 nt, synthetic construct
  source 1..21: mol_type = other RNA
gtgccgggcggcgcagcttcc

SEQ ID NO: 45013 - RNA, 21 nt, synthetic construct
  source 1..21: mol_type = other RNA
cctgctgtgcctaccccaacc

SEQ ID NO: 45014 - RNA, 21 nt, synthetic construct
  source 1..21: mol_type = other RNA
cccacacacccccagtgccga

SEQ ID NO: 45015 - RNA, 21 nt, synthetic construct
  source 1..21: mol_type = other RNA
cccacacacccccagtgccga

SEQ ID NO: 45016 - RNA, 21 nt, synthetic construct
  source 1..21: mol_type = other RNA
cccctcctccactccggagac

SEQ ID NO: 45017 - RNA, 21 nt, synthetic construct
  source 1..21: mol_type = other RNA
cccacacacccccagtgccga

SEQ ID NO: 45018 - RNA, 21 nt, synthetic construct
  source 1..21: mol_type = other RNA
gggccacaccaggggcacctc

SEQ ID NO: 45019 - RNA, 21 nt, synthetic construct
  source 1..21: mol_type = other RNA
cccacacacccccagtgccga

SEQ ID NO: 45020 - RNA, 21 nt, synthetic construct
  source 1..21: mol_type = other RNA
tccccctgggggagttgggcc

SEQ ID NO: 45021 - RNA, 21 nt, synthetic construct
  source 1..21: mol_type = other RNA
cccctcctccactccggagac

SEQ ID NO: 45022 - RNA, 21 nt, synthetic construct
  source 1..21: mol_type = other RNA
accatggtgcatgggaaggag

SEQ ID NO: 45023 - RNA, 21 nt, synthetic construct
  source 1..21: mol_type = other RNA
caggccccgggccgagaaccc

SEQ ID NO: 45024 - RNA, 21 nt, synthetic construct
  source 1..21: mol_type = other RNA
gagcctgcctgtgtgcccgcc

SEQ ID NO: 45025 - RNA, 21 nt, synthetic construct
  source 1..21: mol_type = other RNA
aagagagtggccgggcagtgc

SEQ ID NO: 45026 - RNA, 21 nt, synthetic construct
  source 1..21: mol_type = other RNA
cccagtgctgaccagcacggc

SEQ ID NO: 45027 - RNA, 21 nt, synthetic construct
  source 1..21: mol_type = other RNA
ctccatcccggggaccaccca

SEQ ID NO: 45028 - RNA, 21 nt, synthetic construct
  source 1..21: mol_type = other RNA
ctccatcccggggaccaccca

SEQ ID NO: 45029 - RNA, 21 nt, synthetic construct
  source 1..21: mol_type = other RNA
ctccatcccggggaccaccca

SEQ ID NO: 45030 - RNA, 21 nt, synthetic construct
  source 1..21: mol_type = other RNA
ctccatcccggggaccaccca

SEQ ID NO: 45031 - RNA, 21 nt, synthetic construct
  source 1..21: mol_type = other RNA
cctccctgatgtcactgggac

SEQ ID NO: 45032 - RNA, 21 nt, synthetic construct
  source 1..21: mol_type = other RNA
cggtggcgagagggccgggtg

SEQ ID NO: 45033 - RNA, 21 nt, synthetic construct
  source 1..21: mol_type = other RNA
tcacggccctcagcggggtgg

SEQ ID NO: 45034 - RNA, 21 nt, synthetic construct
  source 1..21: mol_type = other RNA
ccacaactgtggccactggtt

SEQ ID NO: 45035 - RNA, 21 nt, synthetic construct
  source 1..21: mol_type = other RNA
ccacaactgtggccactggtt

SEQ ID NO: 45036 - RNA, 21 nt, synthetic construct
  source 1..21: mol_type = other RNA
ccacaactgtggccactggtt

SEQ ID NO: 45037 - RNA, 21 nt, synthetic construct
  source 1..21: mol_type = other RNA
ccacaactgtggccactggtt

SEQ ID NO: 45038 - RNA, 21 nt, synthetic construct
  source 1..21: mol_type = other RNA
ccacaactgtggccactggtt

SEQ ID NO: 45039 - RNA, 21 nt, synthetic construct
  source 1..21: mol_type = other RNA
acggcggccctcacctcgcag

SEQ ID NO: 45040 - RNA, 21 nt, synthetic construct
  source 1..21: mol_type = other RNA
agtggtactcccccatcactg

SEQ ID NO: 45041 - RNA, 21 nt, synthetic construct
  source 1..21: mol_type = other RNA
agtggtactcccccatcactg

SEQ ID NO: 45042 - RNA, 21 nt, synthetic construct
  source 1..21: mol_type = other RNA
cagaacagaccaccacaccca

SEQ ID NO: 45043 - RNA, 21 nt, synthetic construct
  source 1..21: mol_type = other RNA
ccggagaccacccacacctcc

SEQ ID NO: 45044 - RNA, 21 nt, synthetic construct
  source 1..21: mol_type = other RNA
agtggtactcccccatcactg

SEQ ID NO: 45045 - RNA, 21 nt, synthetic construct
  source 1..21: mol_type = other RNA
agtggtactcccccatcactg

SEQ ID NO: 45046 - RNA, 21 nt, synthetic construct
  source 1..21: mol_type = other RNA
cgttacacccatcccctcctc

SEQ ID NO: 45047 - RNA, 21 nt, synthetic construct
  source 1..21: mol_type = other RNA
cagaacagaccaccacacccg

SEQ ID NO: 45048 - RNA, 21 nt, synthetic construct
  source 1..21: mol_type = other RNA
ccggagaccacccacacctcc

SEQ ID NO: 45049 - RNA, 21 nt, synthetic construct
  source 1..21: mol_type = other RNA
agtggtactcccccatcactg

SEQ ID NO: 45050 - RNA, 21 nt, synthetic construct
  source 1..21: mol_type = other RNA
tggctggtccccgacagcaga

SEQ ID NO: 45051 - RNA, 21 nt, synthetic construct
  source 1..21: mol_type = other RNA
gactggcacaccccccactgc

SEQ ID NO: 45052 - RNA, 21 nt, synthetic construct
  source 1..21: mol_type = other RNA
tctccaccgtgtgtgtccgcg

SEQ ID NO: 45053 - RNA, 21 nt, synthetic construct
  source 1..21: mol_type = other RNA
tcgcccgacaggcacagccag

SEQ ID NO: 45054 - RNA, 21 nt, synthetic construct
  source 1..21: mol_type = other RNA
gagcactacagccaccgtgac

SEQ ID NO: 45055 - RNA, 21 nt, synthetic construct
  source 1..21: mol_type = other RNA
cagcactacagccaccgtgac

SEQ ID NO: 45056 - RNA, 21 nt, synthetic construct
  source 1..21: mol_type = other RNA
gagcactacagccaccgtgac

SEQ ID NO: 45057 - RNA, 21 nt, synthetic construct
  source 1..21: mol_type = other RNA
gagcactacagccaccgtgac

SEQ ID NO: 45058 - RNA, 21 nt, synthetic construct
  source 1..21: mol_type = other RNA
gtggctggtccccgacagcag

SEQ ID NO: 45059 - RNA, 21 nt, synthetic construct
  source 1..21: mol_type = other RNA
caggaaccggaggtgggagtg

SEQ ID NO: 45060 - RNA, 21 nt, synthetic construct
  source 1..21: mol_type = other RNA
cgcttccagtgtggatcagca

SEQ ID NO: 45061 - RNA, 21 nt, synthetic construct
  source 1..21: mol_type = other RNA
cgtccaccgtggggaccaccc

SEQ ID NO: 45062 - RNA, 21 nt, synthetic construct
  source 1..21: mol_type = other RNA
accacccacaccgccacagtg

SEQ ID NO: 45063 - RNA, 21 nt, synthetic construct
  source 1..21: mol_type = other RNA
cagccctcaccctagcagcag

SEQ ID NO: 45064 - RNA, 21 nt, synthetic construct
  source 1..21: mol_type = other RNA
cagccctcaccctagcagcag

SEQ ID NO: 45065 - RNA, 21 nt, synthetic construct
  source 1..21: mol_type = other RNA
accacccacaccgccacagtg

SEQ ID NO: 45066 - RNA, 21 nt, synthetic construct
  source 1..21: mol_type = other RNA
cccagcagcaaccaccagtac

SEQ ID NO: 45067 - RNA, 21 nt, synthetic construct
  source 1..21: mol_type = other RNA
cagccctcaccctagcagcag

SEQ ID NO: 45068 - RNA, 21 nt, synthetic construct
  source 1..21: mol_type = other RNA
cagccctcaccctagcagcag

SEQ ID NO: 45069 - RNA, 21 nt, synthetic construct
  source 1..21: mol_type = other RNA
catctgcagcatgtggggcgg

SEQ ID NO: 45070 - RNA, 21 nt, synthetic construct
  source 1..21: mol_type = other RNA
ccccgcgccctcagcatccac

SEQ ID NO: 45071 - RNA, 21 nt, synthetic construct
  source 1..21: mol_type = other RNA
gctggtccccgacagcagaaa

SEQ ID NO: 45072 - RNA, 21 nt, synthetic construct
  source 1..21: mol_type = other RNA
gccgcggaactggaggtgccc

SEQ ID NO: 45073 - RNA, 21 nt, synthetic construct
  source 1..21: mol_type = other RNA
tgctctgtgcagggcggggcc

SEQ ID NO: 45074 - RNA, 21 nt, synthetic construct
  source 1..21: mol_type = other RNA
ggtgcagctggtgccactcat

SEQ ID NO: 45075 - RNA, 21 nt, synthetic construct
  source 1..21: mol_type = other RNA
cccaggctgcctgtgccaatg

SEQ ID NO: 45076 - RNA, 21 nt, synthetic construct
  source 1..21: mol_type = other RNA
acagctcggcgggcacccctg

SEQ ID NO: 45077 - RNA, 21 nt, synthetic construct
  source 1..21: mol_type = other RNA
tgccagagctgtaactgcaca

SEQ ID NO: 45078 - RNA, 21 nt, synthetic construct
  source 1..21: mol_type = other RNA
gagcttccccaactggaccct

SEQ ID NO: 45079 - RNA, 21 nt, synthetic construct
  source 1..21: mol_type = other RNA
cccaggggtggccacatccac

SEQ ID NO: 45080 - RNA, 21 nt, synthetic construct
  source 1..21: mol_type = other RNA
cacagccacccacgctggccc

SEQ ID NO: 45081 - RNA, 21 nt, synthetic construct
  source 1..21: mol_type = other RNA
acctccaccctgagaacagct

SEQ ID NO: 45082 - RNA, 21 nt, synthetic construct
  source 1..21: mol_type = other RNA
ccagctccaaagccactccct

SEQ ID NO: 45083 - RNA, 21 nt, synthetic construct
  source 1..21: mol_type = other RNA
ccacacccacggccaccatgt

SEQ ID NO: 45084 - RNA, 21 nt, synthetic construct
  source 1..21: mol_type = other RNA
gcagccaccagcaacacagtg

SEQ ID NO: 45085 - RNA, 21 nt, synthetic construct
  source 1..21: mol_type = other RNA
agccctcaccctagcagcaga

SEQ ID NO: 45086 - RNA, 21 nt, synthetic construct
  source 1..21: mol_type = other RNA
cggccacacccagcaagaccc

SEQ ID NO: 45087 - RNA, 21 nt, synthetic construct
  source 1..21: mol_type = other RNA
gccggggccctctggcgggga

SEQ ID NO: 45088 - RNA, 21 nt, synthetic construct
  source 1..21: mol_type = other RNA
ctggactttggcctggtctgc

SEQ ID NO: 45089 - RNA, 21 nt, synthetic construct
  source 1..21: mol_type = other RNA
ccagctccaaagccactccct

SEQ ID NO: 45090 - RNA, 21 nt, synthetic construct
  source 1..21: mol_type = other RNA
ccacacccacggccaccatgt

SEQ ID NO: 45091 - RNA, 21 nt, synthetic construct
  source 1..21: mol_type = other RNA
agccctcaccctagcagcagg

SEQ ID NO: 45092 - RNA, 21 nt, synthetic construct
  source 1..21: mol_type = other RNA
cggccacacccagcaagaccc

SEQ ID NO: 45093 - RNA, 21 nt, synthetic construct
  source 1..21: mol_type = other RNA
gccggggccctctggcgggga

SEQ ID NO: 45094 - RNA, 21 nt, synthetic construct
  source 1..21: mol_type = other RNA
ctggactttggcctggtctgc

SEQ ID NO: 45095 - RNA, 21 nt, synthetic construct
  source 1..21: mol_type = other RNA
ctggatcctcacagagcagac

SEQ ID NO: 45096 - RNA, 21 nt, synthetic construct
  source 1..21: mol_type = other RNA
accacgaaggccaccacgaca

SEQ ID NO: 45097 - RNA, 21 nt, synthetic construct
  source 1..21: mol_type = other RNA
ccacacccacggccaccatgt

SEQ ID NO: 45098 - RNA, 21 nt, synthetic construct
  source 1..21: mol_type = other RNA
agccctcaccctagcagcagg

SEQ ID NO: 45099 - RNA, 21 nt, synthetic construct
  source 1..21: mol_type = other RNA
cagccacacccagcaagaccc

SEQ ID NO: 45100 - RNA, 21 nt, synthetic construct
  source 1..21: mol_type = other RNA
aaccacggtggtgaccacggg

SEQ ID NO: 45101 - RNA, 21 nt, synthetic construct
  source 1..21: mol_type = other RNA
gccggggccctctggcgggga

SEQ ID NO: 45102 - RNA, 21 nt, synthetic construct
  source 1..21: mol_type = other RNA
ctggactttggcctggtctgc

SEQ ID NO: 45103 - RNA, 21 nt, synthetic construct
  source 1..21: mol_type = other RNA
ccagctccaaagccactccct

SEQ ID NO: 45104 - RNA, 21 nt, synthetic construct
  source 1..21: mol_type = other RNA
ccacacccacggccaccatgt

SEQ ID NO: 45105 - RNA, 21 nt, synthetic construct
  source 1..21: mol_type = other RNA
ccacggccaccacaaccaggg

SEQ ID NO: 45106 - RNA, 21 nt, synthetic construct
  source 1..21: mol_type = other RNA
agccctcaccctagcagcagg

SEQ ID NO: 45107 - RNA, 21 nt, synthetic construct
  source 1..21: mol_type = other RNA
cggccacacccagcaagaccc

SEQ ID NO: 45108 - RNA, 21 nt, synthetic construct
  source 1..21: mol_type = other RNA
aaccacggtggtgaccacggg

SEQ ID NO: 45109 - RNA, 21 nt, synthetic construct
  source 1..21: mol_type = other RNA
gccggggccctctggcgggga

SEQ ID NO: 45110 - RNA, 21 nt, synthetic construct
  source 1..21: mol_type = other RNA
ctggactttggcctggtctgc

SEQ ID NO: 45111 - RNA, 21 nt, synthetic construct
  source 1..21: mol_type = other RNA
accacgaaggccaccacgaca

SEQ ID NO: 45112 - RNA, 21 nt, synthetic construct
  source 1..21: mol_type = other RNA
ccagctccaaagccactccct

SEQ ID NO: 45113 - RNA, 21 nt, synthetic construct
  source 1..21: mol_type = other RNA
ccacacccacggccaccatgt

SEQ ID NO: 45114 - RNA, 21 nt, synthetic construct
  source 1..21: mol_type = other RNA
ccccagtgctgaccagcacgg

SEQ ID NO: 45115 - RNA, 21 nt, synthetic construct
  source 1..21: mol_type = other RNA
agcacggccaccacacccgca

SEQ ID NO: 45116 - RNA, 21 nt, synthetic construct
  source 1..21: mol_type = other RNA
ccagagaccacccacacctcc

SEQ ID NO: 45117 - RNA, 21 nt, synthetic construct
  source 1..21: mol_type = other RNA
cctccactctgggaacagctc

SEQ ID NO: 45118 - RNA, 21 nt, synthetic construct
  source 1..21: mol_type = other RNA
ggccactatgcccacagccac

SEQ ID NO: 45119 - RNA, 21 nt, synthetic construct
  source 1..21: mol_type = other RNA
gcctccacggttcccagctcg

SEQ ID NO: 45120 - RNA, 21 nt, synthetic construct
  source 1..21: mol_type = other RNA
cagcctgccaaccttcagcgt

SEQ ID NO: 45121 - RNA, 21 nt, synthetic construct
  source 1..21: mol_type = other RNA
tgccctgggcgtgagcgtcac

SEQ ID NO: 45122 - RNA, 21 nt, synthetic construct
  source 1..21: mol_type = other RNA
actggcacaccccccactgcc

SEQ ID NO: 45123 - RNA, 21 nt, synthetic construct
  source 1..21: mol_type = other RNA
atgcccaccacagccgctctg

SEQ ID NO: 45124 - RNA, 21 nt, synthetic construct
  source 1..21: mol_type = other RNA
gcacacatgggcatctgcgtg

SEQ ID NO: 45125 - RNA, 21 nt, synthetic construct
  source 1..21: mol_type = other RNA
cactcaggagtcctaccctgg

SEQ ID NO: 45126 - RNA, 21 nt, synthetic construct
  source 1..21: mol_type = other RNA
cgccctggaacaaactaagca

SEQ ID NO: 45127 - RNA, 21 nt, synthetic construct
  source 1..21: mol_type = other RNA
ccggccgctggggcagacagg

SEQ ID NO: 45128 - RNA, 21 nt, synthetic construct
  source 1..21: mol_type = other RNA
ggccgctggggcagacaggct

SEQ ID NO: 45129 - RNA, 21 nt, synthetic construct
  source 1..21: mol_type = other RNA
gtcagcatcccaaagccccct

SEQ ID NO: 45130 - RNA, 21 nt, synthetic construct
  source 1..21: mol_type = other RNA
agcctggacttcggccacctc

SEQ ID NO: 45131 - RNA, 21 nt, synthetic construct
  source 1..21: mol_type = other RNA
agcctggacttcggccacctc

SEQ ID NO: 45132 - RNA, 21 nt, synthetic construct
  source 1..21: mol_type = other RNA
agcctggacttcggccacctc

SEQ ID NO: 45133 - RNA, 21 nt, synthetic construct
  source 1..21: mol_type = other RNA
agcctggacttcggccacctc

SEQ ID NO: 45134 - RNA, 21 nt, synthetic construct
  source 1..21: mol_type = other RNA
tgcttctgccctgaggaccag

SEQ ID NO: 45135 - RNA, 21 nt, synthetic construct
  source 1..21: mol_type = other RNA
gcgccactcaggagtcctacc

SEQ ID NO: 45136 - RNA, 21 nt, synthetic construct
  source 1..21: mol_type = other RNA
tgggggagttgggccaggtcg

SEQ ID NO: 45137 - RNA, 21 nt, synthetic construct
  source 1..21: mol_type = other RNA
cccagggtcagcccccgccgt

SEQ ID NO: 45138 - RNA, 21 nt, synthetic construct
  source 1..21: mol_type = other RNA
gccccagaagggtgaggggcc

SEQ ID NO: 45139 - RNA, 21 nt, synthetic construct
  source 1..21: mol_type = other RNA
tgcccctgtgtgcacaacgag

SEQ ID NO: 45140 - RNA, 21 nt, synthetic construct
  source 1..21: mol_type = other RNA
ggacattcctgccctgggcgt

SEQ ID NO: 45141 - RNA, 21 nt, synthetic construct
  source 1..21: mol_type = other RNA
tgagtccactggatccacggc

SEQ ID NO: 45142 - RNA, 21 nt, synthetic construct
  source 1..21: mol_type = other RNA
tgagtccactggatccacggc

SEQ ID NO: 45143 - RNA, 21 nt, synthetic construct
  source 1..21: mol_type = other RNA
ctcccactattccacctttga

SEQ ID NO: 45144 - RNA, 21 nt, synthetic construct
  source 1..21: mol_type = other RNA
caagggtccccacagcggaga

SEQ ID NO: 45145 - RNA, 21 nt, synthetic construct
  source 1..21: mol_type = other RNA
ccccaacccagaccacagcaa

SEQ ID NO: 45146 - RNA, 21 nt, synthetic construct
  source 1..21: mol_type = other RNA
tgggcacatggcgcccctcac

SEQ ID NO: 45147 - RNA, 21 nt, synthetic construct
  source 1..21: mol_type = other RNA
gcccagggtcagcccccgccg

SEQ ID NO: 45148 - RNA, 21 nt, synthetic construct
  source 1..21: mol_type = other RNA
gaggagacggtgcccttgcac

SEQ ID NO: 45149 - RNA, 21 nt, synthetic construct
  source 1..21: mol_type = other RNA
aggatgtgcattgtctgatca

SEQ ID NO: 45150 - RNA, 21 nt, synthetic construct
  source 1..21: mol_type = other RNA
gggccctctggcggggacttt

SEQ ID NO: 45151 - RNA, 21 nt, synthetic construct
  source 1..21: mol_type = other RNA
gggccctctggcggggacttt

SEQ ID NO: 45152 - RNA, 21 nt, synthetic construct
  source 1..21: mol_type = other RNA
gggccctctggcggggacttt

SEQ ID NO: 45153 - RNA, 21 nt, synthetic construct
  source 1..21: mol_type = other RNA
gggccctctggcggggacttt

SEQ ID NO: 45154 - RNA, 21 nt, synthetic construct
  source 1..21: mol_type = other RNA
atgggtgaccccgagcatccg

SEQ ID NO: 45155 - RNA, 21 nt, synthetic construct
  source 1..21: mol_type = other RNA
tgactgcagctacgttctgtc

SEQ ID NO: 45156 - RNA, 21 nt, synthetic construct
  source 1..21: mol_type = other RNA
cttccagggacgacggggagc

SEQ ID NO: 45157 - RNA, 21 nt, synthetic construct
  source 1..21: mol_type = other RNA
atgggtgccccgagcgcgtgc

SEQ ID NO: 45158 - RNA, 21 nt, synthetic construct
  source 1..21: mol_type = other RNA
caacggcaccatcatcaggaa

SEQ ID NO: 45159 - RNA, 21 nt, synthetic construct
  source 1..21: mol_type = other RNA
gggcacttatgccagcagcct

SEQ ID NO: 45160 - RNA, 21 nt, synthetic construct
  source 1..21: mol_type = other RNA
cagcctggacttcggccacct

SEQ ID NO: 45161 - RNA, 21 nt, synthetic construct
  source 1..21: mol_type = other RNA
cccagcaagacccgcacctcg

SEQ ID NO: 45162 - RNA, 21 nt, synthetic construct
  source 1..21: mol_type = other RNA
cagcctggacttcggccacct

SEQ ID NO: 45163 - RNA, 21 nt, synthetic construct
  source 1..21: mol_type = other RNA
acggggacttcccacacccca

SEQ ID NO: 45164 - RNA, 21 nt, synthetic construct
  source 1..21: mol_type = other RNA
cagcaggaccaccgagtcacc

SEQ ID NO: 45165 - RNA, 21 nt, synthetic construct
  source 1..21: mol_type = other RNA
cccagcaagacccgcacctcg

SEQ ID NO: 45166 - RNA, 21 nt, synthetic construct
  source 1..21: mol_type = other RNA
cagcctggacttcggccacct

SEQ ID NO: 45167 - RNA, 21 nt, synthetic construct
  source 1..21: mol_type = other RNA
cagcaggaccaccgagtcacc

SEQ ID NO: 45168 - RNA, 21 nt, synthetic construct
  source 1..21: mol_type = other RNA
cccgggccacaccaggggcac

SEQ ID NO: 45169 - RNA, 21 nt, synthetic construct
  source 1..21: mol_type = other RNA
ccgggccacaccaggggcacc

SEQ ID NO: 45170 - RNA, 21 nt, synthetic construct
  source 1..21: mol_type = other RNA
cccagcaagacccgcacctcg

SEQ ID NO: 45171 - RNA, 21 nt, synthetic construct
  source 1..21: mol_type = other RNA
cagcctggacttcggccacct

SEQ ID NO: 45172 - RNA, 21 nt, synthetic construct
  source 1..21: mol_type = other RNA
acggggacttcccacacccca

SEQ ID NO: 45173 - RNA, 21 nt, synthetic construct
  source 1..21: mol_type = other RNA
cagcaggaccaccgagtcacc

SEQ ID NO: 45174 - RNA, 21 nt, synthetic construct
  source 1..21: mol_type = other RNA
cccagcaagacccgcacctcg

SEQ ID NO: 45175 - RNA, 21 nt, synthetic construct
  source 1..21: mol_type = other RNA
ccctgggggagttgggccagg

SEQ ID NO: 45176 - RNA, 21 nt, synthetic construct
  source 1..21: mol_type = other RNA
gccagtccagctgaatgaaac

SEQ ID NO: 45177 - RNA, 21 nt, synthetic construct
  source 1..21: mol_type = other RNA
cccgcgctccgtgctcctgct

SEQ ID NO: 45178 - RNA, 21 nt, synthetic construct
  source 1..21: mol_type = other RNA
actgcgtacctggccgcctgc

SEQ ID NO: 45179 - RNA, 21 nt, synthetic construct
  source 1..21: mol_type = other RNA
ccgtcccggggaccacccaca

SEQ ID NO: 45180 - RNA, 21 nt, synthetic construct
  source 1..21: mol_type = other RNA
gggcgccactcaggagtccta

SEQ ID NO: 45181 - RNA, 21 nt, synthetic construct
  source 1..21: mol_type = other RNA
tgctggagctggatcccaaat

SEQ ID NO: 45182 - RNA, 21 nt, synthetic construct
  source 1..21: mol_type = other RNA
gggcccacatctccacctatg

SEQ ID NO: 45183 - RNA, 21 nt, synthetic construct
  source 1..21: mol_type = other RNA
tggctgagctgcggaagtgcg

SEQ ID NO: 45184 - RNA, 21 nt, synthetic construct
  source 1..21: mol_type = other RNA
agggtccccacagcggagaac

SEQ ID NO: 45185 - RNA, 21 nt, synthetic construct
  source 1..21: mol_type = other RNA
ccagaggctccacggtgaccc

SEQ ID NO: 45186 - RNA, 21 nt, synthetic construct
  source 1..21: mol_type = other RNA
cgaacaccatggccaccacac

SEQ ID NO: 45187 - RNA, 21 nt, synthetic construct
  source 1..21: mol_type = other RNA
tcacagagcagaccacagcag

SEQ ID NO: 45188 - RNA, 21 nt, synthetic construct
  source 1..21: mol_type = other RNA
ccaccagttccatgtccaccc

SEQ ID NO: 45189 - RNA, 21 nt, synthetic construct
  source 1..21: mol_type = other RNA
ccagaggctccacggtgaccc

SEQ ID NO: 45190 - RNA, 21 nt, synthetic construct
  source 1..21: mol_type = other RNA
gaccacgggctgtgagcccca

SEQ ID NO: 45191 - RNA, 21 nt, synthetic construct
  source 1..21: mol_type = other RNA
ttccccagggacgaccacccc

SEQ ID NO: 45192 - RNA, 21 nt, synthetic construct
  source 1..21: mol_type = other RNA
gaccacgggctgtgagcccca

SEQ ID NO: 45193 - RNA, 21 nt, synthetic construct
  source 1..21: mol_type = other RNA
caagggccaccagttccacgt

SEQ ID NO: 45194 - RNA, 21 nt, synthetic construct
  source 1..21: mol_type = other RNA
ccccgcagccccggtgtctag

SEQ ID NO: 45195 - RNA, 21 nt, synthetic construct
  source 1..21: mol_type = other RNA
ctgtggcaccagggctgcgag

SEQ ID NO: 45196 - RNA, 21 nt, synthetic construct
  source 1..21: mol_type = other RNA
tggccacgtccggccgctggg

SEQ ID NO: 45197 - RNA, 21 nt, synthetic construct
  source 1..21: mol_type = other RNA
gctggggcagacaggctggtc

SEQ ID NO: 45198 - RNA, 21 nt, synthetic construct
  source 1..21: mol_type = other RNA
gtcagagaggggtcagcatcc

SEQ ID NO: 45199 - RNA, 21 nt, synthetic construct
  source 1..21: mol_type = other RNA
cgacggcggccctcacctcgc

SEQ ID NO: 45200 - RNA, 21 nt, synthetic construct
  source 1..21: mol_type = other RNA
accactgcaggggacgtgcca

SEQ ID NO: 45201 - RNA, 21 nt, synthetic construct
  source 1..21: mol_type = other RNA
ctccagagactgtccacacct

SEQ ID NO: 45202 - RNA, 21 nt, synthetic construct
  source 1..21: mol_type = other RNA
ctccagagactgtccacacct

SEQ ID NO: 45203 - RNA, 21 nt, synthetic construct
  source 1..21: mol_type = other RNA
ctccagagactgtccacacct

SEQ ID NO: 45204 - RNA, 21 nt, synthetic construct
  source 1..21: mol_type = other RNA
acctgcacctgcaggaaccgg

SEQ ID NO: 45205 - RNA, 21 nt, synthetic construct
  source 1..21: mol_type = other RNA
aaagaccaccctatgggtgac

SEQ ID NO: 45206 - RNA, 21 nt, synthetic construct
  source 1..21: mol_type = other RNA
tgccagcagcctaaggacata

SEQ ID NO: 45207 - RNA, 21 nt, synthetic construct
  source 1..21: mol_type = other RNA
ccacggccaccacaaccgggg

SEQ ID NO: 45208 - RNA, 21 nt, synthetic construct
  source 1..21: mol_type = other RNA
ccacggccaccacaaccgggg

SEQ ID NO: 45209 - RNA, 21 nt, synthetic construct
  source 1..21: mol_type = other RNA
tcctgccctgggcgtgagcgt

SEQ ID NO: 45210 - RNA, 21 nt, synthetic construct
  source 1..21: mol_type = other RNA
ctgagtgccacaaccttgtgc

SEQ ID NO: 45211 - RNA, 21 nt, synthetic construct
  source 1..21: mol_type = other RNA
gaggcctagtgggctccaggc

SEQ ID NO: 45212 - RNA, 21 nt, synthetic construct
  source 1..21: mol_type = other RNA
ggatgcctgccagcccacttg

SEQ ID NO: 45213 - RNA, 21 nt, synthetic construct
  source 1..21: mol_type = other RNA
tggtccagctggtacaatggg

SEQ ID NO: 45214 - RNA, 21 nt, synthetic construct
  source 1..21: mol_type = other RNA
aggtatgccctgtgctggctg

SEQ ID NO: 45215 - RNA, 21 nt, synthetic construct
  source 1..21: mol_type = other RNA
tccacttcggcctggtgtgca

SEQ ID NO: 45216 - RNA, 21 nt, synthetic construct
  source 1..21: mol_type = other RNA
cacacccacagctaccagcgt

SEQ ID NO: 45217 - RNA, 21 nt, synthetic construct
  source 1..21: mol_type = other RNA
cccacaccgccacagtgctga

SEQ ID NO: 45218 - RNA, 21 nt, synthetic construct
  source 1..21: mol_type = other RNA
gtactcccccatcactgacca

SEQ ID NO: 45219 - RNA, 21 nt, synthetic construct
  source 1..21: mol_type = other RNA
atgtgagcaccacggccacga

SEQ ID NO: 45220 - RNA, 21 nt, synthetic construct
  source 1..21: mol_type = other RNA
gtactcccccatcactgacca

SEQ ID NO: 45221 - RNA, 21 nt, synthetic construct
  source 1..21: mol_type = other RNA
cccttccagtgctgacaagca

SEQ ID NO: 45222 - RNA, 21 nt, synthetic construct
  source 1..21: mol_type = other RNA
cacacccacagctaccagcgt

SEQ ID NO: 45223 - RNA, 21 nt, synthetic construct
  source 1..21: mol_type = other RNA
ccacaaccagggccaccggct

SEQ ID NO: 45224 - RNA, 21 nt, synthetic construct
  source 1..21: mol_type = other RNA
cccacaccgccacagtgctga

SEQ ID NO: 45225 - RNA, 21 nt, synthetic construct
  source 1..21: mol_type = other RNA
gtactcccccatcactgacca

SEQ ID NO: 45226 - RNA, 21 nt, synthetic construct
  source 1..21: mol_type = other RNA
atgtgagcaccacggccacga

SEQ ID NO: 45227 - RNA, 21 nt, synthetic construct
  source 1..21: mol_type = other RNA
ccacaaccagggccaccggct

SEQ ID NO: 45228 - RNA, 21 nt, synthetic construct
  source 1..21: mol_type = other RNA
acgggcttcacagtcaccccc

SEQ ID NO: 45229 - RNA, 21 nt, synthetic construct
  source 1..21: mol_type = other RNA
agtgctgaccagcccggccac

SEQ ID NO: 45230 - RNA, 21 nt, synthetic construct
  source 1..21: mol_type = other RNA
cccttccagtgctgacaagca

SEQ ID NO: 45231 - RNA, 21 nt, synthetic construct
  source 1..21: mol_type = other RNA
atgtgagcaccacggccacga

SEQ ID NO: 45232 - RNA, 21 nt, synthetic construct
  source 1..21: mol_type = other RNA
gtactcccccatcactgacca

SEQ ID NO: 45233 - RNA, 21 nt, synthetic construct
  source 1..21: mol_type = other RNA
cccttccagtgctgacaagca

SEQ ID NO: 45234 - RNA, 21 nt, synthetic construct
  source 1..21: mol_type = other RNA
ccacaaaatccacagctacca

SEQ ID NO: 45235 - RNA, 21 nt, synthetic construct
  source 1..21: mol_type = other RNA
tggatccacggccaccctgtc

SEQ ID NO: 45236 - RNA, 21 nt, synthetic construct
  source 1..21: mol_type = other RNA
ccaccgtgatggtgcccaccg

SEQ ID NO: 45237 - RNA, 21 nt, synthetic construct
  source 1..21: mol_type = other RNA
cgactggcacaccccccactg

SEQ ID NO: 45238 - RNA, 21 nt, synthetic construct
  source 1..21: mol_type = other RNA
aggggccgccttgaggtgccc

SEQ ID NO: 45239 - RNA, 21 nt, synthetic construct
  source 1..21: mol_type = other RNA
gagctctgccgcgcccgggga

SEQ ID NO: 45240 - RNA, 21 nt, synthetic construct
  source 1..21: mol_type = other RNA
atacagcctgccacctgcaac

SEQ ID NO: 45241 - RNA, 21 nt, synthetic construct
  source 1..21: mol_type = other RNA
cccaccttccgctgcagacct

SEQ ID NO: 45242 - RNA, 21 nt, synthetic construct
  source 1..21: mol_type = other RNA
gcctgcatcctgcccagatgt

SEQ ID NO: 45243 - RNA, 21 nt, synthetic construct
  source 1..21: mol_type = other RNA
tccctgcgcccatggctcccc

SEQ ID NO: 45244 - RNA, 21 nt, synthetic construct
  source 1..21: mol_type = other RNA
ccctgcgcccatggctccccc

SEQ ID NO: 45245 - RNA, 21 nt, synthetic construct
  source 1..21: mol_type = other RNA
gccgggcggcgcagcttcccg

SEQ ID NO: 45246 - RNA, 21 nt, synthetic construct
  source 1..21: mol_type = other RNA
agctccaaagccactccctcc

SEQ ID NO: 45247 - RNA, 21 nt, synthetic construct
  source 1..21: mol_type = other RNA
actcgactccagccctttcca

SEQ ID NO: 45248 - RNA, 21 nt, synthetic construct
  source 1..21: mol_type = other RNA
agctccaaagccactccctcc

SEQ ID NO: 45249 - RNA, 21 nt, synthetic construct
  source 1..21: mol_type = other RNA
accacccgcacccctgcagtg

SEQ ID NO: 45250 - RNA, 21 nt, synthetic construct
  source 1..21: mol_type = other RNA
ggggagcggtgggtcagcaac

SEQ ID NO: 45251 - RNA, 21 nt, synthetic construct
  source 1..21: mol_type = other RNA
gcacacctacacccacgtgga

SEQ ID NO: 45252 - RNA, 21 nt, synthetic construct
  source 1..21: mol_type = other RNA
agaacgttctgcctccatccc

SEQ ID NO: 45253 - RNA, 21 nt, synthetic construct
  source 1..21: mol_type = other RNA
gctgcccttgccggccggcaa

SEQ ID NO: 45254 - RNA, 21 nt, synthetic construct
  source 1..21: mol_type = other RNA
gaaccaccgagtcaccccctt

SEQ ID NO: 45255 - RNA, 21 nt, synthetic construct
  source 1..21: mol_type = other RNA
cctcctctactccagagactg

SEQ ID NO: 45256 - RNA, 21 nt, synthetic construct
  source 1..21: mol_type = other RNA
tagccaccgtgatggtgccca

SEQ ID NO: 45257 - RNA, 21 nt, synthetic construct
  source 1..21: mol_type = other RNA
tgtgtctgtgctggggaccac

SEQ ID NO: 45258 - RNA, 21 nt, synthetic construct
  source 1..21: mol_type = other RNA
gaggaccagatcctcttcaac

SEQ ID NO: 45259 - RNA, 21 nt, synthetic construct
  source 1..21: mol_type = other RNA
gagagtggccgggcagtgctg

SEQ ID NO: 45260 - RNA, 21 nt, synthetic construct
  source 1..21: mol_type = other RNA
gaggaggactcctgtcaagtc

SEQ ID NO: 45261 - RNA, 21 nt, synthetic construct
  source 1..21: mol_type = other RNA
cctggggtgacttccactaca

SEQ ID NO: 45262 - RNA, 21 nt, synthetic construct
  source 1..21: mol_type = other RNA
ttgccgcggcctgagtgaggc

SEQ ID NO: 45263 - RNA, 21 nt, synthetic construct
  source 1..21: mol_type = other RNA
tgcattgccgaggaggactgc

SEQ ID NO: 45264 - RNA, 21 nt, synthetic construct
  source 1..21: mol_type = other RNA
gacaggacctacagctaccag

SEQ ID NO: 45265 - RNA, 21 nt, synthetic construct
  source 1..21: mol_type = other RNA
atgggcttggcgcctgcttga

SEQ ID NO: 45266 - RNA, 21 nt, synthetic construct
  source 1..21: mol_type = other RNA
gcagagagggtaccaggtatg

SEQ ID NO: 45267 - RNA, 21 nt, synthetic construct
  source 1..21: mol_type = other RNA
cggcggccctcacctcgcaga

SEQ ID NO: 45268 - RNA, 21 nt, synthetic construct
  source 1..21: mol_type = other RNA
agatcagggccgctggagggc

SEQ ID NO: 45269 - RNA, 21 nt, synthetic construct
  source 1..21: mol_type = other RNA
tatgccagcagcctaaggaca

SEQ ID NO: 45270 - RNA, 21 nt, synthetic construct
  source 1..21: mol_type = other RNA
gccaccgaccacagagctgga

SEQ ID NO: 45271 - RNA, 21 nt, synthetic construct
  source 1..21: mol_type = other RNA
ttccaacacgctcagcccttc

SEQ ID NO: 45272 - RNA, 21 nt, synthetic construct
  source 1..21: mol_type = other RNA
accacgggcttcacagccacc

SEQ ID NO: 45273 - RNA, 21 nt, synthetic construct
  source 1..21: mol_type = other RNA
cccccatcactgaccaccacg

SEQ ID NO: 45274 - RNA, 21 nt, synthetic construct
  source 1..21: mol_type = other RNA
cccccagtgctgaccaccacc

SEQ ID NO: 45275 - RNA, 21 nt, synthetic construct
  source 1..21: mol_type = other RNA
ccgaacaccatggccaccaca

SEQ ID NO: 45276 - RNA, 21 nt, synthetic construct
  source 1..21: mol_type = other RNA
gcctggactttggcctggtct

SEQ ID NO: 45277 - RNA, 21 nt, synthetic construct
  source 1..21: mol_type = other RNA
accacgggcttcacagccacc

SEQ ID NO: 45278 - RNA, 21 nt, synthetic construct
  source 1..21: mol_type = other RNA
cccccatcactgaccaccacg

SEQ ID NO: 45279 - RNA, 21 nt, synthetic construct
  source 1..21: mol_type = other RNA
cccccagtgctgaccaccacc

SEQ ID NO: 45280 - RNA, 21 nt, synthetic construct
  source 1..21: mol_type = other RNA
gcctggactttggcctggtct

SEQ ID NO: 45281 - RNA, 21 nt, synthetic construct
  source 1..21: mol_type = other RNA
accacgggcttcacagccacc

SEQ ID NO: 45282 - RNA, 21 nt, synthetic construct
  source 1..21: mol_type = other RNA
cccccatcactgaccaccacg

SEQ ID NO: 45283 - RNA, 21 nt, synthetic construct
  source 1..21: mol_type = other RNA
cccccagtgctgaccaccacc

SEQ ID NO: 45284 - RNA, 21 nt, synthetic construct
  source 1..21: mol_type = other RNA
gcctggactttggcctggtct

SEQ ID NO: 45285 - RNA, 21 nt, synthetic construct
  source 1..21: mol_type = other RNA
cccccagtgctgaccaccacc

SEQ ID NO: 45286 - RNA, 21 nt, synthetic construct
  source 1..21: mol_type = other RNA
cctggtgtccccctgggggag

SEQ ID NO: 45287 - RNA, 21 nt, synthetic construct
  source 1..21: mol_type = other RNA
ggtgtccccctgggggagttg

SEQ ID NO: 45288 - RNA, 21 nt, synthetic construct
  source 1..21: mol_type = other RNA
gcctggactttggcctggtct

SEQ ID NO: 45289 - RNA, 21 nt, synthetic construct
  source 1..21: mol_type = other RNA
accacgggcttcacagccacc

SEQ ID NO: 45290 - RNA, 21 nt, synthetic construct
  source 1..21: mol_type = other RNA
cccccatcactgaccaccacg

SEQ ID NO: 45291 - RNA, 21 nt, synthetic construct
  source 1..21: mol_type = other RNA
actccagggacaacacccatc

SEQ ID NO: 45292 - RNA, 21 nt, synthetic construct
  source 1..21: mol_type = other RNA
atgccatccctctccggcagg

SEQ ID NO: 45293 - RNA, 21 nt, synthetic construct
  source 1..21: mol_type = other RNA
catccctctccggcaggtgaa

SEQ ID NO: 45294 - RNA, 21 nt, synthetic construct
  source 1..21: mol_type = other RNA
ccttgcccctccctgatgtca

SEQ ID NO: 45295 - RNA, 21 nt, synthetic construct
  source 1..21: mol_type = other RNA
gccagcccccaggatgggtgc

SEQ ID NO: 45296 - RNA, 21 nt, synthetic construct
  source 1..21: mol_type = other RNA
ctctggcggccatgctcgtgg

SEQ ID NO: 45297 - RNA, 21 nt, synthetic construct
  source 1..21: mol_type = other RNA
acctggggtgacttccactac

SEQ ID NO: 45298 - RNA, 21 nt, synthetic construct
  source 1..21: mol_type = other RNA
ctggggtgacttccactacaa

SEQ ID NO: 45299 - RNA, 21 nt, synthetic construct
  source 1..21: mol_type = other RNA
agcactgccgcgccgcctacg

SEQ ID NO: 45300 - RNA, 21 nt, synthetic construct
  source 1..21: mol_type = other RNA
cctcatcaatgggcagcggga

SEQ ID NO: 45301 - RNA, 21 nt, synthetic construct
  source 1..21: mol_type = other RNA
tggagcagagcggggactaca

SEQ ID NO: 45302 - RNA, 21 nt, synthetic construct
  source 1..21: mol_type = other RNA
gctgccccacctgcccgtgtg

SEQ ID NO: 45303 - RNA, 21 nt, synthetic construct
  source 1..21: mol_type = other RNA
acctgccccctcaacatgcag

SEQ ID NO: 45304 - RNA, 21 nt, synthetic construct
  source 1..21: mol_type = other RNA
cctgccccctcaacatgcagc

SEQ ID NO: 45305 - RNA, 21 nt, synthetic construct
  source 1..21: mol_type = other RNA
accaggagtgtggctcaccct

SEQ ID NO: 45306 - RNA, 21 nt, synthetic construct
  source 1..21: mol_type = other RNA
ccaggagtgtggctcaccctg

SEQ ID NO: 45307 - RNA, 21 nt, synthetic construct
  source 1..21: mol_type = other RNA
ggggcccacatctccacctat

SEQ ID NO: 45308 - RNA, 21 nt, synthetic construct
  source 1..21: mol_type = other RNA
agcagcttcaccgtgctggct

SEQ ID NO: 45309 - RNA, 21 nt, synthetic construct
  source 1..21: mol_type = other RNA
atgggagtgggggctgcattg

SEQ ID NO: 45310 - RNA, 21 nt, synthetic construct
  source 1..21: mol_type = other RNA
ctgcacctgcaggaaccggag

SEQ ID NO: 45311 - RNA, 21 nt, synthetic construct
  source 1..21: mol_type = other RNA
cgagagggccgggtggggacc

SEQ ID NO: 45312 - RNA, 21 nt, synthetic construct
  source 1..21: mol_type = other RNA
actccggacacctgccccttg

SEQ ID NO: 45313 - RNA, 21 nt, synthetic construct
  source 1..21: mol_type = other RNA
ccccttgttctgtgacttcta

SEQ ID NO: 45314 - RNA, 21 nt, synthetic construct
  source 1..21: mol_type = other RNA
aagggtccccacagcggagaa

SEQ ID NO: 45315 - RNA, 21 nt, synthetic construct
  source 1..21: mol_type = other RNA
ccttcaccaccgcctgggtcc

SEQ ID NO: 45316 - RNA, 21 nt, synthetic construct
  source 1..21: mol_type = other RNA
ggtccagctggtacaatgggc

SEQ ID NO: 45317 - RNA, 21 nt, synthetic construct
  source 1..21: mol_type = other RNA
tgccgggcggcgcagcttccc

SEQ ID NO: 45318 - RNA, 21 nt, synthetic construct
  source 1..21: mol_type = other RNA
cccaacccagaccacagcaac

SEQ ID NO: 45319 - RNA, 21 nt, synthetic construct
  source 1..21: mol_type = other RNA
aactgggagcaggagggcgtc

SEQ ID NO: 45320 - RNA, 21 nt, synthetic construct
  source 1..21: mol_type = other RNA
gggagcaggagggcgtcttca

SEQ ID NO: 45321 - RNA, 21 nt, synthetic construct
  source 1..21: mol_type = other RNA
acagccaccacgggaggcccc

SEQ ID NO: 45322 - RNA, 21 nt, synthetic construct
  source 1..21: mol_type = other RNA
ccaggggtggccacatccacc

SEQ ID NO: 45323 - RNA, 21 nt, synthetic construct
  source 1..21: mol_type = other RNA
caggggtggccacatccaccc

SEQ ID NO: 45324 - RNA, 21 nt, synthetic construct
  source 1..21: mol_type = other RNA
acctccagagctcgcccgaca

SEQ ID NO: 45325 - RNA, 21 nt, synthetic construct
  source 1..21: mol_type = other RNA
ggacagagacgacaatgagcc

SEQ ID NO: 45326 - RNA, 21 nt, synthetic construct
  source 1..21: mol_type = other RNA
ctgcgtccactggatccacgg

SEQ ID NO: 45327 - RNA, 21 nt, synthetic construct
  source 1..21: mol_type = other RNA
cctccagtccagggactgcaa

SEQ ID NO: 45328 - RNA, 21 nt, synthetic construct
  source 1..21: mol_type = other RNA
cccacggccaccatgtccaca

SEQ ID NO: 45329 - RNA, 21 nt, synthetic construct
  source 1..21: mol_type = other RNA
cagaggctccacggtgacccc

SEQ ID NO: 45330 - RNA, 21 nt, synthetic construct
  source 1..21: mol_type = other RNA
cctcgggcatcttgggcacca

SEQ ID NO: 45331 - RNA, 21 nt, synthetic construct
  source 1..21: mol_type = other RNA
acccccttctccagggacgac

SEQ ID NO: 45332 - RNA, 21 nt, synthetic construct
  source 1..21: mol_type = other RNA
ggccacaccacggccacctcc

SEQ ID NO: 45333 - RNA, 21 nt, synthetic construct
  source 1..21: mol_type = other RNA
ttggcctggtctgcaggaacc

SEQ ID NO: 45334 - RNA, 21 nt, synthetic construct
  source 1..21: mol_type = other RNA
cgtgagcaggtggggaagttc

SEQ ID NO: 45335 - RNA, 21 nt, synthetic construct
  source 1..21: mol_type = other RNA
cccaccggatccacggccacc

SEQ ID NO: 45336 - RNA, 21 nt, synthetic construct
  source 1..21: mol_type = other RNA
tctccagtccagggactgcaa

SEQ ID NO: 45337 - RNA, 21 nt, synthetic construct
  source 1..21: mol_type = other RNA
cccacggccaccatgtccaca

SEQ ID NO: 45338 - RNA, 21 nt, synthetic construct
  source 1..21: mol_type = other RNA
tccagagactgtccacacctc

SEQ ID NO: 45339 - RNA, 21 nt, synthetic construct
  source 1..21: mol_type = other RNA
ccagagactgtccacacctcc

SEQ ID NO: 45340 - RNA, 21 nt, synthetic construct
  source 1..21: mol_type = other RNA
cgaacaccacggccaccacac

SEQ ID NO: 45341 - RNA, 21 nt, synthetic construct
  source 1..21: mol_type = other RNA
aacaccacggccaccacacac

SEQ ID NO: 45342 - RNA, 21 nt, synthetic construct
  source 1..21: mol_type = other RNA
acaccacggccaccacacacg

SEQ ID NO: 45343 - RNA, 21 nt, synthetic construct
  source 1..21: mol_type = other RNA
acccccttctccagggacgac

SEQ ID NO: 45344 - RNA, 21 nt, synthetic construct
  source 1..21: mol_type = other RNA
ttggcctggtctgcaggaacc

SEQ ID NO: 45345 - RNA, 21 nt, synthetic construct
  source 1..21: mol_type = other RNA
cgtgagcaggtggggaagttc

SEQ ID NO: 45346 - RNA, 21 nt, synthetic construct
  source 1..21: mol_type = other RNA
tcctccagtccaaggactgca

SEQ ID NO: 45347 - RNA, 21 nt, synthetic construct
  source 1..21: mol_type = other RNA
caaatccacagctaccagctt

SEQ ID NO: 45348 - RNA, 21 nt, synthetic construct
  source 1..21: mol_type = other RNA
ccacagctaccagctttacac

SEQ ID NO: 45349 - RNA, 21 nt, synthetic construct
  source 1..21: mol_type = other RNA
tcctccactccggagaccacc

SEQ ID NO: 45350 - RNA, 21 nt, synthetic construct
  source 1..21: mol_type = other RNA
cctccactccggagaccaccc

SEQ ID NO: 45351 - RNA, 21 nt, synthetic construct
  source 1..21: mol_type = other RNA
ccacagcagccactacaactg

SEQ ID NO: 45352 - RNA, 21 nt, synthetic construct
  source 1..21: mol_type = other RNA
cccaccggatccacggccacc

SEQ ID NO: 45353 - RNA, 21 nt, synthetic construct
  source 1..21: mol_type = other RNA
ccaccacacccacagtcatca

SEQ ID NO: 45354 - RNA, 21 nt, synthetic construct
  source 1..21: mol_type = other RNA
ctccagagccactccctcctc

SEQ ID NO: 45355 - RNA, 21 nt, synthetic construct
  source 1..21: mol_type = other RNA
cctccagtccagggactgcaa

SEQ ID NO: 45356 - RNA, 21 nt, synthetic construct
  source 1..21: mol_type = other RNA
cccacggccaccatgtccaca

SEQ ID NO: 45357 - RNA, 21 nt, synthetic construct
  source 1..21: mol_type = other RNA
tccagagactgtccacacctc

SEQ ID NO: 45358 - RNA, 21 nt, synthetic construct
  source 1..21: mol_type = other RNA
ccagagactgtccacacctcc

SEQ ID NO: 45359 - RNA, 21 nt, synthetic construct
  source 1..21: mol_type = other RNA
cagaggctccacggtgacccc

SEQ ID NO: 45360 - RNA, 21 nt, synthetic construct
  source 1..21: mol_type = other RNA
cgaacaccacggccaccacac

SEQ ID NO: 45361 - RNA, 21 nt, synthetic construct
  source 1..21: mol_type = other RNA
aacaccacggccaccacacac

SEQ ID NO: 45362 - RNA, 21 nt, synthetic construct
  source 1..21: mol_type = other RNA
acaccacggccaccacacacg

SEQ ID NO: 45363 - RNA, 21 nt, synthetic construct
  source 1..21: mol_type = other RNA
cctcgggcatcttgggcacca

SEQ ID NO: 45364 - RNA, 21 nt, synthetic construct
  source 1..21: mol_type = other RNA
acccccttctccagggacgac

SEQ ID NO: 45365 - RNA, 21 nt, synthetic construct
  source 1..21: mol_type = other RNA
cgggccacaccaggggcacct

SEQ ID NO: 45366 - RNA, 21 nt, synthetic construct
  source 1..21: mol_type = other RNA
ggcagtctgtgagcagcccct

SEQ ID NO: 45367 - RNA, 21 nt, synthetic construct
  source 1..21: mol_type = other RNA
ttggcctggtctgcaggaacc

SEQ ID NO: 45368 - RNA, 21 nt, synthetic construct
  source 1..21: mol_type = other RNA
cgtgagcaggtggggaagttc

SEQ ID NO: 45369 - RNA, 21 nt, synthetic construct
  source 1..21: mol_type = other RNA
cccaccggatccacggccacc

SEQ ID NO: 45370 - RNA, 21 nt, synthetic construct
  source 1..21: mol_type = other RNA
tctccagtccagggactgcaa

SEQ ID NO: 45371 - RNA, 21 nt, synthetic construct
  source 1..21: mol_type = other RNA
cccacggccaccatgtccaca

SEQ ID NO: 45372 - RNA, 21 nt, synthetic construct
  source 1..21: mol_type = other RNA
ctctgtggccaccccctcttc

SEQ ID NO: 45373 - RNA, 21 nt, synthetic construct
  source 1..21: mol_type = other RNA
cgaacaccacggccaccacac

SEQ ID NO: 45374 - RNA, 21 nt, synthetic construct
  source 1..21: mol_type = other RNA
aacaccacggccaccacacac

SEQ ID NO: 45375 - RNA, 21 nt, synthetic construct
  source 1..21: mol_type = other RNA
acaccacggccaccacacacg

SEQ ID NO: 45376 - RNA, 21 nt, synthetic construct
  source 1..21: mol_type = other RNA
ggccacaccacggccacctcc

SEQ ID NO: 45377 - RNA, 21 nt, synthetic construct
  source 1..21: mol_type = other RNA
ttggcctggtctgcaggaacc

SEQ ID NO: 45378 - RNA, 21 nt, synthetic construct
  source 1..21: mol_type = other RNA
cgtgagcaggtggggaagttc

SEQ ID NO: 45379 - RNA, 21 nt, synthetic construct
  source 1..21: mol_type = other RNA
tcctccagtccaaggactgca

SEQ ID NO: 45380 - RNA, 21 nt, synthetic construct
  source 1..21: mol_type = other RNA
cagaccaccacacccgtggcc

SEQ ID NO: 45381 - RNA, 21 nt, synthetic construct
  source 1..21: mol_type = other RNA
tcctccactccggagaccacc

SEQ ID NO: 45382 - RNA, 21 nt, synthetic construct
  source 1..21: mol_type = other RNA
cctccactccggagaccaccc

SEQ ID NO: 45383 - RNA, 21 nt, synthetic construct
  source 1..21: mol_type = other RNA
ccacagcagccactacaactg

SEQ ID NO: 45384 - RNA, 21 nt, synthetic construct
  source 1..21: mol_type = other RNA
ctgcgtccactggatccacgg

SEQ ID NO: 45385 - RNA, 21 nt, synthetic construct
  source 1..21: mol_type = other RNA
cccaccggatccacggccacc

SEQ ID NO: 45386 - RNA, 21 nt, synthetic construct
  source 1..21: mol_type = other RNA
cctccagtccagggactgcaa

SEQ ID NO: 45387 - RNA, 21 nt, synthetic construct
  source 1..21: mol_type = other RNA
cccacggccaccatgtccaca

SEQ ID NO: 45388 - RNA, 21 nt, synthetic construct
  source 1..21: mol_type = other RNA
tccagagactgtccacacctc

SEQ ID NO: 45389 - RNA, 21 nt, synthetic construct
  source 1..21: mol_type = other RNA
ccagagactgtccacacctcc

SEQ ID NO: 45390 - RNA, 21 nt, synthetic construct
  source 1..21: mol_type = other RNA
tcctccagtccaaggactgca

SEQ ID NO: 45391 - RNA, 21 nt, synthetic construct
  source 1..21: mol_type = other RNA
aaaatccacagctaccagctt

SEQ ID NO: 45392 - RNA, 21 nt, synthetic construct
  source 1..21: mol_type = other RNA
ccacagctaccagctttacac

SEQ ID NO: 45393 - RNA, 21 nt, synthetic construct
  source 1..21: mol_type = other RNA
acagaccaccacacccatgtc

SEQ ID NO: 45394 - RNA, 21 nt, synthetic construct
  source 1..21: mol_type = other RNA
tcctctactccagagaccacc

SEQ ID NO: 45395 - RNA, 21 nt, synthetic construct
  source 1..21: mol_type = other RNA
tccagagaccacccacacctc

SEQ ID NO: 45396 - RNA, 21 nt, synthetic construct
  source 1..21: mol_type = other RNA
acagccaccatgacaagggcc

SEQ ID NO: 45397 - RNA, 21 nt, synthetic construct
  source 1..21: mol_type = other RNA
ccactctggggacgacccgga

SEQ ID NO: 45398 - RNA, 21 nt, synthetic construct
  source 1..21: mol_type = other RNA
tcactgagctgaccacaacag

SEQ ID NO: 45399 - RNA, 21 nt, synthetic construct
  source 1..21: mol_type = other RNA
gtggtgaccaccatggccact

SEQ ID NO: 45400 - RNA, 21 nt, synthetic construct
  source 1..21: mol_type = other RNA
gaccgcttccagggcgcctgt

SEQ ID NO: 45401 - RNA, 21 nt, synthetic construct
  source 1..21: mol_type = other RNA
ttccagggcgcctgtcccacc

SEQ ID NO: 45402 - RNA, 21 nt, synthetic construct
  source 1..21: mol_type = other RNA
ctccgccccgctgtcctcgcc

SEQ ID NO: 45403 - RNA, 21 nt, synthetic construct
  source 1..21: mol_type = other RNA
gcagcatgtggggcggctccc

SEQ ID NO: 45404 - RNA, 21 nt, synthetic construct
  source 1..21: mol_type = other RNA
tgctggggaccaccaccatgc

SEQ ID NO: 45405 - RNA, 21 nt, synthetic construct
  source 1..21: mol_type = other RNA
ttcccggggagcggtgggtca

SEQ ID NO: 45406 - RNA, 21 nt, synthetic construct
  source 1..21: mol_type = other RNA
cgcccagggtcagcccccgcc

SEQ ID NO: 45407 - RNA, 21 nt, synthetic construct
  source 1..21: mol_type = other RNA
cccctgctgccccgagacggt

SEQ ID NO: 45408 - RNA, 21 nt, synthetic construct
  source 1..21: mol_type = other RNA
agcctgcctgtgtgcccgcca

SEQ ID NO: 45409 - RNA, 21 nt, synthetic construct
  source 1..21: mol_type = other RNA
tgcctgtgtgcccgccagggc

SEQ ID NO: 45410 - RNA, 21 nt, synthetic construct
  source 1..21: mol_type = other RNA
tgaggaggactcctgtcaagt

SEQ ID NO: 45411 - RNA, 21 nt, synthetic construct
  source 1..21: mol_type = other RNA
tcctgtggcaccagggctgcg

SEQ ID NO: 45412 - RNA, 21 nt, synthetic construct
  source 1..21: mol_type = other RNA
tggctcccccacacacccgtg

SEQ ID NO: 45413 - RNA, 21 nt, synthetic construct
  source 1..21: mol_type = other RNA
gcctcctctgcggagcccccc

SEQ ID NO: 45414 - RNA, 21 nt, synthetic construct
  source 1..21: mol_type = other RNA
acggccaggtcagagaggggt

SEQ ID NO: 45415 - RNA, 21 nt, synthetic construct
  source 1..21: mol_type = other RNA
ggtcagagaggggtcagcatc

SEQ ID NO: 45416 - RNA, 21 nt, synthetic construct
  source 1..21: mol_type = other RNA
gtggtgccgcaggcagagacc

SEQ ID NO: 45417 - RNA, 21 nt, synthetic construct
  source 1..21: mol_type = other RNA
gtcctgctggacccaaagcct

SEQ ID NO: 45418 - RNA, 21 nt, synthetic construct
  source 1..21: mol_type = other RNA
ggcacttatgccagcagccta

SEQ ID NO: 45419 - RNA, 21 nt, synthetic construct
  source 1..21: mol_type = other RNA
tgcaaccttcccaggcgccct

SEQ ID NO: 45420 - RNA, 21 nt, synthetic construct
  source 1..21: mol_type = other RNA
tccagggacaacacccatcac

SEQ ID NO: 45421 - RNA, 21 nt, synthetic construct
  source 1..21: mol_type = other RNA
ccccagcgcgcgcagctctgc

SEQ ID NO: 45422 - RNA, 21 nt, synthetic construct
  source 1..21: mol_type = other RNA
cctccaccccgggaacagctc

SEQ ID NO: 45423 - RNA, 21 nt, synthetic construct
  source 1..21: mol_type = other RNA
cctccaccccgggaacagctc

SEQ ID NO: 45424 - RNA, 21 nt, synthetic construct
  source 1..21: mol_type = other RNA
gcagggcacaccatggatggc

SEQ ID NO: 45425 - RNA, 21 nt, synthetic construct
  source 1..21: mol_type = other RNA
ggctcagccatcctgcacacc

SEQ ID NO: 45426 - RNA, 21 nt, synthetic construct
  source 1..21: mol_type = other RNA
cccttccactcgaactgcatg

SEQ ID NO: 45427 - RNA, 21 nt, synthetic construct
  source 1..21: mol_type = other RNA
ccttccactcgaactgcatgt

SEQ ID NO: 45428 - RNA, 21 nt, synthetic construct
  source 1..21: mol_type = other RNA
aggcagctgcgagtacatctt

SEQ ID NO: 45429 - RNA, 21 nt, synthetic construct
  source 1..21: mol_type = other RNA
atcggccccaataaccacggt

SEQ ID NO: 45430 - RNA, 21 nt, synthetic construct
  source 1..21: mol_type = other RNA
tccacagtgctgaccacgaag

SEQ ID NO: 45431 - RNA, 21 nt, synthetic construct
  source 1..21: mol_type = other RNA
tccacagtgctgaccacgaag

SEQ ID NO: 45432 - RNA, 21 nt, synthetic construct
  source 1..21: mol_type = other RNA
agcggtgggtcagcaactgcc

SEQ ID NO: 45433 - RNA, 21 nt, synthetic construct
  source 1..21: mol_type = other RNA
ccttccagcactgagaagcac

SEQ ID NO: 45434 - RNA, 21 nt, synthetic construct
  source 1..21: mol_type = other RNA
ccttccagcactgagaagcac

SEQ ID NO: 45435 - RNA, 21 nt, synthetic construct
  source 1..21: mol_type = other RNA
ccttccagcactgagaagcac

SEQ ID NO: 45436 - RNA, 21 nt, synthetic construct
  source 1..21: mol_type = other RNA
ccttccagcactgagaagcac

SEQ ID NO: 45437 - RNA, 21 nt, synthetic construct
  source 1..21: mol_type = other RNA
ccttccagcactgagaagcac

SEQ ID NO: 45438 - RNA, 21 nt, synthetic construct
  source 1..21: mol_type = other RNA
acagggtgtgcagcccccatg

SEQ ID NO: 45439 - RNA, 21 nt, synthetic construct
  source 1..21: mol_type = other RNA
ggtggcgagagggccgggtgg

SEQ ID NO: 45440 - RNA, 21 nt, synthetic construct
  source 1..21: mol_type = other RNA
ctggctgagctgcggaagtgc

SEQ ID NO: 45441 - RNA, 21 nt, synthetic construct
  source 1..21: mol_type = other RNA
aacagaccaccacacccatgg

SEQ ID NO: 45442 - RNA, 21 nt, synthetic construct
  source 1..21: mol_type = other RNA
cacagaccaccacacccatgt

SEQ ID NO: 45443 - RNA, 21 nt, synthetic construct
  source 1..21: mol_type = other RNA
gacggcgtctgcaccaagtac

SEQ ID NO: 45444 - RNA, 21 nt, synthetic construct
  source 1..21: mol_type = other RNA
cacctatgaggacaggaccta

SEQ ID NO: 45445 - RNA, 21 nt, synthetic construct
  source 1..21: mol_type = other RNA
tacgccaaccagacctgtggc

SEQ ID NO: 45446 - RNA, 21 nt, synthetic construct
  source 1..21: mol_type = other RNA
cgcgctgtcctcctatgtgca

SEQ ID NO: 45447 - RNA, 21 nt, synthetic construct
  source 1..21: mol_type = other RNA
tatgtcctcatgagagagatc

SEQ ID NO: 45448 - RNA, 21 nt, synthetic construct
  source 1..21: mol_type = other RNA
agcacctgcccatcaaagtgt

SEQ ID NO: 45449 - RNA, 21 nt, synthetic construct
  source 1..21: mol_type = other RNA
ggactaccccaagtctgaaca

SEQ ID NO: 45450 - RNA, 21 nt, synthetic construct
  source 1..21: mol_type = other RNA
cgtgggctgtttcagcacaca

SEQ ID NO: 45451 - RNA, 21 nt, synthetic construct
  source 1..21: mol_type = other RNA
ggactacaagggcagggtctg

SEQ ID NO: 45452 - RNA, 21 nt, synthetic construct
  source 1..21: mol_type = other RNA
gaccacagcaaccgaaaagac

SEQ ID NO: 45453 - RNA, 21 nt, synthetic construct
  source 1..21: mol_type = other RNA
aaagtgctgaccaccacggcc

SEQ ID NO: 45454 - RNA, 21 nt, synthetic construct
  source 1..21: mol_type = other RNA
gtgggagtgcagccaccggct

SEQ ID NO: 45455 - RNA, 21 nt, synthetic construct
  source 1..21: mol_type = other RNA
ggggagcctcaggaaaaccgg

SEQ ID NO: 45456 - RNA, 21 nt, synthetic construct
  source 1..21: mol_type = other RNA
ctgccccccaggcacggtgct

SEQ ID NO: 45457 - RNA, 21 nt, synthetic construct
  source 1..21: mol_type = other RNA
gctttgaggacccctgctccc

SEQ ID NO: 45458 - RNA, 21 nt, synthetic construct
  source 1..21: mol_type = other RNA
gggcacctgcgtggcctacgg

SEQ ID NO: 45459 - RNA, 21 nt, synthetic construct
  source 1..21: mol_type = other RNA
gactgcaccaggactacaagg

SEQ ID NO: 45460 - RNA, 21 nt, synthetic construct
  source 1..21: mol_type = other RNA
cccccactccacgacaagccc

SEQ ID NO: 45461 - RNA, 21 nt, synthetic construct
  source 1..21: mol_type = other RNA
ccccactccacgacaagcccg

SEQ ID NO: 45462 - RNA, 21 nt, synthetic construct
  source 1..21: mol_type = other RNA
cccagcagccccacatcggcc

SEQ ID NO: 45463 - RNA, 21 nt, synthetic construct
  source 1..21: mol_type = other RNA
cccagcagccccacatcggcc

SEQ ID NO: 45464 - RNA, 21 nt, synthetic construct
  source 1..21: mol_type = other RNA
cccagcagccccacatcggcc

SEQ ID NO: 45465 - RNA, 21 nt, synthetic construct
  source 1..21: mol_type = other RNA
cccagcagccccacatcggcc

SEQ ID NO: 45466 - RNA, 21 nt, synthetic construct
  source 1..21: mol_type = other RNA
atgtcctcatgagagagatcc

SEQ ID NO: 45467 - RNA, 21 nt, synthetic construct
  source 1..21: mol_type = other RNA
gtgtacctgcctctctgggga

SEQ ID NO: 45468 - RNA, 21 nt, synthetic construct
  source 1..21: mol_type = other RNA
gggacacccaggacccaacgg

SEQ ID NO: 45469 - RNA, 21 nt, synthetic construct
  source 1..21: mol_type = other RNA
tgctggggccggcctttgcgg

SEQ ID NO: 45470 - RNA, 21 nt, synthetic construct
  source 1..21: mol_type = other RNA
cccactccacgacaagcccgg

SEQ ID NO: 45471 - RNA, 21 nt, synthetic construct
  source 1..21: mol_type = other RNA
tctgtgtccctgcgcccatgg

SEQ ID NO: 45472 - RNA, 21 nt, synthetic construct
  source 1..21: mol_type = other RNA
cacagccttgaggcctgcacc

SEQ ID NO: 45473 - RNA, 21 nt, synthetic construct
  source 1..21: mol_type = other RNA
gtcctgggaccggaagaccag

SEQ ID NO: 45474 - RNA, 21 nt, synthetic construct
  source 1..21: mol_type = other RNA
acccgtcactgtcttccccag

SEQ ID NO: 45475 - RNA, 21 nt, synthetic construct
  source 1..21: mol_type = other RNA
aacctgcagaagttggatggg

SEQ ID NO: 45476 - RNA, 21 nt, synthetic construct
  source 1..21: mol_type = other RNA
tcacgcactctggctgcctgc

SEQ ID NO: 45477 - RNA, 21 nt, synthetic construct
  source 1..21: mol_type = other RNA
aacttcaaccagaaccaggct

SEQ ID NO: 45478 - RNA, 21 nt, synthetic construct
  source 1..21: mol_type = other RNA
gccacgacgcgggcctgtgtg

SEQ ID NO: 45479 - RNA, 21 nt, synthetic construct
  source 1..21: mol_type = other RNA
aacgccattcaccttcaccac

SEQ ID NO: 45480 - RNA, 21 nt, synthetic construct
  source 1..21: mol_type = other RNA
aggccgagagcttccccaact

SEQ ID NO: 45481 - RNA, 21 nt, synthetic construct
  source 1..21: mol_type = other RNA
caccacccacatcacagagcc

SEQ ID NO: 45482 - RNA, 21 nt, synthetic construct
  source 1..21: mol_type = other RNA
caccacccacatcacagagcc

SEQ ID NO: 45483 - RNA, 21 nt, synthetic construct
  source 1..21: mol_type = other RNA
caccacccacatcacagagcc

SEQ ID NO: 45484 - RNA, 21 nt, synthetic construct
  source 1..21: mol_type = other RNA
caccacccacatcacagagcc

SEQ ID NO: 45485 - RNA, 21 nt, synthetic construct
  source 1..21: mol_type = other RNA
cctcttccacaacaacaccga

SEQ ID NO: 45486 - RNA, 21 nt, synthetic construct
  source 1..21: mol_type = other RNA
ggaagttcaagatgtgcttca

SEQ ID NO: 45487 - RNA, 21 nt, synthetic construct
  source 1..21: mol_type = other RNA
ggaagttcaagatgtgcttca

SEQ ID NO: 45488 - RNA, 21 nt, synthetic construct
  source 1..21: mol_type = other RNA
ggaagttcaagatgtgcttca

SEQ ID NO: 45489 - RNA, 21 nt, synthetic construct
  source 1..21: mol_type = other RNA
ggaagttcaagatgtgcttca

SEQ ID NO: 45490 - RNA, 21 nt, synthetic construct
  source 1..21: mol_type = other RNA
caaccagaaccaggctgacga

SEQ ID NO: 45491 - RNA, 21 nt, synthetic construct
  source 1..21: mol_type = other RNA
ggggcaccctgcctaaaaacc

SEQ ID NO: 45492 - RNA, 21 nt, synthetic construct
  source 1..21: mol_type = other RNA
cctaaggacatagagtgccag

SEQ ID NO: 45493 - RNA, 21 nt, synthetic construct
  source 1..21: mol_type = other RNA
ccctcctctgccctagggacc

SEQ ID NO: 45494 - RNA, 21 nt, synthetic construct
  source 1..21: mol_type = other RNA
gggccgtctgtgagcagcccc

SEQ ID NO: 45495 - RNA, 21 nt, synthetic construct
  source 1..21: mol_type = other RNA
tgccctcctccactccgggga

SEQ ID NO: 45496 - RNA, 21 nt, synthetic construct
  source 1..21: mol_type = other RNA
ccctcctctgccctagggacc

SEQ ID NO: 45497 - RNA, 21 nt, synthetic construct
  source 1..21: mol_type = other RNA
caggaccacggccacggccac

SEQ ID NO: 45498 - RNA, 21 nt, synthetic construct
  source 1..21: mol_type = other RNA
gggccgtctgtgagcagcccc

SEQ ID NO: 45499 - RNA, 21 nt, synthetic construct
  source 1..21: mol_type = other RNA
ccctcctctgccctagggacc

SEQ ID NO: 45500 - RNA, 21 nt, synthetic construct
  source 1..21: mol_type = other RNA
ccctcctctgccctagggacc

SEQ ID NO: 45501 - RNA, 21 nt, synthetic construct
  source 1..21: mol_type = other RNA
caggaccacggccacggccac

SEQ ID NO: 45502 - RNA, 21 nt, synthetic construct
  source 1..21: mol_type = other RNA
gggccgtctgtgagcagcccc

SEQ ID NO: 45503 - RNA, 21 nt, synthetic construct
  source 1..21: mol_type = other RNA
tgccctcctccactccgggga

SEQ ID NO: 45504 - RNA, 21 nt, synthetic construct
  source 1..21: mol_type = other RNA
caagcacctgcccatcaaagt

SEQ ID NO: 45505 - RNA, 21 nt, synthetic construct
  source 1..21: mol_type = other RNA
gggggagcctcaggaaaaccg

SEQ ID NO: 45506 - RNA, 21 nt, synthetic construct
  source 1..21: mol_type = other RNA
cgactgcaccaggactacaag

SEQ ID NO: 45507 - RNA, 21 nt, synthetic construct
  source 1..21: mol_type = other RNA
cccggacccgctgcccttgcc

SEQ ID NO: 45508 - RNA, 21 nt, synthetic construct
  source 1..21: mol_type = other RNA
tccacagaacccactgtccca

SEQ ID NO: 45509 - RNA, 21 nt, synthetic construct
  source 1..21: mol_type = other RNA
gtcccccactccacgacaagc

SEQ ID NO: 45510 - RNA, 21 nt, synthetic construct
  source 1..21: mol_type = other RNA
gtgtgtccgcgaggtctgccg

SEQ ID NO: 45511 - RNA, 21 nt, synthetic construct
  source 1..21: mol_type = other RNA
ggccccaggtaccaccacctg

SEQ ID NO: 45512 - RNA, 21 nt, synthetic construct
  source 1..21: mol_type = other RNA
acgttctgtccaagaaatgtg

SEQ ID NO: 45513 - RNA, 21 nt, synthetic construct
  source 1..21: mol_type = other RNA
agtgcgtggcccagtgtggct

SEQ ID NO: 45514 - RNA, 21 nt, synthetic construct
  source 1..21: mol_type = other RNA
tggacagagtggtttgatgag

SEQ ID NO: 45515 - RNA, 21 nt, synthetic construct
  source 1..21: mol_type = other RNA
ggacagagtggtttgatgagg

SEQ ID NO: 45516 - RNA, 21 nt, synthetic construct
  source 1..21: mol_type = other RNA
tgtgatctgatgctgagccag

SEQ ID NO: 45517 - RNA, 21 nt, synthetic construct
  source 1..21: mol_type = other RNA
cactgtcttccccagcctgag

SEQ ID NO: 45518 - RNA, 21 nt, synthetic construct
  source 1..21: mol_type = other RNA
cctgccggaaccccagtgggc

SEQ ID NO: 45519 - RNA, 21 nt, synthetic construct
  source 1..21: mol_type = other RNA
aatccgtgtgttctgctgcaa

SEQ ID NO: 45520 - RNA, 21 nt, synthetic construct
  source 1..21: mol_type = other RNA
aatccgtgtgttctgctgcaa

SEQ ID NO: 45521 - RNA, 21 nt, synthetic construct
  source 1..21: mol_type = other RNA
aatccgtgtgttctgctgcaa

SEQ ID NO: 45522 - RNA, 21 nt, synthetic construct
  source 1..21: mol_type = other RNA
aatccgtgtgttctgctgcaa

SEQ ID NO: 45523 - RNA, 21 nt, synthetic construct
  source 1..21: mol_type = other RNA
cgcagctgcccctgtcggcag

SEQ ID NO: 45524 - RNA, 21 nt, synthetic construct
  source 1..21: mol_type = other RNA
gcagctgcccctgtcggcagc

SEQ ID NO: 45525 - RNA, 21 nt, synthetic construct
  source 1..21: mol_type = other RNA
cctctgccctagggaccaccc

SEQ ID NO: 45526 - RNA, 21 nt, synthetic construct
  source 1..21: mol_type = other RNA
cctctgccctagggaccaccc

SEQ ID NO: 45527 - RNA, 21 nt, synthetic construct
  source 1..21: mol_type = other RNA
cctctgccctagggaccaccc

SEQ ID NO: 45528 - RNA, 21 nt, synthetic construct
  source 1..21: mol_type = other RNA
cctctgccctagggaccaccc

SEQ ID NO: 45529 - RNA, 21 nt, synthetic construct
  source 1..21: mol_type = other RNA
cgaggccacctacaagcctgg

SEQ ID NO: 45530 - RNA, 21 nt, synthetic construct
  source 1..21: mol_type = other RNA
gccacttcatcacctttgatg

SEQ ID NO: 45531 - RNA, 21 nt, synthetic construct
  source 1..21: mol_type = other RNA
tggccgtgtcctgggaccgga

SEQ ID NO: 45532 - RNA, 21 nt, synthetic construct
  source 1..21: mol_type = other RNA
cttcaatgaggaccagatgaa

SEQ ID NO: 45533 - RNA, 21 nt, synthetic construct
  source 1..21: mol_type = other RNA
ccttgaggcctgcacctgcac

SEQ ID NO: 45534 - RNA, 21 nt, synthetic construct
  source 1..21: mol_type = other RNA
ctctgccctagggaccaccca

SEQ ID NO: 45535 - RNA, 21 nt, synthetic construct
  source 1..21: mol_type = other RNA
ctctgccctagggaccaccca

SEQ ID NO: 45536 - RNA, 21 nt, synthetic construct
  source 1..21: mol_type = other RNA
ctctgccctagggaccaccca

SEQ ID NO: 45537 - RNA, 21 nt, synthetic construct
  source 1..21: mol_type = other RNA
ctctgccctagggaccaccca

SEQ ID NO: 45538 - RNA, 21 nt, synthetic construct
  source 1..21: mol_type = other RNA
gtcctcctcagtcctcaccac

SEQ ID NO: 45539 - RNA, 21 nt, synthetic construct
  source 1..21: mol_type = other RNA
cccacttctctactccctgct

SEQ ID NO: 45540 - RNA, 21 nt, synthetic construct
  source 1..21: mol_type = other RNA
ccggggagtgtgcagtgactg

SEQ ID NO: 45541 - RNA, 21 nt, synthetic construct
  source 1..21: mol_type = other RNA
cgccaacacctggaaggccca

SEQ ID NO: 45542 - RNA, 21 nt, synthetic construct
  source 1..21: mol_type = other RNA
tgcacggctgtggctgcctac

SEQ ID NO: 45543 - RNA, 21 nt, synthetic construct
  source 1..21: mol_type = other RNA
caggacgtcatctacaacacc

SEQ ID NO: 45544 - RNA, 21 nt, synthetic construct
  source 1..21: mol_type = other RNA
cagcctaaggacatagagtgc

SEQ ID NO: 45545 - RNA, 21 nt, synthetic construct
  source 1..21: mol_type = other RNA
cagggctttgagtacaagaga

SEQ ID NO: 45546 - RNA, 21 nt, synthetic construct
  source 1..21: mol_type = other RNA
ccacgaggagacggtgccctt

SEQ ID NO: 45547 - RNA, 21 nt, synthetic construct
  source 1..21: mol_type = other RNA
gtgtccctgcgcccatggctc

SEQ ID NO: 45548 - RNA, 21 nt, synthetic construct
  source 1..21: mol_type = other RNA
cctatgtcctcatgagagaga

SEQ ID NO: 45549 - RNA, 21 nt, synthetic construct
  source 1..21: mol_type = other RNA
aagctcttcgtggagagctac

SEQ ID NO: 45550 - RNA, 21 nt, synthetic construct
  source 1..21: mol_type = other RNA
tgtggcatgtcctggaactcc

SEQ ID NO: 45551 - RNA, 21 nt, synthetic construct
  source 1..21: mol_type = other RNA
atgaggactaccccaagtctg

SEQ ID NO: 45552 - RNA, 21 nt, synthetic construct
  source 1..21: mol_type = other RNA
ctgcaccaggactacaagggc

SEQ ID NO: 45553 - RNA, 21 nt, synthetic construct
  source 1..21: mol_type = other RNA
cccttcttcaatgaggaccag

SEQ ID NO: 45554 - RNA, 21 nt, synthetic construct
  source 1..21: mol_type = other RNA
cctccctcagtgccagcacgg

SEQ ID NO: 45555 - RNA, 21 nt, synthetic construct
  source 1..21: mol_type = other RNA
tgatcctgtttgaccaaattc

SEQ ID NO: 45556 - RNA, 21 nt, synthetic construct
  source 1..21: mol_type = other RNA
cgccgcgctgtcctcctatgt

SEQ ID NO: 45557 - RNA, 21 nt, synthetic construct
  source 1..21: mol_type = other RNA
tgtgggaccaccggcaccacc

SEQ ID NO: 45558 - RNA, 21 nt, synthetic construct
  source 1..21: mol_type = other RNA
ctccaaggccatcaagctctt

SEQ ID NO: 45559 - RNA, 21 nt, synthetic construct
  source 1..21: mol_type = other RNA
gccatcaatgactttgccacg

SEQ ID NO: 45560 - RNA, 21 nt, synthetic construct
  source 1..21: mol_type = other RNA
cctgccgctcccaggttgact

SEQ ID NO: 45561 - RNA, 21 nt, synthetic construct
  source 1..21: mol_type = other RNA
taccagccctgcggggcaccc

SEQ ID NO: 45562 - RNA, 21 nt, synthetic construct
  source 1..21: mol_type = other RNA
ggcctggtgtgcaggaactgg

SEQ ID NO: 45563 - RNA, 21 nt, synthetic construct
  source 1..21: mol_type = other RNA
cgtggaatgcagcctggactt

SEQ ID NO: 45564 - RNA, 21 nt, synthetic construct
  source 1..21: mol_type = other RNA
cgtggaatgcagcctggactt

SEQ ID NO: 45565 - RNA, 21 nt, synthetic construct
  source 1..21: mol_type = other RNA
cgtggaatgcagcctggactt

SEQ ID NO: 45566 - RNA, 21 nt, synthetic construct
  source 1..21: mol_type = other RNA
cgtggaatgcagcctggactt

SEQ ID NO: 45567 - RNA, 21 nt, synthetic construct
  source 1..21: mol_type = other RNA
ctgcagggcatttggacagtt

SEQ ID NO: 45568 - RNA, 21 nt, synthetic construct
  source 1..21: mol_type = other RNA
cctggagaactgcacggtggc

SEQ ID NO: 45569 - RNA, 21 nt, synthetic construct
  source 1..21: mol_type = other RNA
gcgtgaacaagcacctgccca

SEQ ID NO: 45570 - RNA, 21 nt, synthetic construct
  source 1..21: mol_type = other RNA
cgtgaacaagcacctgcccat

SEQ ID NO: 45571 - RNA, 21 nt, synthetic construct
  source 1..21: mol_type = other RNA
tccacctttgacggcacctct

SEQ ID NO: 45572 - RNA, 21 nt, synthetic construct
  source 1..21: mol_type = other RNA
agcctggtgtccccctgcggg

SEQ ID NO: 45573 - RNA, 21 nt, synthetic construct
  source 1..21: mol_type = other RNA
agcctggtgtccccctgcggg

SEQ ID NO: 45574 - RNA, 21 nt, synthetic construct
  source 1..21: mol_type = other RNA
agcctggtgtccccctgcggg

SEQ ID NO: 45575 - RNA, 21 nt, synthetic construct
  source 1..21: mol_type = other RNA
ggaacctgcagaagttggatg

SEQ ID NO: 45576 - RNA, 21 nt, synthetic construct
  source 1..21: mol_type = other RNA
ccaggaacagctttgaggacc

SEQ ID NO: 45577 - RNA, 21 nt, synthetic construct
  source 1..21: mol_type = other RNA
ccccaagtctgaacaacttgg

SEQ ID NO: 45578 - RNA, 21 nt, synthetic construct
  source 1..21: mol_type = other RNA
ggacacctgctccaaccccca

SEQ ID NO: 45579 - RNA, 21 nt, synthetic construct
  source 1..21: mol_type = other RNA
gggaacctgcagaagttggat

SEQ ID NO: 45580 - RNA, 21 nt, synthetic construct
  source 1..21: mol_type = other RNA
ggcagccaacatcaccctgtt

SEQ ID NO: 45581 - RNA, 21 nt, synthetic construct
  source 1..21: mol_type = other RNA
gcagccttcgccaacacctgg

SEQ ID NO: 45582 - RNA, 21 nt, synthetic construct
  source 1..21: mol_type = other RNA
caggtgaatgagacctggacc

SEQ ID NO: 45583 - RNA, 21 nt, synthetic construct
  source 1..21: mol_type = other RNA
gctgtcctcctatgtgcacgc

SEQ ID NO: 45584 - RNA, 21 nt, synthetic construct
  source 1..21: mol_type = other RNA
tcccccactccacgacaagcc

SEQ ID NO: 45585 - RNA, 21 nt, synthetic construct
  source 1..21: mol_type = other RNA
ccactccacgacaagcccggc

SEQ ID NO: 45586 - RNA, 21 nt, synthetic construct
  source 1..21: mol_type = other RNA
gccagcaggtggactgtgacc

SEQ ID NO: 45587 - RNA, 21 nt, synthetic construct
  source 1..21: mol_type = other RNA
gcctggtgtccccctgcggga

SEQ ID NO: 45588 - RNA, 21 nt, synthetic construct
  source 1..21: mol_type = other RNA
gcctggtgtccccctgcggga

SEQ ID NO: 45589 - RNA, 21 nt, synthetic construct
  source 1..21: mol_type = other RNA
gcctggtgtccccctgcggga

SEQ ID NO: 45590 - RNA, 21 nt, synthetic construct
  source 1..21: mol_type = other RNA
gtgtcctcctcagtcctcacc

SEQ ID NO: 45591 - RNA, 21 nt, synthetic construct
  source 1..21: mol_type = other RNA
tgtttgtcaggctggaccccg

SEQ ID NO: 45592 - RNA, 21 nt, synthetic construct
  source 1..21: mol_type = other RNA
ctgtcctcctatgtgcacgcc

SEQ ID NO: 45593 - RNA, 21 nt, synthetic construct
  source 1..21: mol_type = other RNA
gatggccgtgtcctgggaccg

SEQ ID NO: 45594 - RNA, 21 nt, synthetic construct
  source 1..21: mol_type = other RNA
tggaccctggagaactgcacg

SEQ ID NO: 45595 - RNA, 21 nt, synthetic construct
  source 1..21: mol_type = other RNA
tgatgctgagccaggtctttg

SEQ ID NO: 45596 - RNA, 21 nt, synthetic construct
  source 1..21: mol_type = other RNA
agtgctgaccaccacggccac

SEQ ID NO: 45597 - RNA, 21 nt, synthetic construct
  source 1..21: mol_type = other RNA
caggacctgccgtgccctggc

SEQ ID NO: 45598 - RNA, 21 nt, synthetic construct
  source 1..21: mol_type = other RNA
caaccccaagcccttccactc

SEQ ID NO: 45599 - RNA, 21 nt, synthetic construct
  source 1..21: mol_type = other RNA
atggcaacaccctcctctagc

SEQ ID NO: 45600 - RNA, 21 nt, synthetic construct
  source 1..21: mol_type = other RNA
atggcaacaccctcctctagc

SEQ ID NO: 45601 - RNA, 21 nt, synthetic construct
  source 1..21: mol_type = other RNA
atggcaacaccctcctctagc

SEQ ID NO: 45602 - RNA, 21 nt, synthetic construct
  source 1..21: mol_type = other RNA
atggcaacaccctcctctagc

SEQ ID NO: 45603 - RNA, 21 nt, synthetic construct
  source 1..21: mol_type = other RNA
atggcaacaccctcctctagc

SEQ ID NO: 45604 - RNA, 21 nt, synthetic construct
  source 1..21: mol_type = other RNA
ctgccagtcctgcgtgtgtga

SEQ ID NO: 45605 - RNA, 21 nt, synthetic construct
  source 1..21: mol_type = other RNA
gaggacagtgccctgctggag

SEQ ID NO: 45606 - RNA, 21 nt, synthetic construct
  source 1..21: mol_type = other RNA
agtgccaggacctgccgtgcc

SEQ ID NO: 45607 - RNA, 21 nt, synthetic construct
  source 1..21: mol_type = other RNA
ggccagatgtgcggcctgtgt

SEQ ID NO: 45608 - RNA, 21 nt, synthetic construct
  source 1..21: mol_type = other RNA
cgggcgcctgtgtgcccgccc

SEQ ID NO: 45609 - RNA, 21 nt, synthetic construct
  source 1..21: mol_type = other RNA
ggcccaggactactgtgggga

SEQ ID NO: 45610 - RNA, 21 nt, synthetic construct
  source 1..21: mol_type = other RNA
cgtcaccgagaacatcccctg

SEQ ID NO: 45611 - RNA, 21 nt, synthetic construct
  source 1..21: mol_type = other RNA
tgcctggtggacctgcctggc

SEQ ID NO: 45612 - RNA, 21 nt, synthetic construct
  source 1..21: mol_type = other RNA
gtggcatccagtgcgctcaca

SEQ ID NO: 45613 - RNA, 21 nt, synthetic construct
  source 1..21: mol_type = other RNA
caagtctgaacaacttggagg

SEQ ID NO: 45614 - RNA, 21 nt, synthetic construct
  source 1..21: mol_type = other RNA
agcaggtggggaagttcaaga

SEQ ID NO: 45615 - RNA, 21 nt, synthetic construct
  source 1..21: mol_type = other RNA
agctaccagctttacagccat

SEQ ID NO: 45616 - RNA, 21 nt, synthetic construct
  source 1..21: mol_type = other RNA
agcaggtggggaagttcaaga

SEQ ID NO: 45617 - RNA, 21 nt, synthetic construct
  source 1..21: mol_type = other RNA
agcaggtggggaagttcaaga

SEQ ID NO: 45618 - RNA, 21 nt, synthetic construct
  source 1..21: mol_type = other RNA
agctaccagctttacagccat

SEQ ID NO: 45619 - RNA, 21 nt, synthetic construct
  source 1..21: mol_type = other RNA
agcaggtggggaagttcaaga

SEQ ID NO: 45620 - RNA, 21 nt, synthetic construct
  source 1..21: mol_type = other RNA
agctaccagctttacagccat

SEQ ID NO: 45621 - RNA, 21 nt, synthetic construct
  source 1..21: mol_type = other RNA
tgggaacctgcagaagttgga

SEQ ID NO: 45622 - RNA, 21 nt, synthetic construct
  source 1..21: mol_type = other RNA
ctgtgccgctgccccacctgc

SEQ ID NO: 45623 - RNA, 21 nt, synthetic construct
  source 1..21: mol_type = other RNA
acgcactctggctgcctgccc

SEQ ID NO: 45624 - RNA, 21 nt, synthetic construct
  source 1..21: mol_type = other RNA
cccctcgggcagtgcccctgc

SEQ ID NO: 45625 - RNA, 21 nt, synthetic construct
  source 1..21: mol_type = other RNA
acgctcagcctggacggcggg

SEQ ID NO: 45626 - RNA, 21 nt, synthetic construct
  source 1..21: mol_type = other RNA
tgtgggaacttcaaccagaac

SEQ ID NO: 45627 - RNA, 21 nt, synthetic construct
  source 1..21: mol_type = other RNA
gtgggaacttcaaccagaacc

SEQ ID NO: 45628 - RNA, 21 nt, synthetic construct
  source 1..21: mol_type = other RNA
gaacagctttgaggacccctg

SEQ ID NO: 45629 - RNA, 21 nt, synthetic construct
  source 1..21: mol_type = other RNA
caccaagtacatgcagaactg

SEQ ID NO: 45630 - RNA, 21 nt, synthetic construct
  source 1..21: mol_type = other RNA
cacacgctggacgtgggctgt

SEQ ID NO: 45631 - RNA, 21 nt, synthetic construct
  source 1..21: mol_type = other RNA
agtgcagccaccggctctgcc

SEQ ID NO: 45632 - RNA, 21 nt, synthetic construct
  source 1..21: mol_type = other RNA
ggccacttcatcacctttgat

SEQ ID NO: 45633 - RNA, 21 nt, synthetic construct
  source 1..21: mol_type = other RNA
tgctccaaggccatcaagctc

SEQ ID NO: 45634 - RNA, 21 nt, synthetic construct
  source 1..21: mol_type = other RNA
aaccccagtgggcactgcctg

SEQ ID NO: 45635 - RNA, 21 nt, synthetic construct
  source 1..21: mol_type = other RNA
tcaatgaggaccagatgaagt

SEQ ID NO: 45636 - RNA, 21 nt, synthetic construct
  source 1..21: mol_type = other RNA
tgcgtggcccagtgtggctgc

SEQ ID NO: 45637 - RNA, 21 nt, synthetic construct
  source 1..21: mol_type = other RNA
gcgctcacagccttgaggcct

SEQ ID NO: 45638 - RNA, 21 nt, synthetic construct
  source 1..21: mol_type = other RNA
tttgaaaacctgaggcagaga

SEQ ID NO: 45639 - RNA, 21 nt, synthetic construct
  source 1..21: mol_type = other RNA
ttgaaaacctgaggcagagag

SEQ ID NO: 45640 - RNA, 21 nt, synthetic construct
  source 1..21: mol_type = other RNA
gccctccctcagtgccagcac

SEQ ID NO: 45641 - RNA, 21 nt, synthetic construct
  source 1..21: mol_type = other RNA
agtgccagcacggagcctgct

SEQ ID NO: 45642 - RNA, 21 nt, synthetic construct
  source 1..21: mol_type = other RNA
aagtgtgagtggacagagtgg

SEQ ID NO: 45643 - RNA, 21 nt, synthetic construct
  source 1..21: mol_type = other RNA
tcgtggaatgcagcctggact

SEQ ID NO: 45644 - RNA, 21 nt, synthetic construct
  source 1..21: mol_type = other RNA
aggaccacggccacggccaca

SEQ ID NO: 45645 - RNA, 21 nt, synthetic construct
  source 1..21: mol_type = other RNA
tcgtggaatgcagcctggact

SEQ ID NO: 45646 - RNA, 21 nt, synthetic construct
  source 1..21: mol_type = other RNA
tcgtggaatgcagcctggact

SEQ ID NO: 45647 - RNA, 21 nt, synthetic construct
  source 1..21: mol_type = other RNA
aggaccacggccacggccaca

SEQ ID NO: 45648 - RNA, 21 nt, synthetic construct
  source 1..21: mol_type = other RNA
tcgtggaatgcagcctggact

SEQ ID NO: 45649 - RNA, 21 nt, synthetic construct
  source 1..21: mol_type = other RNA
tgcggcacctgcaccaacaac

SEQ ID NO: 45650 - RNA, 21 nt, synthetic construct
  source 1..21: mol_type = other RNA
agaggcccaggccatgcagca

SEQ ID NO: 45651 - RNA, 21 nt, synthetic construct
  source 1..21: mol_type = other RNA
tgtccctgcgcccatggctcc

SEQ ID NO: 45652 - RNA, 21 nt, synthetic construct
  source 1..21: mol_type = other RNA
accaagtactacgaggcctgc

SEQ ID NO: 45653 - RNA, 21 nt, synthetic construct
  source 1..21: mol_type = other RNA
cgcccaggacctgtgccgctg

SEQ ID NO: 45654 - RNA, 21 nt, synthetic construct
  source 1..21: mol_type = other RNA
aggacctgccgtgccctggca

SEQ ID NO: 45655 - RNA, 21 nt, synthetic construct
  source 1..21: mol_type = other RNA
cagccttcgccaacacctgga

SEQ ID NO: 45656 - RNA, 21 nt, synthetic construct
  source 1..21: mol_type = other RNA
ggaacagctttgaggacccct

SEQ ID NO: 45657 - RNA, 21 nt, synthetic construct
  source 1..21: mol_type = other RNA
caccaagtactacgaggcctg

SEQ ID NO: 45658 - RNA, 21 nt, synthetic construct
  source 1..21: mol_type = other RNA
aggtctgccgctggtccagct

SEQ ID NO: 45659 - RNA, 21 nt, synthetic construct
  source 1..21: mol_type = other RNA
gcctggtgtgcaggaactggg

SEQ ID NO: 45660 - RNA, 21 nt, synthetic construct
  source 1..21: mol_type = other RNA
aggtgtttgtcaggctggacc

SEQ ID NO: 45661 - RNA, 21 nt, synthetic construct
  source 1..21: mol_type = other RNA
gcagaactgccccaagtccca

SEQ ID NO: 45662 - RNA, 21 nt, synthetic construct
  source 1..21: mol_type = other RNA
cagaactgccccaagtcccag

SEQ ID NO: 45663 - RNA, 21 nt, synthetic construct
  source 1..21: mol_type = other RNA
caagctcttcgtggagagcta

SEQ ID NO: 45664 - RNA, 21 nt, synthetic construct
  source 1..21: mol_type = other RNA
gtctgaacaacttggagggga

SEQ ID NO: 45665 - RNA, 21 nt, synthetic construct
  source 1..21: mol_type = other RNA
cacctgcaccaacaaccagag

SEQ ID NO: 45666 - RNA, 21 nt, synthetic construct
  source 1..21: mol_type = other RNA
cccgctccagtttgggaacct

SEQ ID NO: 45667 - RNA, 21 nt, synthetic construct
  source 1..21: mol_type = other RNA
agtgcccggacccgctgccct

SEQ ID NO: 45668 - RNA, 21 nt, synthetic construct
  source 1..21: mol_type = other RNA
tggggccggcctttgcggagt

SEQ ID NO: 45669 - RNA, 21 nt, synthetic construct
  source 1..21: mol_type = other RNA
ccccccaggcacggtgctgga

SEQ ID NO: 45670 - RNA, 21 nt, synthetic construct
  source 1..21: mol_type = other RNA
gtgccaggacctgccgtgccc

SEQ ID NO: 45671 - RNA, 21 nt, synthetic construct
  source 1..21: mol_type = other RNA
tcggcagccaacatcaccctg

SEQ ID NO: 45672 - RNA, 21 nt, synthetic construct
  source 1..21: mol_type = other RNA
catgcaggtgtttgtcaggct

SEQ ID NO: 45673 - RNA, 21 nt, synthetic construct
  source 1..21: mol_type = other RNA
caggctggaccccgcccacca

SEQ ID NO: 45674 - RNA, 21 nt, synthetic construct
  source 1..21: mol_type = other RNA
ttgaggacccctgctccctca

SEQ ID NO: 45675 - RNA, 21 nt, synthetic construct
  source 1..21: mol_type = other RNA
tggagaatgagaactacgccc

SEQ ID NO: 45676 - RNA, 21 nt, synthetic construct
  source 1..21: mol_type = other RNA
aagtacatgcagaactgcccc

SEQ ID NO: 45677 - RNA, 21 nt, synthetic construct
  source 1..21: mol_type = other RNA
agtacatgcagaactgcccca

SEQ ID NO: 45678 - RNA, 21 nt, synthetic construct
  source 1..21: mol_type = other RNA
gtgtctgtcccccggggctgg

SEQ ID NO: 45679 - RNA, 21 nt, synthetic construct
  source 1..21: mol_type = other RNA
ccacttcatcacctttgatgg

SEQ ID NO: 45680 - RNA, 21 nt, synthetic construct
  source 1..21: mol_type = other RNA
accgagaacatcccctgtggg

SEQ ID NO: 45681 - RNA, 21 nt, synthetic construct
  source 1..21: mol_type = other RNA
tcaagctcttcgtggagagct

SEQ ID NO: 45682 - RNA, 21 nt, synthetic construct
  source 1..21: mol_type = other RNA
tcgtggagagctacgagctga

SEQ ID NO: 45683 - RNA, 21 nt, synthetic construct
  source 1..21: mol_type = other RNA
actgcaccaggactacaaggg

SEQ ID NO: 45684 - RNA, 21 nt, synthetic construct
  source 1..21: mol_type = other RNA
ccatcaatgactttgccacgc

SEQ ID NO: 45685 - RNA, 21 nt, synthetic construct
  source 1..21: mol_type = other RNA
gccttgaggcctgcacctgca

SEQ ID NO: 45686 - RNA, 21 nt, synthetic construct
  source 1..21: mol_type = other RNA
ggcctgcacctgcacctatga

SEQ ID NO: 45687 - RNA, 21 nt, synthetic construct
  source 1..21: mol_type = other RNA
ctgcacctgcacctatgagga

SEQ ID NO: 45688 - RNA, 21 nt, synthetic construct
  source 1..21: mol_type = other RNA
ccagcaccacagcagtcccca

SEQ ID NO: 45689 - RNA, 21 nt, synthetic construct
  source 1..21: mol_type = other RNA
caggctccacagaacccactg

SEQ ID NO: 45690 - RNA, 21 nt, synthetic construct
  source 1..21: mol_type = other RNA
agtgtgagtggacagagtggt

SEQ ID NO: 45691 - RNA, 21 nt, synthetic construct
  source 1..21: mol_type = other RNA
ccaccacacccacagctacca

SEQ ID NO: 45692 - RNA, 21 nt, synthetic construct
  source 1..21: mol_type = other RNA
caccacacccacagctaccag

SEQ ID NO: 45693 - RNA, 21 nt, synthetic construct
  source 1..21: mol_type = other RNA
gccccagtgtgcctggtcaga

SEQ ID NO: 45694 - RNA, 21 nt, synthetic construct
  source 1..21: mol_type = other RNA
gcaggtggggaagttcaagat

SEQ ID NO: 45695 - RNA, 21 nt, synthetic construct
  source 1..21: mol_type = other RNA
ccaccacacccacagctacca

SEQ ID NO: 45696 - RNA, 21 nt, synthetic construct
  source 1..21: mol_type = other RNA
caccacacccacagctaccag

SEQ ID NO: 45697 - RNA, 21 nt, synthetic construct
  source 1..21: mol_type = other RNA
gccccagtgtgcctggtcaga

SEQ ID NO: 45698 - RNA, 21 nt, synthetic construct
  source 1..21: mol_type = other RNA
gcaggtggggaagttcaagat

SEQ ID NO: 45699 - RNA, 21 nt, synthetic construct
  source 1..21: mol_type = other RNA
ccaccacacccacagctacca

SEQ ID NO: 45700 - RNA, 21 nt, synthetic construct
  source 1..21: mol_type = other RNA
caccacacccacagctaccag

SEQ ID NO: 45701 - RNA, 21 nt, synthetic construct
  source 1..21: mol_type = other RNA
gccccagtgtgcctggtcaga

SEQ ID NO: 45702 - RNA, 21 nt, synthetic construct
  source 1..21: mol_type = other RNA
gcaggtggggaagttcaagat

SEQ ID NO: 45703 - RNA, 21 nt, synthetic construct
  source 1..21: mol_type = other RNA
ccaccacacccacagctacca

SEQ ID NO: 45704 - RNA, 21 nt, synthetic construct
  source 1..21: mol_type = other RNA
caccacacccacagctaccag

SEQ ID NO: 45705 - RNA, 21 nt, synthetic construct
  source 1..21: mol_type = other RNA
gccccagtgtgcctggtcaga

SEQ ID NO: 45706 - RNA, 21 nt, synthetic construct
  source 1..21: mol_type = other RNA
gcaggtggggaagttcaagat

SEQ ID NO: 45707 - RNA, 21 nt, synthetic construct
  source 1..21: mol_type = other RNA
ccaccacacccacagctacca

SEQ ID NO: 45708 - RNA, 21 nt, synthetic construct
  source 1..21: mol_type = other RNA
caccacacccacagctaccag

SEQ ID NO: 45709 - RNA, 21 nt, synthetic construct
  source 1..21: mol_type = other RNA
gcaggtgaatgagacctggac

SEQ ID NO: 45710 - RNA, 21 nt, synthetic construct
  source 1..21: mol_type = other RNA
acctggaccctggagaactgc

SEQ ID NO: 45711 - RNA, 21 nt, synthetic construct
  source 1..21: mol_type = other RNA
acctgcgtgaacaagcacctg

SEQ ID NO: 45712 - RNA, 21 nt, synthetic construct
  source 1..21: mol_type = other RNA
ctatgtcctcatgagagagat

SEQ ID NO: 45713 - RNA, 21 nt, synthetic construct
  source 1..21: mol_type = other RNA
gatcctgtttgaccaaattcc

SEQ ID NO: 45714 - RNA, 21 nt, synthetic construct
  source 1..21: mol_type = other RNA
cccggctgccctacagcctct

SEQ ID NO: 45715 - RNA, 21 nt, synthetic construct
  source 1..21: mol_type = other RNA
ccggctgccctacagcctctt

SEQ ID NO: 45716 - RNA, 21 nt, synthetic construct
  source 1..21: mol_type = other RNA
ggtgccctgccagagcctgga

SEQ ID NO: 45717 - RNA, 21 nt, synthetic construct
  source 1..21: mol_type = other RNA
actgccagtcctgcgtgtgtg

SEQ ID NO: 45718 - RNA, 21 nt, synthetic construct
  source 1..21: mol_type = other RNA
ccatgcagcaccagtgcacct

SEQ ID NO: 45719 - RNA, 21 nt, synthetic construct
  source 1..21: mol_type = other RNA
tgctgaccccacagcctgcat

SEQ ID NO: 45720 - RNA, 21 nt, synthetic construct
  source 1..21: mol_type = other RNA
aatgagacctggaccctggag

SEQ ID NO: 45721 - RNA, 21 nt, synthetic construct
  source 1..21: mol_type = other RNA
gcgctgtcctcctatgtgcac

SEQ ID NO: 45722 - RNA, 21 nt, synthetic construct
  source 1..21: mol_type = other RNA
actgcgagtgtttctgcacgg

SEQ ID NO: 45723 - RNA, 21 nt, synthetic construct
  source 1..21: mol_type = other RNA
tctgcggcctgtgcgggaact

SEQ ID NO: 45724 - RNA, 21 nt, synthetic construct
  source 1..21: mol_type = other RNA
gcaccctgcctaaaaacctgc

SEQ ID NO: 45725 - RNA, 21 nt, synthetic construct
  source 1..21: mol_type = other RNA
ggctgtgtctgtcccccgggg

SEQ ID NO: 45726 - RNA, 21 nt, synthetic construct
  source 1..21: mol_type = other RNA
ctgcgagtgtttctgcacggc

SEQ ID NO: 45727 - RNA, 21 nt, synthetic construct
  source 1..21: mol_type = other RNA
gagtgtttctgcacggctgtg

SEQ ID NO: 45728 - RNA, 21 nt, synthetic construct
  source 1..21: mol_type = other RNA
cgcgggcctgtgtgtgtcctg

SEQ ID NO: 45729 - RNA, 21 nt, synthetic construct
  source 1..21: mol_type = other RNA
tgtcaggctggaccccgccca

SEQ ID NO: 45730 - RNA, 21 nt, synthetic construct
  source 1..21: mol_type = other RNA
ccagatgtgcggcctgtgtgg

SEQ ID NO: 45731 - RNA, 21 nt, synthetic construct
  source 1..21: mol_type = other RNA
agtgtttctgcacggctgtgg

SEQ ID NO: 45732 - RNA, 21 nt, synthetic construct
  source 1..21: mol_type = other RNA
cggctgtggctgcctacgccc

SEQ ID NO: 45733 - RNA, 21 nt, synthetic construct
  source 1..21: mol_type = other RNA
aacctgaggcagagagggtac

SEQ ID NO: 45734 - RNA, 21 nt, synthetic construct
  source 1..21: mol_type = other RNA
ttccacctttgacggcacctc

SEQ ID NO: 45735 - RNA, 21 nt, synthetic construct
  source 1..21: mol_type = other RNA
gaggcagagagggtaccaggt

SEQ ID NO: 45736 - RNA, 21 nt, synthetic construct
  source 1..21: mol_type = other RNA
ttctgtgtccctgcgcccatg

SEQ ID NO: 45737 - RNA, 21 nt, synthetic construct
  source 1..21: mol_type = other RNA
ggatggccacttcatcacctt

SEQ ID NO: 45738 - RNA, 21 nt, synthetic construct
  source 1..21: mol_type = other RNA
ccacccgtcactgtcttcccc

SEQ ID NO: 45739 - RNA, 21 nt, synthetic construct
  source 1..21: mol_type = other RNA
gccatgcagcaccagtgcacc

SEQ ID NO: 45740 - RNA, 21 nt, synthetic construct
  source 1..21: mol_type = other RNA
tttgaggacccctgctccctc

SEQ ID NO: 45741 - RNA, 21 nt, synthetic construct
  source 1..21: mol_type = other RNA
tgtttcagcacacactgcgtg

SEQ ID NO: 45742 - RNA, 21 nt, synthetic construct
  source 1..21: mol_type = other RNA
cacagcaaccgaaaagaccac

SEQ ID NO: 45743 - RNA, 21 nt, synthetic construct
  source 1..21: mol_type = other RNA
cagtgcccctgcacccacggc

SEQ ID NO: 45744 - RNA, 21 nt, synthetic construct
  source 1..21: mol_type = other RNA
cggggcaccctgcctaaaaac

SEQ ID NO: 45745 - RNA, 21 nt, synthetic construct
  source 1..21: mol_type = other RNA
tttgacgtggacttcccaacc

SEQ ID NO: 45746 - RNA, 21 nt, synthetic construct
  source 1..21: mol_type = other RNA
tcaatgactttgccacgcgta

SEQ ID NO: 45747 - RNA, 21 nt, synthetic construct
  source 1..21: mol_type = other RNA
ccccaggcacggtgctggatg

SEQ ID NO: 45748 - RNA, 21 nt, synthetic construct
  source 1..21: mol_type = other RNA
gacacccaggacccaacggtg

SEQ ID NO: 45749 - RNA, 21 nt, synthetic construct
  source 1..21: mol_type = other RNA
ctgtgaggaggactcctgtca

SEQ ID NO: 45750 - RNA, 21 nt, synthetic construct
  source 1..21: mol_type = other RNA
ctgaggcagagagggtaccag

SEQ ID NO: 45751 - RNA, 21 nt, synthetic construct
  source 1..21: mol_type = other RNA
gcagcgggaggagctgcctta

SEQ ID NO: 45752 - RNA, 21 nt, synthetic construct
  source 1..21: mol_type = other RNA
gcttctgccccccaggcacgg

SEQ ID NO: 45753 - RNA, 21 nt, synthetic construct
  source 1..21: mol_type = other RNA
cttctgccccccaggcacggt

SEQ ID NO: 45754 - RNA, 21 nt, synthetic construct
  source 1..21: mol_type = other RNA
gacggcggggacacggccatc

SEQ ID NO: 45755 - RNA, 21 nt, synthetic construct
  source 1..21: mol_type = other RNA
gcaccacccacatcacagagc

SEQ ID NO: 45756 - RNA, 21 nt, synthetic construct
  source 1..21: mol_type = other RNA
gcaccacccacatcacagagc

SEQ ID NO: 45757 - RNA, 21 nt, synthetic construct
  source 1..21: mol_type = other RNA
gcaccacccacatcacagagc

SEQ ID NO: 45758 - RNA, 21 nt, synthetic construct
  source 1..21: mol_type = other RNA
gcaccacccacatcacagagc

SEQ ID NO: 45759 - RNA, 21 nt, synthetic construct
  source 1..21: mol_type = other RNA
ggggatggccacttcatcacc

SEQ ID NO: 45760 - RNA, 21 nt, synthetic construct
  source 1..21: mol_type = other RNA
gaacaacttggaggggacgtt

SEQ ID NO: 45761 - RNA, 21 nt, synthetic construct
  source 1..21: mol_type = other RNA
ccaaatacgccaaccagacct

SEQ ID NO: 45762 - RNA, 21 nt, synthetic construct
  source 1..21: mol_type = other RNA
aaccagaaccaggctgacgac

SEQ ID NO: 45763 - RNA, 21 nt, synthetic construct
  source 1..21: mol_type = other RNA
aggtgggagtgcagccaccgg

SEQ ID NO: 45764 - RNA, 21 nt, synthetic construct
  source 1..21: mol_type = other RNA
gggctccaggcctgtggtcac

SEQ ID NO: 45765 - RNA, 21 nt, synthetic construct
  source 1..21: mol_type = other RNA
tccaggcctgtggtcacccgt

SEQ ID NO: 45766 - RNA, 21 nt, synthetic construct
  source 1..21: mol_type = other RNA
tgcccggacccgctgcccttg

SEQ ID NO: 45767 - RNA, 21 nt, synthetic construct
  source 1..21: mol_type = other RNA
accctgctggggccggccttt

SEQ ID NO: 45768 - RNA, 21 nt, synthetic construct
  source 1..21: mol_type = other RNA
gggccggcctttgcggagtgc

SEQ ID NO: 45769 - RNA, 21 nt, synthetic construct
  source 1..21: mol_type = other RNA
tcgggcagtgcccctgcaccc

SEQ ID NO: 45770 - RNA, 21 nt, synthetic construct
  source 1..21: mol_type = other RNA
tgcagccaccggctctgcctg

SEQ ID NO: 45771 - RNA, 21 nt, synthetic construct
  source 1..21: mol_type = other RNA
tgtgtgtccgcgaggtctgcc

SEQ ID NO: 45772 - RNA, 21 nt, synthetic construct
  source 1..21: mol_type = other RNA
gacagagtggtttgatgagga

SEQ ID NO: 45773 - RNA, 21 nt, synthetic construct
  source 1..21: mol_type = other RNA
cggggccctctggcggggact

SEQ ID NO: 45774 - RNA, 21 nt, synthetic construct
  source 1..21: mol_type = other RNA
cacccacagctaccagcttta

SEQ ID NO: 45775 - RNA, 21 nt, synthetic construct
  source 1..21: mol_type = other RNA
cggggccctctggcggggact

SEQ ID NO: 45776 - RNA, 21 nt, synthetic construct
  source 1..21: mol_type = other RNA
cggggccctctggcggggact

SEQ ID NO: 45777 - RNA, 21 nt, synthetic construct
  source 1..21: mol_type = other RNA
cacccacagctaccagcttta

SEQ ID NO: 45778 - RNA, 21 nt, synthetic construct
  source 1..21: mol_type = other RNA
cggggccctctggcggggact

SEQ ID NO: 45779 - RNA, 21 nt, synthetic construct
  source 1..21: mol_type = other RNA
cacccacagctaccagcttta

SEQ ID NO: 45780 - RNA, 21 nt, synthetic construct
  source 1..21: mol_type = other RNA
cgggcagtgctgtggggagtg

SEQ ID NO: 45781 - RNA, 21 nt, synthetic construct
  source 1..21: mol_type = other RNA
agagtgccaggccgagagctt

SEQ ID NO: 45782 - RNA, 21 nt, synthetic construct
  source 1..21: mol_type = other RNA
tccgtgtgttctgctgcaact

SEQ ID NO: 45783 - RNA, 21 nt, synthetic construct
  source 1..21: mol_type = other RNA
tccgtgtgttctgctgcaact

SEQ ID NO: 45784 - RNA, 21 nt, synthetic construct
  source 1..21: mol_type = other RNA
tccgtgtgttctgctgcaact

SEQ ID NO: 45785 - RNA, 21 nt, synthetic construct
  source 1..21: mol_type = other RNA
tccgtgtgttctgctgcaact

SEQ ID NO: 45786 - RNA, 21 nt, synthetic construct
  source 1..21: mol_type = other RNA
atccgactgcaccaggactac

SEQ ID NO: 45787 - RNA, 21 nt, synthetic construct
  source 1..21: mol_type = other RNA
ggggccctctggcggggactt

SEQ ID NO: 45788 - RNA, 21 nt, synthetic construct
  source 1..21: mol_type = other RNA
ggggccctctggcggggactt

SEQ ID NO: 45789 - RNA, 21 nt, synthetic construct
  source 1..21: mol_type = other RNA
ggggccctctggcggggactt

SEQ ID NO: 45790 - RNA, 21 nt, synthetic construct
  source 1..21: mol_type = other RNA
ggggccctctggcggggactt

SEQ ID NO: 45791 - RNA, 21 nt, synthetic construct
  source 1..21: mol_type = other RNA
caggccatgcagcaccagtgc

SEQ ID NO: 45792 - RNA, 21 nt, synthetic construct
  source 1..21: mol_type = other RNA
gcatccagtgcgctcacagcc

SEQ ID NO: 45793 - RNA, 21 nt, synthetic construct
  source 1..21: mol_type = other RNA
tgggcacctgcgtggcctacg

SEQ ID NO: 45794 - RNA, 21 nt, synthetic construct
  source 1..21: mol_type = other RNA
cctgcctctctggggacaccc

SEQ ID NO: 45795 - RNA, 21 nt, synthetic construct
  source 1..21: mol_type = other RNA
tggatgagtgtggctgcacgc

SEQ ID NO: 45796 - RNA, 21 nt, synthetic construct
  source 1..21: mol_type = other RNA
aacggagaggacagtgccctg

SEQ ID NO: 45797 - RNA, 21 nt, synthetic construct
  source 1..21: mol_type = other RNA
aggaaggctgtggcatgtcct

SEQ ID NO: 45798 - RNA, 21 nt, synthetic construct
  source 1..21: mol_type = other RNA
agcctcttccacaacaacacc

SEQ ID NO: 45799 - RNA, 21 nt, synthetic construct
  source 1..21: mol_type = other RNA
aggctgtggcatgtcctggaa

SEQ ID NO: 45800 - RNA, 21 nt, synthetic construct
  source 1..21: mol_type = other RNA
gcacccttggtacagccacca

SEQ ID NO: 45801 - RNA, 21 nt, synthetic construct
  source 1..21: mol_type = other RNA
ccaaagtgctgaccaccacgg

SEQ ID NO: 45802 - RNA, 21 nt, synthetic construct
  source 1..21: mol_type = other RNA
aggaacagctttgaggacccc

SEQ ID NO: 45803 - RNA, 21 nt, synthetic construct
  source 1..21: mol_type = other RNA
gtgtgcaggaactgggagcag

SEQ ID NO: 45804 - RNA, 21 nt, synthetic construct
  source 1..21: mol_type = other RNA
cgtgtgttctgctgcaactac

SEQ ID NO: 45805 - RNA, 21 nt, synthetic construct
  source 1..21: mol_type = other RNA
cgtgtgttctgctgcaactac

SEQ ID NO: 45806 - RNA, 21 nt, synthetic construct
  source 1..21: mol_type = other RNA
cgtgtgttctgctgcaactac

SEQ ID NO: 45807 - RNA, 21 nt, synthetic construct
  source 1..21: mol_type = other RNA
cgtgtgttctgctgcaactac

SEQ ID NO: 45808 - RNA, 21 nt, synthetic construct
  source 1..21: mol_type = other RNA
ccaccggcaccacctgctcca

SEQ ID NO: 45809 - RNA, 21 nt, synthetic construct
  source 1..21: mol_type = other RNA
acaagcacctgcccatcaaag

SEQ ID NO: 45810 - RNA, 21 nt, synthetic construct
  source 1..21: mol_type = other RNA
tcccaggttgactccaccaag

SEQ ID NO: 45811 - RNA, 21 nt, synthetic construct
  source 1..21: mol_type = other RNA
gccacaccctcctccactctg

SEQ ID NO: 45812 - RNA, 21 nt, synthetic construct
  source 1..21: mol_type = other RNA
caatgaggaccagatgaagtg

SEQ ID NO: 45813 - RNA, 21 nt, synthetic construct
  source 1..21: mol_type = other RNA
ggccgggcagtgctgtgggga

SEQ ID NO: 45814 - RNA, 21 nt, synthetic construct
  source 1..21: mol_type = other RNA
ggaacggagaggacagtgccc

SEQ ID NO: 45815 - RNA, 21 nt, synthetic construct
  source 1..21: mol_type = other RNA
tcttcaatgaggaccagatga

SEQ ID NO: 45816 - RNA, 21 nt, synthetic construct
  source 1..21: mol_type = other RNA
gtgtcagtggacagagtggtt

SEQ ID NO: 45817 - RNA, 21 nt, synthetic construct
  source 1..21: mol_type = other RNA
cactgtcccaggggtggccac

SEQ ID NO: 45818 - RNA, 21 nt, synthetic construct
  source 1..21: mol_type = other RNA
tggccaggtgcgtgggtgaca

SEQ ID NO: 45819 - RNA, 21 nt, synthetic construct
  source 1..21: mol_type = other RNA
tgcttctgccccccaggcacg

SEQ ID NO: 45820 - RNA, 21 nt, synthetic construct
  source 1..21: mol_type = other RNA
cccaggcacggtgctggatga

SEQ ID NO: 45821 - RNA, 21 nt, synthetic construct
  source 1..21: mol_type = other RNA
tgcaccaagtacatgcagaac

SEQ ID NO: 45822 - RNA, 21 nt, synthetic construct
  source 1..21: mol_type = other RNA
cagccagcccttcttcaatga

SEQ ID NO: 45823 - RNA, 21 nt, synthetic construct
  source 1..21: mol_type = other RNA
agccagcccttcttcaatgag

SEQ ID NO: 45824 - RNA, 21 nt, synthetic construct
  source 1..21: mol_type = other RNA
tggcatccagtgcgctcacag

SEQ ID NO: 45825 - RNA, 21 nt, synthetic construct
  source 1..21: mol_type = other RNA
ggtcccccactccacgacaag

SEQ ID NO: 45826 - RNA, 21 nt, synthetic construct
  source 1..21: mol_type = other RNA
gaacccactgtcccaggggtg

SEQ ID NO: 45827 - RNA, 21 nt, synthetic construct
  source 1..21: mol_type = other RNA
ctgtcccaggggtggccacat

SEQ ID NO: 45828 - RNA, 21 nt, synthetic construct
  source 1..21: mol_type = other RNA
tgagtggacagagtggtttga

SEQ ID NO: 45829 - RNA, 21 nt, synthetic construct
  source 1..21: mol_type = other RNA
accacacccacagctaccagc

SEQ ID NO: 45830 - RNA, 21 nt, synthetic construct
  source 1..21: mol_type = other RNA
gggcaccacccacatcacaga

SEQ ID NO: 45831 - RNA, 21 nt, synthetic construct
  source 1..21: mol_type = other RNA
gaagttcaagatgtgcttcaa

SEQ ID NO: 45832 - RNA, 21 nt, synthetic construct
  source 1..21: mol_type = other RNA
accacacccacagctaccagc

SEQ ID NO: 45833 - RNA, 21 nt, synthetic construct
  source 1..21: mol_type = other RNA
ccacccacacccccacagtgc

SEQ ID NO: 45834 - RNA, 21 nt, synthetic construct
  source 1..21: mol_type = other RNA
gggcaccacccacatcacaga

SEQ ID NO: 45835 - RNA, 21 nt, synthetic construct
  source 1..21: mol_type = other RNA
gaagttcaagatgtgcttcaa

SEQ ID NO: 45836 - RNA, 21 nt, synthetic construct
  source 1..21: mol_type = other RNA
tgctgacaagcacagccacca

SEQ ID NO: 45837 - RNA, 21 nt, synthetic construct
  source 1..21: mol_type = other RNA
accacacccacagctaccagc

SEQ ID NO: 45838 - RNA, 21 nt, synthetic construct
  source 1..21: mol_type = other RNA
gggcaccacccacatcacaga

SEQ ID NO: 45839 - RNA, 21 nt, synthetic construct
  source 1..21: mol_type = other RNA
gaagttcaagatgtgcttcaa

SEQ ID NO: 45840 - RNA, 21 nt, synthetic construct
  source 1..21: mol_type = other RNA
accacacccacagctaccagc

SEQ ID NO: 45841 - RNA, 21 nt, synthetic construct
  source 1..21: mol_type = other RNA
ccacccacacccccacagtgc

SEQ ID NO: 45842 - RNA, 21 nt, synthetic construct
  source 1..21: mol_type = other RNA
gggcaccacccacatcacaga

SEQ ID NO: 45843 - RNA, 21 nt, synthetic construct
  source 1..21: mol_type = other RNA
gaagttcaagatgtgcttcaa

SEQ ID NO: 45844 - RNA, 21 nt, synthetic construct
  source 1..21: mol_type = other RNA
tgctgacaagcacagccacca

SEQ ID NO: 45845 - RNA, 21 nt, synthetic construct
  source 1..21: mol_type = other RNA
accacacccacagctaccagc

SEQ ID NO: 45846 - RNA, 21 nt, synthetic construct
  source 1..21: mol_type = other RNA
ccctggctgtgacaatgccat

SEQ ID NO: 45847 - RNA, 21 nt, synthetic construct
  source 1..21: mol_type = other RNA
ctggctgtgacaatgccatcc

SEQ ID NO: 45848 - RNA, 21 nt, synthetic construct
  source 1..21: mol_type = other RNA
tggctgtgacaatgccatccc

SEQ ID NO: 45849 - RNA, 21 nt, synthetic construct
  source 1..21: mol_type = other RNA
gctgtgacaatgccatccctc

SEQ ID NO: 45850 - RNA, 21 nt, synthetic construct
  source 1..21: mol_type = other RNA
ctttgacggcacctcttacac

SEQ ID NO: 45851 - RNA, 21 nt, synthetic construct
  source 1..21: mol_type = other RNA
atctgatgctgagccaggtct

SEQ ID NO: 45852 - RNA, 21 nt, synthetic construct
  source 1..21: mol_type = other RNA
tctgatgctgagccaggtctt

SEQ ID NO: 45853 - RNA, 21 nt, synthetic construct
  source 1..21: mol_type = other RNA
gatgctgagccaggtctttgc

SEQ ID NO: 45854 - RNA, 21 nt, synthetic construct
  source 1..21: mol_type = other RNA
tggggacacccaggacccaac

SEQ ID NO: 45855 - RNA, 21 nt, synthetic construct
  source 1..21: mol_type = other RNA
gcagggggagcctcaggaaaa

SEQ ID NO: 45856 - RNA, 21 nt, synthetic construct
  source 1..21: mol_type = other RNA
tgccgctcccaggttgactcc

SEQ ID NO: 45857 - RNA, 21 nt, synthetic construct
  source 1..21: mol_type = other RNA
aggtaccaccacctgccagcc

SEQ ID NO: 45858 - RNA, 21 nt, synthetic construct
  source 1..21: mol_type = other RNA
tgtcctcctcagtcctcacca

SEQ ID NO: 45859 - RNA, 21 nt, synthetic construct
  source 1..21: mol_type = other RNA
catcaaccccaagcccttcca

SEQ ID NO: 45860 - RNA, 21 nt, synthetic construct
  source 1..21: mol_type = other RNA
acacccccacagtgctgacca

SEQ ID NO: 45861 - RNA, 21 nt, synthetic construct
  source 1..21: mol_type = other RNA
acacccccacagtgctgacca

SEQ ID NO: 45862 - RNA, 21 nt, synthetic construct
  source 1..21: mol_type = other RNA
tcaaccccaagcccttccact

SEQ ID NO: 45863 - RNA, 21 nt, synthetic construct
  source 1..21: mol_type = other RNA
tgtgtgtcctggcggactccg

SEQ ID NO: 45864 - RNA, 21 nt, synthetic construct
  source 1..21: mol_type = other RNA
ttgggaacctgcagaagttgg

SEQ ID NO: 45865 - RNA, 21 nt, synthetic construct
  source 1..21: mol_type = other RNA
cagggccagatgtgcggcctg

SEQ ID NO: 45866 - RNA, 21 nt, synthetic construct
  source 1..21: mol_type = other RNA
tgcccctggctgtgacaatgc

SEQ ID NO: 45867 - RNA, 21 nt, synthetic construct
  source 1..21: mol_type = other RNA
ggacctgtgccgctgccccac

SEQ ID NO: 45868 - RNA, 21 nt, synthetic construct
  source 1..21: mol_type = other RNA
gcctgagccccctgaacccgg

SEQ ID NO: 45869 - RNA, 21 nt, synthetic construct
  source 1..21: mol_type = other RNA
tgccgtgccctggcacctgct

SEQ ID NO: 45870 - RNA, 21 nt, synthetic construct
  source 1..21: mol_type = other RNA
tcatcaaccccaagcccttcc

SEQ ID NO: 45871 - RNA, 21 nt, synthetic construct
  source 1..21: mol_type = other RNA
ctgtcccccggggctggtgtc

SEQ ID NO: 45872 - RNA, 21 nt, synthetic construct
  source 1..21: mol_type = other RNA
tttctgcacggctgtggctgc

SEQ ID NO: 45873 - RNA, 21 nt, synthetic construct
  source 1..21: mol_type = other RNA
tctgcacggctgtggctgcct

SEQ ID NO: 45874 - RNA, 21 nt, synthetic construct
  source 1..21: mol_type = other RNA
aggaccagatgaagtgcgtgg

SEQ ID NO: 45875 - RNA, 21 nt, synthetic construct
  source 1..21: mol_type = other RNA
ctgtggcatgtcctggaactc

SEQ ID NO: 45876 - RNA, 21 nt, synthetic construct
  source 1..21: mol_type = other RNA
cagcggtttcagcaagaacgg

SEQ ID NO: 45877 - RNA, 21 nt, synthetic construct
  source 1..21: mol_type = other RNA
cctggtgtgcaggaactggga

SEQ ID NO: 45878 - RNA, 21 nt, synthetic construct
  source 1..21: mol_type = other RNA
tacctgcctctctggggacac

SEQ ID NO: 45879 - RNA, 21 nt, synthetic construct
  source 1..21: mol_type = other RNA
ggctgccctacagcctcttcc

SEQ ID NO: 45880 - RNA, 21 nt, synthetic construct
  source 1..21: mol_type = other RNA
ctggtgtgcaggaactgggag

SEQ ID NO: 45881 - RNA, 21 nt, synthetic construct
  source 1..21: mol_type = other RNA
tcctcctcagtcctcaccacc

SEQ ID NO: 45882 - RNA, 21 nt, synthetic construct
  source 1..21: mol_type = other RNA
caccagtgcacctgctgccag

SEQ ID NO: 45883 - RNA, 21 nt, synthetic construct
  source 1..21: mol_type = other RNA
caaggcccaggggctggtgct

SEQ ID NO: 45884 - RNA, 21 nt, synthetic construct
  source 1..21: mol_type = other RNA
gcaggtgtttgtcaggctgga

SEQ ID NO: 45885 - RNA, 21 nt, synthetic construct
  source 1..21: mol_type = other RNA
ctgcctgggcacctgcgtggc

SEQ ID NO: 45886 - RNA, 21 nt, synthetic construct
  source 1..21: mol_type = other RNA
gctccaaggccatcaagctct

SEQ ID NO: 45887 - RNA, 21 nt, synthetic construct
  source 1..21: mol_type = other RNA
ctgcacggctgtggctgccta

SEQ ID NO: 45888 - RNA, 21 nt, synthetic construct
  source 1..21: mol_type = other RNA
caccacctgccagccccggtg

SEQ ID NO: 45889 - RNA, 21 nt, synthetic construct
  source 1..21: mol_type = other RNA
ctgcaggctccacagaaccca

SEQ ID NO: 45890 - RNA, 21 nt, synthetic construct
  source 1..21: mol_type = other RNA
tgtacctgcctctctggggac

SEQ ID NO: 45891 - RNA, 21 nt, synthetic construct
  source 1..21: mol_type = other RNA
gctgctactcctgtgaggagg

SEQ ID NO: 45892 - RNA, 21 nt, synthetic construct
  source 1..21: mol_type = other RNA
gtccacgaggagacggtgccc

SEQ ID NO: 45893 - RNA, 21 nt, synthetic construct
  source 1..21: mol_type = other RNA
agccccagtgtgcctggtcag

SEQ ID NO: 45894 - RNA, 21 nt, synthetic construct
  source 1..21: mol_type = other RNA
ggtggggaagttcaagatgtg

SEQ ID NO: 45895 - RNA, 21 nt, synthetic construct
  source 1..21: mol_type = other RNA
agccccagtgtgcctggtcag

SEQ ID NO: 45896 - RNA, 21 nt, synthetic construct
  source 1..21: mol_type = other RNA
ggtggggaagttcaagatgtg

SEQ ID NO: 45897 - RNA, 21 nt, synthetic construct
  source 1..21: mol_type = other RNA
agccccagtgtgcctggtcag

SEQ ID NO: 45898 - RNA, 21 nt, synthetic construct
  source 1..21: mol_type = other RNA
ggtggggaagttcaagatgtg

SEQ ID NO: 45899 - RNA, 21 nt, synthetic construct
  source 1..21: mol_type = other RNA
agccccagtgtgcctggtcag

SEQ ID NO: 45900 - RNA, 21 nt, synthetic construct
  source 1..21: mol_type = other RNA
ggtggggaagttcaagatgtg

SEQ ID NO: 45901 - RNA, 21 nt, synthetic construct
  source 1..21: mol_type = other RNA
cgggcaccttcctcaatgacg

SEQ ID NO: 45902 - RNA, 21 nt, synthetic construct
  source 1..21: mol_type = other RNA
tgttcctcaactccatctaca

SEQ ID NO: 45903 - RNA, 21 nt, synthetic construct
  source 1..21: mol_type = other RNA
caaccagacctgtggcctgtg

SEQ ID NO: 45904 - RNA, 21 nt, synthetic construct
  source 1..21: mol_type = other RNA
tgaggcagagagggtaccagg

SEQ ID NO: 45905 - RNA, 21 nt, synthetic construct
  source 1..21: mol_type = other RNA
gtcccaggggtggccacatcc

SEQ ID NO: 45906 - RNA, 21 nt, synthetic construct
  source 1..21: mol_type = other RNA
catcaccctgttcacaccctc

SEQ ID NO: 45907 - RNA, 21 nt, synthetic construct
  source 1..21: mol_type = other RNA
acatcaccctgttcacaccct

SEQ ID NO: 45908 - RNA, 21 nt, synthetic construct
  source 1..21: mol_type = other RNA
cccaagcccttccactcgaac

SEQ ID NO: 45909 - RNA, 21 nt, synthetic construct
  source 1..21: mol_type = other RNA
ccaagcccttccactcgaact

SEQ ID NO: 45910 - RNA, 21 nt, synthetic construct
  source 1..21: mol_type = other RNA
tcaggaaggctgtggcatgtc

SEQ ID NO: 45911 - RNA, 21 nt, synthetic construct
  source 1..21: mol_type = other RNA
ccacctgccagccccggtgtc

SEQ ID NO: 45912 - RNA, 21 nt, synthetic construct
  source 1..21: mol_type = other RNA
ctgccagagctgtaactgcac

SEQ ID NO: 45913 - RNA, 21 nt, synthetic construct
  source 1..21: mol_type = other RNA
cagcctcttccacaacaacac

SEQ ID NO: 45914 - RNA, 21 nt, synthetic construct
  source 1..21: mol_type = other RNA
cgctcacagccttgaggcctg

SEQ ID NO: 45915 - RNA, 21 nt, synthetic construct
  source 1..21: mol_type = other RNA
cacacccacagctaccagctt

SEQ ID NO: 45916 - RNA, 21 nt, synthetic construct
  source 1..21: mol_type = other RNA
cacacccacagctaccagctt

SEQ ID NO: 45917 - RNA, 21 nt, synthetic construct
  source 1..21: mol_type = other RNA
cacacccacagctaccagctt

SEQ ID NO: 45918 - RNA, 21 nt, synthetic construct
  source 1..21: mol_type = other RNA
cccagtgggcactgcctggtg

SEQ ID NO: 45919 - RNA, 21 nt, synthetic construct
  source 1..21: mol_type = other RNA
acctgtgccgctgccccacct

SEQ ID NO: 45920 - RNA, 21 nt, synthetic construct
  source 1..21: mol_type = other RNA
cagtgccagcacggagcctgc

SEQ ID NO: 45921 - RNA, 21 nt, synthetic construct
  source 1..21: mol_type = other RNA
actgtcttccccagcctgagc

SEQ ID NO: 45922 - RNA, 21 nt, synthetic construct
  source 1..21: mol_type = other RNA
cctgagccccctgaacccggc

SEQ ID NO: 45923 - RNA, 21 nt, synthetic construct
  source 1..21: mol_type = other RNA
gctccaggcctgtggtcaccc

SEQ ID NO: 45924 - RNA, 21 nt, synthetic construct
  source 1..21: mol_type = other RNA
ctccaggcctgtggtcacccg

SEQ ID NO: 45925 - RNA, 21 nt, synthetic construct
  source 1..21: mol_type = other RNA
gccccccaggcacggtgctgg

SEQ ID NO: 45926 - RNA, 21 nt, synthetic construct
  source 1..21: mol_type = other RNA
ccaggacctgccgtgccctgg

SEQ ID NO: 45927 - RNA, 21 nt, synthetic construct
  source 1..21: mol_type = other RNA
ggctgtttcagcacacactgc

SEQ ID NO: 45928 - RNA, 21 nt, synthetic construct
  source 1..21: mol_type = other RNA
agaacatcccctgtgggacca

SEQ ID NO: 45929 - RNA, 21 nt, synthetic construct
  source 1..21: mol_type = other RNA
gccgcctgccgctcccaggtt

SEQ ID NO: 45930 - RNA, 21 nt, synthetic construct
  source 1..21: mol_type = other RNA
gtgggcactgcctggtggacc

SEQ ID NO: 45931 - RNA, 21 nt, synthetic construct
  source 1..21: mol_type = other RNA
tgggcactgcctggtggacct

SEQ ID NO: 45932 - RNA, 21 nt, synthetic construct
  source 1..21: mol_type = other RNA
ggctgtggcatgtcctggaac

SEQ ID NO: 45933 - RNA, 21 nt, synthetic construct
  source 1..21: mol_type = other RNA
tgcaggaactgggagcaggag

SEQ ID NO: 45934 - RNA, 21 nt, synthetic construct
  source 1..21: mol_type = other RNA
accacagcagtccccaccctc

SEQ ID NO: 45935 - RNA, 21 nt, synthetic construct
  source 1..21: mol_type = other RNA
tgtcccaggggtggccacatc

SEQ ID NO: 45936 - RNA, 21 nt, synthetic construct
  source 1..21: mol_type = other RNA
tccctcctctgccctagggac

SEQ ID NO: 45937 - RNA, 21 nt, synthetic construct
  source 1..21: mol_type = other RNA
tccctcctctgccctagggac

SEQ ID NO: 45938 - RNA, 21 nt, synthetic construct
  source 1..21: mol_type = other RNA
tccctcctctgccctagggac

SEQ ID NO: 45939 - RNA, 21 nt, synthetic construct
  source 1..21: mol_type = other RNA
tccctcctctgccctagggac

SEQ ID NO: 45940 - RNA, 21 nt, synthetic construct
  source 1..21: mol_type = other RNA
tccactgtgtcctcctcagtc

SEQ ID NO: 45941 - RNA, 21 nt, synthetic construct
  source 1..21: mol_type = other RNA
tgtgacttccactatgagtgc

SEQ ID NO: 45942 - RNA, 21 nt, synthetic construct
  source 1..21: mol_type = other RNA
tctgtgatctgatgctgagcc

SEQ ID NO: 45943 - RNA, 21 nt, synthetic construct
  source 1..21: mol_type = other RNA
gcacggctgtggctgcctacg

SEQ ID NO: 45944 - RNA, 21 nt, synthetic construct
  source 1..21: mol_type = other RNA
ctcctgtgaggaggactcctg

SEQ ID NO: 45945 - RNA, 21 nt, synthetic construct
  source 1..21: mol_type = other RNA
cacttcatcacctttgatggc

SEQ ID NO: 45946 - RNA, 21 nt, synthetic construct
  source 1..21: mol_type = other RNA
tactcctgtgaggaggactcc

SEQ ID NO: 45947 - RNA, 21 nt, synthetic construct
  source 1..21: mol_type = other RNA
ggcacccctggggccgagtgc

SEQ ID NO: 45948 - RNA, 21 nt, synthetic construct
  source 1..21: mol_type = other RNA
tcctccactccggggacgacc

SEQ ID NO: 45949 - RNA, 21 nt, synthetic construct
  source 1..21: mol_type = other RNA
tcctccactccggggacgacc

SEQ ID NO: 45950 - RNA, 21 nt, synthetic construct
  source 1..21: mol_type = other RNA
tcctccactccggggacgacc

SEQ ID NO: 45951 - RNA, 21 nt, synthetic construct
  source 1..21: mol_type = other RNA
tcctccactccggggacgacc

SEQ ID NO: 45952 - RNA, 21 nt, synthetic construct
  source 1..21: mol_type = other RNA
cctgtgggaccaccggcacca

SEQ ID NO: 45953 - RNA, 21 nt, synthetic construct
  source 1..21: mol_type = other RNA
ggctggaccccgcccaccagg

SEQ ID NO: 45954 - RNA, 21 nt, synthetic construct
  source 1..21: mol_type = other RNA
gcgccgcgctgtcctcctatg

SEQ ID NO: 45955 - RNA, 21 nt, synthetic construct
  source 1..21: mol_type = other RNA
ggtgggagtgcagccaccggc

SEQ ID NO: 45956 - RNA, 21 nt, synthetic construct
  source 1..21: mol_type = other RNA
gttctgtgacttctacaaccc

SEQ ID NO: 45957 - RNA, 21 nt, synthetic construct
  source 1..21: mol_type = other RNA
ttctgtgacttctacaaccca

SEQ ID NO: 45958 - RNA, 21 nt, synthetic construct
  source 1..21: mol_type = other RNA
tgggctgtttcagcacacact

SEQ ID NO: 45959 - RNA, 21 nt, synthetic construct
  source 1..21: mol_type = other RNA
ctgtgtccctgcgcccatggc

SEQ ID NO: 45960 - RNA, 21 nt, synthetic construct
  source 1..21: mol_type = other RNA
gcgcccaggacctgtgccgct

SEQ ID NO: 45961 - RNA, 21 nt, synthetic construct
  source 1..21: mol_type = other RNA
tcaggctggaccccgcccacc

SEQ ID NO: 45962 - RNA, 21 nt, synthetic construct
  source 1..21: mol_type = other RNA
caggtggggaagttcaagatg

SEQ ID NO: 45963 - RNA, 21 nt, synthetic construct
  source 1..21: mol_type = other RNA
caggtggggaagttcaagatg

SEQ ID NO: 45964 - RNA, 21 nt, synthetic construct
  source 1..21: mol_type = other RNA
caggtggggaagttcaagatg

SEQ ID NO: 45965 - RNA, 21 nt, synthetic construct
  source 1..21: mol_type = other RNA
caggtggggaagttcaagatg

SEQ ID NO: 45966 - RNA, 21 nt, synthetic construct
  source 1..21: mol_type = other RNA
agaggacagtgccctgctgga

SEQ ID NO: 45967 - RNA, 21 nt, synthetic construct
  source 1..21: mol_type = other RNA
gcccggacccgctgcccttgc

SEQ ID NO: 45968 - RNA, 21 nt, synthetic construct
  source 1..21: mol_type = other RNA
aggctggaccccgcccaccag

SEQ ID NO: 45969 - RNA, 21 nt, synthetic construct
  source 1..21: mol_type = other RNA
agcctctctgcagaaaagcac

SEQ ID NO: 45970 - RNA, 21 nt, synthetic construct
  source 1..21: mol_type = other RNA
gggcacccctggggccgagtg

SEQ ID NO: 45971 - RNA, 21 nt, synthetic construct
  source 1..21: mol_type = other RNA
aggctccacagaacccactgt

SEQ ID NO: 45972 - RNA, 21 nt, synthetic construct
  source 1..21: mol_type = other RNA
ttctctactccctgcttctgc

SEQ ID NO: 45973 - RNA, 21 nt, synthetic construct
  source 1..21: mol_type = other RNA
ccaggcccggctgccctacag

SEQ ID NO: 45974 - RNA, 21 nt, synthetic construct
  source 1..21: mol_type = other RNA
ctactcctgtgaggaggactc

SEQ ID NO: 45975 - RNA, 21 nt, synthetic construct
  source 1..21: mol_type = other RNA
gggtcccccactccacgacaa

SEQ ID NO: 45976 - RNA, 21 nt, synthetic construct
  source 1..21: mol_type = other RNA
aattccggtgagcagcggttt

SEQ ID NO: 45977 - RNA, 21 nt, synthetic construct
  source 1..21: mol_type = other RNA
caccacggccacctccaggac

SEQ ID NO: 45978 - RNA, 21 nt, synthetic construct
  source 1..21: mol_type = other RNA
caccacggccacctccaggac

SEQ ID NO: 45979 - RNA, 21 nt, synthetic construct
  source 1..21: mol_type = other RNA
ccaggactacaagggcagggt

SEQ ID NO: 45980 - RNA, 21 nt, synthetic construct
  source 1..21: mol_type = other RNA
tgggctccaggcctgtggtca

SEQ ID NO: 45981 - RNA, 21 nt, synthetic construct
  source 1..21: mol_type = other RNA
cctgcctaaaaacctgccgga

SEQ ID NO: 45982 - RNA, 21 nt, synthetic construct
  source 1..21: mol_type = other RNA
cctgcctggcctggaaggctg

SEQ ID NO: 45983 - RNA, 21 nt, synthetic construct
  source 1..21: mol_type = other RNA
cccaagtctgaacaacttgga

SEQ ID NO: 45984 - RNA, 21 nt, synthetic construct
  source 1..21: mol_type = other RNA
ggctccacagaacccactgtc

SEQ ID NO: 45985 - RNA, 21 nt, synthetic construct
  source 1..21: mol_type = other RNA
ccctgcgggagttgggccagg

SEQ ID NO: 45986 - RNA, 21 nt, synthetic construct
  source 1..21: mol_type = other RNA
ccctgcgggagttgggccagg

SEQ ID NO: 45987 - RNA, 21 nt, synthetic construct
  source 1..21: mol_type = other RNA
ccctgcgggagttgggccagg

SEQ ID NO: 45988 - RNA, 21 nt, synthetic construct
  source 1..21: mol_type = other RNA
ctgcccctggctgtgacaatg

SEQ ID NO: 45989 - RNA, 21 nt, synthetic construct
  source 1..21: mol_type = other RNA
tgctgctactcctgtgaggag

SEQ ID NO: 45990 - RNA, 21 nt, synthetic construct
  source 1..21: mol_type = other RNA
cctgcccctggctgtgacaat

SEQ ID NO: 45991 - RNA, 21 nt, synthetic construct
  source 1..21: mol_type = other RNA
tcaccgagaacatcccctgtg

SEQ ID NO: 45992 - RNA, 21 nt, synthetic construct
  source 1..21: mol_type = other RNA
ccaggcccagcctggtgtccc

SEQ ID NO: 45993 - RNA, 21 nt, synthetic construct
  source 1..21: mol_type = other RNA
ccaggcccagcctggtgtccc

SEQ ID NO: 45994 - RNA, 21 nt, synthetic construct
  source 1..21: mol_type = other RNA
ccaggcccagcctggtgtccc

SEQ ID NO: 45995 - RNA, 21 nt, synthetic construct
  source 1..21: mol_type = other RNA
ccaggcccagcctggtgtccc

SEQ ID NO: 45996 - RNA, 21 nt, synthetic construct
  source 1..21: mol_type = other RNA
ggcaccgtgctggctcctgga

SEQ ID NO: 45997 - RNA, 21 nt, synthetic construct
  source 1..21: mol_type = other RNA
gcctgggcacctgcgtggcct

SEQ ID NO: 45998 - RNA, 21 nt, synthetic construct
  source 1..21: mol_type = other RNA
gggggctgtgagtggcactac

SEQ ID NO: 45999 - RNA, 21 nt, synthetic construct
  source 1..21: mol_type = other RNA
tgcctggcctggaaggctgct

SEQ ID NO: 46000 - RNA, 21 nt, synthetic construct
  source 1..21: mol_type = other RNA
cgggctgtgagccccagtgtg

SEQ ID NO: 46001 - RNA, 21 nt, synthetic construct
  source 1..21: mol_type = other RNA
cgggctgtgagccccagtgtg

SEQ ID NO: 46002 - RNA, 21 nt, synthetic construct
  source 1..21: mol_type = other RNA
ggctgtgacaatgccatccct

SEQ ID NO: 46003 - RNA, 21 nt, synthetic construct
  source 1..21: mol_type = other RNA
tacagcctcttccacaacaac

SEQ ID NO: 46004 - RNA, 21 nt, synthetic construct
  source 1..21: mol_type = other RNA
ctgcctctctggggacaccca

SEQ ID NO: 46005 - RNA, 21 nt, synthetic construct
  source 1..21: mol_type = other RNA
cccacagcctgcatcctgccc

SEQ ID NO: 46006 - RNA, 21 nt, synthetic construct
  source 1..21: mol_type = other RNA
agggggagcctcaggaaaacc

SEQ ID NO: 46007 - RNA, 21 nt, synthetic construct
  source 1..21: mol_type = other RNA
agggccagatgtgcggcctgt

SEQ ID NO: 46008 - RNA, 21 nt, synthetic construct
  source 1..21: mol_type = other RNA
ggcctacggggatggccactt

SEQ ID NO: 46009 - RNA, 21 nt, synthetic construct
  source 1..21: mol_type = other RNA
ggatcttcctggtcatcgaga

SEQ ID NO: 46010 - RNA, 21 nt, synthetic construct
  source 1..21: mol_type = other RNA
aagtgctgaccaccacggcca

SEQ ID NO: 46011 - RNA, 21 nt, synthetic construct
  source 1..21: mol_type = other RNA
ctgctggggccggcctttgcg

SEQ ID NO: 46012 - RNA, 21 nt, synthetic construct
  source 1..21: mol_type = other RNA
gtgtccggctgtgtctgtccc

SEQ ID NO: 46013 - RNA, 21 nt, synthetic construct
  source 1..21: mol_type = other RNA
catggggatcttcctggtcat

SEQ ID NO: 46014 - RNA, 21 nt, synthetic construct
  source 1..21: mol_type = other RNA
ccccaggtaccaccacctgcc

SEQ ID NO: 46015 - RNA, 21 nt, synthetic construct
  source 1..21: mol_type = other RNA
ccagcctgagccccctgaacc

SEQ ID NO: 46016 - RNA, 21 nt, synthetic construct
  source 1..21: mol_type = other RNA
ccaggttgactccaccaagta

SEQ ID NO: 46017 - RNA, 21 nt, synthetic construct
  source 1..21: mol_type = other RNA
ccatgccctcctccactccgg

SEQ ID NO: 46018 - RNA, 21 nt, synthetic construct
  source 1..21: mol_type = other RNA
acccacacccccacagtgctg

SEQ ID NO: 46019 - RNA, 21 nt, synthetic construct
  source 1..21: mol_type = other RNA
acccacacccccacagtgctg

SEQ ID NO: 46020 - RNA, 21 nt, synthetic construct
  source 1..21: mol_type = other RNA
ccatgccctcctccactccgg

SEQ ID NO: 46021 - RNA, 21 nt, synthetic construct
  source 1..21: mol_type = other RNA
gccgtgtcctgggaccggaag

SEQ ID NO: 46022 - RNA, 21 nt, synthetic construct
  source 1..21: mol_type = other RNA
gtgaacaagcacctgcccatc

SEQ ID NO: 46023 - RNA, 21 nt, synthetic construct
  source 1..21: mol_type = other RNA
gtcactgtcttccccagcctg

SEQ ID NO: 46024 - RNA, 21 nt, synthetic construct
  source 1..21: mol_type = other RNA
agcctgagccccctgaacccg

SEQ ID NO: 46025 - RNA, 21 nt, synthetic construct
  source 1..21: mol_type = other RNA
tcaaggtcagcatccggctgg

SEQ ID NO: 46026 - RNA, 21 nt, synthetic construct
  source 1..21: mol_type = other RNA
caaggtcagcatccggctggt

SEQ ID NO: 46027 - RNA, 21 nt, synthetic construct
  source 1..21: mol_type = other RNA
cgggcagtgcccctgcaccca

SEQ ID NO: 46028 - RNA, 21 nt, synthetic construct
  source 1..21: mol_type = other RNA
cagcctggacggcggggacac

SEQ ID NO: 46029 - RNA, 21 nt, synthetic construct
  source 1..21: mol_type = other RNA
gtttgtcaggctggaccccgc

SEQ ID NO: 46030 - RNA, 21 nt, synthetic construct
  source 1..21: mol_type = other RNA
tgccaggaacagctttgagga

SEQ ID NO: 46031 - RNA, 21 nt, synthetic construct
  source 1..21: mol_type = other RNA
gccaggaacagctttgaggac

SEQ ID NO: 46032 - RNA, 21 nt, synthetic construct
  source 1..21: mol_type = other RNA
gggcaccttcctcaatgacgc

SEQ ID NO: 46033 - RNA, 21 nt, synthetic construct
  source 1..21: mol_type = other RNA
ggcaccttcctcaatgacgcg

SEQ ID NO: 46034 - RNA, 21 nt, synthetic construct
  source 1..21: mol_type = other RNA
ctgctccaaggccatcaagct

SEQ ID NO: 46035 - RNA, 21 nt, synthetic construct
  source 1..21: mol_type = other RNA
tccaaggccatcaagctcttc

SEQ ID NO: 46036 - RNA, 21 nt, synthetic construct
  source 1..21: mol_type = other RNA
gcctggaaggctgctacccga

SEQ ID NO: 46037 - RNA, 21 nt, synthetic construct
  source 1..21: mol_type = other RNA
gaactgccagagctgtaactg

SEQ ID NO: 46038 - RNA, 21 nt, synthetic construct
  source 1..21: mol_type = other RNA
agcacggagcctgctgtgcct

SEQ ID NO: 46039 - RNA, 21 nt, synthetic construct
  source 1..21: mol_type = other RNA
actgggtccagctcaggcccc

SEQ ID NO: 46040 - RNA, 21 nt, synthetic construct
  source 1..21: mol_type = other RNA
ccagccccggtgtcagtggac

SEQ ID NO: 46041 - RNA, 21 nt, synthetic construct
  source 1..21: mol_type = other RNA
agtctgaacaacttggagggg

SEQ ID NO: 46042 - RNA, 21 nt, synthetic construct
  source 1..21: mol_type = other RNA
cggcctggtgtgcaggaactg

SEQ ID NO: 46043 - RNA, 21 nt, synthetic construct
  source 1..21: mol_type = other RNA
acccactgtcccaggggtggc

SEQ ID NO: 46044 - RNA, 21 nt, synthetic construct
  source 1..21: mol_type = other RNA
tcccaggggtggccacatcca

SEQ ID NO: 46045 - RNA, 21 nt, synthetic construct
  source 1..21: mol_type = other RNA
acaatggcaacctccagagct

SEQ ID NO: 46046 - RNA, 21 nt, synthetic construct
  source 1..21: mol_type = other RNA
cacggccacctccaggaccac

SEQ ID NO: 46047 - RNA, 21 nt, synthetic construct
  source 1..21: mol_type = other RNA
ctgtgagccccagtgtgcctg

SEQ ID NO: 46048 - RNA, 21 nt, synthetic construct
  source 1..21: mol_type = other RNA
gccctcctccactccggggac

SEQ ID NO: 46049 - RNA, 21 nt, synthetic construct
  source 1..21: mol_type = other RNA
ctgtgagccccagtgtgcctg

SEQ ID NO: 46050 - RNA, 21 nt, synthetic construct
  source 1..21: mol_type = other RNA
ctgtgagccccagtgtgcctg

SEQ ID NO: 46051 - RNA, 21 nt, synthetic construct
  source 1..21: mol_type = other RNA
cacggccacctccaggaccac

SEQ ID NO: 46052 - RNA, 21 nt, synthetic construct
  source 1..21: mol_type = other RNA
ctgtgagccccagtgtgcctg

SEQ ID NO: 46053 - RNA, 21 nt, synthetic construct
  source 1..21: mol_type = other RNA
gccctcctccactccggggac

SEQ ID NO: 46054 - RNA, 21 nt, synthetic construct
  source 1..21: mol_type = other RNA
cttccccagctcccacttctc

SEQ ID NO: 46055 - RNA, 21 nt, synthetic construct
  source 1..21: mol_type = other RNA
ccccagctcccacttctctac

SEQ ID NO: 46056 - RNA, 21 nt, synthetic construct
  source 1..21: mol_type = other RNA
cctgcttctgcagggcatttg

SEQ ID NO: 46057 - RNA, 21 nt, synthetic construct
  source 1..21: mol_type = other RNA
ccctacagcctcttccacaac

SEQ ID NO: 46058 - RNA, 21 nt, synthetic construct
  source 1..21: mol_type = other RNA
ggagtgtgcagtgactggcga

SEQ ID NO: 46059 - RNA, 21 nt, synthetic construct
  source 1..21: mol_type = other RNA
ctggggacacccaggacccaa

SEQ ID NO: 46060 - RNA, 21 nt, synthetic construct
  source 1..21: mol_type = other RNA
ctgctgctactcctgtgagga

SEQ ID NO: 46061 - RNA, 21 nt, synthetic construct
  source 1..21: mol_type = other RNA
gcagaggcccaggccatgcag

SEQ ID NO: 46062 - RNA, 21 nt, synthetic construct
  source 1..21: mol_type = other RNA
ctcagcctggacggcggggac

SEQ ID NO: 46063 - RNA, 21 nt, synthetic construct
  source 1..21: mol_type = other RNA
ctaccagccctgcggggcacc

SEQ ID NO: 46064 - RNA, 21 nt, synthetic construct
  source 1..21: mol_type = other RNA
agcctggacggcggggacacg

SEQ ID NO: 46065 - RNA, 21 nt, synthetic construct
  source 1..21: mol_type = other RNA
cactgcctggtggacctgcct

SEQ ID NO: 46066 - RNA, 21 nt, synthetic construct
  source 1..21: mol_type = other RNA
gtcagtggacagagtggtttg

SEQ ID NO: 46067 - RNA, 21 nt, synthetic construct
  source 1..21: mol_type = other RNA
gttcaagatgtgcttcaacta

SEQ ID NO: 46068 - RNA, 21 nt, synthetic construct
  source 1..21: mol_type = other RNA
gttcaagatgtgcttcaacta

SEQ ID NO: 46069 - RNA, 21 nt, synthetic construct
  source 1..21: mol_type = other RNA
gttcaagatgtgcttcaacta

SEQ ID NO: 46070 - RNA, 21 nt, synthetic construct
  source 1..21: mol_type = other RNA
gttcaagatgtgcttcaacta

SEQ ID NO: 46071 - RNA, 21 nt, synthetic construct
  source 1..21: mol_type = other RNA
gacagtgccctgctggagctg

SEQ ID NO: 46072 - RNA, 21 nt, synthetic construct
  source 1..21: mol_type = other RNA
gctccagtttgggaacctgca

SEQ ID NO: 46073 - RNA, 21 nt, synthetic construct
  source 1..21: mol_type = other RNA
gcccaggacctgtgccgctgc

SEQ ID NO: 46074 - RNA, 21 nt, synthetic construct
  source 1..21: mol_type = other RNA
cgctgtcctcctatgtgcacg

SEQ ID NO: 46075 - RNA, 21 nt, synthetic construct
  source 1..21: mol_type = other RNA
tcagcacacactgcgtgtccg

SEQ ID NO: 46076 - RNA, 21 nt, synthetic construct
  source 1..21: mol_type = other RNA
tcacagccttgaggcctgcac

SEQ ID NO: 46077 - RNA, 21 nt, synthetic construct
  source 1..21: mol_type = other RNA
cccagcctggtgtccccctgc

SEQ ID NO: 46078 - RNA, 21 nt, synthetic construct
  source 1..21: mol_type = other RNA
cccagcctggtgtccccctgc

SEQ ID NO: 46079 - RNA, 21 nt, synthetic construct
  source 1..21: mol_type = other RNA
cccagcctggtgtccccctgc

SEQ ID NO: 46080 - RNA, 21 nt, synthetic construct
  source 1..21: mol_type = other RNA
acggccacctccaggaccacg

SEQ ID NO: 46081 - RNA, 21 nt, synthetic construct
  source 1..21: mol_type = other RNA
ccaaccagacctgtggcctgt

SEQ ID NO: 46082 - RNA, 21 nt, synthetic construct
  source 1..21: mol_type = other RNA
gccgctgccccacctgcccgt

SEQ ID NO: 46083 - RNA, 21 nt, synthetic construct
  source 1..21: mol_type = other RNA
tgctgaccaccacggccacca

SEQ ID NO: 46084 - RNA, 21 nt, synthetic construct
  source 1..21: mol_type = other RNA
cgctcagcctggacggcgggg

SEQ ID NO: 46085 - RNA, 21 nt, synthetic construct
  source 1..21: mol_type = other RNA
cacttctctactccctgcttc

SEQ ID NO: 46086 - RNA, 21 nt, synthetic construct
  source 1..21: mol_type = other RNA
gtttgggaacctgcagaagtt

SEQ ID NO: 46087 - RNA, 21 nt, synthetic construct
  source 1..21: mol_type = other RNA
cctgcgcccaggacctgtgcc

SEQ ID NO: 46088 - RNA, 21 nt, synthetic construct
  source 1..21: mol_type = other RNA
tcagcctggacggcggggaca

SEQ ID NO: 46089 - RNA, 21 nt, synthetic construct
  source 1..21: mol_type = other RNA
caggaacagctttgaggaccc

SEQ ID NO: 46090 - RNA, 21 nt, synthetic construct
  source 1..21: mol_type = other RNA
gcctctctgcagaaaagcaca

SEQ ID NO: 46091 - RNA, 21 nt, synthetic construct
  source 1..21: mol_type = other RNA
ccggaggtgggagtgcagcca

SEQ ID NO: 46092 - RNA, 21 nt, synthetic construct
  source 1..21: mol_type = other RNA
gaaggctgtggcatgtcctgg

SEQ ID NO: 46093 - RNA, 21 nt, synthetic construct
  source 1..21: mol_type = other RNA
ttgatgaggactaccccaagt

SEQ ID NO: 46094 - RNA, 21 nt, synthetic construct
  source 1..21: mol_type = other RNA
caatggcaacctccagagctc

SEQ ID NO: 46095 - RNA, 21 nt, synthetic construct
  source 1..21: mol_type = other RNA
ctatggcaacaccctcctcta

SEQ ID NO: 46096 - RNA, 21 nt, synthetic construct
  source 1..21: mol_type = other RNA
ccacggccacctccaggacca

SEQ ID NO: 46097 - RNA, 21 nt, synthetic construct
  source 1..21: mol_type = other RNA
ctatggcaacaccctcctcta

SEQ ID NO: 46098 - RNA, 21 nt, synthetic construct
  source 1..21: mol_type = other RNA
ctatggcaacaccctcctcta

SEQ ID NO: 46099 - RNA, 21 nt, synthetic construct
  source 1..21: mol_type = other RNA
ctatggcaacaccctcctcta

SEQ ID NO: 46100 - RNA, 21 nt, synthetic construct
  source 1..21: mol_type = other RNA
ccacggccacctccaggacca

SEQ ID NO: 46101 - RNA, 21 nt, synthetic construct
  source 1..21: mol_type = other RNA
ctatggcaacaccctcctcta

SEQ ID NO: 46102 - RNA, 21 nt, synthetic construct
  source 1..21: mol_type = other RNA
ttcggcctggtgtgcaggaac

SEQ ID NO: 46103 - RNA, 21 nt, synthetic construct
  source 1..21: mol_type = other RNA
tgtgagtggacagagtggttt

SEQ ID NO: 46104 - RNA, 21 nt, synthetic construct
  source 1..21: mol_type = other RNA
ccttcttcaatgaggaccaga

SEQ ID NO: 46105 - RNA, 21 nt, synthetic construct
  source 1..21: mol_type = other RNA
tgcccctgtcggcagccaaca

SEQ ID NO: 46106 - RNA, 21 nt, synthetic construct
  source 1..21: mol_type = other RNA
gccagatgtgcggcctgtgtg

SEQ ID NO: 46107 - RNA, 21 nt, synthetic construct
  source 1..21: mol_type = other RNA
gtgagcagcggtttcagcaag

SEQ ID NO: 46108 - RNA, 21 nt, synthetic construct
  source 1..21: mol_type = other RNA
agcaactgccagtcctgcgtg

SEQ ID NO: 46109 - RNA, 21 nt, synthetic construct
  source 1..21: mol_type = other RNA
gtcttccccagcctgagcccc

SEQ ID NO: 46110 - RNA, 21 nt, synthetic construct
  source 1..21: mol_type = other RNA
acctgcagctcctgcacctgc

SEQ ID NO: 46111 - RNA, 21 nt, synthetic construct
  source 1..21: mol_type = other RNA
gctcagcctggacggcgggga

SEQ ID NO: 46112 - RNA, 21 nt, synthetic construct
  source 1..21: mol_type = other RNA
cacgcagctgcccctgtcggc

SEQ ID NO: 46113 - RNA, 21 nt, synthetic construct
  source 1..21: mol_type = other RNA
gccaacacctggaaggcccag

SEQ ID NO: 46114 - RNA, 21 nt, synthetic construct
  source 1..21: mol_type = other RNA
gtggagaatgagaactacgcc

SEQ ID NO: 46115 - RNA, 21 nt, synthetic construct
  source 1..21: mol_type = other RNA
tgcagaaaagcacagggtgtg

SEQ ID NO: 46116 - RNA, 21 nt, synthetic construct
  source 1..21: mol_type = other RNA
gtgcagccaccggctctgcct

SEQ ID NO: 46117 - RNA, 21 nt, synthetic construct
  source 1..21: mol_type = other RNA
cgccgcctgccgctcccaggt

SEQ ID NO: 46118 - RNA, 21 nt, synthetic construct
  source 1..21: mol_type = other RNA
ggtgtgcaggaactgggagca

SEQ ID NO: 46119 - RNA, 21 nt, synthetic construct
  source 1..21: mol_type = other RNA
cacagccaccccctcctccag

SEQ ID NO: 46120 - RNA, 21 nt, synthetic construct
  source 1..21: mol_type = other RNA
cacagccaccccctcctccag

SEQ ID NO: 46121 - RNA, 21 nt, synthetic construct
  source 1..21: mol_type = other RNA
ccacgccctcctccactccag

SEQ ID NO: 46122 - RNA, 21 nt, synthetic construct
  source 1..21: mol_type = other RNA
cgccctcctccactccaggga

SEQ ID NO: 46123 - RNA, 21 nt, synthetic construct
  source 1..21: mol_type = other RNA
cacagccaccccctcctccag

SEQ ID NO: 46124 - RNA, 21 nt, synthetic construct
  source 1..21: mol_type = other RNA
actccagggacaactcccatc

SEQ ID NO: 46125 - RNA, 21 nt, synthetic construct
  source 1..21: mol_type = other RNA
cacagccaccccctcctccag

SEQ ID NO: 46126 - RNA, 21 nt, synthetic construct
  source 1..21: mol_type = other RNA
cacaccctcctccactctggg

SEQ ID NO: 46127 - RNA, 21 nt, synthetic construct
  source 1..21: mol_type = other RNA
ctctactccctgcttctgcag

SEQ ID NO: 46128 - RNA, 21 nt, synthetic construct
  source 1..21: mol_type = other RNA
ctacagcctcttccacaacaa

SEQ ID NO: 46129 - RNA, 21 nt, synthetic construct
  source 1..21: mol_type = other RNA
ggacggctgcttctgcccccc

SEQ ID NO: 46130 - RNA, 21 nt, synthetic construct
  source 1..21: mol_type = other RNA
cactctggctgcctgcccctc

SEQ ID NO: 46131 - RNA, 21 nt, synthetic construct
  source 1..21: mol_type = other RNA
ggacaacgagaactgcctgaa

SEQ ID NO: 46132 - RNA, 21 nt, synthetic construct
  source 1..21: mol_type = other RNA
ttcctcaactccatctacacg

SEQ ID NO: 46133 - RNA, 21 nt, synthetic construct
  source 1..21: mol_type = other RNA
acacgcagctgcccctgtcgg

SEQ ID NO: 46134 - RNA, 21 nt, synthetic construct
  source 1..21: mol_type = other RNA
gctgcccctgtcggcagccaa

SEQ ID NO: 46135 - RNA, 21 nt, synthetic construct
  source 1..21: mol_type = other RNA
gtcggcagccaacatcaccct

SEQ ID NO: 46136 - RNA, 21 nt, synthetic construct
  source 1..21: mol_type = other RNA
cttcgccaacacctggaaggc

SEQ ID NO: 46137 - RNA, 21 nt, synthetic construct
  source 1..21: mol_type = other RNA
gtggacggctgcacctgcccc

SEQ ID NO: 46138 - RNA, 21 nt, synthetic construct
  source 1..21: mol_type = other RNA
cggcaccgtgctggctcctgg

SEQ ID NO: 46139 - RNA, 21 nt, synthetic construct
  source 1..21: mol_type = other RNA
gcgggcacccctggggccgag

SEQ ID NO: 46140 - RNA, 21 nt, synthetic construct
  source 1..21: mol_type = other RNA
tgtccggctgtgtctgtcccc

SEQ ID NO: 46141 - RNA, 21 nt, synthetic construct
  source 1..21: mol_type = other RNA
gaccaccggcaccacctgctc

SEQ ID NO: 46142 - RNA, 21 nt, synthetic construct
  source 1..21: mol_type = other RNA
atggggatcttcctggtcatc

SEQ ID NO: 46143 - RNA, 21 nt, synthetic construct
  source 1..21: mol_type = other RNA
agccctgcggggcaccctgcc

SEQ ID NO: 46144 - RNA, 21 nt, synthetic construct
  source 1..21: mol_type = other RNA
ccagtgggcactgcctggtgg

SEQ ID NO: 46145 - RNA, 21 nt, synthetic construct
  source 1..21: mol_type = other RNA
tggtggacctgcctggcctgg

SEQ ID NO: 46146 - RNA, 21 nt, synthetic construct
  source 1..21: mol_type = other RNA
gacctgcctggcctggaaggc

SEQ ID NO: 46147 - RNA, 21 nt, synthetic construct
  source 1..21: mol_type = other RNA
tgaggaccagatgaagtgcgt

SEQ ID NO: 46148 - RNA, 21 nt, synthetic construct
  source 1..21: mol_type = other RNA
caggccgagagcttccccaac

SEQ ID NO: 46149 - RNA, 21 nt, synthetic construct
  source 1..21: mol_type = other RNA
agcaccacagcagtccccacc

SEQ ID NO: 46150 - RNA, 21 nt, synthetic construct
  source 1..21: mol_type = other RNA
acagaacccactgtcccaggg

SEQ ID NO: 46151 - RNA, 21 nt, synthetic construct
  source 1..21: mol_type = other RNA
gctgaccaccacggccaccac

SEQ ID NO: 46152 - RNA, 21 nt, synthetic construct
  source 1..21: mol_type = other RNA
aagcacagccaccacacccac

SEQ ID NO: 46153 - RNA, 21 nt, synthetic construct
  source 1..21: mol_type = other RNA
gccgtctgtgagcagcccctg

SEQ ID NO: 46154 - RNA, 21 nt, synthetic construct
  source 1..21: mol_type = other RNA
ctgtgagcagcccctgggcct

SEQ ID NO: 46155 - RNA, 21 nt, synthetic construct
  source 1..21: mol_type = other RNA
aggtggggaagttcaagatgt

SEQ ID NO: 46156 - RNA, 21 nt, synthetic construct
  source 1..21: mol_type = other RNA
aagcacagccaccacacccac

SEQ ID NO: 46157 - RNA, 21 nt, synthetic construct
  source 1..21: mol_type = other RNA
cacctccaggaccacggccac

SEQ ID NO: 46158 - RNA, 21 nt, synthetic construct
  source 1..21: mol_type = other RNA
gccgtctgtgagcagcccctg

SEQ ID NO: 46159 - RNA, 21 nt, synthetic construct
  source 1..21: mol_type = other RNA
ctgtgagcagcccctgggcct

SEQ ID NO: 46160 - RNA, 21 nt, synthetic construct
  source 1..21: mol_type = other RNA
aggtggggaagttcaagatgt

SEQ ID NO: 46161 - RNA, 21 nt, synthetic construct
  source 1..21: mol_type = other RNA
aagcacagccaccacacccac

SEQ ID NO: 46162 - RNA, 21 nt, synthetic construct
  source 1..21: mol_type = other RNA
ctgtgagcagcccctgggcct

SEQ ID NO: 46163 - RNA, 21 nt, synthetic construct
  source 1..21: mol_type = other RNA
aggtggggaagttcaagatgt

SEQ ID NO: 46164 - RNA, 21 nt, synthetic construct
  source 1..21: mol_type = other RNA
aagcacagccaccacacccac

SEQ ID NO: 46165 - RNA, 21 nt, synthetic construct
  source 1..21: mol_type = other RNA
cacctccaggaccacggccac

SEQ ID NO: 46166 - RNA, 21 nt, synthetic construct
  source 1..21: mol_type = other RNA
gccgtctgtgagcagcccctg

SEQ ID NO: 46167 - RNA, 21 nt, synthetic construct
  source 1..21: mol_type = other RNA
ctgtgagcagcccctgggcct

SEQ ID NO: 46168 - RNA, 21 nt, synthetic construct
  source 1..21: mol_type = other RNA
aggtggggaagttcaagatgt

SEQ ID NO: 46169 - RNA, 21 nt, synthetic construct
  source 1..21: mol_type = other RNA
aagcacagccaccacacccac

SEQ ID NO: 46170 - RNA, 21 nt, synthetic construct
  source 1..21: mol_type = other RNA
acaccctcctccactctgggg

SEQ ID NO: 46171 - RNA, 21 nt, synthetic construct
  source 1..21: mol_type = other RNA
ctactccctgcttctgcaggg

SEQ ID NO: 46172 - RNA, 21 nt, synthetic construct
  source 1..21: mol_type = other RNA
gccctacagcctcttccacaa

SEQ ID NO: 46173 - RNA, 21 nt, synthetic construct
  source 1..21: mol_type = other RNA
atgcagcaccagtgcacctgc

SEQ ID NO: 46174 - RNA, 21 nt, synthetic construct
  source 1..21: mol_type = other RNA
gtccctgcgcccatggctccc

SEQ ID NO: 46175 - RNA, 21 nt, synthetic construct
  source 1..21: mol_type = other RNA
ggcccacggagcagtgcccgg

SEQ ID NO: 46176 - RNA, 21 nt, synthetic construct
  source 1..21: mol_type = other RNA
gacctgccgtgccctggcacc

SEQ ID NO: 46177 - RNA, 21 nt, synthetic construct
  source 1..21: mol_type = other RNA
gtgtgggaacttcaaccagaa

SEQ ID NO: 46178 - RNA, 21 nt, synthetic construct
  source 1..21: mol_type = other RNA
ggcgggcacccctggggccga

SEQ ID NO: 46179 - RNA, 21 nt, synthetic construct
  source 1..21: mol_type = other RNA
tcgactgcaacacctgcacct

SEQ ID NO: 46180 - RNA, 21 nt, synthetic construct
  source 1..21: mol_type = other RNA
caccggcaccacctgctccaa

SEQ ID NO: 46181 - RNA, 21 nt, synthetic construct
  source 1..21: mol_type = other RNA
cgggatggccgtgtcctggga

SEQ ID NO: 46182 - RNA, 21 nt, synthetic construct
  source 1..21: mol_type = other RNA
accccagtgggcactgcctgg

SEQ ID NO: 46183 - RNA, 21 nt, synthetic construct
  source 1..21: mol_type = other RNA
agttcaagatgtgcttcaact

SEQ ID NO: 46184 - RNA, 21 nt, synthetic construct
  source 1..21: mol_type = other RNA
cccacacccccacagtgctga

SEQ ID NO: 46185 - RNA, 21 nt, synthetic construct
  source 1..21: mol_type = other RNA
agttcaagatgtgcttcaact

SEQ ID NO: 46186 - RNA, 21 nt, synthetic construct
  source 1..21: mol_type = other RNA
agttcaagatgtgcttcaact

SEQ ID NO: 46187 - RNA, 21 nt, synthetic construct
  source 1..21: mol_type = other RNA
cccacacccccacagtgctga

SEQ ID NO: 46188 - RNA, 21 nt, synthetic construct
  source 1..21: mol_type = other RNA
agttcaagatgtgcttcaact

SEQ ID NO: 46189 - RNA, 21 nt, synthetic construct
  source 1..21: mol_type = other RNA
gcctcttccacaacaacaccg

SEQ ID NO: 46190 - RNA, 21 nt, synthetic construct
  source 1..21: mol_type = other RNA
ccccagcctgagccccctgaa

SEQ ID NO: 46191 - RNA, 21 nt, synthetic construct
  source 1..21: mol_type = other RNA
gtggaacggagaggacagtgc

SEQ ID NO: 46192 - RNA, 21 nt, synthetic construct
  source 1..21: mol_type = other RNA
gtcgactgcaacacctgcacc

SEQ ID NO: 46193 - RNA, 21 nt, synthetic construct
  source 1..21: mol_type = other RNA
gggaccaccggcaccacctgc

SEQ ID NO: 46194 - RNA, 21 nt, synthetic construct
  source 1..21: mol_type = other RNA
ctccctcagtgccagcacgga

SEQ ID NO: 46195 - RNA, 21 nt, synthetic construct
  source 1..21: mol_type = other RNA
ggtttgacgtggacttcccaa

SEQ ID NO: 46196 - RNA, 21 nt, synthetic construct
  source 1..21: mol_type = other RNA
tgccctacagcctcttccaca

SEQ ID NO: 46197 - RNA, 21 nt, synthetic construct
  source 1..21: mol_type = other RNA
gtacctgcctctctggggaca

SEQ ID NO: 46198 - RNA, 21 nt, synthetic construct
  source 1..21: mol_type = other RNA
tgcgcccaggacctgtgccgc

SEQ ID NO: 46199 - RNA, 21 nt, synthetic construct
  source 1..21: mol_type = other RNA
gacctgtgccgctgccccacc

SEQ ID NO: 46200 - RNA, 21 nt, synthetic construct
  source 1..21: mol_type = other RNA
ggaccccgcccaccagggcca

SEQ ID NO: 46201 - RNA, 21 nt, synthetic construct
  source 1..21: mol_type = other RNA
cgctggacgtgggctgtttca

SEQ ID NO: 46202 - RNA, 21 nt, synthetic construct
  source 1..21: mol_type = other RNA
acttcatcacctttgatggcg

SEQ ID NO: 46203 - RNA, 21 nt, synthetic construct
  source 1..21: mol_type = other RNA
caaggccatcaagctcttcgt

SEQ ID NO: 46204 - RNA, 21 nt, synthetic construct
  source 1..21: mol_type = other RNA
tgcaccaggactacaagggca

SEQ ID NO: 46205 - RNA, 21 nt, synthetic construct
  source 1..21: mol_type = other RNA
ggcactgcctggtggacctgc

SEQ ID NO: 46206 - RNA, 21 nt, synthetic construct
  source 1..21: mol_type = other RNA
gcctggtggacctgcctggcc

SEQ ID NO: 46207 - RNA, 21 nt, synthetic construct
  source 1..21: mol_type = other RNA
ctggtggacctgcctggcctg

SEQ ID NO: 46208 - RNA, 21 nt, synthetic construct
  source 1..21: mol_type = other RNA
ggtctgccgctggtccagctg

SEQ ID NO: 46209 - RNA, 21 nt, synthetic construct
  source 1..21: mol_type = other RNA
tctgccgctggtccagctggt

SEQ ID NO: 46210 - RNA, 21 nt, synthetic construct
  source 1..21: mol_type = other RNA
gccaccccctcctccagccca

SEQ ID NO: 46211 - RNA, 21 nt, synthetic construct
  source 1..21: mol_type = other RNA
ctcctctgccctagggaccac

SEQ ID NO: 46212 - RNA, 21 nt, synthetic construct
  source 1..21: mol_type = other RNA
gccaccccctcctccagccca

SEQ ID NO: 46213 - RNA, 21 nt, synthetic construct
  source 1..21: mol_type = other RNA
ctcctctgccctagggaccac

SEQ ID NO: 46214 - RNA, 21 nt, synthetic construct
  source 1..21: mol_type = other RNA
gccaccccctcctccagccca

SEQ ID NO: 46215 - RNA, 21 nt, synthetic construct
  source 1..21: mol_type = other RNA
ctcctctgccctagggaccac

SEQ ID NO: 46216 - RNA, 21 nt, synthetic construct
  source 1..21: mol_type = other RNA
ctcctctgccctagggaccac

SEQ ID NO: 46217 - RNA, 21 nt, synthetic construct
  source 1..21: mol_type = other RNA
gccaccccctcctccagccca

SEQ ID NO: 46218 - RNA, 21 nt, synthetic construct
  source 1..21: mol_type = other RNA
cttctctactccctgcttctg

SEQ ID NO: 46219 - RNA, 21 nt, synthetic construct
  source 1..21: mol_type = other RNA
tctctactccctgcttctgca

SEQ ID NO: 46220 - RNA, 21 nt, synthetic construct
  source 1..21: mol_type = other RNA
gagacctggaccctggagaac

SEQ ID NO: 46221 - RNA, 21 nt, synthetic construct
  source 1..21: mol_type = other RNA
ggcccaggccatgcagcacca

SEQ ID NO: 46222 - RNA, 21 nt, synthetic construct
  source 1..21: mol_type = other RNA
gcccaggccatgcagcaccag

SEQ ID NO: 46223 - RNA, 21 nt, synthetic construct
  source 1..21: mol_type = other RNA
gcagcaccagtgcacctgctg

SEQ ID NO: 46224 - RNA, 21 nt, synthetic construct
  source 1..21: mol_type = other RNA
cccgtcactgtcttccccagc

SEQ ID NO: 46225 - RNA, 21 nt, synthetic construct
  source 1..21: mol_type = other RNA
cgtcactgtcttccccagcct

SEQ ID NO: 46226 - RNA, 21 nt, synthetic construct
  source 1..21: mol_type = other RNA
tcactgtcttccccagcctga

SEQ ID NO: 46227 - RNA, 21 nt, synthetic construct
  source 1..21: mol_type = other RNA
tcttccccagcctgagccccc

SEQ ID NO: 46228 - RNA, 21 nt, synthetic construct
  source 1..21: mol_type = other RNA
cccagcctgagccccctgaac

SEQ ID NO: 46229 - RNA, 21 nt, synthetic construct
  source 1..21: mol_type = other RNA
gtgggctccaggcctgtggtc

SEQ ID NO: 46230 - RNA, 21 nt, synthetic construct
  source 1..21: mol_type = other RNA
ggctccaggcctgtggtcacc

SEQ ID NO: 46231 - RNA, 21 nt, synthetic construct
  source 1..21: mol_type = other RNA
tgtcatcaaggcccaggggct

SEQ ID NO: 46232 - RNA, 21 nt, synthetic construct
  source 1..21: mol_type = other RNA
gtcatcaaggcccaggggctg

SEQ ID NO: 46233 - RNA, 21 nt, synthetic construct
  source 1..21: mol_type = other RNA
tcatcaaggcccaggggctgg

SEQ ID NO: 46234 - RNA, 21 nt, synthetic construct
  source 1..21: mol_type = other RNA
gggcagcgggaggagctgcct

SEQ ID NO: 46235 - RNA, 21 nt, synthetic construct
  source 1..21: mol_type = other RNA
ggcagcgggaggagctgcctt

SEQ ID NO: 46236 - RNA, 21 nt, synthetic construct
  source 1..21: mol_type = other RNA
aggacagtgccctgctggagc

SEQ ID NO: 46237 - RNA, 21 nt, synthetic construct
  source 1..21: mol_type = other RNA
tgccgctgccccacctgcccg

SEQ ID NO: 46238 - RNA, 21 nt, synthetic construct
  source 1..21: mol_type = other RNA
ccgctgccccacctgcccgtg

SEQ ID NO: 46239 - RNA, 21 nt, synthetic construct
  source 1..21: mol_type = other RNA
gacacctgctccaacccccag

SEQ ID NO: 46240 - RNA, 21 nt, synthetic construct
  source 1..21: mol_type = other RNA
acacctgctccaacccccagc

SEQ ID NO: 46241 - RNA, 21 nt, synthetic construct
  source 1..21: mol_type = other RNA
cacctgctccaacccccagcg

SEQ ID NO: 46242 - RNA, 21 nt, synthetic construct
  source 1..21: mol_type = other RNA
cctgctccaacccccagcgcg

SEQ ID NO: 46243 - RNA, 21 nt, synthetic construct
  source 1..21: mol_type = other RNA
gctgcttctgccccccaggca

SEQ ID NO: 46244 - RNA, 21 nt, synthetic construct
  source 1..21: mol_type = other RNA
cgcactctggctgcctgcccc

SEQ ID NO: 46245 - RNA, 21 nt, synthetic construct
  source 1..21: mol_type = other RNA
gcactctggctgcctgcccct

SEQ ID NO: 46246 - RNA, 21 nt, synthetic construct
  source 1..21: mol_type = other RNA
gctgcctgcccctcgggcagt

SEQ ID NO: 46247 - RNA, 21 nt, synthetic construct
  source 1..21: mol_type = other RNA
tgcctgcccctcgggcagtgc

SEQ ID NO: 46248 - RNA, 21 nt, synthetic construct
  source 1..21: mol_type = other RNA
ctgcccctcgggcagtgcccc

SEQ ID NO: 46249 - RNA, 21 nt, synthetic construct
  source 1..21: mol_type = other RNA
gcccctcgggcagtgcccctg

SEQ ID NO: 46250 - RNA, 21 nt, synthetic construct
  source 1..21: mol_type = other RNA
tcaacaccacctgcagctcct

SEQ ID NO: 46251 - RNA, 21 nt, synthetic construct
  source 1..21: mol_type = other RNA
ccacctgcagctcctgcacct

SEQ ID NO: 46252 - RNA, 21 nt, synthetic construct
  source 1..21: mol_type = other RNA
cacctgcagctcctgcacctg

SEQ ID NO: 46253 - RNA, 21 nt, synthetic construct
  source 1..21: mol_type = other RNA
ggcagtgccaggacctgccgt

SEQ ID NO: 46254 - RNA, 21 nt, synthetic construct
  source 1..21: mol_type = other RNA
gtgcagggcggggcccacatc

SEQ ID NO: 46255 - RNA, 21 nt, synthetic construct
  source 1..21: mol_type = other RNA
tacacgcagctgcccctgtcg

SEQ ID NO: 46256 - RNA, 21 nt, synthetic construct
  source 1..21: mol_type = other RNA
gggctgcagctgctggtgcag

SEQ ID NO: 46257 - RNA, 21 nt, synthetic construct
  source 1..21: mol_type = other RNA
agctgctggtgcagctggtgc

SEQ ID NO: 46258 - RNA, 21 nt, synthetic construct
  source 1..21: mol_type = other RNA
gtgtttgtcaggctggacccc

SEQ ID NO: 46259 - RNA, 21 nt, synthetic construct
  source 1..21: mol_type = other RNA
gtcaggctggaccccgcccac

SEQ ID NO: 46260 - RNA, 21 nt, synthetic construct
  source 1..21: mol_type = other RNA
tggaccccgcccaccagggcc

SEQ ID NO: 46261 - RNA, 21 nt, synthetic construct
  source 1..21: mol_type = other RNA
ccccgcccaccagggccagat

SEQ ID NO: 46262 - RNA, 21 nt, synthetic construct
  source 1..21: mol_type = other RNA
gcccaccagggccagatgtgc

SEQ ID NO: 46263 - RNA, 21 nt, synthetic construct
  source 1..21: mol_type = other RNA
gggccagatgtgcggcctgtg

SEQ ID NO: 46264 - RNA, 21 nt, synthetic construct
  source 1..21: mol_type = other RNA
ctttgaggacccctgctccct

SEQ ID NO: 46265 - RNA, 21 nt, synthetic construct
  source 1..21: mol_type = other RNA
tgaggacccctgctccctcag

SEQ ID NO: 46266 - RNA, 21 nt, synthetic construct
  source 1..21: mol_type = other RNA
aaccccaagcccttccactcg

SEQ ID NO: 46267 - RNA, 21 nt, synthetic construct
  source 1..21: mol_type = other RNA
accccaagcccttccactcga

SEQ ID NO: 46268 - RNA, 21 nt, synthetic construct
  source 1..21: mol_type = other RNA
tctgcaccaagtacatgcaga

SEQ ID NO: 46269 - RNA, 21 nt, synthetic construct
  source 1..21: mol_type = other RNA
tgcagaactgccccaagtccc

SEQ ID NO: 46270 - RNA, 21 nt, synthetic construct
  source 1..21: mol_type = other RNA
accgtgctggctcctggagag

SEQ ID NO: 46271 - RNA, 21 nt, synthetic construct
  source 1..21: mol_type = other RNA
ccgtgctggctcctggagagg

SEQ ID NO: 46272 - RNA, 21 nt, synthetic construct
  source 1..21: mol_type = other RNA
cgtgctggctcctggagaggt

SEQ ID NO: 46273 - RNA, 21 nt, synthetic construct
  source 1..21: mol_type = other RNA
ctgcagaaaagcacagggtgt

SEQ ID NO: 46274 - RNA, 21 nt, synthetic construct
  source 1..21: mol_type = other RNA
ccctggggccgagtgcctccg

SEQ ID NO: 46275 - RNA, 21 nt, synthetic construct
  source 1..21: mol_type = other RNA
tccggctgtgtctgtcccccg

SEQ ID NO: 46276 - RNA, 21 nt, synthetic construct
  source 1..21: mol_type = other RNA
cggctgtgtctgtcccccggg

SEQ ID NO: 46277 - RNA, 21 nt, synthetic construct
  source 1..21: mol_type = other RNA
accggaggtgggagtgcagcc

SEQ ID NO: 46278 - RNA, 21 nt, synthetic construct
  source 1..21: mol_type = other RNA
cagccaccggctctgcctggg

SEQ ID NO: 46279 - RNA, 21 nt, synthetic construct
  source 1..21: mol_type = other RNA
agccaccggctctgcctgggc

SEQ ID NO: 46280 - RNA, 21 nt, synthetic construct
  source 1..21: mol_type = other RNA
gccaccggctctgcctgggca

SEQ ID NO: 46281 - RNA, 21 nt, synthetic construct
  source 1..21: mol_type = other RNA
cggctctgcctgggcacctgc

SEQ ID NO: 46282 - RNA, 21 nt, synthetic construct
  source 1..21: mol_type = other RNA
ggctctgcctgggcacctgcg

SEQ ID NO: 46283 - RNA, 21 nt, synthetic construct
  source 1..21: mol_type = other RNA
ctctgcctgggcacctgcgtg

SEQ ID NO: 46284 - RNA, 21 nt, synthetic construct
  source 1..21: mol_type = other RNA
tgcctgggcacctgcgtggcc

SEQ ID NO: 46285 - RNA, 21 nt, synthetic construct
  source 1..21: mol_type = other RNA
ccaaggccatcaagctcttcg

SEQ ID NO: 46286 - RNA, 21 nt, synthetic construct
  source 1..21: mol_type = other RNA
gatcttcctggtcatcgagac

SEQ ID NO: 46287 - RNA, 21 nt, synthetic construct
  source 1..21: mol_type = other RNA
atcttcctggtcatcgagacc

SEQ ID NO: 46288 - RNA, 21 nt, synthetic construct
  source 1..21: mol_type = other RNA
gggatggccgtgtcctgggac

SEQ ID NO: 46289 - RNA, 21 nt, synthetic construct
  source 1..21: mol_type = other RNA
ggatggccgtgtcctgggacc

SEQ ID NO: 46290 - RNA, 21 nt, synthetic construct
  source 1..21: mol_type = other RNA
tccgactgcaccaggactaca

SEQ ID NO: 46291 - RNA, 21 nt, synthetic construct
  source 1..21: mol_type = other RNA
accttcgccgcctgccgctcc

SEQ ID NO: 46292 - RNA, 21 nt, synthetic construct
  source 1..21: mol_type = other RNA
tcgccgcctgccgctcccagg

SEQ ID NO: 46293 - RNA, 21 nt, synthetic construct
  source 1..21: mol_type = other RNA
ccagccctgcggggcaccctg

SEQ ID NO: 46294 - RNA, 21 nt, synthetic construct
  source 1..21: mol_type = other RNA
ccccagtgggcactgcctggt

SEQ ID NO: 46295 - RNA, 21 nt, synthetic construct
  source 1..21: mol_type = other RNA
gggcactgcctggtggacctg

SEQ ID NO: 46296 - RNA, 21 nt, synthetic construct
  source 1..21: mol_type = other RNA
actgcctggtggacctgcctg

SEQ ID NO: 46297 - RNA, 21 nt, synthetic construct
  source 1..21: mol_type = other RNA
cctggtggacctgcctggcct

SEQ ID NO: 46298 - RNA, 21 nt, synthetic construct
  source 1..21: mol_type = other RNA
gtggacctgcctggcctggaa

SEQ ID NO: 46299 - RNA, 21 nt, synthetic construct
  source 1..21: mol_type = other RNA
tggacctgcctggcctggaag

SEQ ID NO: 46300 - RNA, 21 nt, synthetic construct
  source 1..21: mol_type = other RNA
acctgcctggcctggaaggct

SEQ ID NO: 46301 - RNA, 21 nt, synthetic construct
  source 1..21: mol_type = other RNA
ctgcctggcctggaaggctgc

SEQ ID NO: 46302 - RNA, 21 nt, synthetic construct
  source 1..21: mol_type = other RNA
cacccagccagcccttcttca

SEQ ID NO: 46303 - RNA, 21 nt, synthetic construct
  source 1..21: mol_type = other RNA
ccagccagcccttcttcaatg

SEQ ID NO: 46304 - RNA, 21 nt, synthetic construct
  source 1..21: mol_type = other RNA
atgaggaccagatgaagtgcg

SEQ ID NO: 46305 - RNA, 21 nt, synthetic construct
  source 1..21: mol_type = other RNA
agccttgaggcctgcacctgc

SEQ ID NO: 46306 - RNA, 21 nt, synthetic construct
  source 1..21: mol_type = other RNA
cttgaggcctgcacctgcacc

SEQ ID NO: 46307 - RNA, 21 nt, synthetic construct
  source 1..21: mol_type = other RNA
ggaaggctgtggcatgtcctg

SEQ ID NO: 46308 - RNA, 21 nt, synthetic construct
  source 1..21: mol_type = other RNA
ccacgacaagcccggccctcc

SEQ ID NO: 46309 - RNA, 21 nt, synthetic construct
  source 1..21: mol_type = other RNA
cacgacaagcccggccctccc

SEQ ID NO: 46310 - RNA, 21 nt, synthetic construct
  source 1..21: mol_type = other RNA
gagctgggccagcaggtggac

SEQ ID NO: 46311 - RNA, 21 nt, synthetic construct
  source 1..21: mol_type = other RNA
agctgggccagcaggtggact

SEQ ID NO: 46312 - RNA, 21 nt, synthetic construct
  source 1..21: mol_type = other RNA
gctgggccagcaggtggactg

SEQ ID NO: 46313 - RNA, 21 nt, synthetic construct
  source 1..21: mol_type = other RNA
ctgggccagcaggtggactgt

SEQ ID NO: 46314 - RNA, 21 nt, synthetic construct
  source 1..21: mol_type = other RNA
cagccctccctcagtgccagc

SEQ ID NO: 46315 - RNA, 21 nt, synthetic construct
  source 1..21: mol_type = other RNA
ccctccctcagtgccagcacg

SEQ ID NO: 46316 - RNA, 21 nt, synthetic construct
  source 1..21: mol_type = other RNA
ccaggtaccaccacctgccag

SEQ ID NO: 46317 - RNA, 21 nt, synthetic construct
  source 1..21: mol_type = other RNA
accaccacctgccagccccgg

SEQ ID NO: 46318 - RNA, 21 nt, synthetic construct
  source 1..21: mol_type = other RNA
accacctgccagccccggtgt

SEQ ID NO: 46319 - RNA, 21 nt, synthetic construct
  source 1..21: mol_type = other RNA
aagtctgaacaacttggaggg

SEQ ID NO: 46320 - RNA, 21 nt, synthetic construct
  source 1..21: mol_type = other RNA
tcggcctggtgtgcaggaact

SEQ ID NO: 46321 - RNA, 21 nt, synthetic construct
  source 1..21: mol_type = other RNA
tgtgcaggaactgggagcagg

SEQ ID NO: 46322 - RNA, 21 nt, synthetic construct
  source 1..21: mol_type = other RNA
gagacggccaccaccaccacc

SEQ ID NO: 46323 - RNA, 21 nt, synthetic construct
  source 1..21: mol_type = other RNA
ccacagcagtccccaccctct

SEQ ID NO: 46324 - RNA, 21 nt, synthetic construct
  source 1..21: mol_type = other RNA
cacagcagtccccaccctctc

SEQ ID NO: 46325 - RNA, 21 nt, synthetic construct
  source 1..21: mol_type = other RNA
cacagaacccactgtcccagg

SEQ ID NO: 46326 - RNA, 21 nt, synthetic construct
  source 1..21: mol_type = other RNA
ccactgtcccaggggtggcca

SEQ ID NO: 46327 - RNA, 21 nt, synthetic construct
  source 1..21: mol_type = other RNA
agcacagccaccacacccaca

SEQ ID NO: 46328 - RNA, 21 nt, synthetic construct
  source 1..21: mol_type = other RNA
gccaccacacccacagctacc

SEQ ID NO: 46329 - RNA, 21 nt, synthetic construct
  source 1..21: mol_type = other RNA
acagccaccccctcctccagc

SEQ ID NO: 46330 - RNA, 21 nt, synthetic construct
  source 1..21: mol_type = other RNA
cagccaccccctcctccagcc

SEQ ID NO: 46331 - RNA, 21 nt, synthetic construct
  source 1..21: mol_type = other RNA
agccaccccctcctccagccc

SEQ ID NO: 46332 - RNA, 21 nt, synthetic construct
  source 1..21: mol_type = other RNA
ccaccccctcctccagcccag

SEQ ID NO: 46333 - RNA, 21 nt, synthetic construct
  source 1..21: mol_type = other RNA
gccaccacacctgcagccacc

SEQ ID NO: 46334 - RNA, 21 nt, synthetic construct
  source 1..21: mol_type = other RNA
ccaccacacctgcagccacca

SEQ ID NO: 46335 - RNA, 21 nt, synthetic construct
  source 1..21: mol_type = other RNA
caccacacctgcagccaccag

SEQ ID NO: 46336 - RNA, 21 nt, synthetic construct
  source 1..21: mol_type = other RNA
accacacctgcagccaccagc

SEQ ID NO: 46337 - RNA, 21 nt, synthetic construct
  source 1..21: mol_type = other RNA
cacctcgaccctgctgcccag

SEQ ID NO: 46338 - RNA, 21 nt, synthetic construct
  source 1..21: mol_type = other RNA
acctcgaccctgctgcccagc

SEQ ID NO: 46339 - RNA, 21 nt, synthetic construct
  source 1..21: mol_type = other RNA
cctcgaccctgctgcccagca

SEQ ID NO: 46340 - RNA, 21 nt, synthetic construct
  source 1..21: mol_type = other RNA
ctcgaccctgctgcccagcag

SEQ ID NO: 46341 - RNA, 21 nt, synthetic construct
  source 1..21: mol_type = other RNA
ctgctgcccagcagccccaca

SEQ ID NO: 46342 - RNA, 21 nt, synthetic construct
  source 1..21: mol_type = other RNA
gctgcccagcagccccacatc

SEQ ID NO: 46343 - RNA, 21 nt, synthetic construct
  source 1..21: mol_type = other RNA
ctgcccagcagccccacatcg

SEQ ID NO: 46344 - RNA, 21 nt, synthetic construct
  source 1..21: mol_type = other RNA
gcagccccacatcggccccca

SEQ ID NO: 46345 - RNA, 21 nt, synthetic construct
  source 1..21: mol_type = other RNA
gggctgtgagccccagtgtgc

SEQ ID NO: 46346 - RNA, 21 nt, synthetic construct
  source 1..21: mol_type = other RNA
tgtgagccccagtgtgcctgg

SEQ ID NO: 46347 - RNA, 21 nt, synthetic construct
  source 1..21: mol_type = other RNA
tctgtgagcagcccctgggcc

SEQ ID NO: 46348 - RNA, 21 nt, synthetic construct
  source 1..21: mol_type = other RNA
cccaggcccagcctggtgtcc

SEQ ID NO: 46349 - RNA, 21 nt, synthetic construct
  source 1..21: mol_type = other RNA
caggcccagcctggtgtcccc

SEQ ID NO: 46350 - RNA, 21 nt, synthetic construct
  source 1..21: mol_type = other RNA
ggggaagttcaagatgtgctt

SEQ ID NO: 46351 - RNA, 21 nt, synthetic construct
  source 1..21: mol_type = other RNA
ctgccccagcaccccggccac

SEQ ID NO: 46352 - RNA, 21 nt, synthetic construct
  source 1..21: mol_type = other RNA
gccccagcaccccggccacca

SEQ ID NO: 46353 - RNA, 21 nt, synthetic construct
  source 1..21: mol_type = other RNA
ccccagcaccccggccaccag

SEQ ID NO: 46354 - RNA, 21 nt, synthetic construct
  source 1..21: mol_type = other RNA
ccctcctccactccggggacg

SEQ ID NO: 46355 - RNA, 21 nt, synthetic construct
  source 1..21: mol_type = other RNA
agcacagccaccacacccaca

SEQ ID NO: 46356 - RNA, 21 nt, synthetic construct
  source 1..21: mol_type = other RNA
gccaccacacccacagctacc

SEQ ID NO: 46357 - RNA, 21 nt, synthetic construct
  source 1..21: mol_type = other RNA
acagccaccccctcctccagc

SEQ ID NO: 46358 - RNA, 21 nt, synthetic construct
  source 1..21: mol_type = other RNA
cagccaccccctcctccagcc

SEQ ID NO: 46359 - RNA, 21 nt, synthetic construct
  source 1..21: mol_type = other RNA
agccaccccctcctccagccc

SEQ ID NO: 46360 - RNA, 21 nt, synthetic construct
  source 1..21: mol_type = other RNA
ccaccccctcctccagcccag

SEQ ID NO: 46361 - RNA, 21 nt, synthetic construct
  source 1..21: mol_type = other RNA
gccaccacacctgcagccacc

SEQ ID NO: 46362 - RNA, 21 nt, synthetic construct
  source 1..21: mol_type = other RNA
ccaccacacctgcagccacca

SEQ ID NO: 46363 - RNA, 21 nt, synthetic construct
  source 1..21: mol_type = other RNA
caccacacctgcagccaccag

SEQ ID NO: 46364 - RNA, 21 nt, synthetic construct
  source 1..21: mol_type = other RNA
accacacctgcagccaccagc

SEQ ID NO: 46365 - RNA, 21 nt, synthetic construct
  source 1..21: mol_type = other RNA
gccacctccaggaccacggcc

SEQ ID NO: 46366 - RNA, 21 nt, synthetic construct
  source 1..21: mol_type = other RNA
ccacctccaggaccacggcca

SEQ ID NO: 46367 - RNA, 21 nt, synthetic construct
  source 1..21: mol_type = other RNA
cacctcgaccctgctgcccag

SEQ ID NO: 46368 - RNA, 21 nt, synthetic construct
  source 1..21: mol_type = other RNA
acctcgaccctgctgcccagc

SEQ ID NO: 46369 - RNA, 21 nt, synthetic construct
  source 1..21: mol_type = other RNA
cctcgaccctgctgcccagca

SEQ ID NO: 46370 - RNA, 21 nt, synthetic construct
  source 1..21: mol_type = other RNA
ctcgaccctgctgcccagcag

SEQ ID NO: 46371 - RNA, 21 nt, synthetic construct
  source 1..21: mol_type = other RNA
ctgctgcccagcagccccaca

SEQ ID NO: 46372 - RNA, 21 nt, synthetic construct
  source 1..21: mol_type = other RNA
gctgcccagcagccccacatc

SEQ ID NO: 46373 - RNA, 21 nt, synthetic construct
  source 1..21: mol_type = other RNA
ctgcccagcagccccacatcg

SEQ ID NO: 46374 - RNA, 21 nt, synthetic construct
  source 1..21: mol_type = other RNA
gggctgtgagccccagtgtgc

SEQ ID NO: 46375 - RNA, 21 nt, synthetic construct
  source 1..21: mol_type = other RNA
tgtgagccccagtgtgcctgg

SEQ ID NO: 46376 - RNA, 21 nt, synthetic construct
  source 1..21: mol_type = other RNA
tctgtgagcagcccctgggcc

SEQ ID NO: 46377 - RNA, 21 nt, synthetic construct
  source 1..21: mol_type = other RNA
cccaggcccagcctggtgtcc

SEQ ID NO: 46378 - RNA, 21 nt, synthetic construct
  source 1..21: mol_type = other RNA
caggcccagcctggtgtcccc

SEQ ID NO: 46379 - RNA, 21 nt, synthetic construct
  source 1..21: mol_type = other RNA
ggggaagttcaagatgtgctt

SEQ ID NO: 46380 - RNA, 21 nt, synthetic construct
  source 1..21: mol_type = other RNA
ctgccccagcaccccggccac

SEQ ID NO: 46381 - RNA, 21 nt, synthetic construct
  source 1..21: mol_type = other RNA
gccccagcaccccggccacca

SEQ ID NO: 46382 - RNA, 21 nt, synthetic construct
  source 1..21: mol_type = other RNA
ccccagcaccccggccaccag

SEQ ID NO: 46383 - RNA, 21 nt, synthetic construct
  source 1..21: mol_type = other RNA
cggccacgccctcctccactc

SEQ ID NO: 46384 - RNA, 21 nt, synthetic construct
  source 1..21: mol_type = other RNA
ggccacgccctcctccactcc

SEQ ID NO: 46385 - RNA, 21 nt, synthetic construct
  source 1..21: mol_type = other RNA
ccctcctccactccggggacg

SEQ ID NO: 46386 - RNA, 21 nt, synthetic construct
  source 1..21: mol_type = other RNA
agcacagccaccacacccaca

SEQ ID NO: 46387 - RNA, 21 nt, synthetic construct
  source 1..21: mol_type = other RNA
gccaccacacccacagctacc

SEQ ID NO: 46388 - RNA, 21 nt, synthetic construct
  source 1..21: mol_type = other RNA
acagccaccccctcctccagc

SEQ ID NO: 46389 - RNA, 21 nt, synthetic construct
  source 1..21: mol_type = other RNA
cagccaccccctcctccagcc

SEQ ID NO: 46390 - RNA, 21 nt, synthetic construct
  source 1..21: mol_type = other RNA
agccaccccctcctccagccc

SEQ ID NO: 46391 - RNA, 21 nt, synthetic construct
  source 1..21: mol_type = other RNA
ccaccccctcctccagcccag

SEQ ID NO: 46392 - RNA, 21 nt, synthetic construct
  source 1..21: mol_type = other RNA
gccaccacacctgcagccacc

SEQ ID NO: 46393 - RNA, 21 nt, synthetic construct
  source 1..21: mol_type = other RNA
ccaccacacctgcagccacca

SEQ ID NO: 46394 - RNA, 21 nt, synthetic construct
  source 1..21: mol_type = other RNA
caccacacctgcagccaccag

SEQ ID NO: 46395 - RNA, 21 nt, synthetic construct
  source 1..21: mol_type = other RNA
accacacctgcagccaccagc

SEQ ID NO: 46396 - RNA, 21 nt, synthetic construct
  source 1..21: mol_type = other RNA
cacctcgaccctgctgcccag

SEQ ID NO: 46397 - RNA, 21 nt, synthetic construct
  source 1..21: mol_type = other RNA
acctcgaccctgctgcccagc

SEQ ID NO: 46398 - RNA, 21 nt, synthetic construct
  source 1..21: mol_type = other RNA
cctcgaccctgctgcccagca

SEQ ID NO: 46399 - RNA, 21 nt, synthetic construct
  source 1..21: mol_type = other RNA
ctcgaccctgctgcccagcag

SEQ ID NO: 46400 - RNA, 21 nt, synthetic construct
  source 1..21: mol_type = other RNA
ctgctgcccagcagccccaca

SEQ ID NO: 46401 - RNA, 21 nt, synthetic construct
  source 1..21: mol_type = other RNA
gctgcccagcagccccacatc

SEQ ID NO: 46402 - RNA, 21 nt, synthetic construct
  source 1..21: mol_type = other RNA
ctgcccagcagccccacatcg

SEQ ID NO: 46403 - RNA, 21 nt, synthetic construct
  source 1..21: mol_type = other RNA
gcagccccacatcggccccca

SEQ ID NO: 46404 - RNA, 21 nt, synthetic construct
  source 1..21: mol_type = other RNA
gggctgtgagccccagtgtgc

SEQ ID NO: 46405 - RNA, 21 nt, synthetic construct
  source 1..21: mol_type = other RNA
tgtgagccccagtgtgcctgg

SEQ ID NO: 46406 - RNA, 21 nt, synthetic construct
  source 1..21: mol_type = other RNA
tctgtgagcagcccctgggcc

SEQ ID NO: 46407 - RNA, 21 nt, synthetic construct
  source 1..21: mol_type = other RNA
cccaggcccagcctggtgtcc

SEQ ID NO: 46408 - RNA, 21 nt, synthetic construct
  source 1..21: mol_type = other RNA
caggcccagcctggtgtcccc

SEQ ID NO: 46409 - RNA, 21 nt, synthetic construct
  source 1..21: mol_type = other RNA
ggggaagttcaagatgtgctt

SEQ ID NO: 46410 - RNA, 21 nt, synthetic construct
  source 1..21: mol_type = other RNA
ctgccccagcaccccggccac

SEQ ID NO: 46411 - RNA, 21 nt, synthetic construct
  source 1..21: mol_type = other RNA
gccccagcaccccggccacca

SEQ ID NO: 46412 - RNA, 21 nt, synthetic construct
  source 1..21: mol_type = other RNA
ccccagcaccccggccaccag

SEQ ID NO: 46413 - RNA, 21 nt, synthetic construct
  source 1..21: mol_type = other RNA
agcacagccaccacacccaca

SEQ ID NO: 46414 - RNA, 21 nt, synthetic construct
  source 1..21: mol_type = other RNA
gccaccacacccacagctacc

SEQ ID NO: 46415 - RNA, 21 nt, synthetic construct
  source 1..21: mol_type = other RNA
gccaccacacctgcagccacc

SEQ ID NO: 46416 - RNA, 21 nt, synthetic construct
  source 1..21: mol_type = other RNA
ccaccacacctgcagccacca

SEQ ID NO: 46417 - RNA, 21 nt, synthetic construct
  source 1..21: mol_type = other RNA
caccacacctgcagccaccag

SEQ ID NO: 46418 - RNA, 21 nt, synthetic construct
  source 1..21: mol_type = other RNA
accacacctgcagccaccagc

SEQ ID NO: 46419 - RNA, 21 nt, synthetic construct
  source 1..21: mol_type = other RNA
cggccacctccaggaccacgg

SEQ ID NO: 46420 - RNA, 21 nt, synthetic construct
  source 1..21: mol_type = other RNA
gccacctccaggaccacggcc

SEQ ID NO: 46421 - RNA, 21 nt, synthetic construct
  source 1..21: mol_type = other RNA
ccacctccaggaccacggcca

SEQ ID NO: 46422 - RNA, 21 nt, synthetic construct
  source 1..21: mol_type = other RNA
cacctcgaccctgctgcccag

SEQ ID NO: 46423 - RNA, 21 nt, synthetic construct
  source 1..21: mol_type = other RNA
acctcgaccctgctgcccagc

SEQ ID NO: 46424 - RNA, 21 nt, synthetic construct
  source 1..21: mol_type = other RNA
cctcgaccctgctgcccagca

SEQ ID NO: 46425 - RNA, 21 nt, synthetic construct
  source 1..21: mol_type = other RNA
ctcgaccctgctgcccagcag

SEQ ID NO: 46426 - RNA, 21 nt, synthetic construct
  source 1..21: mol_type = other RNA
ctgctgcccagcagccccaca

SEQ ID NO: 46427 - RNA, 21 nt, synthetic construct
  source 1..21: mol_type = other RNA
gctgcccagcagccccacatc

SEQ ID NO: 46428 - RNA, 21 nt, synthetic construct
  source 1..21: mol_type = other RNA
ctgcccagcagccccacatcg

SEQ ID NO: 46429 - RNA, 21 nt, synthetic construct
  source 1..21: mol_type = other RNA
gcagccccacatcggccccca

SEQ ID NO: 46430 - RNA, 21 nt, synthetic construct
  source 1..21: mol_type = other RNA
gggctgtgagccccagtgtgc

SEQ ID NO: 46431 - RNA, 21 nt, synthetic construct
  source 1..21: mol_type = other RNA
tgtgagccccagtgtgcctgg

SEQ ID NO: 46432 - RNA, 21 nt, synthetic construct
  source 1..21: mol_type = other RNA
tctgtgagcagcccctgggcc

SEQ ID NO: 46433 - RNA, 21 nt, synthetic construct
  source 1..21: mol_type = other RNA
cccaggcccagcctggtgtcc

SEQ ID NO: 46434 - RNA, 21 nt, synthetic construct
  source 1..21: mol_type = other RNA
caggcccagcctggtgtcccc

SEQ ID NO: 46435 - RNA, 21 nt, synthetic construct
  source 1..21: mol_type = other RNA
ggggaagttcaagatgtgctt

SEQ ID NO: 46436 - RNA, 21 nt, synthetic construct
  source 1..21: mol_type = other RNA
ctgccccagcaccccggccac

SEQ ID NO: 46437 - RNA, 21 nt, synthetic construct
  source 1..21: mol_type = other RNA
gccccagcaccccggccacca

SEQ ID NO: 46438 - RNA, 21 nt, synthetic construct
  source 1..21: mol_type = other RNA
ccccagcaccccggccaccag

SEQ ID NO: 46439 - RNA, 21 nt, synthetic construct
  source 1..21: mol_type = other RNA
ccctcctccactccggggacg

SEQ ID NO: 46440 - RNA, 21 nt, synthetic construct
  source 1..21: mol_type = other RNA
ccctcctccactccggggacg

SEQ ID NO: 46441 - RNA, 21 nt, synthetic construct
  source 1..21: mol_type = other RNA
agcacagccaccacacccaca

SEQ ID NO: 46442 - RNA, 21 nt, synthetic construct
  source 1..21: mol_type = other RNA
gccaccacacccacagctacc

SEQ ID NO: 46443 - RNA, 21 nt, synthetic construct
  source 1..21: mol_type = other RNA
acagccaccccctcctccagc

SEQ ID NO: 46444 - RNA, 21 nt, synthetic construct
  source 1..21: mol_type = other RNA
cagccaccccctcctccagcc

SEQ ID NO: 46445 - RNA, 21 nt, synthetic construct
  source 1..21: mol_type = other RNA
agccaccccctcctccagccc

SEQ ID NO: 46446 - RNA, 21 nt, synthetic construct
  source 1..21: mol_type = other RNA
ccaccccctcctccagcccag

SEQ ID NO: 46447 - RNA, 21 nt, synthetic construct
  source 1..21: mol_type = other RNA
ggccacaccctcctccactct

SEQ ID NO: 46448 - RNA, 21 nt, synthetic construct
  source 1..21: mol_type = other RNA
ccacaccctcctccactctgg

SEQ ID NO: 46449 - RNA, 21 nt, synthetic construct
  source 1..21: mol_type = other RNA
cagtgctccccagcagcctgc

SEQ ID NO: 46450 - RNA, 21 nt, synthetic construct
  source 1..21: mol_type = other RNA
gtgctccccagcagcctgcca

SEQ ID NO: 46451 - RNA, 21 nt, synthetic construct
  source 1..21: mol_type = other RNA
gtccactgtgtcctcctcagt

SEQ ID NO: 46452 - RNA, 21 nt, synthetic construct
  source 1..21: mol_type = other RNA
ctgtgtcctcctcagtcctca

SEQ ID NO: 46453 - RNA, 21 nt, synthetic construct
  source 1..21: mol_type = other RNA
tccccagctcccacttctcta

SEQ ID NO: 46454 - RNA, 21 nt, synthetic construct
  source 1..21: mol_type = other RNA
acttctctactccctgcttct

SEQ ID NO: 46455 - RNA, 21 nt, synthetic construct
  source 1..21: mol_type = other RNA
tactccctgcttctgcagggc

SEQ ID NO: 46456 - RNA, 21 nt, synthetic construct
  source 1..21: mol_type = other RNA
actccctgcttctgcagggca

SEQ ID NO: 46457 - RNA, 21 nt, synthetic construct
  source 1..21: mol_type = other RNA
tccctgcttctgcagggcatt

SEQ ID NO: 46458 - RNA, 21 nt, synthetic construct
  source 1..21: mol_type = other RNA
ctgcttctgcagggcatttgg

SEQ ID NO: 46459 - RNA, 21 nt, synthetic construct
  source 1..21: mol_type = other RNA
ccctcccctgcccctggctgt

SEQ ID NO: 46460 - RNA, 21 nt, synthetic construct
  source 1..21: mol_type = other RNA
cctcccctgcccctggctgtg

SEQ ID NO: 46461 - RNA, 21 nt, synthetic construct
  source 1..21: mol_type = other RNA
ctcccctgcccctggctgtga

SEQ ID NO: 46462 - RNA, 21 nt, synthetic construct
  source 1..21: mol_type = other RNA
cccctggctgtgacaatgcca

SEQ ID NO: 46463 - RNA, 21 nt, synthetic construct
  source 1..21: mol_type = other RNA
gacctggaccctggagaactg

SEQ ID NO: 46464 - RNA, 21 nt, synthetic construct
  source 1..21: mol_type = other RNA
actgcacggtggccaggtgcg

SEQ ID NO: 46465 - RNA, 21 nt, synthetic construct
  source 1..21: mol_type = other RNA
atcctgtttgaccaaattccg

SEQ ID NO: 46466 - RNA, 21 nt, synthetic construct
  source 1..21: mol_type = other RNA
tccaggcccggctgccctaca

SEQ ID NO: 46467 - RNA, 21 nt, synthetic construct
  source 1..21: mol_type = other RNA
ctctgtgatctgatgctgagc

SEQ ID NO: 46468 - RNA, 21 nt, synthetic construct
  source 1..21: mol_type = other RNA
tgatctgatgctgagccaggt

SEQ ID NO: 46469 - RNA, 21 nt, synthetic construct
  source 1..21: mol_type = other RNA
tgccctgccagagcctggagg

SEQ ID NO: 46470 - RNA, 21 nt, synthetic construct
  source 1..21: mol_type = other RNA
gccctgccagagcctggaggc

SEQ ID NO: 46471 - RNA, 21 nt, synthetic construct
  source 1..21: mol_type = other RNA
caactgccagtcctgcgtgtg

SEQ ID NO: 46472 - RNA, 21 nt, synthetic construct
  source 1..21: mol_type = other RNA
cctctctggggacacccagga

SEQ ID NO: 46473 - RNA, 21 nt, synthetic construct
  source 1..21: mol_type = other RNA
ctctctggggacacccaggac

SEQ ID NO: 46474 - RNA, 21 nt, synthetic construct
  source 1..21: mol_type = other RNA
ccagggctttgagtacaagag

SEQ ID NO: 46475 - RNA, 21 nt, synthetic construct
  source 1..21: mol_type = other RNA
ccgggcagtgctgtggggagt

SEQ ID NO: 46476 - RNA, 21 nt, synthetic construct
  source 1..21: mol_type = other RNA
atttgctgaccccacagcctg

SEQ ID NO: 46477 - RNA, 21 nt, synthetic construct
  source 1..21: mol_type = other RNA
gctgaccccacagcctgcatc

SEQ ID NO: 46478 - RNA, 21 nt, synthetic construct
  source 1..21: mol_type = other RNA
tgaccccacagcctgcatcct

SEQ ID NO: 46479 - RNA, 21 nt, synthetic construct
  source 1..21: mol_type = other RNA
accccacagcctgcatcctgc

SEQ ID NO: 46480 - RNA, 21 nt, synthetic construct
  source 1..21: mol_type = other RNA
ccccacagcctgcatcctgcc

SEQ ID NO: 46481 - RNA, 21 nt, synthetic construct
  source 1..21: mol_type = other RNA
tgtccagctgcagggggagcc

SEQ ID NO: 46482 - RNA, 21 nt, synthetic construct
  source 1..21: mol_type = other RNA
ccagctgcagggggagcctca

SEQ ID NO: 46483 - RNA, 21 nt, synthetic construct
  source 1..21: mol_type = other RNA
cagggggagcctcaggaaaac

SEQ ID NO: 46484 - RNA, 21 nt, synthetic construct
  source 1..21: mol_type = other RNA
cagaggcccaggccatgcagc

SEQ ID NO: 46485 - RNA, 21 nt, synthetic construct
  source 1..21: mol_type = other RNA
gaggcccaggccatgcagcac

SEQ ID NO: 46486 - RNA, 21 nt, synthetic construct
  source 1..21: mol_type = other RNA
aggcccaggccatgcagcacc

SEQ ID NO: 46487 - RNA, 21 nt, synthetic construct
  source 1..21: mol_type = other RNA
ggccatgcagcaccagtgcac

SEQ ID NO: 46488 - RNA, 21 nt, synthetic construct
  source 1..21: mol_type = other RNA
gcaccagtgcacctgctgcca

SEQ ID NO: 46489 - RNA, 21 nt, synthetic construct
  source 1..21: mol_type = other RNA
accagtgcacctgctgccagg

SEQ ID NO: 46490 - RNA, 21 nt, synthetic construct
  source 1..21: mol_type = other RNA
gtgcacctgctgccaggagag

SEQ ID NO: 46491 - RNA, 21 nt, synthetic construct
  source 1..21: mol_type = other RNA
gtctgtcccccggggctggtg

SEQ ID NO: 46492 - RNA, 21 nt, synthetic construct
  source 1..21: mol_type = other RNA
ccagtttgggaacctgcagaa

SEQ ID NO: 46493 - RNA, 21 nt, synthetic construct
  source 1..21: mol_type = other RNA
gtgtccccctgcgggagttgg

SEQ ID NO: 46494 - RNA, 21 nt, synthetic construct
  source 1..21: mol_type = other RNA
gtgtccccctgcgggagttgg

SEQ ID NO: 46495 - RNA, 21 nt, synthetic construct
  source 1..21: mol_type = other RNA
gtgtccccctgcgggagttgg

SEQ ID NO: 46496 - RNA, 21 nt, synthetic construct
  source 1..21: mol_type = other RNA
acagcctgcatcctgcccaga

SEQ ID NO: 46497 - RNA, 21 nt, synthetic construct
  source 1..21: mol_type = other RNA
agtgggcactgcctggtggac

SEQ ID NO: 46498 - RNA, 21 nt, synthetic construct
  source 1..21: mol_type = other RNA
cccctcctccagcccagggac

SEQ ID NO: 46499 - RNA, 21 nt, synthetic construct
  source 1..21: mol_type = other RNA
cccctcctccagcccagggac

SEQ ID NO: 46500 - RNA, 21 nt, synthetic construct
  source 1..21: mol_type = other RNA
cccctcctccagcccagggac

SEQ ID NO: 46501 - RNA, 21 nt, synthetic construct
  source 1..21: mol_type = other RNA
cccctcctccagcccagggac

SEQ ID NO: 46502 - RNA, 21 nt, synthetic construct
  source 1..21: mol_type = other RNA
cccctcctccagcccagggac

SEQ ID NO: 46503 - RNA, 21 nt, synthetic construct
  source 1..21: mol_type = other RNA
gtccagctgcagggggagcct

SEQ ID NO: 46504 - RNA, 21 nt, synthetic construct
  source 1..21: mol_type = other RNA
tgagacctggaccctggagaa

SEQ ID NO: 46505 - RNA, 21 nt, synthetic construct
  source 1..21: mol_type = other RNA
ggctgtggctgcctacgccca

SEQ ID NO: 46506 - RNA, 21 nt, synthetic construct
  source 1..21: mol_type = other RNA
atgagacctggaccctggaga

SEQ ID NO: 46507 - RNA, 21 nt, synthetic construct
  source 1..21: mol_type = other RNA
caccggctctgcctgggcacc

SEQ ID NO: 46508 - RNA, 21 nt, synthetic construct
  source 1..21: mol_type = other RNA
accggctctgcctgggcacct

SEQ ID NO: 46509 - RNA, 21 nt, synthetic construct
  source 1..21: mol_type = other RNA
ctctggggacacccaggaccc

SEQ ID NO: 46510 - RNA, 21 nt, synthetic construct
  source 1..21: mol_type = other RNA
caccacctgcagctcctgcac

SEQ ID NO: 46511 - RNA, 21 nt, synthetic construct
  source 1..21: mol_type = other RNA
accacctgcagctcctgcacc

SEQ ID NO: 46512 - RNA, 21 nt, synthetic construct
  source 1..21: mol_type = other RNA
tctggggacacccaggaccca

SEQ ID NO: 46513 - RNA, 21 nt, synthetic construct
  source 1..21: mol_type = other RNA
agctgcagggggagcctcagg

SEQ ID NO: 46514 - RNA, 21 nt, synthetic construct
  source 1..21: mol_type = other RNA
gggatcttcctggtcatcgag

SEQ ID NO: 46515 - RNA, 21 nt, synthetic construct
  source 1..21: mol_type = other RNA
ggcaccctgcctaaaaacctg

SEQ ID NO: 46516 - RNA, 21 nt, synthetic construct
  source 1..21: mol_type = other RNA
tgtctgtcccccggggctggt

SEQ ID NO: 46517 - RNA, 21 nt, synthetic construct
  source 1..21: mol_type = other RNA
gccgctggtccagctggtaca

SEQ ID NO: 46518 - RNA, 21 nt, synthetic construct
  source 1..21: mol_type = other RNA
gtgcggcacctgcaccaacaa

SEQ ID NO: 46519 - RNA, 21 nt, synthetic construct
  source 1..21: mol_type = other RNA
ccgctggtccagctggtacaa

SEQ ID NO: 46520 - RNA, 21 nt, synthetic construct
  source 1..21: mol_type = other RNA
ggccagtgcggcacctgcacc

SEQ ID NO: 46521 - RNA, 21 nt, synthetic construct
  source 1..21: mol_type = other RNA
gctgtgtctgtcccccggggc

SEQ ID NO: 46522 - RNA, 21 nt, synthetic construct
  source 1..21: mol_type = other RNA
tctgtcccccggggctggtgt

SEQ ID NO: 46523 - RNA, 21 nt, synthetic construct
  source 1..21: mol_type = other RNA
gtctgcggcctgtgcgggaac

SEQ ID NO: 46524 - RNA, 21 nt, synthetic construct
  source 1..21: mol_type = other RNA
ttccccagcctgagccccctg

SEQ ID NO: 46525 - RNA, 21 nt, synthetic construct
  source 1..21: mol_type = other RNA
cagtgccctgctggagctgga

SEQ ID NO: 46526 - RNA, 21 nt, synthetic construct
  source 1..21: mol_type = other RNA
cagtttgggaacctgcagaag

SEQ ID NO: 46527 - RNA, 21 nt, synthetic construct
  source 1..21: mol_type = other RNA
agtttgggaacctgcagaagt

SEQ ID NO: 46528 - RNA, 21 nt, synthetic construct
  source 1..21: mol_type = other RNA
aacaccacctgcagctcctgc

SEQ ID NO: 46529 - RNA, 21 nt, synthetic construct
  source 1..21: mol_type = other RNA
ccagggccagatgtgcggcct

SEQ ID NO: 46530 - RNA, 21 nt, synthetic construct
  source 1..21: mol_type = other RNA
gctctgcctgggcacctgcgt

SEQ ID NO: 46531 - RNA, 21 nt, synthetic construct
  source 1..21: mol_type = other RNA
cagggtctgcggcctgtgcgg

SEQ ID NO: 46532 - RNA, 21 nt, synthetic construct
  source 1..21: mol_type = other RNA
gggtctgcggcctgtgcggga

SEQ ID NO: 46533 - RNA, 21 nt, synthetic construct
  source 1..21: mol_type = other RNA
gccctgcggggcaccctgcct

SEQ ID NO: 46534 - RNA, 21 nt, synthetic construct
  source 1..21: mol_type = other RNA
cctcgccctcccctgcccctg

SEQ ID NO: 46535 - RNA, 21 nt, synthetic construct
  source 1..21: mol_type = other RNA
accggctgctgctactcctgt

SEQ ID NO: 46536 - RNA, 21 nt, synthetic construct
  source 1..21: mol_type = other RNA
ctacacgcagctgcccctgtc

SEQ ID NO: 46537 - RNA, 21 nt, synthetic construct
  source 1..21: mol_type = other RNA
gcctctctggggacacccagg

SEQ ID NO: 46538 - RNA, 21 nt, synthetic construct
  source 1..21: mol_type = other RNA
acggccacgccctcctccact

SEQ ID NO: 46539 - RNA, 21 nt, synthetic construct
  source 1..21: mol_type = other RNA
gcagccaccggctctgcctgg

SEQ ID NO: 46540 - RNA, 21 nt, synthetic construct
  source 1..21: mol_type = other RNA
acccagccagcccttcttcaa

SEQ ID NO: 46541 - RNA, 21 nt, synthetic construct
  source 1..21: mol_type = other RNA
ggccacctccaggaccacggc

SEQ ID NO: 46542 - RNA, 21 nt, synthetic construct
  source 1..21: mol_type = other RNA
ggccacctccaggaccacggc

SEQ ID NO: 46543 - RNA, 21 nt, synthetic construct
  source 1..21: mol_type = other RNA
cctacagcctcttccacaaca

SEQ ID NO: 46544 - RNA, 21 nt, synthetic construct
  source 1..21: mol_type = other RNA
cccagccagcccttcttcaat

SEQ ID NO: 46545 - RNA, 21 nt, synthetic construct
  source 1..21: mol_type = other RNA
gaggaccagatgaagtgcgtg

SEQ ID NO: 46546 - RNA, 21 nt, synthetic construct
  source 1..21: mol_type = other RNA
acgggctgtgagccccagtgt

SEQ ID NO: 46547 - RNA, 21 nt, synthetic construct
  source 1..21: mol_type = other RNA
acgggctgtgagccccagtgt

SEQ ID NO: 46548 - RNA, 21 nt, synthetic construct
  source 1..21: mol_type = other RNA
gccctcccctgcccctggctg

SEQ ID NO: 46549 - RNA, 21 nt, synthetic construct
  source 1..21: mol_type = other RNA
tctacacgcagctgcccctgt

SEQ ID NO: 46550 - RNA, 21 nt, synthetic construct
  source 1..21: mol_type = other RNA
gagcctctctgcagaaaagca

SEQ ID NO: 46551 - RNA, 21 nt, synthetic construct
  source 1..21: mol_type = other RNA
cccacccagccagcccttctt

SEQ ID NO: 46552 - RNA, 21 nt, synthetic construct
  source 1..21: mol_type = other RNA
ccacccagccagcccttcttc

SEQ ID NO: 46553 - RNA, 21 nt, synthetic construct
  source 1..21: mol_type = other RNA
ccagctcccacttctctactc

SEQ ID NO: 46554 - RNA, 21 nt, synthetic construct
  source 1..21: mol_type = other RNA
acagcctcttccacaacaaca

SEQ ID NO: 46555 - RNA, 21 nt, synthetic construct
  source 1..21: mol_type = other RNA
tgcctctctggggacacccag

SEQ ID NO: 46556 - RNA, 21 nt, synthetic construct
  source 1..21: mol_type = other RNA
ccttcgccgcctgccgctccc

SEQ ID NO: 46557 - RNA, 21 nt, synthetic construct
  source 1..21: mol_type = other RNA
gtggatgagtgtggctgcacg

SEQ ID NO: 46558 - RNA, 21 nt, synthetic construct
  source 1..21: mol_type = other RNA
tgcccagcagccccacatcgg

SEQ ID NO: 46559 - RNA, 21 nt, synthetic construct
  source 1..21: mol_type = other RNA
tgcccagcagccccacatcgg

SEQ ID NO: 46560 - RNA, 21 nt, synthetic construct
  source 1..21: mol_type = other RNA
tgcccagcagccccacatcgg

SEQ ID NO: 46561 - RNA, 21 nt, synthetic construct
  source 1..21: mol_type = other RNA
tgcccagcagccccacatcgg

SEQ ID NO: 46562 - RNA, 21 nt, synthetic construct
  source 1..21: mol_type = other RNA
cttcgccgcctgccgctccca

SEQ ID NO: 46563 - RNA, 21 nt, synthetic construct
  source 1..21: mol_type = other RNA
gcaggaactgggagcaggagg

SEQ ID NO: 46564 - RNA, 21 nt, synthetic construct
  source 1..21: mol_type = other RNA
aggaactgggagcaggagggc

SEQ ID NO: 46565 - RNA, 21 nt, synthetic construct
  source 1..21: mol_type = other RNA
acaccacctgcagctcctgca

SEQ ID NO: 46566 - RNA, 21 nt, synthetic construct
  source 1..21: mol_type = other RNA
ttcgccgcctgccgctcccag

SEQ ID NO: 46567 - RNA, 21 nt, synthetic construct
  source 1..21: mol_type = other RNA
cccagcaccccggccaccagc

SEQ ID NO: 46568 - RNA, 21 nt, synthetic construct
  source 1..21: mol_type = other RNA
cccagcaccccggccaccagc

SEQ ID NO: 46569 - RNA, 21 nt, synthetic construct
  source 1..21: mol_type = other RNA
cccagcaccccggccaccagc

SEQ ID NO: 46570 - RNA, 21 nt, synthetic construct
  source 1..21: mol_type = other RNA
cccagcaccccggccaccagc

SEQ ID NO: 46571 - RNA, 21 nt, synthetic construct
  source 1..21: mol_type = other RNA
cgccctcccctgcccctggct

SEQ ID NO: 46572 - RNA, 21 nt, synthetic construct
  source 1..21: mol_type = other RNA
cccaggccatgcagcaccagt

SEQ ID NO: 46573 - RNA, 21 nt, synthetic construct
  source 1..21: mol_type = other RNA
ttgaggcctgcacctgcacct

SEQ ID NO: 46574 - RNA, 21 nt, synthetic construct
  source 1..21: mol_type = other RNA
cacgcgtagccggtccgtggt

SEQ ID NO: 46575 - RNA, 21 nt, synthetic construct
  source 1..21: mol_type = other RNA
accacctggatcctcacagag

SEQ ID NO: 46576 - RNA, 21 nt, synthetic construct
  source 1..21: mol_type = other RNA
accacctggatcctcacagag

SEQ ID NO: 46577 - RNA, 21 nt, synthetic construct
  source 1..21: mol_type = other RNA
accacctggatcctcacagag

SEQ ID NO: 46578 - RNA, 21 nt, synthetic construct
  source 1..21: mol_type = other RNA
accacctggatcctcacagag

SEQ ID NO: 46579 - RNA, 21 nt, synthetic construct
  source 1..21: mol_type = other RNA
accacctggatcctcacagag

SEQ ID NO: 46580 - RNA, 21 nt, synthetic construct
  source 1..21: mol_type = other RNA
accacctggatcctcacagag

SEQ ID NO: 46581 - RNA, 21 nt, synthetic construct
  source 1..21: mol_type = other RNA
ccagcccagttttgcaaataa

SEQ ID NO: 46582 - RNA, 21 nt, synthetic construct
  source 1..21: mol_type = other RNA
aaagccccctctgctcaaccc

SEQ ID NO: 46583 - RNA, 21 nt, synthetic construct
  source 1..21: mol_type = other RNA
acctggatcctcacagagccg

SEQ ID NO: 46584 - RNA, 21 nt, synthetic construct
  source 1..21: mol_type = other RNA
acctggatcctcacagagccc

SEQ ID NO: 46585 - RNA, 21 nt, synthetic construct
  source 1..21: mol_type = other RNA
acctggatcctcacagagccg

SEQ ID NO: 46586 - RNA, 21 nt, synthetic construct
  source 1..21: mol_type = other RNA
acctggatcctcacagagccg

SEQ ID NO: 46587 - RNA, 21 nt, synthetic construct
  source 1..21: mol_type = other RNA
acctggatcctcacagagccg

SEQ ID NO: 46588 - RNA, 21 nt, synthetic construct
  source 1..21: mol_type = other RNA
agagcctgtggcccaccttgg

SEQ ID NO: 46589 - RNA, 21 nt, synthetic construct
  source 1..21: mol_type = other RNA
gtggctgcacgcccttctgtg

SEQ ID NO: 46590 - RNA, 21 nt, synthetic construct
  source 1..21: mol_type = other RNA
ccctctgctcaacccagccca

SEQ ID NO: 46591 - RNA, 21 nt, synthetic construct
  source 1..21: mol_type = other RNA
ccacctggatcctcacagagc

SEQ ID NO: 46592 - RNA, 21 nt, synthetic construct
  source 1..21: mol_type = other RNA
ccacctggatcctcacagagc

SEQ ID NO: 46593 - RNA, 21 nt, synthetic construct
  source 1..21: mol_type = other RNA
ccacctggatcctcacagagc

SEQ ID NO: 46594 - RNA, 21 nt, synthetic construct
  source 1..21: mol_type = other RNA
ccacctggatcctcacagagc

SEQ ID NO: 46595 - RNA, 21 nt, synthetic construct
  source 1..21: mol_type = other RNA
ccacctggatcctcacagagc

SEQ ID NO: 46596 - RNA, 21 nt, synthetic construct
  source 1..21: mol_type = other RNA
ccacctggatcctcacagagc

SEQ ID NO: 46597 - RNA, 21 nt, synthetic construct
  source 1..21: mol_type = other RNA
gccccctctgctcaacccagc

SEQ ID NO: 46598 - RNA, 21 nt, synthetic construct
  source 1..21: mol_type = other RNA
aacccagcccagttttgcaaa

SEQ ID NO: 46599 - RNA, 21 nt, synthetic construct
  source 1..21: mol_type = other RNA
gaccacctggatcctcacaga

SEQ ID NO: 46600 - RNA, 21 nt, synthetic construct
  source 1..21: mol_type = other RNA
gaccacctggatcctcacaga

SEQ ID NO: 46601 - RNA, 21 nt, synthetic construct
  source 1..21: mol_type = other RNA
gaccacctggatcctcacaga

SEQ ID NO: 46602 - RNA, 21 nt, synthetic construct
  source 1..21: mol_type = other RNA
gaccacctggatcctcacaga

SEQ ID NO: 46603 - RNA, 21 nt, synthetic construct
  source 1..21: mol_type = other RNA
gaccacctggatcctcacaga

SEQ ID NO: 46604 - RNA, 21 nt, synthetic construct
  source 1..21: mol_type = other RNA
gaccacctggatcctcacaga

SEQ ID NO: 46605 - RNA, 21 nt, synthetic construct
  source 1..21: mol_type = other RNA
ttcaagatgtgcttcaactat

SEQ ID NO: 46606 - RNA, 21 nt, synthetic construct
  source 1..21: mol_type = other RNA
ttcaagatgtgcttcaactat

SEQ ID NO: 46607 - RNA, 21 nt, synthetic construct
  source 1..21: mol_type = other RNA
ttcaagatgtgcttcaactat

SEQ ID NO: 46608 - RNA, 21 nt, synthetic construct
  source 1..21: mol_type = other RNA
ttcaagatgtgcttcaactat

SEQ ID NO: 46609 - RNA, 21 nt, synthetic construct
  source 1..21: mol_type = other RNA
ttcagcgtgtccactgtgtcc

SEQ ID NO: 46610 - RNA, 21 nt, synthetic construct
  source 1..21: mol_type = other RNA
caagatgtgcttcaactatga

SEQ ID NO: 46611 - RNA, 21 nt, synthetic construct
  source 1..21: mol_type = other RNA
caagatgtgcttcaactatga

SEQ ID NO: 46612 - RNA, 21 nt, synthetic construct
  source 1..21: mol_type = other RNA
caagatgtgcttcaactatga

SEQ ID NO: 46613 - RNA, 21 nt, synthetic construct
  source 1..21: mol_type = other RNA
caagatgtgcttcaactatga

SEQ ID NO: 46614 - RNA, 21 nt, synthetic construct
  source 1..21: mol_type = other RNA
tgtggctgcacgcccttctgt

SEQ ID NO: 46615 - RNA, 21 nt, synthetic construct
  source 1..21: mol_type = other RNA
acctgcccatcaaagtgtcgg

SEQ ID NO: 46616 - RNA, 21 nt, synthetic construct
  source 1..21: mol_type = other RNA
agccccctctgctcaacccag

SEQ ID NO: 46617 - RNA, 21 nt, synthetic construct
  source 1..21: mol_type = other RNA
acccagcccagttttgcaaat

SEQ ID NO: 46618 - RNA, 21 nt, synthetic construct
  source 1..21: mol_type = other RNA
ccatcaaagtgtcggacccga

SEQ ID NO: 46619 - RNA, 21 nt, synthetic construct
  source 1..21: mol_type = other RNA
cacctgcccatcaaagtgtcg

SEQ ID NO: 46620 - RNA, 21 nt, synthetic construct
  source 1..21: mol_type = other RNA
gctctgccgcgcccggggagt

SEQ ID NO: 46621 - RNA, 21 nt, synthetic construct
  source 1..21: mol_type = other RNA
aagccccctctgctcaaccca

SEQ ID NO: 46622 - RNA, 21 nt, synthetic construct
  source 1..21: mol_type = other RNA
atcaaagtgtcggacccgagc

SEQ ID NO: 46623 - RNA, 21 nt, synthetic construct
  source 1..21: mol_type = other RNA
ccatgctctgtccacctggag

SEQ ID NO: 46624 - RNA, 21 nt, synthetic construct
  source 1..21: mol_type = other RNA
atgagtgtggctgcacgccct

SEQ ID NO: 46625 - RNA, 21 nt, synthetic construct
  source 1..21: mol_type = other RNA
gcctccatccccatgctctgt

SEQ ID NO: 46626 - RNA, 21 nt, synthetic construct
  source 1..21: mol_type = other RNA
cccctctgctcaacccagccc

SEQ ID NO: 46627 - RNA, 21 nt, synthetic construct
  source 1..21: mol_type = other RNA
tgagtgtggctgcacgccctt

SEQ ID NO: 46628 - RNA, 21 nt, synthetic construct
  source 1..21: mol_type = other RNA
gcatcccaaagccccctctgc

SEQ ID NO: 46629 - RNA, 21 nt, synthetic construct
  source 1..21: mol_type = other RNA
gggaccacctggatcctcaca

SEQ ID NO: 46630 - RNA, 21 nt, synthetic construct
  source 1..21: mol_type = other RNA
gggaccacctggatcctcaca

SEQ ID NO: 46631 - RNA, 21 nt, synthetic construct
  source 1..21: mol_type = other RNA
gggaccacctggatcctcaca

SEQ ID NO: 46632 - RNA, 21 nt, synthetic construct
  source 1..21: mol_type = other RNA
gggaccacctggatcctcaca

SEQ ID NO: 46633 - RNA, 21 nt, synthetic construct
  source 1..21: mol_type = other RNA
gggaccacctggatcctcaca

SEQ ID NO: 46634 - RNA, 21 nt, synthetic construct
  source 1..21: mol_type = other RNA
gggaccacctggatcctcaca

SEQ ID NO: 46635 - RNA, 21 nt, synthetic construct
  source 1..21: mol_type = other RNA
tctgctcaacccagcccagtt

SEQ ID NO: 46636 - RNA, 21 nt, synthetic construct
  source 1..21: mol_type = other RNA
agacaggctggtccaggcaag

SEQ ID NO: 46637 - RNA, 21 nt, synthetic construct
  source 1..21: mol_type = other RNA
cgacctggatcctcacagagc

SEQ ID NO: 46638 - RNA, 21 nt, synthetic construct
  source 1..21: mol_type = other RNA
agggaccacctggatcctcac

SEQ ID NO: 46639 - RNA, 21 nt, synthetic construct
  source 1..21: mol_type = other RNA
cgacctggatcctcacagagc

SEQ ID NO: 46640 - RNA, 21 nt, synthetic construct
  source 1..21: mol_type = other RNA
cgacctggatcctcacagagc

SEQ ID NO: 46641 - RNA, 21 nt, synthetic construct
  source 1..21: mol_type = other RNA
agggaccacctggatcctcac

SEQ ID NO: 46642 - RNA, 21 nt, synthetic construct
  source 1..21: mol_type = other RNA
agggaccacctggatcctcac

SEQ ID NO: 46643 - RNA, 21 nt, synthetic construct
  source 1..21: mol_type = other RNA
cgacctggatcctcacagagc

SEQ ID NO: 46644 - RNA, 21 nt, synthetic construct
  source 1..21: mol_type = other RNA
cgacctggatcctcacagagc

SEQ ID NO: 46645 - RNA, 21 nt, synthetic construct
  source 1..21: mol_type = other RNA
agggaccacctggatcctcac

SEQ ID NO: 46646 - RNA, 21 nt, synthetic construct
  source 1..21: mol_type = other RNA
agggaccacctggatcctcac

SEQ ID NO: 46647 - RNA, 21 nt, synthetic construct
  source 1..21: mol_type = other RNA
agggaccacctggatcctcac

SEQ ID NO: 46648 - RNA, 21 nt, synthetic construct
  source 1..21: mol_type = other RNA
ctgcccacccaccaaagtgta

SEQ ID NO: 46649 - RNA, 21 nt, synthetic construct
  source 1..21: mol_type = other RNA
tgtcggtgcagtgcaagcccc

SEQ ID NO: 46650 - RNA, 21 nt, synthetic construct
  source 1..21: mol_type = other RNA
ccccatgctctgtccacctgg

SEQ ID NO: 46651 - RNA, 21 nt, synthetic construct
  source 1..21: mol_type = other RNA
gctctgtccacctggagccag

SEQ ID NO: 46652 - RNA, 21 nt, synthetic construct
  source 1..21: mol_type = other RNA
gatcatgaaaaccttgggcct

SEQ ID NO: 46653 - RNA, 21 nt, synthetic construct
  source 1..21: mol_type = other RNA
gacaggctggtccaggcaagg

SEQ ID NO: 46654 - RNA, 21 nt, synthetic construct
  source 1..21: mol_type = other RNA
caggctggtccaggcaaggcc

SEQ ID NO: 46655 - RNA, 21 nt, synthetic construct
  source 1..21: mol_type = other RNA
ctcaacccagcccagttttgc

SEQ ID NO: 46656 - RNA, 21 nt, synthetic construct
  source 1..21: mol_type = other RNA
agcgtgtccactgtgtcctcc

SEQ ID NO: 46657 - RNA, 21 nt, synthetic construct
  source 1..21: mol_type = other RNA
atgctctgtccacctggagcc

SEQ ID NO: 46658 - RNA, 21 nt, synthetic construct
  source 1..21: mol_type = other RNA
ggcccaccttggccttgcccc

SEQ ID NO: 46659 - RNA, 21 nt, synthetic construct
  source 1..21: mol_type = other RNA
ccaaagccccctctgctcaac

SEQ ID NO: 46660 - RNA, 21 nt, synthetic construct
  source 1..21: mol_type = other RNA
gctggtgttggctctggcggc

SEQ ID NO: 46661 - RNA, 21 nt, synthetic construct
  source 1..21: mol_type = other RNA
ctcctccactccagggacgac

SEQ ID NO: 46662 - RNA, 21 nt, synthetic construct
  source 1..21: mol_type = other RNA
ctccatccccatgctctgtcc

SEQ ID NO: 46663 - RNA, 21 nt, synthetic construct
  source 1..21: mol_type = other RNA
tctgccgcgcccggggagtgt

SEQ ID NO: 46664 - RNA, 21 nt, synthetic construct
  source 1..21: mol_type = other RNA
accacacccacagccaccagt

SEQ ID NO: 46665 - RNA, 21 nt, synthetic construct
  source 1..21: mol_type = other RNA
cacacccacagccaccagttc

SEQ ID NO: 46666 - RNA, 21 nt, synthetic construct
  source 1..21: mol_type = other RNA
accacacccacagccaccagt

SEQ ID NO: 46667 - RNA, 21 nt, synthetic construct
  source 1..21: mol_type = other RNA
cacacccacagccaccagttc

SEQ ID NO: 46668 - RNA, 21 nt, synthetic construct
  source 1..21: mol_type = other RNA
cccaaagccccctctgctcaa

SEQ ID NO: 46669 - RNA, 21 nt, synthetic construct
  source 1..21: mol_type = other RNA
tgtggcccaccttggccttgc

SEQ ID NO: 46670 - RNA, 21 nt, synthetic construct
  source 1..21: mol_type = other RNA
ggggccgagtgcctccggagc

SEQ ID NO: 46671 - RNA, 21 nt, synthetic construct
  source 1..21: mol_type = other RNA
atccccatgctctgtccacct

SEQ ID NO: 46672 - RNA, 21 nt, synthetic construct
  source 1..21: mol_type = other RNA
tctgtccacctggagccagga

SEQ ID NO: 46673 - RNA, 21 nt, synthetic construct
  source 1..21: mol_type = other RNA
gtgtgcccgccagggcaggag

SEQ ID NO: 46674 - RNA, 21 nt, synthetic construct
  source 1..21: mol_type = other RNA
cccttctgtgtccctgcgccc

SEQ ID NO: 46675 - RNA, 21 nt, synthetic construct
  source 1..21: mol_type = other RNA
tccatccccatgctctgtcca

SEQ ID NO: 46676 - RNA, 21 nt, synthetic construct
  source 1..21: mol_type = other RNA
gcccaccttggccttgcccct

SEQ ID NO: 46677 - RNA, 21 nt, synthetic construct
  source 1..21: mol_type = other RNA
gttctgcctccatccccatgc

SEQ ID NO: 46678 - RNA, 21 nt, synthetic construct
  source 1..21: mol_type = other RNA
ttctgcctccatccccatgct

SEQ ID NO: 46679 - RNA, 21 nt, synthetic construct
  source 1..21: mol_type = other RNA
ctgcctccatccccatgctct

SEQ ID NO: 46680 - RNA, 21 nt, synthetic construct
  source 1..21: mol_type = other RNA
tcagcgtgtccactgtgtcct

SEQ ID NO: 46681 - RNA, 21 nt, synthetic construct
  source 1..21: mol_type = other RNA
tcaagatgtgcttcaactatg

SEQ ID NO: 46682 - RNA, 21 nt, synthetic construct
  source 1..21: mol_type = other RNA
tcaagatgtgcttcaactatg

SEQ ID NO: 46683 - RNA, 21 nt, synthetic construct
  source 1..21: mol_type = other RNA
tcaagatgtgcttcaactatg

SEQ ID NO: 46684 - RNA, 21 nt, synthetic construct
  source 1..21: mol_type = other RNA
tcaagatgtgcttcaactatg

SEQ ID NO: 46685 - RNA, 21 nt, synthetic construct
  source 1..21: mol_type = other RNA
gaggggccagcaggacccctt

SEQ ID NO: 46686 - RNA, 21 nt, synthetic construct
  source 1..21: mol_type = other RNA
ggagctgccacacgctggacg

SEQ ID NO: 46687 - RNA, 21 nt, synthetic construct
  source 1..21: mol_type = other RNA
acggccacaccctcctccact

SEQ ID NO: 46688 - RNA, 21 nt, synthetic construct
  source 1..21: mol_type = other RNA
gagggacgactgtctccagcg

SEQ ID NO: 46689 - RNA, 21 nt, synthetic construct
  source 1..21: mol_type = other RNA
cacgcccttctgtgtccctgc

SEQ ID NO: 46690 - RNA, 21 nt, synthetic construct
  source 1..21: mol_type = other RNA
catccccatgctctgtccacc

SEQ ID NO: 46691 - RNA, 21 nt, synthetic construct
  source 1..21: mol_type = other RNA
gtgaggggccagcaggacccc

SEQ ID NO: 46692 - RNA, 21 nt, synthetic construct
  source 1..21: mol_type = other RNA
gcctgtggcccaccttggcct

SEQ ID NO: 46693 - RNA, 21 nt, synthetic construct
  source 1..21: mol_type = other RNA
caacccagcccagttttgcaa

SEQ ID NO: 46694 - RNA, 21 nt, synthetic construct
  source 1..21: mol_type = other RNA
gagcctgtggcccaccttggc

SEQ ID NO: 46695 - RNA, 21 nt, synthetic construct
  source 1..21: mol_type = other RNA
cacagccacaccctcctccac

SEQ ID NO: 46696 - RNA, 21 nt, synthetic construct
  source 1..21: mol_type = other RNA
acggccatgccctcctccact

SEQ ID NO: 46697 - RNA, 21 nt, synthetic construct
  source 1..21: mol_type = other RNA
cacagccacaccctcctccac

SEQ ID NO: 46698 - RNA, 21 nt, synthetic construct
  source 1..21: mol_type = other RNA
cacagccacaccctcctccac

SEQ ID NO: 46699 - RNA, 21 nt, synthetic construct
  source 1..21: mol_type = other RNA
acggccatgccctcctccact

SEQ ID NO: 46700 - RNA, 21 nt, synthetic construct
  source 1..21: mol_type = other RNA
cacagccacaccctcctccac

SEQ ID NO: 46701 - RNA, 21 nt, synthetic construct
  source 1..21: mol_type = other RNA
ctctgccgcgcccggggagtg

SEQ ID NO: 46702 - RNA, 21 nt, synthetic construct
  source 1..21: mol_type = other RNA
cgcccggggagtgtgcagtga

SEQ ID NO: 46703 - RNA, 21 nt, synthetic construct
  source 1..21: mol_type = other RNA
ccgtgaccaggccccgggccg

SEQ ID NO: 46704 - RNA, 21 nt, synthetic construct
  source 1..21: mol_type = other RNA
ggacgctggtgttggctctgg

SEQ ID NO: 46705 - RNA, 21 nt, synthetic construct
  source 1..21: mol_type = other RNA
caggcagagacccagggccct

SEQ ID NO: 46706 - RNA, 21 nt, synthetic construct
  source 1..21: mol_type = other RNA
acagccacaccctcctccact

SEQ ID NO: 46707 - RNA, 21 nt, synthetic construct
  source 1..21: mol_type = other RNA
cagccacaccctcctccactc

SEQ ID NO: 46708 - RNA, 21 nt, synthetic construct
  source 1..21: mol_type = other RNA
agccacaccctcctccactcc

SEQ ID NO: 46709 - RNA, 21 nt, synthetic construct
  source 1..21: mol_type = other RNA
ccacaccctcctccactccag

SEQ ID NO: 46710 - RNA, 21 nt, synthetic construct
  source 1..21: mol_type = other RNA
tcctccaccccagggaccacc

SEQ ID NO: 46711 - RNA, 21 nt, synthetic construct
  source 1..21: mol_type = other RNA
accccagggaccacctggatc

SEQ ID NO: 46712 - RNA, 21 nt, synthetic construct
  source 1..21: mol_type = other RNA
ccccagggaccacctggatcc

SEQ ID NO: 46713 - RNA, 21 nt, synthetic construct
  source 1..21: mol_type = other RNA
acagccacaccctcctccact

SEQ ID NO: 46714 - RNA, 21 nt, synthetic construct
  source 1..21: mol_type = other RNA
cagccacaccctcctccactc

SEQ ID NO: 46715 - RNA, 21 nt, synthetic construct
  source 1..21: mol_type = other RNA
agccacaccctcctccactcc

SEQ ID NO: 46716 - RNA, 21 nt, synthetic construct
  source 1..21: mol_type = other RNA
ccacaccctcctccactccag

SEQ ID NO: 46717 - RNA, 21 nt, synthetic construct
  source 1..21: mol_type = other RNA
ccctcctccactccagggacg

SEQ ID NO: 46718 - RNA, 21 nt, synthetic construct
  source 1..21: mol_type = other RNA
cctcctccactccagggacga

SEQ ID NO: 46719 - RNA, 21 nt, synthetic construct
  source 1..21: mol_type = other RNA
ccacacccacagccaccagtt

SEQ ID NO: 46720 - RNA, 21 nt, synthetic construct
  source 1..21: mol_type = other RNA
tcctccaccccagggaccacc

SEQ ID NO: 46721 - RNA, 21 nt, synthetic construct
  source 1..21: mol_type = other RNA
accccagggaccacctggatc

SEQ ID NO: 46722 - RNA, 21 nt, synthetic construct
  source 1..21: mol_type = other RNA
ccccagggaccacctggatcc

SEQ ID NO: 46723 - RNA, 21 nt, synthetic construct
  source 1..21: mol_type = other RNA
tcctccaccccagggaccacc

SEQ ID NO: 46724 - RNA, 21 nt, synthetic construct
  source 1..21: mol_type = other RNA
accccagggaccacctggatc

SEQ ID NO: 46725 - RNA, 21 nt, synthetic construct
  source 1..21: mol_type = other RNA
ccccagggaccacctggatcc

SEQ ID NO: 46726 - RNA, 21 nt, synthetic construct
  source 1..21: mol_type = other RNA
acagccacaccctcctccact

SEQ ID NO: 46727 - RNA, 21 nt, synthetic construct
  source 1..21: mol_type = other RNA
cagccacaccctcctccactc

SEQ ID NO: 46728 - RNA, 21 nt, synthetic construct
  source 1..21: mol_type = other RNA
agccacaccctcctccactcc

SEQ ID NO: 46729 - RNA, 21 nt, synthetic construct
  source 1..21: mol_type = other RNA
ccacaccctcctccactccag

SEQ ID NO: 46730 - RNA, 21 nt, synthetic construct
  source 1..21: mol_type = other RNA
ccacacccacagccaccagtt

SEQ ID NO: 46731 - RNA, 21 nt, synthetic construct
  source 1..21: mol_type = other RNA
tcctccaccccagggaccacc

SEQ ID NO: 46732 - RNA, 21 nt, synthetic construct
  source 1..21: mol_type = other RNA
accccagggaccacctggatc

SEQ ID NO: 46733 - RNA, 21 nt, synthetic construct
  source 1..21: mol_type = other RNA
ccccagggaccacctggatcc

SEQ ID NO: 46734 - RNA, 21 nt, synthetic construct
  source 1..21: mol_type = other RNA
tcctccaccccagggaccacc

SEQ ID NO: 46735 - RNA, 21 nt, synthetic construct
  source 1..21: mol_type = other RNA
accccagggaccacctggatc

SEQ ID NO: 46736 - RNA, 21 nt, synthetic construct
  source 1..21: mol_type = other RNA
ccccagggaccacctggatcc

SEQ ID NO: 46737 - RNA, 21 nt, synthetic construct
  source 1..21: mol_type = other RNA
acagccacaccctcctccact

SEQ ID NO: 46738 - RNA, 21 nt, synthetic construct
  source 1..21: mol_type = other RNA
cagccacaccctcctccactc

SEQ ID NO: 46739 - RNA, 21 nt, synthetic construct
  source 1..21: mol_type = other RNA
agccacaccctcctccactcc

SEQ ID NO: 46740 - RNA, 21 nt, synthetic construct
  source 1..21: mol_type = other RNA
ccacaccctcctccactccag

SEQ ID NO: 46741 - RNA, 21 nt, synthetic construct
  source 1..21: mol_type = other RNA
ccacggccacaccctcctcca

SEQ ID NO: 46742 - RNA, 21 nt, synthetic construct
  source 1..21: mol_type = other RNA
cacggccacaccctcctccac

SEQ ID NO: 46743 - RNA, 21 nt, synthetic construct
  source 1..21: mol_type = other RNA
cggccacaccctcctccactc

SEQ ID NO: 46744 - RNA, 21 nt, synthetic construct
  source 1..21: mol_type = other RNA
caccctcctccactctgggga

SEQ ID NO: 46745 - RNA, 21 nt, synthetic construct
  source 1..21: mol_type = other RNA
tcctccactctggggacgacc

SEQ ID NO: 46746 - RNA, 21 nt, synthetic construct
  source 1..21: mol_type = other RNA
tcctccaccccagggaccacc

SEQ ID NO: 46747 - RNA, 21 nt, synthetic construct
  source 1..21: mol_type = other RNA
accccagggaccacctggatc

SEQ ID NO: 46748 - RNA, 21 nt, synthetic construct
  source 1..21: mol_type = other RNA
ccccagggaccacctggatcc

SEQ ID NO: 46749 - RNA, 21 nt, synthetic construct
  source 1..21: mol_type = other RNA
gtgtccactgtgtcctcctca

SEQ ID NO: 46750 - RNA, 21 nt, synthetic construct
  source 1..21: mol_type = other RNA
ctcacctgcccacccaccaaa

SEQ ID NO: 46751 - RNA, 21 nt, synthetic construct
  source 1..21: mol_type = other RNA
gtgcagtgcaagcccctgccc

SEQ ID NO: 46752 - RNA, 21 nt, synthetic construct
  source 1..21: mol_type = other RNA
gtgcaagcccctgccctgtga

SEQ ID NO: 46753 - RNA, 21 nt, synthetic construct
  source 1..21: mol_type = other RNA
tgtgcccgccagggcaggagt

SEQ ID NO: 46754 - RNA, 21 nt, synthetic construct
  source 1..21: mol_type = other RNA
cgcccttctgtgtccctgcgc

SEQ ID NO: 46755 - RNA, 21 nt, synthetic construct
  source 1..21: mol_type = other RNA
gcccttctgtgtccctgcgcc

SEQ ID NO: 46756 - RNA, 21 nt, synthetic construct
  source 1..21: mol_type = other RNA
tgcctccatccccatgctctg

SEQ ID NO: 46757 - RNA, 21 nt, synthetic construct
  source 1..21: mol_type = other RNA
ccatccccatgctctgtccac

SEQ ID NO: 46758 - RNA, 21 nt, synthetic construct
  source 1..21: mol_type = other RNA
agggtgaggggccagcaggac

SEQ ID NO: 46759 - RNA, 21 nt, synthetic construct
  source 1..21: mol_type = other RNA
ggtgaggggccagcaggaccc

SEQ ID NO: 46760 - RNA, 21 nt, synthetic construct
  source 1..21: mol_type = other RNA
ggggccagcaggacccctttc

SEQ ID NO: 46761 - RNA, 21 nt, synthetic construct
  source 1..21: mol_type = other RNA
tgggagagcctgtggcccacc

SEQ ID NO: 46762 - RNA, 21 nt, synthetic construct
  source 1..21: mol_type = other RNA
cctgtggcccaccttggcctt

SEQ ID NO: 46763 - RNA, 21 nt, synthetic construct
  source 1..21: mol_type = other RNA
ctgtggcccaccttggccttg

SEQ ID NO: 46764 - RNA, 21 nt, synthetic construct
  source 1..21: mol_type = other RNA
atcccaaagccccctctgctc

SEQ ID NO: 46765 - RNA, 21 nt, synthetic construct
  source 1..21: mol_type = other RNA
ccccctctgctcaacccagcc

SEQ ID NO: 46766 - RNA, 21 nt, synthetic construct
  source 1..21: mol_type = other RNA
tcccaaagccccctctgctca

SEQ ID NO: 46767 - RNA, 21 nt, synthetic construct
  source 1..21: mol_type = other RNA
cacccacagccaccagttcca

SEQ ID NO: 46768 - RNA, 21 nt, synthetic construct
  source 1..21: mol_type = other RNA
acccacagccaccagttccaa

SEQ ID NO: 46769 - RNA, 21 nt, synthetic construct
  source 1..21: mol_type = other RNA
cacccacagccaccagttcca

SEQ ID NO: 46770 - RNA, 21 nt, synthetic construct
  source 1..21: mol_type = other RNA
acccacagccaccagttccaa

SEQ ID NO: 46771 - RNA, 21 nt, synthetic construct
  source 1..21: mol_type = other RNA
ccacagccacaccctcctcca

SEQ ID NO: 46772 - RNA, 21 nt, synthetic construct
  source 1..21: mol_type = other RNA
cccctcctccaccccaggaac

SEQ ID NO: 46773 - RNA, 21 nt, synthetic construct
  source 1..21: mol_type = other RNA
ccacagccacaccctcctcca

SEQ ID NO: 46774 - RNA, 21 nt, synthetic construct
  source 1..21: mol_type = other RNA
cccctcctccaccccaggaac

SEQ ID NO: 46775 - RNA, 21 nt, synthetic construct
  source 1..21: mol_type = other RNA
cccctcctccaccccaggaac

SEQ ID NO: 46776 - RNA, 21 nt, synthetic construct
  source 1..21: mol_type = other RNA
ccacagccacaccctcctcca

SEQ ID NO: 46777 - RNA, 21 nt, synthetic construct
  source 1..21: mol_type = other RNA
ccacagccacaccctcctcca

SEQ ID NO: 46778 - RNA, 21 nt, synthetic construct
  source 1..21: mol_type = other RNA
cccctcctccaccccaggaac

SEQ ID NO: 46779 - RNA, 21 nt, synthetic construct
  source 1..21: mol_type = other RNA
ctgggagagcctgtggcccac

SEQ ID NO: 46780 - RNA, 21 nt, synthetic construct
  source 1..21: mol_type = other RNA
tccacagccacaccctcctcc

SEQ ID NO: 46781 - RNA, 21 nt, synthetic construct
  source 1..21: mol_type = other RNA
tccacagccacaccctcctcc

SEQ ID NO: 46782 - RNA, 21 nt, synthetic construct
  source 1..21: mol_type = other RNA
gccaccacacccacagccacc

SEQ ID NO: 46783 - RNA, 21 nt, synthetic construct
  source 1..21: mol_type = other RNA
tccacagccacaccctcctcc

SEQ ID NO: 46784 - RNA, 21 nt, synthetic construct
  source 1..21: mol_type = other RNA
gccaccacacccacagccacc

SEQ ID NO: 46785 - RNA, 21 nt, synthetic construct
  source 1..21: mol_type = other RNA
tccacagccacaccctcctcc

SEQ ID NO: 46786 - RNA, 21 nt, synthetic construct
  source 1..21: mol_type = other RNA
accctcctccactctggggac

SEQ ID NO: 46787 - RNA, 21 nt, synthetic construct
  source 1..21: mol_type = other RNA
acactaccaaagtgctgacta

SEQ ID NO: 46788 - RNA, 21 nt, synthetic construct
  source 1..21: mol_type = other RNA
tgcccctgcacccacggcggc

SEQ ID NO: 46789 - RNA, 21 nt, synthetic construct
  source 1..21: mol_type = other RNA
tccccacagcggagaactgcc

SEQ ID NO: 46790 - RNA, 21 nt, synthetic construct
  source 1..21: mol_type = other RNA
acccgtgttgtcatcaaggcc

SEQ ID NO: 46791 - RNA, 21 nt, synthetic construct
  source 1..21: mol_type = other RNA
ccgtgttgtcatcaaggccca

SEQ ID NO: 46792 - RNA, 21 nt, synthetic construct
  source 1..21: mol_type = other RNA
cgcactggagtttgggaacag

SEQ ID NO: 46793 - RNA, 21 nt, synthetic construct
  source 1..21: mol_type = other RNA
ggccgacgtcacctgcagcgt

SEQ ID NO: 46794 - RNA, 21 nt, synthetic construct
  source 1..21: mol_type = other RNA
actcgactccagccctgtcca

SEQ ID NO: 46795 - RNA, 21 nt, synthetic construct
  source 1..21: mol_type = other RNA
actcgactccagccctgtcca

SEQ ID NO: 46796 - RNA, 21 nt, synthetic construct
  source 1..21: mol_type = other RNA
actcgactccagccctgtcca

SEQ ID NO: 46797 - RNA, 21 nt, synthetic construct
  source 1..21: mol_type = other RNA
agtgtggagaatgagaactac

SEQ ID NO: 46798 - RNA, 21 nt, synthetic construct
  source 1..21: mol_type = other RNA
gtccccacagcggagaactgc

SEQ ID NO: 46799 - RNA, 21 nt, synthetic construct
  source 1..21: mol_type = other RNA
gccctgtgacttccactatga

SEQ ID NO: 46800 - RNA, 21 nt, synthetic construct
  source 1..21: mol_type = other RNA
accccaggaacagctcacact

SEQ ID NO: 46801 - RNA, 21 nt, synthetic construct
  source 1..21: mol_type = other RNA
accccaggaacagctcacact

SEQ ID NO: 46802 - RNA, 21 nt, synthetic construct
  source 1..21: mol_type = other RNA
accccaggaacagctcacact

SEQ ID NO: 46803 - RNA, 21 nt, synthetic construct
  source 1..21: mol_type = other RNA
accccaggaacagctcacact

SEQ ID NO: 46804 - RNA, 21 nt, synthetic construct
  source 1..21: mol_type = other RNA
accccaggaacagctcacact

SEQ ID NO: 46805 - RNA, 21 nt, synthetic construct
  source 1..21: mol_type = other RNA
actacggccactgccccagca

SEQ ID NO: 46806 - RNA, 21 nt, synthetic construct
  source 1..21: mol_type = other RNA
actacggccactgccccagca

SEQ ID NO: 46807 - RNA, 21 nt, synthetic construct
  source 1..21: mol_type = other RNA
actacggccactgccccagca

SEQ ID NO: 46808 - RNA, 21 nt, synthetic construct
  source 1..21: mol_type = other RNA
actacggccactgccccagca

SEQ ID NO: 46809 - RNA, 21 nt, synthetic construct
  source 1..21: mol_type = other RNA
aggacccctgctccctcagtg

SEQ ID NO: 46810 - RNA, 21 nt, synthetic construct
  source 1..21: mol_type = other RNA
acgcactggagtttgggaaca

SEQ ID NO: 46811 - RNA, 21 nt, synthetic construct
  source 1..21: mol_type = other RNA
aactacggccactgccccagc

SEQ ID NO: 46812 - RNA, 21 nt, synthetic construct
  source 1..21: mol_type = other RNA
ctacggccactgccccagcac

SEQ ID NO: 46813 - RNA, 21 nt, synthetic construct
  source 1..21: mol_type = other RNA
aactacggccactgccccagc

SEQ ID NO: 46814 - RNA, 21 nt, synthetic construct
  source 1..21: mol_type = other RNA
ctacggccactgccccagcac

SEQ ID NO: 46815 - RNA, 21 nt, synthetic construct
  source 1..21: mol_type = other RNA
aactacggccactgccccagc

SEQ ID NO: 46816 - RNA, 21 nt, synthetic construct
  source 1..21: mol_type = other RNA
ctacggccactgccccagcac

SEQ ID NO: 46817 - RNA, 21 nt, synthetic construct
  source 1..21: mol_type = other RNA
aactacggccactgccccagc

SEQ ID NO: 46818 - RNA, 21 nt, synthetic construct
  source 1..21: mol_type = other RNA
ctacggccactgccccagcac

SEQ ID NO: 46819 - RNA, 21 nt, synthetic construct
  source 1..21: mol_type = other RNA
gcgactgctgtcccaccttcc

SEQ ID NO: 46820 - RNA, 21 nt, synthetic construct
  source 1..21: mol_type = other RNA
aggccgacgtcacctgcagcg

SEQ ID NO: 46821 - RNA, 21 nt, synthetic construct
  source 1..21: mol_type = other RNA
ccctgcacccacggcggccgc

SEQ ID NO: 46822 - RNA, 21 nt, synthetic construct
  source 1..21: mol_type = other RNA
gctccctcagtgtggagaatg

SEQ ID NO: 46823 - RNA, 21 nt, synthetic construct
  source 1..21: mol_type = other RNA
cccctgcacccacggcggccg

SEQ ID NO: 46824 - RNA, 21 nt, synthetic construct
  source 1..21: mol_type = other RNA
acggcggccgcacctacagcc

SEQ ID NO: 46825 - RNA, 21 nt, synthetic construct
  source 1..21: mol_type = other RNA
ctgggagcctctctgcagaaa

SEQ ID NO: 46826 - RNA, 21 nt, synthetic construct
  source 1..21: mol_type = other RNA
tcctccactccagagactgcc

SEQ ID NO: 46827 - RNA, 21 nt, synthetic construct
  source 1..21: mol_type = other RNA
tcctccactccagagactgcc

SEQ ID NO: 46828 - RNA, 21 nt, synthetic construct
  source 1..21: mol_type = other RNA
ccacaaccaccacacccacaa

SEQ ID NO: 46829 - RNA, 21 nt, synthetic construct
  source 1..21: mol_type = other RNA
agccagccctgtgacttccac

SEQ ID NO: 46830 - RNA, 21 nt, synthetic construct
  source 1..21: mol_type = other RNA
gagccagccctgtgacttcca

SEQ ID NO: 46831 - RNA, 21 nt, synthetic construct
  source 1..21: mol_type = other RNA
agccctgtgacttccactatg

SEQ ID NO: 46832 - RNA, 21 nt, synthetic construct
  source 1..21: mol_type = other RNA
tgtggtcacccgtgttgtcat

SEQ ID NO: 46833 - RNA, 21 nt, synthetic construct
  source 1..21: mol_type = other RNA
gggcgactgctgtcccacctt

SEQ ID NO: 46834 - RNA, 21 nt, synthetic construct
  source 1..21: mol_type = other RNA
gggagcctctctgcagaaaag

SEQ ID NO: 46835 - RNA, 21 nt, synthetic construct
  source 1..21: mol_type = other RNA
cagccctgtgacttccactat

SEQ ID NO: 46836 - RNA, 21 nt, synthetic construct
  source 1..21: mol_type = other RNA
ctgtggtcacccgtgttgtca

SEQ ID NO: 46837 - RNA, 21 nt, synthetic construct
  source 1..21: mol_type = other RNA
gcagcccctgggcctcgagtg

SEQ ID NO: 46838 - RNA, 21 nt, synthetic construct
  source 1..21: mol_type = other RNA
gccactgccccagcaccccgg

SEQ ID NO: 46839 - RNA, 21 nt, synthetic construct
  source 1..21: mol_type = other RNA
gcagcccctgggcctcgagtg

SEQ ID NO: 46840 - RNA, 21 nt, synthetic construct
  source 1..21: mol_type = other RNA
gccactgccccagcaccccgg

SEQ ID NO: 46841 - RNA, 21 nt, synthetic construct
  source 1..21: mol_type = other RNA
gcagcccctgggcctcgagtg

SEQ ID NO: 46842 - RNA, 21 nt, synthetic construct
  source 1..21: mol_type = other RNA
gccactgccccagcaccccgg

SEQ ID NO: 46843 - RNA, 21 nt, synthetic construct
  source 1..21: mol_type = other RNA
gcagcccctgggcctcgagtg

SEQ ID NO: 46844 - RNA, 21 nt, synthetic construct
  source 1..21: mol_type = other RNA
gccactgccccagcaccccgg

SEQ ID NO: 46845 - RNA, 21 nt, synthetic construct
  source 1..21: mol_type = other RNA
gttgtcatcaaggcccagggg

SEQ ID NO: 46846 - RNA, 21 nt, synthetic construct
  source 1..21: mol_type = other RNA
cccgtgttgtcatcaaggccc

SEQ ID NO: 46847 - RNA, 21 nt, synthetic construct
  source 1..21: mol_type = other RNA
gctgcaactacggccactgcc

SEQ ID NO: 46848 - RNA, 21 nt, synthetic construct
  source 1..21: mol_type = other RNA
gctgcaactacggccactgcc

SEQ ID NO: 46849 - RNA, 21 nt, synthetic construct
  source 1..21: mol_type = other RNA
gctgcaactacggccactgcc

SEQ ID NO: 46850 - RNA, 21 nt, synthetic construct
  source 1..21: mol_type = other RNA
gctgcaactacggccactgcc

SEQ ID NO: 46851 - RNA, 21 nt, synthetic construct
  source 1..21: mol_type = other RNA
cctcctccagtccagggactg

SEQ ID NO: 46852 - RNA, 21 nt, synthetic construct
  source 1..21: mol_type = other RNA
ctcctccagtccagggactgc

SEQ ID NO: 46853 - RNA, 21 nt, synthetic construct
  source 1..21: mol_type = other RNA
tccaccccaggaacagctcac

SEQ ID NO: 46854 - RNA, 21 nt, synthetic construct
  source 1..21: mol_type = other RNA
tccaccccaggaacagctcac

SEQ ID NO: 46855 - RNA, 21 nt, synthetic construct
  source 1..21: mol_type = other RNA
cctcctccagtccagggactg

SEQ ID NO: 46856 - RNA, 21 nt, synthetic construct
  source 1..21: mol_type = other RNA
ctcctccagtccagggactgc

SEQ ID NO: 46857 - RNA, 21 nt, synthetic construct
  source 1..21: mol_type = other RNA
tccaccccaggaacagctcac

SEQ ID NO: 46858 - RNA, 21 nt, synthetic construct
  source 1..21: mol_type = other RNA
tccaccccaggaacagctcac

SEQ ID NO: 46859 - RNA, 21 nt, synthetic construct
  source 1..21: mol_type = other RNA
cctcctccagtccagggactg

SEQ ID NO: 46860 - RNA, 21 nt, synthetic construct
  source 1..21: mol_type = other RNA
ctcctccagtccagggactgc

SEQ ID NO: 46861 - RNA, 21 nt, synthetic construct
  source 1..21: mol_type = other RNA
tccaccccaggaacagctcac

SEQ ID NO: 46862 - RNA, 21 nt, synthetic construct
  source 1..21: mol_type = other RNA
ccagccctgtgacttccacta

SEQ ID NO: 46863 - RNA, 21 nt, synthetic construct
  source 1..21: mol_type = other RNA
cacccctgcagtgctccccag

SEQ ID NO: 46864 - RNA, 21 nt, synthetic construct
  source 1..21: mol_type = other RNA
ctcctccaccccaggaacagc

SEQ ID NO: 46865 - RNA, 21 nt, synthetic construct
  source 1..21: mol_type = other RNA
ctcctccaccccaggaacagc

SEQ ID NO: 46866 - RNA, 21 nt, synthetic construct
  source 1..21: mol_type = other RNA
ctcctccaccccaggaacagc

SEQ ID NO: 46867 - RNA, 21 nt, synthetic construct
  source 1..21: mol_type = other RNA
ctcctccaccccaggaacagc

SEQ ID NO: 46868 - RNA, 21 nt, synthetic construct
  source 1..21: mol_type = other RNA
ctctgcccccggacctgcccc

SEQ ID NO: 46869 - RNA, 21 nt, synthetic construct
  source 1..21: mol_type = other RNA
cctgggagcctctctgcagaa

SEQ ID NO: 46870 - RNA, 21 nt, synthetic construct
  source 1..21: mol_type = other RNA
acggccactgccccagcaccc

SEQ ID NO: 46871 - RNA, 21 nt, synthetic construct
  source 1..21: mol_type = other RNA
acggccactgccccagcaccc

SEQ ID NO: 46872 - RNA, 21 nt, synthetic construct
  source 1..21: mol_type = other RNA
acggccactgccccagcaccc

SEQ ID NO: 46873 - RNA, 21 nt, synthetic construct
  source 1..21: mol_type = other RNA
acggccactgccccagcaccc

SEQ ID NO: 46874 - RNA, 21 nt, synthetic construct
  source 1..21: mol_type = other RNA
ctccaccccaggaacagctca

SEQ ID NO: 46875 - RNA, 21 nt, synthetic construct
  source 1..21: mol_type = other RNA
ctccaccccaggaacagctca

SEQ ID NO: 46876 - RNA, 21 nt, synthetic construct
  source 1..21: mol_type = other RNA
ctccaccccaggaacagctca

SEQ ID NO: 46877 - RNA, 21 nt, synthetic construct
  source 1..21: mol_type = other RNA
ctccaccccaggaacagctca

SEQ ID NO: 46878 - RNA, 21 nt, synthetic construct
  source 1..21: mol_type = other RNA
cccctgcagtgctccccagca

SEQ ID NO: 46879 - RNA, 21 nt, synthetic construct
  source 1..21: mol_type = other RNA
ccctgcagtgctccccagcag

SEQ ID NO: 46880 - RNA, 21 nt, synthetic construct
  source 1..21: mol_type = other RNA
tccctcctccagtccagggac

SEQ ID NO: 46881 - RNA, 21 nt, synthetic construct
  source 1..21: mol_type = other RNA
accctcctccactccagagac

SEQ ID NO: 46882 - RNA, 21 nt, synthetic construct
  source 1..21: mol_type = other RNA
accctcctccactccagagac

SEQ ID NO: 46883 - RNA, 21 nt, synthetic construct
  source 1..21: mol_type = other RNA
tccctcctccagtccagggac

SEQ ID NO: 46884 - RNA, 21 nt, synthetic construct
  source 1..21: mol_type = other RNA
accctcctccactccagagac

SEQ ID NO: 46885 - RNA, 21 nt, synthetic construct
  source 1..21: mol_type = other RNA
tccctcctccagtccagggac

SEQ ID NO: 46886 - RNA, 21 nt, synthetic construct
  source 1..21: mol_type = other RNA
accctcctccactccagagac

SEQ ID NO: 46887 - RNA, 21 nt, synthetic construct
  source 1..21: mol_type = other RNA
ggcagtgctgtggggagtgcg

SEQ ID NO: 46888 - RNA, 21 nt, synthetic construct
  source 1..21: mol_type = other RNA
ggtgaccccctcctccatccc

SEQ ID NO: 46889 - RNA, 21 nt, synthetic construct
  source 1..21: mol_type = other RNA
ggtgaccccctcctccatccc

SEQ ID NO: 46890 - RNA, 21 nt, synthetic construct
  source 1..21: mol_type = other RNA
ggtgaccccctcctccatccc

SEQ ID NO: 46891 - RNA, 21 nt, synthetic construct
  source 1..21: mol_type = other RNA
ggtgaccccctcctccatccc

SEQ ID NO: 46892 - RNA, 21 nt, synthetic construct
  source 1..21: mol_type = other RNA
gcacccacggcggccgcacct

SEQ ID NO: 46893 - RNA, 21 nt, synthetic construct
  source 1..21: mol_type = other RNA
ctcgactccagccctgtccag

SEQ ID NO: 46894 - RNA, 21 nt, synthetic construct
  source 1..21: mol_type = other RNA
ctcgactccagccctgtccag

SEQ ID NO: 46895 - RNA, 21 nt, synthetic construct
  source 1..21: mol_type = other RNA
ctcgactccagccctgtccag

SEQ ID NO: 46896 - RNA, 21 nt, synthetic construct
  source 1..21: mol_type = other RNA
cggccgcacctacagcccggg

SEQ ID NO: 46897 - RNA, 21 nt, synthetic construct
  source 1..21: mol_type = other RNA
gactgctgtcccaccttccgc

SEQ ID NO: 46898 - RNA, 21 nt, synthetic construct
  source 1..21: mol_type = other RNA
ccctgagctctgcccccggac

SEQ ID NO: 46899 - RNA, 21 nt, synthetic construct
  source 1..21: mol_type = other RNA
cctgagctctgcccccggacc

SEQ ID NO: 46900 - RNA, 21 nt, synthetic construct
  source 1..21: mol_type = other RNA
ggccgcacctacagcccgggc

SEQ ID NO: 46901 - RNA, 21 nt, synthetic construct
  source 1..21: mol_type = other RNA
agctgcctgggagcctctctg

SEQ ID NO: 46902 - RNA, 21 nt, synthetic construct
  source 1..21: mol_type = other RNA
gctgcctgggagcctctctgc

SEQ ID NO: 46903 - RNA, 21 nt, synthetic construct
  source 1..21: mol_type = other RNA
cagcccctgggcctcgagtgc

SEQ ID NO: 46904 - RNA, 21 nt, synthetic construct
  source 1..21: mol_type = other RNA
cagcccctgggcctcgagtgc

SEQ ID NO: 46905 - RNA, 21 nt, synthetic construct
  source 1..21: mol_type = other RNA
cagcccctgggcctcgagtgc

SEQ ID NO: 46906 - RNA, 21 nt, synthetic construct
  source 1..21: mol_type = other RNA
cagcccctgggcctcgagtgc

SEQ ID NO: 46907 - RNA, 21 nt, synthetic construct
  source 1..21: mol_type = other RNA
actgctgtcccaccttccgct

SEQ ID NO: 46908 - RNA, 21 nt, synthetic construct
  source 1..21: mol_type = other RNA
cctgctccctcagtgtggaga

SEQ ID NO: 46909 - RNA, 21 nt, synthetic construct
  source 1..21: mol_type = other RNA
cggccaccacaactggggcca

SEQ ID NO: 46910 - RNA, 21 nt, synthetic construct
  source 1..21: mol_type = other RNA
acaaccaccacacccacaacc

SEQ ID NO: 46911 - RNA, 21 nt, synthetic construct
  source 1..21: mol_type = other RNA
acaaccaccacacccacaacc

SEQ ID NO: 46912 - RNA, 21 nt, synthetic construct
  source 1..21: mol_type = other RNA
acaaccaccacacccacaacc

SEQ ID NO: 46913 - RNA, 21 nt, synthetic construct
  source 1..21: mol_type = other RNA
acaaccaccacacccacaacc

SEQ ID NO: 46914 - RNA, 21 nt, synthetic construct
  source 1..21: mol_type = other RNA
acaaccaccacacccacaacc

SEQ ID NO: 46915 - RNA, 21 nt, synthetic construct
  source 1..21: mol_type = other RNA
acaaccaccacacccacaacc

SEQ ID NO: 46916 - RNA, 21 nt, synthetic construct
  source 1..21: mol_type = other RNA
cctgcacccacggcggccgca

SEQ ID NO: 46917 - RNA, 21 nt, synthetic construct
  source 1..21: mol_type = other RNA
ctcagtgtggagaatgagaac

SEQ ID NO: 46918 - RNA, 21 nt, synthetic construct
  source 1..21: mol_type = other RNA
gtgtggagaatgagaactacg

SEQ ID NO: 46919 - RNA, 21 nt, synthetic construct
  source 1..21: mol_type = other RNA
ccaccccaggaacagctcaca

SEQ ID NO: 46920 - RNA, 21 nt, synthetic construct
  source 1..21: mol_type = other RNA
caaccaccacacccacaacca

SEQ ID NO: 46921 - RNA, 21 nt, synthetic construct
  source 1..21: mol_type = other RNA
ccaccccaggaacagctcaca

SEQ ID NO: 46922 - RNA, 21 nt, synthetic construct
  source 1..21: mol_type = other RNA
caaccaccacacccacaacca

SEQ ID NO: 46923 - RNA, 21 nt, synthetic construct
  source 1..21: mol_type = other RNA
ccaccccaggaacagctcaca

SEQ ID NO: 46924 - RNA, 21 nt, synthetic construct
  source 1..21: mol_type = other RNA
caaccaccacacccacaacca

SEQ ID NO: 46925 - RNA, 21 nt, synthetic construct
  source 1..21: mol_type = other RNA
ccaccccaggaacagctcaca

SEQ ID NO: 46926 - RNA, 21 nt, synthetic construct
  source 1..21: mol_type = other RNA
caaccaccacacccacaacca

SEQ ID NO: 46927 - RNA, 21 nt, synthetic construct
  source 1..21: mol_type = other RNA
ccaccccaggaacagctcaca

SEQ ID NO: 46928 - RNA, 21 nt, synthetic construct
  source 1..21: mol_type = other RNA
caaccaccacacccacaacca

SEQ ID NO: 46929 - RNA, 21 nt, synthetic construct
  source 1..21: mol_type = other RNA
caaccaccacacccacaacca

SEQ ID NO: 46930 - RNA, 21 nt, synthetic construct
  source 1..21: mol_type = other RNA
tgcagtgctccccagcagcct

SEQ ID NO: 46931 - RNA, 21 nt, synthetic construct
  source 1..21: mol_type = other RNA
cgagccagccctgtgacttcc

SEQ ID NO: 46932 - RNA, 21 nt, synthetic construct
  source 1..21: mol_type = other RNA
ctgcagtgctccccagcagcc

SEQ ID NO: 46933 - RNA, 21 nt, synthetic construct
  source 1..21: mol_type = other RNA
tcctccaccccaggaacagct

SEQ ID NO: 46934 - RNA, 21 nt, synthetic construct
  source 1..21: mol_type = other RNA
tcctccaccccaggaacagct

SEQ ID NO: 46935 - RNA, 21 nt, synthetic construct
  source 1..21: mol_type = other RNA
tcctccaccccaggaacagct

SEQ ID NO: 46936 - RNA, 21 nt, synthetic construct
  source 1..21: mol_type = other RNA
tcctccaccccaggaacagct

SEQ ID NO: 46937 - RNA, 21 nt, synthetic construct
  source 1..21: mol_type = other RNA
gaggacccctgctccctcagt

SEQ ID NO: 46938 - RNA, 21 nt, synthetic construct
  source 1..21: mol_type = other RNA
gtgagcagcccctgggcctcg

SEQ ID NO: 46939 - RNA, 21 nt, synthetic construct
  source 1..21: mol_type = other RNA
gtgagcagcccctgggcctcg

SEQ ID NO: 46940 - RNA, 21 nt, synthetic construct
  source 1..21: mol_type = other RNA
gtgagcagcccctgggcctcg

SEQ ID NO: 46941 - RNA, 21 nt, synthetic construct
  source 1..21: mol_type = other RNA
gtgagcagcccctgggcctcg

SEQ ID NO: 46942 - RNA, 21 nt, synthetic construct
  source 1..21: mol_type = other RNA
aggcctgtggtcacccgtgtt

SEQ ID NO: 46943 - RNA, 21 nt, synthetic construct
  source 1..21: mol_type = other RNA
gtgttgtcatcaaggcccagg

SEQ ID NO: 46944 - RNA, 21 nt, synthetic construct
  source 1..21: mol_type = other RNA
agctctgcccccggacctgcc

SEQ ID NO: 46945 - RNA, 21 nt, synthetic construct
  source 1..21: mol_type = other RNA
acccacggcggccgcacctac

SEQ ID NO: 46946 - RNA, 21 nt, synthetic construct
  source 1..21: mol_type = other RNA
ggacccctgctccctcagtgt

SEQ ID NO: 46947 - RNA, 21 nt, synthetic construct
  source 1..21: mol_type = other RNA
gacccctgctccctcagtgtg

SEQ ID NO: 46948 - RNA, 21 nt, synthetic construct
  source 1..21: mol_type = other RNA
tgctccctcagtgtggagaat

SEQ ID NO: 46949 - RNA, 21 nt, synthetic construct
  source 1..21: mol_type = other RNA
ctccctcagtgtggagaatga

SEQ ID NO: 46950 - RNA, 21 nt, synthetic construct
  source 1..21: mol_type = other RNA
cagtgtggagaatgagaacta

SEQ ID NO: 46951 - RNA, 21 nt, synthetic construct
  source 1..21: mol_type = other RNA
ctgcctgggagcctctctgca

SEQ ID NO: 46952 - RNA, 21 nt, synthetic construct
  source 1..21: mol_type = other RNA
tgcctgggagcctctctgcag

SEQ ID NO: 46953 - RNA, 21 nt, synthetic construct
  source 1..21: mol_type = other RNA
cctccaccccaggaacagctc

SEQ ID NO: 46954 - RNA, 21 nt, synthetic construct
  source 1..21: mol_type = other RNA
cacaaccaccacacccacaac

SEQ ID NO: 46955 - RNA, 21 nt, synthetic construct
  source 1..21: mol_type = other RNA
aaccaccacacccacaaccag

SEQ ID NO: 46956 - RNA, 21 nt, synthetic construct
  source 1..21: mol_type = other RNA
tgtgagcagcccctgggcctc

SEQ ID NO: 46957 - RNA, 21 nt, synthetic construct
  source 1..21: mol_type = other RNA
tgagcagcccctgggcctcga

SEQ ID NO: 46958 - RNA, 21 nt, synthetic construct
  source 1..21: mol_type = other RNA
agcagcccctgggcctcgagt

SEQ ID NO: 46959 - RNA, 21 nt, synthetic construct
  source 1..21: mol_type = other RNA
cggccactgccccagcacccc

SEQ ID NO: 46960 - RNA, 21 nt, synthetic construct
  source 1..21: mol_type = other RNA
ggccactgccccagcaccccg

SEQ ID NO: 46961 - RNA, 21 nt, synthetic construct
  source 1..21: mol_type = other RNA
ccactgccccagcaccccggc

SEQ ID NO: 46962 - RNA, 21 nt, synthetic construct
  source 1..21: mol_type = other RNA
cctccaccccaggaacagctc

SEQ ID NO: 46963 - RNA, 21 nt, synthetic construct
  source 1..21: mol_type = other RNA
cacaaccaccacacccacaac

SEQ ID NO: 46964 - RNA, 21 nt, synthetic construct
  source 1..21: mol_type = other RNA
aaccaccacacccacaaccag

SEQ ID NO: 46965 - RNA, 21 nt, synthetic construct
  source 1..21: mol_type = other RNA
gaccacccacacccccacagt

SEQ ID NO: 46966 - RNA, 21 nt, synthetic construct
  source 1..21: mol_type = other RNA
tccagccctgtccagccctca

SEQ ID NO: 46967 - RNA, 21 nt, synthetic construct
  source 1..21: mol_type = other RNA
ccagccctgtccagccctcac

SEQ ID NO: 46968 - RNA, 21 nt, synthetic construct
  source 1..21: mol_type = other RNA
tgtgagcagcccctgggcctc

SEQ ID NO: 46969 - RNA, 21 nt, synthetic construct
  source 1..21: mol_type = other RNA
tgagcagcccctgggcctcga

SEQ ID NO: 46970 - RNA, 21 nt, synthetic construct
  source 1..21: mol_type = other RNA
agcagcccctgggcctcgagt

SEQ ID NO: 46971 - RNA, 21 nt, synthetic construct
  source 1..21: mol_type = other RNA
cggccactgccccagcacccc

SEQ ID NO: 46972 - RNA, 21 nt, synthetic construct
  source 1..21: mol_type = other RNA
ggccactgccccagcaccccg

SEQ ID NO: 46973 - RNA, 21 nt, synthetic construct
  source 1..21: mol_type = other RNA
ccactgccccagcaccccggc

SEQ ID NO: 46974 - RNA, 21 nt, synthetic construct
  source 1..21: mol_type = other RNA
cctccaccccaggaacagctc

SEQ ID NO: 46975 - RNA, 21 nt, synthetic construct
  source 1..21: mol_type = other RNA
cacaaccaccacacccacaac

SEQ ID NO: 46976 - RNA, 21 nt, synthetic construct
  source 1..21: mol_type = other RNA
aaccaccacacccacaaccag

SEQ ID NO: 46977 - RNA, 21 nt, synthetic construct
  source 1..21: mol_type = other RNA
tccagccctgtccagccctca

SEQ ID NO: 46978 - RNA, 21 nt, synthetic construct
  source 1..21: mol_type = other RNA
ccagccctgtccagccctcac

SEQ ID NO: 46979 - RNA, 21 nt, synthetic construct
  source 1..21: mol_type = other RNA
tgtgagcagcccctgggcctc

SEQ ID NO: 46980 - RNA, 21 nt, synthetic construct
  source 1..21: mol_type = other RNA
tgagcagcccctgggcctcga

SEQ ID NO: 46981 - RNA, 21 nt, synthetic construct
  source 1..21: mol_type = other RNA
agcagcccctgggcctcgagt

SEQ ID NO: 46982 - RNA, 21 nt, synthetic construct
  source 1..21: mol_type = other RNA
cggccactgccccagcacccc

SEQ ID NO: 46983 - RNA, 21 nt, synthetic construct
  source 1..21: mol_type = other RNA
ggccactgccccagcaccccg

SEQ ID NO: 46984 - RNA, 21 nt, synthetic construct
  source 1..21: mol_type = other RNA
ccactgccccagcaccccggc

SEQ ID NO: 46985 - RNA, 21 nt, synthetic construct
  source 1..21: mol_type = other RNA
cacaaccaccacacccacaac

SEQ ID NO: 46986 - RNA, 21 nt, synthetic construct
  source 1..21: mol_type = other RNA
aaccaccacacccacaaccag

SEQ ID NO: 46987 - RNA, 21 nt, synthetic construct
  source 1..21: mol_type = other RNA
gaccacccacacccccacagt

SEQ ID NO: 46988 - RNA, 21 nt, synthetic construct
  source 1..21: mol_type = other RNA
tccagccctgtccagccctca

SEQ ID NO: 46989 - RNA, 21 nt, synthetic construct
  source 1..21: mol_type = other RNA
ccagccctgtccagccctcac

SEQ ID NO: 46990 - RNA, 21 nt, synthetic construct
  source 1..21: mol_type = other RNA
tgtgagcagcccctgggcctc

SEQ ID NO: 46991 - RNA, 21 nt, synthetic construct
  source 1..21: mol_type = other RNA
tgagcagcccctgggcctcga

SEQ ID NO: 46992 - RNA, 21 nt, synthetic construct
  source 1..21: mol_type = other RNA
agcagcccctgggcctcgagt

SEQ ID NO: 46993 - RNA, 21 nt, synthetic construct
  source 1..21: mol_type = other RNA
cggccactgccccagcacccc

SEQ ID NO: 46994 - RNA, 21 nt, synthetic construct
  source 1..21: mol_type = other RNA
ggccactgccccagcaccccg

SEQ ID NO: 46995 - RNA, 21 nt, synthetic construct
  source 1..21: mol_type = other RNA
ccactgccccagcaccccggc

SEQ ID NO: 46996 - RNA, 21 nt, synthetic construct
  source 1..21: mol_type = other RNA
cctccaccccaggaacagctc

SEQ ID NO: 46997 - RNA, 21 nt, synthetic construct
  source 1..21: mol_type = other RNA
cacaaccaccacacccacaac

SEQ ID NO: 46998 - RNA, 21 nt, synthetic construct
  source 1..21: mol_type = other RNA
cacaaccaccacacccacaac

SEQ ID NO: 46999 - RNA, 21 nt, synthetic construct
  source 1..21: mol_type = other RNA
aaccaccacacccacaaccag

SEQ ID NO: 47000 - RNA, 21 nt, synthetic construct
  source 1..21: mol_type = other RNA
gccagccctgtgacttccact

SEQ ID NO: 47001 - RNA, 21 nt, synthetic construct
  source 1..21: mol_type = other RNA
ctcctccactccagagactgc

SEQ ID NO: 47002 - RNA, 21 nt, synthetic construct
  source 1..21: mol_type = other RNA
ctcctccactccagagactgc

SEQ ID NO: 47003 - RNA, 21 nt, synthetic construct
  source 1..21: mol_type = other RNA
ggaccacccacacccccacag

SEQ ID NO: 47004 - RNA, 21 nt, synthetic construct
  source 1..21: mol_type = other RNA
ggaccacccacacccccacag

SEQ ID NO: 47005 - RNA, 21 nt, synthetic construct
  source 1..21: mol_type = other RNA
ccctcctccagtccagggact

SEQ ID NO: 47006 - RNA, 21 nt, synthetic construct
  source 1..21: mol_type = other RNA
ccctcctccagtccagggact

SEQ ID NO: 47007 - RNA, 21 nt, synthetic construct
  source 1..21: mol_type = other RNA
ccctcctccagtccagggact

SEQ ID NO: 47008 - RNA, 21 nt, synthetic construct
  source 1..21: mol_type = other RNA
cctcctccactccagagactg

SEQ ID NO: 47009 - RNA, 21 nt, synthetic construct
  source 1..21: mol_type = other RNA
cctcctccactccagagactg

SEQ ID NO: 47010 - RNA, 21 nt, synthetic construct
  source 1..21: mol_type = other RNA
cctcctccactccagagactg

SEQ ID NO: 47011 - RNA, 21 nt, synthetic construct
  source 1..21: mol_type = other RNA
cctcctccactccagagactg

SEQ ID NO: 47012 - RNA, 21 nt, synthetic construct
  source 1..21: mol_type = other RNA
ggtactcccccatcactgatc

SEQ ID NO: 47013 - RNA, 21 nt, synthetic construct
  source 1..21: mol_type = other RNA
gctgacatcgagtgccgggcg

SEQ ID NO: 47014 - RNA, 21 nt, synthetic construct
  source 1..21: mol_type = other RNA
gcaacaatactacctgtcccc

SEQ ID NO: 47015 - RNA, 21 nt, synthetic construct
  source 1..21: mol_type = other RNA
gcgactggagggacggcgtct

SEQ ID NO: 47016 - RNA, 21 nt, synthetic construct
  source 1..21: mol_type = other RNA
cccggtctccaccgtgtgtgt

SEQ ID NO: 47017 - RNA, 21 nt, synthetic construct
  source 1..21: mol_type = other RNA
tcaacgcacacatgggcatct

SEQ ID NO: 47018 - RNA, 21 nt, synthetic construct
  source 1..21: mol_type = other RNA
cctacgtggtggatgcctgcc

SEQ ID NO: 47019 - RNA, 21 nt, synthetic construct
  source 1..21: mol_type = other RNA
gggcaactgctggcaccctca

SEQ ID NO: 47020 - RNA, 21 nt, synthetic construct
  source 1..21: mol_type = other RNA
gtatgccctgtgctggctgac

SEQ ID NO: 47021 - RNA, 21 nt, synthetic construct
  source 1..21: mol_type = other RNA
aggcaactgctggcaccccac

SEQ ID NO: 47022 - RNA, 21 nt, synthetic construct
  source 1..21: mol_type = other RNA
aggcaactgctggcaccccac

SEQ ID NO: 47023 - RNA, 21 nt, synthetic construct
  source 1..21: mol_type = other RNA
aggcaactgctggcaccccac

SEQ ID NO: 47024 - RNA, 21 nt, synthetic construct
  source 1..21: mol_type = other RNA
tcgtacaatggcaccttctac

SEQ ID NO: 47025 - RNA, 21 nt, synthetic construct
  source 1..21: mol_type = other RNA
agctaccagcgttacagccat

SEQ ID NO: 47026 - RNA, 21 nt, synthetic construct
  source 1..21: mol_type = other RNA
ccacttcggcctggtgtgcag

SEQ ID NO: 47027 - RNA, 21 nt, synthetic construct
  source 1..21: mol_type = other RNA
agcccttccagggacgacggg

SEQ ID NO: 47028 - RNA, 21 nt, synthetic construct
  source 1..21: mol_type = other RNA
cagccactacgactgagtcca

SEQ ID NO: 47029 - RNA, 21 nt, synthetic construct
  source 1..21: mol_type = other RNA
ggccaccatgtccacaatcca

SEQ ID NO: 47030 - RNA, 21 nt, synthetic construct
  source 1..21: mol_type = other RNA
cagccactacgactgagtcca

SEQ ID NO: 47031 - RNA, 21 nt, synthetic construct
  source 1..21: mol_type = other RNA
ggccaccatgtccacaatcca

SEQ ID NO: 47032 - RNA, 21 nt, synthetic construct
  source 1..21: mol_type = other RNA
acgagggttcagtgtcggtgc

SEQ ID NO: 47033 - RNA, 21 nt, synthetic construct
  source 1..21: mol_type = other RNA
gtgatggtgcccaccggttcc

SEQ ID NO: 47034 - RNA, 21 nt, synthetic construct
  source 1..21: mol_type = other RNA
gcctgcaacaatactacctgt

SEQ ID NO: 47035 - RNA, 21 nt, synthetic construct
  source 1..21: mol_type = other RNA
cccggcgcacaatgggcgggt

SEQ ID NO: 47036 - RNA, 21 nt, synthetic construct
  source 1..21: mol_type = other RNA
gcctacgtggtggatgcctgc

SEQ ID NO: 47037 - RNA, 21 nt, synthetic construct
  source 1..21: mol_type = other RNA
gaccaccctatgggtgacccc

SEQ ID NO: 47038 - RNA, 21 nt, synthetic construct
  source 1..21: mol_type = other RNA
gacccgcacctcgaccctgct

SEQ ID NO: 47039 - RNA, 21 nt, synthetic construct
  source 1..21: mol_type = other RNA
gacccgcacctcgaccctgct

SEQ ID NO: 47040 - RNA, 21 nt, synthetic construct
  source 1..21: mol_type = other RNA
gacccgcacctcgaccctgct

SEQ ID NO: 47041 - RNA, 21 nt, synthetic construct
  source 1..21: mol_type = other RNA
gacccgcacctcgaccctgct

SEQ ID NO: 47042 - RNA, 21 nt, synthetic construct
  source 1..21: mol_type = other RNA
caccgcttccaaagagccgct

SEQ ID NO: 47043 - RNA, 21 nt, synthetic construct
  source 1..21: mol_type = other RNA
ccagctttacagccatcccct

SEQ ID NO: 47044 - RNA, 21 nt, synthetic construct
  source 1..21: mol_type = other RNA
ccagctttacagccatcccct

SEQ ID NO: 47045 - RNA, 21 nt, synthetic construct
  source 1..21: mol_type = other RNA
ccagctttacagccatcccct

SEQ ID NO: 47046 - RNA, 21 nt, synthetic construct
  source 1..21: mol_type = other RNA
gacgacggggagcttgggcac

SEQ ID NO: 47047 - RNA, 21 nt, synthetic construct
  source 1..21: mol_type = other RNA
acaaccggggccaccggctct

SEQ ID NO: 47048 - RNA, 21 nt, synthetic construct
  source 1..21: mol_type = other RNA
tcaccctagcagcaggaccac

SEQ ID NO: 47049 - RNA, 21 nt, synthetic construct
  source 1..21: mol_type = other RNA
tcaccctagcagcaggaccac

SEQ ID NO: 47050 - RNA, 21 nt, synthetic construct
  source 1..21: mol_type = other RNA
tcaccctagcagcaggaccac

SEQ ID NO: 47051 - RNA, 21 nt, synthetic construct
  source 1..21: mol_type = other RNA
acaaccggggccaccggctct

SEQ ID NO: 47052 - RNA, 21 nt, synthetic construct
  source 1..21: mol_type = other RNA
gcctcacgcccgatggccagc

SEQ ID NO: 47053 - RNA, 21 nt, synthetic construct
  source 1..21: mol_type = other RNA
tgctggctgacatcgagtgcc

SEQ ID NO: 47054 - RNA, 21 nt, synthetic construct
  source 1..21: mol_type = other RNA
ggaatgcagcctggactttgg

SEQ ID NO: 47055 - RNA, 21 nt, synthetic construct
  source 1..21: mol_type = other RNA
cccacatgtgagcaccacggc

SEQ ID NO: 47056 - RNA, 21 nt, synthetic construct
  source 1..21: mol_type = other RNA
ggaatgcagcctggactttgg

SEQ ID NO: 47057 - RNA, 21 nt, synthetic construct
  source 1..21: mol_type = other RNA
ggaatgcagcctggactttgg

SEQ ID NO: 47058 - RNA, 21 nt, synthetic construct
  source 1..21: mol_type = other RNA
cccacatgtgagcaccacggc

SEQ ID NO: 47059 - RNA, 21 nt, synthetic construct
  source 1..21: mol_type = other RNA
ggaatgcagcctggactttgg

SEQ ID NO: 47060 - RNA, 21 nt, synthetic construct
  source 1..21: mol_type = other RNA
cccacatgtgagcaccacggc

SEQ ID NO: 47061 - RNA, 21 nt, synthetic construct
  source 1..21: mol_type = other RNA
acggtgcaatgtcaggaggat

SEQ ID NO: 47062 - RNA, 21 nt, synthetic construct
  source 1..21: mol_type = other RNA
cggtgcaatgtcaggaggatg

SEQ ID NO: 47063 - RNA, 21 nt, synthetic construct
  source 1..21: mol_type = other RNA
ggagggcgccactcaggagtc

SEQ ID NO: 47064 - RNA, 21 nt, synthetic construct
  source 1..21: mol_type = other RNA
accaggtatgccctgtgctgg

SEQ ID NO: 47065 - RNA, 21 nt, synthetic construct
  source 1..21: mol_type = other RNA
ccaccacgacaagggccacca

SEQ ID NO: 47066 - RNA, 21 nt, synthetic construct
  source 1..21: mol_type = other RNA
ccaccacgacaagggccacca

SEQ ID NO: 47067 - RNA, 21 nt, synthetic construct
  source 1..21: mol_type = other RNA
ggctctggcggccatgctcgt

SEQ ID NO: 47068 - RNA, 21 nt, synthetic construct
  source 1..21: mol_type = other RNA
cccgggcacctccttcaacac

SEQ ID NO: 47069 - RNA, 21 nt, synthetic construct
  source 1..21: mol_type = other RNA
acaaccagaggctccacggtg

SEQ ID NO: 47070 - RNA, 21 nt, synthetic construct
  source 1..21: mol_type = other RNA
tggtactcccccatcactgac

SEQ ID NO: 47071 - RNA, 21 nt, synthetic construct
  source 1..21: mol_type = other RNA
tggtactcccccatcactgac

SEQ ID NO: 47072 - RNA, 21 nt, synthetic construct
  source 1..21: mol_type = other RNA
acaaccagaggctccacggtg

SEQ ID NO: 47073 - RNA, 21 nt, synthetic construct
  source 1..21: mol_type = other RNA
tggtactcccccatcactgac

SEQ ID NO: 47074 - RNA, 21 nt, synthetic construct
  source 1..21: mol_type = other RNA
tggtactcccccatcactgat

SEQ ID NO: 47075 - RNA, 21 nt, synthetic construct
  source 1..21: mol_type = other RNA
tggtactcccccatcactgac

SEQ ID NO: 47076 - RNA, 21 nt, synthetic construct
  source 1..21: mol_type = other RNA
gtgtggctcaccctgcacgga

SEQ ID NO: 47077 - RNA, 21 nt, synthetic construct
  source 1..21: mol_type = other RNA
tgccacaaccttgtgcccccg

SEQ ID NO: 47078 - RNA, 21 nt, synthetic construct
  source 1..21: mol_type = other RNA
aacgcctgcatcagcgaccac

SEQ ID NO: 47079 - RNA, 21 nt, synthetic construct
  source 1..21: mol_type = other RNA
ggggggccagccgcggaactg

SEQ ID NO: 47080 - RNA, 21 nt, synthetic construct
  source 1..21: mol_type = other RNA
gttctgtccaagaaatgtgcc

SEQ ID NO: 47081 - RNA, 21 nt, synthetic construct
  source 1..21: mol_type = other RNA
tggtggaggccacgggcgcag

SEQ ID NO: 47082 - RNA, 21 nt, synthetic construct
  source 1..21: mol_type = other RNA
aggctgcctgtgccaatgcca

SEQ ID NO: 47083 - RNA, 21 nt, synthetic construct
  source 1..21: mol_type = other RNA
tggtgtacctggactgcagca

SEQ ID NO: 47084 - RNA, 21 nt, synthetic construct
  source 1..21: mol_type = other RNA
agactttgagacgtttgaaaa

SEQ ID NO: 47085 - RNA, 21 nt, synthetic construct
  source 1..21: mol_type = other RNA
cagagctggagacggccacca

SEQ ID NO: 47086 - RNA, 21 nt, synthetic construct
  source 1..21: mol_type = other RNA
gcttccaaagagccgctgacc

SEQ ID NO: 47087 - RNA, 21 nt, synthetic construct
  source 1..21: mol_type = other RNA
acctggatcctcacagagcag

SEQ ID NO: 47088 - RNA, 21 nt, synthetic construct
  source 1..21: mol_type = other RNA
accacagcagccactacgacc

SEQ ID NO: 47089 - RNA, 21 nt, synthetic construct
  source 1..21: mol_type = other RNA
accactggatccacggccatc

SEQ ID NO: 47090 - RNA, 21 nt, synthetic construct
  source 1..21: mol_type = other RNA
aaagtgctgaccagcacggcc

SEQ ID NO: 47091 - RNA, 21 nt, synthetic construct
  source 1..21: mol_type = other RNA
aaagtgctgaccagcacggcc

SEQ ID NO: 47092 - RNA, 21 nt, synthetic construct
  source 1..21: mol_type = other RNA
tcaactccagggacaactccc

SEQ ID NO: 47093 - RNA, 21 nt, synthetic construct
  source 1..21: mol_type = other RNA
agtggctccacggtgaccccc

SEQ ID NO: 47094 - RNA, 21 nt, synthetic construct
  source 1..21: mol_type = other RNA
agtggctccacggtgaccccc

SEQ ID NO: 47095 - RNA, 21 nt, synthetic construct
  source 1..21: mol_type = other RNA
tactccagagaccacccacac

SEQ ID NO: 47096 - RNA, 21 nt, synthetic construct
  source 1..21: mol_type = other RNA
cccaaagcctgtggccaacgt

SEQ ID NO: 47097 - RNA, 21 nt, synthetic construct
  source 1..21: mol_type = other RNA
gaaaggatggctgctgggccc

SEQ ID NO: 47098 - RNA, 21 nt, synthetic construct
  source 1..21: mol_type = other RNA
ctgagccaggtctttgctgag

SEQ ID NO: 47099 - RNA, 21 nt, synthetic construct
  source 1..21: mol_type = other RNA
gcccttccctgccacatgtgt

SEQ ID NO: 47100 - RNA, 21 nt, synthetic construct
  source 1..21: mol_type = other RNA
agtgctgtggggagtgcgtcc

SEQ ID NO: 47101 - RNA, 21 nt, synthetic construct
  source 1..21: mol_type = other RNA
tgaatgaaacctgggtcaaca

SEQ ID NO: 47102 - RNA, 21 nt, synthetic construct
  source 1..21: mol_type = other RNA
gagggcgccactcaggagtcc

SEQ ID NO: 47103 - RNA, 21 nt, synthetic construct
  source 1..21: mol_type = other RNA
agaaccaggctgacgacttca

SEQ ID NO: 47104 - RNA, 21 nt, synthetic construct
  source 1..21: mol_type = other RNA
ccgccaagggcgtacagctca

SEQ ID NO: 47105 - RNA, 21 nt, synthetic construct
  source 1..21: mol_type = other RNA
gtgtgtgacgagggttcagtg

SEQ ID NO: 47106 - RNA, 21 nt, synthetic construct
  source 1..21: mol_type = other RNA
caggccccgtgacggtcaccc

SEQ ID NO: 47107 - RNA, 21 nt, synthetic construct
  source 1..21: mol_type = other RNA
cacaaccagaggctccacggt

SEQ ID NO: 47108 - RNA, 21 nt, synthetic construct
  source 1..21: mol_type = other RNA
cacaaccagaggctccacggt

SEQ ID NO: 47109 - RNA, 21 nt, synthetic construct
  source 1..21: mol_type = other RNA
ccacccagcactcgactccag

SEQ ID NO: 47110 - RNA, 21 nt, synthetic construct
  source 1..21: mol_type = other RNA
ccacccagcactcgactccag

SEQ ID NO: 47111 - RNA, 21 nt, synthetic construct
  source 1..21: mol_type = other RNA
ccacccagcactcgactccag

SEQ ID NO: 47112 - RNA, 21 nt, synthetic construct
  source 1..21: mol_type = other RNA
atcctcacaaagctgaccaca

SEQ ID NO: 47113 - RNA, 21 nt, synthetic construct
  source 1..21: mol_type = other RNA
ccacccagcactcgactccag

SEQ ID NO: 47114 - RNA, 21 nt, synthetic construct
  source 1..21: mol_type = other RNA
ccttccctgccacatgtgtac

SEQ ID NO: 47115 - RNA, 21 nt, synthetic construct
  source 1..21: mol_type = other RNA
tgtgtgacgagggttcagtgt

SEQ ID NO: 47116 - RNA, 21 nt, synthetic construct
  source 1..21: mol_type = other RNA
ggcgccactcaggagtcctac

SEQ ID NO: 47117 - RNA, 21 nt, synthetic construct
  source 1..21: mol_type = other RNA
tccagtccaaggactgcaacc

SEQ ID NO: 47118 - RNA, 21 nt, synthetic construct
  source 1..21: mol_type = other RNA
tccagtccaaggactgcaacc

SEQ ID NO: 47119 - RNA, 21 nt, synthetic construct
  source 1..21: mol_type = other RNA
tccagtccaaggactgcaacc

SEQ ID NO: 47120 - RNA, 21 nt, synthetic construct
  source 1..21: mol_type = other RNA
caagaaatgtgccgacagcag

SEQ ID NO: 47121 - RNA, 21 nt, synthetic construct
  source 1..21: mol_type = other RNA
gacaagggccaccagttccat

SEQ ID NO: 47122 - RNA, 21 nt, synthetic construct
  source 1..21: mol_type = other RNA
tcctcacaaagctgaccacaa

SEQ ID NO: 47123 - RNA, 21 nt, synthetic construct
  source 1..21: mol_type = other RNA
gacaagggccaccagttccac

SEQ ID NO: 47124 - RNA, 21 nt, synthetic construct
  source 1..21: mol_type = other RNA
gtacagccaccacgggaggcc

SEQ ID NO: 47125 - RNA, 21 nt, synthetic construct
  source 1..21: mol_type = other RNA
ggccacaccaggggcacctcc

SEQ ID NO: 47126 - RNA, 21 nt, synthetic construct
  source 1..21: mol_type = other RNA
gtgcactgtgacgtccacttc

SEQ ID NO: 47127 - RNA, 21 nt, synthetic construct
  source 1..21: mol_type = other RNA
ggccgcctgcgcccaggacct

SEQ ID NO: 47128 - RNA, 21 nt, synthetic construct
  source 1..21: mol_type = other RNA
ggtgcactgtgacgtccactt

SEQ ID NO: 47129 - RNA, 21 nt, synthetic construct
  source 1..21: mol_type = other RNA
gctggcaccctcaaagtgctg

SEQ ID NO: 47130 - RNA, 21 nt, synthetic construct
  source 1..21: mol_type = other RNA
cggcgcacaatgggcgggtgt

SEQ ID NO: 47131 - RNA, 21 nt, synthetic construct
  source 1..21: mol_type = other RNA
gccctcacctcgcagactggg

SEQ ID NO: 47132 - RNA, 21 nt, synthetic construct
  source 1..21: mol_type = other RNA
tgacgtccacttcggcctggt

SEQ ID NO: 47133 - RNA, 21 nt, synthetic construct
  source 1..21: mol_type = other RNA
atcccccagatacacaagcac

SEQ ID NO: 47134 - RNA, 21 nt, synthetic construct
  source 1..21: mol_type = other RNA
cctatcacagaccaccacacc

SEQ ID NO: 47135 - RNA, 21 nt, synthetic construct
  source 1..21: mol_type = other RNA
tgtgcctggtcagagtggctg

SEQ ID NO: 47136 - RNA, 21 nt, synthetic construct
  source 1..21: mol_type = other RNA
cctatcacagaccaccacacc

SEQ ID NO: 47137 - RNA, 21 nt, synthetic construct
  source 1..21: mol_type = other RNA
tgtgcctggtcagagtggctg

SEQ ID NO: 47138 - RNA, 21 nt, synthetic construct
  source 1..21: mol_type = other RNA
ctggatcctcacagagcccag

SEQ ID NO: 47139 - RNA, 21 nt, synthetic construct
  source 1..21: mol_type = other RNA
cctatcacagaccaccacacc

SEQ ID NO: 47140 - RNA, 21 nt, synthetic construct
  source 1..21: mol_type = other RNA
tgtgcctggtcagagtggctg

SEQ ID NO: 47141 - RNA, 21 nt, synthetic construct
  source 1..21: mol_type = other RNA
cctatcacagaccaccacacc

SEQ ID NO: 47142 - RNA, 21 nt, synthetic construct
  source 1..21: mol_type = other RNA
tgtgcctggtcagagtggctg

SEQ ID NO: 47143 - RNA, 21 nt, synthetic construct
  source 1..21: mol_type = other RNA
cctatcacagaccaccacacc

SEQ ID NO: 47144 - RNA, 21 nt, synthetic construct
  source 1..21: mol_type = other RNA
cacctcctctactccagagac

SEQ ID NO: 47145 - RNA, 21 nt, synthetic construct
  source 1..21: mol_type = other RNA
tcagcatcccaaagccccctc

SEQ ID NO: 47146 - RNA, 21 nt, synthetic construct
  source 1..21: mol_type = other RNA
ggagccgagctgggagaatgc

SEQ ID NO: 47147 - RNA, 21 nt, synthetic construct
  source 1..21: mol_type = other RNA
caggctgaccccgctccagtt

SEQ ID NO: 47148 - RNA, 21 nt, synthetic construct
  source 1..21: mol_type = other RNA
ctgcgggttctctgctgcgaa

SEQ ID NO: 47149 - RNA, 21 nt, synthetic construct
  source 1..21: mol_type = other RNA
ccgacaggcacagccagcacc

SEQ ID NO: 47150 - RNA, 21 nt, synthetic construct
  source 1..21: mol_type = other RNA
tggcaacaccctcctctagca

SEQ ID NO: 47151 - RNA, 21 nt, synthetic construct
  source 1..21: mol_type = other RNA
agcactcgactccagcccttt

SEQ ID NO: 47152 - RNA, 21 nt, synthetic construct
  source 1..21: mol_type = other RNA
tgaccatgggctgtgagcccc

SEQ ID NO: 47153 - RNA, 21 nt, synthetic construct
  source 1..21: mol_type = other RNA
ccagtgtgcctggtcagagtg

SEQ ID NO: 47154 - RNA, 21 nt, synthetic construct
  source 1..21: mol_type = other RNA
cgagtgccgtgcccaggccca

SEQ ID NO: 47155 - RNA, 21 nt, synthetic construct
  source 1..21: mol_type = other RNA
tggcaacaccctcctctagca

SEQ ID NO: 47156 - RNA, 21 nt, synthetic construct
  source 1..21: mol_type = other RNA
tgaccatgggctgtgagcccc

SEQ ID NO: 47157 - RNA, 21 nt, synthetic construct
  source 1..21: mol_type = other RNA
ccagtgtgcctggtcagagtg

SEQ ID NO: 47158 - RNA, 21 nt, synthetic construct
  source 1..21: mol_type = other RNA
cgagtgccgtgcccaggccca

SEQ ID NO: 47159 - RNA, 21 nt, synthetic construct
  source 1..21: mol_type = other RNA
tccagggacgacctggatcct

SEQ ID NO: 47160 - RNA, 21 nt, synthetic construct
  source 1..21: mol_type = other RNA
accccgggaacagctccccct

SEQ ID NO: 47161 - RNA, 21 nt, synthetic construct
  source 1..21: mol_type = other RNA
ccctcccagaacagaccacca

SEQ ID NO: 47162 - RNA, 21 nt, synthetic construct
  source 1..21: mol_type = other RNA
ctggcaccctcaaagtgctga

SEQ ID NO: 47163 - RNA, 21 nt, synthetic construct
  source 1..21: mol_type = other RNA
tggcaacaccctcctctagca

SEQ ID NO: 47164 - RNA, 21 nt, synthetic construct
  source 1..21: mol_type = other RNA
ccagtgtgcctggtcagagtg

SEQ ID NO: 47165 - RNA, 21 nt, synthetic construct
  source 1..21: mol_type = other RNA
cgagtgccgtgcccaggccca

SEQ ID NO: 47166 - RNA, 21 nt, synthetic construct
  source 1..21: mol_type = other RNA
gacggcacgcacgcctccagt

SEQ ID NO: 47167 - RNA, 21 nt, synthetic construct
  source 1..21: mol_type = other RNA
tggcaacaccctcctctagca

SEQ ID NO: 47168 - RNA, 21 nt, synthetic construct
  source 1..21: mol_type = other RNA
ccagtgtgcctggtcagagtg

SEQ ID NO: 47169 - RNA, 21 nt, synthetic construct
  source 1..21: mol_type = other RNA
cgagtgccgtgcccaggccca

SEQ ID NO: 47170 - RNA, 21 nt, synthetic construct
  source 1..21: mol_type = other RNA
accccgggaacagctccccct

SEQ ID NO: 47171 - RNA, 21 nt, synthetic construct
  source 1..21: mol_type = other RNA
ccctcccagaacagaccacca

SEQ ID NO: 47172 - RNA, 21 nt, synthetic construct
  source 1..21: mol_type = other RNA
ccgtggccaccatgtccacaa

SEQ ID NO: 47173 - RNA, 21 nt, synthetic construct
  source 1..21: mol_type = other RNA
ccgccagagtgctgaccacca

SEQ ID NO: 47174 - RNA, 21 nt, synthetic construct
  source 1..21: mol_type = other RNA
tggcaacaccctcctctagca

SEQ ID NO: 47175 - RNA, 21 nt, synthetic construct
  source 1..21: mol_type = other RNA
ccggggagcggtgggtcagca

SEQ ID NO: 47176 - RNA, 21 nt, synthetic construct
  source 1..21: mol_type = other RNA
gcctgtgtgcccgccagggca

SEQ ID NO: 47177 - RNA, 21 nt, synthetic construct
  source 1..21: mol_type = other RNA
ctttgagtacaagagagtggc

SEQ ID NO: 47178 - RNA, 21 nt, synthetic construct
  source 1..21: mol_type = other RNA
ccctcaacatgcagcaccagg

SEQ ID NO: 47179 - RNA, 21 nt, synthetic construct
  source 1..21: mol_type = other RNA
tcccccagatacacaagcacc

SEQ ID NO: 47180 - RNA, 21 nt, synthetic construct
  source 1..21: mol_type = other RNA
cctctccggcaggtgaatgag

SEQ ID NO: 47181 - RNA, 21 nt, synthetic construct
  source 1..21: mol_type = other RNA
cttctcgcgctgccactccat

SEQ ID NO: 47182 - RNA, 21 nt, synthetic construct
  source 1..21: mol_type = other RNA
ggtgaccacgggctgtgagcc

SEQ ID NO: 47183 - RNA, 21 nt, synthetic construct
  source 1..21: mol_type = other RNA
ggtgaccacgggctgtgagcc

SEQ ID NO: 47184 - RNA, 21 nt, synthetic construct
  source 1..21: mol_type = other RNA
gctgagggtggagtccatttg

SEQ ID NO: 47185 - RNA, 21 nt, synthetic construct
  source 1..21: mol_type = other RNA
tgcccaccccgtgggtgaaac

SEQ ID NO: 47186 - RNA, 21 nt, synthetic construct
  source 1..21: mol_type = other RNA
gccgcctgcgcccaggacctg

SEQ ID NO: 47187 - RNA, 21 nt, synthetic construct
  source 1..21: mol_type = other RNA
acagctttgaaggcagctgcg

SEQ ID NO: 47188 - RNA, 21 nt, synthetic construct
  source 1..21: mol_type = other RNA
gacatcccccagatacacaag

SEQ ID NO: 47189 - RNA, 21 nt, synthetic construct
  source 1..21: mol_type = other RNA
ctagggaccacccacacaccc

SEQ ID NO: 47190 - RNA, 21 nt, synthetic construct
  source 1..21: mol_type = other RNA
agccccacatcggcccccata

SEQ ID NO: 47191 - RNA, 21 nt, synthetic construct
  source 1..21: mol_type = other RNA
gaccatgggctgtgagcccca

SEQ ID NO: 47192 - RNA, 21 nt, synthetic construct
  source 1..21: mol_type = other RNA
ctagggaccacccacacaccc

SEQ ID NO: 47193 - RNA, 21 nt, synthetic construct
  source 1..21: mol_type = other RNA
gaccatgggctgtgagcccca

SEQ ID NO: 47194 - RNA, 21 nt, synthetic construct
  source 1..21: mol_type = other RNA
ctagggaccacccacacaccc

SEQ ID NO: 47195 - RNA, 21 nt, synthetic construct
  source 1..21: mol_type = other RNA
agccccacatcggcccccata

SEQ ID NO: 47196 - RNA, 21 nt, synthetic construct
  source 1..21: mol_type = other RNA
ctagggaccacccacacaccc

SEQ ID NO: 47197 - RNA, 21 nt, synthetic construct
  source 1..21: mol_type = other RNA
agccccacatcggcccccata

SEQ ID NO: 47198 - RNA, 21 nt, synthetic construct
  source 1..21: mol_type = other RNA
tgggccccgactggcacaccc

SEQ ID NO: 47199 - RNA, 21 nt, synthetic construct
  source 1..21: mol_type = other RNA
ggtgtctagcacacccacccc

SEQ ID NO: 47200 - RNA, 21 nt, synthetic construct
  source 1..21: mol_type = other RNA
atgctcgtggtgccgcaggca

SEQ ID NO: 47201 - RNA, 21 nt, synthetic construct
  source 1..21: mol_type = other RNA
ggcgcacaatgggcgggtgtg

SEQ ID NO: 47202 - RNA, 21 nt, synthetic construct
  source 1..21: mol_type = other RNA
ctggtgctgacattcctgtgg

SEQ ID NO: 47203 - RNA, 21 nt, synthetic construct
  source 1..21: mol_type = other RNA
tggtgctgacattcctgtgga

SEQ ID NO: 47204 - RNA, 21 nt, synthetic construct
  source 1..21: mol_type = other RNA
tgctggatgacatcacgcact

SEQ ID NO: 47205 - RNA, 21 nt, synthetic construct
  source 1..21: mol_type = other RNA
cgcacctacagcccgggcacc

SEQ ID NO: 47206 - RNA, 21 nt, synthetic construct
  source 1..21: mol_type = other RNA
ggctgacgacttcacggccct

SEQ ID NO: 47207 - RNA, 21 nt, synthetic construct
  source 1..21: mol_type = other RNA
agcgactggagggacggcgtc

SEQ ID NO: 47208 - RNA, 21 nt, synthetic construct
  source 1..21: mol_type = other RNA
caccacccacgggaccttccg

SEQ ID NO: 47209 - RNA, 21 nt, synthetic construct
  source 1..21: mol_type = other RNA
gagctgatcctccaagagggg

SEQ ID NO: 47210 - RNA, 21 nt, synthetic construct
  source 1..21: mol_type = other RNA
tccggacacctgccccttgtt

SEQ ID NO: 47211 - RNA, 21 nt, synthetic construct
  source 1..21: mol_type = other RNA
cgagctgcgggttctctgctg

SEQ ID NO: 47212 - RNA, 21 nt, synthetic construct
  source 1..21: mol_type = other RNA
cctatgggtgaccccgagcat

SEQ ID NO: 47213 - RNA, 21 nt, synthetic construct
  source 1..21: mol_type = other RNA
cctctcagaaggactgacatc

SEQ ID NO: 47214 - RNA, 21 nt, synthetic construct
  source 1..21: mol_type = other RNA
cccccagatacacaagcaccc

SEQ ID NO: 47215 - RNA, 21 nt, synthetic construct
  source 1..21: mol_type = other RNA
gccacccacgctggccccaac

SEQ ID NO: 47216 - RNA, 21 nt, synthetic construct
  source 1..21: mol_type = other RNA
cacccacgctggccccaacaa

SEQ ID NO: 47217 - RNA, 21 nt, synthetic construct
  source 1..21: mol_type = other RNA
tccaaagagccgctgaccacg

SEQ ID NO: 47218 - RNA, 21 nt, synthetic construct
  source 1..21: mol_type = other RNA
cgagcgagctgtccacctctc

SEQ ID NO: 47219 - RNA, 21 nt, synthetic construct
  source 1..21: mol_type = other RNA
ctgagaacagctccccctccc

SEQ ID NO: 47220 - RNA, 21 nt, synthetic construct
  source 1..21: mol_type = other RNA
cccagtgccgaacaccatggc

SEQ ID NO: 47221 - RNA, 21 nt, synthetic construct
  source 1..21: mol_type = other RNA
cacccacatcacagagccttc

SEQ ID NO: 47222 - RNA, 21 nt, synthetic construct
  source 1..21: mol_type = other RNA
acccacatcacagagccttcc

SEQ ID NO: 47223 - RNA, 21 nt, synthetic construct
  source 1..21: mol_type = other RNA
catcacagagccttccacggt

SEQ ID NO: 47224 - RNA, 21 nt, synthetic construct
  source 1..21: mol_type = other RNA
agagccttccacggtgacttc

SEQ ID NO: 47225 - RNA, 21 nt, synthetic construct
  source 1..21: mol_type = other RNA
gccctcaccctagcagcagaa

SEQ ID NO: 47226 - RNA, 21 nt, synthetic construct
  source 1..21: mol_type = other RNA
gccccacatcggcccccataa

SEQ ID NO: 47227 - RNA, 21 nt, synthetic construct
  source 1..21: mol_type = other RNA
gtctgcaggaaccgtgagcag

SEQ ID NO: 47228 - RNA, 21 nt, synthetic construct
  source 1..21: mol_type = other RNA
ggccaccagctctacggccat

SEQ ID NO: 47229 - RNA, 21 nt, synthetic construct
  source 1..21: mol_type = other RNA
gccactcccttctccagtcca

SEQ ID NO: 47230 - RNA, 21 nt, synthetic construct
  source 1..21: mol_type = other RNA
cacccacatcacagagccttc

SEQ ID NO: 47231 - RNA, 21 nt, synthetic construct
  source 1..21: mol_type = other RNA
acccacatcacagagccttcc

SEQ ID NO: 47232 - RNA, 21 nt, synthetic construct
  source 1..21: mol_type = other RNA
catcacagagccttccacggg

SEQ ID NO: 47233 - RNA, 21 nt, synthetic construct
  source 1..21: mol_type = other RNA
gtctgcaggaaccgtgagcag

SEQ ID NO: 47234 - RNA, 21 nt, synthetic construct
  source 1..21: mol_type = other RNA
ggccaccagctctacggccac

SEQ ID NO: 47235 - RNA, 21 nt, synthetic construct
  source 1..21: mol_type = other RNA
atcctcacagagcagaccaca

SEQ ID NO: 47236 - RNA, 21 nt, synthetic construct
  source 1..21: mol_type = other RNA
ggccatcccgtcctccacccc

SEQ ID NO: 47237 - RNA, 21 nt, synthetic construct
  source 1..21: mol_type = other RNA
tcccagaacagaccaccacac

SEQ ID NO: 47238 - RNA, 21 nt, synthetic construct
  source 1..21: mol_type = other RNA
cacccatggccaccatgtcca

SEQ ID NO: 47239 - RNA, 21 nt, synthetic construct
  source 1..21: mol_type = other RNA
cacccacatcacagagccttc

SEQ ID NO: 47240 - RNA, 21 nt, synthetic construct
  source 1..21: mol_type = other RNA
acccacatcacagagccttcc

SEQ ID NO: 47241 - RNA, 21 nt, synthetic construct
  source 1..21: mol_type = other RNA
catcacagagccttccacggt

SEQ ID NO: 47242 - RNA, 21 nt, synthetic construct
  source 1..21: mol_type = other RNA
agagccttccacggtgacttc

SEQ ID NO: 47243 - RNA, 21 nt, synthetic construct
  source 1..21: mol_type = other RNA
gccccacatcggcccccataa

SEQ ID NO: 47244 - RNA, 21 nt, synthetic construct
  source 1..21: mol_type = other RNA
gtctgcaggaaccgtgagcag

SEQ ID NO: 47245 - RNA, 21 nt, synthetic construct
  source 1..21: mol_type = other RNA
ggccaccagctctacggccac

SEQ ID NO: 47246 - RNA, 21 nt, synthetic construct
  source 1..21: mol_type = other RNA
gccactcccttctccagtcca

SEQ ID NO: 47247 - RNA, 21 nt, synthetic construct
  source 1..21: mol_type = other RNA
catcactgatcaccacggcca

SEQ ID NO: 47248 - RNA, 21 nt, synthetic construct
  source 1..21: mol_type = other RNA
cacccacatcacagagccttc

SEQ ID NO: 47249 - RNA, 21 nt, synthetic construct
  source 1..21: mol_type = other RNA
acccacatcacagagccttcc

SEQ ID NO: 47250 - RNA, 21 nt, synthetic construct
  source 1..21: mol_type = other RNA
catcacagagccttccacggg

SEQ ID NO: 47251 - RNA, 21 nt, synthetic construct
  source 1..21: mol_type = other RNA
gccccacatcggcccccataa

SEQ ID NO: 47252 - RNA, 21 nt, synthetic construct
  source 1..21: mol_type = other RNA
gtctgcaggaaccgtgagcag

SEQ ID NO: 47253 - RNA, 21 nt, synthetic construct
  source 1..21: mol_type = other RNA
ggccaccagctctacggccat

SEQ ID NO: 47254 - RNA, 21 nt, synthetic construct
  source 1..21: mol_type = other RNA
tcccagaacagaccaccacac

SEQ ID NO: 47255 - RNA, 21 nt, synthetic construct
  source 1..21: mol_type = other RNA
tccaccctgtggaccacgtgg

SEQ ID NO: 47256 - RNA, 21 nt, synthetic construct
  source 1..21: mol_type = other RNA
cacagtgctgaccaccacagc

SEQ ID NO: 47257 - RNA, 21 nt, synthetic construct
  source 1..21: mol_type = other RNA
actggatccacggccaccctg

SEQ ID NO: 47258 - RNA, 21 nt, synthetic construct
  source 1..21: mol_type = other RNA
gtcctcaccaccctgagaccc

SEQ ID NO: 47259 - RNA, 21 nt, synthetic construct
  source 1..21: mol_type = other RNA
cgctttgggaatctcagcctc

SEQ ID NO: 47260 - RNA, 21 nt, synthetic construct
  source 1..21: mol_type = other RNA
ccaaagtgtacaagccatgcg

SEQ ID NO: 47261 - RNA, 21 nt, synthetic construct
  source 1..21: mol_type = other RNA
accttccgctgcagacctcag

SEQ ID NO: 47262 - RNA, 21 nt, synthetic construct
  source 1..21: mol_type = other RNA
tgtgtacctgcctctctgggg

SEQ ID NO: 47263 - RNA, 21 nt, synthetic construct
  source 1..21: mol_type = other RNA
gctttgagtacaagagagtgg

SEQ ID NO: 47264 - RNA, 21 nt, synthetic construct
  source 1..21: mol_type = other RNA
aggaggactcctgtcaagtcc

SEQ ID NO: 47265 - RNA, 21 nt, synthetic construct
  source 1..21: mol_type = other RNA
gaccatcctgtggcaccaggg

SEQ ID NO: 47266 - RNA, 21 nt, synthetic construct
  source 1..21: mol_type = other RNA
cgaggagacggtgcccttgca

SEQ ID NO: 47267 - RNA, 21 nt, synthetic construct
  source 1..21: mol_type = other RNA
tgcgcccatggctcccccaca

SEQ ID NO: 47268 - RNA, 21 nt, synthetic construct
  source 1..21: mol_type = other RNA
ggagcgcccgcgcagcacgga

SEQ ID NO: 47269 - RNA, 21 nt, synthetic construct
  source 1..21: mol_type = other RNA
gccaggaagctgcgacaggca

SEQ ID NO: 47270 - RNA, 21 nt, synthetic construct
  source 1..21: mol_type = other RNA
cagatacacaagcacccttgg

SEQ ID NO: 47271 - RNA, 21 nt, synthetic construct
  source 1..21: mol_type = other RNA
ggcgtacagctcagcgactgg

SEQ ID NO: 47272 - RNA, 21 nt, synthetic construct
  source 1..21: mol_type = other RNA
ccgacgtcctcgcccacccgg

SEQ ID NO: 47273 - RNA, 21 nt, synthetic construct
  source 1..21: mol_type = other RNA
ccacaaccagaggttccacgg

SEQ ID NO: 47274 - RNA, 21 nt, synthetic construct
  source 1..21: mol_type = other RNA
acaacacctatccccccagtg

SEQ ID NO: 47275 - RNA, 21 nt, synthetic construct
  source 1..21: mol_type = other RNA
acaacacctatccccccagtg

SEQ ID NO: 47276 - RNA, 21 nt, synthetic construct
  source 1..21: mol_type = other RNA
gcgacctcacctgcccaccca

SEQ ID NO: 47277 - RNA, 21 nt, synthetic construct
  source 1..21: mol_type = other RNA
cttccgctgcagacctcagct

SEQ ID NO: 47278 - RNA, 21 nt, synthetic construct
  source 1..21: mol_type = other RNA
acttctacaacccacatgggg

SEQ ID NO: 47279 - RNA, 21 nt, synthetic construct
  source 1..21: mol_type = other RNA
ggtctgcaggaaccgtgagca

SEQ ID NO: 47280 - RNA, 21 nt, synthetic construct
  source 1..21: mol_type = other RNA
ggtctgcaggaaccgtgagca

SEQ ID NO: 47281 - RNA, 21 nt, synthetic construct
  source 1..21: mol_type = other RNA
ggtctgcaggaaccgtgagca

SEQ ID NO: 47282 - RNA, 21 nt, synthetic construct
  source 1..21: mol_type = other RNA
ggtctgcaggaaccgtgagca

SEQ ID NO: 47283 - RNA, 21 nt, synthetic construct
  source 1..21: mol_type = other RNA
cagggcatttggacagttttt

SEQ ID NO: 47284 - RNA, 21 nt, synthetic construct
  source 1..21: mol_type = other RNA
ggagaatgcagggcacaccat

SEQ ID NO: 47285 - RNA, 21 nt, synthetic construct
  source 1..21: mol_type = other RNA
taccaggtatgccctgtgctg

SEQ ID NO: 47286 - RNA, 21 nt, synthetic construct
  source 1..21: mol_type = other RNA
ctccagagactgcccacacct

SEQ ID NO: 47287 - RNA, 21 nt, synthetic construct
  source 1..21: mol_type = other RNA
ttccagccctcaccctagcag

SEQ ID NO: 47288 - RNA, 21 nt, synthetic construct
  source 1..21: mol_type = other RNA
gtccagccctcaccctagcag

SEQ ID NO: 47289 - RNA, 21 nt, synthetic construct
  source 1..21: mol_type = other RNA
tcacagagcccagcactacag

SEQ ID NO: 47290 - RNA, 21 nt, synthetic construct
  source 1..21: mol_type = other RNA
cctcctccacccgggcaactg

SEQ ID NO: 47291 - RNA, 21 nt, synthetic construct
  source 1..21: mol_type = other RNA
gtccagccctcaccctagcag

SEQ ID NO: 47292 - RNA, 21 nt, synthetic construct
  source 1..21: mol_type = other RNA
ctccagagactgcccacacct

SEQ ID NO: 47293 - RNA, 21 nt, synthetic construct
  source 1..21: mol_type = other RNA
gtccagccctcaccctagcag

SEQ ID NO: 47294 - RNA, 21 nt, synthetic construct
  source 1..21: mol_type = other RNA
caactccagggacaacaccca

SEQ ID NO: 47295 - RNA, 21 nt, synthetic construct
  source 1..21: mol_type = other RNA
tgttggctctggcggccatgc

SEQ ID NO: 47296 - RNA, 21 nt, synthetic construct
  source 1..21: mol_type = other RNA
cttctacaacccacatggggg

SEQ ID NO: 47297 - RNA, 21 nt, synthetic construct
  source 1..21: mol_type = other RNA
gcgggcctatgtgtccctgcc

SEQ ID NO: 47298 - RNA, 21 nt, synthetic construct
  source 1..21: mol_type = other RNA
ccatcccctccttcacccttg

SEQ ID NO: 47299 - RNA, 21 nt, synthetic construct
  source 1..21: mol_type = other RNA
ccaacaacaatggcaacctcc

SEQ ID NO: 47300 - RNA, 21 nt, synthetic construct
  source 1..21: mol_type = other RNA
agaactgcctgaaagcggtga

SEQ ID NO: 47301 - RNA, 21 nt, synthetic construct
  source 1..21: mol_type = other RNA
caacaacaatggcaacctcca

SEQ ID NO: 47302 - RNA, 21 nt, synthetic construct
  source 1..21: mol_type = other RNA
ccatgtccacaatccacccct

SEQ ID NO: 47303 - RNA, 21 nt, synthetic construct
  source 1..21: mol_type = other RNA
ccatgtccacaatccacccct

SEQ ID NO: 47304 - RNA, 21 nt, synthetic construct
  source 1..21: mol_type = other RNA
ccacgtccggccgctggggca

SEQ ID NO: 47305 - RNA, 21 nt, synthetic construct
  source 1..21: mol_type = other RNA
aacaacaatggcaacctccag

SEQ ID NO: 47306 - RNA, 21 nt, synthetic construct
  source 1..21: mol_type = other RNA
cgcgtgtgcctgcgactcggg

SEQ ID NO: 47307 - RNA, 21 nt, synthetic construct
  source 1..21: mol_type = other RNA
cctcacctgcccacccaccaa

SEQ ID NO: 47308 - RNA, 21 nt, synthetic construct
  source 1..21: mol_type = other RNA
ctgccacctgcaactctagga

SEQ ID NO: 47309 - RNA, 21 nt, synthetic construct
  source 1..21: mol_type = other RNA
acccccaaagtggtgaccacc

SEQ ID NO: 47310 - RNA, 21 nt, synthetic construct
  source 1..21: mol_type = other RNA
gcagacctcagctgtgttcgt

SEQ ID NO: 47311 - RNA, 21 nt, synthetic construct
  source 1..21: mol_type = other RNA
ctcagcgactggagggacggc

SEQ ID NO: 47312 - RNA, 21 nt, synthetic construct
  source 1..21: mol_type = other RNA
acaaagctgaccacaacagcc

SEQ ID NO: 47313 - RNA, 21 nt, synthetic construct
  source 1..21: mol_type = other RNA
cagcccgggcacctccttcaa

SEQ ID NO: 47314 - RNA, 21 nt, synthetic construct
  source 1..21: mol_type = other RNA
aaccccgccaccgaccacaga

SEQ ID NO: 47315 - RNA, 21 nt, synthetic construct
  source 1..21: mol_type = other RNA
tcccaaagtgctgaccaccac

SEQ ID NO: 47316 - RNA, 21 nt, synthetic construct
  source 1..21: mol_type = other RNA
actgagaagcacagccaccac

SEQ ID NO: 47317 - RNA, 21 nt, synthetic construct
  source 1..21: mol_type = other RNA
ccatgccggggccctctggcg

SEQ ID NO: 47318 - RNA, 21 nt, synthetic construct
  source 1..21: mol_type = other RNA
actgagaagcacagccaccac

SEQ ID NO: 47319 - RNA, 21 nt, synthetic construct
  source 1..21: mol_type = other RNA
ggacttcccacaccccagcag

SEQ ID NO: 47320 - RNA, 21 nt, synthetic construct
  source 1..21: mol_type = other RNA
ccatgccggggccctctggcg

SEQ ID NO: 47321 - RNA, 21 nt, synthetic construct
  source 1..21: mol_type = other RNA
actgagaagcacagccaccac

SEQ ID NO: 47322 - RNA, 21 nt, synthetic construct
  source 1..21: mol_type = other RNA
cacaccctcctctactccaga

SEQ ID NO: 47323 - RNA, 21 nt, synthetic construct
  source 1..21: mol_type = other RNA
tgacttcccacaccccagcag

SEQ ID NO: 47324 - RNA, 21 nt, synthetic construct
  source 1..21: mol_type = other RNA
ccatgccggggccctctggcg

SEQ ID NO: 47325 - RNA, 21 nt, synthetic construct
  source 1..21: mol_type = other RNA
actgagaagcacagccaccac

SEQ ID NO: 47326 - RNA, 21 nt, synthetic construct
  source 1..21: mol_type = other RNA
ggacttcccacaccccagcag

SEQ ID NO: 47327 - RNA, 21 nt, synthetic construct
  source 1..21: mol_type = other RNA
ccatgccggggccctctggcg

SEQ ID NO: 47328 - RNA, 21 nt, synthetic construct
  source 1..21: mol_type = other RNA
actgagaagcacagccaccac

SEQ ID NO: 47329 - RNA, 21 nt, synthetic construct
  source 1..21: mol_type = other RNA
atggtgcatgggaaggaggag

SEQ ID NO: 47330 - RNA, 21 nt, synthetic construct
  source 1..21: mol_type = other RNA
tgtctgtgctggggaccacca

SEQ ID NO: 47331 - RNA, 21 nt, synthetic construct
  source 1..21: mol_type = other RNA
tgtgtgcccgccagggcagga

SEQ ID NO: 47332 - RNA, 21 nt, synthetic construct
  source 1..21: mol_type = other RNA
ggcaccagggctgcgagaccg

SEQ ID NO: 47333 - RNA, 21 nt, synthetic construct
  source 1..21: mol_type = other RNA
ccagttttgcaaataaaccct

SEQ ID NO: 47334 - RNA, 21 nt, synthetic construct
  source 1..21: mol_type = other RNA
aggtggactgtgaccgcatgc

SEQ ID NO: 47335 - RNA, 21 nt, synthetic construct
  source 1..21: mol_type = other RNA
cgtgcggccggaggggcagtc

SEQ ID NO: 47336 - RNA, 21 nt, synthetic construct
  source 1..21: mol_type = other RNA
gtcgtcctgctggacccaaag

SEQ ID NO: 47337 - RNA, 21 nt, synthetic construct
  source 1..21: mol_type = other RNA
actatgcccacagccactgcc

SEQ ID NO: 47338 - RNA, 21 nt, synthetic construct
  source 1..21: mol_type = other RNA
cacgtggatgagtgtggctgc

SEQ ID NO: 47339 - RNA, 21 nt, synthetic construct
  source 1..21: mol_type = other RNA
atcctcactgagctgaccaca

SEQ ID NO: 47340 - RNA, 21 nt, synthetic construct
  source 1..21: mol_type = other RNA
gatcctcactgagctgaccac

SEQ ID NO: 47341 - RNA, 21 nt, synthetic construct
  source 1..21: mol_type = other RNA
ctcggcgggcacccctggggc

SEQ ID NO: 47342 - RNA, 21 nt, synthetic construct
  source 1..21: mol_type = other RNA
caactccagggacaactccca

SEQ ID NO: 47343 - RNA, 21 nt, synthetic construct
  source 1..21: mol_type = other RNA
cgtggccaccatgtccacaat

SEQ ID NO: 47344 - RNA, 21 nt, synthetic construct
  source 1..21: mol_type = other RNA
ggccttgcccctccctgatgt

SEQ ID NO: 47345 - RNA, 21 nt, synthetic construct
  source 1..21: mol_type = other RNA
acgccaggctgaccccgctcc

SEQ ID NO: 47346 - RNA, 21 nt, synthetic construct
  source 1..21: mol_type = other RNA
ctgtaactgcacacccagtgg

SEQ ID NO: 47347 - RNA, 21 nt, synthetic construct
  source 1..21: mol_type = other RNA
gtttgaaaacctgaggcagag

SEQ ID NO: 47348 - RNA, 21 nt, synthetic construct
  source 1..21: mol_type = other RNA
aacaccatggccaccacacac

SEQ ID NO: 47349 - RNA, 21 nt, synthetic construct
  source 1..21: mol_type = other RNA
gctgagccaggtctttgctga

SEQ ID NO: 47350 - RNA, 21 nt, synthetic construct
  source 1..21: mol_type = other RNA
tcggcgggcacccctggggcc

SEQ ID NO: 47351 - RNA, 21 nt, synthetic construct
  source 1..21: mol_type = other RNA
cccgatggccagccagtccag

SEQ ID NO: 47352 - RNA, 21 nt, synthetic construct
  source 1..21: mol_type = other RNA
aggaaccgtgagcaggtgggg

SEQ ID NO: 47353 - RNA, 21 nt, synthetic construct
  source 1..21: mol_type = other RNA
ccaccacaaccggggccaccg

SEQ ID NO: 47354 - RNA, 21 nt, synthetic construct
  source 1..21: mol_type = other RNA
aggaaccgtgagcaggtgggg

SEQ ID NO: 47355 - RNA, 21 nt, synthetic construct
  source 1..21: mol_type = other RNA
aggaaccgtgagcaggtgggg

SEQ ID NO: 47356 - RNA, 21 nt, synthetic construct
  source 1..21: mol_type = other RNA
aggaaccgtgagcaggtgggg

SEQ ID NO: 47357 - RNA, 21 nt, synthetic construct
  source 1..21: mol_type = other RNA
ccaccacaaccggggccaccg

SEQ ID NO: 47358 - RNA, 21 nt, synthetic construct
  source 1..21: mol_type = other RNA
cagctctgcgaggaccactgt

SEQ ID NO: 47359 - RNA, 21 nt, synthetic construct
  source 1..21: mol_type = other RNA
tgccctagggaccacccacac

SEQ ID NO: 47360 - RNA, 21 nt, synthetic construct
  source 1..21: mol_type = other RNA
tgccctagggaccacccacac

SEQ ID NO: 47361 - RNA, 21 nt, synthetic construct
  source 1..21: mol_type = other RNA
tgccctagggaccacccacac

SEQ ID NO: 47362 - RNA, 21 nt, synthetic construct
  source 1..21: mol_type = other RNA
tgccctagggaccacccacac

SEQ ID NO: 47363 - RNA, 21 nt, synthetic construct
  source 1..21: mol_type = other RNA
cggccgcctgtccatgcctgc

SEQ ID NO: 47364 - RNA, 21 nt, synthetic construct
  source 1..21: mol_type = other RNA
tgccgcaggcagagacccagg

SEQ ID NO: 47365 - RNA, 21 nt, synthetic construct
  source 1..21: mol_type = other RNA
ggctgaccagggctcccccgg

SEQ ID NO: 47366 - RNA, 21 nt, synthetic construct
  source 1..21: mol_type = other RNA
caactggggccaccggctctg

SEQ ID NO: 47367 - RNA, 21 nt, synthetic construct
  source 1..21: mol_type = other RNA
gcaacacagtgactccctcct

SEQ ID NO: 47368 - RNA, 21 nt, synthetic construct
  source 1..21: mol_type = other RNA
agcagaaccaccgagtcaccc

SEQ ID NO: 47369 - RNA, 21 nt, synthetic construct
  source 1..21: mol_type = other RNA
tcctctactccagagactgtc

SEQ ID NO: 47370 - RNA, 21 nt, synthetic construct
  source 1..21: mol_type = other RNA
ctctactccagagaccaccca

SEQ ID NO: 47371 - RNA, 21 nt, synthetic construct
  source 1..21: mol_type = other RNA
cagtcctcaccaccctgagac

SEQ ID NO: 47372 - RNA, 21 nt, synthetic construct
  source 1..21: mol_type = other RNA
tgtggcctgtgtggggacttc

SEQ ID NO: 47373 - RNA, 21 nt, synthetic construct
  source 1..21: mol_type = other RNA
aggagggcatctgccaccgca

SEQ ID NO: 47374 - RNA, 21 nt, synthetic construct
  source 1..21: mol_type = other RNA
ggaccactgtgtggacggctg

SEQ ID NO: 47375 - RNA, 21 nt, synthetic construct
  source 1..21: mol_type = other RNA
gtgcagctggtgccactcatg

SEQ ID NO: 47376 - RNA, 21 nt, synthetic construct
  source 1..21: mol_type = other RNA
ccaggctgacgacttcacggc

SEQ ID NO: 47377 - RNA, 21 nt, synthetic construct
  source 1..21: mol_type = other RNA
cttatgccagcagcctaagga

SEQ ID NO: 47378 - RNA, 21 nt, synthetic construct
  source 1..21: mol_type = other RNA
ccccagatacacaagcaccct

SEQ ID NO: 47379 - RNA, 21 nt, synthetic construct
  source 1..21: mol_type = other RNA
aggggtggccacatccaccct

SEQ ID NO: 47380 - RNA, 21 nt, synthetic construct
  source 1..21: mol_type = other RNA
catccacccttccaacacgct

SEQ ID NO: 47381 - RNA, 21 nt, synthetic construct
  source 1..21: mol_type = other RNA
ttaccgccacggccaccacaa

SEQ ID NO: 47382 - RNA, 21 nt, synthetic construct
  source 1..21: mol_type = other RNA
cctcaactcctgggacaactc

SEQ ID NO: 47383 - RNA, 21 nt, synthetic construct
  source 1..21: mol_type = other RNA
actacagccaccgtgacggtg

SEQ ID NO: 47384 - RNA, 21 nt, synthetic construct
  source 1..21: mol_type = other RNA
agtccaaggactgcaaccacc

SEQ ID NO: 47385 - RNA, 21 nt, synthetic construct
  source 1..21: mol_type = other RNA
catcccctccttcacccttgg

SEQ ID NO: 47386 - RNA, 21 nt, synthetic construct
  source 1..21: mol_type = other RNA
cccagaacagaccaccacacc

SEQ ID NO: 47387 - RNA, 21 nt, synthetic construct
  source 1..21: mol_type = other RNA
actacagccaccgtgacggtg

SEQ ID NO: 47388 - RNA, 21 nt, synthetic construct
  source 1..21: mol_type = other RNA
actacagccaccgtgacggtg

SEQ ID NO: 47389 - RNA, 21 nt, synthetic construct
  source 1..21: mol_type = other RNA
agtccaaggactgcaaccacc

SEQ ID NO: 47390 - RNA, 21 nt, synthetic construct
  source 1..21: mol_type = other RNA
cccagaacagaccaccacacc

SEQ ID NO: 47391 - RNA, 21 nt, synthetic construct
  source 1..21: mol_type = other RNA
actacagccaccgtgacggtg

SEQ ID NO: 47392 - RNA, 21 nt, synthetic construct
  source 1..21: mol_type = other RNA
ttaccgccacggccaccacaa

SEQ ID NO: 47393 - RNA, 21 nt, synthetic construct
  source 1..21: mol_type = other RNA
agtccaaggactgcaaccacc

SEQ ID NO: 47394 - RNA, 21 nt, synthetic construct
  source 1..21: mol_type = other RNA
cacagccgctctgtgatctga

SEQ ID NO: 47395 - RNA, 21 nt, synthetic construct
  source 1..21: mol_type = other RNA
ccgggccgagaacccctgctg

SEQ ID NO: 47396 - RNA, 21 nt, synthetic construct
  source 1..21: mol_type = other RNA
cacggggacttcccacacccc

SEQ ID NO: 47397 - RNA, 21 nt, synthetic construct
  source 1..21: mol_type = other RNA
tgccgactaccacaaccacgg

SEQ ID NO: 47398 - RNA, 21 nt, synthetic construct
  source 1..21: mol_type = other RNA
tgccgactaccacaaccacgg

SEQ ID NO: 47399 - RNA, 21 nt, synthetic construct
  source 1..21: mol_type = other RNA
cagtggctccacggtgacccc

SEQ ID NO: 47400 - RNA, 21 nt, synthetic construct
  source 1..21: mol_type = other RNA
cacggggacttcccacacccc

SEQ ID NO: 47401 - RNA, 21 nt, synthetic construct
  source 1..21: mol_type = other RNA
tgccgactaccacaaccacgg

SEQ ID NO: 47402 - RNA, 21 nt, synthetic construct
  source 1..21: mol_type = other RNA
cagtggctccacggtgacccc

SEQ ID NO: 47403 - RNA, 21 nt, synthetic construct
  source 1..21: mol_type = other RNA
tcaacatcaccttctgcgagg

SEQ ID NO: 47404 - RNA, 21 nt, synthetic construct
  source 1..21: mol_type = other RNA
tgaccgcatgcgggggctgat

SEQ ID NO: 47405 - RNA, 21 nt, synthetic construct
  source 1..21: mol_type = other RNA
cgacgtcctcgcccacccggc

SEQ ID NO: 47406 - RNA, 21 nt, synthetic construct
  source 1..21: mol_type = other RNA
gaaactctacgacctgcatgg

SEQ ID NO: 47407 - RNA, 21 nt, synthetic construct
  source 1..21: mol_type = other RNA
gactttgagacgtttgaaaac

SEQ ID NO: 47408 - RNA, 21 nt, synthetic construct
  source 1..21: mol_type = other RNA
ccagaacagaccaccacaccc

SEQ ID NO: 47409 - RNA, 21 nt, synthetic construct
  source 1..21: mol_type = other RNA
gtgtccccctgggggagttgg

SEQ ID NO: 47410 - RNA, 21 nt, synthetic construct
  source 1..21: mol_type = other RNA
ccagaacagaccaccacaccc

SEQ ID NO: 47411 - RNA, 21 nt, synthetic construct
  source 1..21: mol_type = other RNA
atagccaccgtgatggtgccc

SEQ ID NO: 47412 - RNA, 21 nt, synthetic construct
  source 1..21: mol_type = other RNA
tcgtccaccgtggggaccacc

SEQ ID NO: 47413 - RNA, 21 nt, synthetic construct
  source 1..21: mol_type = other RNA
cacctgcaactctaggaacca

SEQ ID NO: 47414 - RNA, 21 nt, synthetic construct
  source 1..21: mol_type = other RNA
agacggtgcccttgcactgtc

SEQ ID NO: 47415 - RNA, 21 nt, synthetic construct
  source 1..21: mol_type = other RNA
tgccccgagcgcgtgccggac

SEQ ID NO: 47416 - RNA, 21 nt, synthetic construct
  source 1..21: mol_type = other RNA
tgagccccctgaacccggcgc

SEQ ID NO: 47417 - RNA, 21 nt, synthetic construct
  source 1..21: mol_type = other RNA
aggaccactgtgtggacggct

SEQ ID NO: 47418 - RNA, 21 nt, synthetic construct
  source 1..21: mol_type = other RNA
gccgcacctacagcccgggca

SEQ ID NO: 47419 - RNA, 21 nt, synthetic construct
  source 1..21: mol_type = other RNA
ctgctctgtgcagggcggggc

SEQ ID NO: 47420 - RNA, 21 nt, synthetic construct
  source 1..21: mol_type = other RNA
agaaactctacgacctgcatg

SEQ ID NO: 47421 - RNA, 21 nt, synthetic construct
  source 1..21: mol_type = other RNA
agctgcgagtacatcttggcc

SEQ ID NO: 47422 - RNA, 21 nt, synthetic construct
  source 1..21: mol_type = other RNA
gaaggctgctacccgaagtgc

SEQ ID NO: 47423 - RNA, 21 nt, synthetic construct
  source 1..21: mol_type = other RNA
acagctaccaggacgtcatct

SEQ ID NO: 47424 - RNA, 21 nt, synthetic construct
  source 1..21: mol_type = other RNA
tcaggccgagaccagcacgcc

SEQ ID NO: 47425 - RNA, 21 nt, synthetic construct
  source 1..21: mol_type = other RNA
accagccagggcacgacccgc

SEQ ID NO: 47426 - RNA, 21 nt, synthetic construct
  source 1..21: mol_type = other RNA
tccactggatccacggccacc

SEQ ID NO: 47427 - RNA, 21 nt, synthetic construct
  source 1..21: mol_type = other RNA
cacacagaccagtggtactcc

SEQ ID NO: 47428 - RNA, 21 nt, synthetic construct
  source 1..21: mol_type = other RNA
tcaactcctgggacaactccc

SEQ ID NO: 47429 - RNA, 21 nt, synthetic construct
  source 1..21: mol_type = other RNA
tccactggatccacggccacc

SEQ ID NO: 47430 - RNA, 21 nt, synthetic construct
  source 1..21: mol_type = other RNA
cacacagaccagtggtactcc

SEQ ID NO: 47431 - RNA, 21 nt, synthetic construct
  source 1..21: mol_type = other RNA
caacacctatccccccagtgc

SEQ ID NO: 47432 - RNA, 21 nt, synthetic construct
  source 1..21: mol_type = other RNA
cacacagaccagtggtactcc

SEQ ID NO: 47433 - RNA, 21 nt, synthetic construct
  source 1..21: mol_type = other RNA
tccactggatccacggccacc

SEQ ID NO: 47434 - RNA, 21 nt, synthetic construct
  source 1..21: mol_type = other RNA
cacacagaccagtggtactcc

SEQ ID NO: 47435 - RNA, 21 nt, synthetic construct
  source 1..21: mol_type = other RNA
caacacctatccccccagtgc

SEQ ID NO: 47436 - RNA, 21 nt, synthetic construct
  source 1..21: mol_type = other RNA
tccactggatccacggccacc

SEQ ID NO: 47437 - RNA, 21 nt, synthetic construct
  source 1..21: mol_type = other RNA
tccactggatccacggccacc

SEQ ID NO: 47438 - RNA, 21 nt, synthetic construct
  source 1..21: mol_type = other RNA
ccagtccagggactgcaactg

SEQ ID NO: 47439 - RNA, 21 nt, synthetic construct
  source 1..21: mol_type = other RNA
cacacagaccagtggtactcc

SEQ ID NO: 47440 - RNA, 21 nt, synthetic construct
  source 1..21: mol_type = other RNA
acggccaccacacccgcagcc

SEQ ID NO: 47441 - RNA, 21 nt, synthetic construct
  source 1..21: mol_type = other RNA
caacagccactacaactgcag

SEQ ID NO: 47442 - RNA, 21 nt, synthetic construct
  source 1..21: mol_type = other RNA
gccactggatccacggccacc

SEQ ID NO: 47443 - RNA, 21 nt, synthetic construct
  source 1..21: mol_type = other RNA
cctcagtcctcaccaccctga

SEQ ID NO: 47444 - RNA, 21 nt, synthetic construct
  source 1..21: mol_type = other RNA
cgtcctgctggacccaaagcc

SEQ ID NO: 47445 - RNA, 21 nt, synthetic construct
  source 1..21: mol_type = other RNA
cattcctgccctgggcgtgag

SEQ ID NO: 47446 - RNA, 21 nt, synthetic construct
  source 1..21: mol_type = other RNA
caccttcaatggccaagtctt

SEQ ID NO: 47447 - RNA, 21 nt, synthetic construct
  source 1..21: mol_type = other RNA
tgagccaggtctttgctgagt

SEQ ID NO: 47448 - RNA, 21 nt, synthetic construct
  source 1..21: mol_type = other RNA
aacgcacacatgggcatctgc

SEQ ID NO: 47449 - RNA, 21 nt, synthetic construct
  source 1..21: mol_type = other RNA
gcgtccagaccgcctgcctca

SEQ ID NO: 47450 - RNA, 21 nt, synthetic construct
  source 1..21: mol_type = other RNA
cgtccagaccgcctgcctcac

SEQ ID NO: 47451 - RNA, 21 nt, synthetic construct
  source 1..21: mol_type = other RNA
cgaccatcctgtggcaccagg

SEQ ID NO: 47452 - RNA, 21 nt, synthetic construct
  source 1..21: mol_type = other RNA
gaggcgggtccacgaggagac

SEQ ID NO: 47453 - RNA, 21 nt, synthetic construct
  source 1..21: mol_type = other RNA
cccacgtggatgagtgtggct

SEQ ID NO: 47454 - RNA, 21 nt, synthetic construct
  source 1..21: mol_type = other RNA
ctggagccaggatgtgcattg

SEQ ID NO: 47455 - RNA, 21 nt, synthetic construct
  source 1..21: mol_type = other RNA
ccccggcctgtgtgtggcacc

SEQ ID NO: 47456 - RNA, 21 nt, synthetic construct
  source 1..21: mol_type = other RNA
catgcgggggctgatgtgcgc

SEQ ID NO: 47457 - RNA, 21 nt, synthetic construct
  source 1..21: mol_type = other RNA
agactgtccacacctccacag

SEQ ID NO: 47458 - RNA, 21 nt, synthetic construct
  source 1..21: mol_type = other RNA
gcccagcactacagccaccgt

SEQ ID NO: 47459 - RNA, 21 nt, synthetic construct
  source 1..21: mol_type = other RNA
agactgtccacacctccacag

SEQ ID NO: 47460 - RNA, 21 nt, synthetic construct
  source 1..21: mol_type = other RNA
caccccagcagcaaccaccag

SEQ ID NO: 47461 - RNA, 21 nt, synthetic construct
  source 1..21: mol_type = other RNA
agactgtccacacctccacag

SEQ ID NO: 47462 - RNA, 21 nt, synthetic construct
  source 1..21: mol_type = other RNA
actccagagaccacccacacc

SEQ ID NO: 47463 - RNA, 21 nt, synthetic construct
  source 1..21: mol_type = other RNA
cctgcgtgtgtgacgagggtt

SEQ ID NO: 47464 - RNA, 21 nt, synthetic construct
  source 1..21: mol_type = other RNA
ctgctgtgcctaccccaaccc

SEQ ID NO: 47465 - RNA, 21 nt, synthetic construct
  source 1..21: mol_type = other RNA
agagtggccgggcagtgctgt

SEQ ID NO: 47466 - RNA, 21 nt, synthetic construct
  source 1..21: mol_type = other RNA
cctgctgcagggtaactcagg

SEQ ID NO: 47467 - RNA, 21 nt, synthetic construct
  source 1..21: mol_type = other RNA
cggaactggaggtgccctgag

SEQ ID NO: 47468 - RNA, 21 nt, synthetic construct
  source 1..21: mol_type = other RNA
gggtggcgactgcgagtgttt

SEQ ID NO: 47469 - RNA, 21 nt, synthetic construct
  source 1..21: mol_type = other RNA
gcgcccctcacagccacccac

SEQ ID NO: 47470 - RNA, 21 nt, synthetic construct
  source 1..21: mol_type = other RNA
caccccgggaacagctccccc

SEQ ID NO: 47471 - RNA, 21 nt, synthetic construct
  source 1..21: mol_type = other RNA
caccccgggaacagctccccc

SEQ ID NO: 47472 - RNA, 21 nt, synthetic construct
  source 1..21: mol_type = other RNA
atgtcaggaggatgcctgcaa

SEQ ID NO: 47473 - RNA, 21 nt, synthetic construct
  source 1..21: mol_type = other RNA
acggccaccatgtccacagcc

SEQ ID NO: 47474 - RNA, 21 nt, synthetic construct
  source 1..21: mol_type = other RNA
acggccaccatgtccacagcc

SEQ ID NO: 47475 - RNA, 21 nt, synthetic construct
  source 1..21: mol_type = other RNA
acggccaccatgtccacagcc

SEQ ID NO: 47476 - RNA, 21 nt, synthetic construct
  source 1..21: mol_type = other RNA
acggccaccatgtccacagcc

SEQ ID NO: 47477 - RNA, 21 nt, synthetic construct
  source 1..21: mol_type = other RNA
acggccaccatgtccacagcc

SEQ ID NO: 47478 - RNA, 21 nt, synthetic construct
  source 1..21: mol_type = other RNA
acgcagtgtgcaatcagcact

SEQ ID NO: 47479 - RNA, 21 nt, synthetic construct
  source 1..21: mol_type = other RNA
ctgctgcagggtaactcaggg

SEQ ID NO: 47480 - RNA, 21 nt, synthetic construct
  source 1..21: mol_type = other RNA
ctacgtgttctctgagcactg

SEQ ID NO: 47481 - RNA, 21 nt, synthetic construct
  source 1..21: mol_type = other RNA
ctgcgtgtgtgacgagggttc

SEQ ID NO: 47482 - RNA, 21 nt, synthetic construct
  source 1..21: mol_type = other RNA
ctggaaggcccaggctgcctg

SEQ ID NO: 47483 - RNA, 21 nt, synthetic construct
  source 1..21: mol_type = other RNA
gctggagggcacttatgccag

SEQ ID NO: 47484 - RNA, 21 nt, synthetic construct
  source 1..21: mol_type = other RNA
aacccctcctcaactccaggg

SEQ ID NO: 47485 - RNA, 21 nt, synthetic construct
  source 1..21: mol_type = other RNA
acagagccttccacggggact

SEQ ID NO: 47486 - RNA, 21 nt, synthetic construct
  source 1..21: mol_type = other RNA
aacccctcctcaactccaggg

SEQ ID NO: 47487 - RNA, 21 nt, synthetic construct
  source 1..21: mol_type = other RNA
aacccctcctcaactccaggg

SEQ ID NO: 47488 - RNA, 21 nt, synthetic construct
  source 1..21: mol_type = other RNA
acagagccttccacggggact

SEQ ID NO: 47489 - RNA, 21 nt, synthetic construct
  source 1..21: mol_type = other RNA
aacccctcctcaactccaggg

SEQ ID NO: 47490 - RNA, 21 nt, synthetic construct
  source 1..21: mol_type = other RNA
gagatccatgcacgctttggg

SEQ ID NO: 47491 - RNA, 21 nt, synthetic construct
  source 1..21: mol_type = other RNA
cccaggaggagggcgactgct

SEQ ID NO: 47492 - RNA, 21 nt, synthetic construct
  source 1..21: mol_type = other RNA
gcggccatgctcgtggtgccg

SEQ ID NO: 47493 - RNA, 21 nt, synthetic construct
  source 1..21: mol_type = other RNA
gctacagctttgaaggcagct

SEQ ID NO: 47494 - RNA, 21 nt, synthetic construct
  source 1..21: mol_type = other RNA
ttctccagggacgaccacccc

SEQ ID NO: 47495 - RNA, 21 nt, synthetic construct
  source 1..21: mol_type = other RNA
ttctccagggacgaccacccc

SEQ ID NO: 47496 - RNA, 21 nt, synthetic construct
  source 1..21: mol_type = other RNA
caaccaccagtaccacccagc

SEQ ID NO: 47497 - RNA, 21 nt, synthetic construct
  source 1..21: mol_type = other RNA
ttctccagggacgaccacccc

SEQ ID NO: 47498 - RNA, 21 nt, synthetic construct
  source 1..21: mol_type = other RNA
atgggcatctgcgtgcaggcc

SEQ ID NO: 47499 - RNA, 21 nt, synthetic construct
  source 1..21: mol_type = other RNA
ccagggacgacggggagcttg

SEQ ID NO: 47500 - RNA, 21 nt, synthetic construct
  source 1..21: mol_type = other RNA
atctgccaccgcaccctgctg

SEQ ID NO: 47501 - RNA, 21 nt, synthetic construct
  source 1..21: mol_type = other RNA
gactgcccctgtgtgcacaac

SEQ ID NO: 47502 - RNA, 21 nt, synthetic construct
  source 1..21: mol_type = other RNA
gtgtggatcagcacaaccacc

SEQ ID NO: 47503 - RNA, 21 nt, synthetic construct
  source 1..21: mol_type = other RNA
tctccagggacgaccaccccg

SEQ ID NO: 47504 - RNA, 21 nt, synthetic construct
  source 1..21: mol_type = other RNA
gtgtggatcagcacaaccacc

SEQ ID NO: 47505 - RNA, 21 nt, synthetic construct
  source 1..21: mol_type = other RNA
tctccagggacgaccaccccg

SEQ ID NO: 47506 - RNA, 21 nt, synthetic construct
  source 1..21: mol_type = other RNA
gtgtggatcagcacaaccacc

SEQ ID NO: 47507 - RNA, 21 nt, synthetic construct
  source 1..21: mol_type = other RNA
tctccagggacgaccaccccg

SEQ ID NO: 47508 - RNA, 21 nt, synthetic construct
  source 1..21: mol_type = other RNA
gtgtggatcagcacaaccacc

SEQ ID NO: 47509 - RNA, 21 nt, synthetic construct
  source 1..21: mol_type = other RNA
gtgtggatcagcacaaccacc

SEQ ID NO: 47510 - RNA, 21 nt, synthetic construct
  source 1..21: mol_type = other RNA
cccggggagcggtgggtcagc

SEQ ID NO: 47511 - RNA, 21 nt, synthetic construct
  source 1..21: mol_type = other RNA
gcgggtccacgaggagacggt

SEQ ID NO: 47512 - RNA, 21 nt, synthetic construct
  source 1..21: mol_type = other RNA
cccaggatgggtgccccgagc

SEQ ID NO: 47513 - RNA, 21 nt, synthetic construct
  source 1..21: mol_type = other RNA
ctcctggtggagcagagcggg

SEQ ID NO: 47514 - RNA, 21 nt, synthetic construct
  source 1..21: mol_type = other RNA
ggaactggaggtgccctgagc

SEQ ID NO: 47515 - RNA, 21 nt, synthetic construct
  source 1..21: mol_type = other RNA
gaggaccactgtgtggacggc

SEQ ID NO: 47516 - RNA, 21 nt, synthetic construct
  source 1..21: mol_type = other RNA
gcctgtgtgcccgcccaggag

SEQ ID NO: 47517 - RNA, 21 nt, synthetic construct
  source 1..21: mol_type = other RNA
tccaagaggggacctttaagg

SEQ ID NO: 47518 - RNA, 21 nt, synthetic construct
  source 1..21: mol_type = other RNA
gtcttcaagatgtgctacaac

SEQ ID NO: 47519 - RNA, 21 nt, synthetic construct
  source 1..21: mol_type = other RNA
gccacaaccccgccaccgacc

SEQ ID NO: 47520 - RNA, 21 nt, synthetic construct
  source 1..21: mol_type = other RNA
agtcaccagctccaaagccac

SEQ ID NO: 47521 - RNA, 21 nt, synthetic construct
  source 1..21: mol_type = other RNA
gtcaccagctccaaagccact

SEQ ID NO: 47522 - RNA, 21 nt, synthetic construct
  source 1..21: mol_type = other RNA
agaccaccacacccacggcca

SEQ ID NO: 47523 - RNA, 21 nt, synthetic construct
  source 1..21: mol_type = other RNA
tgaccccctcctccatcccgg

SEQ ID NO: 47524 - RNA, 21 nt, synthetic construct
  source 1..21: mol_type = other RNA
caactcctgggacaactccca

SEQ ID NO: 47525 - RNA, 21 nt, synthetic construct
  source 1..21: mol_type = other RNA
agtcaccagctccaaagccac

SEQ ID NO: 47526 - RNA, 21 nt, synthetic construct
  source 1..21: mol_type = other RNA
gtcaccagctccaaagccact

SEQ ID NO: 47527 - RNA, 21 nt, synthetic construct
  source 1..21: mol_type = other RNA
agaccaccacacccacggcca

SEQ ID NO: 47528 - RNA, 21 nt, synthetic construct
  source 1..21: mol_type = other RNA
tgaccccctcctccatcccgg

SEQ ID NO: 47529 - RNA, 21 nt, synthetic construct
  source 1..21: mol_type = other RNA
caatccacccctcctccactc

SEQ ID NO: 47530 - RNA, 21 nt, synthetic construct
  source 1..21: mol_type = other RNA
gcaccctcaaagtgctgacca

SEQ ID NO: 47531 - RNA, 21 nt, synthetic construct
  source 1..21: mol_type = other RNA
agaccaccacacccacggcca

SEQ ID NO: 47532 - RNA, 21 nt, synthetic construct
  source 1..21: mol_type = other RNA
tgaccccctcctccatcccgg

SEQ ID NO: 47533 - RNA, 21 nt, synthetic construct
  source 1..21: mol_type = other RNA
agtcaccagctccaaagccac

SEQ ID NO: 47534 - RNA, 21 nt, synthetic construct
  source 1..21: mol_type = other RNA
gtcaccagctccaaagccact

SEQ ID NO: 47535 - RNA, 21 nt, synthetic construct
  source 1..21: mol_type = other RNA
agaccaccacacccacggcca

SEQ ID NO: 47536 - RNA, 21 nt, synthetic construct
  source 1..21: mol_type = other RNA
gtccccctgggggagttgggc

SEQ ID NO: 47537 - RNA, 21 nt, synthetic construct
  source 1..21: mol_type = other RNA
caatccacccctcctccactc

SEQ ID NO: 47538 - RNA, 21 nt, synthetic construct
  source 1..21: mol_type = other RNA
agtcaccagctccaaagccac

SEQ ID NO: 47539 - RNA, 21 nt, synthetic construct
  source 1..21: mol_type = other RNA
gtcaccagctccaaagccact

SEQ ID NO: 47540 - RNA, 21 nt, synthetic construct
  source 1..21: mol_type = other RNA
gcaactgcccttccagcactg

SEQ ID NO: 47541 - RNA, 21 nt, synthetic construct
  source 1..21: mol_type = other RNA
agaccaccacacccacggcca

SEQ ID NO: 47542 - RNA, 21 nt, synthetic construct
  source 1..21: mol_type = other RNA
tgaccccctcctccatcccgg

SEQ ID NO: 47543 - RNA, 21 nt, synthetic construct
  source 1..21: mol_type = other RNA
accatggccactatgcccaca

SEQ ID NO: 47544 - RNA, 21 nt, synthetic construct
  source 1..21: mol_type = other RNA
agcagcctgccaaccttcagc

SEQ ID NO: 47545 - RNA, 21 nt, synthetic construct
  source 1..21: mol_type = other RNA
cgtacaatggcaccttctacg

SEQ ID NO: 47546 - RNA, 21 nt, synthetic construct
  source 1..21: mol_type = other RNA
gagcgcccgcgcagcacggat

SEQ ID NO: 47547 - RNA, 21 nt, synthetic construct
  source 1..21: mol_type = other RNA
cgtccccccacccgtgccagc

SEQ ID NO: 47548 - RNA, 21 nt, synthetic construct
  source 1..21: mol_type = other RNA
gacccagggccctgtggagcc

SEQ ID NO: 47549 - RNA, 21 nt, synthetic construct
  source 1..21: mol_type = other RNA
cgtcctcatcaatgggcagcg

SEQ ID NO: 47550 - RNA, 21 nt, synthetic construct
  source 1..21: mol_type = other RNA
tcagcatccggctggtgctga

SEQ ID NO: 47551 - RNA, 21 nt, synthetic construct
  source 1..21: mol_type = other RNA
tggagctggatcccaaatacg

SEQ ID NO: 47552 - RNA, 21 nt, synthetic construct
  source 1..21: mol_type = other RNA
gcggaactggaggtgccctga

SEQ ID NO: 47553 - RNA, 21 nt, synthetic construct
  source 1..21: mol_type = other RNA
ggctcaccctgcacggacacc

SEQ ID NO: 47554 - RNA, 21 nt, synthetic construct
  source 1..21: mol_type = other RNA
gctcaccctgcacggacacct

SEQ ID NO: 47555 - RNA, 21 nt, synthetic construct
  source 1..21: mol_type = other RNA
ctgcacggacacctgctccaa

SEQ ID NO: 47556 - RNA, 21 nt, synthetic construct
  source 1..21: mol_type = other RNA
gcgcagctctgcgaggaccac

SEQ ID NO: 47557 - RNA, 21 nt, synthetic construct
  source 1..21: mol_type = other RNA
ttcaccgtgctggctgagctg

SEQ ID NO: 47558 - RNA, 21 nt, synthetic construct
  source 1..21: mol_type = other RNA
gtgccaatgccaggaacagct

SEQ ID NO: 47559 - RNA, 21 nt, synthetic construct
  source 1..21: mol_type = other RNA
gctcagcgactggagggacgg

SEQ ID NO: 47560 - RNA, 21 nt, synthetic construct
  source 1..21: mol_type = other RNA
gaactgccccaagtcccagcg

SEQ ID NO: 47561 - RNA, 21 nt, synthetic construct
  source 1..21: mol_type = other RNA
tggtggatgcctgccagccca

SEQ ID NO: 47562 - RNA, 21 nt, synthetic construct
  source 1..21: mol_type = other RNA
gggtgtgcagcccccatggtg

SEQ ID NO: 47563 - RNA, 21 nt, synthetic construct
  source 1..21: mol_type = other RNA
gggacaacaccacccacggga

SEQ ID NO: 47564 - RNA, 21 nt, synthetic construct
  source 1..21: mol_type = other RNA
caccttcgccgcctgccgctc

SEQ ID NO: 47565 - RNA, 21 nt, synthetic construct
  source 1..21: mol_type = other RNA
ggcatgtcctggaactccagc

SEQ ID NO: 47566 - RNA, 21 nt, synthetic construct
  source 1..21: mol_type = other RNA
ggtatgccctgtgctggctga

SEQ ID NO: 47567 - RNA, 21 nt, synthetic construct
  source 1..21: mol_type = other RNA
acatcgagtgccgggcggcgc

SEQ ID NO: 47568 - RNA, 21 nt, synthetic construct
  source 1..21: mol_type = other RNA
ccaactggaccctggcacagg

SEQ ID NO: 47569 - RNA, 21 nt, synthetic construct
  source 1..21: mol_type = other RNA
ctggaccctggcacaggtggg

SEQ ID NO: 47570 - RNA, 21 nt, synthetic construct
  source 1..21: mol_type = other RNA
gagcaggagggcgtcttcaag

SEQ ID NO: 47571 - RNA, 21 nt, synthetic construct
  source 1..21: mol_type = other RNA
cagtgacgaccactgcagggg

SEQ ID NO: 47572 - RNA, 21 nt, synthetic construct
  source 1..21: mol_type = other RNA
agctggagacggccaccacca

SEQ ID NO: 47573 - RNA, 21 nt, synthetic construct
  source 1..21: mol_type = other RNA
tggcaacctccagagctcgcc

SEQ ID NO: 47574 - RNA, 21 nt, synthetic construct
  source 1..21: mol_type = other RNA
acggccaccccgacctccacc

SEQ ID NO: 47575 - RNA, 21 nt, synthetic construct
  source 1..21: mol_type = other RNA
ctatcacagaccaccacaccc

SEQ ID NO: 47576 - RNA, 21 nt, synthetic construct
  source 1..21: mol_type = other RNA
tgcccacacctccacagtgct

SEQ ID NO: 47577 - RNA, 21 nt, synthetic construct
  source 1..21: mol_type = other RNA
gcttaccgccacggccaccac

SEQ ID NO: 47578 - RNA, 21 nt, synthetic construct
  source 1..21: mol_type = other RNA
cgggcttcacagccaccccct

SEQ ID NO: 47579 - RNA, 21 nt, synthetic construct
  source 1..21: mol_type = other RNA
actcacgcctccagtgtggat

SEQ ID NO: 47580 - RNA, 21 nt, synthetic construct
  source 1..21: mol_type = other RNA
ctagcacacagaccagtggta

SEQ ID NO: 47581 - RNA, 21 nt, synthetic construct
  source 1..21: mol_type = other RNA
agccaccagcaacacagtgac

SEQ ID NO: 47582 - RNA, 21 nt, synthetic construct
  source 1..21: mol_type = other RNA
acggtgcgcacagcctggact

SEQ ID NO: 47583 - RNA, 21 nt, synthetic construct
  source 1..21: mol_type = other RNA
cccgggccacaccacggccac

SEQ ID NO: 47584 - RNA, 21 nt, synthetic construct
  source 1..21: mol_type = other RNA
ccgggccacaccacggccacc

SEQ ID NO: 47585 - RNA, 21 nt, synthetic construct
  source 1..21: mol_type = other RNA
gagtgccgtgcccaggcccag

SEQ ID NO: 47586 - RNA, 21 nt, synthetic construct
  source 1..21: mol_type = other RNA
agtgccgtgcccaggcccagc

SEQ ID NO: 47587 - RNA, 21 nt, synthetic construct
  source 1..21: mol_type = other RNA
ccactccggggacgacctgga

SEQ ID NO: 47588 - RNA, 21 nt, synthetic construct
  source 1..21: mol_type = other RNA
ccacggccaccccgtcctcca

SEQ ID NO: 47589 - RNA, 21 nt, synthetic construct
  source 1..21: mol_type = other RNA
cacggccaccccgtcctccac

SEQ ID NO: 47590 - RNA, 21 nt, synthetic construct
  source 1..21: mol_type = other RNA
gccaccgtgacggtgcccacc

SEQ ID NO: 47591 - RNA, 21 nt, synthetic construct
  source 1..21: mol_type = other RNA
ctatcacagaccaccacaccc

SEQ ID NO: 47592 - RNA, 21 nt, synthetic construct
  source 1..21: mol_type = other RNA
cgggcttcacagccaccccct

SEQ ID NO: 47593 - RNA, 21 nt, synthetic construct
  source 1..21: mol_type = other RNA
cacccccacagtgctgaccac

SEQ ID NO: 47594 - RNA, 21 nt, synthetic construct
  source 1..21: mol_type = other RNA
ctagcacacagaccagtggta

SEQ ID NO: 47595 - RNA, 21 nt, synthetic construct
  source 1..21: mol_type = other RNA
gacaacacctatccccccagt

SEQ ID NO: 47596 - RNA, 21 nt, synthetic construct
  source 1..21: mol_type = other RNA
cgggcgatccctgtcccccag

SEQ ID NO: 47597 - RNA, 21 nt, synthetic construct
  source 1..21: mol_type = other RNA
acggtgcgcacagcctggact

SEQ ID NO: 47598 - RNA, 21 nt, synthetic construct
  source 1..21: mol_type = other RNA
caccccagcagcaaccaccgg

SEQ ID NO: 47599 - RNA, 21 nt, synthetic construct
  source 1..21: mol_type = other RNA
agcaggaccaccgagtcaccc

SEQ ID NO: 47600 - RNA, 21 nt, synthetic construct
  source 1..21: mol_type = other RNA
gagtgccgtgcccaggcccag

SEQ ID NO: 47601 - RNA, 21 nt, synthetic construct
  source 1..21: mol_type = other RNA
agtgccgtgcccaggcccagc

SEQ ID NO: 47602 - RNA, 21 nt, synthetic construct
  source 1..21: mol_type = other RNA
cactccagggacgacctggat

SEQ ID NO: 47603 - RNA, 21 nt, synthetic construct
  source 1..21: mol_type = other RNA
cgggaccctcccagaacagac

SEQ ID NO: 47604 - RNA, 21 nt, synthetic construct
  source 1..21: mol_type = other RNA
ccactccggggacgacctgga

SEQ ID NO: 47605 - RNA, 21 nt, synthetic construct
  source 1..21: mol_type = other RNA
ccacggccaccccgtcctcca

SEQ ID NO: 47606 - RNA, 21 nt, synthetic construct
  source 1..21: mol_type = other RNA
cacggccaccccgtcctccac

SEQ ID NO: 47607 - RNA, 21 nt, synthetic construct
  source 1..21: mol_type = other RNA
gccaccgtgacggtgcccacc

SEQ ID NO: 47608 - RNA, 21 nt, synthetic construct
  source 1..21: mol_type = other RNA
tggcaccctcaaagtgctgac

SEQ ID NO: 47609 - RNA, 21 nt, synthetic construct
  source 1..21: mol_type = other RNA
catcagctccagagccactcc

SEQ ID NO: 47610 - RNA, 21 nt, synthetic construct
  source 1..21: mol_type = other RNA
ctatcacagaccaccacaccc

SEQ ID NO: 47611 - RNA, 21 nt, synthetic construct
  source 1..21: mol_type = other RNA
cgggcttcacagccaccccct

SEQ ID NO: 47612 - RNA, 21 nt, synthetic construct
  source 1..21: mol_type = other RNA
actcacgcctccagtgtggat

SEQ ID NO: 47613 - RNA, 21 nt, synthetic construct
  source 1..21: mol_type = other RNA
ctagcacacagaccagtggta

SEQ ID NO: 47614 - RNA, 21 nt, synthetic construct
  source 1..21: mol_type = other RNA
acggtgcgcacagcctggact

SEQ ID NO: 47615 - RNA, 21 nt, synthetic construct
  source 1..21: mol_type = other RNA
agcaggaccaccgagtcaccc

SEQ ID NO: 47616 - RNA, 21 nt, synthetic construct
  source 1..21: mol_type = other RNA
gagtgccgtgcccaggcccag

SEQ ID NO: 47617 - RNA, 21 nt, synthetic construct
  source 1..21: mol_type = other RNA
agtgccgtgcccaggcccagc

SEQ ID NO: 47618 - RNA, 21 nt, synthetic construct
  source 1..21: mol_type = other RNA
ccacggccaccccgtcctcca

SEQ ID NO: 47619 - RNA, 21 nt, synthetic construct
  source 1..21: mol_type = other RNA
cacggccaccccgtcctccac

SEQ ID NO: 47620 - RNA, 21 nt, synthetic construct
  source 1..21: mol_type = other RNA
gccaccgtgacggtgcccacc

SEQ ID NO: 47621 - RNA, 21 nt, synthetic construct
  source 1..21: mol_type = other RNA
ctatcacagaccaccacaccc

SEQ ID NO: 47622 - RNA, 21 nt, synthetic construct
  source 1..21: mol_type = other RNA
tgcccacacctccacagtgct

SEQ ID NO: 47623 - RNA, 21 nt, synthetic construct
  source 1..21: mol_type = other RNA
cagtcaccccctcctccagcc

SEQ ID NO: 47624 - RNA, 21 nt, synthetic construct
  source 1..21: mol_type = other RNA
cccacaaccagtggctccacg

SEQ ID NO: 47625 - RNA, 21 nt, synthetic construct
  source 1..21: mol_type = other RNA
cacccccacagtgctgaccac

SEQ ID NO: 47626 - RNA, 21 nt, synthetic construct
  source 1..21: mol_type = other RNA
ctagcacacagaccagtggta

SEQ ID NO: 47627 - RNA, 21 nt, synthetic construct
  source 1..21: mol_type = other RNA
gacaacacctatccccccagt

SEQ ID NO: 47628 - RNA, 21 nt, synthetic construct
  source 1..21: mol_type = other RNA
cgggcgatccctgtcccccag

SEQ ID NO: 47629 - RNA, 21 nt, synthetic construct
  source 1..21: mol_type = other RNA
acggtgcgcacagcctggact

SEQ ID NO: 47630 - RNA, 21 nt, synthetic construct
  source 1..21: mol_type = other RNA
caccccagcagcaaccaccgg

SEQ ID NO: 47631 - RNA, 21 nt, synthetic construct
  source 1..21: mol_type = other RNA
agcaggaccaccgagtcaccc

SEQ ID NO: 47632 - RNA, 21 nt, synthetic construct
  source 1..21: mol_type = other RNA
cccgggccacaccacggccac

SEQ ID NO: 47633 - RNA, 21 nt, synthetic construct
  source 1..21: mol_type = other RNA
ccgggccacaccacggccacc

SEQ ID NO: 47634 - RNA, 21 nt, synthetic construct
  source 1..21: mol_type = other RNA
gagtgccgtgcccaggcccag

SEQ ID NO: 47635 - RNA, 21 nt, synthetic construct
  source 1..21: mol_type = other RNA
agtgccgtgcccaggcccagc

SEQ ID NO: 47636 - RNA, 21 nt, synthetic construct
  source 1..21: mol_type = other RNA
ccactccggggacgacctgga

SEQ ID NO: 47637 - RNA, 21 nt, synthetic construct
  source 1..21: mol_type = other RNA
ccacggccaccccgtcctcca

SEQ ID NO: 47638 - RNA, 21 nt, synthetic construct
  source 1..21: mol_type = other RNA
cacggccaccccgtcctccac

SEQ ID NO: 47639 - RNA, 21 nt, synthetic construct
  source 1..21: mol_type = other RNA
cagcccggccaccacacccac

SEQ ID NO: 47640 - RNA, 21 nt, synthetic construct
  source 1..21: mol_type = other RNA
cgggaccctcccagaacagac

SEQ ID NO: 47641 - RNA, 21 nt, synthetic construct
  source 1..21: mol_type = other RNA
ccactccggggacgacctgga

SEQ ID NO: 47642 - RNA, 21 nt, synthetic construct
  source 1..21: mol_type = other RNA
ccacggccaccccgtcctcca

SEQ ID NO: 47643 - RNA, 21 nt, synthetic construct
  source 1..21: mol_type = other RNA
cacggccaccccgtcctccac

SEQ ID NO: 47644 - RNA, 21 nt, synthetic construct
  source 1..21: mol_type = other RNA
ccacggccaccccgtcctcca

SEQ ID NO: 47645 - RNA, 21 nt, synthetic construct
  source 1..21: mol_type = other RNA
cacggccaccccgtcctccac

SEQ ID NO: 47646 - RNA, 21 nt, synthetic construct
  source 1..21: mol_type = other RNA
gccaccgtgacggtgcccacc

SEQ ID NO: 47647 - RNA, 21 nt, synthetic construct
  source 1..21: mol_type = other RNA
ctatcacagaccaccacaccc

SEQ ID NO: 47648 - RNA, 21 nt, synthetic construct
  source 1..21: mol_type = other RNA
gcttaccgccacggccaccac

SEQ ID NO: 47649 - RNA, 21 nt, synthetic construct
  source 1..21: mol_type = other RNA
cgggcttcacagccaccccct

SEQ ID NO: 47650 - RNA, 21 nt, synthetic construct
  source 1..21: mol_type = other RNA
actcacgcctccagtgtggat

SEQ ID NO: 47651 - RNA, 21 nt, synthetic construct
  source 1..21: mol_type = other RNA
cccacaaccagtggctccacg

SEQ ID NO: 47652 - RNA, 21 nt, synthetic construct
  source 1..21: mol_type = other RNA
ctagcacacagaccagtggta

SEQ ID NO: 47653 - RNA, 21 nt, synthetic construct
  source 1..21: mol_type = other RNA
ccatgacaagggccaccaatt

SEQ ID NO: 47654 - RNA, 21 nt, synthetic construct
  source 1..21: mol_type = other RNA
aattccacggccacaccctcc

SEQ ID NO: 47655 - RNA, 21 nt, synthetic construct
  source 1..21: mol_type = other RNA
cccggatcctcactgagctga

SEQ ID NO: 47656 - RNA, 21 nt, synthetic construct
  source 1..21: mol_type = other RNA
cacggccaccctgtcctccac

SEQ ID NO: 47657 - RNA, 21 nt, synthetic construct
  source 1..21: mol_type = other RNA
ctcacacccccaaagtggtga

SEQ ID NO: 47658 - RNA, 21 nt, synthetic construct
  source 1..21: mol_type = other RNA
ccaaagtggtgaccaccatgg

SEQ ID NO: 47659 - RNA, 21 nt, synthetic construct
  source 1..21: mol_type = other RNA
aaagtggtgaccaccatggcc

SEQ ID NO: 47660 - RNA, 21 nt, synthetic construct
  source 1..21: mol_type = other RNA
cacccgcacccctgcagtgct

SEQ ID NO: 47661 - RNA, 21 nt, synthetic construct
  source 1..21: mol_type = other RNA
accgaccgagccggctgccat

SEQ ID NO: 47662 - RNA, 21 nt, synthetic construct
  source 1..21: mol_type = other RNA
ggcgcctgtcccacctcccca

SEQ ID NO: 47663 - RNA, 21 nt, synthetic construct
  source 1..21: mol_type = other RNA
gtgtcctccgccccgctgtcc

SEQ ID NO: 47664 - RNA, 21 nt, synthetic construct
  source 1..21: mol_type = other RNA
gacccaaagcctgtggccaac

SEQ ID NO: 47665 - RNA, 21 nt, synthetic construct
  source 1..21: mol_type = other RNA
agcatgtggggcggctcccac

SEQ ID NO: 47666 - RNA, 21 nt, synthetic construct
  source 1..21: mol_type = other RNA
ctcagcatccactacaagtcc

SEQ ID NO: 47667 - RNA, 21 nt, synthetic construct
  source 1..21: mol_type = other RNA
caagacgtggctggtccccga

SEQ ID NO: 47668 - RNA, 21 nt, synthetic construct
  source 1..21: mol_type = other RNA
tgtctagcacacccaccccca

SEQ ID NO: 47669 - RNA, 21 nt, synthetic construct
  source 1..21: mol_type = other RNA
tctagcacacccacccccacc

SEQ ID NO: 47670 - RNA, 21 nt, synthetic construct
  source 1..21: mol_type = other RNA
aggtctttgctgagtgccaca

SEQ ID NO: 47671 - RNA, 21 nt, synthetic construct
  source 1..21: mol_type = other RNA
gtctttgctgagtgccacaac

SEQ ID NO: 47672 - RNA, 21 nt, synthetic construct
  source 1..21: mol_type = other RNA
catacagcctgccacctgcaa

SEQ ID NO: 47673 - RNA, 21 nt, synthetic construct
  source 1..21: mol_type = other RNA
gcgtgtgcaacacaaccacct

SEQ ID NO: 47674 - RNA, 21 nt, synthetic construct
  source 1..21: mol_type = other RNA
gctgtcccaccttccgctgca

SEQ ID NO: 47675 - RNA, 21 nt, synthetic construct
  source 1..21: mol_type = other RNA
gtcaggaggatgcctgcaaca

SEQ ID NO: 47676 - RNA, 21 nt, synthetic construct
  source 1..21: mol_type = other RNA
atactacctgtccccagggct

SEQ ID NO: 47677 - RNA, 21 nt, synthetic construct
  source 1..21: mol_type = other RNA
tactacctgtccccagggctt

SEQ ID NO: 47678 - RNA, 21 nt, synthetic construct
  source 1..21: mol_type = other RNA
gcccgatggccagccagtcca

SEQ ID NO: 47679 - RNA, 21 nt, synthetic construct
  source 1..21: mol_type = other RNA
tgggtcaacagccatgtggac

SEQ ID NO: 47680 - RNA, 21 nt, synthetic construct
  source 1..21: mol_type = other RNA
cctgctgcccaccccgtgggt

SEQ ID NO: 47681 - RNA, 21 nt, synthetic construct
  source 1..21: mol_type = other RNA
cctaccctgggagagcctgtg

SEQ ID NO: 47682 - RNA, 21 nt, synthetic construct
  source 1..21: mol_type = other RNA
gacaagcccggccctcccggt

SEQ ID NO: 47683 - RNA, 21 nt, synthetic construct
  source 1..21: mol_type = other RNA
atcagcacaaccaccacaccc

SEQ ID NO: 47684 - RNA, 21 nt, synthetic construct
  source 1..21: mol_type = other RNA
gctccacggtgaccccctcct

SEQ ID NO: 47685 - RNA, 21 nt, synthetic construct
  source 1..21: mol_type = other RNA
ccagtggtactcccccatcac

SEQ ID NO: 47686 - RNA, 21 nt, synthetic construct
  source 1..21: mol_type = other RNA
ttgggcaccacccacatcaca

SEQ ID NO: 47687 - RNA, 21 nt, synthetic construct
  source 1..21: mol_type = other RNA
atcagcacaaccaccacaccc

SEQ ID NO: 47688 - RNA, 21 nt, synthetic construct
  source 1..21: mol_type = other RNA
ccagtggtactcccccatcac

SEQ ID NO: 47689 - RNA, 21 nt, synthetic construct
  source 1..21: mol_type = other RNA
ttgggcaccacccacatcaca

SEQ ID NO: 47690 - RNA, 21 nt, synthetic construct
  source 1..21: mol_type = other RNA
ggcaccctcaaagtgctgacc

SEQ ID NO: 47691 - RNA, 21 nt, synthetic construct
  source 1..21: mol_type = other RNA
atcagcacaaccaccacaccc

SEQ ID NO: 47692 - RNA, 21 nt, synthetic construct
  source 1..21: mol_type = other RNA
gctccacggtgaccccctcct

SEQ ID NO: 47693 - RNA, 21 nt, synthetic construct
  source 1..21: mol_type = other RNA
ccagtggtactcccccatcac

SEQ ID NO: 47694 - RNA, 21 nt, synthetic construct
  source 1..21: mol_type = other RNA
ttgggcaccacccacatcaca

SEQ ID NO: 47695 - RNA, 21 nt, synthetic construct
  source 1..21: mol_type = other RNA
atcagcacaaccaccacaccc

SEQ ID NO: 47696 - RNA, 21 nt, synthetic construct
  source 1..21: mol_type = other RNA
gctccacggtgaccccctcct

SEQ ID NO: 47697 - RNA, 21 nt, synthetic construct
  source 1..21: mol_type = other RNA
ccagtggtactcccccatcac

SEQ ID NO: 47698 - RNA, 21 nt, synthetic construct
  source 1..21: mol_type = other RNA
ttgggcaccacccacatcaca

SEQ ID NO: 47699 - RNA, 21 nt, synthetic construct
  source 1..21: mol_type = other RNA
gttccacgtccaccccctcct

SEQ ID NO: 47700 - RNA, 21 nt, synthetic construct
  source 1..21: mol_type = other RNA
atcagcacaaccaccacaccc

SEQ ID NO: 47701 - RNA, 21 nt, synthetic construct
  source 1..21: mol_type = other RNA
gctccacggtgaccccctcct

SEQ ID NO: 47702 - RNA, 21 nt, synthetic construct
  source 1..21: mol_type = other RNA
ccagtggtactcccccatcac

SEQ ID NO: 47703 - RNA, 21 nt, synthetic construct
  source 1..21: mol_type = other RNA
tcctcactgagctgaccacaa

SEQ ID NO: 47704 - RNA, 21 nt, synthetic construct
  source 1..21: mol_type = other RNA
gaacagctcacacccccaaag

SEQ ID NO: 47705 - RNA, 21 nt, synthetic construct
  source 1..21: mol_type = other RNA
tccagggcgcctgtcccacct

SEQ ID NO: 47706 - RNA, 21 nt, synthetic construct
  source 1..21: mol_type = other RNA
cggacccgagccagccctgtg

SEQ ID NO: 47707 - RNA, 21 nt, synthetic construct
  source 1..21: mol_type = other RNA
atggcggagggctgcttctgc

SEQ ID NO: 47708 - RNA, 21 nt, synthetic construct
  source 1..21: mol_type = other RNA
ctgcttctgccctgaggacca

SEQ ID NO: 47709 - RNA, 21 nt, synthetic construct
  source 1..21: mol_type = other RNA
cctgaggaccagatcctcttc

SEQ ID NO: 47710 - RNA, 21 nt, synthetic construct
  source 1..21: mol_type = other RNA
ccgcctgcgcccaggacctgt

SEQ ID NO: 47711 - RNA, 21 nt, synthetic construct
  source 1..21: mol_type = other RNA
ctgcccccggacctgccccct

SEQ ID NO: 47712 - RNA, 21 nt, synthetic construct
  source 1..21: mol_type = other RNA
gcttcttcatcgtggtgcaga

SEQ ID NO: 47713 - RNA, 21 nt, synthetic construct
  source 1..21: mol_type = other RNA
aagctaagctgcctgggagcc

SEQ ID NO: 47714 - RNA, 21 nt, synthetic construct
  source 1..21: mol_type = other RNA
gtcctggaactccagccacaa

SEQ ID NO: 47715 - RNA, 21 nt, synthetic construct
  source 1..21: mol_type = other RNA
cgacaagcccggccctcccgg

SEQ ID NO: 47716 - RNA, 21 nt, synthetic construct
  source 1..21: mol_type = other RNA
cgacctccaccctgagaacag

SEQ ID NO: 47717 - RNA, 21 nt, synthetic construct
  source 1..21: mol_type = other RNA
ctccctgggcaccacctggac

SEQ ID NO: 47718 - RNA, 21 nt, synthetic construct
  source 1..21: mol_type = other RNA
ctgcccacacctccacagtgc

SEQ ID NO: 47719 - RNA, 21 nt, synthetic construct
  source 1..21: mol_type = other RNA
caggaaccgtgagcaggtggg

SEQ ID NO: 47720 - RNA, 21 nt, synthetic construct
  source 1..21: mol_type = other RNA
ctccctgggcaccacctggac

SEQ ID NO: 47721 - RNA, 21 nt, synthetic construct
  source 1..21: mol_type = other RNA
caggaaccgtgagcaggtggg

SEQ ID NO: 47722 - RNA, 21 nt, synthetic construct
  source 1..21: mol_type = other RNA
caggaaccgtgagcaggtggg

SEQ ID NO: 47723 - RNA, 21 nt, synthetic construct
  source 1..21: mol_type = other RNA
ctccctgggcaccacctggac

SEQ ID NO: 47724 - RNA, 21 nt, synthetic construct
  source 1..21: mol_type = other RNA
ctgcccacacctccacagtgc

SEQ ID NO: 47725 - RNA, 21 nt, synthetic construct
  source 1..21: mol_type = other RNA
caggaaccgtgagcaggtggg

SEQ ID NO: 47726 - RNA, 21 nt, synthetic construct
  source 1..21: mol_type = other RNA
ctccctgggcaccacctggac

SEQ ID NO: 47727 - RNA, 21 nt, synthetic construct
  source 1..21: mol_type = other RNA
cctcactgagctgaccacaac

SEQ ID NO: 47728 - RNA, 21 nt, synthetic construct
  source 1..21: mol_type = other RNA
accgtgtacctctgtgaggct

SEQ ID NO: 47729 - RNA, 21 nt, synthetic construct
  source 1..21: mol_type = other RNA
gcactggtggacagcactgcg

SEQ ID NO: 47730 - RNA, 21 nt, synthetic construct
  source 1..21: mol_type = other RNA
cggggggccagccgcggaact

SEQ ID NO: 47731 - RNA, 21 nt, synthetic construct
  source 1..21: mol_type = other RNA
atgcctgccagcccacttgcc

SEQ ID NO: 47732 - RNA, 21 nt, synthetic construct
  source 1..21: mol_type = other RNA
gtgtgcccgcccaggagtgcc

SEQ ID NO: 47733 - RNA, 21 nt, synthetic construct
  source 1..21: mol_type = other RNA
gggctgcattgccgaggagga

SEQ ID NO: 47734 - RNA, 21 nt, synthetic construct
  source 1..21: mol_type = other RNA
ctacaagcctggagagaccat

SEQ ID NO: 47735 - RNA, 21 nt, synthetic construct
  source 1..21: mol_type = other RNA
gtggggacaacaccacccacg

SEQ ID NO: 47736 - RNA, 21 nt, synthetic construct
  source 1..21: mol_type = other RNA
ctggatccacggccaccccga

SEQ ID NO: 47737 - RNA, 21 nt, synthetic construct
  source 1..21: mol_type = other RNA
gtggatcagcacaaccaccac

SEQ ID NO: 47738 - RNA, 21 nt, synthetic construct
  source 1..21: mol_type = other RNA
ccgtgagcaggtggggaagtt

SEQ ID NO: 47739 - RNA, 21 nt, synthetic construct
  source 1..21: mol_type = other RNA
ctggatccacggccaccccgt

SEQ ID NO: 47740 - RNA, 21 nt, synthetic construct
  source 1..21: mol_type = other RNA
catgtgagcaccacggccacg

SEQ ID NO: 47741 - RNA, 21 nt, synthetic construct
  source 1..21: mol_type = other RNA
cagctttacagccatcccctc

SEQ ID NO: 47742 - RNA, 21 nt, synthetic construct
  source 1..21: mol_type = other RNA
gtggatcagcacaaccaccac

SEQ ID NO: 47743 - RNA, 21 nt, synthetic construct
  source 1..21: mol_type = other RNA
cccggggaccacccacacccc

SEQ ID NO: 47744 - RNA, 21 nt, synthetic construct
  source 1..21: mol_type = other RNA
cacaccccagcagcaaccacc

SEQ ID NO: 47745 - RNA, 21 nt, synthetic construct
  source 1..21: mol_type = other RNA
accccgggccacaccagggcc

SEQ ID NO: 47746 - RNA, 21 nt, synthetic construct
  source 1..21: mol_type = other RNA
ccgtgagcaggtggggaagtt

SEQ ID NO: 47747 - RNA, 21 nt, synthetic construct
  source 1..21: mol_type = other RNA
ggccaccagttccatgtccac

SEQ ID NO: 47748 - RNA, 21 nt, synthetic construct
  source 1..21: mol_type = other RNA
gtggatcagcacaaccaccac

SEQ ID NO: 47749 - RNA, 21 nt, synthetic construct
  source 1..21: mol_type = other RNA
cacaccccagcagcaaccacc

SEQ ID NO: 47750 - RNA, 21 nt, synthetic construct
  source 1..21: mol_type = other RNA
ccgtgagcaggtggggaagtt

SEQ ID NO: 47751 - RNA, 21 nt, synthetic construct
  source 1..21: mol_type = other RNA
ctggatccacggccaccccgt

SEQ ID NO: 47752 - RNA, 21 nt, synthetic construct
  source 1..21: mol_type = other RNA
catgtgagcaccacggccacg

SEQ ID NO: 47753 - RNA, 21 nt, synthetic construct
  source 1..21: mol_type = other RNA
cagctttacagccatcccctc

SEQ ID NO: 47754 - RNA, 21 nt, synthetic construct
  source 1..21: mol_type = other RNA
gtggatcagcacaaccaccac

SEQ ID NO: 47755 - RNA, 21 nt, synthetic construct
  source 1..21: mol_type = other RNA
cccggggaccacccacacccc

SEQ ID NO: 47756 - RNA, 21 nt, synthetic construct
  source 1..21: mol_type = other RNA
cacaccccagcagcaaccacc

SEQ ID NO: 47757 - RNA, 21 nt, synthetic construct
  source 1..21: mol_type = other RNA
ccgtgagcaggtggggaagtt

SEQ ID NO: 47758 - RNA, 21 nt, synthetic construct
  source 1..21: mol_type = other RNA
ctggatccacggccaccccgt

SEQ ID NO: 47759 - RNA, 21 nt, synthetic construct
  source 1..21: mol_type = other RNA
ctggatccacggccaccccgt

SEQ ID NO: 47760 - RNA, 21 nt, synthetic construct
  source 1..21: mol_type = other RNA
catgtgagcaccacggccacg

SEQ ID NO: 47761 - RNA, 21 nt, synthetic construct
  source 1..21: mol_type = other RNA
cagctttacagccatcccctc

SEQ ID NO: 47762 - RNA, 21 nt, synthetic construct
  source 1..21: mol_type = other RNA
gtggatcagcacaaccaccac

SEQ ID NO: 47763 - RNA, 21 nt, synthetic construct
  source 1..21: mol_type = other RNA
ggatcctcactgagctgacca

SEQ ID NO: 47764 - RNA, 21 nt, synthetic construct
  source 1..21: mol_type = other RNA
ctggatccacggccaccctgt

SEQ ID NO: 47765 - RNA, 21 nt, synthetic construct
  source 1..21: mol_type = other RNA
gggaccacccgcacccctgca

SEQ ID NO: 47766 - RNA, 21 nt, synthetic construct
  source 1..21: mol_type = other RNA
cggcacctcttacaccttccg

SEQ ID NO: 47767 - RNA, 21 nt, synthetic construct
  source 1..21: mol_type = other RNA
ggcacctcttacaccttccgg

SEQ ID NO: 47768 - RNA, 21 nt, synthetic construct
  source 1..21: mol_type = other RNA
attcttcaacgcctgcatcag

SEQ ID NO: 47769 - RNA, 21 nt, synthetic construct
  source 1..21: mol_type = other RNA
agggcaggagtccatctgcac

SEQ ID NO: 47770 - RNA, 21 nt, synthetic construct
  source 1..21: mol_type = other RNA
ggcaggagtccatctgcaccc

SEQ ID NO: 47771 - RNA, 21 nt, synthetic construct
  source 1..21: mol_type = other RNA
tggccgggcagtgctgtgggg

SEQ ID NO: 47772 - RNA, 21 nt, synthetic construct
  source 1..21: mol_type = other RNA
gaggctgagggtggagtccat

SEQ ID NO: 47773 - RNA, 21 nt, synthetic construct
  source 1..21: mol_type = other RNA
cgcccatggctcccccacaca

SEQ ID NO: 47774 - RNA, 21 nt, synthetic construct
  source 1..21: mol_type = other RNA
gtctgagaacgttctgcctcc

SEQ ID NO: 47775 - RNA, 21 nt, synthetic construct
  source 1..21: mol_type = other RNA
ggccggagcgcccgcgcagca

SEQ ID NO: 47776 - RNA, 21 nt, synthetic construct
  source 1..21: mol_type = other RNA
gtgccagcccccaggatgggt

SEQ ID NO: 47777 - RNA, 21 nt, synthetic construct
  source 1..21: mol_type = other RNA
gcttccctggcctttgcaact

SEQ ID NO: 47778 - RNA, 21 nt, synthetic construct
  source 1..21: mol_type = other RNA
gggactacatcaaggtcagca

SEQ ID NO: 47779 - RNA, 21 nt, synthetic construct
  source 1..21: mol_type = other RNA
agggcatctgccaccgcaccc

SEQ ID NO: 47780 - RNA, 21 nt, synthetic construct
  source 1..21: mol_type = other RNA
ccacgcggggggccagccgcg

SEQ ID NO: 47781 - RNA, 21 nt, synthetic construct
  source 1..21: mol_type = other RNA
caacatgcagcaccaggagtg

SEQ ID NO: 47782 - RNA, 21 nt, synthetic construct
  source 1..21: mol_type = other RNA
cacggacacctgctccaaccc

SEQ ID NO: 47783 - RNA, 21 nt, synthetic construct
  source 1..21: mol_type = other RNA
tgtggacggctgcttctgccc

SEQ ID NO: 47784 - RNA, 21 nt, synthetic construct
  source 1..21: mol_type = other RNA
ccgcacctacagcccgggcac

SEQ ID NO: 47785 - RNA, 21 nt, synthetic construct
  source 1..21: mol_type = other RNA
ccgacagcagcttcaccgtgc

SEQ ID NO: 47786 - RNA, 21 nt, synthetic construct
  source 1..21: mol_type = other RNA
cacctggaaggcccaggctgc

SEQ ID NO: 47787 - RNA, 21 nt, synthetic construct
  source 1..21: mol_type = other RNA
cgtttccttcgtgcctgtgga

SEQ ID NO: 47788 - RNA, 21 nt, synthetic construct
  source 1..21: mol_type = other RNA
ctgcacctgccccgcgggcac

SEQ ID NO: 47789 - RNA, 21 nt, synthetic construct
  source 1..21: mol_type = other RNA
gtgcccgcccaggagtgcccc

SEQ ID NO: 47790 - RNA, 21 nt, synthetic construct
  source 1..21: mol_type = other RNA
tgtcggatgggagtgggggct

SEQ ID NO: 47791 - RNA, 21 nt, synthetic construct
  source 1..21: mol_type = other RNA
gccgaggaggactgcccctgt

SEQ ID NO: 47792 - RNA, 21 nt, synthetic construct
  source 1..21: mol_type = other RNA
gtgtgcacaacgaggccacct

SEQ ID NO: 47793 - RNA, 21 nt, synthetic construct
  source 1..21: mol_type = other RNA
gagagaccatcagggtcgact

SEQ ID NO: 47794 - RNA, 21 nt, synthetic construct
  source 1..21: mol_type = other RNA
tacagctttgaaggcagctgc

SEQ ID NO: 47795 - RNA, 21 nt, synthetic construct
  source 1..21: mol_type = other RNA
cgagctgatcctccaagaggg

SEQ ID NO: 47796 - RNA, 21 nt, synthetic construct
  source 1..21: mol_type = other RNA
tggcacccaaggacccctgca

SEQ ID NO: 47797 - RNA, 21 nt, synthetic construct
  source 1..21: mol_type = other RNA
caacccacatgggggctgtga

SEQ ID NO: 47798 - RNA, 21 nt, synthetic construct
  source 1..21: mol_type = other RNA
taactgcacacccagtggcat

SEQ ID NO: 47799 - RNA, 21 nt, synthetic construct
  source 1..21: mol_type = other RNA
atgtcctggaactccagccac

SEQ ID NO: 47800 - RNA, 21 nt, synthetic construct
  source 1..21: mol_type = other RNA
tgtcctggaactccagccaca

SEQ ID NO: 47801 - RNA, 21 nt, synthetic construct
  source 1..21: mol_type = other RNA
agtgccgggcggcgcagcttc

SEQ ID NO: 47802 - RNA, 21 nt, synthetic construct
  source 1..21: mol_type = other RNA
gcctaccccaacccagaccac

SEQ ID NO: 47803 - RNA, 21 nt, synthetic construct
  source 1..21: mol_type = other RNA
cctaccccaacccagaccaca

SEQ ID NO: 47804 - RNA, 21 nt, synthetic construct
  source 1..21: mol_type = other RNA
ttccccaactggaccctggca

SEQ ID NO: 47805 - RNA, 21 nt, synthetic construct
  source 1..21: mol_type = other RNA
acaggtggggcagaaggtgca

SEQ ID NO: 47806 - RNA, 21 nt, synthetic construct
  source 1..21: mol_type = other RNA
aggtggggcagaaggtgcact

SEQ ID NO: 47807 - RNA, 21 nt, synthetic construct
  source 1..21: mol_type = other RNA
gcagtgacgaccactgcaggg

SEQ ID NO: 47808 - RNA, 21 nt, synthetic construct
  source 1..21: mol_type = other RNA
gggctcccccggccagcacca

SEQ ID NO: 47809 - RNA, 21 nt, synthetic construct
  source 1..21: mol_type = other RNA
ccactggatccacggccaccc

SEQ ID NO: 47810 - RNA, 21 nt, synthetic construct
  source 1..21: mol_type = other RNA
cactggatccacggccacccc

SEQ ID NO: 47811 - RNA, 21 nt, synthetic construct
  source 1..21: mol_type = other RNA
actggatccacggccaccccg

SEQ ID NO: 47812 - RNA, 21 nt, synthetic construct
  source 1..21: mol_type = other RNA
ccacagctaccagcgttacac

SEQ ID NO: 47813 - RNA, 21 nt, synthetic construct
  source 1..21: mol_type = other RNA
actccagagactgcccacacc

SEQ ID NO: 47814 - RNA, 21 nt, synthetic construct
  source 1..21: mol_type = other RNA
gcccacacctccacagtgctt

SEQ ID NO: 47815 - RNA, 21 nt, synthetic construct
  source 1..21: mol_type = other RNA
aactggggccaccggctctgt

SEQ ID NO: 47816 - RNA, 21 nt, synthetic construct
  source 1..21: mol_type = other RNA
gcacaaccaccacacccacaa

SEQ ID NO: 47817 - RNA, 21 nt, synthetic construct
  source 1..21: mol_type = other RNA
cctcctccatcccggggacca

SEQ ID NO: 47818 - RNA, 21 nt, synthetic construct
  source 1..21: mol_type = other RNA
cacagtgctgaccaccaccac

SEQ ID NO: 47819 - RNA, 21 nt, synthetic construct
  source 1..21: mol_type = other RNA
ccaccaccacaactgtggcca

SEQ ID NO: 47820 - RNA, 21 nt, synthetic construct
  source 1..21: mol_type = other RNA
tctagcacacagaccagtggt

SEQ ID NO: 47821 - RNA, 21 nt, synthetic construct
  source 1..21: mol_type = other RNA
gatcacggccaccggctccac

SEQ ID NO: 47822 - RNA, 21 nt, synthetic construct
  source 1..21: mol_type = other RNA
aacccctcctcaactcctggg

SEQ ID NO: 47823 - RNA, 21 nt, synthetic construct
  source 1..21: mol_type = other RNA
cagcaacacagtgactccctc

SEQ ID NO: 47824 - RNA, 21 nt, synthetic construct
  source 1..21: mol_type = other RNA
aacacagtgactccctcctct

SEQ ID NO: 47825 - RNA, 21 nt, synthetic construct
  source 1..21: mol_type = other RNA
ccacatcacagagccttccac

SEQ ID NO: 47826 - RNA, 21 nt, synthetic construct
  source 1..21: mol_type = other RNA
ggaccacagccacggccacac

SEQ ID NO: 47827 - RNA, 21 nt, synthetic construct
  source 1..21: mol_type = other RNA
ccacacccagcaagacccgca

SEQ ID NO: 47828 - RNA, 21 nt, synthetic construct
  source 1..21: mol_type = other RNA
ccccagtgtgcctggtcagag

SEQ ID NO: 47829 - RNA, 21 nt, synthetic construct
  source 1..21: mol_type = other RNA
catgccggggccctctggcgg

SEQ ID NO: 47830 - RNA, 21 nt, synthetic construct
  source 1..21: mol_type = other RNA
atgccggggccctctggcggg

SEQ ID NO: 47831 - RNA, 21 nt, synthetic construct
  source 1..21: mol_type = other RNA
tgccggggccctctggcgggg

SEQ ID NO: 47832 - RNA, 21 nt, synthetic construct
  source 1..21: mol_type = other RNA
gaatgcagcctggactttggc

SEQ ID NO: 47833 - RNA, 21 nt, synthetic construct
  source 1..21: mol_type = other RNA
aatgcagcctggactttggcc

SEQ ID NO: 47834 - RNA, 21 nt, synthetic construct
  source 1..21: mol_type = other RNA
ccactggatccacggccaccc

SEQ ID NO: 47835 - RNA, 21 nt, synthetic construct
  source 1..21: mol_type = other RNA
cactggatccacggccacccc

SEQ ID NO: 47836 - RNA, 21 nt, synthetic construct
  source 1..21: mol_type = other RNA
actggatccacggccaccccg

SEQ ID NO: 47837 - RNA, 21 nt, synthetic construct
  source 1..21: mol_type = other RNA
ccaccccgtcctccaccccag

SEQ ID NO: 47838 - RNA, 21 nt, synthetic construct
  source 1..21: mol_type = other RNA
cctccacccaggcaactgctg

SEQ ID NO: 47839 - RNA, 21 nt, synthetic construct
  source 1..21: mol_type = other RNA
ttacagccatcccctcctcct

SEQ ID NO: 47840 - RNA, 21 nt, synthetic construct
  source 1..21: mol_type = other RNA
tcctccactccagagactgtc

SEQ ID NO: 47841 - RNA, 21 nt, synthetic construct
  source 1..21: mol_type = other RNA
gcacaaccaccacacccacaa

SEQ ID NO: 47842 - RNA, 21 nt, synthetic construct
  source 1..21: mol_type = other RNA
cctcctccatcccggggacca

SEQ ID NO: 47843 - RNA, 21 nt, synthetic construct
  source 1..21: mol_type = other RNA
cacagtgctgaccaccaccac

SEQ ID NO: 47844 - RNA, 21 nt, synthetic construct
  source 1..21: mol_type = other RNA
ccaccaccacaactgtggcca

SEQ ID NO: 47845 - RNA, 21 nt, synthetic construct
  source 1..21: mol_type = other RNA
tctagcacacagaccagtggt

SEQ ID NO: 47846 - RNA, 21 nt, synthetic construct
  source 1..21: mol_type = other RNA
gatcacggccaccggctccac

SEQ ID NO: 47847 - RNA, 21 nt, synthetic construct
  source 1..21: mol_type = other RNA
ccacatcacagagccttccac

SEQ ID NO: 47848 - RNA, 21 nt, synthetic construct
  source 1..21: mol_type = other RNA
agccctgtccagccctcaccc

SEQ ID NO: 47849 - RNA, 21 nt, synthetic construct
  source 1..21: mol_type = other RNA
ccacacccagcaagacccgca

SEQ ID NO: 47850 - RNA, 21 nt, synthetic construct
  source 1..21: mol_type = other RNA
ccccagtgtgcctggtcagag

SEQ ID NO: 47851 - RNA, 21 nt, synthetic construct
  source 1..21: mol_type = other RNA
catgccggggccctctggcgg

SEQ ID NO: 47852 - RNA, 21 nt, synthetic construct
  source 1..21: mol_type = other RNA
atgccggggccctctggcggg

SEQ ID NO: 47853 - RNA, 21 nt, synthetic construct
  source 1..21: mol_type = other RNA
tgccggggccctctggcgggg

SEQ ID NO: 47854 - RNA, 21 nt, synthetic construct
  source 1..21: mol_type = other RNA
gaatgcagcctggactttggc

SEQ ID NO: 47855 - RNA, 21 nt, synthetic construct
  source 1..21: mol_type = other RNA
aatgcagcctggactttggcc

SEQ ID NO: 47856 - RNA, 21 nt, synthetic construct
  source 1..21: mol_type = other RNA
catcccgtcctccaccccggg

SEQ ID NO: 47857 - RNA, 21 nt, synthetic construct
  source 1..21: mol_type = other RNA
atcccgtcctccaccccggga

SEQ ID NO: 47858 - RNA, 21 nt, synthetic construct
  source 1..21: mol_type = other RNA
gctgaccagcacggccaccac

SEQ ID NO: 47859 - RNA, 21 nt, synthetic construct
  source 1..21: mol_type = other RNA
cacagccaccaaatccacagc

SEQ ID NO: 47860 - RNA, 21 nt, synthetic construct
  source 1..21: mol_type = other RNA
gctttacacccatcccctcct

SEQ ID NO: 47861 - RNA, 21 nt, synthetic construct
  source 1..21: mol_type = other RNA
cacccatcccctccttcaccc

SEQ ID NO: 47862 - RNA, 21 nt, synthetic construct
  source 1..21: mol_type = other RNA
cttgggaccaccgggaccctc

SEQ ID NO: 47863 - RNA, 21 nt, synthetic construct
  source 1..21: mol_type = other RNA
ccaccgggaccctcccagaac

SEQ ID NO: 47864 - RNA, 21 nt, synthetic construct
  source 1..21: mol_type = other RNA
ccacaatccacccctcctcca

SEQ ID NO: 47865 - RNA, 21 nt, synthetic construct
  source 1..21: mol_type = other RNA
aatccacccctcctccactcc

SEQ ID NO: 47866 - RNA, 21 nt, synthetic construct
  source 1..21: mol_type = other RNA
acccacacctccacagtgctg

SEQ ID NO: 47867 - RNA, 21 nt, synthetic construct
  source 1..21: mol_type = other RNA
gcagccactggccccacggcc

SEQ ID NO: 47868 - RNA, 21 nt, synthetic construct
  source 1..21: mol_type = other RNA
ccaccccgtcctccaccccag

SEQ ID NO: 47869 - RNA, 21 nt, synthetic construct
  source 1..21: mol_type = other RNA
gctgaccagcacggccaccac

SEQ ID NO: 47870 - RNA, 21 nt, synthetic construct
  source 1..21: mol_type = other RNA
agtcatcagctccagagccac

SEQ ID NO: 47871 - RNA, 21 nt, synthetic construct
  source 1..21: mol_type = other RNA
ccacagctaccagcgttacag

SEQ ID NO: 47872 - RNA, 21 nt, synthetic construct
  source 1..21: mol_type = other RNA
acagccacaccctcctctact

SEQ ID NO: 47873 - RNA, 21 nt, synthetic construct
  source 1..21: mol_type = other RNA
gcacaaccaccacacccacaa

SEQ ID NO: 47874 - RNA, 21 nt, synthetic construct
  source 1..21: mol_type = other RNA
cctcctccatcccggggacca

SEQ ID NO: 47875 - RNA, 21 nt, synthetic construct
  source 1..21: mol_type = other RNA
cacagtgctgaccaccaccac

SEQ ID NO: 47876 - RNA, 21 nt, synthetic construct
  source 1..21: mol_type = other RNA
ccaccaccacaactgtggcca

SEQ ID NO: 47877 - RNA, 21 nt, synthetic construct
  source 1..21: mol_type = other RNA
tctagcacacagaccagtggt

SEQ ID NO: 47878 - RNA, 21 nt, synthetic construct
  source 1..21: mol_type = other RNA
ccacatcacagagccttccac

SEQ ID NO: 47879 - RNA, 21 nt, synthetic construct
  source 1..21: mol_type = other RNA
gtgacttcccacaccccagca

SEQ ID NO: 47880 - RNA, 21 nt, synthetic construct
  source 1..21: mol_type = other RNA
accaccagtaccacccagcac

SEQ ID NO: 47881 - RNA, 21 nt, synthetic construct
  source 1..21: mol_type = other RNA
ccaccagtaccacccagcact

SEQ ID NO: 47882 - RNA, 21 nt, synthetic construct
  source 1..21: mol_type = other RNA
agccctgtccagccctcaccc

SEQ ID NO: 47883 - RNA, 21 nt, synthetic construct
  source 1..21: mol_type = other RNA
ccacacccagcaagacccgca

SEQ ID NO: 47884 - RNA, 21 nt, synthetic construct
  source 1..21: mol_type = other RNA
ccccagtgtgcctggtcagag

SEQ ID NO: 47885 - RNA, 21 nt, synthetic construct
  source 1..21: mol_type = other RNA
catgccggggccctctggcgg

SEQ ID NO: 47886 - RNA, 21 nt, synthetic construct
  source 1..21: mol_type = other RNA
atgccggggccctctggcggg

SEQ ID NO: 47887 - RNA, 21 nt, synthetic construct
  source 1..21: mol_type = other RNA
tgccggggccctctggcgggg

SEQ ID NO: 47888 - RNA, 21 nt, synthetic construct
  source 1..21: mol_type = other RNA
gaatgcagcctggactttggc

SEQ ID NO: 47889 - RNA, 21 nt, synthetic construct
  source 1..21: mol_type = other RNA
aatgcagcctggactttggcc

SEQ ID NO: 47890 - RNA, 21 nt, synthetic construct
  source 1..21: mol_type = other RNA
ctggatcctcacaaagctgac

SEQ ID NO: 47891 - RNA, 21 nt, synthetic construct
  source 1..21: mol_type = other RNA
tggatcctcacaaagctgacc

SEQ ID NO: 47892 - RNA, 21 nt, synthetic construct
  source 1..21: mol_type = other RNA
ccactggatccacggccaccc

SEQ ID NO: 47893 - RNA, 21 nt, synthetic construct
  source 1..21: mol_type = other RNA
cactggatccacggccacccc

SEQ ID NO: 47894 - RNA, 21 nt, synthetic construct
  source 1..21: mol_type = other RNA
actggatccacggccaccccg

SEQ ID NO: 47895 - RNA, 21 nt, synthetic construct
  source 1..21: mol_type = other RNA
ccaccccgtcctccaccccag

SEQ ID NO: 47896 - RNA, 21 nt, synthetic construct
  source 1..21: mol_type = other RNA
cctccacccaggcaactgctg

SEQ ID NO: 47897 - RNA, 21 nt, synthetic construct
  source 1..21: mol_type = other RNA
ttacagccatcccctcctcct

SEQ ID NO: 47898 - RNA, 21 nt, synthetic construct
  source 1..21: mol_type = other RNA
actccagagactgcccacacc

SEQ ID NO: 47899 - RNA, 21 nt, synthetic construct
  source 1..21: mol_type = other RNA
gcccacacctccacagtgctt

SEQ ID NO: 47900 - RNA, 21 nt, synthetic construct
  source 1..21: mol_type = other RNA
gcacaaccaccacacccacaa

SEQ ID NO: 47901 - RNA, 21 nt, synthetic construct
  source 1..21: mol_type = other RNA
cggtgaccccctcctccgtcc

SEQ ID NO: 47902 - RNA, 21 nt, synthetic construct
  source 1..21: mol_type = other RNA
cacagtgctgaccaccaccac

SEQ ID NO: 47903 - RNA, 21 nt, synthetic construct
  source 1..21: mol_type = other RNA
ccaccaccacaactgtggcca

SEQ ID NO: 47904 - RNA, 21 nt, synthetic construct
  source 1..21: mol_type = other RNA
tctagcacacagaccagtggt

SEQ ID NO: 47905 - RNA, 21 nt, synthetic construct
  source 1..21: mol_type = other RNA
gatcacggccaccggctccac

SEQ ID NO: 47906 - RNA, 21 nt, synthetic construct
  source 1..21: mol_type = other RNA
ccacatcacagagccttccac

SEQ ID NO: 47907 - RNA, 21 nt, synthetic construct
  source 1..21: mol_type = other RNA
agccctgtccagccctcaccc

SEQ ID NO: 47908 - RNA, 21 nt, synthetic construct
  source 1..21: mol_type = other RNA
cttccccagggacgaccaccc

SEQ ID NO: 47909 - RNA, 21 nt, synthetic construct
  source 1..21: mol_type = other RNA
ccacacccagcaagacccgca

SEQ ID NO: 47910 - RNA, 21 nt, synthetic construct
  source 1..21: mol_type = other RNA
ccccagtgtgcctggtcagag

SEQ ID NO: 47911 - RNA, 21 nt, synthetic construct
  source 1..21: mol_type = other RNA
catgccggggccctctggcgg

SEQ ID NO: 47912 - RNA, 21 nt, synthetic construct
  source 1..21: mol_type = other RNA
atgccggggccctctggcggg

SEQ ID NO: 47913 - RNA, 21 nt, synthetic construct
  source 1..21: mol_type = other RNA
tgccggggccctctggcgggg

SEQ ID NO: 47914 - RNA, 21 nt, synthetic construct
  source 1..21: mol_type = other RNA
gaatgcagcctggactttggc

SEQ ID NO: 47915 - RNA, 21 nt, synthetic construct
  source 1..21: mol_type = other RNA
aatgcagcctggactttggcc

SEQ ID NO: 47916 - RNA, 21 nt, synthetic construct
  source 1..21: mol_type = other RNA
ctgcatccactggatccacgg

SEQ ID NO: 47917 - RNA, 21 nt, synthetic construct
  source 1..21: mol_type = other RNA
ccactggatccacggccaccc

SEQ ID NO: 47918 - RNA, 21 nt, synthetic construct
  source 1..21: mol_type = other RNA
cactggatccacggccacccc

SEQ ID NO: 47919 - RNA, 21 nt, synthetic construct
  source 1..21: mol_type = other RNA
actggatccacggccaccccg

SEQ ID NO: 47920 - RNA, 21 nt, synthetic construct
  source 1..21: mol_type = other RNA
ccaccccgtcctccaccccgg

SEQ ID NO: 47921 - RNA, 21 nt, synthetic construct
  source 1..21: mol_type = other RNA
cacagccaccaaatccacagc

SEQ ID NO: 47922 - RNA, 21 nt, synthetic construct
  source 1..21: mol_type = other RNA
ccacagctaccagcgttacac

SEQ ID NO: 47923 - RNA, 21 nt, synthetic construct
  source 1..21: mol_type = other RNA
ctcctccacccttgggaccac

SEQ ID NO: 47924 - RNA, 21 nt, synthetic construct
  source 1..21: mol_type = other RNA
cttgggaccaccgggaccctc

SEQ ID NO: 47925 - RNA, 21 nt, synthetic construct
  source 1..21: mol_type = other RNA
ccaccgggaccctcccagaac

SEQ ID NO: 47926 - RNA, 21 nt, synthetic construct
  source 1..21: mol_type = other RNA
ccacaatccacccctcctcca

SEQ ID NO: 47927 - RNA, 21 nt, synthetic construct
  source 1..21: mol_type = other RNA
aatccacccctcctccactcc

SEQ ID NO: 47928 - RNA, 21 nt, synthetic construct
  source 1..21: mol_type = other RNA
acccacacctccacagtgctg

SEQ ID NO: 47929 - RNA, 21 nt, synthetic construct
  source 1..21: mol_type = other RNA
gcagccactggccccacggcc

SEQ ID NO: 47930 - RNA, 21 nt, synthetic construct
  source 1..21: mol_type = other RNA
ccaccccgtcctccaccccag

SEQ ID NO: 47931 - RNA, 21 nt, synthetic construct
  source 1..21: mol_type = other RNA
ccactggatccacggccaccc

SEQ ID NO: 47932 - RNA, 21 nt, synthetic construct
  source 1..21: mol_type = other RNA
cactggatccacggccacccc

SEQ ID NO: 47933 - RNA, 21 nt, synthetic construct
  source 1..21: mol_type = other RNA
actggatccacggccaccccg

SEQ ID NO: 47934 - RNA, 21 nt, synthetic construct
  source 1..21: mol_type = other RNA
ccaccccgtcctccaccccag

SEQ ID NO: 47935 - RNA, 21 nt, synthetic construct
  source 1..21: mol_type = other RNA
cctccacccaggcaactgctg

SEQ ID NO: 47936 - RNA, 21 nt, synthetic construct
  source 1..21: mol_type = other RNA
ttacagccatcccctcctcct

SEQ ID NO: 47937 - RNA, 21 nt, synthetic construct
  source 1..21: mol_type = other RNA
tcctccactccagagactgtc

SEQ ID NO: 47938 - RNA, 21 nt, synthetic construct
  source 1..21: mol_type = other RNA
gcacaaccaccacacccacaa

SEQ ID NO: 47939 - RNA, 21 nt, synthetic construct
  source 1..21: mol_type = other RNA
cctcctccatcccggggacca

SEQ ID NO: 47940 - RNA, 21 nt, synthetic construct
  source 1..21: mol_type = other RNA
ccaccaccacaactgtggcca

SEQ ID NO: 47941 - RNA, 21 nt, synthetic construct
  source 1..21: mol_type = other RNA
tctagcacacagaccagtggt

SEQ ID NO: 47942 - RNA, 21 nt, synthetic construct
  source 1..21: mol_type = other RNA
gatcacggccaccggctccac

SEQ ID NO: 47943 - RNA, 21 nt, synthetic construct
  source 1..21: mol_type = other RNA
gctgaccagcacggccaccac

SEQ ID NO: 47944 - RNA, 21 nt, synthetic construct
  source 1..21: mol_type = other RNA
ccaccacacccgcagccacca

SEQ ID NO: 47945 - RNA, 21 nt, synthetic construct
  source 1..21: mol_type = other RNA
acacccgcagccaccagctcc

SEQ ID NO: 47946 - RNA, 21 nt, synthetic construct
  source 1..21: mol_type = other RNA
gcacagccacaaaatccacag

SEQ ID NO: 47947 - RNA, 21 nt, synthetic construct
  source 1..21: mol_type = other RNA
gctttacacccatcccctcct

SEQ ID NO: 47948 - RNA, 21 nt, synthetic construct
  source 1..21: mol_type = other RNA
acccacacctccacagtgctg

SEQ ID NO: 47949 - RNA, 21 nt, synthetic construct
  source 1..21: mol_type = other RNA
ccacaacagccactacaactg

SEQ ID NO: 47950 - RNA, 21 nt, synthetic construct
  source 1..21: mol_type = other RNA
cacaacagccactacaactgc

SEQ ID NO: 47951 - RNA, 21 nt, synthetic construct
  source 1..21: mol_type = other RNA
ccactggatccacggccaccc

SEQ ID NO: 47952 - RNA, 21 nt, synthetic construct
  source 1..21: mol_type = other RNA
cactggatccacggccaccct

SEQ ID NO: 47953 - RNA, 21 nt, synthetic construct
  source 1..21: mol_type = other RNA
aagtggtgaccaccatggcca

SEQ ID NO: 47954 - RNA, 21 nt, synthetic construct
  source 1..21: mol_type = other RNA
ggggaccacccgcacccctgc

SEQ ID NO: 47955 - RNA, 21 nt, synthetic construct
  source 1..21: mol_type = other RNA
agcctgtggccaacgtcacct

SEQ ID NO: 47956 - RNA, 21 nt, synthetic construct
  source 1..21: mol_type = other RNA
cggcctctgccactgccgctg

SEQ ID NO: 47957 - RNA, 21 nt, synthetic construct
  source 1..21: mol_type = other RNA
gtgcatgggaaggaggagggc

SEQ ID NO: 47958 - RNA, 21 nt, synthetic construct
  source 1..21: mol_type = other RNA
gtgtctgtgctggggaccacc

SEQ ID NO: 47959 - RNA, 21 nt, synthetic construct
  source 1..21: mol_type = other RNA
tcaccttcaatggccaagtct

SEQ ID NO: 47960 - RNA, 21 nt, synthetic construct
  source 1..21: mol_type = other RNA
caatggccaagtcttccaggc

SEQ ID NO: 47961 - RNA, 21 nt, synthetic construct
  source 1..21: mol_type = other RNA
cgtggctggtccccgacagca

SEQ ID NO: 47962 - RNA, 21 nt, synthetic construct
  source 1..21: mol_type = other RNA
gacagcagaaaggatggctgc

SEQ ID NO: 47963 - RNA, 21 nt, synthetic construct
  source 1..21: mol_type = other RNA
ccccatgcccaccacagccgc

SEQ ID NO: 47964 - RNA, 21 nt, synthetic construct
  source 1..21: mol_type = other RNA
ccattcttcaacgcctgcatc

SEQ ID NO: 47965 - RNA, 21 nt, synthetic construct
  source 1..21: mol_type = other RNA
tgcaggcctgcccctgcgtgg

SEQ ID NO: 47966 - RNA, 21 nt, synthetic construct
  source 1..21: mol_type = other RNA
tgcaacacaaccacctgcccc

SEQ ID NO: 47967 - RNA, 21 nt, synthetic construct
  source 1..21: mol_type = other RNA
gccagggcaggagtccatctg

SEQ ID NO: 47968 - RNA, 21 nt, synthetic construct
  source 1..21: mol_type = other RNA
cagacctcagctgtgttcgta

SEQ ID NO: 47969 - RNA, 21 nt, synthetic construct
  source 1..21: mol_type = other RNA
catgtgtacctgcctctctgg

SEQ ID NO: 47970 - RNA, 21 nt, synthetic construct
  source 1..21: mol_type = other RNA
aggaggatgcctgcaacaata

SEQ ID NO: 47971 - RNA, 21 nt, synthetic construct
  source 1..21: mol_type = other RNA
tacaagagagtggccgggcag

SEQ ID NO: 47972 - RNA, 21 nt, synthetic construct
  source 1..21: mol_type = other RNA
gtggccgggcagtgctgtggg

SEQ ID NO: 47973 - RNA, 21 nt, synthetic construct
  source 1..21: mol_type = other RNA
ccatttgctgaccccacagcc

SEQ ID NO: 47974 - RNA, 21 nt, synthetic construct
  source 1..21: mol_type = other RNA
cttcccggcccaggaggccac

SEQ ID NO: 47975 - RNA, 21 nt, synthetic construct
  source 1..21: mol_type = other RNA
ccactgctgtctgagaacgtt

SEQ ID NO: 47976 - RNA, 21 nt, synthetic construct
  source 1..21: mol_type = other RNA
ccggagcgcccgcgcagcacg

SEQ ID NO: 47977 - RNA, 21 nt, synthetic construct
  source 1..21: mol_type = other RNA
gtccaggcaaggccagctgct

SEQ ID NO: 47978 - RNA, 21 nt, synthetic construct
  source 1..21: mol_type = other RNA
gcccagttttgcaaataaacc

SEQ ID NO: 47979 - RNA, 21 nt, synthetic construct
  source 1..21: mol_type = other RNA
ttgcaaataaaccctgagcat

SEQ ID NO: 47980 - RNA, 21 nt, synthetic construct
  source 1..21: mol_type = other RNA
tgcaaataaaccctgagcatt

SEQ ID NO: 47981 - RNA, 21 nt, synthetic construct
  source 1..21: mol_type = other RNA
cagccatgtggacaactgcac

SEQ ID NO: 47982 - RNA, 21 nt, synthetic construct
  source 1..21: mol_type = other RNA
caccgcctcctccactctggg

SEQ ID NO: 47983 - RNA, 21 nt, synthetic construct
  source 1..21: mol_type = other RNA
gggtcagcatcccaaagcccc

SEQ ID NO: 47984 - RNA, 21 nt, synthetic construct
  source 1..21: mol_type = other RNA
ccggctctgtggccaccccct

SEQ ID NO: 47985 - RNA, 21 nt, synthetic construct
  source 1..21: mol_type = other RNA
ccggctctgtggccaccccct

SEQ ID NO: 47986 - RNA, 21 nt, synthetic construct
  source 1..21: mol_type = other RNA
ccggctctgtggccaccccct

SEQ ID NO: 47987 - RNA, 21 nt, synthetic construct
  source 1..21: mol_type = other RNA
ccggctctgtggccaccccct

SEQ ID NO: 47988 - RNA, 21 nt, synthetic construct
  source 1..21: mol_type = other RNA
ccggctctgtggccaccccct

SEQ ID NO: 47989 - RNA, 21 nt, synthetic construct
  source 1..21: mol_type = other RNA
ctagcacacccacccccaccc

SEQ ID NO: 47990 - RNA, 21 nt, synthetic construct
  source 1..21: mol_type = other RNA
agctccccctcccaaagtgct

SEQ ID NO: 47991 - RNA, 21 nt, synthetic construct
  source 1..21: mol_type = other RNA
cggctctgtggccaccccctc

SEQ ID NO: 47992 - RNA, 21 nt, synthetic construct
  source 1..21: mol_type = other RNA
cggctctgtggccaccccctc

SEQ ID NO: 47993 - RNA, 21 nt, synthetic construct
  source 1..21: mol_type = other RNA
agctccccctcccaaagtgct

SEQ ID NO: 47994 - RNA, 21 nt, synthetic construct
  source 1..21: mol_type = other RNA
cggctctgtggccaccccctc

SEQ ID NO: 47995 - RNA, 21 nt, synthetic construct
  source 1..21: mol_type = other RNA
cggctctgtggccaccccctc

SEQ ID NO: 47996 - RNA, 21 nt, synthetic construct
  source 1..21: mol_type = other RNA
agctccccctcccaaagtgct

SEQ ID NO: 47997 - RNA, 21 nt, synthetic construct
  source 1..21: mol_type = other RNA
cggctctgtggccaccccctc

SEQ ID NO: 47998 - RNA, 21 nt, synthetic construct
  source 1..21: mol_type = other RNA
gccgcctacgaggacttcaac

SEQ ID NO: 47999 - RNA, 21 nt, synthetic construct
  source 1..21: mol_type = other RNA
cgactgcgagtgtttctgcac

SEQ ID NO: 48000 - RNA, 21 nt, synthetic construct
  source 1..21: mol_type = other RNA
gaaaagcacagggtgtgcagc

SEQ ID NO: 48001 - RNA, 21 nt, synthetic construct
  source 1..21: mol_type = other RNA
aaaagcacagggtgtgcagcc

SEQ ID NO: 48002 - RNA, 21 nt, synthetic construct
  source 1..21: mol_type = other RNA
caccagttccaaagccacttc

SEQ ID NO: 48003 - RNA, 21 nt, synthetic construct
  source 1..21: mol_type = other RNA
caccagttccaaagccacttc

SEQ ID NO: 48004 - RNA, 21 nt, synthetic construct
  source 1..21: mol_type = other RNA
tgtgcccgcccaggagtgccc

SEQ ID NO: 48005 - RNA, 21 nt, synthetic construct
  source 1..21: mol_type = other RNA
ccgggccacaccagggccacc

SEQ ID NO: 48006 - RNA, 21 nt, synthetic construct
  source 1..21: mol_type = other RNA
tggggcagacaggctggtcca

SEQ ID NO: 48007 - RNA, 21 nt, synthetic construct
  source 1..21: mol_type = other RNA
gccccgcagccccggtgtcta

SEQ ID NO: 48008 - RNA, 21 nt, synthetic construct
  source 1..21: mol_type = other RNA
cccttgactaacaccaccacc

SEQ ID NO: 48009 - RNA, 21 nt, synthetic construct
  source 1..21: mol_type = other RNA
cagccctttccagccctcacc

SEQ ID NO: 48010 - RNA, 21 nt, synthetic construct
  source 1..21: mol_type = other RNA
ggagactttgagacgtttgaa

SEQ ID NO: 48011 - RNA, 21 nt, synthetic construct
  source 1..21: mol_type = other RNA
cccgacatgccgctggaggag

SEQ ID NO: 48012 - RNA, 21 nt, synthetic construct
  source 1..21: mol_type = other RNA
cttgactaacaccaccaccag

SEQ ID NO: 48013 - RNA, 21 nt, synthetic construct
  source 1..21: mol_type = other RNA
ggtgacttccactacaagacc

SEQ ID NO: 48014 - RNA, 21 nt, synthetic construct
  source 1..21: mol_type = other RNA
tctgcgaggaccactgtgtgg

SEQ ID NO: 48015 - RNA, 21 nt, synthetic construct
  source 1..21: mol_type = other RNA
caggcacagccagcaccgctt

SEQ ID NO: 48016 - RNA, 21 nt, synthetic construct
  source 1..21: mol_type = other RNA
taacaccaccaccagccaggg

SEQ ID NO: 48017 - RNA, 21 nt, synthetic construct
  source 1..21: mol_type = other RNA
cacgggcttcacagccacccc

SEQ ID NO: 48018 - RNA, 21 nt, synthetic construct
  source 1..21: mol_type = other RNA
acgggcttcacagccaccccc

SEQ ID NO: 48019 - RNA, 21 nt, synthetic construct
  source 1..21: mol_type = other RNA
agccctttccagccctcaccc

SEQ ID NO: 48020 - RNA, 21 nt, synthetic construct
  source 1..21: mol_type = other RNA
cacgggcttcacagccacccc

SEQ ID NO: 48021 - RNA, 21 nt, synthetic construct
  source 1..21: mol_type = other RNA
acgggcttcacagccaccccc

SEQ ID NO: 48022 - RNA, 21 nt, synthetic construct
  source 1..21: mol_type = other RNA
cacgggcttcacagccacccc

SEQ ID NO: 48023 - RNA, 21 nt, synthetic construct
  source 1..21: mol_type = other RNA
acgggcttcacagccaccccc

SEQ ID NO: 48024 - RNA, 21 nt, synthetic construct
  source 1..21: mol_type = other RNA
cacgggcttcacagccacccc

SEQ ID NO: 48025 - RNA, 21 nt, synthetic construct
  source 1..21: mol_type = other RNA
acgggcttcacagccaccccc

SEQ ID NO: 48026 - RNA, 21 nt, synthetic construct
  source 1..21: mol_type = other RNA
acattcctgccctgggcgtga

SEQ ID NO: 48027 - RNA, 21 nt, synthetic construct
  source 1..21: mol_type = other RNA
ctaccctgggagagcctgtgg

SEQ ID NO: 48028 - RNA, 21 nt, synthetic construct
  source 1..21: mol_type = other RNA
ggtcctctgctgcagtgacga

SEQ ID NO: 48029 - RNA, 21 nt, synthetic construct
  source 1..21: mol_type = other RNA
cccaggacagagacgacaatg

SEQ ID NO: 48030 - RNA, 21 nt, synthetic construct
  source 1..21: mol_type = other RNA
tgaccaccacggccactacga

SEQ ID NO: 48031 - RNA, 21 nt, synthetic construct
  source 1..21: mol_type = other RNA
tgaccaccacggccactacga

SEQ ID NO: 48032 - RNA, 21 nt, synthetic construct
  source 1..21: mol_type = other RNA
tgaccaccacggccactacga

SEQ ID NO: 48033 - RNA, 21 nt, synthetic construct
  source 1..21: mol_type = other RNA
tgaccaccacggccactacga

SEQ ID NO: 48034 - RNA, 21 nt, synthetic construct
  source 1..21: mol_type = other RNA
gtccaccatgtccacaatcca

SEQ ID NO: 48035 - RNA, 21 nt, synthetic construct
  source 1..21: mol_type = other RNA
cgtgatggtgcccaccggttc

SEQ ID NO: 48036 - RNA, 21 nt, synthetic construct
  source 1..21: mol_type = other RNA
tctacgcagtgtgcaatcagc

SEQ ID NO: 48037 - RNA, 21 nt, synthetic construct
  source 1..21: mol_type = other RNA
gaggatgcctgcaacaatact

SEQ ID NO: 48038 - RNA, 21 nt, synthetic construct
  source 1..21: mol_type = other RNA
tcctaaatttcccggggagcg

SEQ ID NO: 48039 - RNA, 21 nt, synthetic construct
  source 1..21: mol_type = other RNA
ccagagcctggaggcttacgc

SEQ ID NO: 48040 - RNA, 21 nt, synthetic construct
  source 1..21: mol_type = other RNA
ccacggccaccacacacgggc

SEQ ID NO: 48041 - RNA, 21 nt, synthetic construct
  source 1..21: mol_type = other RNA
ccacggccaccacacacgggc

SEQ ID NO: 48042 - RNA, 21 nt, synthetic construct
  source 1..21: mol_type = other RNA
ccacggccaccacacacgggc

SEQ ID NO: 48043 - RNA, 21 nt, synthetic construct
  source 1..21: mol_type = other RNA
gggcctatgtgtccctgccac

SEQ ID NO: 48044 - RNA, 21 nt, synthetic construct
  source 1..21: mol_type = other RNA
ctgtgtgcccgccagggcagg

SEQ ID NO: 48045 - RNA, 21 nt, synthetic construct
  source 1..21: mol_type = other RNA
acatcttggcccaggactact

SEQ ID NO: 48046 - RNA, 21 nt, synthetic construct
  source 1..21: mol_type = other RNA
ggacctacagctaccaggacg

SEQ ID NO: 48047 - RNA, 21 nt, synthetic construct
  source 1..21: mol_type = other RNA
acccctcctcaactcctggga

SEQ ID NO: 48048 - RNA, 21 nt, synthetic construct
  source 1..21: mol_type = other RNA
gcaccccgcgctccgtgctcc

SEQ ID NO: 48049 - RNA, 21 nt, synthetic construct
  source 1..21: mol_type = other RNA
tcccccatcactgaccaccac

SEQ ID NO: 48050 - RNA, 21 nt, synthetic construct
  source 1..21: mol_type = other RNA
tcccccatcactgaccaccac

SEQ ID NO: 48051 - RNA, 21 nt, synthetic construct
  source 1..21: mol_type = other RNA
tcccccatcactgaccaccac

SEQ ID NO: 48052 - RNA, 21 nt, synthetic construct
  source 1..21: mol_type = other RNA
tcccccatcactgaccaccac

SEQ ID NO: 48053 - RNA, 21 nt, synthetic construct
  source 1..21: mol_type = other RNA
cccgacgtcctcgcccacccg

SEQ ID NO: 48054 - RNA, 21 nt, synthetic construct
  source 1..21: mol_type = other RNA
ccaggcctgccacgacgcggg

SEQ ID NO: 48055 - RNA, 21 nt, synthetic construct
  source 1..21: mol_type = other RNA
ggacacctgccccttgttctg

SEQ ID NO: 48056 - RNA, 21 nt, synthetic construct
  source 1..21: mol_type = other RNA
cgggcggcgcagcttcccgac

SEQ ID NO: 48057 - RNA, 21 nt, synthetic construct
  source 1..21: mol_type = other RNA
ctcctcaactcctgggacaac

SEQ ID NO: 48058 - RNA, 21 nt, synthetic construct
  source 1..21: mol_type = other RNA
gttttgcaaataaaccctgag

SEQ ID NO: 48059 - RNA, 21 nt, synthetic construct
  source 1..21: mol_type = other RNA
ccccgacgtcctcgcccaccc

SEQ ID NO: 48060 - RNA, 21 nt, synthetic construct
  source 1..21: mol_type = other RNA
ggctatggcagtgccaggacc

SEQ ID NO: 48061 - RNA, 21 nt, synthetic construct
  source 1..21: mol_type = other RNA
tacatcttggcccaggactac

SEQ ID NO: 48062 - RNA, 21 nt, synthetic construct
  source 1..21: mol_type = other RNA
ccccgggccacaccaggggca

SEQ ID NO: 48063 - RNA, 21 nt, synthetic construct
  source 1..21: mol_type = other RNA
caacaatactacctgtcccca

SEQ ID NO: 48064 - RNA, 21 nt, synthetic construct
  source 1..21: mol_type = other RNA
cacactaccaaagtgccaact

SEQ ID NO: 48065 - RNA, 21 nt, synthetic construct
  source 1..21: mol_type = other RNA
gcacctccttcaacaccacct

SEQ ID NO: 48066 - RNA, 21 nt, synthetic construct
  source 1..21: mol_type = other RNA
gtgtgcctggtcagagtggct

SEQ ID NO: 48067 - RNA, 21 nt, synthetic construct
  source 1..21: mol_type = other RNA
gtgtgcctggtcagagtggct

SEQ ID NO: 48068 - RNA, 21 nt, synthetic construct
  source 1..21: mol_type = other RNA
gccacaccaggggcacctcca

SEQ ID NO: 48069 - RNA, 21 nt, synthetic construct
  source 1..21: mol_type = other RNA
gtgtgcctggtcagagtggct

SEQ ID NO: 48070 - RNA, 21 nt, synthetic construct
  source 1..21: mol_type = other RNA
gtgtgcctggtcagagtggct

SEQ ID NO: 48071 - RNA, 21 nt, synthetic construct
  source 1..21: mol_type = other RNA
tcctcatgagagagatccatg

SEQ ID NO: 48072 - RNA, 21 nt, synthetic construct
  source 1..21: mol_type = other RNA
ctggtggacagcactgcgtac

SEQ ID NO: 48073 - RNA, 21 nt, synthetic construct
  source 1..21: mol_type = other RNA
tgttcatgtacgggtgggaag

SEQ ID NO: 48074 - RNA, 21 nt, synthetic construct
  source 1..21: mol_type = other RNA
cagcgttacagccatcccctc

SEQ ID NO: 48075 - RNA, 21 nt, synthetic construct
  source 1..21: mol_type = other RNA
ccgccagttgcaaggacatgg

SEQ ID NO: 48076 - RNA, 21 nt, synthetic construct
  source 1..21: mol_type = other RNA
gccccctcaacatgcagcacc

SEQ ID NO: 48077 - RNA, 21 nt, synthetic construct
  source 1..21: mol_type = other RNA
gtggaatgcagcctggacttt

SEQ ID NO: 48078 - RNA, 21 nt, synthetic construct
  source 1..21: mol_type = other RNA
gtggaatgcagcctggacttt

SEQ ID NO: 48079 - RNA, 21 nt, synthetic construct
  source 1..21: mol_type = other RNA
gtggaatgcagcctggacttt

SEQ ID NO: 48080 - RNA, 21 nt, synthetic construct
  source 1..21: mol_type = other RNA
gtggaatgcagcctggacttt

SEQ ID NO: 48081 - RNA, 21 nt, synthetic construct
  source 1..21: mol_type = other RNA
acagccaccagttccaaagcc

SEQ ID NO: 48082 - RNA, 21 nt, synthetic construct
  source 1..21: mol_type = other RNA
acagccaccagttccaaagcc

SEQ ID NO: 48083 - RNA, 21 nt, synthetic construct
  source 1..21: mol_type = other RNA
gggggccagccgcggaactgg

SEQ ID NO: 48084 - RNA, 21 nt, synthetic construct
  source 1..21: mol_type = other RNA
gcaagggtccccacagcggag

SEQ ID NO: 48085 - RNA, 21 nt, synthetic construct
  source 1..21: mol_type = other RNA
agaacagctccccctcccaaa

SEQ ID NO: 48086 - RNA, 21 nt, synthetic construct
  source 1..21: mol_type = other RNA
gtgagcaggtggggaagttca

SEQ ID NO: 48087 - RNA, 21 nt, synthetic construct
  source 1..21: mol_type = other RNA
gtgagcaggtggggaagttca

SEQ ID NO: 48088 - RNA, 21 nt, synthetic construct
  source 1..21: mol_type = other RNA
ggaacagctccccctcccaaa

SEQ ID NO: 48089 - RNA, 21 nt, synthetic construct
  source 1..21: mol_type = other RNA
gccacaccctcctctactcca

SEQ ID NO: 48090 - RNA, 21 nt, synthetic construct
  source 1..21: mol_type = other RNA
gtgagcaggtggggaagttca

SEQ ID NO: 48091 - RNA, 21 nt, synthetic construct
  source 1..21: mol_type = other RNA
gatcctcacaaagctgaccac

SEQ ID NO: 48092 - RNA, 21 nt, synthetic construct
  source 1..21: mol_type = other RNA
gtgagcaggtggggaagttca

SEQ ID NO: 48093 - RNA, 21 nt, synthetic construct
  source 1..21: mol_type = other RNA
ggaacagctccccctcccaaa

SEQ ID NO: 48094 - RNA, 21 nt, synthetic construct
  source 1..21: mol_type = other RNA
gccgccagttgcaaggacatg

SEQ ID NO: 48095 - RNA, 21 nt, synthetic construct
  source 1..21: mol_type = other RNA
cacaactgtggccactggttc

SEQ ID NO: 48096 - RNA, 21 nt, synthetic construct
  source 1..21: mol_type = other RNA
cacaactgtggccactggttc

SEQ ID NO: 48097 - RNA, 21 nt, synthetic construct
  source 1..21: mol_type = other RNA
cacaactgtggccactggttc

SEQ ID NO: 48098 - RNA, 21 nt, synthetic construct
  source 1..21: mol_type = other RNA
cacaactgtggccactggttc

SEQ ID NO: 48099 - RNA, 21 nt, synthetic construct
  source 1..21: mol_type = other RNA
cacaactgtggccactggttc

SEQ ID NO: 48100 - RNA, 21 nt, synthetic construct
  source 1..21: mol_type = other RNA
cctcaactccagggacaacac

SEQ ID NO: 48101 - RNA, 21 nt, synthetic construct
  source 1..21: mol_type = other RNA
cctcaactccagggacaacac

SEQ ID NO: 48102 - RNA, 21 nt, synthetic construct
  source 1..21: mol_type = other RNA
cctcaactccagggacaacac

SEQ ID NO: 48103 - RNA, 21 nt, synthetic construct
  source 1..21: mol_type = other RNA
cgccagttgcaaggacatggc

SEQ ID NO: 48104 - RNA, 21 nt, synthetic construct
  source 1..21: mol_type = other RNA
cggtgacttcccacaccctag

SEQ ID NO: 48105 - RNA, 21 nt, synthetic construct
  source 1..21: mol_type = other RNA
tctacggccacgccctcctcc

SEQ ID NO: 48106 - RNA, 21 nt, synthetic construct
  source 1..21: mol_type = other RNA
tctacggccacgccctcctca

SEQ ID NO: 48107 - RNA, 21 nt, synthetic construct
  source 1..21: mol_type = other RNA
ctgcaggaaccggaggtggga

SEQ ID NO: 48108 - RNA, 21 nt, synthetic construct
  source 1..21: mol_type = other RNA
ggcatctgccaccgcaccctg

SEQ ID NO: 48109 - RNA, 21 nt, synthetic construct
  source 1..21: mol_type = other RNA
ctgcccagatgtgtccagctg

SEQ ID NO: 48110 - RNA, 21 nt, synthetic construct
  source 1..21: mol_type = other RNA
tgcaagggtccccacagcgga

SEQ ID NO: 48111 - RNA, 21 nt, synthetic construct
  source 1..21: mol_type = other RNA
actccggagaccacccacacc

SEQ ID NO: 48112 - RNA, 21 nt, synthetic construct
  source 1..21: mol_type = other RNA
actccggagaccacccacacc

SEQ ID NO: 48113 - RNA, 21 nt, synthetic construct
  source 1..21: mol_type = other RNA
cacacccgtggccaccatgtc

SEQ ID NO: 48114 - RNA, 21 nt, synthetic construct
  source 1..21: mol_type = other RNA
gcagtccccaccctctcagaa

SEQ ID NO: 48115 - RNA, 21 nt, synthetic construct
  source 1..21: mol_type = other RNA
accagggccaccggctctgtg

SEQ ID NO: 48116 - RNA, 21 nt, synthetic construct
  source 1..21: mol_type = other RNA
accagggccaccggctctgtg

SEQ ID NO: 48117 - RNA, 21 nt, synthetic construct
  source 1..21: mol_type = other RNA
agtcctcaccaccctgagacc

SEQ ID NO: 48118 - RNA, 21 nt, synthetic construct
  source 1..21: mol_type = other RNA
ctgtgacaatgccatccctct

SEQ ID NO: 48119 - RNA, 21 nt, synthetic construct
  source 1..21: mol_type = other RNA
accttcccaggcgcccttccc

SEQ ID NO: 48120 - RNA, 21 nt, synthetic construct
  source 1..21: mol_type = other RNA
ggctcctggagaggtggtgca

SEQ ID NO: 48121 - RNA, 21 nt, synthetic construct
  source 1..21: mol_type = other RNA
ctgtccacctctcaggccgag

SEQ ID NO: 48122 - RNA, 21 nt, synthetic construct
  source 1..21: mol_type = other RNA
accggggccaccggctctgtg

SEQ ID NO: 48123 - RNA, 21 nt, synthetic construct
  source 1..21: mol_type = other RNA
tccacggccatcccgtcctcc

SEQ ID NO: 48124 - RNA, 21 nt, synthetic construct
  source 1..21: mol_type = other RNA
ccacccgggcaactgctggca

SEQ ID NO: 48125 - RNA, 21 nt, synthetic construct
  source 1..21: mol_type = other RNA
ctccctgggcaccgcctggac

SEQ ID NO: 48126 - RNA, 21 nt, synthetic construct
  source 1..21: mol_type = other RNA
accggggccaccggctctgtg

SEQ ID NO: 48127 - RNA, 21 nt, synthetic construct
  source 1..21: mol_type = other RNA
aagggccaccaattccacggc

SEQ ID NO: 48128 - RNA, 21 nt, synthetic construct
  source 1..21: mol_type = other RNA
gccacaaccttgtgcccccgg

SEQ ID NO: 48129 - RNA, 21 nt, synthetic construct
  source 1..21: mol_type = other RNA
tacggggttggtgcaaccttc

SEQ ID NO: 48130 - RNA, 21 nt, synthetic construct
  source 1..21: mol_type = other RNA
cgcccttccctgccacatgtg

SEQ ID NO: 48131 - RNA, 21 nt, synthetic construct
  source 1..21: mol_type = other RNA
aggcaaggcggccgcctgtcc

SEQ ID NO: 48132 - RNA, 21 nt, synthetic construct
  source 1..21: mol_type = other RNA
taactcagggctgaggtcgca

SEQ ID NO: 48133 - RNA, 21 nt, synthetic construct
  source 1..21: mol_type = other RNA
actggtggacagcactgcgta

SEQ ID NO: 48134 - RNA, 21 nt, synthetic construct
  source 1..21: mol_type = other RNA
cgggcacctccttcaacacca

SEQ ID NO: 48135 - RNA, 21 nt, synthetic construct
  source 1..21: mol_type = other RNA
accaccgccaccacacctgca

SEQ ID NO: 48136 - RNA, 21 nt, synthetic construct
  source 1..21: mol_type = other RNA
accaccgccaccacacctgca

SEQ ID NO: 48137 - RNA, 21 nt, synthetic construct
  source 1..21: mol_type = other RNA
accaccgccaccacacctgca

SEQ ID NO: 48138 - RNA, 21 nt, synthetic construct
  source 1..21: mol_type = other RNA
accaccgccaccacacctgca

SEQ ID NO: 48139 - RNA, 21 nt, synthetic construct
  source 1..21: mol_type = other RNA
tgcaatgtcaggaggatgcct

SEQ ID NO: 48140 - RNA, 21 nt, synthetic construct
  source 1..21: mol_type = other RNA
ctgagccccctgaacccggcg

SEQ ID NO: 48141 - RNA, 21 nt, synthetic construct
  source 1..21: mol_type = other RNA
aactctacgacctgcatggtg

SEQ ID NO: 48142 - RNA, 21 nt, synthetic construct
  source 1..21: mol_type = other RNA
caccccctcggccccaggtac

SEQ ID NO: 48143 - RNA, 21 nt, synthetic construct
  source 1..21: mol_type = other RNA
gggggagttgggccaggtcgt

SEQ ID NO: 48144 - RNA, 21 nt, synthetic construct
  source 1..21: mol_type = other RNA
tccaagtactcagcagaggcc

SEQ ID NO: 48145 - RNA, 21 nt, synthetic construct
  source 1..21: mol_type = other RNA
acagctcagcgactggaggga

SEQ ID NO: 48146 - RNA, 21 nt, synthetic construct
  source 1..21: mol_type = other RNA
accaccgcctgggtcccccac

SEQ ID NO: 48147 - RNA, 21 nt, synthetic construct
  source 1..21: mol_type = other RNA
tccacggccaccccgtcctcc

SEQ ID NO: 48148 - RNA, 21 nt, synthetic construct
  source 1..21: mol_type = other RNA
cccacggccaccccgtcctcc

SEQ ID NO: 48149 - RNA, 21 nt, synthetic construct
  source 1..21: mol_type = other RNA
tccacggccaccccgtcctcc

SEQ ID NO: 48150 - RNA, 21 nt, synthetic construct
  source 1..21: mol_type = other RNA
tccacggccaccccgtcctcc

SEQ ID NO: 48151 - RNA, 21 nt, synthetic construct
  source 1..21: mol_type = other RNA
cccacggccaccccgtcctcc

SEQ ID NO: 48152 - RNA, 21 nt, synthetic construct
  source 1..21: mol_type = other RNA
tccacggccaccccgtcctcc

SEQ ID NO: 48153 - RNA, 21 nt, synthetic construct
  source 1..21: mol_type = other RNA
gccaagtcttccaggcccggc

SEQ ID NO: 48154 - RNA, 21 nt, synthetic construct
  source 1..21: mol_type = other RNA
gggagaatgcagggcacacca

SEQ ID NO: 48155 - RNA, 21 nt, synthetic construct
  source 1..21: mol_type = other RNA
tgcagggcacaccatggatgg

SEQ ID NO: 48156 - RNA, 21 nt, synthetic construct
  source 1..21: mol_type = other RNA
agtgtggctcaccctgcacgg

SEQ ID NO: 48157 - RNA, 21 nt, synthetic construct
  source 1..21: mol_type = other RNA
agcgcgcgcagctctgcgagg

SEQ ID NO: 48158 - RNA, 21 nt, synthetic construct
  source 1..21: mol_type = other RNA
gcccgggcacctccttcaaca

SEQ ID NO: 48159 - RNA, 21 nt, synthetic construct
  source 1..21: mol_type = other RNA
agggcggggcccacatctcca

SEQ ID NO: 48160 - RNA, 21 nt, synthetic construct
  source 1..21: mol_type = other RNA
cgctgccactccatcatcaac

SEQ ID NO: 48161 - RNA, 21 nt, synthetic construct
  source 1..21: mol_type = other RNA
taaggcggtggcgagagggcc

SEQ ID NO: 48162 - RNA, 21 nt, synthetic construct
  source 1..21: mol_type = other RNA
agggccgggtggggacccacc

SEQ ID NO: 48163 - RNA, 21 nt, synthetic construct
  source 1..21: mol_type = other RNA
tgggtccagctcaggccccgt

SEQ ID NO: 48164 - RNA, 21 nt, synthetic construct
  source 1..21: mol_type = other RNA
gcctgcaggctccacagaacc

SEQ ID NO: 48165 - RNA, 21 nt, synthetic construct
  source 1..21: mol_type = other RNA
accagcacgcccaggacagag

SEQ ID NO: 48166 - RNA, 21 nt, synthetic construct
  source 1..21: mol_type = other RNA
ccaccctgagaacagctcccc

SEQ ID NO: 48167 - RNA, 21 nt, synthetic construct
  source 1..21: mol_type = other RNA
actggggccaccggctctgtg

SEQ ID NO: 48168 - RNA, 21 nt, synthetic construct
  source 1..21: mol_type = other RNA
agaggctccacggtgaccccc

SEQ ID NO: 48169 - RNA, 21 nt, synthetic construct
  source 1..21: mol_type = other RNA
gaccaccacggccactacgat

SEQ ID NO: 48170 - RNA, 21 nt, synthetic construct
  source 1..21: mol_type = other RNA
gacaactcccatccccccagt

SEQ ID NO: 48171 - RNA, 21 nt, synthetic construct
  source 1..21: mol_type = other RNA
gcgcacagcctggacttcggc

SEQ ID NO: 48172 - RNA, 21 nt, synthetic construct
  source 1..21: mol_type = other RNA
tccagccctcaccctagcagc

SEQ ID NO: 48173 - RNA, 21 nt, synthetic construct
  source 1..21: mol_type = other RNA
actgctggcaccccacatgtg

SEQ ID NO: 48174 - RNA, 21 nt, synthetic construct
  source 1..21: mol_type = other RNA
gaccaccacggccactacgat

SEQ ID NO: 48175 - RNA, 21 nt, synthetic construct
  source 1..21: mol_type = other RNA
caccagcagcacagtgactcc

SEQ ID NO: 48176 - RNA, 21 nt, synthetic construct
  source 1..21: mol_type = other RNA
gcgcacagcctggacttcggc

SEQ ID NO: 48177 - RNA, 21 nt, synthetic construct
  source 1..21: mol_type = other RNA
cggccacctcaggcaccttgg

SEQ ID NO: 48178 - RNA, 21 nt, synthetic construct
  source 1..21: mol_type = other RNA
tccagccctcaccctagcagc

SEQ ID NO: 48179 - RNA, 21 nt, synthetic construct
  source 1..21: mol_type = other RNA
ccaccagctctacggccacgc

SEQ ID NO: 48180 - RNA, 21 nt, synthetic construct
  source 1..21: mol_type = other RNA
agaccacagcagccactacga

SEQ ID NO: 48181 - RNA, 21 nt, synthetic construct
  source 1..21: mol_type = other RNA
accaaatccacagctaccagc

SEQ ID NO: 48182 - RNA, 21 nt, synthetic construct
  source 1..21: mol_type = other RNA
cgcctcctccacccgggcaac

SEQ ID NO: 48183 - RNA, 21 nt, synthetic construct
  source 1..21: mol_type = other RNA
acaaccagggccaccggctct

SEQ ID NO: 48184 - RNA, 21 nt, synthetic construct
  source 1..21: mol_type = other RNA
agaggctccacggtgaccccc

SEQ ID NO: 48185 - RNA, 21 nt, synthetic construct
  source 1..21: mol_type = other RNA
gaccaccacggccactacgat

SEQ ID NO: 48186 - RNA, 21 nt, synthetic construct
  source 1..21: mol_type = other RNA
gacaactcccatccccccagt

SEQ ID NO: 48187 - RNA, 21 nt, synthetic construct
  source 1..21: mol_type = other RNA
caccagcagcacagtgactcc

SEQ ID NO: 48188 - RNA, 21 nt, synthetic construct
  source 1..21: mol_type = other RNA
gcgcacagcctggacttcggc

SEQ ID NO: 48189 - RNA, 21 nt, synthetic construct
  source 1..21: mol_type = other RNA
tccagccctcaccctagcagc

SEQ ID NO: 48190 - RNA, 21 nt, synthetic construct
  source 1..21: mol_type = other RNA
ccaccagctctacggccacgc

SEQ ID NO: 48191 - RNA, 21 nt, synthetic construct
  source 1..21: mol_type = other RNA
actgctggcaccccacatgtg

SEQ ID NO: 48192 - RNA, 21 nt, synthetic construct
  source 1..21: mol_type = other RNA
acaaccagggccaccggctct

SEQ ID NO: 48193 - RNA, 21 nt, synthetic construct
  source 1..21: mol_type = other RNA
gatcaccacggccactacgat

SEQ ID NO: 48194 - RNA, 21 nt, synthetic construct
  source 1..21: mol_type = other RNA
caccagcagcacagtgactcc

SEQ ID NO: 48195 - RNA, 21 nt, synthetic construct
  source 1..21: mol_type = other RNA
gcgcacagcctggacttcggc

SEQ ID NO: 48196 - RNA, 21 nt, synthetic construct
  source 1..21: mol_type = other RNA
cggccacctcaggcaccttgg

SEQ ID NO: 48197 - RNA, 21 nt, synthetic construct
  source 1..21: mol_type = other RNA
tccagccctcaccctagcagc

SEQ ID NO: 48198 - RNA, 21 nt, synthetic construct
  source 1..21: mol_type = other RNA
acccccttccccagggacgac

SEQ ID NO: 48199 - RNA, 21 nt, synthetic construct
  source 1..21: mol_type = other RNA
cccccttccccagggacgacc

SEQ ID NO: 48200 - RNA, 21 nt, synthetic construct
  source 1..21: mol_type = other RNA
accaaatccacagctaccagc

SEQ ID NO: 48201 - RNA, 21 nt, synthetic construct
  source 1..21: mol_type = other RNA
actgctggcaccccacatgtg

SEQ ID NO: 48202 - RNA, 21 nt, synthetic construct
  source 1..21: mol_type = other RNA
tgcaactgcccttccagcact

SEQ ID NO: 48203 - RNA, 21 nt, synthetic construct
  source 1..21: mol_type = other RNA
gaccaccacggccactacgat

SEQ ID NO: 48204 - RNA, 21 nt, synthetic construct
  source 1..21: mol_type = other RNA
ccctcctccaccctgtggacc

SEQ ID NO: 48205 - RNA, 21 nt, synthetic construct
  source 1..21: mol_type = other RNA
cagaccaccacacccatgtcc

SEQ ID NO: 48206 - RNA, 21 nt, synthetic construct
  source 1..21: mol_type = other RNA
tccccaccgccagtgtcctcc

SEQ ID NO: 48207 - RNA, 21 nt, synthetic construct
  source 1..21: mol_type = other RNA
atctgcagcatgtggggcggc

SEQ ID NO: 48208 - RNA, 21 nt, synthetic construct
  source 1..21: mol_type = other RNA
tttgggaatctcagcctctac

SEQ ID NO: 48209 - RNA, 21 nt, synthetic construct
  source 1..21: mol_type = other RNA
ctacctggacaaccactactg

SEQ ID NO: 48210 - RNA, 21 nt, synthetic construct
  source 1..21: mol_type = other RNA
ccaagtcttccaggcccggct

SEQ ID NO: 48211 - RNA, 21 nt, synthetic construct
  source 1..21: mol_type = other RNA
gccagttgcaaggacatggcc

SEQ ID NO: 48212 - RNA, 21 nt, synthetic construct
  source 1..21: mol_type = other RNA
gctgggccccgactggcacac

SEQ ID NO: 48213 - RNA, 21 nt, synthetic construct
  source 1..21: mol_type = other RNA
cccaccacagccgctctgtga

SEQ ID NO: 48214 - RNA, 21 nt, synthetic construct
  source 1..21: mol_type = other RNA
accacagccgctctgtgatct

SEQ ID NO: 48215 - RNA, 21 nt, synthetic construct
  source 1..21: mol_type = other RNA
gccttgaggtgccctgccaga

SEQ ID NO: 48216 - RNA, 21 nt, synthetic construct
  source 1..21: mol_type = other RNA
ccagggcaggagtccatctgc

SEQ ID NO: 48217 - RNA, 21 nt, synthetic construct
  source 1..21: mol_type = other RNA
acctgtccccagggctttgag

SEQ ID NO: 48218 - RNA, 21 nt, synthetic construct
  source 1..21: mol_type = other RNA
accgcctgcctcacgcccgat

SEQ ID NO: 48219 - RNA, 21 nt, synthetic construct
  source 1..21: mol_type = other RNA
tgatcatgaaaaccttgggcc

SEQ ID NO: 48220 - RNA, 21 nt, synthetic construct
  source 1..21: mol_type = other RNA
actcaggagtcctaccctggg

SEQ ID NO: 48221 - RNA, 21 nt, synthetic construct
  source 1..21: mol_type = other RNA
ctcagggctgaggtcgcaacg

SEQ ID NO: 48222 - RNA, 21 nt, synthetic construct
  source 1..21: mol_type = other RNA
tccaacccccagcgcgcgcag

SEQ ID NO: 48223 - RNA, 21 nt, synthetic construct
  source 1..21: mol_type = other RNA
gctgaccacgaaggccaccac

SEQ ID NO: 48224 - RNA, 21 nt, synthetic construct
  source 1..21: mol_type = other RNA
gctgaccacgaaggccaccac

SEQ ID NO: 48225 - RNA, 21 nt, synthetic construct
  source 1..21: mol_type = other RNA
cgccagagtgctgaccaccac

SEQ ID NO: 48226 - RNA, 21 nt, synthetic construct
  source 1..21: mol_type = other RNA
agctccaaagccactcccttc

SEQ ID NO: 48227 - RNA, 21 nt, synthetic construct
  source 1..21: mol_type = other RNA
agctccaaagccactcccttc

SEQ ID NO: 48228 - RNA, 21 nt, synthetic construct
  source 1..21: mol_type = other RNA
actgtggggacaacaccaccc

SEQ ID NO: 48229 - RNA, 21 nt, synthetic construct
  source 1..21: mol_type = other RNA
caccccggccaccagctctac

SEQ ID NO: 48230 - RNA, 21 nt, synthetic construct
  source 1..21: mol_type = other RNA
caccccggccaccagctctac

SEQ ID NO: 48231 - RNA, 21 nt, synthetic construct
  source 1..21: mol_type = other RNA
caccccggccaccagctctac

SEQ ID NO: 48232 - RNA, 21 nt, synthetic construct
  source 1..21: mol_type = other RNA
cacggtgaccccctcctccgt

SEQ ID NO: 48233 - RNA, 21 nt, synthetic construct
  source 1..21: mol_type = other RNA
caccccggccaccagctctac

SEQ ID NO: 48234 - RNA, 21 nt, synthetic construct
  source 1..21: mol_type = other RNA
gccagagtgctgaccaccacc

SEQ ID NO: 48235 - RNA, 21 nt, synthetic construct
  source 1..21: mol_type = other RNA
acagaccaccacacccacggc

SEQ ID NO: 48236 - RNA, 21 nt, synthetic construct
  source 1..21: mol_type = other RNA
ccagccctcaccctagcagca

SEQ ID NO: 48237 - RNA, 21 nt, synthetic construct
  source 1..21: mol_type = other RNA
acagaccaccacacccacggc

SEQ ID NO: 48238 - RNA, 21 nt, synthetic construct
  source 1..21: mol_type = other RNA
ccagccctcaccctagcagca

SEQ ID NO: 48239 - RNA, 21 nt, synthetic construct
  source 1..21: mol_type = other RNA
ccacagcagccactacgaccg

SEQ ID NO: 48240 - RNA, 21 nt, synthetic construct
  source 1..21: mol_type = other RNA
cagccaccagttccaaagcca

SEQ ID NO: 48241 - RNA, 21 nt, synthetic construct
  source 1..21: mol_type = other RNA
acagaccaccacacccacggc

SEQ ID NO: 48242 - RNA, 21 nt, synthetic construct
  source 1..21: mol_type = other RNA
cctctactccagagactgtcc

SEQ ID NO: 48243 - RNA, 21 nt, synthetic construct
  source 1..21: mol_type = other RNA
ccagccctcaccctagcagca

SEQ ID NO: 48244 - RNA, 21 nt, synthetic construct
  source 1..21: mol_type = other RNA
acagaccaccacacccacggc

SEQ ID NO: 48245 - RNA, 21 nt, synthetic construct
  source 1..21: mol_type = other RNA
ccagccctcaccctagcagca

SEQ ID NO: 48246 - RNA, 21 nt, synthetic construct
  source 1..21: mol_type = other RNA
cagccaccagttccaaagcca

SEQ ID NO: 48247 - RNA, 21 nt, synthetic construct
  source 1..21: mol_type = other RNA
acagaccaccacacccacggc

SEQ ID NO: 48248 - RNA, 21 nt, synthetic construct
  source 1..21: mol_type = other RNA
gcagaaaggatggctgctggg

SEQ ID NO: 48249 - RNA, 21 nt, synthetic construct
  source 1..21: mol_type = other RNA
cagggcaggagtccatctgca

SEQ ID NO: 48250 - RNA, 21 nt, synthetic construct
  source 1..21: mol_type = other RNA
ccagctgaatgaaacctgggt

SEQ ID NO: 48251 - RNA, 21 nt, synthetic construct
  source 1..21: mol_type = other RNA
aacgccaggctgaccccgctc

SEQ ID NO: 48252 - RNA, 21 nt, synthetic construct
  source 1..21: mol_type = other RNA
gcctggtcagagtggctggac

SEQ ID NO: 48253 - RNA, 21 nt, synthetic construct
  source 1..21: mol_type = other RNA
gcctggtcagagtggctggac

SEQ ID NO: 48254 - RNA, 21 nt, synthetic construct
  source 1..21: mol_type = other RNA
gcctggtcagagtggctggac

SEQ ID NO: 48255 - RNA, 21 nt, synthetic construct
  source 1..21: mol_type = other RNA
gcctggtcagagtggctggac

SEQ ID NO: 48256 - RNA, 21 nt, synthetic construct
  source 1..21: mol_type = other RNA
tggaggggatggcggagggct

SEQ ID NO: 48257 - RNA, 21 nt, synthetic construct
  source 1..21: mol_type = other RNA
acctgcaggaaccggaggtgg

SEQ ID NO: 48258 - RNA, 21 nt, synthetic construct
  source 1..21: mol_type = other RNA
gacacctgccccttgttctgt

SEQ ID NO: 48259 - RNA, 21 nt, synthetic construct
  source 1..21: mol_type = other RNA
ggcctgggaggcggagacttt

SEQ ID NO: 48260 - RNA, 21 nt, synthetic construct
  source 1..21: mol_type = other RNA
ctccaaagccactcccttctc

SEQ ID NO: 48261 - RNA, 21 nt, synthetic construct
  source 1..21: mol_type = other RNA
cccatggccaccatgtccaca

SEQ ID NO: 48262 - RNA, 21 nt, synthetic construct
  source 1..21: mol_type = other RNA
ctccaaagccactcccttctc

SEQ ID NO: 48263 - RNA, 21 nt, synthetic construct
  source 1..21: mol_type = other RNA
tcctcactgtcaccatggtgc

SEQ ID NO: 48264 - RNA, 21 nt, synthetic construct
  source 1..21: mol_type = other RNA
gtgaggaggactcctgtcaag

SEQ ID NO: 48265 - RNA, 21 nt, synthetic construct
  source 1..21: mol_type = other RNA
ctggtccaggcaaggccagct

SEQ ID NO: 48266 - RNA, 21 nt, synthetic construct
  source 1..21: mol_type = other RNA
cttccgcttccctggcctttg

SEQ ID NO: 48267 - RNA, 21 nt, synthetic construct
  source 1..21: mol_type = other RNA
cggccaccacacccacagtca

SEQ ID NO: 48268 - RNA, 21 nt, synthetic construct
  source 1..21: mol_type = other RNA
cccacaaccagaggctccacg

SEQ ID NO: 48269 - RNA, 21 nt, synthetic construct
  source 1..21: mol_type = other RNA
cagtgtgcctggtcagagtgg

SEQ ID NO: 48270 - RNA, 21 nt, synthetic construct
  source 1..21: mol_type = other RNA
cagcccagggacggcacgcac

SEQ ID NO: 48271 - RNA, 21 nt, synthetic construct
  source 1..21: mol_type = other RNA
cagtgtgcctggtcagagtgg

SEQ ID NO: 48272 - RNA, 21 nt, synthetic construct
  source 1..21: mol_type = other RNA
cccaaagtgctgaccagcacg

SEQ ID NO: 48273 - RNA, 21 nt, synthetic construct
  source 1..21: mol_type = other RNA
ccaaagtgctgaccagcacgg

SEQ ID NO: 48274 - RNA, 21 nt, synthetic construct
  source 1..21: mol_type = other RNA
tcaaagtgctgaccagcacgg

SEQ ID NO: 48275 - RNA, 21 nt, synthetic construct
  source 1..21: mol_type = other RNA
cggccaccacacccacagtca

SEQ ID NO: 48276 - RNA, 21 nt, synthetic construct
  source 1..21: mol_type = other RNA
cccacaaccagaggctccacg

SEQ ID NO: 48277 - RNA, 21 nt, synthetic construct
  source 1..21: mol_type = other RNA
cagtgtgcctggtcagagtgg

SEQ ID NO: 48278 - RNA, 21 nt, synthetic construct
  source 1..21: mol_type = other RNA
cagcccagggacggcacgcac

SEQ ID NO: 48279 - RNA, 21 nt, synthetic construct
  source 1..21: mol_type = other RNA
cagtgtgcctggtcagagtgg

SEQ ID NO: 48280 - RNA, 21 nt, synthetic construct
  source 1..21: mol_type = other RNA
agggcgcctgtcccacctccc

SEQ ID NO: 48281 - RNA, 21 nt, synthetic construct
  source 1..21: mol_type = other RNA
caatgtcaggaggatgcctgc

SEQ ID NO: 48282 - RNA, 21 nt, synthetic construct
  source 1..21: mol_type = other RNA
atgcctgctgcagggtaactc

SEQ ID NO: 48283 - RNA, 21 nt, synthetic construct
  source 1..21: mol_type = other RNA
acccttggtacagccaccacg

SEQ ID NO: 48284 - RNA, 21 nt, synthetic construct
  source 1..21: mol_type = other RNA
caccatggccaccacacacgg

SEQ ID NO: 48285 - RNA, 21 nt, synthetic construct
  source 1..21: mol_type = other RNA
gactgagtccactggatccac

SEQ ID NO: 48286 - RNA, 21 nt, synthetic construct
  source 1..21: mol_type = other RNA
gactgagtccactggatccac

SEQ ID NO: 48287 - RNA, 21 nt, synthetic construct
  source 1..21: mol_type = other RNA
ggccacgtccggccgctgggg

SEQ ID NO: 48288 - RNA, 21 nt, synthetic construct
  source 1..21: mol_type = other RNA
ccctgtggagccgagctggga

SEQ ID NO: 48289 - RNA, 21 nt, synthetic construct
  source 1..21: mol_type = other RNA
gagctgggagaatgcagggca

SEQ ID NO: 48290 - RNA, 21 nt, synthetic construct
  source 1..21: mol_type = other RNA
cccccagcgcgcgcagctctg

SEQ ID NO: 48291 - RNA, 21 nt, synthetic construct
  source 1..21: mol_type = other RNA
gactgcagcaacagctcggcg

SEQ ID NO: 48292 - RNA, 21 nt, synthetic construct
  source 1..21: mol_type = other RNA
aacaccacccacgggaccttc

SEQ ID NO: 48293 - RNA, 21 nt, synthetic construct
  source 1..21: mol_type = other RNA
gcctgggaggcggagactttg

SEQ ID NO: 48294 - RNA, 21 nt, synthetic construct
  source 1..21: mol_type = other RNA
actacaggatccgggtcctct

SEQ ID NO: 48295 - RNA, 21 nt, synthetic construct
  source 1..21: mol_type = other RNA
acacccacagctaccagcgtt

SEQ ID NO: 48296 - RNA, 21 nt, synthetic construct
  source 1..21: mol_type = other RNA
accacacccacggccaccatg

SEQ ID NO: 48297 - RNA, 21 nt, synthetic construct
  source 1..21: mol_type = other RNA
tccacagtgcttaccgccacg

SEQ ID NO: 48298 - RNA, 21 nt, synthetic construct
  source 1..21: mol_type = other RNA
caccagcaacacagtgactcc

SEQ ID NO: 48299 - RNA, 21 nt, synthetic construct
  source 1..21: mol_type = other RNA
accacccacatcacagagcct

SEQ ID NO: 48300 - RNA, 21 nt, synthetic construct
  source 1..21: mol_type = other RNA
cccatgccggggccctctggc

SEQ ID NO: 48301 - RNA, 21 nt, synthetic construct
  source 1..21: mol_type = other RNA
accacacccacggccaccatg

SEQ ID NO: 48302 - RNA, 21 nt, synthetic construct
  source 1..21: mol_type = other RNA
ccagcccagggacggcacgca

SEQ ID NO: 48303 - RNA, 21 nt, synthetic construct
  source 1..21: mol_type = other RNA
ccacacccacaaccagaggtt

SEQ ID NO: 48304 - RNA, 21 nt, synthetic construct
  source 1..21: mol_type = other RNA
cacctcaggcaccttgggcac

SEQ ID NO: 48305 - RNA, 21 nt, synthetic construct
  source 1..21: mol_type = other RNA
accacccacatcacagagcct

SEQ ID NO: 48306 - RNA, 21 nt, synthetic construct
  source 1..21: mol_type = other RNA
cccatgccggggccctctggc

SEQ ID NO: 48307 - RNA, 21 nt, synthetic construct
  source 1..21: mol_type = other RNA
ccccgggaacagctccccctc

SEQ ID NO: 48308 - RNA, 21 nt, synthetic construct
  source 1..21: mol_type = other RNA
cacacccatggccaccatgtc

SEQ ID NO: 48309 - RNA, 21 nt, synthetic construct
  source 1..21: mol_type = other RNA
acaagggccaccagttccatg

SEQ ID NO: 48310 - RNA, 21 nt, synthetic construct
  source 1..21: mol_type = other RNA
acacccacagctaccagcgtt

SEQ ID NO: 48311 - RNA, 21 nt, synthetic construct
  source 1..21: mol_type = other RNA
accacacccacggccaccatg

SEQ ID NO: 48312 - RNA, 21 nt, synthetic construct
  source 1..21: mol_type = other RNA
accctcctctactccagagac

SEQ ID NO: 48313 - RNA, 21 nt, synthetic construct
  source 1..21: mol_type = other RNA
accacccacatcacagagcct

SEQ ID NO: 48314 - RNA, 21 nt, synthetic construct
  source 1..21: mol_type = other RNA
cccatgccggggccctctggc

SEQ ID NO: 48315 - RNA, 21 nt, synthetic construct
  source 1..21: mol_type = other RNA
accacacccacggccaccatg

SEQ ID NO: 48316 - RNA, 21 nt, synthetic construct
  source 1..21: mol_type = other RNA
ccagcccagggacggcacgca

SEQ ID NO: 48317 - RNA, 21 nt, synthetic construct
  source 1..21: mol_type = other RNA
cacctcaggcaccttgggcac

SEQ ID NO: 48318 - RNA, 21 nt, synthetic construct
  source 1..21: mol_type = other RNA
accacccacatcacagagcct

SEQ ID NO: 48319 - RNA, 21 nt, synthetic construct
  source 1..21: mol_type = other RNA
cccatgccggggccctctggc

SEQ ID NO: 48320 - RNA, 21 nt, synthetic construct
  source 1..21: mol_type = other RNA
ccccgggaacagctccccctc

SEQ ID NO: 48321 - RNA, 21 nt, synthetic construct
  source 1..21: mol_type = other RNA
accacacccacggccaccatg

SEQ ID NO: 48322 - RNA, 21 nt, synthetic construct
  source 1..21: mol_type = other RNA
tccacagtgcttaccgccacg

SEQ ID NO: 48323 - RNA, 21 nt, synthetic construct
  source 1..21: mol_type = other RNA
accacaacagccactacaact

SEQ ID NO: 48324 - RNA, 21 nt, synthetic construct
  source 1..21: mol_type = other RNA
caccaccctgagacccactgg

SEQ ID NO: 48325 - RNA, 21 nt, synthetic construct
  source 1..21: mol_type = other RNA
gccagtgtcctccgccccgct

SEQ ID NO: 48326 - RNA, 21 nt, synthetic construct
  source 1..21: mol_type = other RNA
gacgtggctggtccccgacag

SEQ ID NO: 48327 - RNA, 21 nt, synthetic construct
  source 1..21: mol_type = other RNA
aaccttcccaggcgcccttcc

SEQ ID NO: 48328 - RNA, 21 nt, synthetic construct
  source 1..21: mol_type = other RNA
tgcccagatgtgtccagctgc

SEQ ID NO: 48329 - RNA, 21 nt, synthetic construct
  source 1..21: mol_type = other RNA
gccaggtcagagaggggtcag

SEQ ID NO: 48330 - RNA, 21 nt, synthetic construct
  source 1..21: mol_type = other RNA
ataaaccctgagcattgagta

SEQ ID NO: 48331 - RNA, 21 nt, synthetic construct
  source 1..21: mol_type = other RNA
tcttccgcttccctggccttt

SEQ ID NO: 48332 - RNA, 21 nt, synthetic construct
  source 1..21: mol_type = other RNA
ccgcaccctgctggggccggc

SEQ ID NO: 48333 - RNA, 21 nt, synthetic construct
  source 1..21: mol_type = other RNA
atcacgcactctggctgcctg

SEQ ID NO: 48334 - RNA, 21 nt, synthetic construct
  source 1..21: mol_type = other RNA
tgccgcggcctgagtgaggcc

SEQ ID NO: 48335 - RNA, 21 nt, synthetic construct
  source 1..21: mol_type = other RNA
gtcccccggggctggtgtcgg

SEQ ID NO: 48336 - RNA, 21 nt, synthetic construct
  source 1..21: mol_type = other RNA
gagtgggggctgcattgccga

SEQ ID NO: 48337 - RNA, 21 nt, synthetic construct
  source 1..21: mol_type = other RNA
cgacaatgccatcaatgactt

SEQ ID NO: 48338 - RNA, 21 nt, synthetic construct
  source 1..21: mol_type = other RNA
cccttgttctgtgacttctac

SEQ ID NO: 48339 - RNA, 21 nt, synthetic construct
  source 1..21: mol_type = other RNA
ctgggtccagctcaggccccg

SEQ ID NO: 48340 - RNA, 21 nt, synthetic construct
  source 1..21: mol_type = other RNA
accccctcggccccaggtacc

SEQ ID NO: 48341 - RNA, 21 nt, synthetic construct
  source 1..21: mol_type = other RNA
cagggccgctggagggcactt

SEQ ID NO: 48342 - RNA, 21 nt, synthetic construct
  source 1..21: mol_type = other RNA
cgggtcctctgctgcagtgac

SEQ ID NO: 48343 - RNA, 21 nt, synthetic construct
  source 1..21: mol_type = other RNA
tacgagtagcccggggctgac

SEQ ID NO: 48344 - RNA, 21 nt, synthetic construct
  source 1..21: mol_type = other RNA
cagcccttccagggacgacgg

SEQ ID NO: 48345 - RNA, 21 nt, synthetic construct
  source 1..21: mol_type = other RNA
cccacgctggccccaacaaca

SEQ ID NO: 48346 - RNA, 21 nt, synthetic construct
  source 1..21: mol_type = other RNA
accacacccacagtcaccagc

SEQ ID NO: 48347 - RNA, 21 nt, synthetic construct
  source 1..21: mol_type = other RNA
actgcaaccgcccttccagca

SEQ ID NO: 48348 - RNA, 21 nt, synthetic construct
  source 1..21: mol_type = other RNA
accgcccttccagcactgaga

SEQ ID NO: 48349 - RNA, 21 nt, synthetic construct
  source 1..21: mol_type = other RNA
accacacccacaaccagaggc

SEQ ID NO: 48350 - RNA, 21 nt, synthetic construct
  source 1..21: mol_type = other RNA
actgcaaccgcccttccagca

SEQ ID NO: 48351 - RNA, 21 nt, synthetic construct
  source 1..21: mol_type = other RNA
accgcccttccagcactgaga

SEQ ID NO: 48352 - RNA, 21 nt, synthetic construct
  source 1..21: mol_type = other RNA
accacacccacaaccagaggt

SEQ ID NO: 48353 - RNA, 21 nt, synthetic construct
  source 1..21: mol_type = other RNA
atccacggccatcccgtcctc

SEQ ID NO: 48354 - RNA, 21 nt, synthetic construct
  source 1..21: mol_type = other RNA
ccacggccatcccgtcctcca

SEQ ID NO: 48355 - RNA, 21 nt, synthetic construct
  source 1..21: mol_type = other RNA
tgacaagcacagccaccaaat

SEQ ID NO: 48356 - RNA, 21 nt, synthetic construct
  source 1..21: mol_type = other RNA
atcccctccttcacccttggg

SEQ ID NO: 48357 - RNA, 21 nt, synthetic construct
  source 1..21: mol_type = other RNA
actgcaaccgcccttccagca

SEQ ID NO: 48358 - RNA, 21 nt, synthetic construct
  source 1..21: mol_type = other RNA
accgcccttccagcactgaga

SEQ ID NO: 48359 - RNA, 21 nt, synthetic construct
  source 1..21: mol_type = other RNA
accacacccacaaccagaggc

SEQ ID NO: 48360 - RNA, 21 nt, synthetic construct
  source 1..21: mol_type = other RNA
actgcaaccgcccttccagca

SEQ ID NO: 48361 - RNA, 21 nt, synthetic construct
  source 1..21: mol_type = other RNA
accgcccttccagcactgaga

SEQ ID NO: 48362 - RNA, 21 nt, synthetic construct
  source 1..21: mol_type = other RNA
gcccggccaccacacccacag

SEQ ID NO: 48363 - RNA, 21 nt, synthetic construct
  source 1..21: mol_type = other RNA
tgacaagcacagccaccaaat

SEQ ID NO: 48364 - RNA, 21 nt, synthetic construct
  source 1..21: mol_type = other RNA
tgacaagcacagccacaaaat

SEQ ID NO: 48365 - RNA, 21 nt, synthetic construct
  source 1..21: mol_type = other RNA
acaactgcagccactggatcc

SEQ ID NO: 48366 - RNA, 21 nt, synthetic construct
  source 1..21: mol_type = other RNA
cgagccggctgccatttctac

SEQ ID NO: 48367 - RNA, 21 nt, synthetic construct
  source 1..21: mol_type = other RNA
cctgtcccacctccccaccgc

SEQ ID NO: 48368 - RNA, 21 nt, synthetic construct
  source 1..21: mol_type = other RNA
gcccccgcgccctcagcatcc

SEQ ID NO: 48369 - RNA, 21 nt, synthetic construct
  source 1..21: mol_type = other RNA
cgccctcagcatccactacaa

SEQ ID NO: 48370 - RNA, 21 nt, synthetic construct
  source 1..21: mol_type = other RNA
gtcctcactgtcaccatggtg

SEQ ID NO: 48371 - RNA, 21 nt, synthetic construct
  source 1..21: mol_type = other RNA
caccatggtgcatgggaagga

SEQ ID NO: 48372 - RNA, 21 nt, synthetic construct
  source 1..21: mol_type = other RNA
aatggccaagtcttccaggcc

SEQ ID NO: 48373 - RNA, 21 nt, synthetic construct
  source 1..21: mol_type = other RNA
cgggacggaaccactgccgcc

SEQ ID NO: 48374 - RNA, 21 nt, synthetic construct
  source 1..21: mol_type = other RNA
ccaggtctttgctgagtgcca

SEQ ID NO: 48375 - RNA, 21 nt, synthetic construct
  source 1..21: mol_type = other RNA
tgtgacgcccagggtcagccc

SEQ ID NO: 48376 - RNA, 21 nt, synthetic construct
  source 1..21: mol_type = other RNA
aaccgtgaccaggccccgggc

SEQ ID NO: 48377 - RNA, 21 nt, synthetic construct
  source 1..21: mol_type = other RNA
ctacggggttggtgcaacctt

SEQ ID NO: 48378 - RNA, 21 nt, synthetic construct
  source 1..21: mol_type = other RNA
ggcgcccttccctgccacatg

SEQ ID NO: 48379 - RNA, 21 nt, synthetic construct
  source 1..21: mol_type = other RNA
tgcctcacgcccgatggccag

SEQ ID NO: 48380 - RNA, 21 nt, synthetic construct
  source 1..21: mol_type = other RNA
tgtgaggaggactcctgtcaa

SEQ ID NO: 48381 - RNA, 21 nt, synthetic construct
  source 1..21: mol_type = other RNA
gccaggatgtgcattgtctga

SEQ ID NO: 48382 - RNA, 21 nt, synthetic construct
  source 1..21: mol_type = other RNA
gtctgatcatgaaaaccttgg

SEQ ID NO: 48383 - RNA, 21 nt, synthetic construct
  source 1..21: mol_type = other RNA
gagccccccggcctgtgtgtg

SEQ ID NO: 48384 - RNA, 21 nt, synthetic construct
  source 1..21: mol_type = other RNA
ttctcgcgctgccactccatc

SEQ ID NO: 48385 - RNA, 21 nt, synthetic construct
  source 1..21: mol_type = other RNA
acaggatccgggtcctctgct

SEQ ID NO: 48386 - RNA, 21 nt, synthetic construct
  source 1..21: mol_type = other RNA
cacccaggccctgttctcaac

SEQ ID NO: 48387 - RNA, 21 nt, synthetic construct
  source 1..21: mol_type = other RNA
cttcccacaccctagcagcaa

SEQ ID NO: 48388 - RNA, 21 nt, synthetic construct
  source 1..21: mol_type = other RNA
acccgcacctcgaccctgctg

SEQ ID NO: 48389 - RNA, 21 nt, synthetic construct
  source 1..21: mol_type = other RNA
acccgcacctcgaccctgctg

SEQ ID NO: 48390 - RNA, 21 nt, synthetic construct
  source 1..21: mol_type = other RNA
acccgcacctcgaccctgctg

SEQ ID NO: 48391 - RNA, 21 nt, synthetic construct
  source 1..21: mol_type = other RNA
acccgcacctcgaccctgctg

SEQ ID NO: 48392 - RNA, 21 nt, synthetic construct
  source 1..21: mol_type = other RNA
atttggacagtttttctcgcc

SEQ ID NO: 48393 - RNA, 21 nt, synthetic construct
  source 1..21: mol_type = other RNA
ggcatctgcgtgcaggcctgc

SEQ ID NO: 48394 - RNA, 21 nt, synthetic construct
  source 1..21: mol_type = other RNA
accaccccgggccacaccacg

SEQ ID NO: 48395 - RNA, 21 nt, synthetic construct
  source 1..21: mol_type = other RNA
accaccccgggccacaccacg

SEQ ID NO: 48396 - RNA, 21 nt, synthetic construct
  source 1..21: mol_type = other RNA
tccagaccgcctgcctcacgc

SEQ ID NO: 48397 - RNA, 21 nt, synthetic construct
  source 1..21: mol_type = other RNA
cctgggtcaacagccatgtgg

SEQ ID NO: 48398 - RNA, 21 nt, synthetic construct
  source 1..21: mol_type = other RNA
ggaggactcctgtcaagtccg

SEQ ID NO: 48399 - RNA, 21 nt, synthetic construct
  source 1..21: mol_type = other RNA
aaactctacgacctgcatggt

SEQ ID NO: 48400 - RNA, 21 nt, synthetic construct
  source 1..21: mol_type = other RNA
cccaccttcgccgcctgccgc

SEQ ID NO: 48401 - RNA, 21 nt, synthetic construct
  source 1..21: mol_type = other RNA
gccctcccggtctccaccgtg

SEQ ID NO: 48402 - RNA, 21 nt, synthetic construct
  source 1..21: mol_type = other RNA
aaaagaccaccctatgggtga

SEQ ID NO: 48403 - RNA, 21 nt, synthetic construct
  source 1..21: mol_type = other RNA
caaagagccgctgaccacgag

SEQ ID NO: 48404 - RNA, 21 nt, synthetic construct
  source 1..21: mol_type = other RNA
accagaggctccacggtgacc

SEQ ID NO: 48405 - RNA, 21 nt, synthetic construct
  source 1..21: mol_type = other RNA
cctctagcacacagaccagtg

SEQ ID NO: 48406 - RNA, 21 nt, synthetic construct
  source 1..21: mol_type = other RNA
tgcaggaaccgtgagcaggtg

SEQ ID NO: 48407 - RNA, 21 nt, synthetic construct
  source 1..21: mol_type = other RNA
cctctagcacacagaccagtg

SEQ ID NO: 48408 - RNA, 21 nt, synthetic construct
  source 1..21: mol_type = other RNA
tgcaggaaccgtgagcaggtg

SEQ ID NO: 48409 - RNA, 21 nt, synthetic construct
  source 1..21: mol_type = other RNA
ccatggccaccatgtccacaa

SEQ ID NO: 48410 - RNA, 21 nt, synthetic construct
  source 1..21: mol_type = other RNA
accagaggctccacggtgacc

SEQ ID NO: 48411 - RNA, 21 nt, synthetic construct
  source 1..21: mol_type = other RNA
cctctagcacacagaccagtg

SEQ ID NO: 48412 - RNA, 21 nt, synthetic construct
  source 1..21: mol_type = other RNA
cacaccaggggcacctccagg

SEQ ID NO: 48413 - RNA, 21 nt, synthetic construct
  source 1..21: mol_type = other RNA
tgcaggaaccgtgagcaggtg

SEQ ID NO: 48414 - RNA, 21 nt, synthetic construct
  source 1..21: mol_type = other RNA
cctctagcacacagaccagtg

SEQ ID NO: 48415 - RNA, 21 nt, synthetic construct
  source 1..21: mol_type = other RNA
tgcaggaaccgtgagcaggtg

SEQ ID NO: 48416 - RNA, 21 nt, synthetic construct
  source 1..21: mol_type = other RNA
cctccacccttgggaccaccg

SEQ ID NO: 48417 - RNA, 21 nt, synthetic construct
  source 1..21: mol_type = other RNA
cctctagcacacagaccagtg

SEQ ID NO: 48418 - RNA, 21 nt, synthetic construct
  source 1..21: mol_type = other RNA
acattgaccgcttccagggcg

SEQ ID NO: 48419 - RNA, 21 nt, synthetic construct
  source 1..21: mol_type = other RNA
cagttgcaaggacatggccaa

SEQ ID NO: 48420 - RNA, 21 nt, synthetic construct
  source 1..21: mol_type = other RNA
gcccaccacagccgctctgtg

SEQ ID NO: 48421 - RNA, 21 nt, synthetic construct
  source 1..21: mol_type = other RNA
gccaggtctttgctgagtgcc

SEQ ID NO: 48422 - RNA, 21 nt, synthetic construct
  source 1..21: mol_type = other RNA
gcagcacggattccagctggc

SEQ ID NO: 48423 - RNA, 21 nt, synthetic construct
  source 1..21: mol_type = other RNA
agctggccacgtccggccgct

SEQ ID NO: 48424 - RNA, 21 nt, synthetic construct
  source 1..21: mol_type = other RNA
acccagggccctgtggagccg

SEQ ID NO: 48425 - RNA, 21 nt, synthetic construct
  source 1..21: mol_type = other RNA
cgcttccctggcctttgcaac

SEQ ID NO: 48426 - RNA, 21 nt, synthetic construct
  source 1..21: mol_type = other RNA
cggctggtgctgacattcctg

SEQ ID NO: 48427 - RNA, 21 nt, synthetic construct
  source 1..21: mol_type = other RNA
agcccgggcacctccttcaac

SEQ ID NO: 48428 - RNA, 21 nt, synthetic construct
  source 1..21: mol_type = other RNA
tccggggggctatggcagtgc

SEQ ID NO: 48429 - RNA, 21 nt, synthetic construct
  source 1..21: mol_type = other RNA
gggctatggcagtgccaggac

SEQ ID NO: 48430 - RNA, 21 nt, synthetic construct
  source 1..21: mol_type = other RNA
gcccccatggtgtacctggac

SEQ ID NO: 48431 - RNA, 21 nt, synthetic construct
  source 1..21: mol_type = other RNA
cgggtggggacccaccctaca

SEQ ID NO: 48432 - RNA, 21 nt, synthetic construct
  source 1..21: mol_type = other RNA
ggtaccaggtatgccctgtgc

SEQ ID NO: 48433 - RNA, 21 nt, synthetic construct
  source 1..21: mol_type = other RNA
gggcggcgcagcttcccgaca

SEQ ID NO: 48434 - RNA, 21 nt, synthetic construct
  source 1..21: mol_type = other RNA
agggccgctggagggcactta

SEQ ID NO: 48435 - RNA, 21 nt, synthetic construct
  source 1..21: mol_type = other RNA
agcccggggctgaccagggct

SEQ ID NO: 48436 - RNA, 21 nt, synthetic construct
  source 1..21: mol_type = other RNA
gggctgaccagggctcccccg

SEQ ID NO: 48437 - RNA, 21 nt, synthetic construct
  source 1..21: mol_type = other RNA
gggtggccacatccacccttc

SEQ ID NO: 48438 - RNA, 21 nt, synthetic construct
  source 1..21: mol_type = other RNA
ggccacatccacccttccaac

SEQ ID NO: 48439 - RNA, 21 nt, synthetic construct
  source 1..21: mol_type = other RNA
acggggagcttgggcacatgg

SEQ ID NO: 48440 - RNA, 21 nt, synthetic construct
  source 1..21: mol_type = other RNA
gaccagcacgcccaggacaga

SEQ ID NO: 48441 - RNA, 21 nt, synthetic construct
  source 1..21: mol_type = other RNA
gcccaggacagagacgacaat

SEQ ID NO: 48442 - RNA, 21 nt, synthetic construct
  source 1..21: mol_type = other RNA
ccacggccaccacacccacag

SEQ ID NO: 48443 - RNA, 21 nt, synthetic construct
  source 1..21: mol_type = other RNA
cacggccaccacacccacagt

SEQ ID NO: 48444 - RNA, 21 nt, synthetic construct
  source 1..21: mol_type = other RNA
gctccaaagccactccctcct

SEQ ID NO: 48445 - RNA, 21 nt, synthetic construct
  source 1..21: mol_type = other RNA
cccttccagcactgagaagca

SEQ ID NO: 48446 - RNA, 21 nt, synthetic construct
  source 1..21: mol_type = other RNA
tccagagactgcccacacctc

SEQ ID NO: 48447 - RNA, 21 nt, synthetic construct
  source 1..21: mol_type = other RNA
ctggggccaccggctctgtgg

SEQ ID NO: 48448 - RNA, 21 nt, synthetic construct
  source 1..21: mol_type = other RNA
tggggccaccggctctgtggc

SEQ ID NO: 48449 - RNA, 21 nt, synthetic construct
  source 1..21: mol_type = other RNA
atcccggggaccacccacacc

SEQ ID NO: 48450 - RNA, 21 nt, synthetic construct
  source 1..21: mol_type = other RNA
actgtggccactggttctatg

SEQ ID NO: 48451 - RNA, 21 nt, synthetic construct
  source 1..21: mol_type = other RNA
ccaacccctcctcaactcctg

SEQ ID NO: 48452 - RNA, 21 nt, synthetic construct
  source 1..21: mol_type = other RNA
cctcctcaactcctgggacaa

SEQ ID NO: 48453 - RNA, 21 nt, synthetic construct
  source 1..21: mol_type = other RNA
aactcccatccccccagtgct

SEQ ID NO: 48454 - RNA, 21 nt, synthetic construct
  source 1..21: mol_type = other RNA
ccccagcagtccccacacggt

SEQ ID NO: 48455 - RNA, 21 nt, synthetic construct
  source 1..21: mol_type = other RNA
ccagcactcgactccagccct

SEQ ID NO: 48456 - RNA, 21 nt, synthetic construct
  source 1..21: mol_type = other RNA
accacggtggtgaccatgggc

SEQ ID NO: 48457 - RNA, 21 nt, synthetic construct
  source 1..21: mol_type = other RNA
cccagtgtgcctggtcagagt

SEQ ID NO: 48458 - RNA, 21 nt, synthetic construct
  source 1..21: mol_type = other RNA
ctttggcctggtctgcaggaa

SEQ ID NO: 48459 - RNA, 21 nt, synthetic construct
  source 1..21: mol_type = other RNA
tcacagagccgagcactacag

SEQ ID NO: 48460 - RNA, 21 nt, synthetic construct
  source 1..21: mol_type = other RNA
ccttctccagtccagggactg

SEQ ID NO: 48461 - RNA, 21 nt, synthetic construct
  source 1..21: mol_type = other RNA
cttctccagtccagggactgc

SEQ ID NO: 48462 - RNA, 21 nt, synthetic construct
  source 1..21: mol_type = other RNA
cccttccagcactgagaagca

SEQ ID NO: 48463 - RNA, 21 nt, synthetic construct
  source 1..21: mol_type = other RNA
cggggccaccggctctgtggc

SEQ ID NO: 48464 - RNA, 21 nt, synthetic construct
  source 1..21: mol_type = other RNA
agcccagggacggcacgcacg

SEQ ID NO: 48465 - RNA, 21 nt, synthetic construct
  source 1..21: mol_type = other RNA
atcccggggaccacccacacc

SEQ ID NO: 48466 - RNA, 21 nt, synthetic construct
  source 1..21: mol_type = other RNA
actgtggccactggttctatg

SEQ ID NO: 48467 - RNA, 21 nt, synthetic construct
  source 1..21: mol_type = other RNA
actccagggacaacacctatc

SEQ ID NO: 48468 - RNA, 21 nt, synthetic construct
  source 1..21: mol_type = other RNA
cagccaccagcagcacagtga

SEQ ID NO: 48469 - RNA, 21 nt, synthetic construct
  source 1..21: mol_type = other RNA
ccaccagcagcacagtgactc

SEQ ID NO: 48470 - RNA, 21 nt, synthetic construct
  source 1..21: mol_type = other RNA
ccccagcagtccccacacggt

SEQ ID NO: 48471 - RNA, 21 nt, synthetic construct
  source 1..21: mol_type = other RNA
ctcaggcaccttgggcaccac

SEQ ID NO: 48472 - RNA, 21 nt, synthetic construct
  source 1..21: mol_type = other RNA
ccttccacggggacttcccac

SEQ ID NO: 48473 - RNA, 21 nt, synthetic construct
  source 1..21: mol_type = other RNA
ccagcactcgactccagccct

SEQ ID NO: 48474 - RNA, 21 nt, synthetic construct
  source 1..21: mol_type = other RNA
cctagcagcaggaccaccgag

SEQ ID NO: 48475 - RNA, 21 nt, synthetic construct
  source 1..21: mol_type = other RNA
accacggtggtgaccatgggc

SEQ ID NO: 48476 - RNA, 21 nt, synthetic construct
  source 1..21: mol_type = other RNA
cccagtgtgcctggtcagagt

SEQ ID NO: 48477 - RNA, 21 nt, synthetic construct
  source 1..21: mol_type = other RNA
ctttggcctggtctgcaggaa

SEQ ID NO: 48478 - RNA, 21 nt, synthetic construct
  source 1..21: mol_type = other RNA
gcagaccacagcagccactac

SEQ ID NO: 48479 - RNA, 21 nt, synthetic construct
  source 1..21: mol_type = other RNA
gcacggccaccacacccacag

SEQ ID NO: 48480 - RNA, 21 nt, synthetic construct
  source 1..21: mol_type = other RNA
cacggccaccacacccacagc

SEQ ID NO: 48481 - RNA, 21 nt, synthetic construct
  source 1..21: mol_type = other RNA
gccaccaaatccacagctacc

SEQ ID NO: 48482 - RNA, 21 nt, synthetic construct
  source 1..21: mol_type = other RNA
ccaccaaatccacagctacca

SEQ ID NO: 48483 - RNA, 21 nt, synthetic construct
  source 1..21: mol_type = other RNA
ccccctcctccactccgggga

SEQ ID NO: 48484 - RNA, 21 nt, synthetic construct
  source 1..21: mol_type = other RNA
gcacggccaccacacccacag

SEQ ID NO: 48485 - RNA, 21 nt, synthetic construct
  source 1..21: mol_type = other RNA
cacggccaccacacccacagt

SEQ ID NO: 48486 - RNA, 21 nt, synthetic construct
  source 1..21: mol_type = other RNA
cagtcatcagctccagagcca

SEQ ID NO: 48487 - RNA, 21 nt, synthetic construct
  source 1..21: mol_type = other RNA
gtcatcagctccagagccact

SEQ ID NO: 48488 - RNA, 21 nt, synthetic construct
  source 1..21: mol_type = other RNA
tcatcagctccagagccactc

SEQ ID NO: 48489 - RNA, 21 nt, synthetic construct
  source 1..21: mol_type = other RNA
cccttccagcactgagaagca

SEQ ID NO: 48490 - RNA, 21 nt, synthetic construct
  source 1..21: mol_type = other RNA
agccacaccctcctctactcc

SEQ ID NO: 48491 - RNA, 21 nt, synthetic construct
  source 1..21: mol_type = other RNA
ccagggccaccggctctgtgg

SEQ ID NO: 48492 - RNA, 21 nt, synthetic construct
  source 1..21: mol_type = other RNA
agtgccgactaccacaaccac

SEQ ID NO: 48493 - RNA, 21 nt, synthetic construct
  source 1..21: mol_type = other RNA
atcccggggaccacccacacc

SEQ ID NO: 48494 - RNA, 21 nt, synthetic construct
  source 1..21: mol_type = other RNA
actgtggccactggttctatg

SEQ ID NO: 48495 - RNA, 21 nt, synthetic construct
  source 1..21: mol_type = other RNA
aactcccatccccccagtgct

SEQ ID NO: 48496 - RNA, 21 nt, synthetic construct
  source 1..21: mol_type = other RNA
cagccaccagcagcacagtga

SEQ ID NO: 48497 - RNA, 21 nt, synthetic construct
  source 1..21: mol_type = other RNA
ccaccagcagcacagtgactc

SEQ ID NO: 48498 - RNA, 21 nt, synthetic construct
  source 1..21: mol_type = other RNA
ccccagcagtccccacacggt

SEQ ID NO: 48499 - RNA, 21 nt, synthetic construct
  source 1..21: mol_type = other RNA
ccccagcagcaaccaccagta

SEQ ID NO: 48500 - RNA, 21 nt, synthetic construct
  source 1..21: mol_type = other RNA
ccagcactcgactccagccct

SEQ ID NO: 48501 - RNA, 21 nt, synthetic construct
  source 1..21: mol_type = other RNA
cctagcagcaggaccaccgag

SEQ ID NO: 48502 - RNA, 21 nt, synthetic construct
  source 1..21: mol_type = other RNA
cccagtgtgcctggtcagagt

SEQ ID NO: 48503 - RNA, 21 nt, synthetic construct
  source 1..21: mol_type = other RNA
ctttggcctggtctgcaggaa

SEQ ID NO: 48504 - RNA, 21 nt, synthetic construct
  source 1..21: mol_type = other RNA
tcacagagccgagcactacag

SEQ ID NO: 48505 - RNA, 21 nt, synthetic construct
  source 1..21: mol_type = other RNA
ccttctccagtccagggactg

SEQ ID NO: 48506 - RNA, 21 nt, synthetic construct
  source 1..21: mol_type = other RNA
cttctccagtccagggactgc

SEQ ID NO: 48507 - RNA, 21 nt, synthetic construct
  source 1..21: mol_type = other RNA
cccttccagcactgagaagca

SEQ ID NO: 48508 - RNA, 21 nt, synthetic construct
  source 1..21: mol_type = other RNA
tccagagactgcccacacctc

SEQ ID NO: 48509 - RNA, 21 nt, synthetic construct
  source 1..21: mol_type = other RNA
ccagggccaccggctctgtgg

SEQ ID NO: 48510 - RNA, 21 nt, synthetic construct
  source 1..21: mol_type = other RNA
agtgccgactaccacaaccac

SEQ ID NO: 48511 - RNA, 21 nt, synthetic construct
  source 1..21: mol_type = other RNA
agcccagggacggcacgcacg

SEQ ID NO: 48512 - RNA, 21 nt, synthetic construct
  source 1..21: mol_type = other RNA
gtcccggggaccacccacacc

SEQ ID NO: 48513 - RNA, 21 nt, synthetic construct
  source 1..21: mol_type = other RNA
actgtggccactggttctatg

SEQ ID NO: 48514 - RNA, 21 nt, synthetic construct
  source 1..21: mol_type = other RNA
atcactgatcaccacggccac

SEQ ID NO: 48515 - RNA, 21 nt, synthetic construct
  source 1..21: mol_type = other RNA
actccagggacaacacctatc

SEQ ID NO: 48516 - RNA, 21 nt, synthetic construct
  source 1..21: mol_type = other RNA
cagccaccagcagcacagtga

SEQ ID NO: 48517 - RNA, 21 nt, synthetic construct
  source 1..21: mol_type = other RNA
ccaccagcagcacagtgactc

SEQ ID NO: 48518 - RNA, 21 nt, synthetic construct
  source 1..21: mol_type = other RNA
ccccagcagtccccacacggt

SEQ ID NO: 48519 - RNA, 21 nt, synthetic construct
  source 1..21: mol_type = other RNA
ctcaggcaccttgggcaccac

SEQ ID NO: 48520 - RNA, 21 nt, synthetic construct
  source 1..21: mol_type = other RNA
ccttccacggggacttcccac

SEQ ID NO: 48521 - RNA, 21 nt, synthetic construct
  source 1..21: mol_type = other RNA
ccagcactcgactccagccct

SEQ ID NO: 48522 - RNA, 21 nt, synthetic construct
  source 1..21: mol_type = other RNA
cctagcagcaggaccaccgag

SEQ ID NO: 48523 - RNA, 21 nt, synthetic construct
  source 1..21: mol_type = other RNA
cccagtgtgcctggtcagagt

SEQ ID NO: 48524 - RNA, 21 nt, synthetic construct
  source 1..21: mol_type = other RNA
agcctggtgtccccctggggg

SEQ ID NO: 48525 - RNA, 21 nt, synthetic construct
  source 1..21: mol_type = other RNA
cctgggggagttgggccaggt

SEQ ID NO: 48526 - RNA, 21 nt, synthetic construct
  source 1..21: mol_type = other RNA
ctttggcctggtctgcaggaa

SEQ ID NO: 48527 - RNA, 21 nt, synthetic construct
  source 1..21: mol_type = other RNA
tgctgaccagcccggccacca

SEQ ID NO: 48528 - RNA, 21 nt, synthetic construct
  source 1..21: mol_type = other RNA
gaccagcccggccaccacacc

SEQ ID NO: 48529 - RNA, 21 nt, synthetic construct
  source 1..21: mol_type = other RNA
cccggccaccacacccacagc

SEQ ID NO: 48530 - RNA, 21 nt, synthetic construct
  source 1..21: mol_type = other RNA
gccaccaaatccacagctacc

SEQ ID NO: 48531 - RNA, 21 nt, synthetic construct
  source 1..21: mol_type = other RNA
ccaccaaatccacagctacca

SEQ ID NO: 48532 - RNA, 21 nt, synthetic construct
  source 1..21: mol_type = other RNA
ccccctcctccactccgggga

SEQ ID NO: 48533 - RNA, 21 nt, synthetic construct
  source 1..21: mol_type = other RNA
tcacagagccgagcactacag

SEQ ID NO: 48534 - RNA, 21 nt, synthetic construct
  source 1..21: mol_type = other RNA
gctccaaagccactccctcct

SEQ ID NO: 48535 - RNA, 21 nt, synthetic construct
  source 1..21: mol_type = other RNA
actgcccttccagcactgaga

SEQ ID NO: 48536 - RNA, 21 nt, synthetic construct
  source 1..21: mol_type = other RNA
cccttccagcactgagaagca

SEQ ID NO: 48537 - RNA, 21 nt, synthetic construct
  source 1..21: mol_type = other RNA
cggggccaccggctctgtggc

SEQ ID NO: 48538 - RNA, 21 nt, synthetic construct
  source 1..21: mol_type = other RNA
agtgccgactaccacaaccac

SEQ ID NO: 48539 - RNA, 21 nt, synthetic construct
  source 1..21: mol_type = other RNA
atcccggggaccacccacacc

SEQ ID NO: 48540 - RNA, 21 nt, synthetic construct
  source 1..21: mol_type = other RNA
actgtggccactggttctatg

SEQ ID NO: 48541 - RNA, 21 nt, synthetic construct
  source 1..21: mol_type = other RNA
acaagcacagccacaaaatcc

SEQ ID NO: 48542 - RNA, 21 nt, synthetic construct
  source 1..21: mol_type = other RNA
cccctcctccaccctgtggac

SEQ ID NO: 48543 - RNA, 21 nt, synthetic construct
  source 1..21: mol_type = other RNA
agccactgcctccacggttcc

SEQ ID NO: 48544 - RNA, 21 nt, synthetic construct
  source 1..21: mol_type = other RNA
tgctggacccaaagcctgtgg

SEQ ID NO: 48545 - RNA, 21 nt, synthetic construct
  source 1..21: mol_type = other RNA
tactgcacggcctctgccact

SEQ ID NO: 48546 - RNA, 21 nt, synthetic construct
  source 1..21: mol_type = other RNA
actgcacggcctctgccactg

SEQ ID NO: 48547 - RNA, 21 nt, synthetic construct
  source 1..21: mol_type = other RNA
tgcccccgcgccctcagcatc

SEQ ID NO: 48548 - RNA, 21 nt, synthetic construct
  source 1..21: mol_type = other RNA
ccctcagcatccactacaagt

SEQ ID NO: 48549 - RNA, 21 nt, synthetic construct
  source 1..21: mol_type = other RNA
gtggacattcctgccctgggc

SEQ ID NO: 48550 - RNA, 21 nt, synthetic construct
  source 1..21: mol_type = other RNA
ccttcaatggccaagtcttcc

SEQ ID NO: 48551 - RNA, 21 nt, synthetic construct
  source 1..21: mol_type = other RNA
atggccaagtcttccaggccc

SEQ ID NO: 48552 - RNA, 21 nt, synthetic construct
  source 1..21: mol_type = other RNA
cggtgtctagcacacccaccc

SEQ ID NO: 48553 - RNA, 21 nt, synthetic construct
  source 1..21: mol_type = other RNA
ccccagagcctgcctgtgtgc

SEQ ID NO: 48554 - RNA, 21 nt, synthetic construct
  source 1..21: mol_type = other RNA
ccaacggtgcaatgtcaggag

SEQ ID NO: 48555 - RNA, 21 nt, synthetic construct
  source 1..21: mol_type = other RNA
aggatgcctgcaacaatacta

SEQ ID NO: 48556 - RNA, 21 nt, synthetic construct
  source 1..21: mol_type = other RNA
aggctgagggtggagtccatt

SEQ ID NO: 48557 - RNA, 21 nt, synthetic construct
  source 1..21: mol_type = other RNA
ggctgagggtggagtccattt

SEQ ID NO: 48558 - RNA, 21 nt, synthetic construct
  source 1..21: mol_type = other RNA
cccatggctcccccacacacc

SEQ ID NO: 48559 - RNA, 21 nt, synthetic construct
  source 1..21: mol_type = other RNA
caggaggccactgctgtctga

SEQ ID NO: 48560 - RNA, 21 nt, synthetic construct
  source 1..21: mol_type = other RNA
cctggagccaggatgtgcatt

SEQ ID NO: 48561 - RNA, 21 nt, synthetic construct
  source 1..21: mol_type = other RNA
tctgatcatgaaaaccttggg

SEQ ID NO: 48562 - RNA, 21 nt, synthetic construct
  source 1..21: mol_type = other RNA
gcggagccccccggcctgtgt

SEQ ID NO: 48563 - RNA, 21 nt, synthetic construct
  source 1..21: mol_type = other RNA
ctccgtgctcctgctgcccac

SEQ ID NO: 48564 - RNA, 21 nt, synthetic construct
  source 1..21: mol_type = other RNA
ggccccagaagggtgaggggc

SEQ ID NO: 48565 - RNA, 21 nt, synthetic construct
  source 1..21: mol_type = other RNA
ggccagcaggacccctttcgg

SEQ ID NO: 48566 - RNA, 21 nt, synthetic construct
  source 1..21: mol_type = other RNA
gggagggcgccactcaggagt

SEQ ID NO: 48567 - RNA, 21 nt, synthetic construct
  source 1..21: mol_type = other RNA
cgggcctatgtgtccctgcca

SEQ ID NO: 48568 - RNA, 21 nt, synthetic construct
  source 1..21: mol_type = other RNA
ccaggaagctgcgacaggcaa

SEQ ID NO: 48569 - RNA, 21 nt, synthetic construct
  source 1..21: mol_type = other RNA
cagttttgcaaataaaccctg

SEQ ID NO: 48570 - RNA, 21 nt, synthetic construct
  source 1..21: mol_type = other RNA
ctacggccacgccctcctcca

SEQ ID NO: 48571 - RNA, 21 nt, synthetic construct
  source 1..21: mol_type = other RNA
ctacggccacgccctcctcaa

SEQ ID NO: 48572 - RNA, 21 nt, synthetic construct
  source 1..21: mol_type = other RNA
gtgaaaccggccccagaaggg

SEQ ID NO: 48573 - RNA, 21 nt, synthetic construct
  source 1..21: mol_type = other RNA
tcagcgaccactgcaggggcc

SEQ ID NO: 48574 - RNA, 21 nt, synthetic construct
  source 1..21: mol_type = other RNA
tggagccgagctgggagaatg

SEQ ID NO: 48575 - RNA, 21 nt, synthetic construct
  source 1..21: mol_type = other RNA
cttccccaactggaccctggc

SEQ ID NO: 48576 - RNA, 21 nt, synthetic construct
  source 1..21: mol_type = other RNA
ccaccctgagacccactggct

SEQ ID NO: 48577 - RNA, 21 nt, synthetic construct
  source 1..21: mol_type = other RNA
cacccctcctccactccggag

SEQ ID NO: 48578 - RNA, 21 nt, synthetic construct
  source 1..21: mol_type = other RNA
cacccctcctccactccggag

SEQ ID NO: 48579 - RNA, 21 nt, synthetic construct
  source 1..21: mol_type = other RNA
agcccctgccctgtgacgccc

SEQ ID NO: 48580 - RNA, 21 nt, synthetic construct
  source 1..21: mol_type = other RNA
gggcatttggacagtttttct

SEQ ID NO: 48581 - RNA, 21 nt, synthetic construct
  source 1..21: mol_type = other RNA
cccgtgccagcccccaggatg

SEQ ID NO: 48582 - RNA, 21 nt, synthetic construct
  source 1..21: mol_type = other RNA
acagagtcccccgctctgtca

SEQ ID NO: 48583 - RNA, 21 nt, synthetic construct
  source 1..21: mol_type = other RNA
tccatgcctgctgcagggtaa

SEQ ID NO: 48584 - RNA, 21 nt, synthetic construct
  source 1..21: mol_type = other RNA
gcaggaccaccgagtcacccc

SEQ ID NO: 48585 - RNA, 21 nt, synthetic construct
  source 1..21: mol_type = other RNA
gcaggaccaccgagtcacccc

SEQ ID NO: 48586 - RNA, 21 nt, synthetic construct
  source 1..21: mol_type = other RNA
gcaggaccaccgagtcacccc

SEQ ID NO: 48587 - RNA, 21 nt, synthetic construct
  source 1..21: mol_type = other RNA
cgccttgaggtgccctgccag

SEQ ID NO: 48588 - RNA, 21 nt, synthetic construct
  source 1..21: mol_type = other RNA
tgtaactgcacacccagtggc

SEQ ID NO: 48589 - RNA, 21 nt, synthetic construct
  source 1..21: mol_type = other RNA
ctacatcaaggtcagcatccg

SEQ ID NO: 48590 - RNA, 21 nt, synthetic construct
  source 1..21: mol_type = other RNA
ccccacccgtgccagccccca

SEQ ID NO: 48591 - RNA, 21 nt, synthetic construct
  source 1..21: mol_type = other RNA
ctgccccttgttctgtgactt

SEQ ID NO: 48592 - RNA, 21 nt, synthetic construct
  source 1..21: mol_type = other RNA
cctagcagcagaaccaccgag

SEQ ID NO: 48593 - RNA, 21 nt, synthetic construct
  source 1..21: mol_type = other RNA
ccgccagtgtcctccgccccg

SEQ ID NO: 48594 - RNA, 21 nt, synthetic construct
  source 1..21: mol_type = other RNA
aggggatggcggagggctgct

SEQ ID NO: 48595 - RNA, 21 nt, synthetic construct
  source 1..21: mol_type = other RNA
tcctcaactcctgggacaact

SEQ ID NO: 48596 - RNA, 21 nt, synthetic construct
  source 1..21: mol_type = other RNA
ggatccacggccaccccgtcc

SEQ ID NO: 48597 - RNA, 21 nt, synthetic construct
  source 1..21: mol_type = other RNA
ggatccacggccaccccgtcc

SEQ ID NO: 48598 - RNA, 21 nt, synthetic construct
  source 1..21: mol_type = other RNA
ggatccacggccaccccgtcc

SEQ ID NO: 48599 - RNA, 21 nt, synthetic construct
  source 1..21: mol_type = other RNA
ggatccacggccaccccgtcc

SEQ ID NO: 48600 - RNA, 21 nt, synthetic construct
  source 1..21: mol_type = other RNA
ggcctgtgtgtggcaccccgc

SEQ ID NO: 48601 - RNA, 21 nt, synthetic construct
  source 1..21: mol_type = other RNA
gtcttccgcttccctggcctt

SEQ ID NO: 48602 - RNA, 21 nt, synthetic construct
  source 1..21: mol_type = other RNA
ggcacagccagcaccgcttcc

SEQ ID NO: 48603 - RNA, 21 nt, synthetic construct
  source 1..21: mol_type = other RNA
cgacaatgagccccttgacta

SEQ ID NO: 48604 - RNA, 21 nt, synthetic construct
  source 1..21: mol_type = other RNA
agcacacagaccagtggtact

SEQ ID NO: 48605 - RNA, 21 nt, synthetic construct
  source 1..21: mol_type = other RNA
agcacacagaccagtggtact

SEQ ID NO: 48606 - RNA, 21 nt, synthetic construct
  source 1..21: mol_type = other RNA
gggccaccagttccatgtcca

SEQ ID NO: 48607 - RNA, 21 nt, synthetic construct
  source 1..21: mol_type = other RNA
ccccacggccaccccgtcctc

SEQ ID NO: 48608 - RNA, 21 nt, synthetic construct
  source 1..21: mol_type = other RNA
agcacacagaccagtggtact

SEQ ID NO: 48609 - RNA, 21 nt, synthetic construct
  source 1..21: mol_type = other RNA
agcacacagaccagtggtact

SEQ ID NO: 48610 - RNA, 21 nt, synthetic construct
  source 1..21: mol_type = other RNA
ccccacggccaccccgtcctc

SEQ ID NO: 48611 - RNA, 21 nt, synthetic construct
  source 1..21: mol_type = other RNA
agcacacagaccagtggtact

SEQ ID NO: 48612 - RNA, 21 nt, synthetic construct
  source 1..21: mol_type = other RNA
gcagccaccagctccaaagcc

SEQ ID NO: 48613 - RNA, 21 nt, synthetic construct
  source 1..21: mol_type = other RNA
cggatcctcactgagctgacc

SEQ ID NO: 48614 - RNA, 21 nt, synthetic construct
  source 1..21: mol_type = other RNA
ccgcacccctgcagtgctccc

SEQ ID NO: 48615 - RNA, 21 nt, synthetic construct
  source 1..21: mol_type = other RNA
gaccaccaccatgcgtgtgga

SEQ ID NO: 48616 - RNA, 21 nt, synthetic construct
  source 1..21: mol_type = other RNA
gcttctgccctgaggaccaga

SEQ ID NO: 48617 - RNA, 21 nt, synthetic construct
  source 1..21: mol_type = other RNA
gcacctacagcccgggcacct

SEQ ID NO: 48618 - RNA, 21 nt, synthetic construct
  source 1..21: mol_type = other RNA
gcgcctgtgtgcccgcccagg

SEQ ID NO: 48619 - RNA, 21 nt, synthetic construct
  source 1..21: mol_type = other RNA
caggtggggcagaaggtgcac

SEQ ID NO: 48620 - RNA, 21 nt, synthetic construct
  source 1..21: mol_type = other RNA
cctcctccacccaggcaactg

SEQ ID NO: 48621 - RNA, 21 nt, synthetic construct
  source 1..21: mol_type = other RNA
cctcctccacccaggcaactg

SEQ ID NO: 48622 - RNA, 21 nt, synthetic construct
  source 1..21: mol_type = other RNA
caccacacccgtggccaccat

SEQ ID NO: 48623 - RNA, 21 nt, synthetic construct
  source 1..21: mol_type = other RNA
cctcctccacccaggcaactg

SEQ ID NO: 48624 - RNA, 21 nt, synthetic construct
  source 1..21: mol_type = other RNA
tgccaggaagctgcgacaggc

SEQ ID NO: 48625 - RNA, 21 nt, synthetic construct
  source 1..21: mol_type = other RNA
aggtcagcatccggctggtgc

SEQ ID NO: 48626 - RNA, 21 nt, synthetic construct
  source 1..21: mol_type = other RNA
cagcagtccccaccctctcag

SEQ ID NO: 48627 - RNA, 21 nt, synthetic construct
  source 1..21: mol_type = other RNA
tcacggccaccggctccacca

SEQ ID NO: 48628 - RNA, 21 nt, synthetic construct
  source 1..21: mol_type = other RNA
tcacggccaccggctccacca

SEQ ID NO: 48629 - RNA, 21 nt, synthetic construct
  source 1..21: mol_type = other RNA
tcacggccaccggctccacca

SEQ ID NO: 48630 - RNA, 21 nt, synthetic construct
  source 1..21: mol_type = other RNA
tcacggccaccggctccacca

SEQ ID NO: 48631 - RNA, 21 nt, synthetic construct
  source 1..21: mol_type = other RNA
ccacagccaccatgacaaggg

SEQ ID NO: 48632 - RNA, 21 nt, synthetic construct
  source 1..21: mol_type = other RNA
gcgcccatggctcccccacac

SEQ ID NO: 48633 - RNA, 21 nt, synthetic construct
  source 1..21: mol_type = other RNA
aacggccaggtcagagagggg

SEQ ID NO: 48634 - RNA, 21 nt, synthetic construct
  source 1..21: mol_type = other RNA
cggccctcagcggggtggtgg

SEQ ID NO: 48635 - RNA, 21 nt, synthetic construct
  source 1..21: mol_type = other RNA
gtacctggactgcagcaacag

SEQ ID NO: 48636 - RNA, 21 nt, synthetic construct
  source 1..21: mol_type = other RNA
gctatggcagtgccaggacct

SEQ ID NO: 48637 - RNA, 21 nt, synthetic construct
  source 1..21: mol_type = other RNA
gcccctcacagccacccacgc

SEQ ID NO: 48638 - RNA, 21 nt, synthetic construct
  source 1..21: mol_type = other RNA
tcaccaccgcctgggtccccc

SEQ ID NO: 48639 - RNA, 21 nt, synthetic construct
  source 1..21: mol_type = other RNA
ccccttctccagggacgacca

SEQ ID NO: 48640 - RNA, 21 nt, synthetic construct
  source 1..21: mol_type = other RNA
ccccttctccagggacgacca

SEQ ID NO: 48641 - RNA, 21 nt, synthetic construct
  source 1..21: mol_type = other RNA
ccccttctccagggacgacca

SEQ ID NO: 48642 - RNA, 21 nt, synthetic construct
  source 1..21: mol_type = other RNA
ctgggggagttgggccaggtc

SEQ ID NO: 48643 - RNA, 21 nt, synthetic construct
  source 1..21: mol_type = other RNA
ccactctgggaacagctcaca

SEQ ID NO: 48644 - RNA, 21 nt, synthetic construct
  source 1..21: mol_type = other RNA
cctccccaccgccagtgtcct

SEQ ID NO: 48645 - RNA, 21 nt, synthetic construct
  source 1..21: mol_type = other RNA
gcctctacctggacaaccact

SEQ ID NO: 48646 - RNA, 21 nt, synthetic construct
  source 1..21: mol_type = other RNA
cctctacctggacaaccacta

SEQ ID NO: 48647 - RNA, 21 nt, synthetic construct
  source 1..21: mol_type = other RNA
agctctgccgcgcccggggag

SEQ ID NO: 48648 - RNA, 21 nt, synthetic construct
  source 1..21: mol_type = other RNA
gtttccttcgtgcctgtggac

SEQ ID NO: 48649 - RNA, 21 nt, synthetic construct
  source 1..21: mol_type = other RNA
tacacccatcccctcttcctc

SEQ ID NO: 48650 - RNA, 21 nt, synthetic construct
  source 1..21: mol_type = other RNA
ccaccacacccacggccacca

SEQ ID NO: 48651 - RNA, 21 nt, synthetic construct
  source 1..21: mol_type = other RNA
ccagcaacacagtgactccct

SEQ ID NO: 48652 - RNA, 21 nt, synthetic construct
  source 1..21: mol_type = other RNA
ccaccacacccacggccacca

SEQ ID NO: 48653 - RNA, 21 nt, synthetic construct
  source 1..21: mol_type = other RNA
cacccacagtcatcagctcca

SEQ ID NO: 48654 - RNA, 21 nt, synthetic construct
  source 1..21: mol_type = other RNA
ccaccacacccacggccacca

SEQ ID NO: 48655 - RNA, 21 nt, synthetic construct
  source 1..21: mol_type = other RNA
ccaccacacccacggccacca

SEQ ID NO: 48656 - RNA, 21 nt, synthetic construct
  source 1..21: mol_type = other RNA
ccaccacacccacggccacca

SEQ ID NO: 48657 - RNA, 21 nt, synthetic construct
  source 1..21: mol_type = other RNA
cacccacaaccaccacaccca

SEQ ID NO: 48658 - RNA, 21 nt, synthetic construct
  source 1..21: mol_type = other RNA
acaacacccatcaccccagtg

SEQ ID NO: 48659 - RNA, 21 nt, synthetic construct
  source 1..21: mol_type = other RNA
ctaggaaccagagcccacagc

SEQ ID NO: 48660 - RNA, 21 nt, synthetic construct
  source 1..21: mol_type = other RNA
catcctgcacacctacaccca

SEQ ID NO: 48661 - RNA, 21 nt, synthetic construct
  source 1..21: mol_type = other RNA
ggatccacggccaccccgacc

SEQ ID NO: 48662 - RNA, 21 nt, synthetic construct
  source 1..21: mol_type = other RNA
caaagccactccctcctccag

SEQ ID NO: 48663 - RNA, 21 nt, synthetic construct
  source 1..21: mol_type = other RNA
caaagccactccctcctccag

SEQ ID NO: 48664 - RNA, 21 nt, synthetic construct
  source 1..21: mol_type = other RNA
aggaccagatcctcttcaacg

SEQ ID NO: 48665 - RNA, 21 nt, synthetic construct
  source 1..21: mol_type = other RNA
ccaggactactgtggggacaa

SEQ ID NO: 48666 - RNA, 21 nt, synthetic construct
  source 1..21: mol_type = other RNA
ggacttcaacggcctcccggc

SEQ ID NO: 48667 - RNA, 21 nt, synthetic construct
  source 1..21: mol_type = other RNA
tgccccttgttctgtgacttc

SEQ ID NO: 48668 - RNA, 21 nt, synthetic construct
  source 1..21: mol_type = other RNA
gccaccacaactggggccacc

SEQ ID NO: 48669 - RNA, 21 nt, synthetic construct
  source 1..21: mol_type = other RNA
caccccagggaccacctggat

SEQ ID NO: 48670 - RNA, 21 nt, synthetic construct
  source 1..21: mol_type = other RNA
ccagttccatgtccaccccct

SEQ ID NO: 48671 - RNA, 21 nt, synthetic construct
  source 1..21: mol_type = other RNA
caccccagggaccacctggat

SEQ ID NO: 48672 - RNA, 21 nt, synthetic construct
  source 1..21: mol_type = other RNA
ccctcctctactccagagact

SEQ ID NO: 48673 - RNA, 21 nt, synthetic construct
  source 1..21: mol_type = other RNA
caccccagggaccacctggat

SEQ ID NO: 48674 - RNA, 21 nt, synthetic construct
  source 1..21: mol_type = other RNA
caccccagggaccacctggat

SEQ ID NO: 48675 - RNA, 21 nt, synthetic construct
  source 1..21: mol_type = other RNA
caccccagggaccacctggat

SEQ ID NO: 48676 - RNA, 21 nt, synthetic construct
  source 1..21: mol_type = other RNA
acctcctctactccagagacc

SEQ ID NO: 48677 - RNA, 21 nt, synthetic construct
  source 1..21: mol_type = other RNA
caccccagggaccacctggat

SEQ ID NO: 48678 - RNA, 21 nt, synthetic construct
  source 1..21: mol_type = other RNA
atctcagcctctacctggaca

SEQ ID NO: 48679 - RNA, 21 nt, synthetic construct
  source 1..21: mol_type = other RNA
tctcagcctctacctggacaa

SEQ ID NO: 48680 - RNA, 21 nt, synthetic construct
  source 1..21: mol_type = other RNA
ctgcccccagagcctgcctgt

SEQ ID NO: 48681 - RNA, 21 nt, synthetic construct
  source 1..21: mol_type = other RNA
tccccccacccgtgccagccc

SEQ ID NO: 48682 - RNA, 21 nt, synthetic construct
  source 1..21: mol_type = other RNA
cactggcctcctggtggagca

SEQ ID NO: 48683 - RNA, 21 nt, synthetic construct
  source 1..21: mol_type = other RNA
ggggacttcaacggcctcccg

SEQ ID NO: 48684 - RNA, 21 nt, synthetic construct
  source 1..21: mol_type = other RNA
gacgccctggcacccaaggac

SEQ ID NO: 48685 - RNA, 21 nt, synthetic construct
  source 1..21: mol_type = other RNA
cgccctggcacccaaggaccc

SEQ ID NO: 48686 - RNA, 21 nt, synthetic construct
  source 1..21: mol_type = other RNA
ggcaccgcccagagcccggcc

SEQ ID NO: 48687 - RNA, 21 nt, synthetic construct
  source 1..21: mol_type = other RNA
cgtttgaaaacctgaggcaga

SEQ ID NO: 48688 - RNA, 21 nt, synthetic construct
  source 1..21: mol_type = other RNA
ccacatccacccttccaacac

SEQ ID NO: 48689 - RNA, 21 nt, synthetic construct
  source 1..21: mol_type = other RNA
acgctcagcccttccagggac

SEQ ID NO: 48690 - RNA, 21 nt, synthetic construct
  source 1..21: mol_type = other RNA
cctccagcccagggacggcac

SEQ ID NO: 48691 - RNA, 21 nt, synthetic construct
  source 1..21: mol_type = other RNA
gaccacccacacacccccagt

SEQ ID NO: 48692 - RNA, 21 nt, synthetic construct
  source 1..21: mol_type = other RNA
atcttgggcaccacccacatc

SEQ ID NO: 48693 - RNA, 21 nt, synthetic construct
  source 1..21: mol_type = other RNA
agccttccacggtgacttccc

SEQ ID NO: 48694 - RNA, 21 nt, synthetic construct
  source 1..21: mol_type = other RNA
gccttccacggtgacttccca

SEQ ID NO: 48695 - RNA, 21 nt, synthetic construct
  source 1..21: mol_type = other RNA
ccgtcctccaccccagggacc

SEQ ID NO: 48696 - RNA, 21 nt, synthetic construct
  source 1..21: mol_type = other RNA
cctccagcccagggacggcac

SEQ ID NO: 48697 - RNA, 21 nt, synthetic construct
  source 1..21: mol_type = other RNA
ggggaccacccacacccccac

SEQ ID NO: 48698 - RNA, 21 nt, synthetic construct
  source 1..21: mol_type = other RNA
gaccacccacacacccccagt

SEQ ID NO: 48699 - RNA, 21 nt, synthetic construct
  source 1..21: mol_type = other RNA
tacacccatcccctccttcac

SEQ ID NO: 48700 - RNA, 21 nt, synthetic construct
  source 1..21: mol_type = other RNA
ccgtcctccaccccagggacc

SEQ ID NO: 48701 - RNA, 21 nt, synthetic construct
  source 1..21: mol_type = other RNA
cctccagcccagggacggcac

SEQ ID NO: 48702 - RNA, 21 nt, synthetic construct
  source 1..21: mol_type = other RNA
gaccacccacacacccccagt

SEQ ID NO: 48703 - RNA, 21 nt, synthetic construct
  source 1..21: mol_type = other RNA
atcttgggcaccacccacatc

SEQ ID NO: 48704 - RNA, 21 nt, synthetic construct
  source 1..21: mol_type = other RNA
agccttccacggtgacttccc

SEQ ID NO: 48705 - RNA, 21 nt, synthetic construct
  source 1..21: mol_type = other RNA
gccttccacggtgacttccca

SEQ ID NO: 48706 - RNA, 21 nt, synthetic construct
  source 1..21: mol_type = other RNA
ggatcctcacaaagctgacca

SEQ ID NO: 48707 - RNA, 21 nt, synthetic construct
  source 1..21: mol_type = other RNA
ccgtcctccaccccagggacc

SEQ ID NO: 48708 - RNA, 21 nt, synthetic construct
  source 1..21: mol_type = other RNA
cctccagcccagggacggcac

SEQ ID NO: 48709 - RNA, 21 nt, synthetic construct
  source 1..21: mol_type = other RNA
ggggaccacccacacccccac

SEQ ID NO: 48710 - RNA, 21 nt, synthetic construct
  source 1..21: mol_type = other RNA
gaccacccacacacccccagt

SEQ ID NO: 48711 - RNA, 21 nt, synthetic construct
  source 1..21: mol_type = other RNA
ccgtcctccaccccagggacc

SEQ ID NO: 48712 - RNA, 21 nt, synthetic construct
  source 1..21: mol_type = other RNA
ccgtcctccaccccagggacc

SEQ ID NO: 48713 - RNA, 21 nt, synthetic construct
  source 1..21: mol_type = other RNA
cctccagcccagggacggcac

SEQ ID NO: 48714 - RNA, 21 nt, synthetic construct
  source 1..21: mol_type = other RNA
caacacccatcaccccagtgc

SEQ ID NO: 48715 - RNA, 21 nt, synthetic construct
  source 1..21: mol_type = other RNA
ccaccacacccatgtccacca

SEQ ID NO: 48716 - RNA, 21 nt, synthetic construct
  source 1..21: mol_type = other RNA
caccacacccatgtccaccat

SEQ ID NO: 48717 - RNA, 21 nt, synthetic construct
  source 1..21: mol_type = other RNA
gcgcctgtcccacctccccac

SEQ ID NO: 48718 - RNA, 21 nt, synthetic construct
  source 1..21: mol_type = other RNA
catggtgcatgggaaggagga

SEQ ID NO: 48719 - RNA, 21 nt, synthetic construct
  source 1..21: mol_type = other RNA
acctcacctgcccacccacca

SEQ ID NO: 48720 - RNA, 21 nt, synthetic construct
  source 1..21: mol_type = other RNA
ccacctgcccccagagcctgc

SEQ ID NO: 48721 - RNA, 21 nt, synthetic construct
  source 1..21: mol_type = other RNA
gtcccaccttccgctgcagac

SEQ ID NO: 48722 - RNA, 21 nt, synthetic construct
  source 1..21: mol_type = other RNA
ccccagaagggtgaggggcca

SEQ ID NO: 48723 - RNA, 21 nt, synthetic construct
  source 1..21: mol_type = other RNA
tcctggagaggtggtgcacga

SEQ ID NO: 48724 - RNA, 21 nt, synthetic construct
  source 1..21: mol_type = other RNA
aagcccctgccctgtgacgcc

SEQ ID NO: 48725 - RNA, 21 nt, synthetic construct
  source 1..21: mol_type = other RNA
ccgcggaactggaggtgccct

SEQ ID NO: 48726 - RNA, 21 nt, synthetic construct
  source 1..21: mol_type = other RNA
agggcatttggacagtttttc

SEQ ID NO: 48727 - RNA, 21 nt, synthetic construct
  source 1..21: mol_type = other RNA
ccctccctgatgtcactggga

SEQ ID NO: 48728 - RNA, 21 nt, synthetic construct
  source 1..21: mol_type = other RNA
cccaacaacaatggcaacctc

SEQ ID NO: 48729 - RNA, 21 nt, synthetic construct
  source 1..21: mol_type = other RNA
cctggaactccagccacaacg

SEQ ID NO: 48730 - RNA, 21 nt, synthetic construct
  source 1..21: mol_type = other RNA
tcctggaactccagccacaac

SEQ ID NO: 48731 - RNA, 21 nt, synthetic construct
  source 1..21: mol_type = other RNA
ccaccagcaacacagtgactc

SEQ ID NO: 48732 - RNA, 21 nt, synthetic construct
  source 1..21: mol_type = other RNA
cacagtgactccctcctctgc

SEQ ID NO: 48733 - RNA, 21 nt, synthetic construct
  source 1..21: mol_type = other RNA
cacagtgactccctcctctgc

SEQ ID NO: 48734 - RNA, 21 nt, synthetic construct
  source 1..21: mol_type = other RNA
cacagtgactccctcctctgc

SEQ ID NO: 48735 - RNA, 21 nt, synthetic construct
  source 1..21: mol_type = other RNA
ttccaccccaggaacagctca

SEQ ID NO: 48736 - RNA, 21 nt, synthetic construct
  source 1..21: mol_type = other RNA
cacagtgactccctcctctgc

SEQ ID NO: 48737 - RNA, 21 nt, synthetic construct
  source 1..21: mol_type = other RNA
cccagctcgtccaccgtgggg

SEQ ID NO: 48738 - RNA, 21 nt, synthetic construct
  source 1..21: mol_type = other RNA
accaccctgagacccactggc

SEQ ID NO: 48739 - RNA, 21 nt, synthetic construct
  source 1..21: mol_type = other RNA
cgccagggcaggagtccatct

SEQ ID NO: 48740 - RNA, 21 nt, synthetic construct
  source 1..21: mol_type = other RNA
gtgccgacagcagcttcaccg

SEQ ID NO: 48741 - RNA, 21 nt, synthetic construct
  source 1..21: mol_type = other RNA
ctcttccaccccaggaacagc

SEQ ID NO: 48742 - RNA, 21 nt, synthetic construct
  source 1..21: mol_type = other RNA
gtactcccccatcactgatca

SEQ ID NO: 48743 - RNA, 21 nt, synthetic construct
  source 1..21: mol_type = other RNA
tctacctggacaaccactact

SEQ ID NO: 48744 - RNA, 21 nt, synthetic construct
  source 1..21: mol_type = other RNA
atcctgtggcaccagggctgc

SEQ ID NO: 48745 - RNA, 21 nt, synthetic construct
  source 1..21: mol_type = other RNA
cgctgcccttgccggccggca

SEQ ID NO: 48746 - RNA, 21 nt, synthetic construct
  source 1..21: mol_type = other RNA
ccaggacagagacgacaatga

SEQ ID NO: 48747 - RNA, 21 nt, synthetic construct
  source 1..21: mol_type = other RNA
cagtcaccagctccaaagcca

SEQ ID NO: 48748 - RNA, 21 nt, synthetic construct
  source 1..21: mol_type = other RNA
cagtcaccagctccaaagcca

SEQ ID NO: 48749 - RNA, 21 nt, synthetic construct
  source 1..21: mol_type = other RNA
cagtcaccagctccaaagcca

SEQ ID NO: 48750 - RNA, 21 nt, synthetic construct
  source 1..21: mol_type = other RNA
cagtcaccagctccaaagcca

SEQ ID NO: 48751 - RNA, 21 nt, synthetic construct
  source 1..21: mol_type = other RNA
acatgcagcaccaggagtgtg

SEQ ID NO: 48752 - RNA, 21 nt, synthetic construct
  source 1..21: mol_type = other RNA
gcggtggcgagagggccgggt

SEQ ID NO: 48753 - RNA, 21 nt, synthetic construct
  source 1..21: mol_type = other RNA
cagtgtggctgctacgacaag

SEQ ID NO: 48754 - RNA, 21 nt, synthetic construct
  source 1..21: mol_type = other RNA
cgcccaggacagagacgacaa

SEQ ID NO: 48755 - RNA, 21 nt, synthetic construct
  source 1..21: mol_type = other RNA
gaacagctccccctcccaaag

SEQ ID NO: 48756 - RNA, 21 nt, synthetic construct
  source 1..21: mol_type = other RNA
acagtcaccagctccaaagcc

SEQ ID NO: 48757 - RNA, 21 nt, synthetic construct
  source 1..21: mol_type = other RNA
tgagaagcacagccaccacac

SEQ ID NO: 48758 - RNA, 21 nt, synthetic construct
  source 1..21: mol_type = other RNA
gggcatcttgggcaccaccca

SEQ ID NO: 48759 - RNA, 21 nt, synthetic construct
  source 1..21: mol_type = other RNA
acagtcaccagctccaaagcc

SEQ ID NO: 48760 - RNA, 21 nt, synthetic construct
  source 1..21: mol_type = other RNA
tgagaagcacagccaccacac

SEQ ID NO: 48761 - RNA, 21 nt, synthetic construct
  source 1..21: mol_type = other RNA
tccagcccagggacggcacgc

SEQ ID NO: 48762 - RNA, 21 nt, synthetic construct
  source 1..21: mol_type = other RNA
gaacagctccccctcccaaag

SEQ ID NO: 48763 - RNA, 21 nt, synthetic construct
  source 1..21: mol_type = other RNA
ccaccatgtccacaatccacc

SEQ ID NO: 48764 - RNA, 21 nt, synthetic construct
  source 1..21: mol_type = other RNA
tgagaagcacagccaccacac

SEQ ID NO: 48765 - RNA, 21 nt, synthetic construct
  source 1..21: mol_type = other RNA
gcgttacagccatcccctctt

SEQ ID NO: 48766 - RNA, 21 nt, synthetic construct
  source 1..21: mol_type = other RNA
gggcatcttgggcaccaccca

SEQ ID NO: 48767 - RNA, 21 nt, synthetic construct
  source 1..21: mol_type = other RNA
acagtcaccagctccaaagcc

SEQ ID NO: 48768 - RNA, 21 nt, synthetic construct
  source 1..21: mol_type = other RNA
tgagaagcacagccaccacac

SEQ ID NO: 48769 - RNA, 21 nt, synthetic construct
  source 1..21: mol_type = other RNA
tccagcccagggacggcacgc

SEQ ID NO: 48770 - RNA, 21 nt, synthetic construct
  source 1..21: mol_type = other RNA
gaacagctccccctcccaaag

SEQ ID NO: 48771 - RNA, 21 nt, synthetic construct
  source 1..21: mol_type = other RNA
ccaccatgtccacaatccacc

SEQ ID NO: 48772 - RNA, 21 nt, synthetic construct
  source 1..21: mol_type = other RNA
ccaccagttccacgtccaccc

SEQ ID NO: 48773 - RNA, 21 nt, synthetic construct
  source 1..21: mol_type = other RNA
acagtcaccagctccaaagcc

SEQ ID NO: 48774 - RNA, 21 nt, synthetic construct
  source 1..21: mol_type = other RNA
tgagaagcacagccaccacac

SEQ ID NO: 48775 - RNA, 21 nt, synthetic construct
  source 1..21: mol_type = other RNA
ccaccatgtccacaatccaca

SEQ ID NO: 48776 - RNA, 21 nt, synthetic construct
  source 1..21: mol_type = other RNA
acagctcacacccccaaagtg

SEQ ID NO: 48777 - RNA, 21 nt, synthetic construct
  source 1..21: mol_type = other RNA
cgtcaccttcaatggccaagt

SEQ ID NO: 48778 - RNA, 21 nt, synthetic construct
  source 1..21: mol_type = other RNA
catgcccaccacagccgctct

SEQ ID NO: 48779 - RNA, 21 nt, synthetic construct
  source 1..21: mol_type = other RNA
cccttccctgccacatgtgta

SEQ ID NO: 48780 - RNA, 21 nt, synthetic construct
  source 1..21: mol_type = other RNA
gtggcgagagggccgggtggg

SEQ ID NO: 48781 - RNA, 21 nt, synthetic construct
  source 1..21: mol_type = other RNA
ggcagagagggtaccaggtat

SEQ ID NO: 48782 - RNA, 21 nt, synthetic construct
  source 1..21: mol_type = other RNA
ccctccctgcccgtccccgtc

SEQ ID NO: 48783 - RNA, 21 nt, synthetic construct
  source 1..21: mol_type = other RNA
cggacacctgccccttgttct

SEQ ID NO: 48784 - RNA, 21 nt, synthetic construct
  source 1..21: mol_type = other RNA
gccacacccagcaagacccgc

SEQ ID NO: 48785 - RNA, 21 nt, synthetic construct
  source 1..21: mol_type = other RNA
gccacacccagcaagacccgc

SEQ ID NO: 48786 - RNA, 21 nt, synthetic construct
  source 1..21: mol_type = other RNA
gccacacccagcaagacccgc

SEQ ID NO: 48787 - RNA, 21 nt, synthetic construct
  source 1..21: mol_type = other RNA
cacggccaccacaaccagggc

SEQ ID NO: 48788 - RNA, 21 nt, synthetic construct
  source 1..21: mol_type = other RNA
gccacacccagcaagacccgc

SEQ ID NO: 48789 - RNA, 21 nt, synthetic construct
  source 1..21: mol_type = other RNA
catcccctcctccaccctgtg

SEQ ID NO: 48790 - RNA, 21 nt, synthetic construct
  source 1..21: mol_type = other RNA
ccacggccacacccagcaaga

SEQ ID NO: 48791 - RNA, 21 nt, synthetic construct
  source 1..21: mol_type = other RNA
ccacggccacacccagcaaga

SEQ ID NO: 48792 - RNA, 21 nt, synthetic construct
  source 1..21: mol_type = other RNA
cagaccacagcagccactacg

SEQ ID NO: 48793 - RNA, 21 nt, synthetic construct
  source 1..21: mol_type = other RNA
ccacggccacacccagcaaga

SEQ ID NO: 48794 - RNA, 21 nt, synthetic construct
  source 1..21: mol_type = other RNA
cgctgtcctcgccctcccctg

SEQ ID NO: 48795 - RNA, 21 nt, synthetic construct
  source 1..21: mol_type = other RNA
ctgaccacagcagccactaca

SEQ ID NO: 48796 - RNA, 21 nt, synthetic construct
  source 1..21: mol_type = other RNA
tccagagccactccctcctcc

SEQ ID NO: 48797 - RNA, 21 nt, synthetic construct
  source 1..21: mol_type = other RNA
ccacacacgggcggtccctgc

SEQ ID NO: 48798 - RNA, 21 nt, synthetic construct
  source 1..21: mol_type = other RNA
ctgaccacagcagccactaca

SEQ ID NO: 48799 - RNA, 21 nt, synthetic construct
  source 1..21: mol_type = other RNA
cccggggctgaccagggctcc

SEQ ID NO: 48800 - RNA, 21 nt, synthetic construct
  source 1..21: mol_type = other RNA
tgcctggtcagagtggctgga

SEQ ID NO: 48801 - RNA, 21 nt, synthetic construct
  source 1..21: mol_type = other RNA
tgcctggtcagagtggctgga

SEQ ID NO: 48802 - RNA, 21 nt, synthetic construct
  source 1..21: mol_type = other RNA
tgcctggtcagagtggctgga

SEQ ID NO: 48803 - RNA, 21 nt, synthetic construct
  source 1..21: mol_type = other RNA
tgcctggtcagagtggctgga

SEQ ID NO: 48804 - RNA, 21 nt, synthetic construct
  source 1..21: mol_type = other RNA
acccccagcgcgcgcagctct

SEQ ID NO: 48805 - RNA, 21 nt, synthetic construct
  source 1..21: mol_type = other RNA
gcggggcccacatctccacct

SEQ ID NO: 48806 - RNA, 21 nt, synthetic construct
  source 1..21: mol_type = other RNA
cgagcttcttcatcgtggtgc

SEQ ID NO: 48807 - RNA, 21 nt, synthetic construct
  source 1..21: mol_type = other RNA
gcccggggctgaccagggctc

SEQ ID NO: 48808 - RNA, 21 nt, synthetic construct
  source 1..21: mol_type = other RNA
ccaccacacccacaaccagag

SEQ ID NO: 48809 - RNA, 21 nt, synthetic construct
  source 1..21: mol_type = other RNA
accacaactgtggccactggt

SEQ ID NO: 48810 - RNA, 21 nt, synthetic construct
  source 1..21: mol_type = other RNA
gggccacaccacggccacctc

SEQ ID NO: 48811 - RNA, 21 nt, synthetic construct
  source 1..21: mol_type = other RNA
ccaccacacccacaaccagag

SEQ ID NO: 48812 - RNA, 21 nt, synthetic construct
  source 1..21: mol_type = other RNA
accacaactgtggccactggt

SEQ ID NO: 48813 - RNA, 21 nt, synthetic construct
  source 1..21: mol_type = other RNA
gcagcacagtgactccctcct

SEQ ID NO: 48814 - RNA, 21 nt, synthetic construct
  source 1..21: mol_type = other RNA
gatcctcacagagcagaccac

SEQ ID NO: 48815 - RNA, 21 nt, synthetic construct
  source 1..21: mol_type = other RNA
ccaccacacccacaaccagag

SEQ ID NO: 48816 - RNA, 21 nt, synthetic construct
  source 1..21: mol_type = other RNA
accacaactgtggccactggt

SEQ ID NO: 48817 - RNA, 21 nt, synthetic construct
  source 1..21: mol_type = other RNA
gcagcacagtgactccctcct

SEQ ID NO: 48818 - RNA, 21 nt, synthetic construct
  source 1..21: mol_type = other RNA
accacaactgtggccactggt

SEQ ID NO: 48819 - RNA, 21 nt, synthetic construct
  source 1..21: mol_type = other RNA
gcagcacagtgactccctcct

SEQ ID NO: 48820 - RNA, 21 nt, synthetic construct
  source 1..21: mol_type = other RNA
gggccacaccacggccacctc

SEQ ID NO: 48821 - RNA, 21 nt, synthetic construct
  source 1..21: mol_type = other RNA
accacaactgtggccactggt

SEQ ID NO: 48822 - RNA, 21 nt, synthetic construct
  source 1..21: mol_type = other RNA
tgaggctgagggtggagtcca

SEQ ID NO: 48823 - RNA, 21 nt, synthetic construct
  source 1..21: mol_type = other RNA
gctgccaggagaggcgggtcc

SEQ ID NO: 48824 - RNA, 21 nt, synthetic construct
  source 1..21: mol_type = other RNA
gcccaggaggccactgctgtc

SEQ ID NO: 48825 - RNA, 21 nt, synthetic construct
  source 1..21: mol_type = other RNA
ctgctgcccaccccgtgggtg

SEQ ID NO: 48826 - RNA, 21 nt, synthetic construct
  source 1..21: mol_type = other RNA
aggggtcagcatcccaaagcc

SEQ ID NO: 48827 - RNA, 21 nt, synthetic construct
  source 1..21: mol_type = other RNA
tcaatgggcagcgggaggagc

SEQ ID NO: 48828 - RNA, 21 nt, synthetic construct
  source 1..21: mol_type = other RNA
agccgcactggcctcctggtg

SEQ ID NO: 48829 - RNA, 21 nt, synthetic construct
  source 1..21: mol_type = other RNA
gactacatcaaggtcagcatc

SEQ ID NO: 48830 - RNA, 21 nt, synthetic construct
  source 1..21: mol_type = other RNA
acccgaagtgcccacccagcc

SEQ ID NO: 48831 - RNA, 21 nt, synthetic construct
  source 1..21: mol_type = other RNA
tcgcagactgggtccagctca

SEQ ID NO: 48832 - RNA, 21 nt, synthetic construct
  source 1..21: mol_type = other RNA
accatgtccacagccacaccc

SEQ ID NO: 48833 - RNA, 21 nt, synthetic construct
  source 1..21: mol_type = other RNA
tcagcacaaccaccacaccca

SEQ ID NO: 48834 - RNA, 21 nt, synthetic construct
  source 1..21: mol_type = other RNA
aaccacggtggtgaccatggg

SEQ ID NO: 48835 - RNA, 21 nt, synthetic construct
  source 1..21: mol_type = other RNA
tttggcctggtctgcaggaac

SEQ ID NO: 48836 - RNA, 21 nt, synthetic construct
  source 1..21: mol_type = other RNA
ctcctccacccaggcaactgc

SEQ ID NO: 48837 - RNA, 21 nt, synthetic construct
  source 1..21: mol_type = other RNA
accatgtccacagccacaccc

SEQ ID NO: 48838 - RNA, 21 nt, synthetic construct
  source 1..21: mol_type = other RNA
tcagcacaaccaccacaccca

SEQ ID NO: 48839 - RNA, 21 nt, synthetic construct
  source 1..21: mol_type = other RNA
aaccacggtggtgaccatggg

SEQ ID NO: 48840 - RNA, 21 nt, synthetic construct
  source 1..21: mol_type = other RNA
tttggcctggtctgcaggaac

SEQ ID NO: 48841 - RNA, 21 nt, synthetic construct
  source 1..21: mol_type = other RNA
accatgtccacagccacaccc

SEQ ID NO: 48842 - RNA, 21 nt, synthetic construct
  source 1..21: mol_type = other RNA
tcagcacaaccaccacaccca

SEQ ID NO: 48843 - RNA, 21 nt, synthetic construct
  source 1..21: mol_type = other RNA
tttggcctggtctgcaggaac

SEQ ID NO: 48844 - RNA, 21 nt, synthetic construct
  source 1..21: mol_type = other RNA
ctcctccacccaggcaactgc

SEQ ID NO: 48845 - RNA, 21 nt, synthetic construct
  source 1..21: mol_type = other RNA
accatgtccacagccacaccc

SEQ ID NO: 48846 - RNA, 21 nt, synthetic construct
  source 1..21: mol_type = other RNA
tcagcacaaccaccacaccca

SEQ ID NO: 48847 - RNA, 21 nt, synthetic construct
  source 1..21: mol_type = other RNA
tttggcctggtctgcaggaac

SEQ ID NO: 48848 - RNA, 21 nt, synthetic construct
  source 1..21: mol_type = other RNA
ctcctccacccaggcaactgc

SEQ ID NO: 48849 - RNA, 21 nt, synthetic construct
  source 1..21: mol_type = other RNA
accatgtccacagccacaccc

SEQ ID NO: 48850 - RNA, 21 nt, synthetic construct
  source 1..21: mol_type = other RNA
tcagcacaaccaccacaccca

SEQ ID NO: 48851 - RNA, 21 nt, synthetic construct
  source 1..21: mol_type = other RNA
acaatccacacctcctctact

SEQ ID NO: 48852 - RNA, 21 nt, synthetic construct
  source 1..21: mol_type = other RNA
cagatgtgtccagctgcaggg

SEQ ID NO: 48853 - RNA, 21 nt, synthetic construct
  source 1..21: mol_type = other RNA
tggcacaccccccactgccag

SEQ ID NO: 48854 - RNA, 21 nt, synthetic construct
  source 1..21: mol_type = other RNA
ccatgcctgctgcagggtaac

SEQ ID NO: 48855 - RNA, 21 nt, synthetic construct
  source 1..21: mol_type = other RNA
gagccgagctgggagaatgca

SEQ ID NO: 48856 - RNA, 21 nt, synthetic construct
  source 1..21: mol_type = other RNA
ccaccttcgccgcctgccgct

SEQ ID NO: 48857 - RNA, 21 nt, synthetic construct
  source 1..21: mol_type = other RNA
ccaccaccgccaccacacctg

SEQ ID NO: 48858 - RNA, 21 nt, synthetic construct
  source 1..21: mol_type = other RNA
ccttccacggtgacttcccac

SEQ ID NO: 48859 - RNA, 21 nt, synthetic construct
  source 1..21: mol_type = other RNA
ccaccaccgccaccacacctg

SEQ ID NO: 48860 - RNA, 21 nt, synthetic construct
  source 1..21: mol_type = other RNA
gacaagcacagccaccaaatc

SEQ ID NO: 48861 - RNA, 21 nt, synthetic construct
  source 1..21: mol_type = other RNA
ccaccaccgccaccacacctg

SEQ ID NO: 48862 - RNA, 21 nt, synthetic construct
  source 1..21: mol_type = other RNA
ccttccacggtgacttcccac

SEQ ID NO: 48863 - RNA, 21 nt, synthetic construct
  source 1..21: mol_type = other RNA
ccaccaccgccaccacacctg

SEQ ID NO: 48864 - RNA, 21 nt, synthetic construct
  source 1..21: mol_type = other RNA
gacaagcacagccaccaaatc

SEQ ID NO: 48865 - RNA, 21 nt, synthetic construct
  source 1..21: mol_type = other RNA
gatggcggagggctgcttctg

SEQ ID NO: 48866 - RNA, 21 nt, synthetic construct
  source 1..21: mol_type = other RNA
tgcaggaaccggaggtgggag

SEQ ID NO: 48867 - RNA, 21 nt, synthetic construct
  source 1..21: mol_type = other RNA
ccccccagcagtccccacacg

SEQ ID NO: 48868 - RNA, 21 nt, synthetic construct
  source 1..21: mol_type = other RNA
tcccccagcagtccccacacg

SEQ ID NO: 48869 - RNA, 21 nt, synthetic construct
  source 1..21: mol_type = other RNA
ccccccagcagtccccacacg

SEQ ID NO: 48870 - RNA, 21 nt, synthetic construct
  source 1..21: mol_type = other RNA
tcccccagcagtccccacacg

SEQ ID NO: 48871 - RNA, 21 nt, synthetic construct
  source 1..21: mol_type = other RNA
cagcacggccaccacacccgc

SEQ ID NO: 48872 - RNA, 21 nt, synthetic construct
  source 1..21: mol_type = other RNA
ctccaccctgtggaccacgtg

SEQ ID NO: 48873 - RNA, 21 nt, synthetic construct
  source 1..21: mol_type = other RNA
cccagagcctgcctgtgtgcc

SEQ ID NO: 48874 - RNA, 21 nt, synthetic construct
  source 1..21: mol_type = other RNA
tcaacggcctcccggccttca

SEQ ID NO: 48875 - RNA, 21 nt, synthetic construct
  source 1..21: mol_type = other RNA
cccagcgcgcgcagctctgcg

SEQ ID NO: 48876 - RNA, 21 nt, synthetic construct
  source 1..21: mol_type = other RNA
cctgctctgtgcagggcgggg

SEQ ID NO: 48877 - RNA, 21 nt, synthetic construct
  source 1..21: mol_type = other RNA
gctaagctgcctgggagcctc

SEQ ID NO: 48878 - RNA, 21 nt, synthetic construct
  source 1..21: mol_type = other RNA
acctggactgcagcaacagct

SEQ ID NO: 48879 - RNA, 21 nt, synthetic construct
  source 1..21: mol_type = other RNA
gatcctccaagaggggacctt

SEQ ID NO: 48880 - RNA, 21 nt, synthetic construct
  source 1..21: mol_type = other RNA
aacagagtcccccgctctgtc

SEQ ID NO: 48881 - RNA, 21 nt, synthetic construct
  source 1..21: mol_type = other RNA
cgcagactgggtccagctcag

SEQ ID NO: 48882 - RNA, 21 nt, synthetic construct
  source 1..21: mol_type = other RNA
gacgcctgcaggctccacaga

SEQ ID NO: 48883 - RNA, 21 nt, synthetic construct
  source 1..21: mol_type = other RNA
ccctcacagccacccacgctg

SEQ ID NO: 48884 - RNA, 21 nt, synthetic construct
  source 1..21: mol_type = other RNA
tccaccctgagaacagctccc

SEQ ID NO: 48885 - RNA, 21 nt, synthetic construct
  source 1..21: mol_type = other RNA
ccaccacggccaccacaccca

SEQ ID NO: 48886 - RNA, 21 nt, synthetic construct
  source 1..21: mol_type = other RNA
ctgagaagcacagccaccaca

SEQ ID NO: 48887 - RNA, 21 nt, synthetic construct
  source 1..21: mol_type = other RNA
cctccctgggcaccacctgga

SEQ ID NO: 48888 - RNA, 21 nt, synthetic construct
  source 1..21: mol_type = other RNA
atgtccacagccacaccctcc

SEQ ID NO: 48889 - RNA, 21 nt, synthetic construct
  source 1..21: mol_type = other RNA
acaccctcctccactccagag

SEQ ID NO: 48890 - RNA, 21 nt, synthetic construct
  source 1..21: mol_type = other RNA
ggggccaccggctctgtggcc

SEQ ID NO: 48891 - RNA, 21 nt, synthetic construct
  source 1..21: mol_type = other RNA
tccagtgtggatcagcacaac

SEQ ID NO: 48892 - RNA, 21 nt, synthetic construct
  source 1..21: mol_type = other RNA
accaccacacccacaaccaga

SEQ ID NO: 48893 - RNA, 21 nt, synthetic construct
  source 1..21: mol_type = other RNA
tgcagccaccagcaacacagt

SEQ ID NO: 48894 - RNA, 21 nt, synthetic construct
  source 1..21: mol_type = other RNA
agggaccacccacacaccccc

SEQ ID NO: 48895 - RNA, 21 nt, synthetic construct
  source 1..21: mol_type = other RNA
cagagccttccacggtgactt

SEQ ID NO: 48896 - RNA, 21 nt, synthetic construct
  source 1..21: mol_type = other RNA
tggactttggcctggtctgca

SEQ ID NO: 48897 - RNA, 21 nt, synthetic construct
  source 1..21: mol_type = other RNA
ctgagaagcacagccaccaca

SEQ ID NO: 48898 - RNA, 21 nt, synthetic construct
  source 1..21: mol_type = other RNA
cctccctgggcaccacctgga

SEQ ID NO: 48899 - RNA, 21 nt, synthetic construct
  source 1..21: mol_type = other RNA
atgtccacagccacaccctcc

SEQ ID NO: 48900 - RNA, 21 nt, synthetic construct
  source 1..21: mol_type = other RNA
acaccctcctccactccagag

SEQ ID NO: 48901 - RNA, 21 nt, synthetic construct
  source 1..21: mol_type = other RNA
ggggccaccggctctgtggcc

SEQ ID NO: 48902 - RNA, 21 nt, synthetic construct
  source 1..21: mol_type = other RNA
tccagtgtggatcagcacaac

SEQ ID NO: 48903 - RNA, 21 nt, synthetic construct
  source 1..21: mol_type = other RNA
accaccacacccacaaccaga

SEQ ID NO: 48904 - RNA, 21 nt, synthetic construct
  source 1..21: mol_type = other RNA
agggaccacccacacaccccc

SEQ ID NO: 48905 - RNA, 21 nt, synthetic construct
  source 1..21: mol_type = other RNA
tggactttggcctggtctgca

SEQ ID NO: 48906 - RNA, 21 nt, synthetic construct
  source 1..21: mol_type = other RNA
cacttcctcctccagtccaag

SEQ ID NO: 48907 - RNA, 21 nt, synthetic construct
  source 1..21: mol_type = other RNA
gctgacaagcacagccaccaa

SEQ ID NO: 48908 - RNA, 21 nt, synthetic construct
  source 1..21: mol_type = other RNA
cccatcccctccttcaccctt

SEQ ID NO: 48909 - RNA, 21 nt, synthetic construct
  source 1..21: mol_type = other RNA
gccaccatgtccacaatccac

SEQ ID NO: 48910 - RNA, 21 nt, synthetic construct
  source 1..21: mol_type = other RNA
acacctccacagtgctgacca

SEQ ID NO: 48911 - RNA, 21 nt, synthetic construct
  source 1..21: mol_type = other RNA
caactgcagccactggcccca

SEQ ID NO: 48912 - RNA, 21 nt, synthetic construct
  source 1..21: mol_type = other RNA
gcctcctccacccgggcaact

SEQ ID NO: 48913 - RNA, 21 nt, synthetic construct
  source 1..21: mol_type = other RNA
ctgagaagcacagccaccaca

SEQ ID NO: 48914 - RNA, 21 nt, synthetic construct
  source 1..21: mol_type = other RNA
atgtccacagccacaccctcc

SEQ ID NO: 48915 - RNA, 21 nt, synthetic construct
  source 1..21: mol_type = other RNA
agggccaccggctctgtggcc

SEQ ID NO: 48916 - RNA, 21 nt, synthetic construct
  source 1..21: mol_type = other RNA
tccagtgtggatcagcacaac

SEQ ID NO: 48917 - RNA, 21 nt, synthetic construct
  source 1..21: mol_type = other RNA
accaccacacccacaaccaga

SEQ ID NO: 48918 - RNA, 21 nt, synthetic construct
  source 1..21: mol_type = other RNA
agggaccacccacacaccccc

SEQ ID NO: 48919 - RNA, 21 nt, synthetic construct
  source 1..21: mol_type = other RNA
cagagccttccacggtgactt

SEQ ID NO: 48920 - RNA, 21 nt, synthetic construct
  source 1..21: mol_type = other RNA
tggactttggcctggtctgca

SEQ ID NO: 48921 - RNA, 21 nt, synthetic construct
  source 1..21: mol_type = other RNA
ctgagaagcacagccaccaca

SEQ ID NO: 48922 - RNA, 21 nt, synthetic construct
  source 1..21: mol_type = other RNA
cctccctgggcaccacctgga

SEQ ID NO: 48923 - RNA, 21 nt, synthetic construct
  source 1..21: mol_type = other RNA
atgtccacagccacaccctcc

SEQ ID NO: 48924 - RNA, 21 nt, synthetic construct
  source 1..21: mol_type = other RNA
acaccctcctccactccagag

SEQ ID NO: 48925 - RNA, 21 nt, synthetic construct
  source 1..21: mol_type = other RNA
agggccaccggctctgtggcc

SEQ ID NO: 48926 - RNA, 21 nt, synthetic construct
  source 1..21: mol_type = other RNA
tccagtgtggatcagcacaac

SEQ ID NO: 48927 - RNA, 21 nt, synthetic construct
  source 1..21: mol_type = other RNA
accaccacacccacaaccagt

SEQ ID NO: 48928 - RNA, 21 nt, synthetic construct
  source 1..21: mol_type = other RNA
agggaccacccacacaccccc

SEQ ID NO: 48929 - RNA, 21 nt, synthetic construct
  source 1..21: mol_type = other RNA
tggactttggcctggtctgca

SEQ ID NO: 48930 - RNA, 21 nt, synthetic construct
  source 1..21: mol_type = other RNA
accagcccggccaccacaccc

SEQ ID NO: 48931 - RNA, 21 nt, synthetic construct
  source 1..21: mol_type = other RNA
cacttcctcctccagtccaag

SEQ ID NO: 48932 - RNA, 21 nt, synthetic construct
  source 1..21: mol_type = other RNA
gctgacaagcacagccaccaa

SEQ ID NO: 48933 - RNA, 21 nt, synthetic construct
  source 1..21: mol_type = other RNA
cccctcctccacccttgggac

SEQ ID NO: 48934 - RNA, 21 nt, synthetic construct
  source 1..21: mol_type = other RNA
gccaccatgtccacaatccac

SEQ ID NO: 48935 - RNA, 21 nt, synthetic construct
  source 1..21: mol_type = other RNA
acacctccacagtgctgacca

SEQ ID NO: 48936 - RNA, 21 nt, synthetic construct
  source 1..21: mol_type = other RNA
caactgcagccactggcccca

SEQ ID NO: 48937 - RNA, 21 nt, synthetic construct
  source 1..21: mol_type = other RNA
ctgagaagcacagccaccaca

SEQ ID NO: 48938 - RNA, 21 nt, synthetic construct
  source 1..21: mol_type = other RNA
cctccctgggcaccacctgga

SEQ ID NO: 48939 - RNA, 21 nt, synthetic construct
  source 1..21: mol_type = other RNA
atgtccacagccacaccctcc

SEQ ID NO: 48940 - RNA, 21 nt, synthetic construct
  source 1..21: mol_type = other RNA
acaccctcctccactccagag

SEQ ID NO: 48941 - RNA, 21 nt, synthetic construct
  source 1..21: mol_type = other RNA
ggggccaccggctctgtggcc

SEQ ID NO: 48942 - RNA, 21 nt, synthetic construct
  source 1..21: mol_type = other RNA
tccagtgtggatcagcacaac

SEQ ID NO: 48943 - RNA, 21 nt, synthetic construct
  source 1..21: mol_type = other RNA
accaccacacccacaaccagt

SEQ ID NO: 48944 - RNA, 21 nt, synthetic construct
  source 1..21: mol_type = other RNA
cacttcctcctccagtccaag

SEQ ID NO: 48945 - RNA, 21 nt, synthetic construct
  source 1..21: mol_type = other RNA
tcctccaccctgtggaccacg

SEQ ID NO: 48946 - RNA, 21 nt, synthetic construct
  source 1..21: mol_type = other RNA
cctccaccctgtggaccacgt

SEQ ID NO: 48947 - RNA, 21 nt, synthetic construct
  source 1..21: mol_type = other RNA
tccaccatgtccacaatccac

SEQ ID NO: 48948 - RNA, 21 nt, synthetic construct
  source 1..21: mol_type = other RNA
acacctccacagtgctgacca

SEQ ID NO: 48949 - RNA, 21 nt, synthetic construct
  source 1..21: mol_type = other RNA
ggcatttggacagtttttctc

SEQ ID NO: 48950 - RNA, 21 nt, synthetic construct
  source 1..21: mol_type = other RNA
ctggacccaaagcctgtggcc

SEQ ID NO: 48951 - RNA, 21 nt, synthetic construct
  source 1..21: mol_type = other RNA
tgcatctgcagcatgtggggc

SEQ ID NO: 48952 - RNA, 21 nt, synthetic construct
  source 1..21: mol_type = other RNA
atcgtcctcactgtcaccatg

SEQ ID NO: 48953 - RNA, 21 nt, synthetic construct
  source 1..21: mol_type = other RNA
acagcctgccacctgcaactc

SEQ ID NO: 48954 - RNA, 21 nt, synthetic construct
  source 1..21: mol_type = other RNA
tgctgcccaccccgtgggtga

SEQ ID NO: 48955 - RNA, 21 nt, synthetic construct
  source 1..21: mol_type = other RNA
ttggccttgcccctccctgat

SEQ ID NO: 48956 - RNA, 21 nt, synthetic construct
  source 1..21: mol_type = other RNA
ccaggtcagagaggggtcagc

SEQ ID NO: 48957 - RNA, 21 nt, synthetic construct
  source 1..21: mol_type = other RNA
ggggtcagcatcccaaagccc

SEQ ID NO: 48958 - RNA, 21 nt, synthetic construct
  source 1..21: mol_type = other RNA
cccagttttgcaaataaaccc

SEQ ID NO: 48959 - RNA, 21 nt, synthetic construct
  source 1..21: mol_type = other RNA
atgcagggcacaccatggatg

SEQ ID NO: 48960 - RNA, 21 nt, synthetic construct
  source 1..21: mol_type = other RNA
tgggtcagcaactgccagtcc

SEQ ID NO: 48961 - RNA, 21 nt, synthetic construct
  source 1..21: mol_type = other RNA
ggggacttcccacaccccagc

SEQ ID NO: 48962 - RNA, 21 nt, synthetic construct
  source 1..21: mol_type = other RNA
ggggacttcccacaccccagc

SEQ ID NO: 48963 - RNA, 21 nt, synthetic construct
  source 1..21: mol_type = other RNA
cttcacagtcaccccctcctc

SEQ ID NO: 48964 - RNA, 21 nt, synthetic construct
  source 1..21: mol_type = other RNA
cccatccccccagtgctgacc

SEQ ID NO: 48965 - RNA, 21 nt, synthetic construct
  source 1..21: mol_type = other RNA
cccatccccccagtgctgacc

SEQ ID NO: 48966 - RNA, 21 nt, synthetic construct
  source 1..21: mol_type = other RNA
ctggcacccaaggacccctgc

SEQ ID NO: 48967 - RNA, 21 nt, synthetic construct
  source 1..21: mol_type = other RNA
ggccaccggctctgtggccac

SEQ ID NO: 48968 - RNA, 21 nt, synthetic construct
  source 1..21: mol_type = other RNA
ggccaccggctctgtggccac

SEQ ID NO: 48969 - RNA, 21 nt, synthetic construct
  source 1..21: mol_type = other RNA
ggccaccggctctgtggccac

SEQ ID NO: 48970 - RNA, 21 nt, synthetic construct
  source 1..21: mol_type = other RNA
ggccaccggctctgtggccac

SEQ ID NO: 48971 - RNA, 21 nt, synthetic construct
  source 1..21: mol_type = other RNA
ggccaccggctctgtggccac

SEQ ID NO: 48972 - RNA, 21 nt, synthetic construct
  source 1..21: mol_type = other RNA
gtggcaccccgcgctccgtgc

SEQ ID NO: 48973 - RNA, 21 nt, synthetic construct
  source 1..21: mol_type = other RNA
cccctcaacatgcagcaccag

SEQ ID NO: 48974 - RNA, 21 nt, synthetic construct
  source 1..21: mol_type = other RNA
actgagtccactggatccacg

SEQ ID NO: 48975 - RNA, 21 nt, synthetic construct
  source 1..21: mol_type = other RNA
tcacaaagctgaccacaacag

SEQ ID NO: 48976 - RNA, 21 nt, synthetic construct
  source 1..21: mol_type = other RNA
actgagtccactggatccacg

SEQ ID NO: 48977 - RNA, 21 nt, synthetic construct
  source 1..21: mol_type = other RNA
cagggcacaccatggatggcg

SEQ ID NO: 48978 - RNA, 21 nt, synthetic construct
  source 1..21: mol_type = other RNA
tgctccaacccccagcgcgcg

SEQ ID NO: 48979 - RNA, 21 nt, synthetic construct
  source 1..21: mol_type = other RNA
agcaacacagtgactccctcc

SEQ ID NO: 48980 - RNA, 21 nt, synthetic construct
  source 1..21: mol_type = other RNA
accacgacaagggccaccagt

SEQ ID NO: 48981 - RNA, 21 nt, synthetic construct
  source 1..21: mol_type = other RNA
accacgacaagggccaccagt

SEQ ID NO: 48982 - RNA, 21 nt, synthetic construct
  source 1..21: mol_type = other RNA
caagcacagccacaaaatcca

SEQ ID NO: 48983 - RNA, 21 nt, synthetic construct
  source 1..21: mol_type = other RNA
actgtcaccatggtgcatggg

SEQ ID NO: 48984 - RNA, 21 nt, synthetic construct
  source 1..21: mol_type = other RNA
ggctcccccacacacccgtgg

SEQ ID NO: 48985 - RNA, 21 nt, synthetic construct
  source 1..21: mol_type = other RNA
gccggagcgcccgcgcagcac

SEQ ID NO: 48986 - RNA, 21 nt, synthetic construct
  source 1..21: mol_type = other RNA
ggtaactcagggctgaggtcg

SEQ ID NO: 48987 - RNA, 21 nt, synthetic construct
  source 1..21: mol_type = other RNA
ccacacctcctctactccaga

SEQ ID NO: 48988 - RNA, 21 nt, synthetic construct
  source 1..21: mol_type = other RNA
aaccagacctgtggcctgtgt

SEQ ID NO: 48989 - RNA, 21 nt, synthetic construct
  source 1..21: mol_type = other RNA
acagcctggacttcggccacc

SEQ ID NO: 48990 - RNA, 21 nt, synthetic construct
  source 1..21: mol_type = other RNA
ggcatcttgggcaccacccac

SEQ ID NO: 48991 - RNA, 21 nt, synthetic construct
  source 1..21: mol_type = other RNA
acagcctggacttcggccacc

SEQ ID NO: 48992 - RNA, 21 nt, synthetic construct
  source 1..21: mol_type = other RNA
acagcctggacttcggccacc

SEQ ID NO: 48993 - RNA, 21 nt, synthetic construct
  source 1..21: mol_type = other RNA
ggcatcttgggcaccacccac

SEQ ID NO: 48994 - RNA, 21 nt, synthetic construct
  source 1..21: mol_type = other RNA
acagcctggacttcggccacc

SEQ ID NO: 48995 - RNA, 21 nt, synthetic construct
  source 1..21: mol_type = other RNA
tgcccctccctgatgtcactg

SEQ ID NO: 48996 - RNA, 21 nt, synthetic construct
  source 1..21: mol_type = other RNA
gtgttctctgagcactgccgc

SEQ ID NO: 48997 - RNA, 21 nt, synthetic construct
  source 1..21: mol_type = other RNA
cctgtgctggctgacatcgag

SEQ ID NO: 48998 - RNA, 21 nt, synthetic construct
  source 1..21: mol_type = other RNA
cggccccaggtaccaccacct

SEQ ID NO: 48999 - RNA, 21 nt, synthetic construct
  source 1..21: mol_type = other RNA
acaatccacccctcctccact

SEQ ID NO: 49000 - RNA, 21 nt, synthetic construct
  source 1..21: mol_type = other RNA
acaatccacccctcctccact

SEQ ID NO: 49001 - RNA, 21 nt, synthetic construct
  source 1..21: mol_type = other RNA
caccatgtccacagccacacc

SEQ ID NO: 49002 - RNA, 21 nt, synthetic construct
  source 1..21: mol_type = other RNA
caccatgtccacagccacacc

SEQ ID NO: 49003 - RNA, 21 nt, synthetic construct
  source 1..21: mol_type = other RNA
caccatgtccacagccacacc

SEQ ID NO: 49004 - RNA, 21 nt, synthetic construct
  source 1..21: mol_type = other RNA
caccatgtccacagccacacc

SEQ ID NO: 49005 - RNA, 21 nt, synthetic construct
  source 1..21: mol_type = other RNA
caccatgtccacagccacacc

SEQ ID NO: 49006 - RNA, 21 nt, synthetic construct
  source 1..21: mol_type = other RNA
gttggctctggcggccatgct

SEQ ID NO: 49007 - RNA, 21 nt, synthetic construct
  source 1..21: mol_type = other RNA
gtggatgcctgccagcccact

SEQ ID NO: 49008 - RNA, 21 nt, synthetic construct
  source 1..21: mol_type = other RNA
ccagctcaggccccgtgacgg

SEQ ID NO: 49009 - RNA, 21 nt, synthetic construct
  source 1..21: mol_type = other RNA
tgtccacctctcaggccgaga

SEQ ID NO: 49010 - RNA, 21 nt, synthetic construct
  source 1..21: mol_type = other RNA
tgctgaccagcacggccacca

SEQ ID NO: 49011 - RNA, 21 nt, synthetic construct
  source 1..21: mol_type = other RNA
tgctgaccagcacggccacca

SEQ ID NO: 49012 - RNA, 21 nt, synthetic construct
  source 1..21: mol_type = other RNA
tgctgaccagcacggccacca

SEQ ID NO: 49013 - RNA, 21 nt, synthetic construct
  source 1..21: mol_type = other RNA
cacagctggaggggatggcgg

SEQ ID NO: 49014 - RNA, 21 nt, synthetic construct
  source 1..21: mol_type = other RNA
gcccctccctgatgtcactgg

SEQ ID NO: 49015 - RNA, 21 nt, synthetic construct
  source 1..21: mol_type = other RNA
ggacccgctgcccttgccggc

SEQ ID NO: 49016 - RNA, 21 nt, synthetic construct
  source 1..21: mol_type = other RNA
ctcagcggggtggtggaggcc

SEQ ID NO: 49017 - RNA, 21 nt, synthetic construct
  source 1..21: mol_type = other RNA
actgcacacccagtggcatcc

SEQ ID NO: 49018 - RNA, 21 nt, synthetic construct
  source 1..21: mol_type = other RNA
cggcaccatcatcaggaaggc

SEQ ID NO: 49019 - RNA, 21 nt, synthetic construct
  source 1..21: mol_type = other RNA
cccggcctgggaggcggagac

SEQ ID NO: 49020 - RNA, 21 nt, synthetic construct
  source 1..21: mol_type = other RNA
gtcaccccctcggccccaggt

SEQ ID NO: 49021 - RNA, 21 nt, synthetic construct
  source 1..21: mol_type = other RNA
acagagcagaccacagcagcc

SEQ ID NO: 49022 - RNA, 21 nt, synthetic construct
  source 1..21: mol_type = other RNA
cccacacctccacagtgctga

SEQ ID NO: 49023 - RNA, 21 nt, synthetic construct
  source 1..21: mol_type = other RNA
cctcaactccagggacaactc

SEQ ID NO: 49024 - RNA, 21 nt, synthetic construct
  source 1..21: mol_type = other RNA
cccacacctccacagtgctga

SEQ ID NO: 49025 - RNA, 21 nt, synthetic construct
  source 1..21: mol_type = other RNA
cccacacctccacagtgctga

SEQ ID NO: 49026 - RNA, 21 nt, synthetic construct
  source 1..21: mol_type = other RNA
gtgcgagtgcatctgcagcat

SEQ ID NO: 49027 - RNA, 21 nt, synthetic construct
  source 1..21: mol_type = other RNA
agtcttccaggcccggctgcc

SEQ ID NO: 49028 - RNA, 21 nt, synthetic construct
  source 1..21: mol_type = other RNA
gtgggtcagcaactgccagtc

SEQ ID NO: 49029 - RNA, 21 nt, synthetic construct
  source 1..21: mol_type = other RNA
cagccatcctgcacacctaca

SEQ ID NO: 49030 - RNA, 21 nt, synthetic construct
  source 1..21: mol_type = other RNA
gcaccgcttccaaagagccgc

SEQ ID NO: 49031 - RNA, 21 nt, synthetic construct
  source 1..21: mol_type = other RNA
gaggggcagtctgtgagcagc

SEQ ID NO: 49032 - RNA, 21 nt, synthetic construct
  source 1..21: mol_type = other RNA
cttgcccctccctgatgtcac

SEQ ID NO: 49033 - RNA, 21 nt, synthetic construct
  source 1..21: mol_type = other RNA
gcacggacgaggagggcatct

SEQ ID NO: 49034 - RNA, 21 nt, synthetic construct
  source 1..21: mol_type = other RNA
tgcctgccagcccacttgccg

SEQ ID NO: 49035 - RNA, 21 nt, synthetic construct
  source 1..21: mol_type = other RNA
accccgtcctccaccccggga

SEQ ID NO: 49036 - RNA, 21 nt, synthetic construct
  source 1..21: mol_type = other RNA
ttccacgtccaccccctcctc

SEQ ID NO: 49037 - RNA, 21 nt, synthetic construct
  source 1..21: mol_type = other RNA
ctgccactccatcatcaaccc

SEQ ID NO: 49038 - RNA, 21 nt, synthetic construct
  source 1..21: mol_type = other RNA
gcacacccagtggcatccagt

SEQ ID NO: 49039 - RNA, 21 nt, synthetic construct
  source 1..21: mol_type = other RNA
tcccacaccctagcagcaacc

SEQ ID NO: 49040 - RNA, 21 nt, synthetic construct
  source 1..21: mol_type = other RNA
acagccaccggctccaccacc

SEQ ID NO: 49041 - RNA, 21 nt, synthetic construct
  source 1..21: mol_type = other RNA
accacacccgcagccaccagc

SEQ ID NO: 49042 - RNA, 21 nt, synthetic construct
  source 1..21: mol_type = other RNA
acccgcacccctgcagtgctc

SEQ ID NO: 49043 - RNA, 21 nt, synthetic construct
  source 1..21: mol_type = other RNA
ccccaccgccagtgtcctccg

SEQ ID NO: 49044 - RNA, 21 nt, synthetic construct
  source 1..21: mol_type = other RNA
aggaggagggcgactgctgtc

SEQ ID NO: 49045 - RNA, 21 nt, synthetic construct
  source 1..21: mol_type = other RNA
cctgcccgtccccgtcccccc

SEQ ID NO: 49046 - RNA, 21 nt, synthetic construct
  source 1..21: mol_type = other RNA
cccgtccccgtccccccaccc

SEQ ID NO: 49047 - RNA, 21 nt, synthetic construct
  source 1..21: mol_type = other RNA
gcactggcctcctggtggagc

SEQ ID NO: 49048 - RNA, 21 nt, synthetic construct
  source 1..21: mol_type = other RNA
gcatctgccaccgcaccctgc

SEQ ID NO: 49049 - RNA, 21 nt, synthetic construct
  source 1..21: mol_type = other RNA
ggctgcacctgccccgcgggc

SEQ ID NO: 49050 - RNA, 21 nt, synthetic construct
  source 1..21: mol_type = other RNA
ccccatggtgtacctggactg

SEQ ID NO: 49051 - RNA, 21 nt, synthetic construct
  source 1..21: mol_type = other RNA
tgtgtgcacaacgaggccacc

SEQ ID NO: 49052 - RNA, 21 nt, synthetic construct
  source 1..21: mol_type = other RNA
aacacctgcacctgcaggaac

SEQ ID NO: 49053 - RNA, 21 nt, synthetic construct
  source 1..21: mol_type = other RNA
accacccacgggaccttccgc

SEQ ID NO: 49054 - RNA, 21 nt, synthetic construct
  source 1..21: mol_type = other RNA
cctggcacccaaggacccctg

SEQ ID NO: 49055 - RNA, 21 nt, synthetic construct
  source 1..21: mol_type = other RNA
agcaggagggcgtcttcaaga

SEQ ID NO: 49056 - RNA, 21 nt, synthetic construct
  source 1..21: mol_type = other RNA
cacgctcagcccttccaggga

SEQ ID NO: 49057 - RNA, 21 nt, synthetic construct
  source 1..21: mol_type = other RNA
cgctcagcccttccagggacg

SEQ ID NO: 49058 - RNA, 21 nt, synthetic construct
  source 1..21: mol_type = other RNA
agccacccacgctggccccaa

SEQ ID NO: 49059 - RNA, 21 nt, synthetic construct
  source 1..21: mol_type = other RNA
cgtccactggatccacggcca

SEQ ID NO: 49060 - RNA, 21 nt, synthetic construct
  source 1..21: mol_type = other RNA
caccagctccaaagccactcc

SEQ ID NO: 49061 - RNA, 21 nt, synthetic construct
  source 1..21: mol_type = other RNA
ttcctccctgggcaccacctg

SEQ ID NO: 49062 - RNA, 21 nt, synthetic construct
  source 1..21: mol_type = other RNA
cccctcctccatcccggggac

SEQ ID NO: 49063 - RNA, 21 nt, synthetic construct
  source 1..21: mol_type = other RNA
cagtgactccctcctctgccc

SEQ ID NO: 49064 - RNA, 21 nt, synthetic construct
  source 1..21: mol_type = other RNA
cccacatcacagagccttcca

SEQ ID NO: 49065 - RNA, 21 nt, synthetic construct
  source 1..21: mol_type = other RNA
gactccagccctttccagccc

SEQ ID NO: 49066 - RNA, 21 nt, synthetic construct
  source 1..21: mol_type = other RNA
atccgtgcggccggaggggcc

SEQ ID NO: 49067 - RNA, 21 nt, synthetic construct
  source 1..21: mol_type = other RNA
agtccactggatccacggcca

SEQ ID NO: 49068 - RNA, 21 nt, synthetic construct
  source 1..21: mol_type = other RNA
caccagctccaaagccactcc

SEQ ID NO: 49069 - RNA, 21 nt, synthetic construct
  source 1..21: mol_type = other RNA
ccaaagccactcccttctcca

SEQ ID NO: 49070 - RNA, 21 nt, synthetic construct
  source 1..21: mol_type = other RNA
ctcctccctgggcaccacctg

SEQ ID NO: 49071 - RNA, 21 nt, synthetic construct
  source 1..21: mol_type = other RNA
cccctcctccatcccggggac

SEQ ID NO: 49072 - RNA, 21 nt, synthetic construct
  source 1..21: mol_type = other RNA
cagtgactccctcctctgccc

SEQ ID NO: 49073 - RNA, 21 nt, synthetic construct
  source 1..21: mol_type = other RNA
cccacatcacagagccttcca

SEQ ID NO: 49074 - RNA, 21 nt, synthetic construct
  source 1..21: mol_type = other RNA
cacaccagggccacctccagg

SEQ ID NO: 49075 - RNA, 21 nt, synthetic construct
  source 1..21: mol_type = other RNA
atccgtgcggccggaggggcc

SEQ ID NO: 49076 - RNA, 21 nt, synthetic construct
  source 1..21: mol_type = other RNA
ccacgaccaccacaaccaggg

SEQ ID NO: 49077 - RNA, 21 nt, synthetic construct
  source 1..21: mol_type = other RNA
cccctcctccatcccggggac

SEQ ID NO: 49078 - RNA, 21 nt, synthetic construct
  source 1..21: mol_type = other RNA
cagtgactccctcctctgccc

SEQ ID NO: 49079 - RNA, 21 nt, synthetic construct
  source 1..21: mol_type = other RNA
cccacatcacagagccttcca

SEQ ID NO: 49080 - RNA, 21 nt, synthetic construct
  source 1..21: mol_type = other RNA
atccgtgcggccggaggggca

SEQ ID NO: 49081 - RNA, 21 nt, synthetic construct
  source 1..21: mol_type = other RNA
agtccactggatccacggcca

SEQ ID NO: 49082 - RNA, 21 nt, synthetic construct
  source 1..21: mol_type = other RNA
caccagctccaaagccactcc

SEQ ID NO: 49083 - RNA, 21 nt, synthetic construct
  source 1..21: mol_type = other RNA
ccaaagccactcccttctcca

SEQ ID NO: 49084 - RNA, 21 nt, synthetic construct
  source 1..21: mol_type = other RNA
ctcctccctgggcaccacctg

SEQ ID NO: 49085 - RNA, 21 nt, synthetic construct
  source 1..21: mol_type = other RNA
cttccaccccaggaacagctc

SEQ ID NO: 49086 - RNA, 21 nt, synthetic construct
  source 1..21: mol_type = other RNA
cagtgactccctcctctgccc

SEQ ID NO: 49087 - RNA, 21 nt, synthetic construct
  source 1..21: mol_type = other RNA
cccacatcacagagccttcca

SEQ ID NO: 49088 - RNA, 21 nt, synthetic construct
  source 1..21: mol_type = other RNA
atccgtgcggccggaggggcc

SEQ ID NO: 49089 - RNA, 21 nt, synthetic construct
  source 1..21: mol_type = other RNA
cgtccactggatccacggcca

SEQ ID NO: 49090 - RNA, 21 nt, synthetic construct
  source 1..21: mol_type = other RNA
caccagctccaaagccactcc

SEQ ID NO: 49091 - RNA, 21 nt, synthetic construct
  source 1..21: mol_type = other RNA
ctcctccctgggcaccacctg

SEQ ID NO: 49092 - RNA, 21 nt, synthetic construct
  source 1..21: mol_type = other RNA
cccctcctccatcccggggac

SEQ ID NO: 49093 - RNA, 21 nt, synthetic construct
  source 1..21: mol_type = other RNA
caccagctccaaagccacttc

SEQ ID NO: 49094 - RNA, 21 nt, synthetic construct
  source 1..21: mol_type = other RNA
ctcactgagctgaccacaaca

SEQ ID NO: 49095 - RNA, 21 nt, synthetic construct
  source 1..21: mol_type = other RNA
ctgagctgaccacaacagcca

SEQ ID NO: 49096 - RNA, 21 nt, synthetic construct
  source 1..21: mol_type = other RNA
ggttccacggccaccgcctcc

SEQ ID NO: 49097 - RNA, 21 nt, synthetic construct
  source 1..21: mol_type = other RNA
gtgaccaccatggccactatg

SEQ ID NO: 49098 - RNA, 21 nt, synthetic construct
  source 1..21: mol_type = other RNA
ccaccgtggggaccacccgca

SEQ ID NO: 49099 - RNA, 21 nt, synthetic construct
  source 1..21: mol_type = other RNA
tccggcaggtgaatgagacct

SEQ ID NO: 49100 - RNA, 21 nt, synthetic construct
  source 1..21: mol_type = other RNA
gctgcccccgcgccctcagca

SEQ ID NO: 49101 - RNA, 21 nt, synthetic construct
  source 1..21: mol_type = other RNA
aaggaggagggcctgatcctg

SEQ ID NO: 49102 - RNA, 21 nt, synthetic construct
  source 1..21: mol_type = other RNA
gtcttccaggcccggctgccc

SEQ ID NO: 49103 - RNA, 21 nt, synthetic construct
  source 1..21: mol_type = other RNA
acaccccccactgccagcccc

SEQ ID NO: 49104 - RNA, 21 nt, synthetic construct
  source 1..21: mol_type = other RNA
gctggaggggatggcggaggg

SEQ ID NO: 49105 - RNA, 21 nt, synthetic construct
  source 1..21: mol_type = other RNA
gtgcaggcctgcccctgcgtg

SEQ ID NO: 49106 - RNA, 21 nt, synthetic construct
  source 1..21: mol_type = other RNA
aggcctgcccctgcgtgggac

SEQ ID NO: 49107 - RNA, 21 nt, synthetic construct
  source 1..21: mol_type = other RNA
tcaggaggatgcctgcaacaa

SEQ ID NO: 49108 - RNA, 21 nt, synthetic construct
  source 1..21: mol_type = other RNA
caggaggatgcctgcaacaat

SEQ ID NO: 49109 - RNA, 21 nt, synthetic construct
  source 1..21: mol_type = other RNA
gcagaaccaccgagtcacccc

SEQ ID NO: 49110 - RNA, 21 nt, synthetic construct
  source 1..21: mol_type = other RNA
cgcgtgccggacgctggtgtt

SEQ ID NO: 49111 - RNA, 21 nt, synthetic construct
  source 1..21: mol_type = other RNA
gagctggatcccaaatacgcc

SEQ ID NO: 49112 - RNA, 21 nt, synthetic construct
  source 1..21: mol_type = other RNA
aatgcagggcacaccatggat

SEQ ID NO: 49113 - RNA, 21 nt, synthetic construct
  source 1..21: mol_type = other RNA
cctacgcccaggcctgccacg

SEQ ID NO: 49114 - RNA, 21 nt, synthetic construct
  source 1..21: mol_type = other RNA
gctctgtgatctgatgctgag

SEQ ID NO: 49115 - RNA, 21 nt, synthetic construct
  source 1..21: mol_type = other RNA
ccaccgcctgggtcccccact

SEQ ID NO: 49116 - RNA, 21 nt, synthetic construct
  source 1..21: mol_type = other RNA
agcgagctgtccacctctcag

SEQ ID NO: 49117 - RNA, 21 nt, synthetic construct
  source 1..21: mol_type = other RNA
agggcgccactcaggagtcct

SEQ ID NO: 49118 - RNA, 21 nt, synthetic construct
  source 1..21: mol_type = other RNA
gcccgtccccgtccccccacc

SEQ ID NO: 49119 - RNA, 21 nt, synthetic construct
  source 1..21: mol_type = other RNA
cccgctgcccttgccggccgg

SEQ ID NO: 49120 - RNA, 21 nt, synthetic construct
  source 1..21: mol_type = other RNA
ccgctgcccttgccggccggc

SEQ ID NO: 49121 - RNA, 21 nt, synthetic construct
  source 1..21: mol_type = other RNA
ctgagctgcggaagtgcggcc

SEQ ID NO: 49122 - RNA, 21 nt, synthetic construct
  source 1..21: mol_type = other RNA
actcgggtggcgactgcgagt

SEQ ID NO: 49123 - RNA, 21 nt, synthetic construct
  source 1..21: mol_type = other RNA
tcgggtggcgactgcgagtgt

SEQ ID NO: 49124 - RNA, 21 nt, synthetic construct
  source 1..21: mol_type = other RNA
gcaccacctggacccgcctat

SEQ ID NO: 49125 - RNA, 21 nt, synthetic construct
  source 1..21: mol_type = other RNA
tccagcccagggacggcactc

SEQ ID NO: 49126 - RNA, 21 nt, synthetic construct
  source 1..21: mol_type = other RNA
gactccctcctctgccctagg

SEQ ID NO: 49127 - RNA, 21 nt, synthetic construct
  source 1..21: mol_type = other RNA
gacgaccaccccgggccacac

SEQ ID NO: 49128 - RNA, 21 nt, synthetic construct
  source 1..21: mol_type = other RNA
gcaccacctggacccgcctat

SEQ ID NO: 49129 - RNA, 21 nt, synthetic construct
  source 1..21: mol_type = other RNA
gactccctcctctgccctagg

SEQ ID NO: 49130 - RNA, 21 nt, synthetic construct
  source 1..21: mol_type = other RNA
ccctgtcccccagcagtcccc

SEQ ID NO: 49131 - RNA, 21 nt, synthetic construct
  source 1..21: mol_type = other RNA
gacgaccaccccgggccacac

SEQ ID NO: 49132 - RNA, 21 nt, synthetic construct
  source 1..21: mol_type = other RNA
catggccaccatgtccacaat

SEQ ID NO: 49133 - RNA, 21 nt, synthetic construct
  source 1..21: mol_type = other RNA
tccagcccagggacggcactc

SEQ ID NO: 49134 - RNA, 21 nt, synthetic construct
  source 1..21: mol_type = other RNA
gactccctcctctgccctagg

SEQ ID NO: 49135 - RNA, 21 nt, synthetic construct
  source 1..21: mol_type = other RNA
gacgaccaccccgggccacac

SEQ ID NO: 49136 - RNA, 21 nt, synthetic construct
  source 1..21: mol_type = other RNA
gcaccacctggacccgcctat

SEQ ID NO: 49137 - RNA, 21 nt, synthetic construct
  source 1..21: mol_type = other RNA
acggtgaccccctcctccgtc

SEQ ID NO: 49138 - RNA, 21 nt, synthetic construct
  source 1..21: mol_type = other RNA
cccatcactgatcaccacggc

SEQ ID NO: 49139 - RNA, 21 nt, synthetic construct
  source 1..21: mol_type = other RNA
gactccctcctctgccctagg

SEQ ID NO: 49140 - RNA, 21 nt, synthetic construct
  source 1..21: mol_type = other RNA
ccctgtcccccagcagtcccc

SEQ ID NO: 49141 - RNA, 21 nt, synthetic construct
  source 1..21: mol_type = other RNA
gacgaccaccccgggccacac

SEQ ID NO: 49142 - RNA, 21 nt, synthetic construct
  source 1..21: mol_type = other RNA
gcaccacctggacccgcctat

SEQ ID NO: 49143 - RNA, 21 nt, synthetic construct
  source 1..21: mol_type = other RNA
tccagcccagggacggcactc

SEQ ID NO: 49144 - RNA, 21 nt, synthetic construct
  source 1..21: mol_type = other RNA
cggagccccccggcctgtgtg

SEQ ID NO: 49145 - RNA, 21 nt, synthetic construct
  source 1..21: mol_type = other RNA
ctggggcagacaggctggtcc

SEQ ID NO: 49146 - RNA, 21 nt, synthetic construct
  source 1..21: mol_type = other RNA
acctccacagtgcttaccacc

SEQ ID NO: 49147 - RNA, 21 nt, synthetic construct
  source 1..21: mol_type = other RNA
acctccacagtgcttaccacc

SEQ ID NO: 49148 - RNA, 21 nt, synthetic construct
  source 1..21: mol_type = other RNA
acctccacagtgcttaccacc

SEQ ID NO: 49149 - RNA, 21 nt, synthetic construct
  source 1..21: mol_type = other RNA
gaggccactgctgtctgagaa

SEQ ID NO: 49150 - RNA, 21 nt, synthetic construct
  source 1..21: mol_type = other RNA
cgatgggcttggcgcctgctt

SEQ ID NO: 49151 - RNA, 21 nt, synthetic construct
  source 1..21: mol_type = other RNA
cagaccaccacacccatggcc

SEQ ID NO: 49152 - RNA, 21 nt, synthetic construct
  source 1..21: mol_type = other RNA
cagccccgcagccccggtgtc

SEQ ID NO: 49153 - RNA, 21 nt, synthetic construct
  source 1..21: mol_type = other RNA
tccagtgctgacaagcacagc

SEQ ID NO: 49154 - RNA, 21 nt, synthetic construct
  source 1..21: mol_type = other RNA
tccagtgctgacaagcacagc

SEQ ID NO: 49155 - RNA, 21 nt, synthetic construct
  source 1..21: mol_type = other RNA
tccagtgctgacaagcacagc

SEQ ID NO: 49156 - RNA, 21 nt, synthetic construct
  source 1..21: mol_type = other RNA
atgcccacaacgccaggctga

SEQ ID NO: 49157 - RNA, 21 nt, synthetic construct
  source 1..21: mol_type = other RNA
gccgaacaccatggccaccac

SEQ ID NO: 49158 - RNA, 21 nt, synthetic construct
  source 1..21: mol_type = other RNA
ctacaactgcagccactggcc

SEQ ID NO: 49159 - RNA, 21 nt, synthetic construct
  source 1..21: mol_type = other RNA
ctacaactgcagccactggcc

SEQ ID NO: 49160 - RNA, 21 nt, synthetic construct
  source 1..21: mol_type = other RNA
cgagaccgaggtcaacatcac

SEQ ID NO: 49161 - RNA, 21 nt, synthetic construct
  source 1..21: mol_type = other RNA
catgaaaaccttgggcctcct

SEQ ID NO: 49162 - RNA, 21 nt, synthetic construct
  source 1..21: mol_type = other RNA
ggagtgggggctgcattgccg

SEQ ID NO: 49163 - RNA, 21 nt, synthetic construct
  source 1..21: mol_type = other RNA
gccaccatgtccacagccaca

SEQ ID NO: 49164 - RNA, 21 nt, synthetic construct
  source 1..21: mol_type = other RNA
gccaccatgtccacagccaca

SEQ ID NO: 49165 - RNA, 21 nt, synthetic construct
  source 1..21: mol_type = other RNA
cggggaccacccacaccccca

SEQ ID NO: 49166 - RNA, 21 nt, synthetic construct
  source 1..21: mol_type = other RNA
ctgcagccactggccccacgg

SEQ ID NO: 49167 - RNA, 21 nt, synthetic construct
  source 1..21: mol_type = other RNA
gccaccatgtccacagccaca

SEQ ID NO: 49168 - RNA, 21 nt, synthetic construct
  source 1..21: mol_type = other RNA
acacgggcggtccctgccccc

SEQ ID NO: 49169 - RNA, 21 nt, synthetic construct
  source 1..21: mol_type = other RNA
cacgggcggtccctgcccccc

SEQ ID NO: 49170 - RNA, 21 nt, synthetic construct
  source 1..21: mol_type = other RNA
gccaccatgtccacagccaca

SEQ ID NO: 49171 - RNA, 21 nt, synthetic construct
  source 1..21: mol_type = other RNA
cggggaccacccacaccccca

SEQ ID NO: 49172 - RNA, 21 nt, synthetic construct
  source 1..21: mol_type = other RNA
ctgcagccactggccccacgg

SEQ ID NO: 49173 - RNA, 21 nt, synthetic construct
  source 1..21: mol_type = other RNA
gccaccatgtccacagccaca

SEQ ID NO: 49174 - RNA, 21 nt, synthetic construct
  source 1..21: mol_type = other RNA
gccactatgcccacagccact

SEQ ID NO: 49175 - RNA, 21 nt, synthetic construct
  source 1..21: mol_type = other RNA
ccacccgcacccctgcagtgc

SEQ ID NO: 49176 - RNA, 21 nt, synthetic construct
  source 1..21: mol_type = other RNA
cttcaccgtgctggctgagct

SEQ ID NO: 49177 - RNA, 21 nt, synthetic construct
  source 1..21: mol_type = other RNA
acccagcaagacccgcacctc

SEQ ID NO: 49178 - RNA, 21 nt, synthetic construct
  source 1..21: mol_type = other RNA
acccagcaagacccgcacctc

SEQ ID NO: 49179 - RNA, 21 nt, synthetic construct
  source 1..21: mol_type = other RNA
acccagcaagacccgcacctc

SEQ ID NO: 49180 - RNA, 21 nt, synthetic construct
  source 1..21: mol_type = other RNA
acccagcaagacccgcacctc

SEQ ID NO: 49181 - RNA, 21 nt, synthetic construct
  source 1..21: mol_type = other RNA
caatcagcactgtgacattga

SEQ ID NO: 49182 - RNA, 21 nt, synthetic construct
  source 1..21: mol_type = other RNA
cggcgtgcttgtgtctgtgct

SEQ ID NO: 49183 - RNA, 21 nt, synthetic construct
  source 1..21: mol_type = other RNA
acccgctgcccttgccggccg

SEQ ID NO: 49184 - RNA, 21 nt, synthetic construct
  source 1..21: mol_type = other RNA
catgggggctgtgagtggcac

SEQ ID NO: 49185 - RNA, 21 nt, synthetic construct
  source 1..21: mol_type = other RNA
gcaggaaccgtgagcaggtgg

SEQ ID NO: 49186 - RNA, 21 nt, synthetic construct
  source 1..21: mol_type = other RNA
gcaggaaccgtgagcaggtgg

SEQ ID NO: 49187 - RNA, 21 nt, synthetic construct
  source 1..21: mol_type = other RNA
gcaggaaccgtgagcaggtgg

SEQ ID NO: 49188 - RNA, 21 nt, synthetic construct
  source 1..21: mol_type = other RNA
gcaggaaccgtgagcaggtgg

SEQ ID NO: 49189 - RNA, 21 nt, synthetic construct
  source 1..21: mol_type = other RNA
accacacccgtggccaccatg

SEQ ID NO: 49190 - RNA, 21 nt, synthetic construct
  source 1..21: mol_type = other RNA
actacatcaaggtcagcatcc

SEQ ID NO: 49191 - RNA, 21 nt, synthetic construct
  source 1..21: mol_type = other RNA
cggacacctgctccaaccccc

SEQ ID NO: 49192 - RNA, 21 nt, synthetic construct
  source 1..21: mol_type = other RNA
actgccccaagtcccagcgct

SEQ ID NO: 49193 - RNA, 21 nt, synthetic construct
  source 1..21: mol_type = other RNA
tcgtgcctgtggacggctgca

SEQ ID NO: 49194 - RNA, 21 nt, synthetic construct
  source 1..21: mol_type = other RNA
tgggagtgggggctgcattgc

SEQ ID NO: 49195 - RNA, 21 nt, synthetic construct
  source 1..21: mol_type = other RNA
tctccccctcctgcccggacg

SEQ ID NO: 49196 - RNA, 21 nt, synthetic construct
  source 1..21: mol_type = other RNA
agcccggcctgggaggcggag

SEQ ID NO: 49197 - RNA, 21 nt, synthetic construct
  source 1..21: mol_type = other RNA
gggcacatggcgcccctcaca

SEQ ID NO: 49198 - RNA, 21 nt, synthetic construct
  source 1..21: mol_type = other RNA
ctccaaagccactccctcctc

SEQ ID NO: 49199 - RNA, 21 nt, synthetic construct
  source 1..21: mol_type = other RNA
gggccaccggctctgtggcca

SEQ ID NO: 49200 - RNA, 21 nt, synthetic construct
  source 1..21: mol_type = other RNA
ccacggtgaccccctcctcca

SEQ ID NO: 49201 - RNA, 21 nt, synthetic construct
  source 1..21: mol_type = other RNA
accacccacacacccccagtg

SEQ ID NO: 49202 - RNA, 21 nt, synthetic construct
  source 1..21: mol_type = other RNA
tgggctgtgagccccagtgtg

SEQ ID NO: 49203 - RNA, 21 nt, synthetic construct
  source 1..21: mol_type = other RNA
gggccaccggctctgtggcca

SEQ ID NO: 49204 - RNA, 21 nt, synthetic construct
  source 1..21: mol_type = other RNA
ccacggtgaccccctcctcca

SEQ ID NO: 49205 - RNA, 21 nt, synthetic construct
  source 1..21: mol_type = other RNA
accacccacacacccccagtg

SEQ ID NO: 49206 - RNA, 21 nt, synthetic construct
  source 1..21: mol_type = other RNA
tgggctgtgagccccagtgtg

SEQ ID NO: 49207 - RNA, 21 nt, synthetic construct
  source 1..21: mol_type = other RNA
gccaccagttccaaagccact

SEQ ID NO: 49208 - RNA, 21 nt, synthetic construct
  source 1..21: mol_type = other RNA
gttccaaagccacttcctcct

SEQ ID NO: 49209 - RNA, 21 nt, synthetic construct
  source 1..21: mol_type = other RNA
ccacccttccagtgctgacaa

SEQ ID NO: 49210 - RNA, 21 nt, synthetic construct
  source 1..21: mol_type = other RNA
tcacagagctgaccacagcag

SEQ ID NO: 49211 - RNA, 21 nt, synthetic construct
  source 1..21: mol_type = other RNA
cacagagctgaccacagcagc

SEQ ID NO: 49212 - RNA, 21 nt, synthetic construct
  source 1..21: mol_type = other RNA
acagagctgaccacagcagcc

SEQ ID NO: 49213 - RNA, 21 nt, synthetic construct
  source 1..21: mol_type = other RNA
aactgcagccactggccccac

SEQ ID NO: 49214 - RNA, 21 nt, synthetic construct
  source 1..21: mol_type = other RNA
accacacccacagtcatcagc

SEQ ID NO: 49215 - RNA, 21 nt, synthetic construct
  source 1..21: mol_type = other RNA
gggccaccggctctgtggcca

SEQ ID NO: 49216 - RNA, 21 nt, synthetic construct
  source 1..21: mol_type = other RNA
ccacggtgaccccctcctcca

SEQ ID NO: 49217 - RNA, 21 nt, synthetic construct
  source 1..21: mol_type = other RNA
accacccacacacccccagtg

SEQ ID NO: 49218 - RNA, 21 nt, synthetic construct
  source 1..21: mol_type = other RNA
cacagccacacccagcaagac

SEQ ID NO: 49219 - RNA, 21 nt, synthetic construct
  source 1..21: mol_type = other RNA
gggccaccggctctgtggcca

SEQ ID NO: 49220 - RNA, 21 nt, synthetic construct
  source 1..21: mol_type = other RNA
caccacacccacaaccagtgg

SEQ ID NO: 49221 - RNA, 21 nt, synthetic construct
  source 1..21: mol_type = other RNA
ccacggtgaccccctcctccg

SEQ ID NO: 49222 - RNA, 21 nt, synthetic construct
  source 1..21: mol_type = other RNA
accacccacacacccccagtg

SEQ ID NO: 49223 - RNA, 21 nt, synthetic construct
  source 1..21: mol_type = other RNA
gccaccagttccaaagccact

SEQ ID NO: 49224 - RNA, 21 nt, synthetic construct
  source 1..21: mol_type = other RNA
gttccaaagccacttcctcct

SEQ ID NO: 49225 - RNA, 21 nt, synthetic construct
  source 1..21: mol_type = other RNA
ccacccttccagtgctgacaa

SEQ ID NO: 49226 - RNA, 21 nt, synthetic construct
  source 1..21: mol_type = other RNA
tcacagagctgaccacagcag

SEQ ID NO: 49227 - RNA, 21 nt, synthetic construct
  source 1..21: mol_type = other RNA
cacagagctgaccacagcagc

SEQ ID NO: 49228 - RNA, 21 nt, synthetic construct
  source 1..21: mol_type = other RNA
acagagctgaccacagcagcc

SEQ ID NO: 49229 - RNA, 21 nt, synthetic construct
  source 1..21: mol_type = other RNA
aactgcagccactggccccac

SEQ ID NO: 49230 - RNA, 21 nt, synthetic construct
  source 1..21: mol_type = other RNA
ctccaaagccactccctcctc

SEQ ID NO: 49231 - RNA, 21 nt, synthetic construct
  source 1..21: mol_type = other RNA
gggccaccggctctgtggcca

SEQ ID NO: 49232 - RNA, 21 nt, synthetic construct
  source 1..21: mol_type = other RNA
caccacacccacaaccagtgg

SEQ ID NO: 49233 - RNA, 21 nt, synthetic construct
  source 1..21: mol_type = other RNA
ccacggtgaccccctcctcca

SEQ ID NO: 49234 - RNA, 21 nt, synthetic construct
  source 1..21: mol_type = other RNA
ccagctccaaagccacttcct

SEQ ID NO: 49235 - RNA, 21 nt, synthetic construct
  source 1..21: mol_type = other RNA
gctccaaagccacttcctcct

SEQ ID NO: 49236 - RNA, 21 nt, synthetic construct
  source 1..21: mol_type = other RNA
ccacccttccagtgctgacaa

SEQ ID NO: 49237 - RNA, 21 nt, synthetic construct
  source 1..21: mol_type = other RNA
caactgcagccactggatcca

SEQ ID NO: 49238 - RNA, 21 nt, synthetic construct
  source 1..21: mol_type = other RNA
cctcaccaccctgagacccac

SEQ ID NO: 49239 - RNA, 21 nt, synthetic construct
  source 1..21: mol_type = other RNA
aatcagcactgtgacattgac

SEQ ID NO: 49240 - RNA, 21 nt, synthetic construct
  source 1..21: mol_type = other RNA
ggcacaccccccactgccagc

SEQ ID NO: 49241 - RNA, 21 nt, synthetic construct
  source 1..21: mol_type = other RNA
tgctgagccaggtctttgctg

SEQ ID NO: 49242 - RNA, 21 nt, synthetic construct
  source 1..21: mol_type = other RNA
aacccctgctgccccgagacg

SEQ ID NO: 49243 - RNA, 21 nt, synthetic construct
  source 1..21: mol_type = other RNA
ctgcctgtgtgcccgccaggg

SEQ ID NO: 49244 - RNA, 21 nt, synthetic construct
  source 1..21: mol_type = other RNA
catttgctgaccccacagcct

SEQ ID NO: 49245 - RNA, 21 nt, synthetic construct
  source 1..21: mol_type = other RNA
cctgctgccaggagaggcggg

SEQ ID NO: 49246 - RNA, 21 nt, synthetic construct
  source 1..21: mol_type = other RNA
cgtggatgagtgtggctgcac

SEQ ID NO: 49247 - RNA, 21 nt, synthetic construct
  source 1..21: mol_type = other RNA
gcccatggctcccccacacac

SEQ ID NO: 49248 - RNA, 21 nt, synthetic construct
  source 1..21: mol_type = other RNA
aggaggccactgctgtctgag

SEQ ID NO: 49249 - RNA, 21 nt, synthetic construct
  source 1..21: mol_type = other RNA
ggaggccactgctgtctgaga

SEQ ID NO: 49250 - RNA, 21 nt, synthetic construct
  source 1..21: mol_type = other RNA
acggccggagcgcccgcgcag

SEQ ID NO: 49251 - RNA, 21 nt, synthetic construct
  source 1..21: mol_type = other RNA
gcagcacctggggtgacttcc

SEQ ID NO: 49252 - RNA, 21 nt, synthetic construct
  source 1..21: mol_type = other RNA
atcaaggtcagcatccggctg

SEQ ID NO: 49253 - RNA, 21 nt, synthetic construct
  source 1..21: mol_type = other RNA
accgcaccctgctggggccgg

SEQ ID NO: 49254 - RNA, 21 nt, synthetic construct
  source 1..21: mol_type = other RNA
ccccggacctgccccctcaac

SEQ ID NO: 49255 - RNA, 21 nt, synthetic construct
  source 1..21: mol_type = other RNA
gcacggtgctggatgacatca

SEQ ID NO: 49256 - RNA, 21 nt, synthetic construct
  source 1..21: mol_type = other RNA
tctcgcgctgccactccatca

SEQ ID NO: 49257 - RNA, 21 nt, synthetic construct
  source 1..21: mol_type = other RNA
gaggactgcccctgtgtgcac

SEQ ID NO: 49258 - RNA, 21 nt, synthetic construct
  source 1..21: mol_type = other RNA
cctgggtcccccactccacga

SEQ ID NO: 49259 - RNA, 21 nt, synthetic construct
  source 1..21: mol_type = other RNA
ccagccagggcacgacccgct

SEQ ID NO: 49260 - RNA, 21 nt, synthetic construct
  source 1..21: mol_type = other RNA
gcactgagaagcacagccacc

SEQ ID NO: 49261 - RNA, 21 nt, synthetic construct
  source 1..21: mol_type = other RNA
ccaccggctctgtggccaccc

SEQ ID NO: 49262 - RNA, 21 nt, synthetic construct
  source 1..21: mol_type = other RNA
ccccaggaacagctcacacta

SEQ ID NO: 49263 - RNA, 21 nt, synthetic construct
  source 1..21: mol_type = other RNA
cacagagccttccacggtgac

SEQ ID NO: 49264 - RNA, 21 nt, synthetic construct
  source 1..21: mol_type = other RNA
acggtggtgaccatgggctgt

SEQ ID NO: 49265 - RNA, 21 nt, synthetic construct
  source 1..21: mol_type = other RNA
agcactacagccaccgtgacg

SEQ ID NO: 49266 - RNA, 21 nt, synthetic construct
  source 1..21: mol_type = other RNA
gcactgagaagcacagccacc

SEQ ID NO: 49267 - RNA, 21 nt, synthetic construct
  source 1..21: mol_type = other RNA
ccaccggctctgtggccaccc

SEQ ID NO: 49268 - RNA, 21 nt, synthetic construct
  source 1..21: mol_type = other RNA
ccccaggaacagctcacacta

SEQ ID NO: 49269 - RNA, 21 nt, synthetic construct
  source 1..21: mol_type = other RNA
gcaccttgggcaccacccaca

SEQ ID NO: 49270 - RNA, 21 nt, synthetic construct
  source 1..21: mol_type = other RNA
acggtggtgaccatgggctgt

SEQ ID NO: 49271 - RNA, 21 nt, synthetic construct
  source 1..21: mol_type = other RNA
caccgggaccctcccagaaca

SEQ ID NO: 49272 - RNA, 21 nt, synthetic construct
  source 1..21: mol_type = other RNA
agcactacagccaccgtgacg

SEQ ID NO: 49273 - RNA, 21 nt, synthetic construct
  source 1..21: mol_type = other RNA
ccacacccacagtcatcagct

SEQ ID NO: 49274 - RNA, 21 nt, synthetic construct
  source 1..21: mol_type = other RNA
cacacccacagtcatcagctc

SEQ ID NO: 49275 - RNA, 21 nt, synthetic construct
  source 1..21: mol_type = other RNA
gcactgagaagcacagccacc

SEQ ID NO: 49276 - RNA, 21 nt, synthetic construct
  source 1..21: mol_type = other RNA
ccaccggctctgtggccaccc

SEQ ID NO: 49277 - RNA, 21 nt, synthetic construct
  source 1..21: mol_type = other RNA
ccccaggaacagctcacacta

SEQ ID NO: 49278 - RNA, 21 nt, synthetic construct
  source 1..21: mol_type = other RNA
cacagagccttccacggtgac

SEQ ID NO: 49279 - RNA, 21 nt, synthetic construct
  source 1..21: mol_type = other RNA
agcactacagccaccgtgacg

SEQ ID NO: 49280 - RNA, 21 nt, synthetic construct
  source 1..21: mol_type = other RNA
gcactgagaagcacagccacc

SEQ ID NO: 49281 - RNA, 21 nt, synthetic construct
  source 1..21: mol_type = other RNA
ccaccggctctgtggccaccc

SEQ ID NO: 49282 - RNA, 21 nt, synthetic construct
  source 1..21: mol_type = other RNA
cctcttccaccccaggaacag

SEQ ID NO: 49283 - RNA, 21 nt, synthetic construct
  source 1..21: mol_type = other RNA
ccccaggaacagctcacacta

SEQ ID NO: 49284 - RNA, 21 nt, synthetic construct
  source 1..21: mol_type = other RNA
ctccgtcccggggaccaccca

SEQ ID NO: 49285 - RNA, 21 nt, synthetic construct
  source 1..21: mol_type = other RNA
gcaccttgggcaccacccaca

SEQ ID NO: 49286 - RNA, 21 nt, synthetic construct
  source 1..21: mol_type = other RNA
cccaaagtgctgaccagcccg

SEQ ID NO: 49287 - RNA, 21 nt, synthetic construct
  source 1..21: mol_type = other RNA
aagtgctgaccagcccggcca

SEQ ID NO: 49288 - RNA, 21 nt, synthetic construct
  source 1..21: mol_type = other RNA
caccgggaccctcccagaaca

SEQ ID NO: 49289 - RNA, 21 nt, synthetic construct
  source 1..21: mol_type = other RNA
agcactacagccaccgtgacg

SEQ ID NO: 49290 - RNA, 21 nt, synthetic construct
  source 1..21: mol_type = other RNA
gcactgagaagcacagccacc

SEQ ID NO: 49291 - RNA, 21 nt, synthetic construct
  source 1..21: mol_type = other RNA
ccaccggctctgtggccaccc

SEQ ID NO: 49292 - RNA, 21 nt, synthetic construct
  source 1..21: mol_type = other RNA
ccccaggaacagctcacacta

SEQ ID NO: 49293 - RNA, 21 nt, synthetic construct
  source 1..21: mol_type = other RNA
accatgacaagggccaccaat

SEQ ID NO: 49294 - RNA, 21 nt, synthetic construct
  source 1..21: mol_type = other RNA
ctgggaacagctcacaccccc

SEQ ID NO: 49295 - RNA, 21 nt, synthetic construct
  source 1..21: mol_type = other RNA
cactgtcaccatggtgcatgg

SEQ ID NO: 49296 - RNA, 21 nt, synthetic construct
  source 1..21: mol_type = other RNA
gtgtcggtgcagtgcaagccc

SEQ ID NO: 49297 - RNA, 21 nt, synthetic construct
  source 1..21: mol_type = other RNA
tgacgcccagggtcagccccc

SEQ ID NO: 49298 - RNA, 21 nt, synthetic construct
  source 1..21: mol_type = other RNA
caggcgcccttccctgccaca

SEQ ID NO: 49299 - RNA, 21 nt, synthetic construct
  source 1..21: mol_type = other RNA
ccatgtggacaactgcaccgt

SEQ ID NO: 49300 - RNA, 21 nt, synthetic construct
  source 1..21: mol_type = other RNA
tgctgccaggagaggcgggtc

SEQ ID NO: 49301 - RNA, 21 nt, synthetic construct
  source 1..21: mol_type = other RNA
ccatcctgcacacctacaccc

SEQ ID NO: 49302 - RNA, 21 nt, synthetic construct
  source 1..21: mol_type = other RNA
atggctcccccacacacccgt

SEQ ID NO: 49303 - RNA, 21 nt, synthetic construct
  source 1..21: mol_type = other RNA
ccgtgccagcccccaggatgg

SEQ ID NO: 49304 - RNA, 21 nt, synthetic construct
  source 1..21: mol_type = other RNA
gcagggcggggcccacatctc

SEQ ID NO: 49305 - RNA, 21 nt, synthetic construct
  source 1..21: mol_type = other RNA
tgtgtgcccgcccaggagtgc

SEQ ID NO: 49306 - RNA, 21 nt, synthetic construct
  source 1..21: mol_type = other RNA
agcactgagaagcacagccac

SEQ ID NO: 49307 - RNA, 21 nt, synthetic construct
  source 1..21: mol_type = other RNA
agcactgagaagcacagccac

SEQ ID NO: 49308 - RNA, 21 nt, synthetic construct
  source 1..21: mol_type = other RNA
cagggccacctccaggaccac

SEQ ID NO: 49309 - RNA, 21 nt, synthetic construct
  source 1..21: mol_type = other RNA
agcactgagaagcacagccac

SEQ ID NO: 49310 - RNA, 21 nt, synthetic construct
  source 1..21: mol_type = other RNA
caccacaaccagggccaccgg

SEQ ID NO: 49311 - RNA, 21 nt, synthetic construct
  source 1..21: mol_type = other RNA
agcactgagaagcacagccac

SEQ ID NO: 49312 - RNA, 21 nt, synthetic construct
  source 1..21: mol_type = other RNA
caccacaaccagggccaccgg

SEQ ID NO: 49313 - RNA, 21 nt, synthetic construct
  source 1..21: mol_type = other RNA
agcactgagaagcacagccac

SEQ ID NO: 49314 - RNA, 21 nt, synthetic construct
  source 1..21: mol_type = other RNA
cctgagacccactggcttccc

SEQ ID NO: 49315 - RNA, 21 nt, synthetic construct
  source 1..21: mol_type = other RNA
cccaggcgcccttccctgcca

SEQ ID NO: 49316 - RNA, 21 nt, synthetic construct
  source 1..21: mol_type = other RNA
ctcagccatcctgcacaccta

SEQ ID NO: 49317 - RNA, 21 nt, synthetic construct
  source 1..21: mol_type = other RNA
ttcccggcccaggaggccact

SEQ ID NO: 49318 - RNA, 21 nt, synthetic construct
  source 1..21: mol_type = other RNA
ccctgagaacagctccccctc

SEQ ID NO: 49319 - RNA, 21 nt, synthetic construct
  source 1..21: mol_type = other RNA
tgtggatcagcacaaccacca

SEQ ID NO: 49320 - RNA, 21 nt, synthetic construct
  source 1..21: mol_type = other RNA
ggccaccggctccaccaccaa

SEQ ID NO: 49321 - RNA, 21 nt, synthetic construct
  source 1..21: mol_type = other RNA
tgtggatcagcacaaccacca

SEQ ID NO: 49322 - RNA, 21 nt, synthetic construct
  source 1..21: mol_type = other RNA
cacccacaaccagaggttcca

SEQ ID NO: 49323 - RNA, 21 nt, synthetic construct
  source 1..21: mol_type = other RNA
ggccaccggctccaccaccaa

SEQ ID NO: 49324 - RNA, 21 nt, synthetic construct
  source 1..21: mol_type = other RNA
accaccacacccatggccacc

SEQ ID NO: 49325 - RNA, 21 nt, synthetic construct
  source 1..21: mol_type = other RNA
tgctgaccacgaaggccacca

SEQ ID NO: 49326 - RNA, 21 nt, synthetic construct
  source 1..21: mol_type = other RNA
tgtggatcagcacaaccacca

SEQ ID NO: 49327 - RNA, 21 nt, synthetic construct
  source 1..21: mol_type = other RNA
agccaccggctccaccaccaa

SEQ ID NO: 49328 - RNA, 21 nt, synthetic construct
  source 1..21: mol_type = other RNA
tgtggatcagcacaaccacca

SEQ ID NO: 49329 - RNA, 21 nt, synthetic construct
  source 1..21: mol_type = other RNA
ggccaccggctccaccaccaa

SEQ ID NO: 49330 - RNA, 21 nt, synthetic construct
  source 1..21: mol_type = other RNA
tgctgaccacgaaggccacca

SEQ ID NO: 49331 - RNA, 21 nt, synthetic construct
  source 1..21: mol_type = other RNA
tgtggatcagcacaaccacca

SEQ ID NO: 49332 - RNA, 21 nt, synthetic construct
  source 1..21: mol_type = other RNA
ggccaccggctccaccaccaa

SEQ ID NO: 49333 - RNA, 21 nt, synthetic construct
  source 1..21: mol_type = other RNA
ctactgcacggcctctgccac

SEQ ID NO: 49334 - RNA, 21 nt, synthetic construct
  source 1..21: mol_type = other RNA
gctcagccatcctgcacacct

SEQ ID NO: 49335 - RNA, 21 nt, synthetic construct
  source 1..21: mol_type = other RNA
caaataaaccctgagcattga

SEQ ID NO: 49336 - RNA, 21 nt, synthetic construct
  source 1..21: mol_type = other RNA
cagcccccaggatgggtgccc

SEQ ID NO: 49337 - RNA, 21 nt, synthetic construct
  source 1..21: mol_type = other RNA
caacggctccgtcctcatcaa

SEQ ID NO: 49338 - RNA, 21 nt, synthetic construct
  source 1..21: mol_type = other RNA
gaggagggcatctgccaccgc

SEQ ID NO: 49339 - RNA, 21 nt, synthetic construct
  source 1..21: mol_type = other RNA
tggaaggctgctacccgaagt

SEQ ID NO: 49340 - RNA, 21 nt, synthetic construct
  source 1..21: mol_type = other RNA
ggaaggctgctacccgaagtg

SEQ ID NO: 49341 - RNA, 21 nt, synthetic construct
  source 1..21: mol_type = other RNA
ccactgcaggggacgtgccac

SEQ ID NO: 49342 - RNA, 21 nt, synthetic construct
  source 1..21: mol_type = other RNA
cccagatacacaagcaccctt

SEQ ID NO: 49343 - RNA, 21 nt, synthetic construct
  source 1..21: mol_type = other RNA
gcacgcccaggacagagacga

SEQ ID NO: 49344 - RNA, 21 nt, synthetic construct
  source 1..21: mol_type = other RNA
accacaactggggccaccggc

SEQ ID NO: 49345 - RNA, 21 nt, synthetic construct
  source 1..21: mol_type = other RNA
ggactttggcctggtctgcag

SEQ ID NO: 49346 - RNA, 21 nt, synthetic construct
  source 1..21: mol_type = other RNA
aagccactcccttctccagtc

SEQ ID NO: 49347 - RNA, 21 nt, synthetic construct
  source 1..21: mol_type = other RNA
caacccctcctcaactccagg

SEQ ID NO: 49348 - RNA, 21 nt, synthetic construct
  source 1..21: mol_type = other RNA
ggactttggcctggtctgcag

SEQ ID NO: 49349 - RNA, 21 nt, synthetic construct
  source 1..21: mol_type = other RNA
aaatccacagctaccagcttt

SEQ ID NO: 49350 - RNA, 21 nt, synthetic construct
  source 1..21: mol_type = other RNA
tccctgggcaccgcctggacc

SEQ ID NO: 49351 - RNA, 21 nt, synthetic construct
  source 1..21: mol_type = other RNA
caacccctcctcaactccagg

SEQ ID NO: 49352 - RNA, 21 nt, synthetic construct
  source 1..21: mol_type = other RNA
ggactttggcctggtctgcag

SEQ ID NO: 49353 - RNA, 21 nt, synthetic construct
  source 1..21: mol_type = other RNA
aagccactcccttctccagtc

SEQ ID NO: 49354 - RNA, 21 nt, synthetic construct
  source 1..21: mol_type = other RNA
caacccctcctcaactccagg

SEQ ID NO: 49355 - RNA, 21 nt, synthetic construct
  source 1..21: mol_type = other RNA
ggactttggcctggtctgcag

SEQ ID NO: 49356 - RNA, 21 nt, synthetic construct
  source 1..21: mol_type = other RNA
cagtccagggactgcaactgc

SEQ ID NO: 49357 - RNA, 21 nt, synthetic construct
  source 1..21: mol_type = other RNA
caacccctcctcaactccagg

SEQ ID NO: 49358 - RNA, 21 nt, synthetic construct
  source 1..21: mol_type = other RNA
aagcacagccacaaaatccac

SEQ ID NO: 49359 - RNA, 21 nt, synthetic construct
  source 1..21: mol_type = other RNA
aaatccacagctaccagcttt

SEQ ID NO: 49360 - RNA, 21 nt, synthetic construct
  source 1..21: mol_type = other RNA
ctgtggaccacgtggaccgtc

SEQ ID NO: 49361 - RNA, 21 nt, synthetic construct
  source 1..21: mol_type = other RNA
ccatgtccaccatgtccacaa

SEQ ID NO: 49362 - RNA, 21 nt, synthetic construct
  source 1..21: mol_type = other RNA
gccaccaattccacggccaca

SEQ ID NO: 49363 - RNA, 21 nt, synthetic construct
  source 1..21: mol_type = other RNA
ctgcagcatgtggggcggctc

SEQ ID NO: 49364 - RNA, 21 nt, synthetic construct
  source 1..21: mol_type = other RNA
tgcccgtccccgtccccccac

SEQ ID NO: 49365 - RNA, 21 nt, synthetic construct
  source 1..21: mol_type = other RNA
ggtgtgcagcacctggggtga

SEQ ID NO: 49366 - RNA, 21 nt, synthetic construct
  source 1..21: mol_type = other RNA
ggggctggtgctggaggcgtc

SEQ ID NO: 49367 - RNA, 21 nt, synthetic construct
  source 1..21: mol_type = other RNA
tggtgctggaggcgtccaacg

SEQ ID NO: 49368 - RNA, 21 nt, synthetic construct
  source 1..21: mol_type = other RNA
gccctgctggagctggatccc

SEQ ID NO: 49369 - RNA, 21 nt, synthetic construct
  source 1..21: mol_type = other RNA
gccaggctgaccccgctccag

SEQ ID NO: 49370 - RNA, 21 nt, synthetic construct
  source 1..21: mol_type = other RNA
tgcacggacgaggagggcatc

SEQ ID NO: 49371 - RNA, 21 nt, synthetic construct
  source 1..21: mol_type = other RNA
cggacgaggagggcatctgcc

SEQ ID NO: 49372 - RNA, 21 nt, synthetic construct
  source 1..21: mol_type = other RNA
ctggaggtgccctgagctctg

SEQ ID NO: 49373 - RNA, 21 nt, synthetic construct
  source 1..21: mol_type = other RNA
tgcacggacacctgctccaac

SEQ ID NO: 49374 - RNA, 21 nt, synthetic construct
  source 1..21: mol_type = other RNA
cgcgcgcagctctgcgaggac

SEQ ID NO: 49375 - RNA, 21 nt, synthetic construct
  source 1..21: mol_type = other RNA
gcagctctgcgaggaccactg

SEQ ID NO: 49376 - RNA, 21 nt, synthetic construct
  source 1..21: mol_type = other RNA
ccaatgccaggaacagctttg

SEQ ID NO: 49377 - RNA, 21 nt, synthetic construct
  source 1..21: mol_type = other RNA
cgcgctgccactccatcatca

SEQ ID NO: 49378 - RNA, 21 nt, synthetic construct
  source 1..21: mol_type = other RNA
ctgccccaagtcccagcgcta

SEQ ID NO: 49379 - RNA, 21 nt, synthetic construct
  source 1..21: mol_type = other RNA
gcctgccagcccacttgccgc

SEQ ID NO: 49380 - RNA, 21 nt, synthetic construct
  source 1..21: mol_type = other RNA
tccttcgtgcctgtggacggc

SEQ ID NO: 49381 - RNA, 21 nt, synthetic construct
  source 1..21: mol_type = other RNA
acggctgcacctgccccgcgg

SEQ ID NO: 49382 - RNA, 21 nt, synthetic construct
  source 1..21: mol_type = other RNA
cggctgcacctgccccgcggg

SEQ ID NO: 49383 - RNA, 21 nt, synthetic construct
  source 1..21: mol_type = other RNA
gtgctggctcctggagaggtg

SEQ ID NO: 49384 - RNA, 21 nt, synthetic construct
  source 1..21: mol_type = other RNA
tgctggctcctggagaggtgg

SEQ ID NO: 49385 - RNA, 21 nt, synthetic construct
  source 1..21: mol_type = other RNA
gtgcagcccccatggtgtacc

SEQ ID NO: 49386 - RNA, 21 nt, synthetic construct
  source 1..21: mol_type = other RNA
acacctgcacctgcaggaacc

SEQ ID NO: 49387 - RNA, 21 nt, synthetic construct
  source 1..21: mol_type = other RNA
tgcacctgcaggaaccggagg

SEQ ID NO: 49388 - RNA, 21 nt, synthetic construct
  source 1..21: mol_type = other RNA
cagctttgaaggcagctgcga

SEQ ID NO: 49389 - RNA, 21 nt, synthetic construct
  source 1..21: mol_type = other RNA
tgaaggcagctgcgagtacat

SEQ ID NO: 49390 - RNA, 21 nt, synthetic construct
  source 1..21: mol_type = other RNA
gctgatcctccaagaggggac

SEQ ID NO: 49391 - RNA, 21 nt, synthetic construct
  source 1..21: mol_type = other RNA
gggccgggtggggacccaccc

SEQ ID NO: 49392 - RNA, 21 nt, synthetic construct
  source 1..21: mol_type = other RNA
ccctcctgcccggacgccctg

SEQ ID NO: 49393 - RNA, 21 nt, synthetic construct
  source 1..21: mol_type = other RNA
cctgccccttgttctgtgact

SEQ ID NO: 49394 - RNA, 21 nt, synthetic construct
  source 1..21: mol_type = other RNA
tgggggctgtgagtggcacta

SEQ ID NO: 49395 - RNA, 21 nt, synthetic construct
  source 1..21: mol_type = other RNA
cctggaaggctgctacccgaa

SEQ ID NO: 49396 - RNA, 21 nt, synthetic construct
  source 1..21: mol_type = other RNA
ctggaaggctgctacccgaag

SEQ ID NO: 49397 - RNA, 21 nt, synthetic construct
  source 1..21: mol_type = other RNA
gcaccatcatcaggaaggctg

SEQ ID NO: 49398 - RNA, 21 nt, synthetic construct
  source 1..21: mol_type = other RNA
accatcatcaggaaggctgtg

SEQ ID NO: 49399 - RNA, 21 nt, synthetic construct
  source 1..21: mol_type = other RNA
catcaggaaggctgtggcatg

SEQ ID NO: 49400 - RNA, 21 nt, synthetic construct
  source 1..21: mol_type = other RNA
gccattcaccttcaccaccgc

SEQ ID NO: 49401 - RNA, 21 nt, synthetic construct
  source 1..21: mol_type = other RNA
cagagcccggcctgggaggcg

SEQ ID NO: 49402 - RNA, 21 nt, synthetic construct
  source 1..21: mol_type = other RNA
gtaccaggtatgccctgtgct

SEQ ID NO: 49403 - RNA, 21 nt, synthetic construct
  source 1..21: mol_type = other RNA
tatgccctgtgctggctgaca

SEQ ID NO: 49404 - RNA, 21 nt, synthetic construct
  source 1..21: mol_type = other RNA
gtgaccgcatgcgggggctga

SEQ ID NO: 49405 - RNA, 21 nt, synthetic construct
  source 1..21: mol_type = other RNA
cgccaacagccaacagagtcc

SEQ ID NO: 49406 - RNA, 21 nt, synthetic construct
  source 1..21: mol_type = other RNA
gggtccagctcaggccccgtg

SEQ ID NO: 49407 - RNA, 21 nt, synthetic construct
  source 1..21: mol_type = other RNA
tcagggccgctggagggcact

SEQ ID NO: 49408 - RNA, 21 nt, synthetic construct
  source 1..21: mol_type = other RNA
atgccagcagcctaaggacat

SEQ ID NO: 49409 - RNA, 21 nt, synthetic construct
  source 1..21: mol_type = other RNA
ctggcacaggtggggcagaag

SEQ ID NO: 49410 - RNA, 21 nt, synthetic construct
  source 1..21: mol_type = other RNA
actgggagcaggagggcgtct

SEQ ID NO: 49411 - RNA, 21 nt, synthetic construct
  source 1..21: mol_type = other RNA
ccccggccagcaccacagcag

SEQ ID NO: 49412 - RNA, 21 nt, synthetic construct
  source 1..21: mol_type = other RNA
ggggtggccacatccaccctt

SEQ ID NO: 49413 - RNA, 21 nt, synthetic construct
  source 1..21: mol_type = other RNA
aggcacagccagcaccgcttc

SEQ ID NO: 49414 - RNA, 21 nt, synthetic construct
  source 1..21: mol_type = other RNA
cgagaccagcacgcccaggac

SEQ ID NO: 49415 - RNA, 21 nt, synthetic construct
  source 1..21: mol_type = other RNA
ccaccaccagccagggcacga

SEQ ID NO: 49416 - RNA, 21 nt, synthetic construct
  source 1..21: mol_type = other RNA
cctccaccctgagaacagctc

SEQ ID NO: 49417 - RNA, 21 nt, synthetic construct
  source 1..21: mol_type = other RNA
cagctccaaagccactccctc

SEQ ID NO: 49418 - RNA, 21 nt, synthetic construct
  source 1..21: mol_type = other RNA
cttccagcactgagaagcaca

SEQ ID NO: 49419 - RNA, 21 nt, synthetic construct
  source 1..21: mol_type = other RNA
cgccacggccaccacaactgg

SEQ ID NO: 49420 - RNA, 21 nt, synthetic construct
  source 1..21: mol_type = other RNA
tagcacacagaccagtggtac

SEQ ID NO: 49421 - RNA, 21 nt, synthetic construct
  source 1..21: mol_type = other RNA
cccatcactgaccaccacggc

SEQ ID NO: 49422 - RNA, 21 nt, synthetic construct
  source 1..21: mol_type = other RNA
tgactccctcctctgccctag

SEQ ID NO: 49423 - RNA, 21 nt, synthetic construct
  source 1..21: mol_type = other RNA
atccctgccccccagcagtcc

SEQ ID NO: 49424 - RNA, 21 nt, synthetic construct
  source 1..21: mol_type = other RNA
cggccacctccaggaccacag

SEQ ID NO: 49425 - RNA, 21 nt, synthetic construct
  source 1..21: mol_type = other RNA
acctccaggaccacagccacg

SEQ ID NO: 49426 - RNA, 21 nt, synthetic construct
  source 1..21: mol_type = other RNA
agtgtgcctggtcagagtggc

SEQ ID NO: 49427 - RNA, 21 nt, synthetic construct
  source 1..21: mol_type = other RNA
accccgtcctccaccccaggg

SEQ ID NO: 49428 - RNA, 21 nt, synthetic construct
  source 1..21: mol_type = other RNA
cagctccaaagccactccctt

SEQ ID NO: 49429 - RNA, 21 nt, synthetic construct
  source 1..21: mol_type = other RNA
tcccttctccagtccagggac

SEQ ID NO: 49430 - RNA, 21 nt, synthetic construct
  source 1..21: mol_type = other RNA
cttccagcactgagaagcaca

SEQ ID NO: 49431 - RNA, 21 nt, synthetic construct
  source 1..21: mol_type = other RNA
gactgtccacacctccacagt

SEQ ID NO: 49432 - RNA, 21 nt, synthetic construct
  source 1..21: mol_type = other RNA
caccacggccaccacaaccgg

SEQ ID NO: 49433 - RNA, 21 nt, synthetic construct
  source 1..21: mol_type = other RNA
tagcacacagaccagtggtac

SEQ ID NO: 49434 - RNA, 21 nt, synthetic construct
  source 1..21: mol_type = other RNA
cccatcactgaccaccacggc

SEQ ID NO: 49435 - RNA, 21 nt, synthetic construct
  source 1..21: mol_type = other RNA
cctcctcaactccagggacaa

SEQ ID NO: 49436 - RNA, 21 nt, synthetic construct
  source 1..21: mol_type = other RNA
tgactccctcctctgccctag

SEQ ID NO: 49437 - RNA, 21 nt, synthetic construct
  source 1..21: mol_type = other RNA
atccctgtcccccagcagtcc

SEQ ID NO: 49438 - RNA, 21 nt, synthetic construct
  source 1..21: mol_type = other RNA
ctgtcccccagcagtccccac

SEQ ID NO: 49439 - RNA, 21 nt, synthetic construct
  source 1..21: mol_type = other RNA
ccccagcagcaaccaccggta

SEQ ID NO: 49440 - RNA, 21 nt, synthetic construct
  source 1..21: mol_type = other RNA
agtgtgcctggtcagagtggc

SEQ ID NO: 49441 - RNA, 21 nt, synthetic construct
  source 1..21: mol_type = other RNA
ccttccagtgctgacaagcac

SEQ ID NO: 49442 - RNA, 21 nt, synthetic construct
  source 1..21: mol_type = other RNA
cctccacagtgctgaccacga

SEQ ID NO: 49443 - RNA, 21 nt, synthetic construct
  source 1..21: mol_type = other RNA
cccctcctccactccggggac

SEQ ID NO: 49444 - RNA, 21 nt, synthetic construct
  source 1..21: mol_type = other RNA
accacagcagccactacaact

SEQ ID NO: 49445 - RNA, 21 nt, synthetic construct
  source 1..21: mol_type = other RNA
accccgtcctccaccccaggg

SEQ ID NO: 49446 - RNA, 21 nt, synthetic construct
  source 1..21: mol_type = other RNA
cttccagcactgagaagcaca

SEQ ID NO: 49447 - RNA, 21 nt, synthetic construct
  source 1..21: mol_type = other RNA
ccctgggcaccgcctggaccc

SEQ ID NO: 49448 - RNA, 21 nt, synthetic construct
  source 1..21: mol_type = other RNA
gactgtccacacctccacagt

SEQ ID NO: 49449 - RNA, 21 nt, synthetic construct
  source 1..21: mol_type = other RNA
tagcacacagaccagtggtac

SEQ ID NO: 49450 - RNA, 21 nt, synthetic construct
  source 1..21: mol_type = other RNA
cccatcactgaccaccacggc

SEQ ID NO: 49451 - RNA, 21 nt, synthetic construct
  source 1..21: mol_type = other RNA
cctcctcaactccagggacaa

SEQ ID NO: 49452 - RNA, 21 nt, synthetic construct
  source 1..21: mol_type = other RNA
tgactccctcctctgccctag

SEQ ID NO: 49453 - RNA, 21 nt, synthetic construct
  source 1..21: mol_type = other RNA
gtccctgccccccagcagtcc

SEQ ID NO: 49454 - RNA, 21 nt, synthetic construct
  source 1..21: mol_type = other RNA
acctccaggaccacagccaca

SEQ ID NO: 49455 - RNA, 21 nt, synthetic construct
  source 1..21: mol_type = other RNA
agtgtgcctggtcagagtggc

SEQ ID NO: 49456 - RNA, 21 nt, synthetic construct
  source 1..21: mol_type = other RNA
accccgtcctccaccccaggg

SEQ ID NO: 49457 - RNA, 21 nt, synthetic construct
  source 1..21: mol_type = other RNA
cagctccaaagccactccctt

SEQ ID NO: 49458 - RNA, 21 nt, synthetic construct
  source 1..21: mol_type = other RNA
tcccttctccagtccagggac

SEQ ID NO: 49459 - RNA, 21 nt, synthetic construct
  source 1..21: mol_type = other RNA
cttccagcactgagaagcaca

SEQ ID NO: 49460 - RNA, 21 nt, synthetic construct
  source 1..21: mol_type = other RNA
accacggccaccacaaccagg

SEQ ID NO: 49461 - RNA, 21 nt, synthetic construct
  source 1..21: mol_type = other RNA
acagtcaccccctcctccagc

SEQ ID NO: 49462 - RNA, 21 nt, synthetic construct
  source 1..21: mol_type = other RNA
ccccctcctccgtcccgggga

SEQ ID NO: 49463 - RNA, 21 nt, synthetic construct
  source 1..21: mol_type = other RNA
tagcacacagaccagtggtac

SEQ ID NO: 49464 - RNA, 21 nt, synthetic construct
  source 1..21: mol_type = other RNA
cctcctcaactccagggacaa

SEQ ID NO: 49465 - RNA, 21 nt, synthetic construct
  source 1..21: mol_type = other RNA
tgactccctcctctgccctag

SEQ ID NO: 49466 - RNA, 21 nt, synthetic construct
  source 1..21: mol_type = other RNA
atccctgtcccccagcagtcc

SEQ ID NO: 49467 - RNA, 21 nt, synthetic construct
  source 1..21: mol_type = other RNA
ctgtcccccagcagtccccac

SEQ ID NO: 49468 - RNA, 21 nt, synthetic construct
  source 1..21: mol_type = other RNA
ccccagcagcaaccaccggta

SEQ ID NO: 49469 - RNA, 21 nt, synthetic construct
  source 1..21: mol_type = other RNA
agtgtgcctggtcagagtggc

SEQ ID NO: 49470 - RNA, 21 nt, synthetic construct
  source 1..21: mol_type = other RNA
tgaccagcccggccaccacac

SEQ ID NO: 49471 - RNA, 21 nt, synthetic construct
  source 1..21: mol_type = other RNA
ccttccagtgctgacaagcac

SEQ ID NO: 49472 - RNA, 21 nt, synthetic construct
  source 1..21: mol_type = other RNA
cctccacagtgctgaccacga

SEQ ID NO: 49473 - RNA, 21 nt, synthetic construct
  source 1..21: mol_type = other RNA
cccctcctccactccggggac

SEQ ID NO: 49474 - RNA, 21 nt, synthetic construct
  source 1..21: mol_type = other RNA
accacagcagccactacaact

SEQ ID NO: 49475 - RNA, 21 nt, synthetic construct
  source 1..21: mol_type = other RNA
accccgtcctccaccccaggg

SEQ ID NO: 49476 - RNA, 21 nt, synthetic construct
  source 1..21: mol_type = other RNA
accccgtcctccaccccaggg

SEQ ID NO: 49477 - RNA, 21 nt, synthetic construct
  source 1..21: mol_type = other RNA
cagctccaaagccactccctc

SEQ ID NO: 49478 - RNA, 21 nt, synthetic construct
  source 1..21: mol_type = other RNA
cttccagcactgagaagcaca

SEQ ID NO: 49479 - RNA, 21 nt, synthetic construct
  source 1..21: mol_type = other RNA
gactgtccacacctccacagt

SEQ ID NO: 49480 - RNA, 21 nt, synthetic construct
  source 1..21: mol_type = other RNA
cgccacggccaccacaaccgg

SEQ ID NO: 49481 - RNA, 21 nt, synthetic construct
  source 1..21: mol_type = other RNA
cccacaaccaccacacccaca

SEQ ID NO: 49482 - RNA, 21 nt, synthetic construct
  source 1..21: mol_type = other RNA
tagcacacagaccagtggtac

SEQ ID NO: 49483 - RNA, 21 nt, synthetic construct
  source 1..21: mol_type = other RNA
cccatcactgaccaccacggc

SEQ ID NO: 49484 - RNA, 21 nt, synthetic construct
  source 1..21: mol_type = other RNA
cctcctcaactccagggacaa

SEQ ID NO: 49485 - RNA, 21 nt, synthetic construct
  source 1..21: mol_type = other RNA
accccagtgctgaccagcacg

SEQ ID NO: 49486 - RNA, 21 nt, synthetic construct
  source 1..21: mol_type = other RNA
gcacggccaccacacccgcag

SEQ ID NO: 49487 - RNA, 21 nt, synthetic construct
  source 1..21: mol_type = other RNA
cacggccaccacacccgcagc

SEQ ID NO: 49488 - RNA, 21 nt, synthetic construct
  source 1..21: mol_type = other RNA
ccttccagtgctgacaagcac

SEQ ID NO: 49489 - RNA, 21 nt, synthetic construct
  source 1..21: mol_type = other RNA
cacaaaatccacagctaccag

SEQ ID NO: 49490 - RNA, 21 nt, synthetic construct
  source 1..21: mol_type = other RNA
gaccaccacacccatgtccac

SEQ ID NO: 49491 - RNA, 21 nt, synthetic construct
  source 1..21: mol_type = other RNA
acacccatgtccaccatgtcc

SEQ ID NO: 49492 - RNA, 21 nt, synthetic construct
  source 1..21: mol_type = other RNA
cccatgtccaccatgtccaca

SEQ ID NO: 49493 - RNA, 21 nt, synthetic construct
  source 1..21: mol_type = other RNA
cagccaccatgacaagggcca

SEQ ID NO: 49494 - RNA, 21 nt, synthetic construct
  source 1..21: mol_type = other RNA
gggccaccaattccacggcca

SEQ ID NO: 49495 - RNA, 21 nt, synthetic construct
  source 1..21: mol_type = other RNA
ccacagccactgcctccacgg

SEQ ID NO: 49496 - RNA, 21 nt, synthetic construct
  source 1..21: mol_type = other RNA
agcctgccaaccttcagcgtg

SEQ ID NO: 49497 - RNA, 21 nt, synthetic construct
  source 1..21: mol_type = other RNA
agtgcatctgcagcatgtggg

SEQ ID NO: 49498 - RNA, 21 nt, synthetic construct
  source 1..21: mol_type = other RNA
caccttccggggcaactgcac

SEQ ID NO: 49499 - RNA, 21 nt, synthetic construct
  source 1..21: mol_type = other RNA
cgcgccctcagcatccactac

SEQ ID NO: 49500 - RNA, 21 nt, synthetic construct
  source 1..21: mol_type = other RNA
aaggatggctgctgggccccg

SEQ ID NO: 49501 - RNA, 21 nt, synthetic construct
  source 1..21: mol_type = other RNA
tgcccaccacagccgctctgt

SEQ ID NO: 49502 - RNA, 21 nt, synthetic construct
  source 1..21: mol_type = other RNA
ggaccagatcctcttcaacgc

SEQ ID NO: 49503 - RNA, 21 nt, synthetic construct
  source 1..21: mol_type = other RNA
gacgcccagggtcagcccccg

SEQ ID NO: 49504 - RNA, 21 nt, synthetic construct
  source 1..21: mol_type = other RNA
gaccaggccccgggccgagaa

SEQ ID NO: 49505 - RNA, 21 nt, synthetic construct
  source 1..21: mol_type = other RNA
accaggccccgggccgagaac

SEQ ID NO: 49506 - RNA, 21 nt, synthetic construct
  source 1..21: mol_type = other RNA
tgcccgccagggcaggagtcc

SEQ ID NO: 49507 - RNA, 21 nt, synthetic construct
  source 1..21: mol_type = other RNA
gcacccaggaggagggcgact

SEQ ID NO: 49508 - RNA, 21 nt, synthetic construct
  source 1..21: mol_type = other RNA
tgtcaggaggatgcctgcaac

SEQ ID NO: 49509 - RNA, 21 nt, synthetic construct
  source 1..21: mol_type = other RNA
aacagccatgtggacaactgc

SEQ ID NO: 49510 - RNA, 21 nt, synthetic construct
  source 1..21: mol_type = other RNA
agcctgcatcctgcccagatg

SEQ ID NO: 49511 - RNA, 21 nt, synthetic construct
  source 1..21: mol_type = other RNA
cctgtggcaccagggctgcga

SEQ ID NO: 49512 - RNA, 21 nt, synthetic construct
  source 1..21: mol_type = other RNA
accttctgcgagggctcctgc

SEQ ID NO: 49513 - RNA, 21 nt, synthetic construct
  source 1..21: mol_type = other RNA
tcccccacacacccgtggctt

SEQ ID NO: 49514 - RNA, 21 nt, synthetic construct
  source 1..21: mol_type = other RNA
tgcggagccccccggcctgtg

SEQ ID NO: 49515 - RNA, 21 nt, synthetic construct
  source 1..21: mol_type = other RNA
gctcctgctgcccaccccgtg

SEQ ID NO: 49516 - RNA, 21 nt, synthetic construct
  source 1..21: mol_type = other RNA
ctcctgctgcccaccccgtgg

SEQ ID NO: 49517 - RNA, 21 nt, synthetic construct
  source 1..21: mol_type = other RNA
cggccgctggggcagacaggc

SEQ ID NO: 49518 - RNA, 21 nt, synthetic construct
  source 1..21: mol_type = other RNA
tggtccaggcaaggccagctg

SEQ ID NO: 49519 - RNA, 21 nt, synthetic construct
  source 1..21: mol_type = other RNA
tgctgccaggaagctgcgaca

SEQ ID NO: 49520 - RNA, 21 nt, synthetic construct
  source 1..21: mol_type = other RNA
gctgccaggaagctgcgacag

SEQ ID NO: 49521 - RNA, 21 nt, synthetic construct
  source 1..21: mol_type = other RNA
gtaactcagggctgaggtcgc

SEQ ID NO: 49522 - RNA, 21 nt, synthetic construct
  source 1..21: mol_type = other RNA
gcctggacttcggccacctcg

SEQ ID NO: 49523 - RNA, 21 nt, synthetic construct
  source 1..21: mol_type = other RNA
tcgggcatcttgggcaccacc

SEQ ID NO: 49524 - RNA, 21 nt, synthetic construct
  source 1..21: mol_type = other RNA
tcctcaactccagggacaaca

SEQ ID NO: 49525 - RNA, 21 nt, synthetic construct
  source 1..21: mol_type = other RNA
gcctggacttcggccacctca

SEQ ID NO: 49526 - RNA, 21 nt, synthetic construct
  source 1..21: mol_type = other RNA
ctccagggacgacctggatcc

SEQ ID NO: 49527 - RNA, 21 nt, synthetic construct
  source 1..21: mol_type = other RNA
caccacacccatggccaccat

SEQ ID NO: 49528 - RNA, 21 nt, synthetic construct
  source 1..21: mol_type = other RNA
tcctcaactccagggacaact

SEQ ID NO: 49529 - RNA, 21 nt, synthetic construct
  source 1..21: mol_type = other RNA
gcctggacttcggccacctcg

SEQ ID NO: 49530 - RNA, 21 nt, synthetic construct
  source 1..21: mol_type = other RNA
tcgggcatcttgggcaccacc

SEQ ID NO: 49531 - RNA, 21 nt, synthetic construct
  source 1..21: mol_type = other RNA
tcctcaactccagggacaaca

SEQ ID NO: 49532 - RNA, 21 nt, synthetic construct
  source 1..21: mol_type = other RNA
gcctggacttcggccacctca

SEQ ID NO: 49533 - RNA, 21 nt, synthetic construct
  source 1..21: mol_type = other RNA
tcctcaactccagggacaaca

SEQ ID NO: 49534 - RNA, 21 nt, synthetic construct
  source 1..21: mol_type = other RNA
cggtgggtcagcaactgccag

SEQ ID NO: 49535 - RNA, 21 nt, synthetic construct
  source 1..21: mol_type = other RNA
ctgcaaccgcccttccagcac

SEQ ID NO: 49536 - RNA, 21 nt, synthetic construct
  source 1..21: mol_type = other RNA
ctgcaaccgcccttccagcac

SEQ ID NO: 49537 - RNA, 21 nt, synthetic construct
  source 1..21: mol_type = other RNA
agggccacctccaggaccacg

SEQ ID NO: 49538 - RNA, 21 nt, synthetic construct
  source 1..21: mol_type = other RNA
ctgcaaccgcccttccagcac

SEQ ID NO: 49539 - RNA, 21 nt, synthetic construct
  source 1..21: mol_type = other RNA
ctgcaaccgcccttccagcac

SEQ ID NO: 49540 - RNA, 21 nt, synthetic construct
  source 1..21: mol_type = other RNA
cctggaaggcccaggctgcct

SEQ ID NO: 49541 - RNA, 21 nt, synthetic construct
  source 1..21: mol_type = other RNA
cagccctgtccagccctcacc

SEQ ID NO: 49542 - RNA, 21 nt, synthetic construct
  source 1..21: mol_type = other RNA
cagccctgtccagccctcacc

SEQ ID NO: 49543 - RNA, 21 nt, synthetic construct
  source 1..21: mol_type = other RNA
cagccctgtccagccctcacc

SEQ ID NO: 49544 - RNA, 21 nt, synthetic construct
  source 1..21: mol_type = other RNA
ctggaggggatggcggagggc

SEQ ID NO: 49545 - RNA, 21 nt, synthetic construct
  source 1..21: mol_type = other RNA
tgtgaggctgagggtggagtc

SEQ ID NO: 49546 - RNA, 21 nt, synthetic construct
  source 1..21: mol_type = other RNA
actacgtgttctctgagcact

SEQ ID NO: 49547 - RNA, 21 nt, synthetic construct
  source 1..21: mol_type = other RNA
caacgccaggctgaccccgct

SEQ ID NO: 49548 - RNA, 21 nt, synthetic construct
  source 1..21: mol_type = other RNA
tgccctgagctctgcccccgg

SEQ ID NO: 49549 - RNA, 21 nt, synthetic construct
  source 1..21: mol_type = other RNA
caccatcatcaggaaggctgt

SEQ ID NO: 49550 - RNA, 21 nt, synthetic construct
  source 1..21: mol_type = other RNA
gcctgggtcccccactccacg

SEQ ID NO: 49551 - RNA, 21 nt, synthetic construct
  source 1..21: mol_type = other RNA
ggccgagaccagcacgcccag

SEQ ID NO: 49552 - RNA, 21 nt, synthetic construct
  source 1..21: mol_type = other RNA
ggcaccacctggacccgccta

SEQ ID NO: 49553 - RNA, 21 nt, synthetic construct
  source 1..21: mol_type = other RNA
acggccacctccaggaccaca

SEQ ID NO: 49554 - RNA, 21 nt, synthetic construct
  source 1..21: mol_type = other RNA
caggaccacagccacggccac

SEQ ID NO: 49555 - RNA, 21 nt, synthetic construct
  source 1..21: mol_type = other RNA
cggtggtgaccatgggctgtg

SEQ ID NO: 49556 - RNA, 21 nt, synthetic construct
  source 1..21: mol_type = other RNA
tgagcaggtggggaagttcaa

SEQ ID NO: 49557 - RNA, 21 nt, synthetic construct
  source 1..21: mol_type = other RNA
ggcaccacctggacccgccta

SEQ ID NO: 49558 - RNA, 21 nt, synthetic construct
  source 1..21: mol_type = other RNA
cggtggtgaccatgggctgtg

SEQ ID NO: 49559 - RNA, 21 nt, synthetic construct
  source 1..21: mol_type = other RNA
tgagcaggtggggaagttcaa

SEQ ID NO: 49560 - RNA, 21 nt, synthetic construct
  source 1..21: mol_type = other RNA
gaccaccacacccatggccac

SEQ ID NO: 49561 - RNA, 21 nt, synthetic construct
  source 1..21: mol_type = other RNA
caccgcctcctccacccgggc

SEQ ID NO: 49562 - RNA, 21 nt, synthetic construct
  source 1..21: mol_type = other RNA
gctccagagccactccctcct

SEQ ID NO: 49563 - RNA, 21 nt, synthetic construct
  source 1..21: mol_type = other RNA
tgagcaggtggggaagttcaa

SEQ ID NO: 49564 - RNA, 21 nt, synthetic construct
  source 1..21: mol_type = other RNA
ggcaccacctggacccgccta

SEQ ID NO: 49565 - RNA, 21 nt, synthetic construct
  source 1..21: mol_type = other RNA
ccacaaccagtggctccacgg

SEQ ID NO: 49566 - RNA, 21 nt, synthetic construct
  source 1..21: mol_type = other RNA
gaccccctcctccgtcccggg

SEQ ID NO: 49567 - RNA, 21 nt, synthetic construct
  source 1..21: mol_type = other RNA
accccctcctccgtcccgggg

SEQ ID NO: 49568 - RNA, 21 nt, synthetic construct
  source 1..21: mol_type = other RNA
cccagcctggtgtccccctgg

SEQ ID NO: 49569 - RNA, 21 nt, synthetic construct
  source 1..21: mol_type = other RNA
tgagcaggtggggaagttcaa

SEQ ID NO: 49570 - RNA, 21 nt, synthetic construct
  source 1..21: mol_type = other RNA
ggcaccacctggacccgccta

SEQ ID NO: 49571 - RNA, 21 nt, synthetic construct
  source 1..21: mol_type = other RNA
ccacaaccagtggctccacgg

SEQ ID NO: 49572 - RNA, 21 nt, synthetic construct
  source 1..21: mol_type = other RNA
cggccaccacacccgcagcca

SEQ ID NO: 49573 - RNA, 21 nt, synthetic construct
  source 1..21: mol_type = other RNA
atcccctcctccaccctgtgg

SEQ ID NO: 49574 - RNA, 21 nt, synthetic construct
  source 1..21: mol_type = other RNA
accacagccaccatgacaagg

SEQ ID NO: 49575 - RNA, 21 nt, synthetic construct
  source 1..21: mol_type = other RNA
gcctcctccactctgggaaca

SEQ ID NO: 49576 - RNA, 21 nt, synthetic construct
  source 1..21: mol_type = other RNA
gggaaggaggagggcctgatc

SEQ ID NO: 49577 - RNA, 21 nt, synthetic construct
  source 1..21: mol_type = other RNA
gtgctggggaccaccaccatg

SEQ ID NO: 49578 - RNA, 21 nt, synthetic construct
  source 1..21: mol_type = other RNA
ccacagctggaggggatggcg

SEQ ID NO: 49579 - RNA, 21 nt, synthetic construct
  source 1..21: mol_type = other RNA
gggggctatggcagtgccagg

SEQ ID NO: 49580 - RNA, 21 nt, synthetic construct
  source 1..21: mol_type = other RNA
agtcccagcgctacgcctacg

SEQ ID NO: 49581 - RNA, 21 nt, synthetic construct
  source 1..21: mol_type = other RNA
gtgtacctggactgcagcaac

SEQ ID NO: 49582 - RNA, 21 nt, synthetic construct
  source 1..21: mol_type = other RNA
tgcaaccgcccttccagcact

SEQ ID NO: 49583 - RNA, 21 nt, synthetic construct
  source 1..21: mol_type = other RNA
actgaccaccacggccactac

SEQ ID NO: 49584 - RNA, 21 nt, synthetic construct
  source 1..21: mol_type = other RNA
ccaccaacccctcctcaactc

SEQ ID NO: 49585 - RNA, 21 nt, synthetic construct
  source 1..21: mol_type = other RNA
accctagcagcaaccaccggt

SEQ ID NO: 49586 - RNA, 21 nt, synthetic construct
  source 1..21: mol_type = other RNA
tgcaaccgcccttccagcact

SEQ ID NO: 49587 - RNA, 21 nt, synthetic construct
  source 1..21: mol_type = other RNA
actgaccaccacggccactac

SEQ ID NO: 49588 - RNA, 21 nt, synthetic construct
  source 1..21: mol_type = other RNA
ccaccaacccctcctcaactc

SEQ ID NO: 49589 - RNA, 21 nt, synthetic construct
  source 1..21: mol_type = other RNA
tgccgaacaccacggccacca

SEQ ID NO: 49590 - RNA, 21 nt, synthetic construct
  source 1..21: mol_type = other RNA
tccctgtcccccagcagtccc

SEQ ID NO: 49591 - RNA, 21 nt, synthetic construct
  source 1..21: mol_type = other RNA
cggggacttcccacaccccag

SEQ ID NO: 49592 - RNA, 21 nt, synthetic construct
  source 1..21: mol_type = other RNA
ggatcctcacagagcccagca

SEQ ID NO: 49593 - RNA, 21 nt, synthetic construct
  source 1..21: mol_type = other RNA
tgcaaccgcccttccagcact

SEQ ID NO: 49594 - RNA, 21 nt, synthetic construct
  source 1..21: mol_type = other RNA
actgaccaccacggccactac

SEQ ID NO: 49595 - RNA, 21 nt, synthetic construct
  source 1..21: mol_type = other RNA
ccaccaacccctcctcaactc

SEQ ID NO: 49596 - RNA, 21 nt, synthetic construct
  source 1..21: mol_type = other RNA
tgccgaacaccacggccacca

SEQ ID NO: 49597 - RNA, 21 nt, synthetic construct
  source 1..21: mol_type = other RNA
tgcaaccgcccttccagcact

SEQ ID NO: 49598 - RNA, 21 nt, synthetic construct
  source 1..21: mol_type = other RNA
ccaccaacccctcctcaactc

SEQ ID NO: 49599 - RNA, 21 nt, synthetic construct
  source 1..21: mol_type = other RNA
tgccgaacaccacggccacca

SEQ ID NO: 49600 - RNA, 21 nt, synthetic construct
  source 1..21: mol_type = other RNA
tccctgtcccccagcagtccc

SEQ ID NO: 49601 - RNA, 21 nt, synthetic construct
  source 1..21: mol_type = other RNA
cggggacttcccacaccccag

SEQ ID NO: 49602 - RNA, 21 nt, synthetic construct
  source 1..21: mol_type = other RNA
actgaccaccacggccactac

SEQ ID NO: 49603 - RNA, 21 nt, synthetic construct
  source 1..21: mol_type = other RNA
ccaccaacccctcctcaactc

SEQ ID NO: 49604 - RNA, 21 nt, synthetic construct
  source 1..21: mol_type = other RNA
agacgtggctggtccccgaca

SEQ ID NO: 49605 - RNA, 21 nt, synthetic construct
  source 1..21: mol_type = other RNA
tcctgcccggacgccctggca

SEQ ID NO: 49606 - RNA, 21 nt, synthetic construct
  source 1..21: mol_type = other RNA
catgggcatctgcgtgcaggc

SEQ ID NO: 49607 - RNA, 21 nt, synthetic construct
  source 1..21: mol_type = other RNA
tacctggccgcctgcgcccag

SEQ ID NO: 49608 - RNA, 21 nt, synthetic construct
  source 1..21: mol_type = other RNA
cctcctgcccggacgccctgg

SEQ ID NO: 49609 - RNA, 21 nt, synthetic construct
  source 1..21: mol_type = other RNA
catgtcctggaactccagcca

SEQ ID NO: 49610 - RNA, 21 nt, synthetic construct
  source 1..21: mol_type = other RNA
tccagggacgacggggagctt

SEQ ID NO: 49611 - RNA, 21 nt, synthetic construct
  source 1..21: mol_type = other RNA
gaccacccacaccgccacagt

SEQ ID NO: 49612 - RNA, 21 nt, synthetic construct
  source 1..21: mol_type = other RNA
gaccacccacaccgccacagt

SEQ ID NO: 49613 - RNA, 21 nt, synthetic construct
  source 1..21: mol_type = other RNA
aaatccacagctaccagcgtt

SEQ ID NO: 49614 - RNA, 21 nt, synthetic construct
  source 1..21: mol_type = other RNA
ccccgcgctccgtgctcctgc

SEQ ID NO: 49615 - RNA, 21 nt, synthetic construct
  source 1..21: mol_type = other RNA
gccctgtggagccgagctggg

SEQ ID NO: 49616 - RNA, 21 nt, synthetic construct
  source 1..21: mol_type = other RNA
cgaggagggcatctgccaccg

SEQ ID NO: 49617 - RNA, 21 nt, synthetic construct
  source 1..21: mol_type = other RNA
acctggccgcctgcgcccagg

SEQ ID NO: 49618 - RNA, 21 nt, synthetic construct
  source 1..21: mol_type = other RNA
cgaggaccactgtgtggacgg

SEQ ID NO: 49619 - RNA, 21 nt, synthetic construct
  source 1..21: mol_type = other RNA
ctggtgcagctggtgccactc

SEQ ID NO: 49620 - RNA, 21 nt, synthetic construct
  source 1..21: mol_type = other RNA
agctacgagctgatcctccaa

SEQ ID NO: 49621 - RNA, 21 nt, synthetic construct
  source 1..21: mol_type = other RNA
ctggtccagctggtacaatgg

SEQ ID NO: 49622 - RNA, 21 nt, synthetic construct
  source 1..21: mol_type = other RNA
tgggcaccgcccagagcccgg

SEQ ID NO: 49623 - RNA, 21 nt, synthetic construct
  source 1..21: mol_type = other RNA
agcacccttggtacagccacc

SEQ ID NO: 49624 - RNA, 21 nt, synthetic construct
  source 1..21: mol_type = other RNA
tcccatccccccagtgctgac

SEQ ID NO: 49625 - RNA, 21 nt, synthetic construct
  source 1..21: mol_type = other RNA
cccttctccagtccagggact

SEQ ID NO: 49626 - RNA, 21 nt, synthetic construct
  source 1..21: mol_type = other RNA
gcagccccacatcggccccaa

SEQ ID NO: 49627 - RNA, 21 nt, synthetic construct
  source 1..21: mol_type = other RNA
gccaccagttccatgtccacc

SEQ ID NO: 49628 - RNA, 21 nt, synthetic construct
  source 1..21: mol_type = other RNA
acccgggcaactgctggcacc

SEQ ID NO: 49629 - RNA, 21 nt, synthetic construct
  source 1..21: mol_type = other RNA
tcccatccccccagtgctgac

SEQ ID NO: 49630 - RNA, 21 nt, synthetic construct
  source 1..21: mol_type = other RNA
cccttctccagtccagggact

SEQ ID NO: 49631 - RNA, 21 nt, synthetic construct
  source 1..21: mol_type = other RNA
acggccaccacaaccagggcc

SEQ ID NO: 49632 - RNA, 21 nt, synthetic construct
  source 1..21: mol_type = other RNA
ggccaccacacccgcagccac

SEQ ID NO: 49633 - RNA, 21 nt, synthetic construct
  source 1..21: mol_type = other RNA
tgctgacaagcacagccacaa

SEQ ID NO: 49634 - RNA, 21 nt, synthetic construct
  source 1..21: mol_type = other RNA
gctgacaagcacagccacaaa

SEQ ID NO: 49635 - RNA, 21 nt, synthetic construct
  source 1..21: mol_type = other RNA
gccaccctgtcctccacccca

SEQ ID NO: 49636 - RNA, 21 nt, synthetic construct
  source 1..21: mol_type = other RNA
ccatccctctccggcaggtga

SEQ ID NO: 49637 - RNA, 21 nt, synthetic construct
  source 1..21: mol_type = other RNA
tctgtgctggggaccaccacc

SEQ ID NO: 49638 - RNA, 21 nt, synthetic construct
  source 1..21: mol_type = other RNA
cggggcccacatctccaccta

SEQ ID NO: 49639 - RNA, 21 nt, synthetic construct
  source 1..21: mol_type = other RNA
ccgtgctggctgagctgcgga

SEQ ID NO: 49640 - RNA, 21 nt, synthetic construct
  source 1..21: mol_type = other RNA
cccccggccagcaccacagca

SEQ ID NO: 49641 - RNA, 21 nt, synthetic construct
  source 1..21: mol_type = other RNA
acgagcgagctgtccacctct

SEQ ID NO: 49642 - RNA, 21 nt, synthetic construct
  source 1..21: mol_type = other RNA
ggatcagcacaaccaccacac

SEQ ID NO: 49643 - RNA, 21 nt, synthetic construct
  source 1..21: mol_type = other RNA
ctccaccaccaacccctcctc

SEQ ID NO: 49644 - RNA, 21 nt, synthetic construct
  source 1..21: mol_type = other RNA
tgtgagcaccacggccacgac

SEQ ID NO: 49645 - RNA, 21 nt, synthetic construct
  source 1..21: mol_type = other RNA
gcaccacggccacgacaccca

SEQ ID NO: 49646 - RNA, 21 nt, synthetic construct
  source 1..21: mol_type = other RNA
ggatcagcacaaccaccacac

SEQ ID NO: 49647 - RNA, 21 nt, synthetic construct
  source 1..21: mol_type = other RNA
ctccaccaccaacccctcctc

SEQ ID NO: 49648 - RNA, 21 nt, synthetic construct
  source 1..21: mol_type = other RNA
caaccacccttccagtgctga

SEQ ID NO: 49649 - RNA, 21 nt, synthetic construct
  source 1..21: mol_type = other RNA
ccaccacacccatggccacca

SEQ ID NO: 49650 - RNA, 21 nt, synthetic construct
  source 1..21: mol_type = other RNA
cagagcccagcactacagcca

SEQ ID NO: 49651 - RNA, 21 nt, synthetic construct
  source 1..21: mol_type = other RNA
cgaccaccacaaccagggcca

SEQ ID NO: 49652 - RNA, 21 nt, synthetic construct
  source 1..21: mol_type = other RNA
ggatcagcacaaccaccacac

SEQ ID NO: 49653 - RNA, 21 nt, synthetic construct
  source 1..21: mol_type = other RNA
ctccaccaccaacccctcctc

SEQ ID NO: 49654 - RNA, 21 nt, synthetic construct
  source 1..21: mol_type = other RNA
tgtgagcaccacggccacgac

SEQ ID NO: 49655 - RNA, 21 nt, synthetic construct
  source 1..21: mol_type = other RNA
gcaccacggccacgacaccca

SEQ ID NO: 49656 - RNA, 21 nt, synthetic construct
  source 1..21: mol_type = other RNA
ggatcagcacaaccaccacac

SEQ ID NO: 49657 - RNA, 21 nt, synthetic construct
  source 1..21: mol_type = other RNA
ctccaccaccaacccctcctc

SEQ ID NO: 49658 - RNA, 21 nt, synthetic construct
  source 1..21: mol_type = other RNA
caaccacccttccagtgctga

SEQ ID NO: 49659 - RNA, 21 nt, synthetic construct
  source 1..21: mol_type = other RNA
tgtgagcaccacggccacgac

SEQ ID NO: 49660 - RNA, 21 nt, synthetic construct
  source 1..21: mol_type = other RNA
gcaccacggccacgacaccca

SEQ ID NO: 49661 - RNA, 21 nt, synthetic construct
  source 1..21: mol_type = other RNA
ccagggactgcaactgccctt

SEQ ID NO: 49662 - RNA, 21 nt, synthetic construct
  source 1..21: mol_type = other RNA
ggatcagcacaaccaccacac

SEQ ID NO: 49663 - RNA, 21 nt, synthetic construct
  source 1..21: mol_type = other RNA
ctccaccaccaacccctcctc

SEQ ID NO: 49664 - RNA, 21 nt, synthetic construct
  source 1..21: mol_type = other RNA
caaccacccttccagtgctga

SEQ ID NO: 49665 - RNA, 21 nt, synthetic construct
  source 1..21: mol_type = other RNA
gtctgtgctggggaccaccac

SEQ ID NO: 49666 - RNA, 21 nt, synthetic construct
  source 1..21: mol_type = other RNA
tctgcgtgcaggcctgcccct

SEQ ID NO: 49667 - RNA, 21 nt, synthetic construct
  source 1..21: mol_type = other RNA
aggcgcccttccctgccacat

SEQ ID NO: 49668 - RNA, 21 nt, synthetic construct
  source 1..21: mol_type = other RNA
tgggcctcctctgcggagccc

SEQ ID NO: 49669 - RNA, 21 nt, synthetic construct
  source 1..21: mol_type = other RNA
ggcctcctctgcggagccccc

SEQ ID NO: 49670 - RNA, 21 nt, synthetic construct
  source 1..21: mol_type = other RNA
acccacaaccagaggctccac

SEQ ID NO: 49671 - RNA, 21 nt, synthetic construct
  source 1..21: mol_type = other RNA
acccacaaccagaggctccac

SEQ ID NO: 49672 - RNA, 21 nt, synthetic construct
  source 1..21: mol_type = other RNA
gtccccccacccgtgccagcc

SEQ ID NO: 49673 - RNA, 21 nt, synthetic construct
  source 1..21: mol_type = other RNA
gggcacgacccgctgtcaacc

SEQ ID NO: 49674 - RNA, 21 nt, synthetic construct
  source 1..21: mol_type = other RNA
acggccaccccgtcctccacc

SEQ ID NO: 49675 - RNA, 21 nt, synthetic construct
  source 1..21: mol_type = other RNA
acggccaccccgtcctccacc

SEQ ID NO: 49676 - RNA, 21 nt, synthetic construct
  source 1..21: mol_type = other RNA
acggccaccccgtcctccacc

SEQ ID NO: 49677 - RNA, 21 nt, synthetic construct
  source 1..21: mol_type = other RNA
acggccaccccgtcctccacc

SEQ ID NO: 49678 - RNA, 21 nt, synthetic construct
  source 1..21: mol_type = other RNA
acggccaccccgtcctccacc

SEQ ID NO: 49679 - RNA, 21 nt, synthetic construct
  source 1..21: mol_type = other RNA
acggccaccccgtcctccacc

SEQ ID NO: 49680 - RNA, 21 nt, synthetic construct
  source 1..21: mol_type = other RNA
ggccaccctgtcctccacccc

SEQ ID NO: 49681 - RNA, 21 nt, synthetic construct
  source 1..21: mol_type = other RNA
caatgggcagcgggaggagct

SEQ ID NO: 49682 - RNA, 21 nt, synthetic construct
  source 1..21: mol_type = other RNA
ggcacctgctctgtgcagggc

SEQ ID NO: 49683 - RNA, 21 nt, synthetic construct
  source 1..21: mol_type = other RNA
ctcctgcccggacgccctggc

SEQ ID NO: 49684 - RNA, 21 nt, synthetic construct
  source 1..21: mol_type = other RNA
ggcacaggtggggcagaaggt

SEQ ID NO: 49685 - RNA, 21 nt, synthetic construct
  source 1..21: mol_type = other RNA
cagtccagggactgcaaccgc

SEQ ID NO: 49686 - RNA, 21 nt, synthetic construct
  source 1..21: mol_type = other RNA
gatcagcacaaccaccacacc

SEQ ID NO: 49687 - RNA, 21 nt, synthetic construct
  source 1..21: mol_type = other RNA
cagtccagggactgcaaccgc

SEQ ID NO: 49688 - RNA, 21 nt, synthetic construct
  source 1..21: mol_type = other RNA
gatcagcacaaccaccacacc

SEQ ID NO: 49689 - RNA, 21 nt, synthetic construct
  source 1..21: mol_type = other RNA
cagcacggccaccacacccac

SEQ ID NO: 49690 - RNA, 21 nt, synthetic construct
  source 1..21: mol_type = other RNA
ctgctggcaccctcaaagtgc

SEQ ID NO: 49691 - RNA, 21 nt, synthetic construct
  source 1..21: mol_type = other RNA
cagcacggccaccacacccac

SEQ ID NO: 49692 - RNA, 21 nt, synthetic construct
  source 1..21: mol_type = other RNA
cagtccagggactgcaaccgc

SEQ ID NO: 49693 - RNA, 21 nt, synthetic construct
  source 1..21: mol_type = other RNA
gatcagcacaaccaccacacc

SEQ ID NO: 49694 - RNA, 21 nt, synthetic construct
  source 1..21: mol_type = other RNA
cagtccagggactgcaaccgc

SEQ ID NO: 49695 - RNA, 21 nt, synthetic construct
  source 1..21: mol_type = other RNA
cacagtcaccccctcctccag

SEQ ID NO: 49696 - RNA, 21 nt, synthetic construct
  source 1..21: mol_type = other RNA
gatcagcacaaccaccacacc

SEQ ID NO: 49697 - RNA, 21 nt, synthetic construct
  source 1..21: mol_type = other RNA
gatcagcacaaccaccacacc

SEQ ID NO: 49698 - RNA, 21 nt, synthetic construct
  source 1..21: mol_type = other RNA
tctgggaacagctcacacccc

SEQ ID NO: 49699 - RNA, 21 nt, synthetic construct
  source 1..21: mol_type = other RNA
gctgtcctcgccctcccctgc

SEQ ID NO: 49700 - RNA, 21 nt, synthetic construct
  source 1..21: mol_type = other RNA
ccaagacgtggctggtccccg

SEQ ID NO: 49701 - RNA, 21 nt, synthetic construct
  source 1..21: mol_type = other RNA
cagaaaggatggctgctgggc

SEQ ID NO: 49702 - RNA, 21 nt, synthetic construct
  source 1..21: mol_type = other RNA
gccccgggccgagaacccctg

SEQ ID NO: 49703 - RNA, 21 nt, synthetic construct
  source 1..21: mol_type = other RNA
gtgcaacacaaccacctgccc

SEQ ID NO: 49704 - RNA, 21 nt, synthetic construct
  source 1..21: mol_type = other RNA
ggagccccccggcctgtgtgt

SEQ ID NO: 49705 - RNA, 21 nt, synthetic construct
  source 1..21: mol_type = other RNA
tggccttgcccctccctgatg

SEQ ID NO: 49706 - RNA, 21 nt, synthetic construct
  source 1..21: mol_type = other RNA
gtccctgccacggccggagcg

SEQ ID NO: 49707 - RNA, 21 nt, synthetic construct
  source 1..21: mol_type = other RNA
tgccagcccccaggatgggtg

SEQ ID NO: 49708 - RNA, 21 nt, synthetic construct
  source 1..21: mol_type = other RNA
ccccaggatgggtgccccgag

SEQ ID NO: 49709 - RNA, 21 nt, synthetic construct
  source 1..21: mol_type = other RNA
ccagggccctgtggagccgag

SEQ ID NO: 49710 - RNA, 21 nt, synthetic construct
  source 1..21: mol_type = other RNA
cctgtggagccgagctgggag

SEQ ID NO: 49711 - RNA, 21 nt, synthetic construct
  source 1..21: mol_type = other RNA
tggggtgacttccactacaag

SEQ ID NO: 49712 - RNA, 21 nt, synthetic construct
  source 1..21: mol_type = other RNA
gggctggtgctggaggcgtcc

SEQ ID NO: 49713 - RNA, 21 nt, synthetic construct
  source 1..21: mol_type = other RNA
gtcctcatcaatgggcagcgg

SEQ ID NO: 49714 - RNA, 21 nt, synthetic construct
  source 1..21: mol_type = other RNA
cgccaggctgaccccgctcca

SEQ ID NO: 49715 - RNA, 21 nt, synthetic construct
  source 1..21: mol_type = other RNA
tggccgcctgcgcccaggacc

SEQ ID NO: 49716 - RNA, 21 nt, synthetic construct
  source 1..21: mol_type = other RNA
cccacctgcccgtgtgccacc

SEQ ID NO: 49717 - RNA, 21 nt, synthetic construct
  source 1..21: mol_type = other RNA
gctcctgcacctgctccgggg

SEQ ID NO: 49718 - RNA, 21 nt, synthetic construct
  source 1..21: mol_type = other RNA
tctgtgcagggcggggcccac

SEQ ID NO: 49719 - RNA, 21 nt, synthetic construct
  source 1..21: mol_type = other RNA
tggtgcagacaggcctggggc

SEQ ID NO: 49720 - RNA, 21 nt, synthetic construct
  source 1..21: mol_type = other RNA
acctggaaggcccaggctgcc

SEQ ID NO: 49721 - RNA, 21 nt, synthetic construct
  source 1..21: mol_type = other RNA
tacgcccggcactggtgctcg

SEQ ID NO: 49722 - RNA, 21 nt, synthetic construct
  source 1..21: mol_type = other RNA
gtgccttctcgcgctgccact

SEQ ID NO: 49723 - RNA, 21 nt, synthetic construct
  source 1..21: mol_type = other RNA
cctgccagcccacttgccgcg

SEQ ID NO: 49724 - RNA, 21 nt, synthetic construct
  source 1..21: mol_type = other RNA
ggactgcagcaacagctcggc

SEQ ID NO: 49725 - RNA, 21 nt, synthetic construct
  source 1..21: mol_type = other RNA
gcacctgcaggaaccggaggt

SEQ ID NO: 49726 - RNA, 21 nt, synthetic construct
  source 1..21: mol_type = other RNA
acgggatggccgtgtcctggg

SEQ ID NO: 49727 - RNA, 21 nt, synthetic construct
  source 1..21: mol_type = other RNA
ggtggcgactgcgagtgtttc

SEQ ID NO: 49728 - RNA, 21 nt, synthetic construct
  source 1..21: mol_type = other RNA
agctgtaactgcacacccagt

SEQ ID NO: 49729 - RNA, 21 nt, synthetic construct
  source 1..21: mol_type = other RNA
gcccagagcccggcctgggag

SEQ ID NO: 49730 - RNA, 21 nt, synthetic construct
  source 1..21: mol_type = other RNA
cagccctcagccctccctcag

SEQ ID NO: 49731 - RNA, 21 nt, synthetic construct
  source 1..21: mol_type = other RNA
gaaaagaccaccctatgggtg

SEQ ID NO: 49732 - RNA, 21 nt, synthetic construct
  source 1..21: mol_type = other RNA
agggctcccccggccagcacc

SEQ ID NO: 49733 - RNA, 21 nt, synthetic construct
  source 1..21: mol_type = other RNA
caccacggccaccacacccac

SEQ ID NO: 49734 - RNA, 21 nt, synthetic construct
  source 1..21: mol_type = other RNA
gccaccggctctgtggccacc

SEQ ID NO: 49735 - RNA, 21 nt, synthetic construct
  source 1..21: mol_type = other RNA
cctcctccaccccaggaacag

SEQ ID NO: 49736 - RNA, 21 nt, synthetic construct
  source 1..21: mol_type = other RNA
cccaggaacagctcacactac

SEQ ID NO: 49737 - RNA, 21 nt, synthetic construct
  source 1..21: mol_type = other RNA
ccacacccacaaccagaggct

SEQ ID NO: 49738 - RNA, 21 nt, synthetic construct
  source 1..21: mol_type = other RNA
accctcctctagcacacagac

SEQ ID NO: 49739 - RNA, 21 nt, synthetic construct
  source 1..21: mol_type = other RNA
ctgaccaccacggccactacg

SEQ ID NO: 49740 - RNA, 21 nt, synthetic construct
  source 1..21: mol_type = other RNA
accagcaacacagtgactccc

SEQ ID NO: 49741 - RNA, 21 nt, synthetic construct
  source 1..21: mol_type = other RNA
ctgccccccagcagtccccac

SEQ ID NO: 49742 - RNA, 21 nt, synthetic construct
  source 1..21: mol_type = other RNA
tgggcaccacccacatcacag

SEQ ID NO: 49743 - RNA, 21 nt, synthetic construct
  source 1..21: mol_type = other RNA
taaccacggtggtgaccatgg

SEQ ID NO: 49744 - RNA, 21 nt, synthetic construct
  source 1..21: mol_type = other RNA
ggtggtgaccatgggctgtga

SEQ ID NO: 49745 - RNA, 21 nt, synthetic construct
  source 1..21: mol_type = other RNA
agagtggctggactacagcta

SEQ ID NO: 49746 - RNA, 21 nt, synthetic construct
  source 1..21: mol_type = other RNA
gcagcctggactttggcctgg

SEQ ID NO: 49747 - RNA, 21 nt, synthetic construct
  source 1..21: mol_type = other RNA
gccaccggctctgtggccacc

SEQ ID NO: 49748 - RNA, 21 nt, synthetic construct
  source 1..21: mol_type = other RNA
cctcctccaccccaggaacag

SEQ ID NO: 49749 - RNA, 21 nt, synthetic construct
  source 1..21: mol_type = other RNA
cccaggaacagctcacactac

SEQ ID NO: 49750 - RNA, 21 nt, synthetic construct
  source 1..21: mol_type = other RNA
accctcctctagcacacagac

SEQ ID NO: 49751 - RNA, 21 nt, synthetic construct
  source 1..21: mol_type = other RNA
ctgaccaccacggccactacg

SEQ ID NO: 49752 - RNA, 21 nt, synthetic construct
  source 1..21: mol_type = other RNA
tcaggcaccttgggcaccacc

SEQ ID NO: 49753 - RNA, 21 nt, synthetic construct
  source 1..21: mol_type = other RNA
tgggcaccacccacatcacag

SEQ ID NO: 49754 - RNA, 21 nt, synthetic construct
  source 1..21: mol_type = other RNA
ccacaccccagcagcaaccac

SEQ ID NO: 49755 - RNA, 21 nt, synthetic construct
  source 1..21: mol_type = other RNA
taaccacggtggtgaccatgg

SEQ ID NO: 49756 - RNA, 21 nt, synthetic construct
  source 1..21: mol_type = other RNA
ggtggtgaccatgggctgtga

SEQ ID NO: 49757 - RNA, 21 nt, synthetic construct
  source 1..21: mol_type = other RNA
agagtggctggactacagcta

SEQ ID NO: 49758 - RNA, 21 nt, synthetic construct
  source 1..21: mol_type = other RNA
gcagcctggactttggcctgg

SEQ ID NO: 49759 - RNA, 21 nt, synthetic construct
  source 1..21: mol_type = other RNA
tcctccaccccgggaacagct

SEQ ID NO: 49760 - RNA, 21 nt, synthetic construct
  source 1..21: mol_type = other RNA
agaccaccacacccatggcca

SEQ ID NO: 49761 - RNA, 21 nt, synthetic construct
  source 1..21: mol_type = other RNA
cctcctccactccggagacca

SEQ ID NO: 49762 - RNA, 21 nt, synthetic construct
  source 1..21: mol_type = other RNA
aagggccaccagttccatgtc

SEQ ID NO: 49763 - RNA, 21 nt, synthetic construct
  source 1..21: mol_type = other RNA
caccagttccatgtccacccc

SEQ ID NO: 49764 - RNA, 21 nt, synthetic construct
  source 1..21: mol_type = other RNA
tgaccacagcagccactacaa

SEQ ID NO: 49765 - RNA, 21 nt, synthetic construct
  source 1..21: mol_type = other RNA
gaccacagcagccactacaac

SEQ ID NO: 49766 - RNA, 21 nt, synthetic construct
  source 1..21: mol_type = other RNA
cacagcagccactacaactgc

SEQ ID NO: 49767 - RNA, 21 nt, synthetic construct
  source 1..21: mol_type = other RNA
cccgggcaactgctggcaccc

SEQ ID NO: 49768 - RNA, 21 nt, synthetic construct
  source 1..21: mol_type = other RNA
ttcctccctgggcaccgcctg

SEQ ID NO: 49769 - RNA, 21 nt, synthetic construct
  source 1..21: mol_type = other RNA
tcctccctgggcaccgcctgg

SEQ ID NO: 49770 - RNA, 21 nt, synthetic construct
  source 1..21: mol_type = other RNA
cacgaccaccacaaccagggc

SEQ ID NO: 49771 - RNA, 21 nt, synthetic construct
  source 1..21: mol_type = other RNA
gccaccggctctgtggccacc

SEQ ID NO: 49772 - RNA, 21 nt, synthetic construct
  source 1..21: mol_type = other RNA
cctcctccaccccaggaacag

SEQ ID NO: 49773 - RNA, 21 nt, synthetic construct
  source 1..21: mol_type = other RNA
cccaggaacagctcacactac

SEQ ID NO: 49774 - RNA, 21 nt, synthetic construct
  source 1..21: mol_type = other RNA
ccacacccacaaccagaggct

SEQ ID NO: 49775 - RNA, 21 nt, synthetic construct
  source 1..21: mol_type = other RNA
accctcctctagcacacagac

SEQ ID NO: 49776 - RNA, 21 nt, synthetic construct
  source 1..21: mol_type = other RNA
ctgaccaccacggccactacg

SEQ ID NO: 49777 - RNA, 21 nt, synthetic construct
  source 1..21: mol_type = other RNA
ctgccccccagcagtccccac

SEQ ID NO: 49778 - RNA, 21 nt, synthetic construct
  source 1..21: mol_type = other RNA
tgggcaccacccacatcacag

SEQ ID NO: 49779 - RNA, 21 nt, synthetic construct
  source 1..21: mol_type = other RNA
ccacaccccagcagcaaccac

SEQ ID NO: 49780 - RNA, 21 nt, synthetic construct
  source 1..21: mol_type = other RNA
agagtggctggactacagcta

SEQ ID NO: 49781 - RNA, 21 nt, synthetic construct
  source 1..21: mol_type = other RNA
gcagcctggactttggcctgg

SEQ ID NO: 49782 - RNA, 21 nt, synthetic construct
  source 1..21: mol_type = other RNA
gccaccggctctgtggccacc

SEQ ID NO: 49783 - RNA, 21 nt, synthetic construct
  source 1..21: mol_type = other RNA
cccaggaacagctcacactac

SEQ ID NO: 49784 - RNA, 21 nt, synthetic construct
  source 1..21: mol_type = other RNA
accctcctctagcacacagac

SEQ ID NO: 49785 - RNA, 21 nt, synthetic construct
  source 1..21: mol_type = other RNA
tcaggcaccttgggcaccacc

SEQ ID NO: 49786 - RNA, 21 nt, synthetic construct
  source 1..21: mol_type = other RNA
tgggcaccacccacatcacag

SEQ ID NO: 49787 - RNA, 21 nt, synthetic construct
  source 1..21: mol_type = other RNA
ccacaccccagcagcaaccac

SEQ ID NO: 49788 - RNA, 21 nt, synthetic construct
  source 1..21: mol_type = other RNA
tccccagggacgaccaccccg

SEQ ID NO: 49789 - RNA, 21 nt, synthetic construct
  source 1..21: mol_type = other RNA
agagtggctggactacagcta

SEQ ID NO: 49790 - RNA, 21 nt, synthetic construct
  source 1..21: mol_type = other RNA
gcagcctggactttggcctgg

SEQ ID NO: 49791 - RNA, 21 nt, synthetic construct
  source 1..21: mol_type = other RNA
tcctccaccccgggaacagct

SEQ ID NO: 49792 - RNA, 21 nt, synthetic construct
  source 1..21: mol_type = other RNA
ctgaccagcccggccaccaca

SEQ ID NO: 49793 - RNA, 21 nt, synthetic construct
  source 1..21: mol_type = other RNA
cctcctccactccggagacca

SEQ ID NO: 49794 - RNA, 21 nt, synthetic construct
  source 1..21: mol_type = other RNA
acaagggccaccagttccacg

SEQ ID NO: 49795 - RNA, 21 nt, synthetic construct
  source 1..21: mol_type = other RNA
caccagttccacgtccacccc

SEQ ID NO: 49796 - RNA, 21 nt, synthetic construct
  source 1..21: mol_type = other RNA
tgaccacagcagccactacaa

SEQ ID NO: 49797 - RNA, 21 nt, synthetic construct
  source 1..21: mol_type = other RNA
gaccacagcagccactacaac

SEQ ID NO: 49798 - RNA, 21 nt, synthetic construct
  source 1..21: mol_type = other RNA
cacagcagccactacaactgc

SEQ ID NO: 49799 - RNA, 21 nt, synthetic construct
  source 1..21: mol_type = other RNA
agtccagggactgcaactgcc

SEQ ID NO: 49800 - RNA, 21 nt, synthetic construct
  source 1..21: mol_type = other RNA
gccaccggctctgtggccacc

SEQ ID NO: 49801 - RNA, 21 nt, synthetic construct
  source 1..21: mol_type = other RNA
cctcctccaccccaggaacag

SEQ ID NO: 49802 - RNA, 21 nt, synthetic construct
  source 1..21: mol_type = other RNA
cccaggaacagctcacactac

SEQ ID NO: 49803 - RNA, 21 nt, synthetic construct
  source 1..21: mol_type = other RNA
accctcctctagcacacagac

SEQ ID NO: 49804 - RNA, 21 nt, synthetic construct
  source 1..21: mol_type = other RNA
ctgaccaccacggccactacg

SEQ ID NO: 49805 - RNA, 21 nt, synthetic construct
  source 1..21: mol_type = other RNA
acccatcaccccagtgctgac

SEQ ID NO: 49806 - RNA, 21 nt, synthetic construct
  source 1..21: mol_type = other RNA
agccaccagctccaaagccac

SEQ ID NO: 49807 - RNA, 21 nt, synthetic construct
  source 1..21: mol_type = other RNA
gccaccagctccaaagccact

SEQ ID NO: 49808 - RNA, 21 nt, synthetic construct
  source 1..21: mol_type = other RNA
catgtccaccatgtccacaat

SEQ ID NO: 49809 - RNA, 21 nt, synthetic construct
  source 1..21: mol_type = other RNA
catgtccacaatccacacctc

SEQ ID NO: 49810 - RNA, 21 nt, synthetic construct
  source 1..21: mol_type = other RNA
gcagcctgccaaccttcagcg

SEQ ID NO: 49811 - RNA, 21 nt, synthetic construct
  source 1..21: mol_type = other RNA
cccgctgtcctcgccctcccc

SEQ ID NO: 49812 - RNA, 21 nt, synthetic construct
  source 1..21: mol_type = other RNA
gcatctgcagcatgtggggcg

SEQ ID NO: 49813 - RNA, 21 nt, synthetic construct
  source 1..21: mol_type = other RNA
tgggaaggaggagggcctgat

SEQ ID NO: 49814 - RNA, 21 nt, synthetic construct
  source 1..21: mol_type = other RNA
ggaaggaggagggcctgatcc

SEQ ID NO: 49815 - RNA, 21 nt, synthetic construct
  source 1..21: mol_type = other RNA
gaaggaggagggcctgatcct

SEQ ID NO: 49816 - RNA, 21 nt, synthetic construct
  source 1..21: mol_type = other RNA
ccctgggcgtgagcgtcacct

SEQ ID NO: 49817 - RNA, 21 nt, synthetic construct
  source 1..21: mol_type = other RNA
ttctgccctgaggaccagatc

SEQ ID NO: 49818 - RNA, 21 nt, synthetic construct
  source 1..21: mol_type = other RNA
gggcaggagtccatctgcacc

SEQ ID NO: 49819 - RNA, 21 nt, synthetic construct
  source 1..21: mol_type = other RNA
tccatctgcacccaggaggag

SEQ ID NO: 49820 - RNA, 21 nt, synthetic construct
  source 1..21: mol_type = other RNA
cgatggccagccagtccagct

SEQ ID NO: 49821 - RNA, 21 nt, synthetic construct
  source 1..21: mol_type = other RNA
tggccagccagtccagctgaa

SEQ ID NO: 49822 - RNA, 21 nt, synthetic construct
  source 1..21: mol_type = other RNA
tacctctgtgaggctgagggt

SEQ ID NO: 49823 - RNA, 21 nt, synthetic construct
  source 1..21: mol_type = other RNA
tgtggcaccagggctgcgaga

SEQ ID NO: 49824 - RNA, 21 nt, synthetic construct
  source 1..21: mol_type = other RNA
ctgccaggagaggcgggtcca

SEQ ID NO: 49825 - RNA, 21 nt, synthetic construct
  source 1..21: mol_type = other RNA
tcatgaaaaccttgggcctcc

SEQ ID NO: 49826 - RNA, 21 nt, synthetic construct
  source 1..21: mol_type = other RNA
cggccggagcgcccgcgcagc

SEQ ID NO: 49827 - RNA, 21 nt, synthetic construct
  source 1..21: mol_type = other RNA
tccctgcccgtccccgtcccc

SEQ ID NO: 49828 - RNA, 21 nt, synthetic construct
  source 1..21: mol_type = other RNA
aggcctagtgggctccaggcc

SEQ ID NO: 49829 - RNA, 21 nt, synthetic construct
  source 1..21: mol_type = other RNA
ggcctagtgggctccaggcct

SEQ ID NO: 49830 - RNA, 21 nt, synthetic construct
  source 1..21: mol_type = other RNA
gcctagtgggctccaggcctg

SEQ ID NO: 49831 - RNA, 21 nt, synthetic construct
  source 1..21: mol_type = other RNA
cctagtgggctccaggcctgt

SEQ ID NO: 49832 - RNA, 21 nt, synthetic construct
  source 1..21: mol_type = other RNA
gccgcactggcctcctggtgg

SEQ ID NO: 49833 - RNA, 21 nt, synthetic construct
  source 1..21: mol_type = other RNA
ccgcactggcctcctggtgga

SEQ ID NO: 49834 - RNA, 21 nt, synthetic construct
  source 1..21: mol_type = other RNA
ggtggagcagagcggggacta

SEQ ID NO: 49835 - RNA, 21 nt, synthetic construct
  source 1..21: mol_type = other RNA
catcaaggtcagcatccggct

SEQ ID NO: 49836 - RNA, 21 nt, synthetic construct
  source 1..21: mol_type = other RNA
ggcctgtgtggggacttcaac

SEQ ID NO: 49837 - RNA, 21 nt, synthetic construct
  source 1..21: mol_type = other RNA
gcctgtgtggggacttcaacg

SEQ ID NO: 49838 - RNA, 21 nt, synthetic construct
  source 1..21: mol_type = other RNA
ggaggtgccctgagctctgcc

SEQ ID NO: 49839 - RNA, 21 nt, synthetic construct
  source 1..21: mol_type = other RNA
gtgtggacggctgcttctgcc

SEQ ID NO: 49840 - RNA, 21 nt, synthetic construct
  source 1..21: mol_type = other RNA
ctgcctgtgccaatgccagga

SEQ ID NO: 49841 - RNA, 21 nt, synthetic construct
  source 1..21: mol_type = other RNA
tcgcgctgccactccatcatc

SEQ ID NO: 49842 - RNA, 21 nt, synthetic construct
  source 1..21: mol_type = other RNA
tgccactccatcatcaacccc

SEQ ID NO: 49843 - RNA, 21 nt, synthetic construct
  source 1..21: mol_type = other RNA
gacggctgcacctgccccgcg

SEQ ID NO: 49844 - RNA, 21 nt, synthetic construct
  source 1..21: mol_type = other RNA
tgccccgcgggcaccttcctc

SEQ ID NO: 49845 - RNA, 21 nt, synthetic construct
  source 1..21: mol_type = other RNA
cccgcccaggagtgcccctgc

SEQ ID NO: 49846 - RNA, 21 nt, synthetic construct
  source 1..21: mol_type = other RNA
tggtgcacgacgagggcgccg

SEQ ID NO: 49847 - RNA, 21 nt, synthetic construct
  source 1..21: mol_type = other RNA
ctggactgcagcaacagctcg

SEQ ID NO: 49848 - RNA, 21 nt, synthetic construct
  source 1..21: mol_type = other RNA
aaggcagctgcgagtacatct

SEQ ID NO: 49849 - RNA, 21 nt, synthetic construct
  source 1..21: mol_type = other RNA
ggactactgtggggacaacac

SEQ ID NO: 49850 - RNA, 21 nt, synthetic construct
  source 1..21: mol_type = other RNA
acaacaccacccacgggacct

SEQ ID NO: 49851 - RNA, 21 nt, synthetic construct
  source 1..21: mol_type = other RNA
agctctccccctcctgcccgg

SEQ ID NO: 49852 - RNA, 21 nt, synthetic construct
  source 1..21: mol_type = other RNA
ctctccccctcctgcccggac

SEQ ID NO: 49853 - RNA, 21 nt, synthetic construct
  source 1..21: mol_type = other RNA
tggctgcctacgcccaggcct

SEQ ID NO: 49854 - RNA, 21 nt, synthetic construct
  source 1..21: mol_type = other RNA
ggctgcctacgcccaggcctg

SEQ ID NO: 49855 - RNA, 21 nt, synthetic construct
  source 1..21: mol_type = other RNA
ctacgcccaggcctgccacga

SEQ ID NO: 49856 - RNA, 21 nt, synthetic construct
  source 1..21: mol_type = other RNA
gactccggacacctgcccctt

SEQ ID NO: 49857 - RNA, 21 nt, synthetic construct
  source 1..21: mol_type = other RNA
acggcaccatcatcaggaagg

SEQ ID NO: 49858 - RNA, 21 nt, synthetic construct
  source 1..21: mol_type = other RNA
accgcctgggtcccccactcc

SEQ ID NO: 49859 - RNA, 21 nt, synthetic construct
  source 1..21: mol_type = other RNA
gtccagctggtacaatgggca

SEQ ID NO: 49860 - RNA, 21 nt, synthetic construct
  source 1..21: mol_type = other RNA
gcaccgcccagagcccggcct

SEQ ID NO: 49861 - RNA, 21 nt, synthetic construct
  source 1..21: mol_type = other RNA
tgccctgtgctggctgacatc

SEQ ID NO: 49862 - RNA, 21 nt, synthetic construct
  source 1..21: mol_type = other RNA
ctccccggccccaggcaccag

SEQ ID NO: 49863 - RNA, 21 nt, synthetic construct
  source 1..21: mol_type = other RNA
cccaggcaccagccctcagcc

SEQ ID NO: 49864 - RNA, 21 nt, synthetic construct
  source 1..21: mol_type = other RNA
gtgcctaccccaacccagacc

SEQ ID NO: 49865 - RNA, 21 nt, synthetic construct
  source 1..21: mol_type = other RNA
cccaactggaccctggcacag

SEQ ID NO: 49866 - RNA, 21 nt, synthetic construct
  source 1..21: mol_type = other RNA
tggaccctggcacaggtgggg

SEQ ID NO: 49867 - RNA, 21 nt, synthetic construct
  source 1..21: mol_type = other RNA
ccggccagcaccacagcagtc

SEQ ID NO: 49868 - RNA, 21 nt, synthetic construct
  source 1..21: mol_type = other RNA
atggcgcccctcacagccacc

SEQ ID NO: 49869 - RNA, 21 nt, synthetic construct
  source 1..21: mol_type = other RNA
agaccagcacgcccaggacag

SEQ ID NO: 49870 - RNA, 21 nt, synthetic construct
  source 1..21: mol_type = other RNA
gactaacaccaccaccagcca

SEQ ID NO: 49871 - RNA, 21 nt, synthetic construct
  source 1..21: mol_type = other RNA
actaacaccaccaccagccag

SEQ ID NO: 49872 - RNA, 21 nt, synthetic construct
  source 1..21: mol_type = other RNA
caccaccagccagggcacgac

SEQ ID NO: 49873 - RNA, 21 nt, synthetic construct
  source 1..21: mol_type = other RNA
ccactccctcctccagtccag

SEQ ID NO: 49874 - RNA, 21 nt, synthetic construct
  source 1..21: mol_type = other RNA
agaagcacagccaccacaccc

SEQ ID NO: 49875 - RNA, 21 nt, synthetic construct
  source 1..21: mol_type = other RNA
ccctgggcaccacctggaccc

SEQ ID NO: 49876 - RNA, 21 nt, synthetic construct
  source 1..21: mol_type = other RNA
caccacacccacggccaccat

SEQ ID NO: 49877 - RNA, 21 nt, synthetic construct
  source 1..21: mol_type = other RNA
cacccacggccaccatgtcca

SEQ ID NO: 49878 - RNA, 21 nt, synthetic construct
  source 1..21: mol_type = other RNA
ccgccacggccaccacaactg

SEQ ID NO: 49879 - RNA, 21 nt, synthetic construct
  source 1..21: mol_type = other RNA
caccggctctgtggccacccc

SEQ ID NO: 49880 - RNA, 21 nt, synthetic construct
  source 1..21: mol_type = other RNA
accggctctgtggccaccccc

SEQ ID NO: 49881 - RNA, 21 nt, synthetic construct
  source 1..21: mol_type = other RNA
ctcctccatcccggggaccac

SEQ ID NO: 49882 - RNA, 21 nt, synthetic construct
  source 1..21: mol_type = other RNA
tcctccatcccggggaccacc

SEQ ID NO: 49883 - RNA, 21 nt, synthetic construct
  source 1..21: mol_type = other RNA
accgccacagtgctgaccacc

SEQ ID NO: 49884 - RNA, 21 nt, synthetic construct
  source 1..21: mol_type = other RNA
caccaccacaactgtggccac

SEQ ID NO: 49885 - RNA, 21 nt, synthetic construct
  source 1..21: mol_type = other RNA
ctctagcacacagaccagtgg

SEQ ID NO: 49886 - RNA, 21 nt, synthetic construct
  source 1..21: mol_type = other RNA
tcactgaccaccacggccact

SEQ ID NO: 49887 - RNA, 21 nt, synthetic construct
  source 1..21: mol_type = other RNA
caccggctccaccaccaaccc

SEQ ID NO: 49888 - RNA, 21 nt, synthetic construct
  source 1..21: mol_type = other RNA
atccccccagtgctgaccacc

SEQ ID NO: 49889 - RNA, 21 nt, synthetic construct
  source 1..21: mol_type = other RNA
tccccccagtgctgaccacca

SEQ ID NO: 49890 - RNA, 21 nt, synthetic construct
  source 1..21: mol_type = other RNA
agtgactccctcctctgccct

SEQ ID NO: 49891 - RNA, 21 nt, synthetic construct
  source 1..21: mol_type = other RNA
cgatccctgccccccagcagt

SEQ ID NO: 49892 - RNA, 21 nt, synthetic construct
  source 1..21: mol_type = other RNA
ctggacttcggccacctcggg

SEQ ID NO: 49893 - RNA, 21 nt, synthetic construct
  source 1..21: mol_type = other RNA
cgactccagccctttccagcc

SEQ ID NO: 49894 - RNA, 21 nt, synthetic construct
  source 1..21: mol_type = other RNA
ctttccagccctcaccctagc

SEQ ID NO: 49895 - RNA, 21 nt, synthetic construct
  source 1..21: mol_type = other RNA
cacctccaggaccacagccac

SEQ ID NO: 49896 - RNA, 21 nt, synthetic construct
  source 1..21: mol_type = other RNA
cacggtggtgaccatgggctg

SEQ ID NO: 49897 - RNA, 21 nt, synthetic construct
  source 1..21: mol_type = other RNA
gtgccgtgcccaggcccagcc

SEQ ID NO: 49898 - RNA, 21 nt, synthetic construct
  source 1..21: mol_type = other RNA
gccgtgcccaggcccagcctg

SEQ ID NO: 49899 - RNA, 21 nt, synthetic construct
  source 1..21: mol_type = other RNA
gcactacagccaccgtgacgg

SEQ ID NO: 49900 - RNA, 21 nt, synthetic construct
  source 1..21: mol_type = other RNA
gatccacggccaccgcctcct

SEQ ID NO: 49901 - RNA, 21 nt, synthetic construct
  source 1..21: mol_type = other RNA
cacgacacccacagtcaccag

SEQ ID NO: 49902 - RNA, 21 nt, synthetic construct
  source 1..21: mol_type = other RNA
ttctccagtccagggactgca

SEQ ID NO: 49903 - RNA, 21 nt, synthetic construct
  source 1..21: mol_type = other RNA
agaagcacagccaccacaccc

SEQ ID NO: 49904 - RNA, 21 nt, synthetic construct
  source 1..21: mol_type = other RNA
ccctgggcaccacctggaccc

SEQ ID NO: 49905 - RNA, 21 nt, synthetic construct
  source 1..21: mol_type = other RNA
caccacacccacggccaccat

SEQ ID NO: 49906 - RNA, 21 nt, synthetic construct
  source 1..21: mol_type = other RNA
cacccacggccaccatgtcca

SEQ ID NO: 49907 - RNA, 21 nt, synthetic construct
  source 1..21: mol_type = other RNA
caccggctctgtggccacccc

SEQ ID NO: 49908 - RNA, 21 nt, synthetic construct
  source 1..21: mol_type = other RNA
accggctctgtggccaccccc

SEQ ID NO: 49909 - RNA, 21 nt, synthetic construct
  source 1..21: mol_type = other RNA
cacaaccagaggttccacggt

SEQ ID NO: 49910 - RNA, 21 nt, synthetic construct
  source 1..21: mol_type = other RNA
ctcctccatcccggggaccac

SEQ ID NO: 49911 - RNA, 21 nt, synthetic construct
  source 1..21: mol_type = other RNA
tcctccatcccggggaccacc

SEQ ID NO: 49912 - RNA, 21 nt, synthetic construct
  source 1..21: mol_type = other RNA
caccaccacaactgtggccac

SEQ ID NO: 49913 - RNA, 21 nt, synthetic construct
  source 1..21: mol_type = other RNA
ctctagcacacagaccagtgg

SEQ ID NO: 49914 - RNA, 21 nt, synthetic construct
  source 1..21: mol_type = other RNA
tcactgaccaccacggccact

SEQ ID NO: 49915 - RNA, 21 nt, synthetic construct
  source 1..21: mol_type = other RNA
caccggctccaccaccaaccc

SEQ ID NO: 49916 - RNA, 21 nt, synthetic construct
  source 1..21: mol_type = other RNA
atccccccagtgctgaccacc

SEQ ID NO: 49917 - RNA, 21 nt, synthetic construct
  source 1..21: mol_type = other RNA
tccccccagtgctgaccacca

SEQ ID NO: 49918 - RNA, 21 nt, synthetic construct
  source 1..21: mol_type = other RNA
agtgactccctcctctgccct

SEQ ID NO: 49919 - RNA, 21 nt, synthetic construct
  source 1..21: mol_type = other RNA
gggcgatccctgtcccccagc

SEQ ID NO: 49920 - RNA, 21 nt, synthetic construct
  source 1..21: mol_type = other RNA
cacggtggtgaccatgggctg

SEQ ID NO: 49921 - RNA, 21 nt, synthetic construct
  source 1..21: mol_type = other RNA
gtgccgtgcccaggcccagcc

SEQ ID NO: 49922 - RNA, 21 nt, synthetic construct
  source 1..21: mol_type = other RNA
gccgtgcccaggcccagcctg

SEQ ID NO: 49923 - RNA, 21 nt, synthetic construct
  source 1..21: mol_type = other RNA
ccagggacgacctggatcctc

SEQ ID NO: 49924 - RNA, 21 nt, synthetic construct
  source 1..21: mol_type = other RNA
cagagcagaccacagcagcca

SEQ ID NO: 49925 - RNA, 21 nt, synthetic construct
  source 1..21: mol_type = other RNA
agtgctgaccagcacggccac

SEQ ID NO: 49926 - RNA, 21 nt, synthetic construct
  source 1..21: mol_type = other RNA
cggccaccacacccacagcca

SEQ ID NO: 49927 - RNA, 21 nt, synthetic construct
  source 1..21: mol_type = other RNA
acaagcacagccaccaaatcc

SEQ ID NO: 49928 - RNA, 21 nt, synthetic construct
  source 1..21: mol_type = other RNA
acagccaccaaatccacagct

SEQ ID NO: 49929 - RNA, 21 nt, synthetic construct
  source 1..21: mol_type = other RNA
gaccacccacacctccacagt

SEQ ID NO: 49930 - RNA, 21 nt, synthetic construct
  source 1..21: mol_type = other RNA
ccacccacacctccacagtgc

SEQ ID NO: 49931 - RNA, 21 nt, synthetic construct
  source 1..21: mol_type = other RNA
cacctccacagtgctgaccac

SEQ ID NO: 49932 - RNA, 21 nt, synthetic construct
  source 1..21: mol_type = other RNA
gttccatgtccaccccctcct

SEQ ID NO: 49933 - RNA, 21 nt, synthetic construct
  source 1..21: mol_type = other RNA
actacaactgcagccactggc

SEQ ID NO: 49934 - RNA, 21 nt, synthetic construct
  source 1..21: mol_type = other RNA
cactggccccacggccacccc

SEQ ID NO: 49935 - RNA, 21 nt, synthetic construct
  source 1..21: mol_type = other RNA
tcctcacagagcccagcacta

SEQ ID NO: 49936 - RNA, 21 nt, synthetic construct
  source 1..21: mol_type = other RNA
gcactacagccaccgtgacgg

SEQ ID NO: 49937 - RNA, 21 nt, synthetic construct
  source 1..21: mol_type = other RNA
gatccacggccaccgcctcct

SEQ ID NO: 49938 - RNA, 21 nt, synthetic construct
  source 1..21: mol_type = other RNA
agtgctgaccagcacggccac

SEQ ID NO: 49939 - RNA, 21 nt, synthetic construct
  source 1..21: mol_type = other RNA
ccactccctcctccagtccag

SEQ ID NO: 49940 - RNA, 21 nt, synthetic construct
  source 1..21: mol_type = other RNA
agaagcacagccaccacaccc

SEQ ID NO: 49941 - RNA, 21 nt, synthetic construct
  source 1..21: mol_type = other RNA
caccacacccacggccaccat

SEQ ID NO: 49942 - RNA, 21 nt, synthetic construct
  source 1..21: mol_type = other RNA
cacccacggccaccatgtcca

SEQ ID NO: 49943 - RNA, 21 nt, synthetic construct
  source 1..21: mol_type = other RNA
caccggctctgtggccacccc

SEQ ID NO: 49944 - RNA, 21 nt, synthetic construct
  source 1..21: mol_type = other RNA
accggctctgtggccaccccc

SEQ ID NO: 49945 - RNA, 21 nt, synthetic construct
  source 1..21: mol_type = other RNA
ctcctccatcccggggaccac

SEQ ID NO: 49946 - RNA, 21 nt, synthetic construct
  source 1..21: mol_type = other RNA
tcctccatcccggggaccacc

SEQ ID NO: 49947 - RNA, 21 nt, synthetic construct
  source 1..21: mol_type = other RNA
accgccacagtgctgaccacc

SEQ ID NO: 49948 - RNA, 21 nt, synthetic construct
  source 1..21: mol_type = other RNA
caccaccacaactgtggccac

SEQ ID NO: 49949 - RNA, 21 nt, synthetic construct
  source 1..21: mol_type = other RNA
ctctagcacacagaccagtgg

SEQ ID NO: 49950 - RNA, 21 nt, synthetic construct
  source 1..21: mol_type = other RNA
tcactgaccaccacggccact

SEQ ID NO: 49951 - RNA, 21 nt, synthetic construct
  source 1..21: mol_type = other RNA
caccggctccaccaccaaccc

SEQ ID NO: 49952 - RNA, 21 nt, synthetic construct
  source 1..21: mol_type = other RNA
atccccccagtgctgaccacc

SEQ ID NO: 49953 - RNA, 21 nt, synthetic construct
  source 1..21: mol_type = other RNA
tccccccagtgctgaccacca

SEQ ID NO: 49954 - RNA, 21 nt, synthetic construct
  source 1..21: mol_type = other RNA
agtgactccctcctctgccct

SEQ ID NO: 49955 - RNA, 21 nt, synthetic construct
  source 1..21: mol_type = other RNA
ctggacttcggccacctcggg

SEQ ID NO: 49956 - RNA, 21 nt, synthetic construct
  source 1..21: mol_type = other RNA
cacctccaggaccacagccac

SEQ ID NO: 49957 - RNA, 21 nt, synthetic construct
  source 1..21: mol_type = other RNA
gtgccgtgcccaggcccagcc

SEQ ID NO: 49958 - RNA, 21 nt, synthetic construct
  source 1..21: mol_type = other RNA
gccgtgcccaggcccagcctg

SEQ ID NO: 49959 - RNA, 21 nt, synthetic construct
  source 1..21: mol_type = other RNA
gcactacagccaccgtgacgg

SEQ ID NO: 49960 - RNA, 21 nt, synthetic construct
  source 1..21: mol_type = other RNA
gatccacggccaccgcctcct

SEQ ID NO: 49961 - RNA, 21 nt, synthetic construct
  source 1..21: mol_type = other RNA
cacgacacccacagtcaccag

SEQ ID NO: 49962 - RNA, 21 nt, synthetic construct
  source 1..21: mol_type = other RNA
ttctccagtccagggactgca

SEQ ID NO: 49963 - RNA, 21 nt, synthetic construct
  source 1..21: mol_type = other RNA
agaagcacagccaccacaccc

SEQ ID NO: 49964 - RNA, 21 nt, synthetic construct
  source 1..21: mol_type = other RNA
ccctgggcaccacctggaccc

SEQ ID NO: 49965 - RNA, 21 nt, synthetic construct
  source 1..21: mol_type = other RNA
caccacacccacggccaccat

SEQ ID NO: 49966 - RNA, 21 nt, synthetic construct
  source 1..21: mol_type = other RNA
cacccacggccaccatgtcca

SEQ ID NO: 49967 - RNA, 21 nt, synthetic construct
  source 1..21: mol_type = other RNA
caccggctctgtggccacccc

SEQ ID NO: 49968 - RNA, 21 nt, synthetic construct
  source 1..21: mol_type = other RNA
accggctctgtggccaccccc

SEQ ID NO: 49969 - RNA, 21 nt, synthetic construct
  source 1..21: mol_type = other RNA
tgtggccaccccctcttccac

SEQ ID NO: 49970 - RNA, 21 nt, synthetic construct
  source 1..21: mol_type = other RNA
accccctcttccaccccagga

SEQ ID NO: 49971 - RNA, 21 nt, synthetic construct
  source 1..21: mol_type = other RNA
acgcacgcctccagtgtggat

SEQ ID NO: 49972 - RNA, 21 nt, synthetic construct
  source 1..21: mol_type = other RNA
tgaccccctcctccgtcccgg

SEQ ID NO: 49973 - RNA, 21 nt, synthetic construct
  source 1..21: mol_type = other RNA
caccaccacaactgtggccac

SEQ ID NO: 49974 - RNA, 21 nt, synthetic construct
  source 1..21: mol_type = other RNA
ctctagcacacagaccagtgg

SEQ ID NO: 49975 - RNA, 21 nt, synthetic construct
  source 1..21: mol_type = other RNA
caccggctccaccaccaaccc

SEQ ID NO: 49976 - RNA, 21 nt, synthetic construct
  source 1..21: mol_type = other RNA
atccccccagtgctgaccacc

SEQ ID NO: 49977 - RNA, 21 nt, synthetic construct
  source 1..21: mol_type = other RNA
tccccccagtgctgaccacca

SEQ ID NO: 49978 - RNA, 21 nt, synthetic construct
  source 1..21: mol_type = other RNA
agtgactccctcctctgccct

SEQ ID NO: 49979 - RNA, 21 nt, synthetic construct
  source 1..21: mol_type = other RNA
gggcgatccctgtcccccagc

SEQ ID NO: 49980 - RNA, 21 nt, synthetic construct
  source 1..21: mol_type = other RNA
gtgccgtgcccaggcccagcc

SEQ ID NO: 49981 - RNA, 21 nt, synthetic construct
  source 1..21: mol_type = other RNA
gccgtgcccaggcccagcctg

SEQ ID NO: 49982 - RNA, 21 nt, synthetic construct
  source 1..21: mol_type = other RNA
tggtgtccccctgggggagtt

SEQ ID NO: 49983 - RNA, 21 nt, synthetic construct
  source 1..21: mol_type = other RNA
tcccaaagtgctgaccagccc

SEQ ID NO: 49984 - RNA, 21 nt, synthetic construct
  source 1..21: mol_type = other RNA
cggccaccacacccacagcca

SEQ ID NO: 49985 - RNA, 21 nt, synthetic construct
  source 1..21: mol_type = other RNA
acaagcacagccaccaaatcc

SEQ ID NO: 49986 - RNA, 21 nt, synthetic construct
  source 1..21: mol_type = other RNA
acagccaccaaatccacagct

SEQ ID NO: 49987 - RNA, 21 nt, synthetic construct
  source 1..21: mol_type = other RNA
aacagaccaccacacccgtgg

SEQ ID NO: 49988 - RNA, 21 nt, synthetic construct
  source 1..21: mol_type = other RNA
gaccacccacacctccacagt

SEQ ID NO: 49989 - RNA, 21 nt, synthetic construct
  source 1..21: mol_type = other RNA
ccacccacacctccacagtgc

SEQ ID NO: 49990 - RNA, 21 nt, synthetic construct
  source 1..21: mol_type = other RNA
cacctccacagtgctgaccac

SEQ ID NO: 49991 - RNA, 21 nt, synthetic construct
  source 1..21: mol_type = other RNA
actacaactgcagccactggc

SEQ ID NO: 49992 - RNA, 21 nt, synthetic construct
  source 1..21: mol_type = other RNA
cactggccccacggccacccc

SEQ ID NO: 49993 - RNA, 21 nt, synthetic construct
  source 1..21: mol_type = other RNA
gcactacagccaccgtgacgg

SEQ ID NO: 49994 - RNA, 21 nt, synthetic construct
  source 1..21: mol_type = other RNA
gatccacggccaccgcctcct

SEQ ID NO: 49995 - RNA, 21 nt, synthetic construct
  source 1..21: mol_type = other RNA
cacgacacccacagtcaccag

SEQ ID NO: 49996 - RNA, 21 nt, synthetic construct
  source 1..21: mol_type = other RNA
ccactccctcctccagtccag

SEQ ID NO: 49997 - RNA, 21 nt, synthetic construct
  source 1..21: mol_type = other RNA
agaagcacagccaccacaccc

SEQ ID NO: 49998 - RNA, 21 nt, synthetic construct
  source 1..21: mol_type = other RNA
ccctgggcaccacctggaccc

SEQ ID NO: 49999 - RNA, 21 nt, synthetic construct
  source 1..21: mol_type = other RNA
caccacacccacggccaccat

SEQ ID NO: 50000 - RNA, 21 nt, synthetic construct
  source 1..21: mol_type = other RNA
cacccacggccaccatgtcca

SEQ ID NO: 50001 - RNA, 21 nt, synthetic construct
  source 1..21: mol_type = other RNA
ccgccacggccaccacaaccg

SEQ ID NO: 50002 - RNA, 21 nt, synthetic construct
  source 1..21: mol_type = other RNA
caccggctctgtggccacccc

SEQ ID NO: 50003 - RNA, 21 nt, synthetic construct
  source 1..21: mol_type = other RNA
accggctctgtggccaccccc

SEQ ID NO: 50004 - RNA, 21 nt, synthetic construct
  source 1..21: mol_type = other RNA
ctcctccatcccggggaccac

SEQ ID NO: 50005 - RNA, 21 nt, synthetic construct
  source 1..21: mol_type = other RNA
tcctccatcccggggaccacc

SEQ ID NO: 50006 - RNA, 21 nt, synthetic construct
  source 1..21: mol_type = other RNA
caccaccacaactgtggccac

SEQ ID NO: 50007 - RNA, 21 nt, synthetic construct
  source 1..21: mol_type = other RNA
ctctagcacacagaccagtgg

SEQ ID NO: 50008 - RNA, 21 nt, synthetic construct
  source 1..21: mol_type = other RNA
tcactgaccaccacggccact

SEQ ID NO: 50009 - RNA, 21 nt, synthetic construct
  source 1..21: mol_type = other RNA
caccggctccaccaccaaccc

SEQ ID NO: 50010 - RNA, 21 nt, synthetic construct
  source 1..21: mol_type = other RNA
agtgctgaccagcacggccac

SEQ ID NO: 50011 - RNA, 21 nt, synthetic construct
  source 1..21: mol_type = other RNA
caccacacccgcagccaccag

SEQ ID NO: 50012 - RNA, 21 nt, synthetic construct
  source 1..21: mol_type = other RNA
cacccgcagccaccagctcca

SEQ ID NO: 50013 - RNA, 21 nt, synthetic construct
  source 1..21: mol_type = other RNA
agctccaaagccacttcctcc

SEQ ID NO: 50014 - RNA, 21 nt, synthetic construct
  source 1..21: mol_type = other RNA
ccagcacagaccaccacaccc

SEQ ID NO: 50015 - RNA, 21 nt, synthetic construct
  source 1..21: mol_type = other RNA
accaccacacccatgtccacc

SEQ ID NO: 50016 - RNA, 21 nt, synthetic construct
  source 1..21: mol_type = other RNA
gaccacccacacctccacagt

SEQ ID NO: 50017 - RNA, 21 nt, synthetic construct
  source 1..21: mol_type = other RNA
ccacccacacctccacagtgc

SEQ ID NO: 50018 - RNA, 21 nt, synthetic construct
  source 1..21: mol_type = other RNA
cacctccacagtgctgaccac

SEQ ID NO: 50019 - RNA, 21 nt, synthetic construct
  source 1..21: mol_type = other RNA
attccacggccacaccctcct

SEQ ID NO: 50020 - RNA, 21 nt, synthetic construct
  source 1..21: mol_type = other RNA
actacaactgcagccactgga

SEQ ID NO: 50021 - RNA, 21 nt, synthetic construct
  source 1..21: mol_type = other RNA
ccacggccaccctgtcctcca

SEQ ID NO: 50022 - RNA, 21 nt, synthetic construct
  source 1..21: mol_type = other RNA
tatgcccacagccactgcctc

SEQ ID NO: 50023 - RNA, 21 nt, synthetic construct
  source 1..21: mol_type = other RNA
tccccagcagcctgccaacct

SEQ ID NO: 50024 - RNA, 21 nt, synthetic construct
  source 1..21: mol_type = other RNA
gacccactggcttccccagct

SEQ ID NO: 50025 - RNA, 21 nt, synthetic construct
  source 1..21: mol_type = other RNA
gggcgcctgtcccacctcccc

SEQ ID NO: 50026 - RNA, 21 nt, synthetic construct
  source 1..21: mol_type = other RNA
ctgtcccacctccccaccgcc

SEQ ID NO: 50027 - RNA, 21 nt, synthetic construct
  source 1..21: mol_type = other RNA
cccacctccccaccgccagtg

SEQ ID NO: 50028 - RNA, 21 nt, synthetic construct
  source 1..21: mol_type = other RNA
accgccagtgtcctccgcccc

SEQ ID NO: 50029 - RNA, 21 nt, synthetic construct
  source 1..21: mol_type = other RNA
gccccgctgtcctcgccctcc

SEQ ID NO: 50030 - RNA, 21 nt, synthetic construct
  source 1..21: mol_type = other RNA
ccccgctgtcctcgccctccc

SEQ ID NO: 50031 - RNA, 21 nt, synthetic construct
  source 1..21: mol_type = other RNA
tgtcctcgccctcccctgccc

SEQ ID NO: 50032 - RNA, 21 nt, synthetic construct
  source 1..21: mol_type = other RNA
tgcacggcctctgccactgcc

SEQ ID NO: 50033 - RNA, 21 nt, synthetic construct
  source 1..21: mol_type = other RNA
tcgtcctcactgtcaccatgg

SEQ ID NO: 50034 - RNA, 21 nt, synthetic construct
  source 1..21: mol_type = other RNA
gcgtgcttgtgtctgtgctgg

SEQ ID NO: 50035 - RNA, 21 nt, synthetic construct
  source 1..21: mol_type = other RNA
gtgcttgtgtctgtgctgggg

SEQ ID NO: 50036 - RNA, 21 nt, synthetic construct
  source 1..21: mol_type = other RNA
tgcttgtgtctgtgctgggga

SEQ ID NO: 50037 - RNA, 21 nt, synthetic construct
  source 1..21: mol_type = other RNA
ggatggctgctgggccccgac

SEQ ID NO: 50038 - RNA, 21 nt, synthetic construct
  source 1..21: mol_type = other RNA
ccacaaccttgtgcccccggg

SEQ ID NO: 50039 - RNA, 21 nt, synthetic construct
  source 1..21: mol_type = other RNA
ggagggctgcttctgccctga

SEQ ID NO: 50040 - RNA, 21 nt, synthetic construct
  source 1..21: mol_type = other RNA
gtgacgcccagggtcagcccc

SEQ ID NO: 50041 - RNA, 21 nt, synthetic construct
  source 1..21: mol_type = other RNA
agaacccctgctgccccgaga

SEQ ID NO: 50042 - RNA, 21 nt, synthetic construct
  source 1..21: mol_type = other RNA
gcaacacaaccacctgccccc

SEQ ID NO: 50043 - RNA, 21 nt, synthetic construct
  source 1..21: mol_type = other RNA
aacacaaccacctgcccccag

SEQ ID NO: 50044 - RNA, 21 nt, synthetic construct
  source 1..21: mol_type = other RNA
ctgcagacctcagctgtgttc

SEQ ID NO: 50045 - RNA, 21 nt, synthetic construct
  source 1..21: mol_type = other RNA
ccacatgtgtacctgcctctc

SEQ ID NO: 50046 - RNA, 21 nt, synthetic construct
  source 1..21: mol_type = other RNA
actacctgtccccagggcttt

SEQ ID NO: 50047 - RNA, 21 nt, synthetic construct
  source 1..21: mol_type = other RNA
cgcccgatggccagccagtcc

SEQ ID NO: 50048 - RNA, 21 nt, synthetic construct
  source 1..21: mol_type = other RNA
ccagccagtccagctgaatga

SEQ ID NO: 50049 - RNA, 21 nt, synthetic construct
  source 1..21: mol_type = other RNA
gggtcaacagccatgtggaca

SEQ ID NO: 50050 - RNA, 21 nt, synthetic construct
  source 1..21: mol_type = other RNA
cagcctgcatcctgcccagat

SEQ ID NO: 50051 - RNA, 21 nt, synthetic construct
  source 1..21: mol_type = other RNA
gaggtcaacatcaccttctgc

SEQ ID NO: 50052 - RNA, 21 nt, synthetic construct
  source 1..21: mol_type = other RNA
aggtcaacatcaccttctgcg

SEQ ID NO: 50053 - RNA, 21 nt, synthetic construct
  source 1..21: mol_type = other RNA
ccttctgcgagggctcctgcc

SEQ ID NO: 50054 - RNA, 21 nt, synthetic construct
  source 1..21: mol_type = other RNA
cttctgcgagggctcctgccc

SEQ ID NO: 50055 - RNA, 21 nt, synthetic construct
  source 1..21: mol_type = other RNA
acgtggatgagtgtggctgca

SEQ ID NO: 50056 - RNA, 21 nt, synthetic construct
  source 1..21: mol_type = other RNA
cctgcgcccatggctccccca

SEQ ID NO: 50057 - RNA, 21 nt, synthetic construct
  source 1..21: mol_type = other RNA
cccggcccaggaggccactgc

SEQ ID NO: 50058 - RNA, 21 nt, synthetic construct
  source 1..21: mol_type = other RNA
ccggcccaggaggccactgct

SEQ ID NO: 50059 - RNA, 21 nt, synthetic construct
  source 1..21: mol_type = other RNA
agccaggatgtgcattgtctg

SEQ ID NO: 50060 - RNA, 21 nt, synthetic construct
  source 1..21: mol_type = other RNA
gctccgtgctcctgctgccca

SEQ ID NO: 50061 - RNA, 21 nt, synthetic construct
  source 1..21: mol_type = other RNA
cgtgctcctgctgcccacccc

SEQ ID NO: 50062 - RNA, 21 nt, synthetic construct
  source 1..21: mol_type = other RNA
gtgctcctgctgcccaccccg

SEQ ID NO: 50063 - RNA, 21 nt, synthetic construct
  source 1..21: mol_type = other RNA
cgtccggccgctggggcagac

SEQ ID NO: 50064 - RNA, 21 nt, synthetic construct
  source 1..21: mol_type = other RNA
ccgctggggcagacaggctgg

SEQ ID NO: 50065 - RNA, 21 nt, synthetic construct
  source 1..21: mol_type = other RNA
ccctgcccgtccccgtccccc

SEQ ID NO: 50066 - RNA, 21 nt, synthetic construct
  source 1..21: mol_type = other RNA
cgagctgggagaatgcagggc

SEQ ID NO: 50067 - RNA, 21 nt, synthetic construct
  source 1..21: mol_type = other RNA
caggcacggtgctggatgaca

SEQ ID NO: 50068 - RNA, 21 nt, synthetic construct
  source 1..21: mol_type = other RNA
cggtgctggatgacatcacgc

SEQ ID NO: 50069 - RNA, 21 nt, synthetic construct
  source 1..21: mol_type = other RNA
ctgccccgcgggcaccttcct

SEQ ID NO: 50070 - RNA, 21 nt, synthetic construct
  source 1..21: mol_type = other RNA
ccttgttctgtgacttctaca

SEQ ID NO: 50071 - RNA, 21 nt, synthetic construct
  source 1..21: mol_type = other RNA
tggcacaggtggggcagaagg

SEQ ID NO: 50072 - RNA, 21 nt, synthetic construct
  source 1..21: mol_type = other RNA
gctcccccggccagcaccaca

SEQ ID NO: 50073 - RNA, 21 nt, synthetic construct
  source 1..21: mol_type = other RNA
cttccaacacgctcagccctt

SEQ ID NO: 50074 - RNA, 21 nt, synthetic construct
  source 1..21: mol_type = other RNA
acacccacggccaccatgtcc

SEQ ID NO: 50075 - RNA, 21 nt, synthetic construct
  source 1..21: mol_type = other RNA
caccaccgccaccacacctgc

SEQ ID NO: 50076 - RNA, 21 nt, synthetic construct
  source 1..21: mol_type = other RNA
actccctcctctgccctaggg

SEQ ID NO: 50077 - RNA, 21 nt, synthetic construct
  source 1..21: mol_type = other RNA
ctcgggcatcttgggcaccac

SEQ ID NO: 50078 - RNA, 21 nt, synthetic construct
  source 1..21: mol_type = other RNA
tgccgtgcccaggcccagcct

SEQ ID NO: 50079 - RNA, 21 nt, synthetic construct
  source 1..21: mol_type = other RNA
gcaccccggccaccagctcta

SEQ ID NO: 50080 - RNA, 21 nt, synthetic construct
  source 1..21: mol_type = other RNA
ccactcccttctccagtccag

SEQ ID NO: 50081 - RNA, 21 nt, synthetic construct
  source 1..21: mol_type = other RNA
acacccacggccaccatgtcc

SEQ ID NO: 50082 - RNA, 21 nt, synthetic construct
  source 1..21: mol_type = other RNA
ccggggaccacccacaccccc

SEQ ID NO: 50083 - RNA, 21 nt, synthetic construct
  source 1..21: mol_type = other RNA
caccaccgccaccacacctgc

SEQ ID NO: 50084 - RNA, 21 nt, synthetic construct
  source 1..21: mol_type = other RNA
actccctcctctgccctaggg

SEQ ID NO: 50085 - RNA, 21 nt, synthetic construct
  source 1..21: mol_type = other RNA
tgccgtgcccaggcccagcct

SEQ ID NO: 50086 - RNA, 21 nt, synthetic construct
  source 1..21: mol_type = other RNA
gcaccccggccaccagctcta

SEQ ID NO: 50087 - RNA, 21 nt, synthetic construct
  source 1..21: mol_type = other RNA
ctgacaagcacagccaccaaa

SEQ ID NO: 50088 - RNA, 21 nt, synthetic construct
  source 1..21: mol_type = other RNA
acacccatggccaccatgtcc

SEQ ID NO: 50089 - RNA, 21 nt, synthetic construct
  source 1..21: mol_type = other RNA
acacccacggccaccatgtcc

SEQ ID NO: 50090 - RNA, 21 nt, synthetic construct
  source 1..21: mol_type = other RNA
caccaccgccaccacacctgc

SEQ ID NO: 50091 - RNA, 21 nt, synthetic construct
  source 1..21: mol_type = other RNA
actccctcctctgccctaggg

SEQ ID NO: 50092 - RNA, 21 nt, synthetic construct
  source 1..21: mol_type = other RNA
ctcgggcatcttgggcaccac

SEQ ID NO: 50093 - RNA, 21 nt, synthetic construct
  source 1..21: mol_type = other RNA
tgccgtgcccaggcccagcct

SEQ ID NO: 50094 - RNA, 21 nt, synthetic construct
  source 1..21: mol_type = other RNA
gcaccccggccaccagctcta

SEQ ID NO: 50095 - RNA, 21 nt, synthetic construct
  source 1..21: mol_type = other RNA
ccactcccttctccagtccag

SEQ ID NO: 50096 - RNA, 21 nt, synthetic construct
  source 1..21: mol_type = other RNA
acacccacggccaccatgtcc

SEQ ID NO: 50097 - RNA, 21 nt, synthetic construct
  source 1..21: mol_type = other RNA
tctgtggccaccccctcttcc

SEQ ID NO: 50098 - RNA, 21 nt, synthetic construct
  source 1..21: mol_type = other RNA
cacgcacgcctccagtgtgga

SEQ ID NO: 50099 - RNA, 21 nt, synthetic construct
  source 1..21: mol_type = other RNA
ccggggaccacccacaccccc

SEQ ID NO: 50100 - RNA, 21 nt, synthetic construct
  source 1..21: mol_type = other RNA
caccaccgccaccacacctgc

SEQ ID NO: 50101 - RNA, 21 nt, synthetic construct
  source 1..21: mol_type = other RNA
actccctcctctgccctaggg

SEQ ID NO: 50102 - RNA, 21 nt, synthetic construct
  source 1..21: mol_type = other RNA
tgccgtgcccaggcccagcct

SEQ ID NO: 50103 - RNA, 21 nt, synthetic construct
  source 1..21: mol_type = other RNA
gcaccccggccaccagctcta

SEQ ID NO: 50104 - RNA, 21 nt, synthetic construct
  source 1..21: mol_type = other RNA
ctgacaagcacagccaccaaa

SEQ ID NO: 50105 - RNA, 21 nt, synthetic construct
  source 1..21: mol_type = other RNA
tacacccatcccctcctccac

SEQ ID NO: 50106 - RNA, 21 nt, synthetic construct
  source 1..21: mol_type = other RNA
acacccacggccaccatgtcc

SEQ ID NO: 50107 - RNA, 21 nt, synthetic construct
  source 1..21: mol_type = other RNA
cacacccgcagccaccagctc

SEQ ID NO: 50108 - RNA, 21 nt, synthetic construct
  source 1..21: mol_type = other RNA
tacacccatcccctcctccac

SEQ ID NO: 50109 - RNA, 21 nt, synthetic construct
  source 1..21: mol_type = other RNA
aactgcagccactggatccac

SEQ ID NO: 50110 - RNA, 21 nt, synthetic construct
  source 1..21: mol_type = other RNA
accgtggggaccacccgcacc

SEQ ID NO: 50111 - RNA, 21 nt, synthetic construct
  source 1..21: mol_type = other RNA
gggcctgatcctgtttgacca

SEQ ID NO: 50112 - RNA, 21 nt, synthetic construct
  source 1..21: mol_type = other RNA
cgtgcttgtgtctgtgctggg

SEQ ID NO: 50113 - RNA, 21 nt, synthetic construct
  source 1..21: mol_type = other RNA
cttgtgtctgtgctggggacc

SEQ ID NO: 50114 - RNA, 21 nt, synthetic construct
  source 1..21: mol_type = other RNA
ccacagccgctctgtgatctg

SEQ ID NO: 50115 - RNA, 21 nt, synthetic construct
  source 1..21: mol_type = other RNA
cgacctcacctgcccacccac

SEQ ID NO: 50116 - RNA, 21 nt, synthetic construct
  source 1..21: mol_type = other RNA
atctgcacccaggaggagggc

SEQ ID NO: 50117 - RNA, 21 nt, synthetic construct
  source 1..21: mol_type = other RNA
ctgggtcaacagccatgtgga

SEQ ID NO: 50118 - RNA, 21 nt, synthetic construct
  source 1..21: mol_type = other RNA
tgtgtccagctgcagggggag

SEQ ID NO: 50119 - RNA, 21 nt, synthetic construct
  source 1..21: mol_type = other RNA
acaggcaaggcggccgcctgt

SEQ ID NO: 50120 - RNA, 21 nt, synthetic construct
  source 1..21: mol_type = other RNA
tggtggagcagagcggggact

SEQ ID NO: 50121 - RNA, 21 nt, synthetic construct
  source 1..21: mol_type = other RNA
caccgcaccctgctggggccg

SEQ ID NO: 50122 - RNA, 21 nt, synthetic construct
  source 1..21: mol_type = other RNA
ctccttcaacaccacctgcag

SEQ ID NO: 50123 - RNA, 21 nt, synthetic construct
  source 1..21: mol_type = other RNA
cctacaagcctggagagacca

SEQ ID NO: 50124 - RNA, 21 nt, synthetic construct
  source 1..21: mol_type = other RNA
ccgcccagagcccggcctggg

SEQ ID NO: 50125 - RNA, 21 nt, synthetic construct
  source 1..21: mol_type = other RNA
ctgtgcctaccccaacccaga

SEQ ID NO: 50126 - RNA, 21 nt, synthetic construct
  source 1..21: mol_type = other RNA
caacccagaccacagcaaccg

SEQ ID NO: 50127 - RNA, 21 nt, synthetic construct
  source 1..21: mol_type = other RNA
gtgccacaaccccgccaccga

SEQ ID NO: 50128 - RNA, 21 nt, synthetic construct
  source 1..21: mol_type = other RNA
ggggctgaccagggctccccc

SEQ ID NO: 50129 - RNA, 21 nt, synthetic construct
  source 1..21: mol_type = other RNA
ggctcccccggccagcaccac

SEQ ID NO: 50130 - RNA, 21 nt, synthetic construct
  source 1..21: mol_type = other RNA
caggacagagacgacaatgag

SEQ ID NO: 50131 - RNA, 21 nt, synthetic construct
  source 1..21: mol_type = other RNA
tggatcagcacaaccaccaca

SEQ ID NO: 50132 - RNA, 21 nt, synthetic construct
  source 1..21: mol_type = other RNA
cggctccaccaccaacccctc

SEQ ID NO: 50133 - RNA, 21 nt, synthetic construct
  source 1..21: mol_type = other RNA
cctgccccccagcagtcccca

SEQ ID NO: 50134 - RNA, 21 nt, synthetic construct
  source 1..21: mol_type = other RNA
agcaccccggccaccagctct

SEQ ID NO: 50135 - RNA, 21 nt, synthetic construct
  source 1..21: mol_type = other RNA
gtccacacctccacagtgctt

SEQ ID NO: 50136 - RNA, 21 nt, synthetic construct
  source 1..21: mol_type = other RNA
tggatcagcacaaccaccaca

SEQ ID NO: 50137 - RNA, 21 nt, synthetic construct
  source 1..21: mol_type = other RNA
cggctccaccaccaacccctc

SEQ ID NO: 50138 - RNA, 21 nt, synthetic construct
  source 1..21: mol_type = other RNA
ggcgatccctgtcccccagca

SEQ ID NO: 50139 - RNA, 21 nt, synthetic construct
  source 1..21: mol_type = other RNA
aggcaccttgggcaccaccca

SEQ ID NO: 50140 - RNA, 21 nt, synthetic construct
  source 1..21: mol_type = other RNA
gacttcccacaccccagcagc

SEQ ID NO: 50141 - RNA, 21 nt, synthetic construct
  source 1..21: mol_type = other RNA
agcaccccggccaccagctct

SEQ ID NO: 50142 - RNA, 21 nt, synthetic construct
  source 1..21: mol_type = other RNA
tcctcctccagtccaaggact

SEQ ID NO: 50143 - RNA, 21 nt, synthetic construct
  source 1..21: mol_type = other RNA
tgtccaccccctcctccactc

SEQ ID NO: 50144 - RNA, 21 nt, synthetic construct
  source 1..21: mol_type = other RNA
gtccacacctccacagtgctt

SEQ ID NO: 50145 - RNA, 21 nt, synthetic construct
  source 1..21: mol_type = other RNA
tggatcagcacaaccaccaca

SEQ ID NO: 50146 - RNA, 21 nt, synthetic construct
  source 1..21: mol_type = other RNA
cggctccaccaccaacccctc

SEQ ID NO: 50147 - RNA, 21 nt, synthetic construct
  source 1..21: mol_type = other RNA
cctgccccccagcagtcccca

SEQ ID NO: 50148 - RNA, 21 nt, synthetic construct
  source 1..21: mol_type = other RNA
gacttcccacaccccagcagc

SEQ ID NO: 50149 - RNA, 21 nt, synthetic construct
  source 1..21: mol_type = other RNA
agcaccccggccaccagctct

SEQ ID NO: 50150 - RNA, 21 nt, synthetic construct
  source 1..21: mol_type = other RNA
aaagctgaccacaacagccac

SEQ ID NO: 50151 - RNA, 21 nt, synthetic construct
  source 1..21: mol_type = other RNA
tggatcagcacaaccaccaca

SEQ ID NO: 50152 - RNA, 21 nt, synthetic construct
  source 1..21: mol_type = other RNA
cggctccaccaccaacccctc

SEQ ID NO: 50153 - RNA, 21 nt, synthetic construct
  source 1..21: mol_type = other RNA
ggcgatccctgtcccccagca

SEQ ID NO: 50154 - RNA, 21 nt, synthetic construct
  source 1..21: mol_type = other RNA
aggcaccttgggcaccaccca

SEQ ID NO: 50155 - RNA, 21 nt, synthetic construct
  source 1..21: mol_type = other RNA
gacttcccacaccccagcagc

SEQ ID NO: 50156 - RNA, 21 nt, synthetic construct
  source 1..21: mol_type = other RNA
agcaccccggccaccagctct

SEQ ID NO: 50157 - RNA, 21 nt, synthetic construct
  source 1..21: mol_type = other RNA
tcctcctccagtccaaggact

SEQ ID NO: 50158 - RNA, 21 nt, synthetic construct
  source 1..21: mol_type = other RNA
cctcctccacccttgggacca

SEQ ID NO: 50159 - RNA, 21 nt, synthetic construct
  source 1..21: mol_type = other RNA
cgtccaccccctcctccactc

SEQ ID NO: 50160 - RNA, 21 nt, synthetic construct
  source 1..21: mol_type = other RNA
gtccacacctccacagtgctt

SEQ ID NO: 50161 - RNA, 21 nt, synthetic construct
  source 1..21: mol_type = other RNA
tggatcagcacaaccaccaca

SEQ ID NO: 50162 - RNA, 21 nt, synthetic construct
  source 1..21: mol_type = other RNA
cggctccaccaccaacccctc

SEQ ID NO: 50163 - RNA, 21 nt, synthetic construct
  source 1..21: mol_type = other RNA
tcctcctccagtccaaggact

SEQ ID NO: 50164 - RNA, 21 nt, synthetic construct
  source 1..21: mol_type = other RNA
cctcctctactccagagacca

SEQ ID NO: 50165 - RNA, 21 nt, synthetic construct
  source 1..21: mol_type = other RNA
tgggaacagctcacaccccca

SEQ ID NO: 50166 - RNA, 21 nt, synthetic construct
  source 1..21: mol_type = other RNA
ccaccgccagtgtcctccgcc

SEQ ID NO: 50167 - RNA, 21 nt, synthetic construct
  source 1..21: mol_type = other RNA
ctgtcctcgccctcccctgcc

SEQ ID NO: 50168 - RNA, 21 nt, synthetic construct
  source 1..21: mol_type = other RNA
gcttgtgtctgtgctggggac

SEQ ID NO: 50169 - RNA, 21 nt, synthetic construct
  source 1..21: mol_type = other RNA
tgcagacctcagctgtgttcg

SEQ ID NO: 50170 - RNA, 21 nt, synthetic construct
  source 1..21: mol_type = other RNA
tcccaggcgcccttccctgcc

SEQ ID NO: 50171 - RNA, 21 nt, synthetic construct
  source 1..21: mol_type = other RNA
cagctgaatgaaacctgggtc

SEQ ID NO: 50172 - RNA, 21 nt, synthetic construct
  source 1..21: mol_type = other RNA
caccttggccttgcccctccc

SEQ ID NO: 50173 - RNA, 21 nt, synthetic construct
  source 1..21: mol_type = other RNA
gcagacaggctggtccaggca

SEQ ID NO: 50174 - RNA, 21 nt, synthetic construct
  source 1..21: mol_type = other RNA
gcctgtccatgcctgctgcag

SEQ ID NO: 50175 - RNA, 21 nt, synthetic construct
  source 1..21: mol_type = other RNA
tggctctggcggccatgctcg

SEQ ID NO: 50176 - RNA, 21 nt, synthetic construct
  source 1..21: mol_type = other RNA
tccgcttccctggcctttgca

SEQ ID NO: 50177 - RNA, 21 nt, synthetic construct
  source 1..21: mol_type = other RNA
gctggagctggatcccaaata

SEQ ID NO: 50178 - RNA, 21 nt, synthetic construct
  source 1..21: mol_type = other RNA
gacctgtggcctgtgtgggga

SEQ ID NO: 50179 - RNA, 21 nt, synthetic construct
  source 1..21: mol_type = other RNA
ccacaacgccaggctgacccc

SEQ ID NO: 50180 - RNA, 21 nt, synthetic construct
  source 1..21: mol_type = other RNA
actgcacggacgaggagggca

SEQ ID NO: 50181 - RNA, 21 nt, synthetic construct
  source 1..21: mol_type = other RNA
cacctgcccgtgtgccacctt

SEQ ID NO: 50182 - RNA, 21 nt, synthetic construct
  source 1..21: mol_type = other RNA
tctgcccccggacctgccccc

SEQ ID NO: 50183 - RNA, 21 nt, synthetic construct
  source 1..21: mol_type = other RNA
aacatgcagcaccaggagtgt

SEQ ID NO: 50184 - RNA, 21 nt, synthetic construct
  source 1..21: mol_type = other RNA
ccctgcacggacacctgctcc

SEQ ID NO: 50185 - RNA, 21 nt, synthetic construct
  source 1..21: mol_type = other RNA
actgtgtggacggctgcttct

SEQ ID NO: 50186 - RNA, 21 nt, synthetic construct
  source 1..21: mol_type = other RNA
ctatggcagtgccaggacctg

SEQ ID NO: 50187 - RNA, 21 nt, synthetic construct
  source 1..21: mol_type = other RNA
gtgcagacaggcctggggctg

SEQ ID NO: 50188 - RNA, 21 nt, synthetic construct
  source 1..21: mol_type = other RNA
cctcagcggggtggtggaggc

SEQ ID NO: 50189 - RNA, 21 nt, synthetic construct
  source 1..21: mol_type = other RNA
aggcccaggctgcctgtgcca

SEQ ID NO: 50190 - RNA, 21 nt, synthetic construct
  source 1..21: mol_type = other RNA
acgcccggcactggtgctcgc

SEQ ID NO: 50191 - RNA, 21 nt, synthetic construct
  source 1..21: mol_type = other RNA
agctcagcgactggagggacg

SEQ ID NO: 50192 - RNA, 21 nt, synthetic construct
  source 1..21: mol_type = other RNA
aggcggtggcgagagggccgg

SEQ ID NO: 50193 - RNA, 21 nt, synthetic construct
  source 1..21: mol_type = other RNA
cacctgccccttgttctgtga

SEQ ID NO: 50194 - RNA, 21 nt, synthetic construct
  source 1..21: mol_type = other RNA
ccacatgggggctgtgagtgg

SEQ ID NO: 50195 - RNA, 21 nt, synthetic construct
  source 1..21: mol_type = other RNA
ccatcatcaggaaggctgtgg

SEQ ID NO: 50196 - RNA, 21 nt, synthetic construct
  source 1..21: mol_type = other RNA
ttcaccaccgcctgggtcccc

SEQ ID NO: 50197 - RNA, 21 nt, synthetic construct
  source 1..21: mol_type = other RNA
ccagagcccggcctgggaggc

SEQ ID NO: 50198 - RNA, 21 nt, synthetic construct
  source 1..21: mol_type = other RNA
caggcaccagccctcagccct

SEQ ID NO: 50199 - RNA, 21 nt, synthetic construct
  source 1..21: mol_type = other RNA
cctcagccctccctcagtgcc

SEQ ID NO: 50200 - RNA, 21 nt, synthetic construct
  source 1..21: mol_type = other RNA
agcttccccaactggaccctg

SEQ ID NO: 50201 - RNA, 21 nt, synthetic construct
  source 1..21: mol_type = other RNA
ccccgccaccgaccacagagc

SEQ ID NO: 50202 - RNA, 21 nt, synthetic construct
  source 1..21: mol_type = other RNA
cgccaccgaccacagagctgg

SEQ ID NO: 50203 - RNA, 21 nt, synthetic construct
  source 1..21: mol_type = other RNA
cgaccacagagctggagacgg

SEQ ID NO: 50204 - RNA, 21 nt, synthetic construct
  source 1..21: mol_type = other RNA
cccctcacagccacccacgct

SEQ ID NO: 50205 - RNA, 21 nt, synthetic construct
  source 1..21: mol_type = other RNA
cagccacccacgctggcccca

SEQ ID NO: 50206 - RNA, 21 nt, synthetic construct
  source 1..21: mol_type = other RNA
gagaccagcacgcccaggaca

SEQ ID NO: 50207 - RNA, 21 nt, synthetic construct
  source 1..21: mol_type = other RNA
gccaccccgacctccaccctg

SEQ ID NO: 50208 - RNA, 21 nt, synthetic construct
  source 1..21: mol_type = other RNA
cacccacagtcaccagctcca

SEQ ID NO: 50209 - RNA, 21 nt, synthetic construct
  source 1..21: mol_type = other RNA
aaagccactccctcctccagt

SEQ ID NO: 50210 - RNA, 21 nt, synthetic construct
  source 1..21: mol_type = other RNA
aagccactccctcctccagtc

SEQ ID NO: 50211 - RNA, 21 nt, synthetic construct
  source 1..21: mol_type = other RNA
cacggtgaccccctcctccat

SEQ ID NO: 50212 - RNA, 21 nt, synthetic construct
  source 1..21: mol_type = other RNA
tccaccaccaacccctcctca

SEQ ID NO: 50213 - RNA, 21 nt, synthetic construct
  source 1..21: mol_type = other RNA
caacccctcctcaactcctgg

SEQ ID NO: 50214 - RNA, 21 nt, synthetic construct
  source 1..21: mol_type = other RNA
cacacctgcagccaccagcaa

SEQ ID NO: 50215 - RNA, 21 nt, synthetic construct
  source 1..21: mol_type = other RNA
cctcaccctagcagcagaacc

SEQ ID NO: 50216 - RNA, 21 nt, synthetic construct
  source 1..21: mol_type = other RNA
acgaccaccccgggccacacc

SEQ ID NO: 50217 - RNA, 21 nt, synthetic construct
  source 1..21: mol_type = other RNA
gccacctccaggaccacagcc

SEQ ID NO: 50218 - RNA, 21 nt, synthetic construct
  source 1..21: mol_type = other RNA
ggatccacggccaccgcctcc

SEQ ID NO: 50219 - RNA, 21 nt, synthetic construct
  source 1..21: mol_type = other RNA
cacccacagtcaccagctcca

SEQ ID NO: 50220 - RNA, 21 nt, synthetic construct
  source 1..21: mol_type = other RNA
ctgtccacacctccacagtgc

SEQ ID NO: 50221 - RNA, 21 nt, synthetic construct
  source 1..21: mol_type = other RNA
tgtccacacctccacagtgct

SEQ ID NO: 50222 - RNA, 21 nt, synthetic construct
  source 1..21: mol_type = other RNA
cacggtgaccccctcctccat

SEQ ID NO: 50223 - RNA, 21 nt, synthetic construct
  source 1..21: mol_type = other RNA
tccaccaccaacccctcctca

SEQ ID NO: 50224 - RNA, 21 nt, synthetic construct
  source 1..21: mol_type = other RNA
cacacctgcagccaccagcag

SEQ ID NO: 50225 - RNA, 21 nt, synthetic construct
  source 1..21: mol_type = other RNA
caccttgggcaccacccacat

SEQ ID NO: 50226 - RNA, 21 nt, synthetic construct
  source 1..21: mol_type = other RNA
acgaccaccccgggccacacc

SEQ ID NO: 50227 - RNA, 21 nt, synthetic construct
  source 1..21: mol_type = other RNA
agccactacaactgcagccac

SEQ ID NO: 50228 - RNA, 21 nt, synthetic construct
  source 1..21: mol_type = other RNA
gccactacaactgcagccact

SEQ ID NO: 50229 - RNA, 21 nt, synthetic construct
  source 1..21: mol_type = other RNA
ggatccacggccaccgcctcc

SEQ ID NO: 50230 - RNA, 21 nt, synthetic construct
  source 1..21: mol_type = other RNA
gagccactccctcctccagtc

SEQ ID NO: 50231 - RNA, 21 nt, synthetic construct
  source 1..21: mol_type = other RNA
cacagccacaccctcctctac

SEQ ID NO: 50232 - RNA, 21 nt, synthetic construct
  source 1..21: mol_type = other RNA
ctgtccacacctccacagtgc

SEQ ID NO: 50233 - RNA, 21 nt, synthetic construct
  source 1..21: mol_type = other RNA
tgtccacacctccacagtgct

SEQ ID NO: 50234 - RNA, 21 nt, synthetic construct
  source 1..21: mol_type = other RNA
ccaccacaaccagggccaccg

SEQ ID NO: 50235 - RNA, 21 nt, synthetic construct
  source 1..21: mol_type = other RNA
cacggtgaccccctcctccat

SEQ ID NO: 50236 - RNA, 21 nt, synthetic construct
  source 1..21: mol_type = other RNA
tccaccaccaacccctcctca

SEQ ID NO: 50237 - RNA, 21 nt, synthetic construct
  source 1..21: mol_type = other RNA
cacacctgcagccaccagcag

SEQ ID NO: 50238 - RNA, 21 nt, synthetic construct
  source 1..21: mol_type = other RNA
acgaccaccccgggccacacc

SEQ ID NO: 50239 - RNA, 21 nt, synthetic construct
  source 1..21: mol_type = other RNA
ccaggaccacagccacagcca

SEQ ID NO: 50240 - RNA, 21 nt, synthetic construct
  source 1..21: mol_type = other RNA
ggatccacggccaccgcctcc

SEQ ID NO: 50241 - RNA, 21 nt, synthetic construct
  source 1..21: mol_type = other RNA
cacccacagtcaccagctcca

SEQ ID NO: 50242 - RNA, 21 nt, synthetic construct
  source 1..21: mol_type = other RNA
ccaccacaaccagggccaccg

SEQ ID NO: 50243 - RNA, 21 nt, synthetic construct
  source 1..21: mol_type = other RNA
tcttccaccccaggaacagct

SEQ ID NO: 50244 - RNA, 21 nt, synthetic construct
  source 1..21: mol_type = other RNA
tccaccaccaacccctcctca

SEQ ID NO: 50245 - RNA, 21 nt, synthetic construct
  source 1..21: mol_type = other RNA
cacacctgcagccaccagcag

SEQ ID NO: 50246 - RNA, 21 nt, synthetic construct
  source 1..21: mol_type = other RNA
caccttgggcaccacccacat

SEQ ID NO: 50247 - RNA, 21 nt, synthetic construct
  source 1..21: mol_type = other RNA
acgaccaccccgggccacacc

SEQ ID NO: 50248 - RNA, 21 nt, synthetic construct
  source 1..21: mol_type = other RNA
gcctggtgtccccctggggga

SEQ ID NO: 50249 - RNA, 21 nt, synthetic construct
  source 1..21: mol_type = other RNA
atccacagctaccagcgttac

SEQ ID NO: 50250 - RNA, 21 nt, synthetic construct
  source 1..21: mol_type = other RNA
ccacacccgtggccaccatgt

SEQ ID NO: 50251 - RNA, 21 nt, synthetic construct
  source 1..21: mol_type = other RNA
agccactacaactgcagccac

SEQ ID NO: 50252 - RNA, 21 nt, synthetic construct
  source 1..21: mol_type = other RNA
gccactacaactgcagccact

SEQ ID NO: 50253 - RNA, 21 nt, synthetic construct
  source 1..21: mol_type = other RNA
ggatccacggccaccgcctcc

SEQ ID NO: 50254 - RNA, 21 nt, synthetic construct
  source 1..21: mol_type = other RNA
cacccacagtcaccagctcca

SEQ ID NO: 50255 - RNA, 21 nt, synthetic construct
  source 1..21: mol_type = other RNA
aaagccactccctcctccagt

SEQ ID NO: 50256 - RNA, 21 nt, synthetic construct
  source 1..21: mol_type = other RNA
aagccactccctcctccagtc

SEQ ID NO: 50257 - RNA, 21 nt, synthetic construct
  source 1..21: mol_type = other RNA
ctgtccacacctccacagtgc

SEQ ID NO: 50258 - RNA, 21 nt, synthetic construct
  source 1..21: mol_type = other RNA
tgtccacacctccacagtgct

SEQ ID NO: 50259 - RNA, 21 nt, synthetic construct
  source 1..21: mol_type = other RNA
acacccacaaccaccacaccc

SEQ ID NO: 50260 - RNA, 21 nt, synthetic construct
  source 1..21: mol_type = other RNA
cacggtgaccccctcctccat

SEQ ID NO: 50261 - RNA, 21 nt, synthetic construct
  source 1..21: mol_type = other RNA
tccaccaccaacccctcctca

SEQ ID NO: 50262 - RNA, 21 nt, synthetic construct
  source 1..21: mol_type = other RNA
gccaccacacccgcagccacc

SEQ ID NO: 50263 - RNA, 21 nt, synthetic construct
  source 1..21: mol_type = other RNA
acccgcagccaccagctccaa

SEQ ID NO: 50264 - RNA, 21 nt, synthetic construct
  source 1..21: mol_type = other RNA
agtgctgaccaccacagccac

SEQ ID NO: 50265 - RNA, 21 nt, synthetic construct
  source 1..21: mol_type = other RNA
tgctgaccaccacagccacca

SEQ ID NO: 50266 - RNA, 21 nt, synthetic construct
  source 1..21: mol_type = other RNA
gctgaccaccacagccaccat

SEQ ID NO: 50267 - RNA, 21 nt, synthetic construct
  source 1..21: mol_type = other RNA
agccactacaactgcagccac

SEQ ID NO: 50268 - RNA, 21 nt, synthetic construct
  source 1..21: mol_type = other RNA
gccactacaactgcagccact

SEQ ID NO: 50269 - RNA, 21 nt, synthetic construct
  source 1..21: mol_type = other RNA
tgagacccactggcttcccca

SEQ ID NO: 50270 - RNA, 21 nt, synthetic construct
  source 1..21: mol_type = other RNA
cgccccgctgtcctcgccctc

SEQ ID NO: 50271 - RNA, 21 nt, synthetic construct
  source 1..21: mol_type = other RNA
aggaggagggcctgatcctgt

SEQ ID NO: 50272 - RNA, 21 nt, synthetic construct
  source 1..21: mol_type = other RNA
tggctgctgggccccgactgg

SEQ ID NO: 50273 - RNA, 21 nt, synthetic construct
  source 1..21: mol_type = other RNA
cacaccccccactgccagccc

SEQ ID NO: 50274 - RNA, 21 nt, synthetic construct
  source 1..21: mol_type = other RNA
agcccacagctggaggggatg

SEQ ID NO: 50275 - RNA, 21 nt, synthetic construct
  source 1..21: mol_type = other RNA
gcaggagtccatctgcaccca

SEQ ID NO: 50276 - RNA, 21 nt, synthetic construct
  source 1..21: mol_type = other RNA
gagtccatctgcacccaggag

SEQ ID NO: 50277 - RNA, 21 nt, synthetic construct
  source 1..21: mol_type = other RNA
ccaggaggagggcgactgctg

SEQ ID NO: 50278 - RNA, 21 nt, synthetic construct
  source 1..21: mol_type = other RNA
ttcccaggcgcccttccctgc

SEQ ID NO: 50279 - RNA, 21 nt, synthetic construct
  source 1..21: mol_type = other RNA
acaatactacctgtccccagg

SEQ ID NO: 50280 - RNA, 21 nt, synthetic construct
  source 1..21: mol_type = other RNA
ggccagccagtccagctgaat

SEQ ID NO: 50281 - RNA, 21 nt, synthetic construct
  source 1..21: mol_type = other RNA
cctctgtgaggctgagggtgg

SEQ ID NO: 50282 - RNA, 21 nt, synthetic construct
  source 1..21: mol_type = other RNA
gtggcttcccggcccaggagg

SEQ ID NO: 50283 - RNA, 21 nt, synthetic construct
  source 1..21: mol_type = other RNA
tggcttcccggcccaggaggc

SEQ ID NO: 50284 - RNA, 21 nt, synthetic construct
  source 1..21: mol_type = other RNA
ccagaagggtgaggggccagc

SEQ ID NO: 50285 - RNA, 21 nt, synthetic construct
  source 1..21: mol_type = other RNA
caaggccagctgctgccagga

SEQ ID NO: 50286 - RNA, 21 nt, synthetic construct
  source 1..21: mol_type = other RNA
ttttgcaaataaaccctgagc

SEQ ID NO: 50287 - RNA, 21 nt, synthetic construct
  source 1..21: mol_type = other RNA
cccggcccggctccctccctg

SEQ ID NO: 50288 - RNA, 21 nt, synthetic construct
  source 1..21: mol_type = other RNA
cggcccggctccctccctgcc

SEQ ID NO: 50289 - RNA, 21 nt, synthetic construct
  source 1..21: mol_type = other RNA
ggcccggctccctccctgccc

SEQ ID NO: 50290 - RNA, 21 nt, synthetic construct
  source 1..21: mol_type = other RNA
gcccggctccctccctgcccg

SEQ ID NO: 50291 - RNA, 21 nt, synthetic construct
  source 1..21: mol_type = other RNA
cccggctccctccctgcccgt

SEQ ID NO: 50292 - RNA, 21 nt, synthetic construct
  source 1..21: mol_type = other RNA
ccggctccctccctgcccgtc

SEQ ID NO: 50293 - RNA, 21 nt, synthetic construct
  source 1..21: mol_type = other RNA
gctccctccctgcccgtcccc

SEQ ID NO: 50294 - RNA, 21 nt, synthetic construct
  source 1..21: mol_type = other RNA
ctccctccctgcccgtccccg

SEQ ID NO: 50295 - RNA, 21 nt, synthetic construct
  source 1..21: mol_type = other RNA
tccctccctgcccgtccccgt

SEQ ID NO: 50296 - RNA, 21 nt, synthetic construct
  source 1..21: mol_type = other RNA
cctccctgcccgtccccgtcc

SEQ ID NO: 50297 - RNA, 21 nt, synthetic construct
  source 1..21: mol_type = other RNA
cgtccccgtccccccacccgt

SEQ ID NO: 50298 - RNA, 21 nt, synthetic construct
  source 1..21: mol_type = other RNA
tccccgtccccccacccgtgc

SEQ ID NO: 50299 - RNA, 21 nt, synthetic construct
  source 1..21: mol_type = other RNA
ccccccacccgtgccagcccc

SEQ ID NO: 50300 - RNA, 21 nt, synthetic construct
  source 1..21: mol_type = other RNA
cccacccgtgccagcccccag

SEQ ID NO: 50301 - RNA, 21 nt, synthetic construct
  source 1..21: mol_type = other RNA
ccacccgtgccagcccccagg

SEQ ID NO: 50302 - RNA, 21 nt, synthetic construct
  source 1..21: mol_type = other RNA
acccgtgccagcccccaggat

SEQ ID NO: 50303 - RNA, 21 nt, synthetic construct
  source 1..21: mol_type = other RNA
gcccccaggatgggtgccccg

SEQ ID NO: 50304 - RNA, 21 nt, synthetic construct
  source 1..21: mol_type = other RNA
tcgtggtgccgcaggcagaga

SEQ ID NO: 50305 - RNA, 21 nt, synthetic construct
  source 1..21: mol_type = other RNA
cgtggtgccgcaggcagagac

SEQ ID NO: 50306 - RNA, 21 nt, synthetic construct
  source 1..21: mol_type = other RNA
ggcagagacccagggccctgt

SEQ ID NO: 50307 - RNA, 21 nt, synthetic construct
  source 1..21: mol_type = other RNA
gcagagacccagggccctgtg

SEQ ID NO: 50308 - RNA, 21 nt, synthetic construct
  source 1..21: mol_type = other RNA
agagacccagggccctgtgga

SEQ ID NO: 50309 - RNA, 21 nt, synthetic construct
  source 1..21: mol_type = other RNA
agacccagggccctgtggagc

SEQ ID NO: 50310 - RNA, 21 nt, synthetic construct
  source 1..21: mol_type = other RNA
cccagggccctgtggagccga

SEQ ID NO: 50311 - RNA, 21 nt, synthetic construct
  source 1..21: mol_type = other RNA
cagggccctgtggagccgagc

SEQ ID NO: 50312 - RNA, 21 nt, synthetic construct
  source 1..21: mol_type = other RNA
tgtggagccgagctgggagaa

SEQ ID NO: 50313 - RNA, 21 nt, synthetic construct
  source 1..21: mol_type = other RNA
cgtcctcgcccacccggcgcg

SEQ ID NO: 50314 - RNA, 21 nt, synthetic construct
  source 1..21: mol_type = other RNA
gggtgtgcagcacctggggtg

SEQ ID NO: 50315 - RNA, 21 nt, synthetic construct
  source 1..21: mol_type = other RNA
gtgtgcagcacctggggtgac

SEQ ID NO: 50316 - RNA, 21 nt, synthetic construct
  source 1..21: mol_type = other RNA
tagtgggctccaggcctgtgg

SEQ ID NO: 50317 - RNA, 21 nt, synthetic construct
  source 1..21: mol_type = other RNA
agtgggctccaggcctgtggt

SEQ ID NO: 50318 - RNA, 21 nt, synthetic construct
  source 1..21: mol_type = other RNA
aatgggcagcgggaggagctg

SEQ ID NO: 50319 - RNA, 21 nt, synthetic construct
  source 1..21: mol_type = other RNA
cgcactggcctcctggtggag

SEQ ID NO: 50320 - RNA, 21 nt, synthetic construct
  source 1..21: mol_type = other RNA
ggcctcctggtggagcagagc

SEQ ID NO: 50321 - RNA, 21 nt, synthetic construct
  source 1..21: mol_type = other RNA
gcctcctggtggagcagagcg

SEQ ID NO: 50322 - RNA, 21 nt, synthetic construct
  source 1..21: mol_type = other RNA
cctcctggtggagcagagcgg

SEQ ID NO: 50323 - RNA, 21 nt, synthetic construct
  source 1..21: mol_type = other RNA
tcctggtggagcagagcgggg

SEQ ID NO: 50324 - RNA, 21 nt, synthetic construct
  source 1..21: mol_type = other RNA
cctggtggagcagagcgggga

SEQ ID NO: 50325 - RNA, 21 nt, synthetic construct
  source 1..21: mol_type = other RNA
ctggtggagcagagcggggac

SEQ ID NO: 50326 - RNA, 21 nt, synthetic construct
  source 1..21: mol_type = other RNA
tgccctgctggagctggatcc

SEQ ID NO: 50327 - RNA, 21 nt, synthetic construct
  source 1..21: mol_type = other RNA
ctgctggagctggatcccaaa

SEQ ID NO: 50328 - RNA, 21 nt, synthetic construct
  source 1..21: mol_type = other RNA
ctggagctggatcccaaatac

SEQ ID NO: 50329 - RNA, 21 nt, synthetic construct
  source 1..21: mol_type = other RNA
accagacctgtggcctgtgtg

SEQ ID NO: 50330 - RNA, 21 nt, synthetic construct
  source 1..21: mol_type = other RNA
ccagacctgtggcctgtgtgg

SEQ ID NO: 50331 - RNA, 21 nt, synthetic construct
  source 1..21: mol_type = other RNA
ctgtggcctgtgtggggactt

SEQ ID NO: 50332 - RNA, 21 nt, synthetic construct
  source 1..21: mol_type = other RNA
ccaggctgaccccgctccagt

SEQ ID NO: 50333 - RNA, 21 nt, synthetic construct
  source 1..21: mol_type = other RNA
gggcatctgccaccgcaccct

SEQ ID NO: 50334 - RNA, 21 nt, synthetic construct
  source 1..21: mol_type = other RNA
ctgccaccgcaccctgctggg

SEQ ID NO: 50335 - RNA, 21 nt, synthetic construct
  source 1..21: mol_type = other RNA
ccaccgcaccctgctggggcc

SEQ ID NO: 50336 - RNA, 21 nt, synthetic construct
  source 1..21: mol_type = other RNA
cgcaccctgctggggccggcc

SEQ ID NO: 50337 - RNA, 21 nt, synthetic construct
  source 1..21: mol_type = other RNA
gcaccctgctggggccggcct

SEQ ID NO: 50338 - RNA, 21 nt, synthetic construct
  source 1..21: mol_type = other RNA
acgcactggtggacagcactg

SEQ ID NO: 50339 - RNA, 21 nt, synthetic construct
  source 1..21: mol_type = other RNA
ccacctgcccgtgtgccacct

SEQ ID NO: 50340 - RNA, 21 nt, synthetic construct
  source 1..21: mol_type = other RNA
cgcggggggccagccgcggaa

SEQ ID NO: 50341 - RNA, 21 nt, synthetic construct
  source 1..21: mol_type = other RNA
cgcggaactggaggtgccctg

SEQ ID NO: 50342 - RNA, 21 nt, synthetic construct
  source 1..21: mol_type = other RNA
aactggaggtgccctgagctc

SEQ ID NO: 50343 - RNA, 21 nt, synthetic construct
  source 1..21: mol_type = other RNA
tggaggtgccctgagctctgc

SEQ ID NO: 50344 - RNA, 21 nt, synthetic construct
  source 1..21: mol_type = other RNA
ggtgccctgagctctgccccc

SEQ ID NO: 50345 - RNA, 21 nt, synthetic construct
  source 1..21: mol_type = other RNA
tgcccccggacctgccccctc

SEQ ID NO: 50346 - RNA, 21 nt, synthetic construct
  source 1..21: mol_type = other RNA
agcaccaggagtgtggctcac

SEQ ID NO: 50347 - RNA, 21 nt, synthetic construct
  source 1..21: mol_type = other RNA
gcaccaggagtgtggctcacc

SEQ ID NO: 50348 - RNA, 21 nt, synthetic construct
  source 1..21: mol_type = other RNA
caccaggagtgtggctcaccc

SEQ ID NO: 50349 - RNA, 21 nt, synthetic construct
  source 1..21: mol_type = other RNA
gcacggacacctgctccaacc

SEQ ID NO: 50350 - RNA, 21 nt, synthetic construct
  source 1..21: mol_type = other RNA
ccagcgcgcgcagctctgcga

SEQ ID NO: 50351 - RNA, 21 nt, synthetic construct
  source 1..21: mol_type = other RNA
cgcagctctgcgaggaccact

SEQ ID NO: 50352 - RNA, 21 nt, synthetic construct
  source 1..21: mol_type = other RNA
acagcccgggcacctccttca

SEQ ID NO: 50353 - RNA, 21 nt, synthetic construct
  source 1..21: mol_type = other RNA
cctccttcaacaccacctgca

SEQ ID NO: 50354 - RNA, 21 nt, synthetic construct
  source 1..21: mol_type = other RNA
ctcctgcacctgctccggggg

SEQ ID NO: 50355 - RNA, 21 nt, synthetic construct
  source 1..21: mol_type = other RNA
ccgtgccctggcacctgctct

SEQ ID NO: 50356 - RNA, 21 nt, synthetic construct
  source 1..21: mol_type = other RNA
cgtgccctggcacctgctctg

SEQ ID NO: 50357 - RNA, 21 nt, synthetic construct
  source 1..21: mol_type = other RNA
tgccctggcacctgctctgtg

SEQ ID NO: 50358 - RNA, 21 nt, synthetic construct
  source 1..21: mol_type = other RNA
ccctggcacctgctctgtgca

SEQ ID NO: 50359 - RNA, 21 nt, synthetic construct
  source 1..21: mol_type = other RNA
cctggcacctgctctgtgcag

SEQ ID NO: 50360 - RNA, 21 nt, synthetic construct
  source 1..21: mol_type = other RNA
gcacctgctctgtgcagggcg

SEQ ID NO: 50361 - RNA, 21 nt, synthetic construct
  source 1..21: mol_type = other RNA
gctctgtgcagggcggggccc

SEQ ID NO: 50362 - RNA, 21 nt, synthetic construct
  source 1..21: mol_type = other RNA
tgtgcagggcggggcccacat

SEQ ID NO: 50363 - RNA, 21 nt, synthetic construct
  source 1..21: mol_type = other RNA
gacagcagcttcaccgtgctg

SEQ ID NO: 50364 - RNA, 21 nt, synthetic construct
  source 1..21: mol_type = other RNA
accgtgctggctgagctgcgg

SEQ ID NO: 50365 - RNA, 21 nt, synthetic construct
  source 1..21: mol_type = other RNA
cgtgctggctgagctgcggaa

SEQ ID NO: 50366 - RNA, 21 nt, synthetic construct
  source 1..21: mol_type = other RNA
gtgctggctgagctgcggaag

SEQ ID NO: 50367 - RNA, 21 nt, synthetic construct
  source 1..21: mol_type = other RNA
tgctggctgagctgcggaagt

SEQ ID NO: 50368 - RNA, 21 nt, synthetic construct
  source 1..21: mol_type = other RNA
ttcttcatcgtggtgcagaca

SEQ ID NO: 50369 - RNA, 21 nt, synthetic construct
  source 1..21: mol_type = other RNA
cgtggtgcagacaggcctggg

SEQ ID NO: 50370 - RNA, 21 nt, synthetic construct
  source 1..21: mol_type = other RNA
gtggtgcagacaggcctgggg

SEQ ID NO: 50371 - RNA, 21 nt, synthetic construct
  source 1..21: mol_type = other RNA
ggtgcagacaggcctggggct

SEQ ID NO: 50372 - RNA, 21 nt, synthetic construct
  source 1..21: mol_type = other RNA
tgcagacaggcctggggctgc

SEQ ID NO: 50373 - RNA, 21 nt, synthetic construct
  source 1..21: mol_type = other RNA
cagacaggcctggggctgcag

SEQ ID NO: 50374 - RNA, 21 nt, synthetic construct
  source 1..21: mol_type = other RNA
tggggctgcagctgctggtgc

SEQ ID NO: 50375 - RNA, 21 nt, synthetic construct
  source 1..21: mol_type = other RNA
gccctcagcggggtggtggag

SEQ ID NO: 50376 - RNA, 21 nt, synthetic construct
  source 1..21: mol_type = other RNA
ccctcagcggggtggtggagg

SEQ ID NO: 50377 - RNA, 21 nt, synthetic construct
  source 1..21: mol_type = other RNA
cagcggggtggtggaggccac

SEQ ID NO: 50378 - RNA, 21 nt, synthetic construct
  source 1..21: mol_type = other RNA
gtggtggaggccacgggcgca

SEQ ID NO: 50379 - RNA, 21 nt, synthetic construct
  source 1..21: mol_type = other RNA
aacacctggaaggcccaggct

SEQ ID NO: 50380 - RNA, 21 nt, synthetic construct
  source 1..21: mol_type = other RNA
acacctggaaggcccaggctg

SEQ ID NO: 50381 - RNA, 21 nt, synthetic construct
  source 1..21: mol_type = other RNA
tggaaggcccaggctgcctgt

SEQ ID NO: 50382 - RNA, 21 nt, synthetic construct
  source 1..21: mol_type = other RNA
ggaaggcccaggctgcctgtg

SEQ ID NO: 50383 - RNA, 21 nt, synthetic construct
  source 1..21: mol_type = other RNA
aaggcccaggctgcctgtgcc

SEQ ID NO: 50384 - RNA, 21 nt, synthetic construct
  source 1..21: mol_type = other RNA
caggctgcctgtgccaatgcc

SEQ ID NO: 50385 - RNA, 21 nt, synthetic construct
  source 1..21: mol_type = other RNA
gatcccaacagtgccttctcg

SEQ ID NO: 50386 - RNA, 21 nt, synthetic construct
  source 1..21: mol_type = other RNA
gctgccactccatcatcaacc

SEQ ID NO: 50387 - RNA, 21 nt, synthetic construct
  source 1..21: mol_type = other RNA
ctccatcatcaaccccaagcc

SEQ ID NO: 50388 - RNA, 21 nt, synthetic construct
  source 1..21: mol_type = other RNA
tccatcatcaaccccaagccc

SEQ ID NO: 50389 - RNA, 21 nt, synthetic construct
  source 1..21: mol_type = other RNA
ttccactcgaactgcatgttt

SEQ ID NO: 50390 - RNA, 21 nt, synthetic construct
  source 1..21: mol_type = other RNA
ttcgtgcctgtggacggctgc

SEQ ID NO: 50391 - RNA, 21 nt, synthetic construct
  source 1..21: mol_type = other RNA
ggacggctgcacctgccccgc

SEQ ID NO: 50392 - RNA, 21 nt, synthetic construct
  source 1..21: mol_type = other RNA
cgcccaggagtgcccctgcta

SEQ ID NO: 50393 - RNA, 21 nt, synthetic construct
  source 1..21: mol_type = other RNA
tggctcctggagaggtggtgc

SEQ ID NO: 50394 - RNA, 21 nt, synthetic construct
  source 1..21: mol_type = other RNA
ctaagctgcctgggagcctct

SEQ ID NO: 50395 - RNA, 21 nt, synthetic construct
  source 1..21: mol_type = other RNA
gcagaaaagcacagggtgtgc

SEQ ID NO: 50396 - RNA, 21 nt, synthetic construct
  source 1..21: mol_type = other RNA
tacctggactgcagcaacagc

SEQ ID NO: 50397 - RNA, 21 nt, synthetic construct
  source 1..21: mol_type = other RNA
tcggatgggagtgggggctgc

SEQ ID NO: 50398 - RNA, 21 nt, synthetic construct
  source 1..21: mol_type = other RNA
gatgggagtgggggctgcatt

SEQ ID NO: 50399 - RNA, 21 nt, synthetic construct
  source 1..21: mol_type = other RNA
gcaacacctgcacctgcagga

SEQ ID NO: 50400 - RNA, 21 nt, synthetic construct
  source 1..21: mol_type = other RNA
caacacctgcacctgcaggaa

SEQ ID NO: 50401 - RNA, 21 nt, synthetic construct
  source 1..21: mol_type = other RNA
ctactgtggggacaacaccac

SEQ ID NO: 50402 - RNA, 21 nt, synthetic construct
  source 1..21: mol_type = other RNA
aaggcggtggcgagagggccg

SEQ ID NO: 50403 - RNA, 21 nt, synthetic construct
  source 1..21: mol_type = other RNA
gagagggccgggtggggaccc

SEQ ID NO: 50404 - RNA, 21 nt, synthetic construct
  source 1..21: mol_type = other RNA
gctctccccctcctgcccgga

SEQ ID NO: 50405 - RNA, 21 nt, synthetic construct
  source 1..21: mol_type = other RNA
ggcacccaaggacccctgcac

SEQ ID NO: 50406 - RNA, 21 nt, synthetic construct
  source 1..21: mol_type = other RNA
ggactccggacacctgcccct

SEQ ID NO: 50407 - RNA, 21 nt, synthetic construct
  source 1..21: mol_type = other RNA
acacctgccccttgttctgtg

SEQ ID NO: 50408 - RNA, 21 nt, synthetic construct
  source 1..21: mol_type = other RNA
acatgggggctgtgagtggca

SEQ ID NO: 50409 - RNA, 21 nt, synthetic construct
  source 1..21: mol_type = other RNA
atgggggctgtgagtggcact

SEQ ID NO: 50410 - RNA, 21 nt, synthetic construct
  source 1..21: mol_type = other RNA
aagtgcccacccagccagccc

SEQ ID NO: 50411 - RNA, 21 nt, synthetic construct
  source 1..21: mol_type = other RNA
agtgcccacccagccagccct

SEQ ID NO: 50412 - RNA, 21 nt, synthetic construct
  source 1..21: mol_type = other RNA
tcatcaggaaggctgtggcat

SEQ ID NO: 50413 - RNA, 21 nt, synthetic construct
  source 1..21: mol_type = other RNA
atcaggaaggctgtggcatgt

SEQ ID NO: 50414 - RNA, 21 nt, synthetic construct
  source 1..21: mol_type = other RNA
gcatgtcctggaactccagcc

SEQ ID NO: 50415 - RNA, 21 nt, synthetic construct
  source 1..21: mol_type = other RNA
ccattcaccttcaccaccgcc

SEQ ID NO: 50416 - RNA, 21 nt, synthetic construct
  source 1..21: mol_type = other RNA
ttcaccttcaccaccgcctgg

SEQ ID NO: 50417 - RNA, 21 nt, synthetic construct
  source 1..21: mol_type = other RNA
tcaccttcaccaccgcctggg

SEQ ID NO: 50418 - RNA, 21 nt, synthetic construct
  source 1..21: mol_type = other RNA
cgcctgggtcccccactccac

SEQ ID NO: 50419 - RNA, 21 nt, synthetic construct
  source 1..21: mol_type = other RNA
cggccctcccggtctccaccg

SEQ ID NO: 50420 - RNA, 21 nt, synthetic construct
  source 1..21: mol_type = other RNA
ggccctcccggtctccaccgt

SEQ ID NO: 50421 - RNA, 21 nt, synthetic construct
  source 1..21: mol_type = other RNA
tccagctggtacaatgggcac

SEQ ID NO: 50422 - RNA, 21 nt, synthetic construct
  source 1..21: mol_type = other RNA
cagctggtacaatgggcaccg

SEQ ID NO: 50423 - RNA, 21 nt, synthetic construct
  source 1..21: mol_type = other RNA
cgcccagagcccggcctggga

SEQ ID NO: 50424 - RNA, 21 nt, synthetic construct
  source 1..21: mol_type = other RNA
agagcccggcctgggaggcgg

SEQ ID NO: 50425 - RNA, 21 nt, synthetic construct
  source 1..21: mol_type = other RNA
gagcccggcctgggaggcgga

SEQ ID NO: 50426 - RNA, 21 nt, synthetic construct
  source 1..21: mol_type = other RNA
gcccggcctgggaggcggaga

SEQ ID NO: 50427 - RNA, 21 nt, synthetic construct
  source 1..21: mol_type = other RNA
cgctggaggagctgggccagc

SEQ ID NO: 50428 - RNA, 21 nt, synthetic construct
  source 1..21: mol_type = other RNA
aggagctgggccagcaggtgg

SEQ ID NO: 50429 - RNA, 21 nt, synthetic construct
  source 1..21: mol_type = other RNA
cgtgccctgtggcccctcccc

SEQ ID NO: 50430 - RNA, 21 nt, synthetic construct
  source 1..21: mol_type = other RNA
tgccctgtggcccctccccgg

SEQ ID NO: 50431 - RNA, 21 nt, synthetic construct
  source 1..21: mol_type = other RNA
gccctgtggcccctccccggc

SEQ ID NO: 50432 - RNA, 21 nt, synthetic construct
  source 1..21: mol_type = other RNA
ccctgtggcccctccccggcc

SEQ ID NO: 50433 - RNA, 21 nt, synthetic construct
  source 1..21: mol_type = other RNA
cctgtggcccctccccggccc

SEQ ID NO: 50434 - RNA, 21 nt, synthetic construct
  source 1..21: mol_type = other RNA
cccctccccggccccaggcac

SEQ ID NO: 50435 - RNA, 21 nt, synthetic construct
  source 1..21: mol_type = other RNA
ggccccaggcaccagccctca

SEQ ID NO: 50436 - RNA, 21 nt, synthetic construct
  source 1..21: mol_type = other RNA
gccccaggcaccagccctcag

SEQ ID NO: 50437 - RNA, 21 nt, synthetic construct
  source 1..21: mol_type = other RNA
ccccaggcaccagccctcagc

SEQ ID NO: 50438 - RNA, 21 nt, synthetic construct
  source 1..21: mol_type = other RNA
ccaggcaccagccctcagccc

SEQ ID NO: 50439 - RNA, 21 nt, synthetic construct
  source 1..21: mol_type = other RNA
accagccctcagccctccctc

SEQ ID NO: 50440 - RNA, 21 nt, synthetic construct
  source 1..21: mol_type = other RNA
gccctcagccctccctcagtg

SEQ ID NO: 50441 - RNA, 21 nt, synthetic construct
  source 1..21: mol_type = other RNA
tcagccctccctcagtgccag

SEQ ID NO: 50442 - RNA, 21 nt, synthetic construct
  source 1..21: mol_type = other RNA
ccaacccagaccacagcaacc

SEQ ID NO: 50443 - RNA, 21 nt, synthetic construct
  source 1..21: mol_type = other RNA
gtccagctcaggccccgtgac

SEQ ID NO: 50444 - RNA, 21 nt, synthetic construct
  source 1..21: mol_type = other RNA
tcaccccctcggccccaggta

SEQ ID NO: 50445 - RNA, 21 nt, synthetic construct
  source 1..21: mol_type = other RNA
gatcagggccgctggagggca

SEQ ID NO: 50446 - RNA, 21 nt, synthetic construct
  source 1..21: mol_type = other RNA
gatccgggtcctctgctgcag

SEQ ID NO: 50447 - RNA, 21 nt, synthetic construct
  source 1..21: mol_type = other RNA
ccaccgaccacagagctggag

SEQ ID NO: 50448 - RNA, 21 nt, synthetic construct
  source 1..21: mol_type = other RNA
accacagagctggagacggcc

SEQ ID NO: 50449 - RNA, 21 nt, synthetic construct
  source 1..21: mol_type = other RNA
ccacagagctggagacggcca

SEQ ID NO: 50450 - RNA, 21 nt, synthetic construct
  source 1..21: mol_type = other RNA
accaccaccaccacccaggcc

SEQ ID NO: 50451 - RNA, 21 nt, synthetic construct
  source 1..21: mol_type = other RNA
ccaccaccaccacccaggccc

SEQ ID NO: 50452 - RNA, 21 nt, synthetic construct
  source 1..21: mol_type = other RNA
accaccaccacccaggccctg

SEQ ID NO: 50453 - RNA, 21 nt, synthetic construct
  source 1..21: mol_type = other RNA
ccaccacccaggccctgttct

SEQ ID NO: 50454 - RNA, 21 nt, synthetic construct
  source 1..21: mol_type = other RNA
caccacccaggccctgttctc

SEQ ID NO: 50455 - RNA, 21 nt, synthetic construct
  source 1..21: mol_type = other RNA
ccacccaggccctgttctcaa

SEQ ID NO: 50456 - RNA, 21 nt, synthetic construct
  source 1..21: mol_type = other RNA
tagcccggggctgaccagggc

SEQ ID NO: 50457 - RNA, 21 nt, synthetic construct
  source 1..21: mol_type = other RNA
ccggggctgaccagggctccc

SEQ ID NO: 50458 - RNA, 21 nt, synthetic construct
  source 1..21: mol_type = other RNA
tgaccagggctcccccggcca

SEQ ID NO: 50459 - RNA, 21 nt, synthetic construct
  source 1..21: mol_type = other RNA
accagggctcccccggccagc

SEQ ID NO: 50460 - RNA, 21 nt, synthetic construct
  source 1..21: mol_type = other RNA
cagggctcccccggccagcac

SEQ ID NO: 50461 - RNA, 21 nt, synthetic construct
  source 1..21: mol_type = other RNA
ctcagaaggactgacatcccc

SEQ ID NO: 50462 - RNA, 21 nt, synthetic construct
  source 1..21: mol_type = other RNA
cgcctgcaggctccacagaac

SEQ ID NO: 50463 - RNA, 21 nt, synthetic construct
  source 1..21: mol_type = other RNA
aacacgctcagcccttccagg

SEQ ID NO: 50464 - RNA, 21 nt, synthetic construct
  source 1..21: mol_type = other RNA
acacgctcagcccttccaggg

SEQ ID NO: 50465 - RNA, 21 nt, synthetic construct
  source 1..21: mol_type = other RNA
acatggcgcccctcacagcca

SEQ ID NO: 50466 - RNA, 21 nt, synthetic construct
  source 1..21: mol_type = other RNA
tggcgcccctcacagccaccc

SEQ ID NO: 50467 - RNA, 21 nt, synthetic construct
  source 1..21: mol_type = other RNA
cgcccctcacagccacccacg

SEQ ID NO: 50468 - RNA, 21 nt, synthetic construct
  source 1..21: mol_type = other RNA
gcccgacaggcacagccagca

SEQ ID NO: 50469 - RNA, 21 nt, synthetic construct
  source 1..21: mol_type = other RNA
cccgacaggcacagccagcac

SEQ ID NO: 50470 - RNA, 21 nt, synthetic construct
  source 1..21: mol_type = other RNA
cgacaggcacagccagcaccg

SEQ ID NO: 50471 - RNA, 21 nt, synthetic construct
  source 1..21: mol_type = other RNA
gacaggcacagccagcaccgc

SEQ ID NO: 50472 - RNA, 21 nt, synthetic construct
  source 1..21: mol_type = other RNA
agctgtccacctctcaggccg

SEQ ID NO: 50473 - RNA, 21 nt, synthetic construct
  source 1..21: mol_type = other RNA
ttgactaacaccaccaccagc

SEQ ID NO: 50474 - RNA, 21 nt, synthetic construct
  source 1..21: mol_type = other RNA
acaccaccaccagccagggca

SEQ ID NO: 50475 - RNA, 21 nt, synthetic construct
  source 1..21: mol_type = other RNA
accaccaccagccagggcacg

SEQ ID NO: 50476 - RNA, 21 nt, synthetic construct
  source 1..21: mol_type = other RNA
ccaccagccagggcacgaccc

SEQ ID NO: 50477 - RNA, 21 nt, synthetic construct
  source 1..21: mol_type = other RNA
cggccaccccgacctccaccc

SEQ ID NO: 50478 - RNA, 21 nt, synthetic construct
  source 1..21: mol_type = other RNA
ggccaccccgacctccaccct

SEQ ID NO: 50479 - RNA, 21 nt, synthetic construct
  source 1..21: mol_type = other RNA
ccaccccgacctccaccctga

SEQ ID NO: 50480 - RNA, 21 nt, synthetic construct
  source 1..21: mol_type = other RNA
gagaacagctccccctcccaa

SEQ ID NO: 50481 - RNA, 21 nt, synthetic construct
  source 1..21: mol_type = other RNA
accacggccaccacacccaca

SEQ ID NO: 50482 - RNA, 21 nt, synthetic construct
  source 1..21: mol_type = other RNA
acggccaccacacccacagtc

SEQ ID NO: 50483 - RNA, 21 nt, synthetic construct
  source 1..21: mol_type = other RNA
ggccaccacacccacagtcac

SEQ ID NO: 50484 - RNA, 21 nt, synthetic construct
  source 1..21: mol_type = other RNA
ccaccacacccacagtcacca

SEQ ID NO: 50485 - RNA, 21 nt, synthetic construct
  source 1..21: mol_type = other RNA
acacccacagtcaccagctcc

SEQ ID NO: 50486 - RNA, 21 nt, synthetic construct
  source 1..21: mol_type = other RNA
acccacagtcaccagctccaa

SEQ ID NO: 50487 - RNA, 21 nt, synthetic construct
  source 1..21: mol_type = other RNA
cccacagtcaccagctccaaa

SEQ ID NO: 50488 - RNA, 21 nt, synthetic construct
  source 1..21: mol_type = other RNA
tcaccagctccaaagccactc

SEQ ID NO: 50489 - RNA, 21 nt, synthetic construct
  source 1..21: mol_type = other RNA
tccaaagccactccctcctcc

SEQ ID NO: 50490 - RNA, 21 nt, synthetic construct
  source 1..21: mol_type = other RNA
ccaaagccactccctcctcca

SEQ ID NO: 50491 - RNA, 21 nt, synthetic construct
  source 1..21: mol_type = other RNA
agccactccctcctccagtcc

SEQ ID NO: 50492 - RNA, 21 nt, synthetic construct
  source 1..21: mol_type = other RNA
actccctcctccagtccaggg

SEQ ID NO: 50493 - RNA, 21 nt, synthetic construct
  source 1..21: mol_type = other RNA
acccatcccctcttcctccct

SEQ ID NO: 50494 - RNA, 21 nt, synthetic construct
  source 1..21: mol_type = other RNA
tcccctcttcctccctgggca

SEQ ID NO: 50495 - RNA, 21 nt, synthetic construct
  source 1..21: mol_type = other RNA
ccctcttcctccctgggcacc

SEQ ID NO: 50496 - RNA, 21 nt, synthetic construct
  source 1..21: mol_type = other RNA
cctcttcctccctgggcacca

SEQ ID NO: 50497 - RNA, 21 nt, synthetic construct
  source 1..21: mol_type = other RNA
ctcttcctccctgggcaccac

SEQ ID NO: 50498 - RNA, 21 nt, synthetic construct
  source 1..21: mol_type = other RNA
tcttcctccctgggcaccacc

SEQ ID NO: 50499 - RNA, 21 nt, synthetic construct
  source 1..21: mol_type = other RNA
tcctccctgggcaccacctgg

SEQ ID NO: 50500 - RNA, 21 nt, synthetic construct
  source 1..21: mol_type = other RNA
tccctgggcaccacctggacc

SEQ ID NO: 50501 - RNA, 21 nt, synthetic construct
  source 1..21: mol_type = other RNA
cctgggcaccacctggacccg

SEQ ID NO: 50502 - RNA, 21 nt, synthetic construct
  source 1..21: mol_type = other RNA
ctgggcaccacctggacccgc

SEQ ID NO: 50503 - RNA, 21 nt, synthetic construct
  source 1..21: mol_type = other RNA
tgggcaccacctggacccgcc

SEQ ID NO: 50504 - RNA, 21 nt, synthetic construct
  source 1..21: mol_type = other RNA
gggcaccacctggacccgcct

SEQ ID NO: 50505 - RNA, 21 nt, synthetic construct
  source 1..21: mol_type = other RNA
tatcacagaccaccacaccca

SEQ ID NO: 50506 - RNA, 21 nt, synthetic construct
  source 1..21: mol_type = other RNA
cggccaccatgtccacagcca

SEQ ID NO: 50507 - RNA, 21 nt, synthetic construct
  source 1..21: mol_type = other RNA
ccaccatgtccacagccacac

SEQ ID NO: 50508 - RNA, 21 nt, synthetic construct
  source 1..21: mol_type = other RNA
ccatgtccacagccacaccct

SEQ ID NO: 50509 - RNA, 21 nt, synthetic construct
  source 1..21: mol_type = other RNA
cacaccctcctccactccaga

SEQ ID NO: 50510 - RNA, 21 nt, synthetic construct
  source 1..21: mol_type = other RNA
actgcccacacctccacagtg

SEQ ID NO: 50511 - RNA, 21 nt, synthetic construct
  source 1..21: mol_type = other RNA
taccgccacggccaccacaac

SEQ ID NO: 50512 - RNA, 21 nt, synthetic construct
  source 1..21: mol_type = other RNA
gctctgtggccaccccctcct

SEQ ID NO: 50513 - RNA, 21 nt, synthetic construct
  source 1..21: mol_type = other RNA
ctctgtggccaccccctcctc

SEQ ID NO: 50514 - RNA, 21 nt, synthetic construct
  source 1..21: mol_type = other RNA
tctgtggccaccccctcctcc

SEQ ID NO: 50515 - RNA, 21 nt, synthetic construct
  source 1..21: mol_type = other RNA
ctgtggccaccccctcctcca

SEQ ID NO: 50516 - RNA, 21 nt, synthetic construct
  source 1..21: mol_type = other RNA
tgtggccaccccctcctccac

SEQ ID NO: 50517 - RNA, 21 nt, synthetic construct
  source 1..21: mol_type = other RNA
accccctcctccaccccagga

SEQ ID NO: 50518 - RNA, 21 nt, synthetic construct
  source 1..21: mol_type = other RNA
ccctcctccaccccaggaaca

SEQ ID NO: 50519 - RNA, 21 nt, synthetic construct
  source 1..21: mol_type = other RNA
ccacgggcttcacagccaccc

SEQ ID NO: 50520 - RNA, 21 nt, synthetic construct
  source 1..21: mol_type = other RNA
gcttcacagccaccccctcct

SEQ ID NO: 50521 - RNA, 21 nt, synthetic construct
  source 1..21: mol_type = other RNA
tcacagccaccccctcctcca

SEQ ID NO: 50522 - RNA, 21 nt, synthetic construct
  source 1..21: mol_type = other RNA
ctcctccagcccagggacggc

SEQ ID NO: 50523 - RNA, 21 nt, synthetic construct
  source 1..21: mol_type = other RNA
tcctccagcccagggacggca

SEQ ID NO: 50524 - RNA, 21 nt, synthetic construct
  source 1..21: mol_type = other RNA
cctccagtgtggatcagcaca

SEQ ID NO: 50525 - RNA, 21 nt, synthetic construct
  source 1..21: mol_type = other RNA
acggtgaccccctcctccatc

SEQ ID NO: 50526 - RNA, 21 nt, synthetic construct
  source 1..21: mol_type = other RNA
gtgaccccctcctccatcccg

SEQ ID NO: 50527 - RNA, 21 nt, synthetic construct
  source 1..21: mol_type = other RNA
gaccccctcctccatcccggg

SEQ ID NO: 50528 - RNA, 21 nt, synthetic construct
  source 1..21: mol_type = other RNA
ccccctcctccatcccgggga

SEQ ID NO: 50529 - RNA, 21 nt, synthetic construct
  source 1..21: mol_type = other RNA
ccctcctccatcccggggacc

SEQ ID NO: 50530 - RNA, 21 nt, synthetic construct
  source 1..21: mol_type = other RNA
gccacagtgctgaccaccacc

SEQ ID NO: 50531 - RNA, 21 nt, synthetic construct
  source 1..21: mol_type = other RNA
tgctgaccaccaccaccacaa

SEQ ID NO: 50532 - RNA, 21 nt, synthetic construct
  source 1..21: mol_type = other RNA
gctgaccaccaccaccacaac

SEQ ID NO: 50533 - RNA, 21 nt, synthetic construct
  source 1..21: mol_type = other RNA
accaccaccaccacaactgtg

SEQ ID NO: 50534 - RNA, 21 nt, synthetic construct
  source 1..21: mol_type = other RNA
ccaccacaactgtggccactg

SEQ ID NO: 50535 - RNA, 21 nt, synthetic construct
  source 1..21: mol_type = other RNA
gtggccactggttctatggca

SEQ ID NO: 50536 - RNA, 21 nt, synthetic construct
  source 1..21: mol_type = other RNA
cactgaccaccacggccacta

SEQ ID NO: 50537 - RNA, 21 nt, synthetic construct
  source 1..21: mol_type = other RNA
acggccaccggctccaccacc

SEQ ID NO: 50538 - RNA, 21 nt, synthetic construct
  source 1..21: mol_type = other RNA
ccaccggctccaccaccaacc

SEQ ID NO: 50539 - RNA, 21 nt, synthetic construct
  source 1..21: mol_type = other RNA
ccaccaccaacccctcctcaa

SEQ ID NO: 50540 - RNA, 21 nt, synthetic construct
  source 1..21: mol_type = other RNA
accaccaacccctcctcaact

SEQ ID NO: 50541 - RNA, 21 nt, synthetic construct
  source 1..21: mol_type = other RNA
accaacccctcctcaactcct

SEQ ID NO: 50542 - RNA, 21 nt, synthetic construct
  source 1..21: mol_type = other RNA
ggacaactcccatccccccag

SEQ ID NO: 50543 - RNA, 21 nt, synthetic construct
  source 1..21: mol_type = other RNA
acaactcccatccccccagtg

SEQ ID NO: 50544 - RNA, 21 nt, synthetic construct
  source 1..21: mol_type = other RNA
ctcccatccccccagtgctga

SEQ ID NO: 50545 - RNA, 21 nt, synthetic construct
  source 1..21: mol_type = other RNA
ccccccagtgctgaccaccac

SEQ ID NO: 50546 - RNA, 21 nt, synthetic construct
  source 1..21: mol_type = other RNA
ccccagtgctgaccaccaccg

SEQ ID NO: 50547 - RNA, 21 nt, synthetic construct
  source 1..21: mol_type = other RNA
gctgaccaccaccgccaccac

SEQ ID NO: 50548 - RNA, 21 nt, synthetic construct
  source 1..21: mol_type = other RNA
accaccaccgccaccacacct

SEQ ID NO: 50549 - RNA, 21 nt, synthetic construct
  source 1..21: mol_type = other RNA
ccaccgccaccacacctgcag

SEQ ID NO: 50550 - RNA, 21 nt, synthetic construct
  source 1..21: mol_type = other RNA
accgccaccacacctgcagcc

SEQ ID NO: 50551 - RNA, 21 nt, synthetic construct
  source 1..21: mol_type = other RNA
ccgccaccacacctgcagcca

SEQ ID NO: 50552 - RNA, 21 nt, synthetic construct
  source 1..21: mol_type = other RNA
acacctgcagccaccagcaac

SEQ ID NO: 50553 - RNA, 21 nt, synthetic construct
  source 1..21: mol_type = other RNA
acctgcagccaccagcaacac

SEQ ID NO: 50554 - RNA, 21 nt, synthetic construct
  source 1..21: mol_type = other RNA
ctgcagccaccagcaacacag

SEQ ID NO: 50555 - RNA, 21 nt, synthetic construct
  source 1..21: mol_type = other RNA
cagccaccagcaacacagtga

SEQ ID NO: 50556 - RNA, 21 nt, synthetic construct
  source 1..21: mol_type = other RNA
gccaccagcaacacagtgact

SEQ ID NO: 50557 - RNA, 21 nt, synthetic construct
  source 1..21: mol_type = other RNA
gtgactccctcctctgcccta

SEQ ID NO: 50558 - RNA, 21 nt, synthetic construct
  source 1..21: mol_type = other RNA
acccacacacccccagtgccg

SEQ ID NO: 50559 - RNA, 21 nt, synthetic construct
  source 1..21: mol_type = other RNA
ccacacacccccagtgccgaa

SEQ ID NO: 50560 - RNA, 21 nt, synthetic construct
  source 1..21: mol_type = other RNA
gaacaccatggccaccacaca

SEQ ID NO: 50561 - RNA, 21 nt, synthetic construct
  source 1..21: mol_type = other RNA
gatccctgccccccagcagtc

SEQ ID NO: 50562 - RNA, 21 nt, synthetic construct
  source 1..21: mol_type = other RNA
tccctgccccccagcagtccc

SEQ ID NO: 50563 - RNA, 21 nt, synthetic construct
  source 1..21: mol_type = other RNA
ccctgccccccagcagtcccc

SEQ ID NO: 50564 - RNA, 21 nt, synthetic construct
  source 1..21: mol_type = other RNA
tgccccccagcagtccccaca

SEQ ID NO: 50565 - RNA, 21 nt, synthetic construct
  source 1..21: mol_type = other RNA
actccagccctttccagccct

SEQ ID NO: 50566 - RNA, 21 nt, synthetic construct
  source 1..21: mol_type = other RNA
ctccagccctttccagccctc

SEQ ID NO: 50567 - RNA, 21 nt, synthetic construct
  source 1..21: mol_type = other RNA
agtcacccccttctccaggga

SEQ ID NO: 50568 - RNA, 21 nt, synthetic construct
  source 1..21: mol_type = other RNA
gtcacccccttctccagggac

SEQ ID NO: 50569 - RNA, 21 nt, synthetic construct
  source 1..21: mol_type = other RNA
tcacccccttctccagggacg

SEQ ID NO: 50570 - RNA, 21 nt, synthetic construct
  source 1..21: mol_type = other RNA
cacccccttctccagggacga

SEQ ID NO: 50571 - RNA, 21 nt, synthetic construct
  source 1..21: mol_type = other RNA
cccccttctccagggacgacc

SEQ ID NO: 50572 - RNA, 21 nt, synthetic construct
  source 1..21: mol_type = other RNA
ccttctccagggacgaccacc

SEQ ID NO: 50573 - RNA, 21 nt, synthetic construct
  source 1..21: mol_type = other RNA
cgaccaccccgggccacacca

SEQ ID NO: 50574 - RNA, 21 nt, synthetic construct
  source 1..21: mol_type = other RNA
cgggccacaccacggccacct

SEQ ID NO: 50575 - RNA, 21 nt, synthetic construct
  source 1..21: mol_type = other RNA
cacaccacggccacctccagg

SEQ ID NO: 50576 - RNA, 21 nt, synthetic construct
  source 1..21: mol_type = other RNA
ccacctccaggaccacagcca

SEQ ID NO: 50577 - RNA, 21 nt, synthetic construct
  source 1..21: mol_type = other RNA
cctccaggaccacagccacgg

SEQ ID NO: 50578 - RNA, 21 nt, synthetic construct
  source 1..21: mol_type = other RNA
aggaccacagccacggccaca

SEQ ID NO: 50579 - RNA, 21 nt, synthetic construct
  source 1..21: mol_type = other RNA
gaccacagccacggccacacc

SEQ ID NO: 50580 - RNA, 21 nt, synthetic construct
  source 1..21: mol_type = other RNA
accacagccacggccacaccc

SEQ ID NO: 50581 - RNA, 21 nt, synthetic construct
  source 1..21: mol_type = other RNA
cacagccacggccacacccag

SEQ ID NO: 50582 - RNA, 21 nt, synthetic construct
  source 1..21: mol_type = other RNA
acagccacggccacacccagc

SEQ ID NO: 50583 - RNA, 21 nt, synthetic construct
  source 1..21: mol_type = other RNA
cagccacggccacacccagca

SEQ ID NO: 50584 - RNA, 21 nt, synthetic construct
  source 1..21: mol_type = other RNA
agccacggccacacccagcaa

SEQ ID NO: 50585 - RNA, 21 nt, synthetic construct
  source 1..21: mol_type = other RNA
gccacggccacacccagcaag

SEQ ID NO: 50586 - RNA, 21 nt, synthetic construct
  source 1..21: mol_type = other RNA
atgggctgtgagccccagtgt

SEQ ID NO: 50587 - RNA, 21 nt, synthetic construct
  source 1..21: mol_type = other RNA
tggtcagagtggctggactac

SEQ ID NO: 50588 - RNA, 21 nt, synthetic construct
  source 1..21: mol_type = other RNA
gtgcggccggaggggccgtct

SEQ ID NO: 50589 - RNA, 21 nt, synthetic construct
  source 1..21: mol_type = other RNA
ccgtgcccaggcccagcctgg

SEQ ID NO: 50590 - RNA, 21 nt, synthetic construct
  source 1..21: mol_type = other RNA
atgcagcctggactttggcct

SEQ ID NO: 50591 - RNA, 21 nt, synthetic construct
  source 1..21: mol_type = other RNA
tgcagcctggactttggcctg

SEQ ID NO: 50592 - RNA, 21 nt, synthetic construct
  source 1..21: mol_type = other RNA
agcctggactttggcctggtc

SEQ ID NO: 50593 - RNA, 21 nt, synthetic construct
  source 1..21: mol_type = other RNA
ggcctggtctgcaggaaccgt

SEQ ID NO: 50594 - RNA, 21 nt, synthetic construct
  source 1..21: mol_type = other RNA
tacggccatgccctcctccac

SEQ ID NO: 50595 - RNA, 21 nt, synthetic construct
  source 1..21: mol_type = other RNA
ggccatgccctcctccactcc

SEQ ID NO: 50596 - RNA, 21 nt, synthetic construct
  source 1..21: mol_type = other RNA
cgactgagtccactggatcca

SEQ ID NO: 50597 - RNA, 21 nt, synthetic construct
  source 1..21: mol_type = other RNA
ccccgtcctccaccccaggga

SEQ ID NO: 50598 - RNA, 21 nt, synthetic construct
  source 1..21: mol_type = other RNA
cccgtcctccaccccagggac

SEQ ID NO: 50599 - RNA, 21 nt, synthetic construct
  source 1..21: mol_type = other RNA
cgtcctccaccccagggacca

SEQ ID NO: 50600 - RNA, 21 nt, synthetic construct
  source 1..21: mol_type = other RNA
gtcctccaccccagggaccac

SEQ ID NO: 50601 - RNA, 21 nt, synthetic construct
  source 1..21: mol_type = other RNA
cctccaccccagggaccacct

SEQ ID NO: 50602 - RNA, 21 nt, synthetic construct
  source 1..21: mol_type = other RNA
ctccaccccagggaccacctg

SEQ ID NO: 50603 - RNA, 21 nt, synthetic construct
  source 1..21: mol_type = other RNA
tccaccccagggaccacctgg

SEQ ID NO: 50604 - RNA, 21 nt, synthetic construct
  source 1..21: mol_type = other RNA
ccaccccagggaccacctgga

SEQ ID NO: 50605 - RNA, 21 nt, synthetic construct
  source 1..21: mol_type = other RNA
ccaccgcctcctccacccagg

SEQ ID NO: 50606 - RNA, 21 nt, synthetic construct
  source 1..21: mol_type = other RNA
tcctccacccaggcaactgct

SEQ ID NO: 50607 - RNA, 21 nt, synthetic construct
  source 1..21: mol_type = other RNA
acacccacagtcaccagctcc

SEQ ID NO: 50608 - RNA, 21 nt, synthetic construct
  source 1..21: mol_type = other RNA
acccacagtcaccagctccaa

SEQ ID NO: 50609 - RNA, 21 nt, synthetic construct
  source 1..21: mol_type = other RNA
cccacagtcaccagctccaaa

SEQ ID NO: 50610 - RNA, 21 nt, synthetic construct
  source 1..21: mol_type = other RNA
tcaccagctccaaagccactc

SEQ ID NO: 50611 - RNA, 21 nt, synthetic construct
  source 1..21: mol_type = other RNA
gctccaaagccactcccttct

SEQ ID NO: 50612 - RNA, 21 nt, synthetic construct
  source 1..21: mol_type = other RNA
tccaaagccactcccttctcc

SEQ ID NO: 50613 - RNA, 21 nt, synthetic construct
  source 1..21: mol_type = other RNA
tacagccatcccctcctcctc

SEQ ID NO: 50614 - RNA, 21 nt, synthetic construct
  source 1..21: mol_type = other RNA
acagccatcccctcctcctcc

SEQ ID NO: 50615 - RNA, 21 nt, synthetic construct
  source 1..21: mol_type = other RNA
cctcctcctccctgggcacca

SEQ ID NO: 50616 - RNA, 21 nt, synthetic construct
  source 1..21: mol_type = other RNA
tcctccctgggcaccacctgg

SEQ ID NO: 50617 - RNA, 21 nt, synthetic construct
  source 1..21: mol_type = other RNA
tccctgggcaccacctggacc

SEQ ID NO: 50618 - RNA, 21 nt, synthetic construct
  source 1..21: mol_type = other RNA
cctgggcaccacctggacccg

SEQ ID NO: 50619 - RNA, 21 nt, synthetic construct
  source 1..21: mol_type = other RNA
ctgggcaccacctggacccgc

SEQ ID NO: 50620 - RNA, 21 nt, synthetic construct
  source 1..21: mol_type = other RNA
tgggcaccacctggacccgcc

SEQ ID NO: 50621 - RNA, 21 nt, synthetic construct
  source 1..21: mol_type = other RNA
gggcaccacctggacccgcct

SEQ ID NO: 50622 - RNA, 21 nt, synthetic construct
  source 1..21: mol_type = other RNA
tatcacagaccaccacaccca

SEQ ID NO: 50623 - RNA, 21 nt, synthetic construct
  source 1..21: mol_type = other RNA
cggccaccatgtccacagcca

SEQ ID NO: 50624 - RNA, 21 nt, synthetic construct
  source 1..21: mol_type = other RNA
ccaccatgtccacagccacac

SEQ ID NO: 50625 - RNA, 21 nt, synthetic construct
  source 1..21: mol_type = other RNA
ccatgtccacagccacaccct

SEQ ID NO: 50626 - RNA, 21 nt, synthetic construct
  source 1..21: mol_type = other RNA
cacaccctcctccactccaga

SEQ ID NO: 50627 - RNA, 21 nt, synthetic construct
  source 1..21: mol_type = other RNA
gctctgtggccaccccctcct

SEQ ID NO: 50628 - RNA, 21 nt, synthetic construct
  source 1..21: mol_type = other RNA
ctctgtggccaccccctcctc

SEQ ID NO: 50629 - RNA, 21 nt, synthetic construct
  source 1..21: mol_type = other RNA
tctgtggccaccccctcctcc

SEQ ID NO: 50630 - RNA, 21 nt, synthetic construct
  source 1..21: mol_type = other RNA
ctgtggccaccccctcctcca

SEQ ID NO: 50631 - RNA, 21 nt, synthetic construct
  source 1..21: mol_type = other RNA
tgtggccaccccctcctccac

SEQ ID NO: 50632 - RNA, 21 nt, synthetic construct
  source 1..21: mol_type = other RNA
accccctcctccaccccagga

SEQ ID NO: 50633 - RNA, 21 nt, synthetic construct
  source 1..21: mol_type = other RNA
ccctcctccaccccaggaaca

SEQ ID NO: 50634 - RNA, 21 nt, synthetic construct
  source 1..21: mol_type = other RNA
ccacgggcttcacagccaccc

SEQ ID NO: 50635 - RNA, 21 nt, synthetic construct
  source 1..21: mol_type = other RNA
gcttcacagccaccccctcct

SEQ ID NO: 50636 - RNA, 21 nt, synthetic construct
  source 1..21: mol_type = other RNA
tcacagccaccccctcctcca

SEQ ID NO: 50637 - RNA, 21 nt, synthetic construct
  source 1..21: mol_type = other RNA
ctcctccagcccagggacggc

SEQ ID NO: 50638 - RNA, 21 nt, synthetic construct
  source 1..21: mol_type = other RNA
tcctccagcccagggacggca

SEQ ID NO: 50639 - RNA, 21 nt, synthetic construct
  source 1..21: mol_type = other RNA
acccacaaccagaggttccac

SEQ ID NO: 50640 - RNA, 21 nt, synthetic construct
  source 1..21: mol_type = other RNA
cccacaaccagaggttccacg

SEQ ID NO: 50641 - RNA, 21 nt, synthetic construct
  source 1..21: mol_type = other RNA
acggtgaccccctcctccatc

SEQ ID NO: 50642 - RNA, 21 nt, synthetic construct
  source 1..21: mol_type = other RNA
gtgaccccctcctccatcccg

SEQ ID NO: 50643 - RNA, 21 nt, synthetic construct
  source 1..21: mol_type = other RNA
gaccccctcctccatcccggg

SEQ ID NO: 50644 - RNA, 21 nt, synthetic construct
  source 1..21: mol_type = other RNA
ccccctcctccatcccgggga

SEQ ID NO: 50645 - RNA, 21 nt, synthetic construct
  source 1..21: mol_type = other RNA
ccctcctccatcccggggacc

SEQ ID NO: 50646 - RNA, 21 nt, synthetic construct
  source 1..21: mol_type = other RNA
cccccacagtgctgaccacca

SEQ ID NO: 50647 - RNA, 21 nt, synthetic construct
  source 1..21: mol_type = other RNA
ccccacagtgctgaccaccac

SEQ ID NO: 50648 - RNA, 21 nt, synthetic construct
  source 1..21: mol_type = other RNA
cccacagtgctgaccaccacc

SEQ ID NO: 50649 - RNA, 21 nt, synthetic construct
  source 1..21: mol_type = other RNA
tgctgaccaccaccaccacaa

SEQ ID NO: 50650 - RNA, 21 nt, synthetic construct
  source 1..21: mol_type = other RNA
gctgaccaccaccaccacaac

SEQ ID NO: 50651 - RNA, 21 nt, synthetic construct
  source 1..21: mol_type = other RNA
accaccaccaccacaactgtg

SEQ ID NO: 50652 - RNA, 21 nt, synthetic construct
  source 1..21: mol_type = other RNA
ccaccacaactgtggccactg

SEQ ID NO: 50653 - RNA, 21 nt, synthetic construct
  source 1..21: mol_type = other RNA
gtggccactggttctatggca

SEQ ID NO: 50654 - RNA, 21 nt, synthetic construct
  source 1..21: mol_type = other RNA
cactgaccaccacggccacta

SEQ ID NO: 50655 - RNA, 21 nt, synthetic construct
  source 1..21: mol_type = other RNA
acggccaccggctccaccacc

SEQ ID NO: 50656 - RNA, 21 nt, synthetic construct
  source 1..21: mol_type = other RNA
ccaccggctccaccaccaacc

SEQ ID NO: 50657 - RNA, 21 nt, synthetic construct
  source 1..21: mol_type = other RNA
ccaccaccaacccctcctcaa

SEQ ID NO: 50658 - RNA, 21 nt, synthetic construct
  source 1..21: mol_type = other RNA
accaccaacccctcctcaact

SEQ ID NO: 50659 - RNA, 21 nt, synthetic construct
  source 1..21: mol_type = other RNA
accaacccctcctcaactcca

SEQ ID NO: 50660 - RNA, 21 nt, synthetic construct
  source 1..21: mol_type = other RNA
ccaacccctcctcaactccag

SEQ ID NO: 50661 - RNA, 21 nt, synthetic construct
  source 1..21: mol_type = other RNA
acccctcctcaactccaggga

SEQ ID NO: 50662 - RNA, 21 nt, synthetic construct
  source 1..21: mol_type = other RNA
ccctcctcaactccagggaca

SEQ ID NO: 50663 - RNA, 21 nt, synthetic construct
  source 1..21: mol_type = other RNA
ctcctcaactccagggacaac

SEQ ID NO: 50664 - RNA, 21 nt, synthetic construct
  source 1..21: mol_type = other RNA
ccccccagtgctgaccaccac

SEQ ID NO: 50665 - RNA, 21 nt, synthetic construct
  source 1..21: mol_type = other RNA
ccccagtgctgaccaccaccg

SEQ ID NO: 50666 - RNA, 21 nt, synthetic construct
  source 1..21: mol_type = other RNA
gctgaccaccaccgccaccac

SEQ ID NO: 50667 - RNA, 21 nt, synthetic construct
  source 1..21: mol_type = other RNA
accaccaccgccaccacacct

SEQ ID NO: 50668 - RNA, 21 nt, synthetic construct
  source 1..21: mol_type = other RNA
ccaccgccaccacacctgcag

SEQ ID NO: 50669 - RNA, 21 nt, synthetic construct
  source 1..21: mol_type = other RNA
accgccaccacacctgcagcc

SEQ ID NO: 50670 - RNA, 21 nt, synthetic construct
  source 1..21: mol_type = other RNA
ccgccaccacacctgcagcca

SEQ ID NO: 50671 - RNA, 21 nt, synthetic construct
  source 1..21: mol_type = other RNA
acacctgcagccaccagcagc

SEQ ID NO: 50672 - RNA, 21 nt, synthetic construct
  source 1..21: mol_type = other RNA
tgcagccaccagcagcacagt

SEQ ID NO: 50673 - RNA, 21 nt, synthetic construct
  source 1..21: mol_type = other RNA
agccaccagcagcacagtgac

SEQ ID NO: 50674 - RNA, 21 nt, synthetic construct
  source 1..21: mol_type = other RNA
cagcacagtgactccctcctc

SEQ ID NO: 50675 - RNA, 21 nt, synthetic construct
  source 1..21: mol_type = other RNA
agcacagtgactccctcctct

SEQ ID NO: 50676 - RNA, 21 nt, synthetic construct
  source 1..21: mol_type = other RNA
gtgactccctcctctgcccta

SEQ ID NO: 50677 - RNA, 21 nt, synthetic construct
  source 1..21: mol_type = other RNA
acccacacacccccagtgccg

SEQ ID NO: 50678 - RNA, 21 nt, synthetic construct
  source 1..21: mol_type = other RNA
ccacacacccccagtgccgaa

SEQ ID NO: 50679 - RNA, 21 nt, synthetic construct
  source 1..21: mol_type = other RNA
gaacaccacggccaccacaca

SEQ ID NO: 50680 - RNA, 21 nt, synthetic construct
  source 1..21: mol_type = other RNA
tgtcccccagcagtccccaca

SEQ ID NO: 50681 - RNA, 21 nt, synthetic construct
  source 1..21: mol_type = other RNA
ttcggccacctcaggcacctt

SEQ ID NO: 50682 - RNA, 21 nt, synthetic construct
  source 1..21: mol_type = other RNA
ggccacctcaggcaccttggg

SEQ ID NO: 50683 - RNA, 21 nt, synthetic construct
  source 1..21: mol_type = other RNA
cctcaggcaccttgggcacca

SEQ ID NO: 50684 - RNA, 21 nt, synthetic construct
  source 1..21: mol_type = other RNA
ggcaccttgggcaccacccac

SEQ ID NO: 50685 - RNA, 21 nt, synthetic construct
  source 1..21: mol_type = other RNA
gggacttcccacaccccagca

SEQ ID NO: 50686 - RNA, 21 nt, synthetic construct
  source 1..21: mol_type = other RNA
ttcccacaccccagcagcaac

SEQ ID NO: 50687 - RNA, 21 nt, synthetic construct
  source 1..21: mol_type = other RNA
ctgtccagccctcaccctagc

SEQ ID NO: 50688 - RNA, 21 nt, synthetic construct
  source 1..21: mol_type = other RNA
agtcacccccttctccaggga

SEQ ID NO: 50689 - RNA, 21 nt, synthetic construct
  source 1..21: mol_type = other RNA
gtcacccccttctccagggac

SEQ ID NO: 50690 - RNA, 21 nt, synthetic construct
  source 1..21: mol_type = other RNA
tcacccccttctccagggacg

SEQ ID NO: 50691 - RNA, 21 nt, synthetic construct
  source 1..21: mol_type = other RNA
cacccccttctccagggacga

SEQ ID NO: 50692 - RNA, 21 nt, synthetic construct
  source 1..21: mol_type = other RNA
cccccttctccagggacgacc

SEQ ID NO: 50693 - RNA, 21 nt, synthetic construct
  source 1..21: mol_type = other RNA
ccttctccagggacgaccacc

SEQ ID NO: 50694 - RNA, 21 nt, synthetic construct
  source 1..21: mol_type = other RNA
cgaccaccccgggccacacca

SEQ ID NO: 50695 - RNA, 21 nt, synthetic construct
  source 1..21: mol_type = other RNA
ggccacaccagggccacctcc

SEQ ID NO: 50696 - RNA, 21 nt, synthetic construct
  source 1..21: mol_type = other RNA
gccacaccagggccacctcca

SEQ ID NO: 50697 - RNA, 21 nt, synthetic construct
  source 1..21: mol_type = other RNA
ccacaccagggccacctccag

SEQ ID NO: 50698 - RNA, 21 nt, synthetic construct
  source 1..21: mol_type = other RNA
acaccagggccacctccagga

SEQ ID NO: 50699 - RNA, 21 nt, synthetic construct
  source 1..21: mol_type = other RNA
caccagggccacctccaggac

SEQ ID NO: 50700 - RNA, 21 nt, synthetic construct
  source 1..21: mol_type = other RNA
accagggccacctccaggacc

SEQ ID NO: 50701 - RNA, 21 nt, synthetic construct
  source 1..21: mol_type = other RNA
ccagggccacctccaggacca

SEQ ID NO: 50702 - RNA, 21 nt, synthetic construct
  source 1..21: mol_type = other RNA
gggccacctccaggaccacgg

SEQ ID NO: 50703 - RNA, 21 nt, synthetic construct
  source 1..21: mol_type = other RNA
ccacggccacggccacaccca

SEQ ID NO: 50704 - RNA, 21 nt, synthetic construct
  source 1..21: mol_type = other RNA
cacggccacggccacacccag

SEQ ID NO: 50705 - RNA, 21 nt, synthetic construct
  source 1..21: mol_type = other RNA
acggccacggccacacccagc

SEQ ID NO: 50706 - RNA, 21 nt, synthetic construct
  source 1..21: mol_type = other RNA
ggccacggccacacccagcaa

SEQ ID NO: 50707 - RNA, 21 nt, synthetic construct
  source 1..21: mol_type = other RNA
gccacggccacacccagcaag

SEQ ID NO: 50708 - RNA, 21 nt, synthetic construct
  source 1..21: mol_type = other RNA
atgggctgtgagccccagtgt

SEQ ID NO: 50709 - RNA, 21 nt, synthetic construct
  source 1..21: mol_type = other RNA
tggtcagagtggctggactac

SEQ ID NO: 50710 - RNA, 21 nt, synthetic construct
  source 1..21: mol_type = other RNA
gtgcggccggaggggccgtct

SEQ ID NO: 50711 - RNA, 21 nt, synthetic construct
  source 1..21: mol_type = other RNA
ccgtgcccaggcccagcctgg

SEQ ID NO: 50712 - RNA, 21 nt, synthetic construct
  source 1..21: mol_type = other RNA
atgcagcctggactttggcct

SEQ ID NO: 50713 - RNA, 21 nt, synthetic construct
  source 1..21: mol_type = other RNA
tgcagcctggactttggcctg

SEQ ID NO: 50714 - RNA, 21 nt, synthetic construct
  source 1..21: mol_type = other RNA
agcctggactttggcctggtc

SEQ ID NO: 50715 - RNA, 21 nt, synthetic construct
  source 1..21: mol_type = other RNA
ggcctggtctgcaggaaccgt

SEQ ID NO: 50716 - RNA, 21 nt, synthetic construct
  source 1..21: mol_type = other RNA
gccaccagctctacggccacg

SEQ ID NO: 50717 - RNA, 21 nt, synthetic construct
  source 1..21: mol_type = other RNA
actccagggacgacctggatc

SEQ ID NO: 50718 - RNA, 21 nt, synthetic construct
  source 1..21: mol_type = other RNA
agagcagaccacagcagccac

SEQ ID NO: 50719 - RNA, 21 nt, synthetic construct
  source 1..21: mol_type = other RNA
agcagaccacagcagccacta

SEQ ID NO: 50720 - RNA, 21 nt, synthetic construct
  source 1..21: mol_type = other RNA
gggaacagctccccctcccaa

SEQ ID NO: 50721 - RNA, 21 nt, synthetic construct
  source 1..21: mol_type = other RNA
ctgaccagcacggccaccaca

SEQ ID NO: 50722 - RNA, 21 nt, synthetic construct
  source 1..21: mol_type = other RNA
ccagcacggccaccacaccca

SEQ ID NO: 50723 - RNA, 21 nt, synthetic construct
  source 1..21: mol_type = other RNA
agcacggccaccacacccaca

SEQ ID NO: 50724 - RNA, 21 nt, synthetic construct
  source 1..21: mol_type = other RNA
ttccaaagccacttcctcctc

SEQ ID NO: 50725 - RNA, 21 nt, synthetic construct
  source 1..21: mol_type = other RNA
aaagccacttcctcctccagt

SEQ ID NO: 50726 - RNA, 21 nt, synthetic construct
  source 1..21: mol_type = other RNA
agccacttcctcctccagtcc

SEQ ID NO: 50727 - RNA, 21 nt, synthetic construct
  source 1..21: mol_type = other RNA
gccacttcctcctccagtcca

SEQ ID NO: 50728 - RNA, 21 nt, synthetic construct
  source 1..21: mol_type = other RNA
ccacttcctcctccagtccaa

SEQ ID NO: 50729 - RNA, 21 nt, synthetic construct
  source 1..21: mol_type = other RNA
acttcctcctccagtccaagg

SEQ ID NO: 50730 - RNA, 21 nt, synthetic construct
  source 1..21: mol_type = other RNA
ttcctcctccagtccaaggac

SEQ ID NO: 50731 - RNA, 21 nt, synthetic construct
  source 1..21: mol_type = other RNA
acccatcccctccttcaccct

SEQ ID NO: 50732 - RNA, 21 nt, synthetic construct
  source 1..21: mol_type = other RNA
ccctccttcacccttgggacc

SEQ ID NO: 50733 - RNA, 21 nt, synthetic construct
  source 1..21: mol_type = other RNA
ctccttcacccttgggaccac

SEQ ID NO: 50734 - RNA, 21 nt, synthetic construct
  source 1..21: mol_type = other RNA
accgggaccctcccagaacag

SEQ ID NO: 50735 - RNA, 21 nt, synthetic construct
  source 1..21: mol_type = other RNA
acagaccaccacacccatggc

SEQ ID NO: 50736 - RNA, 21 nt, synthetic construct
  source 1..21: mol_type = other RNA
acccatggccaccatgtccac

SEQ ID NO: 50737 - RNA, 21 nt, synthetic construct
  source 1..21: mol_type = other RNA
acccctcctccactccggaga

SEQ ID NO: 50738 - RNA, 21 nt, synthetic construct
  source 1..21: mol_type = other RNA
accacccacacctccacagtg

SEQ ID NO: 50739 - RNA, 21 nt, synthetic construct
  source 1..21: mol_type = other RNA
ctgaccacgaaggccaccacg

SEQ ID NO: 50740 - RNA, 21 nt, synthetic construct
  source 1..21: mol_type = other RNA
agggccaccagttccatgtcc

SEQ ID NO: 50741 - RNA, 21 nt, synthetic construct
  source 1..21: mol_type = other RNA
tccatgtccaccccctcctcc

SEQ ID NO: 50742 - RNA, 21 nt, synthetic construct
  source 1..21: mol_type = other RNA
ccatgtccaccccctcctcca

SEQ ID NO: 50743 - RNA, 21 nt, synthetic construct
  source 1..21: mol_type = other RNA
catgtccaccccctcctccac

SEQ ID NO: 50744 - RNA, 21 nt, synthetic construct
  source 1..21: mol_type = other RNA
ccaccccctcctccactccgg

SEQ ID NO: 50745 - RNA, 21 nt, synthetic construct
  source 1..21: mol_type = other RNA
gcagccactacaactgcagcc

SEQ ID NO: 50746 - RNA, 21 nt, synthetic construct
  source 1..21: mol_type = other RNA
cagccactacaactgcagcca

SEQ ID NO: 50747 - RNA, 21 nt, synthetic construct
  source 1..21: mol_type = other RNA
tacaactgcagccactggccc

SEQ ID NO: 50748 - RNA, 21 nt, synthetic construct
  source 1..21: mol_type = other RNA
acaactgcagccactggcccc

SEQ ID NO: 50749 - RNA, 21 nt, synthetic construct
  source 1..21: mol_type = other RNA
tgcagccactggccccacggc

SEQ ID NO: 50750 - RNA, 21 nt, synthetic construct
  source 1..21: mol_type = other RNA
gccactggccccacggccacc

SEQ ID NO: 50751 - RNA, 21 nt, synthetic construct
  source 1..21: mol_type = other RNA
tggccccacggccaccccgtc

SEQ ID NO: 50752 - RNA, 21 nt, synthetic construct
  source 1..21: mol_type = other RNA
ccccgtcctccaccccaggga

SEQ ID NO: 50753 - RNA, 21 nt, synthetic construct
  source 1..21: mol_type = other RNA
cccgtcctccaccccagggac

SEQ ID NO: 50754 - RNA, 21 nt, synthetic construct
  source 1..21: mol_type = other RNA
cgtcctccaccccagggacca

SEQ ID NO: 50755 - RNA, 21 nt, synthetic construct
  source 1..21: mol_type = other RNA
gtcctccaccccagggaccac

SEQ ID NO: 50756 - RNA, 21 nt, synthetic construct
  source 1..21: mol_type = other RNA
cctccaccccagggaccacct

SEQ ID NO: 50757 - RNA, 21 nt, synthetic construct
  source 1..21: mol_type = other RNA
ctccaccccagggaccacctg

SEQ ID NO: 50758 - RNA, 21 nt, synthetic construct
  source 1..21: mol_type = other RNA
tccaccccagggaccacctgg

SEQ ID NO: 50759 - RNA, 21 nt, synthetic construct
  source 1..21: mol_type = other RNA
ccaccccagggaccacctgga

SEQ ID NO: 50760 - RNA, 21 nt, synthetic construct
  source 1..21: mol_type = other RNA
agcccagcactacagccaccg

SEQ ID NO: 50761 - RNA, 21 nt, synthetic construct
  source 1..21: mol_type = other RNA
ccaccgcctcctccacccggg

SEQ ID NO: 50762 - RNA, 21 nt, synthetic construct
  source 1..21: mol_type = other RNA
accgcctcctccacccgggca

SEQ ID NO: 50763 - RNA, 21 nt, synthetic construct
  source 1..21: mol_type = other RNA
ccgcctcctccacccgggcaa

SEQ ID NO: 50764 - RNA, 21 nt, synthetic construct
  source 1..21: mol_type = other RNA
ctgaccagcacggccaccaca

SEQ ID NO: 50765 - RNA, 21 nt, synthetic construct
  source 1..21: mol_type = other RNA
ccagcacggccaccacaccca

SEQ ID NO: 50766 - RNA, 21 nt, synthetic construct
  source 1..21: mol_type = other RNA
agcacggccaccacacccaca

SEQ ID NO: 50767 - RNA, 21 nt, synthetic construct
  source 1..21: mol_type = other RNA
acggccaccacacccacagtc

SEQ ID NO: 50768 - RNA, 21 nt, synthetic construct
  source 1..21: mol_type = other RNA
ggccaccacacccacagtcat

SEQ ID NO: 50769 - RNA, 21 nt, synthetic construct
  source 1..21: mol_type = other RNA
acacccacagtcatcagctcc

SEQ ID NO: 50770 - RNA, 21 nt, synthetic construct
  source 1..21: mol_type = other RNA
acccacagtcatcagctccag

SEQ ID NO: 50771 - RNA, 21 nt, synthetic construct
  source 1..21: mol_type = other RNA
cccacagtcatcagctccaga

SEQ ID NO: 50772 - RNA, 21 nt, synthetic construct
  source 1..21: mol_type = other RNA
acagtcatcagctccagagcc

SEQ ID NO: 50773 - RNA, 21 nt, synthetic construct
  source 1..21: mol_type = other RNA
cagctccagagccactccctc

SEQ ID NO: 50774 - RNA, 21 nt, synthetic construct
  source 1..21: mol_type = other RNA
ccagagccactccctcctcca

SEQ ID NO: 50775 - RNA, 21 nt, synthetic construct
  source 1..21: mol_type = other RNA
cagagccactccctcctccag

SEQ ID NO: 50776 - RNA, 21 nt, synthetic construct
  source 1..21: mol_type = other RNA
agccactccctcctccagtcc

SEQ ID NO: 50777 - RNA, 21 nt, synthetic construct
  source 1..21: mol_type = other RNA
actccctcctccagtccaggg

SEQ ID NO: 50778 - RNA, 21 nt, synthetic construct
  source 1..21: mol_type = other RNA
gttacagccatcccctcttcc

SEQ ID NO: 50779 - RNA, 21 nt, synthetic construct
  source 1..21: mol_type = other RNA
tcccctcttcctccctgggca

SEQ ID NO: 50780 - RNA, 21 nt, synthetic construct
  source 1..21: mol_type = other RNA
ccctcttcctccctgggcacc

SEQ ID NO: 50781 - RNA, 21 nt, synthetic construct
  source 1..21: mol_type = other RNA
cctcttcctccctgggcaccg

SEQ ID NO: 50782 - RNA, 21 nt, synthetic construct
  source 1..21: mol_type = other RNA
ctcttcctccctgggcaccgc

SEQ ID NO: 50783 - RNA, 21 nt, synthetic construct
  source 1..21: mol_type = other RNA
tcttcctccctgggcaccgcc

SEQ ID NO: 50784 - RNA, 21 nt, synthetic construct
  source 1..21: mol_type = other RNA
cttcctccctgggcaccgcct

SEQ ID NO: 50785 - RNA, 21 nt, synthetic construct
  source 1..21: mol_type = other RNA
cctccctgggcaccgcctgga

SEQ ID NO: 50786 - RNA, 21 nt, synthetic construct
  source 1..21: mol_type = other RNA
tatcacagaccaccacaccca

SEQ ID NO: 50787 - RNA, 21 nt, synthetic construct
  source 1..21: mol_type = other RNA
cggccaccatgtccacagcca

SEQ ID NO: 50788 - RNA, 21 nt, synthetic construct
  source 1..21: mol_type = other RNA
ccaccatgtccacagccacac

SEQ ID NO: 50789 - RNA, 21 nt, synthetic construct
  source 1..21: mol_type = other RNA
ccatgtccacagccacaccct

SEQ ID NO: 50790 - RNA, 21 nt, synthetic construct
  source 1..21: mol_type = other RNA
ccacagccacaccctcctcta

SEQ ID NO: 50791 - RNA, 21 nt, synthetic construct
  source 1..21: mol_type = other RNA
cagccacaccctcctctactc

SEQ ID NO: 50792 - RNA, 21 nt, synthetic construct
  source 1..21: mol_type = other RNA
ccacaccctcctctactccag

SEQ ID NO: 50793 - RNA, 21 nt, synthetic construct
  source 1..21: mol_type = other RNA
taccaccacgaccaccacaac

SEQ ID NO: 50794 - RNA, 21 nt, synthetic construct
  source 1..21: mol_type = other RNA
accaccacgaccaccacaacc

SEQ ID NO: 50795 - RNA, 21 nt, synthetic construct
  source 1..21: mol_type = other RNA
ccaccacgaccaccacaacca

SEQ ID NO: 50796 - RNA, 21 nt, synthetic construct
  source 1..21: mol_type = other RNA
caccacgaccaccacaaccag

SEQ ID NO: 50797 - RNA, 21 nt, synthetic construct
  source 1..21: mol_type = other RNA
accacgaccaccacaaccagg

SEQ ID NO: 50798 - RNA, 21 nt, synthetic construct
  source 1..21: mol_type = other RNA
accaccacaaccagggccacc

SEQ ID NO: 50799 - RNA, 21 nt, synthetic construct
  source 1..21: mol_type = other RNA
caaccagggccaccggctctg

SEQ ID NO: 50800 - RNA, 21 nt, synthetic construct
  source 1..21: mol_type = other RNA
aaccagggccaccggctctgt

SEQ ID NO: 50801 - RNA, 21 nt, synthetic construct
  source 1..21: mol_type = other RNA
gctctgtggccaccccctcct

SEQ ID NO: 50802 - RNA, 21 nt, synthetic construct
  source 1..21: mol_type = other RNA
ctctgtggccaccccctcctc

SEQ ID NO: 50803 - RNA, 21 nt, synthetic construct
  source 1..21: mol_type = other RNA
tctgtggccaccccctcctcc

SEQ ID NO: 50804 - RNA, 21 nt, synthetic construct
  source 1..21: mol_type = other RNA
ctgtggccaccccctcctcca

SEQ ID NO: 50805 - RNA, 21 nt, synthetic construct
  source 1..21: mol_type = other RNA
tgtggccaccccctcctccac

SEQ ID NO: 50806 - RNA, 21 nt, synthetic construct
  source 1..21: mol_type = other RNA
accccctcctccaccccagga

SEQ ID NO: 50807 - RNA, 21 nt, synthetic construct
  source 1..21: mol_type = other RNA
ccctcctccaccccaggaaca

SEQ ID NO: 50808 - RNA, 21 nt, synthetic construct
  source 1..21: mol_type = other RNA
aagtgccgactaccacaacca

SEQ ID NO: 50809 - RNA, 21 nt, synthetic construct
  source 1..21: mol_type = other RNA
ccacgggcttcacagccaccc

SEQ ID NO: 50810 - RNA, 21 nt, synthetic construct
  source 1..21: mol_type = other RNA
gcttcacagccaccccctcct

SEQ ID NO: 50811 - RNA, 21 nt, synthetic construct
  source 1..21: mol_type = other RNA
tcacagccaccccctcctcca

SEQ ID NO: 50812 - RNA, 21 nt, synthetic construct
  source 1..21: mol_type = other RNA
ctcctccagcccagggacggc

SEQ ID NO: 50813 - RNA, 21 nt, synthetic construct
  source 1..21: mol_type = other RNA
tcctccagcccagggacggca

SEQ ID NO: 50814 - RNA, 21 nt, synthetic construct
  source 1..21: mol_type = other RNA
cctccagtgtggatcagcaca

SEQ ID NO: 50815 - RNA, 21 nt, synthetic construct
  source 1..21: mol_type = other RNA
acggtgaccccctcctccatc

SEQ ID NO: 50816 - RNA, 21 nt, synthetic construct
  source 1..21: mol_type = other RNA
gtgaccccctcctccatcccg

SEQ ID NO: 50817 - RNA, 21 nt, synthetic construct
  source 1..21: mol_type = other RNA
gaccccctcctccatcccggg

SEQ ID NO: 50818 - RNA, 21 nt, synthetic construct
  source 1..21: mol_type = other RNA
ccccctcctccatcccgggga

SEQ ID NO: 50819 - RNA, 21 nt, synthetic construct
  source 1..21: mol_type = other RNA
ccctcctccatcccggggacc

SEQ ID NO: 50820 - RNA, 21 nt, synthetic construct
  source 1..21: mol_type = other RNA
gccacagtgctgaccaccacc

SEQ ID NO: 50821 - RNA, 21 nt, synthetic construct
  source 1..21: mol_type = other RNA
tgctgaccaccaccaccacaa

SEQ ID NO: 50822 - RNA, 21 nt, synthetic construct
  source 1..21: mol_type = other RNA
gctgaccaccaccaccacaac

SEQ ID NO: 50823 - RNA, 21 nt, synthetic construct
  source 1..21: mol_type = other RNA
accaccaccaccacaactgtg

SEQ ID NO: 50824 - RNA, 21 nt, synthetic construct
  source 1..21: mol_type = other RNA
ccaccacaactgtggccactg

SEQ ID NO: 50825 - RNA, 21 nt, synthetic construct
  source 1..21: mol_type = other RNA
gtggccactggttctatggca

SEQ ID NO: 50826 - RNA, 21 nt, synthetic construct
  source 1..21: mol_type = other RNA
cactgaccaccacggccacta

SEQ ID NO: 50827 - RNA, 21 nt, synthetic construct
  source 1..21: mol_type = other RNA
ccaccggctccaccaccaacc

SEQ ID NO: 50828 - RNA, 21 nt, synthetic construct
  source 1..21: mol_type = other RNA
ccaccaccaacccctcctcaa

SEQ ID NO: 50829 - RNA, 21 nt, synthetic construct
  source 1..21: mol_type = other RNA
accaccaacccctcctcaact

SEQ ID NO: 50830 - RNA, 21 nt, synthetic construct
  source 1..21: mol_type = other RNA
accaacccctcctcaactcca

SEQ ID NO: 50831 - RNA, 21 nt, synthetic construct
  source 1..21: mol_type = other RNA
ccaacccctcctcaactccag

SEQ ID NO: 50832 - RNA, 21 nt, synthetic construct
  source 1..21: mol_type = other RNA
acccctcctcaactccaggga

SEQ ID NO: 50833 - RNA, 21 nt, synthetic construct
  source 1..21: mol_type = other RNA
ccctcctcaactccagggaca

SEQ ID NO: 50834 - RNA, 21 nt, synthetic construct
  source 1..21: mol_type = other RNA
ctcctcaactccagggacaac

SEQ ID NO: 50835 - RNA, 21 nt, synthetic construct
  source 1..21: mol_type = other RNA
ggacaactcccatccccccag

SEQ ID NO: 50836 - RNA, 21 nt, synthetic construct
  source 1..21: mol_type = other RNA
acaactcccatccccccagtg

SEQ ID NO: 50837 - RNA, 21 nt, synthetic construct
  source 1..21: mol_type = other RNA
ctcccatccccccagtgctga

SEQ ID NO: 50838 - RNA, 21 nt, synthetic construct
  source 1..21: mol_type = other RNA
ccccccagtgctgaccaccac

SEQ ID NO: 50839 - RNA, 21 nt, synthetic construct
  source 1..21: mol_type = other RNA
ccccagtgctgaccaccaccg

SEQ ID NO: 50840 - RNA, 21 nt, synthetic construct
  source 1..21: mol_type = other RNA
gctgaccaccaccgccaccac

SEQ ID NO: 50841 - RNA, 21 nt, synthetic construct
  source 1..21: mol_type = other RNA
accaccaccgccaccacacct

SEQ ID NO: 50842 - RNA, 21 nt, synthetic construct
  source 1..21: mol_type = other RNA
ccaccgccaccacacctgcag

SEQ ID NO: 50843 - RNA, 21 nt, synthetic construct
  source 1..21: mol_type = other RNA
accgccaccacacctgcagcc

SEQ ID NO: 50844 - RNA, 21 nt, synthetic construct
  source 1..21: mol_type = other RNA
ccgccaccacacctgcagcca

SEQ ID NO: 50845 - RNA, 21 nt, synthetic construct
  source 1..21: mol_type = other RNA
acacctgcagccaccagcagc

SEQ ID NO: 50846 - RNA, 21 nt, synthetic construct
  source 1..21: mol_type = other RNA
tgcagccaccagcagcacagt

SEQ ID NO: 50847 - RNA, 21 nt, synthetic construct
  source 1..21: mol_type = other RNA
agccaccagcagcacagtgac

SEQ ID NO: 50848 - RNA, 21 nt, synthetic construct
  source 1..21: mol_type = other RNA
cagcacagtgactccctcctc

SEQ ID NO: 50849 - RNA, 21 nt, synthetic construct
  source 1..21: mol_type = other RNA
agcacagtgactccctcctct

SEQ ID NO: 50850 - RNA, 21 nt, synthetic construct
  source 1..21: mol_type = other RNA
gtgactccctcctctgcccta

SEQ ID NO: 50851 - RNA, 21 nt, synthetic construct
  source 1..21: mol_type = other RNA
acccacacacccccagtgccg

SEQ ID NO: 50852 - RNA, 21 nt, synthetic construct
  source 1..21: mol_type = other RNA
ccacacacccccagtgccgaa

SEQ ID NO: 50853 - RNA, 21 nt, synthetic construct
  source 1..21: mol_type = other RNA
gaacaccacggccaccacaca

SEQ ID NO: 50854 - RNA, 21 nt, synthetic construct
  source 1..21: mol_type = other RNA
cggccaccacacacgggcggt

SEQ ID NO: 50855 - RNA, 21 nt, synthetic construct
  source 1..21: mol_type = other RNA
cggtccctgccccccagcagt

SEQ ID NO: 50856 - RNA, 21 nt, synthetic construct
  source 1..21: mol_type = other RNA
ggtccctgccccccagcagtc

SEQ ID NO: 50857 - RNA, 21 nt, synthetic construct
  source 1..21: mol_type = other RNA
tccctgccccccagcagtccc

SEQ ID NO: 50858 - RNA, 21 nt, synthetic construct
  source 1..21: mol_type = other RNA
ccctgccccccagcagtcccc

SEQ ID NO: 50859 - RNA, 21 nt, synthetic construct
  source 1..21: mol_type = other RNA
tgccccccagcagtccccaca

SEQ ID NO: 50860 - RNA, 21 nt, synthetic construct
  source 1..21: mol_type = other RNA
ttcccacaccccagcagcaac

SEQ ID NO: 50861 - RNA, 21 nt, synthetic construct
  source 1..21: mol_type = other RNA
accccagcagcaaccaccagt

SEQ ID NO: 50862 - RNA, 21 nt, synthetic construct
  source 1..21: mol_type = other RNA
gcagcaaccaccagtaccacc

SEQ ID NO: 50863 - RNA, 21 nt, synthetic construct
  source 1..21: mol_type = other RNA
ctgtccagccctcaccctagc

SEQ ID NO: 50864 - RNA, 21 nt, synthetic construct
  source 1..21: mol_type = other RNA
agtcacccccttctccaggga

SEQ ID NO: 50865 - RNA, 21 nt, synthetic construct
  source 1..21: mol_type = other RNA
gtcacccccttctccagggac

SEQ ID NO: 50866 - RNA, 21 nt, synthetic construct
  source 1..21: mol_type = other RNA
tcacccccttctccagggacg

SEQ ID NO: 50867 - RNA, 21 nt, synthetic construct
  source 1..21: mol_type = other RNA
cacccccttctccagggacga

SEQ ID NO: 50868 - RNA, 21 nt, synthetic construct
  source 1..21: mol_type = other RNA
cccccttctccagggacgacc

SEQ ID NO: 50869 - RNA, 21 nt, synthetic construct
  source 1..21: mol_type = other RNA
ccttctccagggacgaccacc

SEQ ID NO: 50870 - RNA, 21 nt, synthetic construct
  source 1..21: mol_type = other RNA
cgaccaccccgggccacacca

SEQ ID NO: 50871 - RNA, 21 nt, synthetic construct
  source 1..21: mol_type = other RNA
acaccaggggcacctccagga

SEQ ID NO: 50872 - RNA, 21 nt, synthetic construct
  source 1..21: mol_type = other RNA
caccaggggcacctccaggac

SEQ ID NO: 50873 - RNA, 21 nt, synthetic construct
  source 1..21: mol_type = other RNA
aggggcacctccaggaccaca

SEQ ID NO: 50874 - RNA, 21 nt, synthetic construct
  source 1..21: mol_type = other RNA
gggcacctccaggaccacagc

SEQ ID NO: 50875 - RNA, 21 nt, synthetic construct
  source 1..21: mol_type = other RNA
ggcacctccaggaccacagcc

SEQ ID NO: 50876 - RNA, 21 nt, synthetic construct
  source 1..21: mol_type = other RNA
gcacctccaggaccacagcca

SEQ ID NO: 50877 - RNA, 21 nt, synthetic construct
  source 1..21: mol_type = other RNA
cctccaggaccacagccacag

SEQ ID NO: 50878 - RNA, 21 nt, synthetic construct
  source 1..21: mol_type = other RNA
caggaccacagccacagccac

SEQ ID NO: 50879 - RNA, 21 nt, synthetic construct
  source 1..21: mol_type = other RNA
ggtggtgaccacgggctgtga

SEQ ID NO: 50880 - RNA, 21 nt, synthetic construct
  source 1..21: mol_type = other RNA
tggtcagagtggctggactac

SEQ ID NO: 50881 - RNA, 21 nt, synthetic construct
  source 1..21: mol_type = other RNA
gcagtctgtgagcagcccctg

SEQ ID NO: 50882 - RNA, 21 nt, synthetic construct
  source 1..21: mol_type = other RNA
ccgtgcccaggcccagcctgg

SEQ ID NO: 50883 - RNA, 21 nt, synthetic construct
  source 1..21: mol_type = other RNA
atgcagcctggactttggcct

SEQ ID NO: 50884 - RNA, 21 nt, synthetic construct
  source 1..21: mol_type = other RNA
tgcagcctggactttggcctg

SEQ ID NO: 50885 - RNA, 21 nt, synthetic construct
  source 1..21: mol_type = other RNA
agcctggactttggcctggtc

SEQ ID NO: 50886 - RNA, 21 nt, synthetic construct
  source 1..21: mol_type = other RNA
ggcctggtctgcaggaaccgt

SEQ ID NO: 50887 - RNA, 21 nt, synthetic construct
  source 1..21: mol_type = other RNA
gccaccagctctacggccacg

SEQ ID NO: 50888 - RNA, 21 nt, synthetic construct
  source 1..21: mol_type = other RNA
caaagctgaccacaacagcca

SEQ ID NO: 50889 - RNA, 21 nt, synthetic construct
  source 1..21: mol_type = other RNA
cgactgagtccactggatcca

SEQ ID NO: 50890 - RNA, 21 nt, synthetic construct
  source 1..21: mol_type = other RNA
ccccgtcctccaccccaggga

SEQ ID NO: 50891 - RNA, 21 nt, synthetic construct
  source 1..21: mol_type = other RNA
cccgtcctccaccccagggac

SEQ ID NO: 50892 - RNA, 21 nt, synthetic construct
  source 1..21: mol_type = other RNA
cgtcctccaccccagggacca

SEQ ID NO: 50893 - RNA, 21 nt, synthetic construct
  source 1..21: mol_type = other RNA
gtcctccaccccagggaccac

SEQ ID NO: 50894 - RNA, 21 nt, synthetic construct
  source 1..21: mol_type = other RNA
cctccaccccagggaccacct

SEQ ID NO: 50895 - RNA, 21 nt, synthetic construct
  source 1..21: mol_type = other RNA
ctccaccccagggaccacctg

SEQ ID NO: 50896 - RNA, 21 nt, synthetic construct
  source 1..21: mol_type = other RNA
tccaccccagggaccacctgg

SEQ ID NO: 50897 - RNA, 21 nt, synthetic construct
  source 1..21: mol_type = other RNA
ccaccccagggaccacctgga

SEQ ID NO: 50898 - RNA, 21 nt, synthetic construct
  source 1..21: mol_type = other RNA
ccaccgcctcctccacccagg

SEQ ID NO: 50899 - RNA, 21 nt, synthetic construct
  source 1..21: mol_type = other RNA
tcctccacccaggcaactgct

SEQ ID NO: 50900 - RNA, 21 nt, synthetic construct
  source 1..21: mol_type = other RNA
acacccacagtcaccagctcc

SEQ ID NO: 50901 - RNA, 21 nt, synthetic construct
  source 1..21: mol_type = other RNA
acccacagtcaccagctccaa

SEQ ID NO: 50902 - RNA, 21 nt, synthetic construct
  source 1..21: mol_type = other RNA
cccacagtcaccagctccaaa

SEQ ID NO: 50903 - RNA, 21 nt, synthetic construct
  source 1..21: mol_type = other RNA
tcaccagctccaaagccactc

SEQ ID NO: 50904 - RNA, 21 nt, synthetic construct
  source 1..21: mol_type = other RNA
gctccaaagccactcccttct

SEQ ID NO: 50905 - RNA, 21 nt, synthetic construct
  source 1..21: mol_type = other RNA
tccaaagccactcccttctcc

SEQ ID NO: 50906 - RNA, 21 nt, synthetic construct
  source 1..21: mol_type = other RNA
tacagccatcccctcctcctc

SEQ ID NO: 50907 - RNA, 21 nt, synthetic construct
  source 1..21: mol_type = other RNA
acagccatcccctcctcctcc

SEQ ID NO: 50908 - RNA, 21 nt, synthetic construct
  source 1..21: mol_type = other RNA
cctcctcctccctgggcacca

SEQ ID NO: 50909 - RNA, 21 nt, synthetic construct
  source 1..21: mol_type = other RNA
tcctccctgggcaccacctgg

SEQ ID NO: 50910 - RNA, 21 nt, synthetic construct
  source 1..21: mol_type = other RNA
tccctgggcaccacctggacc

SEQ ID NO: 50911 - RNA, 21 nt, synthetic construct
  source 1..21: mol_type = other RNA
cctgggcaccacctggacccg

SEQ ID NO: 50912 - RNA, 21 nt, synthetic construct
  source 1..21: mol_type = other RNA
ctgggcaccacctggacccgc

SEQ ID NO: 50913 - RNA, 21 nt, synthetic construct
  source 1..21: mol_type = other RNA
tgggcaccacctggacccgcc

SEQ ID NO: 50914 - RNA, 21 nt, synthetic construct
  source 1..21: mol_type = other RNA
gggcaccacctggacccgcct

SEQ ID NO: 50915 - RNA, 21 nt, synthetic construct
  source 1..21: mol_type = other RNA
tatcacagaccaccacaccca

SEQ ID NO: 50916 - RNA, 21 nt, synthetic construct
  source 1..21: mol_type = other RNA
cggccaccatgtccacagcca

SEQ ID NO: 50917 - RNA, 21 nt, synthetic construct
  source 1..21: mol_type = other RNA
ccaccatgtccacagccacac

SEQ ID NO: 50918 - RNA, 21 nt, synthetic construct
  source 1..21: mol_type = other RNA
ccatgtccacagccacaccct

SEQ ID NO: 50919 - RNA, 21 nt, synthetic construct
  source 1..21: mol_type = other RNA
cacaccctcctccactccaga

SEQ ID NO: 50920 - RNA, 21 nt, synthetic construct
  source 1..21: mol_type = other RNA
actgcccacacctccacagtg

SEQ ID NO: 50921 - RNA, 21 nt, synthetic construct
  source 1..21: mol_type = other RNA
caccacggccaccacaaccag

SEQ ID NO: 50922 - RNA, 21 nt, synthetic construct
  source 1..21: mol_type = other RNA
gccaccacaaccagggccacc

SEQ ID NO: 50923 - RNA, 21 nt, synthetic construct
  source 1..21: mol_type = other RNA
caaccagggccaccggctctg

SEQ ID NO: 50924 - RNA, 21 nt, synthetic construct
  source 1..21: mol_type = other RNA
aaccagggccaccggctctgt

SEQ ID NO: 50925 - RNA, 21 nt, synthetic construct
  source 1..21: mol_type = other RNA
gtggccaccccctcttccacc

SEQ ID NO: 50926 - RNA, 21 nt, synthetic construct
  source 1..21: mol_type = other RNA
tggccaccccctcttccaccc

SEQ ID NO: 50927 - RNA, 21 nt, synthetic construct
  source 1..21: mol_type = other RNA
ggccaccccctcttccacccc

SEQ ID NO: 50928 - RNA, 21 nt, synthetic construct
  source 1..21: mol_type = other RNA
aagtgccgactaccacaacca

SEQ ID NO: 50929 - RNA, 21 nt, synthetic construct
  source 1..21: mol_type = other RNA
gcttcacagtcaccccctcct

SEQ ID NO: 50930 - RNA, 21 nt, synthetic construct
  source 1..21: mol_type = other RNA
tcaccccctcctccagcccag

SEQ ID NO: 50931 - RNA, 21 nt, synthetic construct
  source 1..21: mol_type = other RNA
ctcctccagcccagggacggc

SEQ ID NO: 50932 - RNA, 21 nt, synthetic construct
  source 1..21: mol_type = other RNA
tcctccagcccagggacggca

SEQ ID NO: 50933 - RNA, 21 nt, synthetic construct
  source 1..21: mol_type = other RNA
cctccagtgtggatcagcaca

SEQ ID NO: 50934 - RNA, 21 nt, synthetic construct
  source 1..21: mol_type = other RNA
ccaccacacccacaaccagtg

SEQ ID NO: 50935 - RNA, 21 nt, synthetic construct
  source 1..21: mol_type = other RNA
caaccagtggctccacggtga

SEQ ID NO: 50936 - RNA, 21 nt, synthetic construct
  source 1..21: mol_type = other RNA
cgtcccggggaccacccacac

SEQ ID NO: 50937 - RNA, 21 nt, synthetic construct
  source 1..21: mol_type = other RNA
cccccacagtgctgaccacca

SEQ ID NO: 50938 - RNA, 21 nt, synthetic construct
  source 1..21: mol_type = other RNA
ccccacagtgctgaccaccac

SEQ ID NO: 50939 - RNA, 21 nt, synthetic construct
  source 1..21: mol_type = other RNA
cccacagtgctgaccaccacc

SEQ ID NO: 50940 - RNA, 21 nt, synthetic construct
  source 1..21: mol_type = other RNA
tgctgaccaccaccaccacaa

SEQ ID NO: 50941 - RNA, 21 nt, synthetic construct
  source 1..21: mol_type = other RNA
gctgaccaccaccaccacaac

SEQ ID NO: 50942 - RNA, 21 nt, synthetic construct
  source 1..21: mol_type = other RNA
accaccaccaccacaactgtg

SEQ ID NO: 50943 - RNA, 21 nt, synthetic construct
  source 1..21: mol_type = other RNA
ccaccacaactgtggccactg

SEQ ID NO: 50944 - RNA, 21 nt, synthetic construct
  source 1..21: mol_type = other RNA
gtggccactggttctatggca

SEQ ID NO: 50945 - RNA, 21 nt, synthetic construct
  source 1..21: mol_type = other RNA
acggccaccggctccaccacc

SEQ ID NO: 50946 - RNA, 21 nt, synthetic construct
  source 1..21: mol_type = other RNA
ccaccggctccaccaccaacc

SEQ ID NO: 50947 - RNA, 21 nt, synthetic construct
  source 1..21: mol_type = other RNA
ccaccaccaacccctcctcaa

SEQ ID NO: 50948 - RNA, 21 nt, synthetic construct
  source 1..21: mol_type = other RNA
accaccaacccctcctcaact

SEQ ID NO: 50949 - RNA, 21 nt, synthetic construct
  source 1..21: mol_type = other RNA
accaacccctcctcaactcca

SEQ ID NO: 50950 - RNA, 21 nt, synthetic construct
  source 1..21: mol_type = other RNA
ccaacccctcctcaactccag

SEQ ID NO: 50951 - RNA, 21 nt, synthetic construct
  source 1..21: mol_type = other RNA
acccctcctcaactccaggga

SEQ ID NO: 50952 - RNA, 21 nt, synthetic construct
  source 1..21: mol_type = other RNA
ccctcctcaactccagggaca

SEQ ID NO: 50953 - RNA, 21 nt, synthetic construct
  source 1..21: mol_type = other RNA
ctcctcaactccagggacaac

SEQ ID NO: 50954 - RNA, 21 nt, synthetic construct
  source 1..21: mol_type = other RNA
ccccccagtgctgaccaccac

SEQ ID NO: 50955 - RNA, 21 nt, synthetic construct
  source 1..21: mol_type = other RNA
ccccagtgctgaccaccaccg

SEQ ID NO: 50956 - RNA, 21 nt, synthetic construct
  source 1..21: mol_type = other RNA
gctgaccaccaccgccaccac

SEQ ID NO: 50957 - RNA, 21 nt, synthetic construct
  source 1..21: mol_type = other RNA
accaccaccgccaccacacct

SEQ ID NO: 50958 - RNA, 21 nt, synthetic construct
  source 1..21: mol_type = other RNA
ccaccgccaccacacctgcag

SEQ ID NO: 50959 - RNA, 21 nt, synthetic construct
  source 1..21: mol_type = other RNA
accgccaccacacctgcagcc

SEQ ID NO: 50960 - RNA, 21 nt, synthetic construct
  source 1..21: mol_type = other RNA
ccgccaccacacctgcagcca

SEQ ID NO: 50961 - RNA, 21 nt, synthetic construct
  source 1..21: mol_type = other RNA
acacctgcagccaccagcagc

SEQ ID NO: 50962 - RNA, 21 nt, synthetic construct
  source 1..21: mol_type = other RNA
tgcagccaccagcagcacagt

SEQ ID NO: 50963 - RNA, 21 nt, synthetic construct
  source 1..21: mol_type = other RNA
agccaccagcagcacagtgac

SEQ ID NO: 50964 - RNA, 21 nt, synthetic construct
  source 1..21: mol_type = other RNA
cagcacagtgactccctcctc

SEQ ID NO: 50965 - RNA, 21 nt, synthetic construct
  source 1..21: mol_type = other RNA
agcacagtgactccctcctct

SEQ ID NO: 50966 - RNA, 21 nt, synthetic construct
  source 1..21: mol_type = other RNA
gtgactccctcctctgcccta

SEQ ID NO: 50967 - RNA, 21 nt, synthetic construct
  source 1..21: mol_type = other RNA
acccacacacccccagtgccg

SEQ ID NO: 50968 - RNA, 21 nt, synthetic construct
  source 1..21: mol_type = other RNA
ccacacacccccagtgccgaa

SEQ ID NO: 50969 - RNA, 21 nt, synthetic construct
  source 1..21: mol_type = other RNA
gaacaccacggccaccacaca

SEQ ID NO: 50970 - RNA, 21 nt, synthetic construct
  source 1..21: mol_type = other RNA
tgtcccccagcagtccccaca

SEQ ID NO: 50971 - RNA, 21 nt, synthetic construct
  source 1..21: mol_type = other RNA
ttcggccacctcaggcacctt

SEQ ID NO: 50972 - RNA, 21 nt, synthetic construct
  source 1..21: mol_type = other RNA
ggccacctcaggcaccttggg

SEQ ID NO: 50973 - RNA, 21 nt, synthetic construct
  source 1..21: mol_type = other RNA
cctcaggcaccttgggcacca

SEQ ID NO: 50974 - RNA, 21 nt, synthetic construct
  source 1..21: mol_type = other RNA
ggcaccttgggcaccacccac

SEQ ID NO: 50975 - RNA, 21 nt, synthetic construct
  source 1..21: mol_type = other RNA
gggacttcccacaccccagca

SEQ ID NO: 50976 - RNA, 21 nt, synthetic construct
  source 1..21: mol_type = other RNA
ttcccacaccccagcagcaac

SEQ ID NO: 50977 - RNA, 21 nt, synthetic construct
  source 1..21: mol_type = other RNA
ctgtccagccctcaccctagc

SEQ ID NO: 50978 - RNA, 21 nt, synthetic construct
  source 1..21: mol_type = other RNA
cgaccaccccgggccacacca

SEQ ID NO: 50979 - RNA, 21 nt, synthetic construct
  source 1..21: mol_type = other RNA
cgggccacaccacggccacct

SEQ ID NO: 50980 - RNA, 21 nt, synthetic construct
  source 1..21: mol_type = other RNA
cacaccacggccacctccagg

SEQ ID NO: 50981 - RNA, 21 nt, synthetic construct
  source 1..21: mol_type = other RNA
ccacggccacggccacaccca

SEQ ID NO: 50982 - RNA, 21 nt, synthetic construct
  source 1..21: mol_type = other RNA
cacggccacggccacacccag

SEQ ID NO: 50983 - RNA, 21 nt, synthetic construct
  source 1..21: mol_type = other RNA
acggccacggccacacccagc

SEQ ID NO: 50984 - RNA, 21 nt, synthetic construct
  source 1..21: mol_type = other RNA
ggccacggccacacccagcaa

SEQ ID NO: 50985 - RNA, 21 nt, synthetic construct
  source 1..21: mol_type = other RNA
gccacggccacacccagcaag

SEQ ID NO: 50986 - RNA, 21 nt, synthetic construct
  source 1..21: mol_type = other RNA
ggtggtgaccacgggctgtga

SEQ ID NO: 50987 - RNA, 21 nt, synthetic construct
  source 1..21: mol_type = other RNA
tggtcagagtggctggactac

SEQ ID NO: 50988 - RNA, 21 nt, synthetic construct
  source 1..21: mol_type = other RNA
gtgcggccggaggggccgtct

SEQ ID NO: 50989 - RNA, 21 nt, synthetic construct
  source 1..21: mol_type = other RNA
ccgtgcccaggcccagcctgg

SEQ ID NO: 50990 - RNA, 21 nt, synthetic construct
  source 1..21: mol_type = other RNA
ctggtgtccccctgggggagt

SEQ ID NO: 50991 - RNA, 21 nt, synthetic construct
  source 1..21: mol_type = other RNA
atgcagcctggactttggcct

SEQ ID NO: 50992 - RNA, 21 nt, synthetic construct
  source 1..21: mol_type = other RNA
tgcagcctggactttggcctg

SEQ ID NO: 50993 - RNA, 21 nt, synthetic construct
  source 1..21: mol_type = other RNA
agcctggactttggcctggtc

SEQ ID NO: 50994 - RNA, 21 nt, synthetic construct
  source 1..21: mol_type = other RNA
ggcctggtctgcaggaaccgt

SEQ ID NO: 50995 - RNA, 21 nt, synthetic construct
  source 1..21: mol_type = other RNA
tacggccatgccctcctccac

SEQ ID NO: 50996 - RNA, 21 nt, synthetic construct
  source 1..21: mol_type = other RNA
ggccatgccctcctccactcc

SEQ ID NO: 50997 - RNA, 21 nt, synthetic construct
  source 1..21: mol_type = other RNA
caccccgtcctccaccccggg

SEQ ID NO: 50998 - RNA, 21 nt, synthetic construct
  source 1..21: mol_type = other RNA
gggaacagctccccctcccaa

SEQ ID NO: 50999 - RNA, 21 nt, synthetic construct
  source 1..21: mol_type = other RNA
agcccggccaccacacccaca

SEQ ID NO: 51000 - RNA, 21 nt, synthetic construct
  source 1..21: mol_type = other RNA
ttccaaagccacttcctcctc

SEQ ID NO: 51001 - RNA, 21 nt, synthetic construct
  source 1..21: mol_type = other RNA
aaagccacttcctcctccagt

SEQ ID NO: 51002 - RNA, 21 nt, synthetic construct
  source 1..21: mol_type = other RNA
agccacttcctcctccagtcc

SEQ ID NO: 51003 - RNA, 21 nt, synthetic construct
  source 1..21: mol_type = other RNA
gccacttcctcctccagtcca

SEQ ID NO: 51004 - RNA, 21 nt, synthetic construct
  source 1..21: mol_type = other RNA
ccacttcctcctccagtccaa

SEQ ID NO: 51005 - RNA, 21 nt, synthetic construct
  source 1..21: mol_type = other RNA
acttcctcctccagtccaagg

SEQ ID NO: 51006 - RNA, 21 nt, synthetic construct
  source 1..21: mol_type = other RNA
ttcctcctccagtccaaggac

SEQ ID NO: 51007 - RNA, 21 nt, synthetic construct
  source 1..21: mol_type = other RNA
acacccatcccctcctccacc

SEQ ID NO: 51008 - RNA, 21 nt, synthetic construct
  source 1..21: mol_type = other RNA
tcccctcctccacccttggga

SEQ ID NO: 51009 - RNA, 21 nt, synthetic construct
  source 1..21: mol_type = other RNA
tcctccacccttgggaccacc

SEQ ID NO: 51010 - RNA, 21 nt, synthetic construct
  source 1..21: mol_type = other RNA
accgggaccctcccagaacag

SEQ ID NO: 51011 - RNA, 21 nt, synthetic construct
  source 1..21: mol_type = other RNA
cccgtggccaccatgtccaca

SEQ ID NO: 51012 - RNA, 21 nt, synthetic construct
  source 1..21: mol_type = other RNA
acccctcctccactccggaga

SEQ ID NO: 51013 - RNA, 21 nt, synthetic construct
  source 1..21: mol_type = other RNA
accacccacacctccacagtg

SEQ ID NO: 51014 - RNA, 21 nt, synthetic construct
  source 1..21: mol_type = other RNA
ctgaccacgaaggccaccacg

SEQ ID NO: 51015 - RNA, 21 nt, synthetic construct
  source 1..21: mol_type = other RNA
tccacgtccaccccctcctcc

SEQ ID NO: 51016 - RNA, 21 nt, synthetic construct
  source 1..21: mol_type = other RNA
ccacgtccaccccctcctcca

SEQ ID NO: 51017 - RNA, 21 nt, synthetic construct
  source 1..21: mol_type = other RNA
cacgtccaccccctcctccac

SEQ ID NO: 51018 - RNA, 21 nt, synthetic construct
  source 1..21: mol_type = other RNA
ccaccccctcctccactccgg

SEQ ID NO: 51019 - RNA, 21 nt, synthetic construct
  source 1..21: mol_type = other RNA
gcagccactacaactgcagcc

SEQ ID NO: 51020 - RNA, 21 nt, synthetic construct
  source 1..21: mol_type = other RNA
cagccactacaactgcagcca

SEQ ID NO: 51021 - RNA, 21 nt, synthetic construct
  source 1..21: mol_type = other RNA
tacaactgcagccactggccc

SEQ ID NO: 51022 - RNA, 21 nt, synthetic construct
  source 1..21: mol_type = other RNA
acaactgcagccactggcccc

SEQ ID NO: 51023 - RNA, 21 nt, synthetic construct
  source 1..21: mol_type = other RNA
tgcagccactggccccacggc

SEQ ID NO: 51024 - RNA, 21 nt, synthetic construct
  source 1..21: mol_type = other RNA
gccactggccccacggccacc

SEQ ID NO: 51025 - RNA, 21 nt, synthetic construct
  source 1..21: mol_type = other RNA
tggccccacggccaccccgtc

SEQ ID NO: 51026 - RNA, 21 nt, synthetic construct
  source 1..21: mol_type = other RNA
ccccgtcctccaccccaggga

SEQ ID NO: 51027 - RNA, 21 nt, synthetic construct
  source 1..21: mol_type = other RNA
cccgtcctccaccccagggac

SEQ ID NO: 51028 - RNA, 21 nt, synthetic construct
  source 1..21: mol_type = other RNA
cgtcctccaccccagggacca

SEQ ID NO: 51029 - RNA, 21 nt, synthetic construct
  source 1..21: mol_type = other RNA
gtcctccaccccagggaccac

SEQ ID NO: 51030 - RNA, 21 nt, synthetic construct
  source 1..21: mol_type = other RNA
cctccaccccagggaccacct

SEQ ID NO: 51031 - RNA, 21 nt, synthetic construct
  source 1..21: mol_type = other RNA
ctccaccccagggaccacctg

SEQ ID NO: 51032 - RNA, 21 nt, synthetic construct
  source 1..21: mol_type = other RNA
tccaccccagggaccacctgg

SEQ ID NO: 51033 - RNA, 21 nt, synthetic construct
  source 1..21: mol_type = other RNA
ccaccccagggaccacctgga

SEQ ID NO: 51034 - RNA, 21 nt, synthetic construct
  source 1..21: mol_type = other RNA
ccccgtcctccaccccaggga

SEQ ID NO: 51035 - RNA, 21 nt, synthetic construct
  source 1..21: mol_type = other RNA
cccgtcctccaccccagggac

SEQ ID NO: 51036 - RNA, 21 nt, synthetic construct
  source 1..21: mol_type = other RNA
cgtcctccaccccagggacca

SEQ ID NO: 51037 - RNA, 21 nt, synthetic construct
  source 1..21: mol_type = other RNA
gtcctccaccccagggaccac

SEQ ID NO: 51038 - RNA, 21 nt, synthetic construct
  source 1..21: mol_type = other RNA
cctccaccccagggaccacct

SEQ ID NO: 51039 - RNA, 21 nt, synthetic construct
  source 1..21: mol_type = other RNA
ctccaccccagggaccacctg

SEQ ID NO: 51040 - RNA, 21 nt, synthetic construct
  source 1..21: mol_type = other RNA
tccaccccagggaccacctgg

SEQ ID NO: 51041 - RNA, 21 nt, synthetic construct
  source 1..21: mol_type = other RNA
ccaccccagggaccacctgga

SEQ ID NO: 51042 - RNA, 21 nt, synthetic construct
  source 1..21: mol_type = other RNA
ccaccgcctcctccacccagg

SEQ ID NO: 51043 - RNA, 21 nt, synthetic construct
  source 1..21: mol_type = other RNA
tcctccacccaggcaactgct

SEQ ID NO: 51044 - RNA, 21 nt, synthetic construct
  source 1..21: mol_type = other RNA
acacccacagtcaccagctcc

SEQ ID NO: 51045 - RNA, 21 nt, synthetic construct
  source 1..21: mol_type = other RNA
acccacagtcaccagctccaa

SEQ ID NO: 51046 - RNA, 21 nt, synthetic construct
  source 1..21: mol_type = other RNA
cccacagtcaccagctccaaa

SEQ ID NO: 51047 - RNA, 21 nt, synthetic construct
  source 1..21: mol_type = other RNA
tcaccagctccaaagccactc

SEQ ID NO: 51048 - RNA, 21 nt, synthetic construct
  source 1..21: mol_type = other RNA
tccaaagccactccctcctcc

SEQ ID NO: 51049 - RNA, 21 nt, synthetic construct
  source 1..21: mol_type = other RNA
ccaaagccactccctcctcca

SEQ ID NO: 51050 - RNA, 21 nt, synthetic construct
  source 1..21: mol_type = other RNA
agccactccctcctccagtcc

SEQ ID NO: 51051 - RNA, 21 nt, synthetic construct
  source 1..21: mol_type = other RNA
actccctcctccagtccaggg

SEQ ID NO: 51052 - RNA, 21 nt, synthetic construct
  source 1..21: mol_type = other RNA
tacagccatcccctcctcctc

SEQ ID NO: 51053 - RNA, 21 nt, synthetic construct
  source 1..21: mol_type = other RNA
acagccatcccctcctcctcc

SEQ ID NO: 51054 - RNA, 21 nt, synthetic construct
  source 1..21: mol_type = other RNA
cctcctcctccctgggcacca

SEQ ID NO: 51055 - RNA, 21 nt, synthetic construct
  source 1..21: mol_type = other RNA
tcctccctgggcaccacctgg

SEQ ID NO: 51056 - RNA, 21 nt, synthetic construct
  source 1..21: mol_type = other RNA
tccctgggcaccacctggacc

SEQ ID NO: 51057 - RNA, 21 nt, synthetic construct
  source 1..21: mol_type = other RNA
cctgggcaccacctggacccg

SEQ ID NO: 51058 - RNA, 21 nt, synthetic construct
  source 1..21: mol_type = other RNA
ctgggcaccacctggacccgc

SEQ ID NO: 51059 - RNA, 21 nt, synthetic construct
  source 1..21: mol_type = other RNA
tgggcaccacctggacccgcc

SEQ ID NO: 51060 - RNA, 21 nt, synthetic construct
  source 1..21: mol_type = other RNA
gggcaccacctggacccgcct

SEQ ID NO: 51061 - RNA, 21 nt, synthetic construct
  source 1..21: mol_type = other RNA
tatcacagaccaccacaccca

SEQ ID NO: 51062 - RNA, 21 nt, synthetic construct
  source 1..21: mol_type = other RNA
cggccaccatgtccacagcca

SEQ ID NO: 51063 - RNA, 21 nt, synthetic construct
  source 1..21: mol_type = other RNA
ccaccatgtccacagccacac

SEQ ID NO: 51064 - RNA, 21 nt, synthetic construct
  source 1..21: mol_type = other RNA
ccatgtccacagccacaccct

SEQ ID NO: 51065 - RNA, 21 nt, synthetic construct
  source 1..21: mol_type = other RNA
cacaccctcctccactccaga

SEQ ID NO: 51066 - RNA, 21 nt, synthetic construct
  source 1..21: mol_type = other RNA
taccgccacggccaccacaac

SEQ ID NO: 51067 - RNA, 21 nt, synthetic construct
  source 1..21: mol_type = other RNA
gctctgtggccaccccctcct

SEQ ID NO: 51068 - RNA, 21 nt, synthetic construct
  source 1..21: mol_type = other RNA
ctctgtggccaccccctcctc

SEQ ID NO: 51069 - RNA, 21 nt, synthetic construct
  source 1..21: mol_type = other RNA
tctgtggccaccccctcctcc

SEQ ID NO: 51070 - RNA, 21 nt, synthetic construct
  source 1..21: mol_type = other RNA
ctgtggccaccccctcctcca

SEQ ID NO: 51071 - RNA, 21 nt, synthetic construct
  source 1..21: mol_type = other RNA
tgtggccaccccctcctccac

SEQ ID NO: 51072 - RNA, 21 nt, synthetic construct
  source 1..21: mol_type = other RNA
accccctcctccaccccagga

SEQ ID NO: 51073 - RNA, 21 nt, synthetic construct
  source 1..21: mol_type = other RNA
ccctcctccaccccaggaaca

SEQ ID NO: 51074 - RNA, 21 nt, synthetic construct
  source 1..21: mol_type = other RNA
aagtgccgactaccacaacca

SEQ ID NO: 51075 - RNA, 21 nt, synthetic construct
  source 1..21: mol_type = other RNA
ccacgggcttcacagccaccc

SEQ ID NO: 51076 - RNA, 21 nt, synthetic construct
  source 1..21: mol_type = other RNA
gcttcacagccaccccctcct

SEQ ID NO: 51077 - RNA, 21 nt, synthetic construct
  source 1..21: mol_type = other RNA
tcacagccaccccctcctcca

SEQ ID NO: 51078 - RNA, 21 nt, synthetic construct
  source 1..21: mol_type = other RNA
ctcctccagcccagggacggc

SEQ ID NO: 51079 - RNA, 21 nt, synthetic construct
  source 1..21: mol_type = other RNA
tcctccagcccagggacggca

SEQ ID NO: 51080 - RNA, 21 nt, synthetic construct
  source 1..21: mol_type = other RNA
cctccagtgtggatcagcaca

SEQ ID NO: 51081 - RNA, 21 nt, synthetic construct
  source 1..21: mol_type = other RNA
aaccaccacacccacaaccac

SEQ ID NO: 51082 - RNA, 21 nt, synthetic construct
  source 1..21: mol_type = other RNA
accaccacacccacaaccacc

SEQ ID NO: 51083 - RNA, 21 nt, synthetic construct
  source 1..21: mol_type = other RNA
ccaccacacccacaaccacca

SEQ ID NO: 51084 - RNA, 21 nt, synthetic construct
  source 1..21: mol_type = other RNA
caccacacccacaaccaccac

SEQ ID NO: 51085 - RNA, 21 nt, synthetic construct
  source 1..21: mol_type = other RNA
accacacccacaaccaccaca

SEQ ID NO: 51086 - RNA, 21 nt, synthetic construct
  source 1..21: mol_type = other RNA
ccacacccacaaccaccacac

SEQ ID NO: 51087 - RNA, 21 nt, synthetic construct
  source 1..21: mol_type = other RNA
cacacccacaaccaccacacc

SEQ ID NO: 51088 - RNA, 21 nt, synthetic construct
  source 1..21: mol_type = other RNA
acccacaaccaccacacccac

SEQ ID NO: 51089 - RNA, 21 nt, synthetic construct
  source 1..21: mol_type = other RNA
ccaccacacccacaaccagtg

SEQ ID NO: 51090 - RNA, 21 nt, synthetic construct
  source 1..21: mol_type = other RNA
caaccagtggctccacggtga

SEQ ID NO: 51091 - RNA, 21 nt, synthetic construct
  source 1..21: mol_type = other RNA
acggtgaccccctcctccatc

SEQ ID NO: 51092 - RNA, 21 nt, synthetic construct
  source 1..21: mol_type = other RNA
gtgaccccctcctccatcccg

SEQ ID NO: 51093 - RNA, 21 nt, synthetic construct
  source 1..21: mol_type = other RNA
gaccccctcctccatcccggg

SEQ ID NO: 51094 - RNA, 21 nt, synthetic construct
  source 1..21: mol_type = other RNA
ccccctcctccatcccgggga

SEQ ID NO: 51095 - RNA, 21 nt, synthetic construct
  source 1..21: mol_type = other RNA
ccctcctccatcccggggacc

SEQ ID NO: 51096 - RNA, 21 nt, synthetic construct
  source 1..21: mol_type = other RNA
cagagtgctgaccaccaccac

SEQ ID NO: 51097 - RNA, 21 nt, synthetic construct
  source 1..21: mol_type = other RNA
tgctgaccaccaccaccacaa

SEQ ID NO: 51098 - RNA, 21 nt, synthetic construct
  source 1..21: mol_type = other RNA
gctgaccaccaccaccacaac

SEQ ID NO: 51099 - RNA, 21 nt, synthetic construct
  source 1..21: mol_type = other RNA
accaccaccaccacaactgtg

SEQ ID NO: 51100 - RNA, 21 nt, synthetic construct
  source 1..21: mol_type = other RNA
ccaccacaactgtggccactg

SEQ ID NO: 51101 - RNA, 21 nt, synthetic construct
  source 1..21: mol_type = other RNA
gtggccactggttctatggca

SEQ ID NO: 51102 - RNA, 21 nt, synthetic construct
  source 1..21: mol_type = other RNA
cactgaccaccacggccacta

SEQ ID NO: 51103 - RNA, 21 nt, synthetic construct
  source 1..21: mol_type = other RNA
acggccaccggctccaccacc

SEQ ID NO: 51104 - RNA, 21 nt, synthetic construct
  source 1..21: mol_type = other RNA
ccaccggctccaccaccaacc

SEQ ID NO: 51105 - RNA, 21 nt, synthetic construct
  source 1..21: mol_type = other RNA
ccaccaccaacccctcctcaa

SEQ ID NO: 51106 - RNA, 21 nt, synthetic construct
  source 1..21: mol_type = other RNA
accaccaacccctcctcaact

SEQ ID NO: 51107 - RNA, 21 nt, synthetic construct
  source 1..21: mol_type = other RNA
accaacccctcctcaactcca

SEQ ID NO: 51108 - RNA, 21 nt, synthetic construct
  source 1..21: mol_type = other RNA
ccaacccctcctcaactccag

SEQ ID NO: 51109 - RNA, 21 nt, synthetic construct
  source 1..21: mol_type = other RNA
acccctcctcaactccaggga

SEQ ID NO: 51110 - RNA, 21 nt, synthetic construct
  source 1..21: mol_type = other RNA
ccctcctcaactccagggaca

SEQ ID NO: 51111 - RNA, 21 nt, synthetic construct
  source 1..21: mol_type = other RNA
ctcctcaactccagggacaac

SEQ ID NO: 51112 - RNA, 21 nt, synthetic construct
  source 1..21: mol_type = other RNA
aacacccatcaccccagtgct

SEQ ID NO: 51113 - RNA, 21 nt, synthetic construct
  source 1..21: mol_type = other RNA
cccatcaccccagtgctgacc

SEQ ID NO: 51114 - RNA, 21 nt, synthetic construct
  source 1..21: mol_type = other RNA
ccatcaccccagtgctgacca

SEQ ID NO: 51115 - RNA, 21 nt, synthetic construct
  source 1..21: mol_type = other RNA
ctgaccagcacggccaccaca

SEQ ID NO: 51116 - RNA, 21 nt, synthetic construct
  source 1..21: mol_type = other RNA
ccagcacggccaccacacccg

SEQ ID NO: 51117 - RNA, 21 nt, synthetic construct
  source 1..21: mol_type = other RNA
ccgcagccaccagctccaaag

SEQ ID NO: 51118 - RNA, 21 nt, synthetic construct
  source 1..21: mol_type = other RNA
ccaccagctccaaagccactt

SEQ ID NO: 51119 - RNA, 21 nt, synthetic construct
  source 1..21: mol_type = other RNA
cagctccaaagccacttcctc

SEQ ID NO: 51120 - RNA, 21 nt, synthetic construct
  source 1..21: mol_type = other RNA
ctccaaagccacttcctcctc

SEQ ID NO: 51121 - RNA, 21 nt, synthetic construct
  source 1..21: mol_type = other RNA
aaagccacttcctcctccagt

SEQ ID NO: 51122 - RNA, 21 nt, synthetic construct
  source 1..21: mol_type = other RNA
agccacttcctcctccagtcc

SEQ ID NO: 51123 - RNA, 21 nt, synthetic construct
  source 1..21: mol_type = other RNA
gccacttcctcctccagtcca

SEQ ID NO: 51124 - RNA, 21 nt, synthetic construct
  source 1..21: mol_type = other RNA
ccacttcctcctccagtccaa

SEQ ID NO: 51125 - RNA, 21 nt, synthetic construct
  source 1..21: mol_type = other RNA
acttcctcctccagtccaagg

SEQ ID NO: 51126 - RNA, 21 nt, synthetic construct
  source 1..21: mol_type = other RNA
ttcctcctccagtccaaggac

SEQ ID NO: 51127 - RNA, 21 nt, synthetic construct
  source 1..21: mol_type = other RNA
acacccatcccctcctccacc

SEQ ID NO: 51128 - RNA, 21 nt, synthetic construct
  source 1..21: mol_type = other RNA
tcccctcctccaccctgtgga

SEQ ID NO: 51129 - RNA, 21 nt, synthetic construct
  source 1..21: mol_type = other RNA
ctcctccaccctgtggaccac

SEQ ID NO: 51130 - RNA, 21 nt, synthetic construct
  source 1..21: mol_type = other RNA
tcccagcacagaccaccacac

SEQ ID NO: 51131 - RNA, 21 nt, synthetic construct
  source 1..21: mol_type = other RNA
cccagcacagaccaccacacc

SEQ ID NO: 51132 - RNA, 21 nt, synthetic construct
  source 1..21: mol_type = other RNA
accacacccatgtccaccatg

SEQ ID NO: 51133 - RNA, 21 nt, synthetic construct
  source 1..21: mol_type = other RNA
ccacacccatgtccaccatgt

SEQ ID NO: 51134 - RNA, 21 nt, synthetic construct
  source 1..21: mol_type = other RNA
acccatgtccaccatgtccac

SEQ ID NO: 51135 - RNA, 21 nt, synthetic construct
  source 1..21: mol_type = other RNA
accacccacacctccacagtg

SEQ ID NO: 51136 - RNA, 21 nt, synthetic construct
  source 1..21: mol_type = other RNA
cctccacagtgctgaccacca

SEQ ID NO: 51137 - RNA, 21 nt, synthetic construct
  source 1..21: mol_type = other RNA
ctccacagtgctgaccaccac

SEQ ID NO: 51138 - RNA, 21 nt, synthetic construct
  source 1..21: mol_type = other RNA
tccacagtgctgaccaccaca

SEQ ID NO: 51139 - RNA, 21 nt, synthetic construct
  source 1..21: mol_type = other RNA
cagtgctgaccaccacagcca

SEQ ID NO: 51140 - RNA, 21 nt, synthetic construct
  source 1..21: mol_type = other RNA
cactgagctgaccacaacagc

SEQ ID NO: 51141 - RNA, 21 nt, synthetic construct
  source 1..21: mol_type = other RNA
acagccactacaactgcagcc

SEQ ID NO: 51142 - RNA, 21 nt, synthetic construct
  source 1..21: mol_type = other RNA
cagccactacaactgcagcca

SEQ ID NO: 51143 - RNA, 21 nt, synthetic construct
  source 1..21: mol_type = other RNA
atccacggccaccctgtcctc

SEQ ID NO: 51144 - RNA, 21 nt, synthetic construct
  source 1..21: mol_type = other RNA
acggccaccctgtcctccacc

SEQ ID NO: 51145 - RNA, 21 nt, synthetic construct
  source 1..21: mol_type = other RNA
cggccaccctgtcctccaccc

SEQ ID NO: 51146 - RNA, 21 nt, synthetic construct
  source 1..21: mol_type = other RNA
ccaccctgtcctccaccccag

SEQ ID NO: 51147 - RNA, 21 nt, synthetic construct
  source 1..21: mol_type = other RNA
accctgtcctccaccccaggg

SEQ ID NO: 51148 - RNA, 21 nt, synthetic construct
  source 1..21: mol_type = other RNA
ccctgtcctccaccccaggga

SEQ ID NO: 51149 - RNA, 21 nt, synthetic construct
  source 1..21: mol_type = other RNA
tgtcctccaccccagggacca

SEQ ID NO: 51150 - RNA, 21 nt, synthetic construct
  source 1..21: mol_type = other RNA
gtcctccaccccagggaccac

SEQ ID NO: 51151 - RNA, 21 nt, synthetic construct
  source 1..21: mol_type = other RNA
cctccaccccagggaccacct

SEQ ID NO: 51152 - RNA, 21 nt, synthetic construct
  source 1..21: mol_type = other RNA
ctccaccccagggaccacctg

SEQ ID NO: 51153 - RNA, 21 nt, synthetic construct
  source 1..21: mol_type = other RNA
tccaccccagggaccacctgg

SEQ ID NO: 51154 - RNA, 21 nt, synthetic construct
  source 1..21: mol_type = other RNA
ccaccccagggaccacctgga

SEQ ID NO: 51155 - RNA, 21 nt, synthetic construct
  source 1..21: mol_type = other RNA
gttccacggccaccgcctcct

SEQ ID NO: 51156 - RNA, 21 nt, synthetic construct
  source 1..21: mol_type = other RNA
cggccaccgcctcctccactc

SEQ ID NO: 51157 - RNA, 21 nt, synthetic construct
  source 1..21: mol_type = other RNA
ccaccgcctcctccactctgg

SEQ ID NO: 51158 - RNA, 21 nt, synthetic construct
  source 1..21: mol_type = other RNA
accgcctcctccactctggga

SEQ ID NO: 51159 - RNA, 21 nt, synthetic construct
  source 1..21: mol_type = other RNA
ccgcctcctccactctgggaa

SEQ ID NO: 51160 - RNA, 21 nt, synthetic construct
  source 1..21: mol_type = other RNA
ggtgaccaccatggccactat

SEQ ID NO: 51161 - RNA, 21 nt, synthetic construct
  source 1..21: mol_type = other RNA
ccatggccactatgcccacag

SEQ ID NO: 51162 - RNA, 21 nt, synthetic construct
  source 1..21: mol_type = other RNA
ccactatgcccacagccactg

SEQ ID NO: 51163 - RNA, 21 nt, synthetic construct
  source 1..21: mol_type = other RNA
atgcccacagccactgcctcc

SEQ ID NO: 51164 - RNA, 21 nt, synthetic construct
  source 1..21: mol_type = other RNA
tgcccacagccactgcctcca

SEQ ID NO: 51165 - RNA, 21 nt, synthetic construct
  source 1..21: mol_type = other RNA
gcccacagccactgcctccac

SEQ ID NO: 51166 - RNA, 21 nt, synthetic construct
  source 1..21: mol_type = other RNA
cacagccactgcctccacggt

SEQ ID NO: 51167 - RNA, 21 nt, synthetic construct
  source 1..21: mol_type = other RNA
acagccactgcctccacggtt

SEQ ID NO: 51168 - RNA, 21 nt, synthetic construct
  source 1..21: mol_type = other RNA
gcacccctgcagtgctcccca

SEQ ID NO: 51169 - RNA, 21 nt, synthetic construct
  source 1..21: mol_type = other RNA
ctccccagcagcctgccaacc

SEQ ID NO: 51170 - RNA, 21 nt, synthetic construct
  source 1..21: mol_type = other RNA
ctcaccaccctgagacccact

SEQ ID NO: 51171 - RNA, 21 nt, synthetic construct
  source 1..21: mol_type = other RNA
cactggcttccccagctccca

SEQ ID NO: 51172 - RNA, 21 nt, synthetic construct
  source 1..21: mol_type = other RNA
ctggcttccccagctcccact

SEQ ID NO: 51173 - RNA, 21 nt, synthetic construct
  source 1..21: mol_type = other RNA
tggcttccccagctcccactt

SEQ ID NO: 51174 - RNA, 21 nt, synthetic construct
  source 1..21: mol_type = other RNA
ggcttccccagctcccacttc

SEQ ID NO: 51175 - RNA, 21 nt, synthetic construct
  source 1..21: mol_type = other RNA
gcttccccagctcccacttct

SEQ ID NO: 51176 - RNA, 21 nt, synthetic construct
  source 1..21: mol_type = other RNA
tgcaatcagcactgtgacatt

SEQ ID NO: 51177 - RNA, 21 nt, synthetic construct
  source 1..21: mol_type = other RNA
cgcctgtcccacctccccacc

SEQ ID NO: 51178 - RNA, 21 nt, synthetic construct
  source 1..21: mol_type = other RNA
gcctgtcccacctccccaccg

SEQ ID NO: 51179 - RNA, 21 nt, synthetic construct
  source 1..21: mol_type = other RNA
tgtcccacctccccaccgcca

SEQ ID NO: 51180 - RNA, 21 nt, synthetic construct
  source 1..21: mol_type = other RNA
gtcccacctccccaccgccag

SEQ ID NO: 51181 - RNA, 21 nt, synthetic construct
  source 1..21: mol_type = other RNA
tcccacctccccaccgccagt

SEQ ID NO: 51182 - RNA, 21 nt, synthetic construct
  source 1..21: mol_type = other RNA
ccacctccccaccgccagtgt

SEQ ID NO: 51183 - RNA, 21 nt, synthetic construct
  source 1..21: mol_type = other RNA
tgtcctccgccccgctgtcct

SEQ ID NO: 51184 - RNA, 21 nt, synthetic construct
  source 1..21: mol_type = other RNA
ccgccccgctgtcctcgccct

SEQ ID NO: 51185 - RNA, 21 nt, synthetic construct
  source 1..21: mol_type = other RNA
ccgctgtcctcgccctcccct

SEQ ID NO: 51186 - RNA, 21 nt, synthetic construct
  source 1..21: mol_type = other RNA
gtcctcgccctcccctgcccc

SEQ ID NO: 51187 - RNA, 21 nt, synthetic construct
  source 1..21: mol_type = other RNA
tcctcgccctcccctgcccct

SEQ ID NO: 51188 - RNA, 21 nt, synthetic construct
  source 1..21: mol_type = other RNA
aatctcagcctctacctggac

SEQ ID NO: 51189 - RNA, 21 nt, synthetic construct
  source 1..21: mol_type = other RNA
acctggacaaccactactgca

SEQ ID NO: 51190 - RNA, 21 nt, synthetic construct
  source 1..21: mol_type = other RNA
acggcctctgccactgccgct

SEQ ID NO: 51191 - RNA, 21 nt, synthetic construct
  source 1..21: mol_type = other RNA
ggcctctgccactgccgctgc

SEQ ID NO: 51192 - RNA, 21 nt, synthetic construct
  source 1..21: mol_type = other RNA
gcctctgccactgccgctgcc

SEQ ID NO: 51193 - RNA, 21 nt, synthetic construct
  source 1..21: mol_type = other RNA
ctgccgctgccgcccgctgcc

SEQ ID NO: 51194 - RNA, 21 nt, synthetic construct
  source 1..21: mol_type = other RNA
ccgctgccgcccgctgccccc

SEQ ID NO: 51195 - RNA, 21 nt, synthetic construct
  source 1..21: mol_type = other RNA
gcccgctgcccccgcgccctc

SEQ ID NO: 51196 - RNA, 21 nt, synthetic construct
  source 1..21: mol_type = other RNA
ccgctgcccccgcgccctcag

SEQ ID NO: 51197 - RNA, 21 nt, synthetic construct
  source 1..21: mol_type = other RNA
tgcatgggaaggaggagggcc

SEQ ID NO: 51198 - RNA, 21 nt, synthetic construct
  source 1..21: mol_type = other RNA
gcatgggaaggaggagggcct

SEQ ID NO: 51199 - RNA, 21 nt, synthetic construct
  source 1..21: mol_type = other RNA
catgggaaggaggagggcctg

SEQ ID NO: 51200 - RNA, 21 nt, synthetic construct
  source 1..21: mol_type = other RNA
atgggaaggaggagggcctga

SEQ ID NO: 51201 - RNA, 21 nt, synthetic construct
  source 1..21: mol_type = other RNA
ggcgtgcttgtgtctgtgctg

SEQ ID NO: 51202 - RNA, 21 nt, synthetic construct
  source 1..21: mol_type = other RNA
gctggggaccaccaccatgcg

SEQ ID NO: 51203 - RNA, 21 nt, synthetic construct
  source 1..21: mol_type = other RNA
gcgtgtggacattcctgccct

SEQ ID NO: 51204 - RNA, 21 nt, synthetic construct
  source 1..21: mol_type = other RNA
tggccaagtcttccaggcccg

SEQ ID NO: 51205 - RNA, 21 nt, synthetic construct
  source 1..21: mol_type = other RNA
caagtcttccaggcccggctg

SEQ ID NO: 51206 - RNA, 21 nt, synthetic construct
  source 1..21: mol_type = other RNA
tgctgggccccgactggcaca

SEQ ID NO: 51207 - RNA, 21 nt, synthetic construct
  source 1..21: mol_type = other RNA
gcacaccccccactgccagcc

SEQ ID NO: 51208 - RNA, 21 nt, synthetic construct
  source 1..21: mol_type = other RNA
accccccactgccagccccgc

SEQ ID NO: 51209 - RNA, 21 nt, synthetic construct
  source 1..21: mol_type = other RNA
cccccactgccagccccgcag

SEQ ID NO: 51210 - RNA, 21 nt, synthetic construct
  source 1..21: mol_type = other RNA
cacccacccccaccccatgcc

SEQ ID NO: 51211 - RNA, 21 nt, synthetic construct
  source 1..21: mol_type = other RNA
cccacccccaccccatgccca

SEQ ID NO: 51212 - RNA, 21 nt, synthetic construct
  source 1..21: mol_type = other RNA
ccaccccatgcccaccacagc

SEQ ID NO: 51213 - RNA, 21 nt, synthetic construct
  source 1..21: mol_type = other RNA
cccatgcccaccacagccgct

SEQ ID NO: 51214 - RNA, 21 nt, synthetic construct
  source 1..21: mol_type = other RNA
ccatgcccaccacagccgctc

SEQ ID NO: 51215 - RNA, 21 nt, synthetic construct
  source 1..21: mol_type = other RNA
gagccaggtctttgctgagtg

SEQ ID NO: 51216 - RNA, 21 nt, synthetic construct
  source 1..21: mol_type = other RNA
agccaggtctttgctgagtgc

SEQ ID NO: 51217 - RNA, 21 nt, synthetic construct
  source 1..21: mol_type = other RNA
ccctgccagagcctggaggct

SEQ ID NO: 51218 - RNA, 21 nt, synthetic construct
  source 1..21: mol_type = other RNA
ggaaccagagcccacagctgg

SEQ ID NO: 51219 - RNA, 21 nt, synthetic construct
  source 1..21: mol_type = other RNA
gaaccagagcccacagctgga

SEQ ID NO: 51220 - RNA, 21 nt, synthetic construct
  source 1..21: mol_type = other RNA
aaccagagcccacagctggag

SEQ ID NO: 51221 - RNA, 21 nt, synthetic construct
  source 1..21: mol_type = other RNA
accagagcccacagctggagg

SEQ ID NO: 51222 - RNA, 21 nt, synthetic construct
  source 1..21: mol_type = other RNA
acagctggaggggatggcgga

SEQ ID NO: 51223 - RNA, 21 nt, synthetic construct
  source 1..21: mol_type = other RNA
agctggaggggatggcggagg

SEQ ID NO: 51224 - RNA, 21 nt, synthetic construct
  source 1..21: mol_type = other RNA
gctgcttctgccctgaggacc

SEQ ID NO: 51225 - RNA, 21 nt, synthetic construct
  source 1..21: mol_type = other RNA
cttctgccctgaggaccagat

SEQ ID NO: 51226 - RNA, 21 nt, synthetic construct
  source 1..21: mol_type = other RNA
tctgccctgaggaccagatcc

SEQ ID NO: 51227 - RNA, 21 nt, synthetic construct
  source 1..21: mol_type = other RNA
caggcctgcccctgcgtggga

SEQ ID NO: 51228 - RNA, 21 nt, synthetic construct
  source 1..21: mol_type = other RNA
ggcctgcccctgcgtgggacc

SEQ ID NO: 51229 - RNA, 21 nt, synthetic construct
  source 1..21: mol_type = other RNA
gtcagcaactgccagtcctgc

SEQ ID NO: 51230 - RNA, 21 nt, synthetic construct
  source 1..21: mol_type = other RNA
acgcccagggtcagcccccgc

SEQ ID NO: 51231 - RNA, 21 nt, synthetic construct
  source 1..21: mol_type = other RNA
tgaccaggccccgggccgaga

SEQ ID NO: 51232 - RNA, 21 nt, synthetic construct
  source 1..21: mol_type = other RNA
caacacaaccacctgccccca

SEQ ID NO: 51233 - RNA, 21 nt, synthetic construct
  source 1..21: mol_type = other RNA
caaccacctgcccccagagcc

SEQ ID NO: 51234 - RNA, 21 nt, synthetic construct
  source 1..21: mol_type = other RNA
aaccacctgcccccagagcct

SEQ ID NO: 51235 - RNA, 21 nt, synthetic construct
  source 1..21: mol_type = other RNA
cacctgcccccagagcctgcc

SEQ ID NO: 51236 - RNA, 21 nt, synthetic construct
  source 1..21: mol_type = other RNA
cctgcccccagagcctgcctg

SEQ ID NO: 51237 - RNA, 21 nt, synthetic construct
  source 1..21: mol_type = other RNA
tgcccccagagcctgcctgtg

SEQ ID NO: 51238 - RNA, 21 nt, synthetic construct
  source 1..21: mol_type = other RNA
gtgcccgccagggcaggagtc

SEQ ID NO: 51239 - RNA, 21 nt, synthetic construct
  source 1..21: mol_type = other RNA
gcccgccagggcaggagtcca

SEQ ID NO: 51240 - RNA, 21 nt, synthetic construct
  source 1..21: mol_type = other RNA
agtccatctgcacccaggagg

SEQ ID NO: 51241 - RNA, 21 nt, synthetic construct
  source 1..21: mol_type = other RNA
gtccatctgcacccaggagga

SEQ ID NO: 51242 - RNA, 21 nt, synthetic construct
  source 1..21: mol_type = other RNA
ccatctgcacccaggaggagg

SEQ ID NO: 51243 - RNA, 21 nt, synthetic construct
  source 1..21: mol_type = other RNA
tctgcacccaggaggagggcg

SEQ ID NO: 51244 - RNA, 21 nt, synthetic construct
  source 1..21: mol_type = other RNA
tgcacccaggaggagggcgac

SEQ ID NO: 51245 - RNA, 21 nt, synthetic construct
  source 1..21: mol_type = other RNA
ccgctgcagacctcagctgtg

SEQ ID NO: 51246 - RNA, 21 nt, synthetic construct
  source 1..21: mol_type = other RNA
cgctgcagacctcagctgtgt

SEQ ID NO: 51247 - RNA, 21 nt, synthetic construct
  source 1..21: mol_type = other RNA
ccttcccaggcgcccttccct

SEQ ID NO: 51248 - RNA, 21 nt, synthetic construct
  source 1..21: mol_type = other RNA
ctacctgtccccagggctttg

SEQ ID NO: 51249 - RNA, 21 nt, synthetic construct
  source 1..21: mol_type = other RNA
ctgtccccagggctttgagta

SEQ ID NO: 51250 - RNA, 21 nt, synthetic construct
  source 1..21: mol_type = other RNA
atggccagccagtccagctga

SEQ ID NO: 51251 - RNA, 21 nt, synthetic construct
  source 1..21: mol_type = other RNA
tcaacagccatgtggacaact

SEQ ID NO: 51252 - RNA, 21 nt, synthetic construct
  source 1..21: mol_type = other RNA
acctctgtgaggctgagggtg

SEQ ID NO: 51253 - RNA, 21 nt, synthetic construct
  source 1..21: mol_type = other RNA
ctctgtgaggctgagggtgga

SEQ ID NO: 51254 - RNA, 21 nt, synthetic construct
  source 1..21: mol_type = other RNA
tctgtgaggctgagggtggag

SEQ ID NO: 51255 - RNA, 21 nt, synthetic construct
  source 1..21: mol_type = other RNA
ctgtgaggctgagggtggagt

SEQ ID NO: 51256 - RNA, 21 nt, synthetic construct
  source 1..21: mol_type = other RNA
cctgcatcctgcccagatgtg

SEQ ID NO: 51257 - RNA, 21 nt, synthetic construct
  source 1..21: mol_type = other RNA
atgtgtccagctgcaggggga

SEQ ID NO: 51258 - RNA, 21 nt, synthetic construct
  source 1..21: mol_type = other RNA
agggctgcgagaccgaggtca

SEQ ID NO: 51259 - RNA, 21 nt, synthetic construct
  source 1..21: mol_type = other RNA
tgcgagggctcctgccccgga

SEQ ID NO: 51260 - RNA, 21 nt, synthetic construct
  source 1..21: mol_type = other RNA
gcgagggctcctgccccggag

SEQ ID NO: 51261 - RNA, 21 nt, synthetic construct
  source 1..21: mol_type = other RNA
tactcagcagaggcccaggcc

SEQ ID NO: 51262 - RNA, 21 nt, synthetic construct
  source 1..21: mol_type = other RNA
tgcacctgctgccaggagagg

SEQ ID NO: 51263 - RNA, 21 nt, synthetic construct
  source 1..21: mol_type = other RNA
ctgctgccaggagaggcgggt

SEQ ID NO: 51264 - RNA, 21 nt, synthetic construct
  source 1..21: mol_type = other RNA
acacccgtggcttcccggccc

SEQ ID NO: 51265 - RNA, 21 nt, synthetic construct
  source 1..21: mol_type = other RNA
cgtggcttcccggcccaggag

SEQ ID NO: 51266 - RNA, 21 nt, synthetic construct
  source 1..21: mol_type = other RNA
ggcttcccggcccaggaggcc

SEQ ID NO: 51267 - RNA, 21 nt, synthetic construct
  source 1..21: mol_type = other RNA
gcttcccggcccaggaggcca

SEQ ID NO: 51268 - RNA, 21 nt, synthetic construct
  source 1..21: mol_type = other RNA
cggcccaggaggccactgctg

SEQ ID NO: 51269 - RNA, 21 nt, synthetic construct
  source 1..21: mol_type = other RNA
ccaggaggccactgctgtctg

SEQ ID NO: 51270 - RNA, 21 nt, synthetic construct
  source 1..21: mol_type = other RNA
cgttctgcctccatccccatg

SEQ ID NO: 51271 - RNA, 21 nt, synthetic construct
  source 1..21: mol_type = other RNA
gtccacctggagccaggatgt

SEQ ID NO: 51272 - RNA, 21 nt, synthetic construct
  source 1..21: mol_type = other RNA
gcattgtctgatcatgaaaac

SEQ ID NO: 51273 - RNA, 21 nt, synthetic construct
  source 1..21: mol_type = other RNA
cattgtctgatcatgaaaacc

SEQ ID NO: 51274 - RNA, 21 nt, synthetic construct
  source 1..21: mol_type = other RNA
gggcctcctctgcggagcccc

SEQ ID NO: 51275 - RNA, 21 nt, synthetic construct
  source 1..21: mol_type = other RNA
cctcctctgcggagccccccg

SEQ ID NO: 51276 - RNA, 21 nt, synthetic construct
  source 1..21: mol_type = other RNA
ctctgcggagccccccggcct

SEQ ID NO: 51277 - RNA, 21 nt, synthetic construct
  source 1..21: mol_type = other RNA
tctgcggagccccccggcctg

SEQ ID NO: 51278 - RNA, 21 nt, synthetic construct
  source 1..21: mol_type = other RNA
ccccccggcctgtgtgtggca

SEQ ID NO: 51279 - RNA, 21 nt, synthetic construct
  source 1..21: mol_type = other RNA
cggccccagaagggtgagggg

SEQ ID NO: 51280 - RNA, 21 nt, synthetic construct
  source 1..21: mol_type = other RNA
agaagggtgaggggccagcag

SEQ ID NO: 51281 - RNA, 21 nt, synthetic construct
  source 1..21: mol_type = other RNA
gggccagcaggacccctttcg

SEQ ID NO: 51282 - RNA, 21 nt, synthetic construct
  source 1..21: mol_type = other RNA
ccttggccttgcccctccctg

SEQ ID NO: 51283 - RNA, 21 nt, synthetic construct
  source 1..21: mol_type = other RNA
cttggccttgcccctccctga

SEQ ID NO: 51284 - RNA, 21 nt, synthetic construct
  source 1..21: mol_type = other RNA
cacggccggagcgcccgcgca

SEQ ID NO: 51285 - RNA, 21 nt, synthetic construct
  source 1..21: mol_type = other RNA
aggctggtccaggcaaggcca

SEQ ID NO: 51286 - RNA, 21 nt, synthetic construct
  source 1..21: mol_type = other RNA
ggtccaggcaaggccagctgc

SEQ ID NO: 51287 - RNA, 21 nt, synthetic construct
  source 1..21: mol_type = other RNA
ggcaaggccagctgctgccag

SEQ ID NO: 51288 - RNA, 21 nt, synthetic construct
  source 1..21: mol_type = other RNA
gcaaggccagctgctgccagg

SEQ ID NO: 51289 - RNA, 21 nt, synthetic construct
  source 1..21: mol_type = other RNA
aaggccagctgctgccaggaa

SEQ ID NO: 51290 - RNA, 21 nt, synthetic construct
  source 1..21: mol_type = other RNA
gccagctgctgccaggaagct

SEQ ID NO: 51291 - RNA, 21 nt, synthetic construct
  source 1..21: mol_type = other RNA
agctgctgccaggaagctgcg

SEQ ID NO: 51292 - RNA, 21 nt, synthetic construct
  source 1..21: mol_type = other RNA
ctgctgccaggaagctgcgac

SEQ ID NO: 51293 - RNA, 21 nt, synthetic construct
  source 1..21: mol_type = other RNA
aggaagctgcgacaggcaagg

SEQ ID NO: 51294 - RNA, 21 nt, synthetic construct
  source 1..21: mol_type = other RNA
caggtcagagaggggtcagca

SEQ ID NO: 51295 - RNA, 21 nt, synthetic construct
  source 1..21: mol_type = other RNA
cagagaggggtcagcatccca

SEQ ID NO: 51296 - RNA, 21 nt, synthetic construct
  source 1..21: mol_type = other RNA
gcaaataaaccctgagcattg

SEQ ID NO: 51297 - RNA, 21 nt, synthetic construct
  source 1..21: mol_type = other RNA
acagccatgtggacaactgca

SEQ ID NO: 51298 - RNA, 21 nt, synthetic construct
  source 1..21: mol_type = other RNA
gtggaggccacgggcgcagcc

SEQ ID NO: 51299 - RNA, 21 nt, synthetic construct
  source 1..21: mol_type = other RNA
cagctccccctcccaaagtgc

SEQ ID NO: 51300 - RNA, 21 nt, synthetic construct
  source 1..21: mol_type = other RNA
cagctccccctcccaaagtgc

SEQ ID NO: 51301 - RNA, 21 nt, synthetic construct
  source 1..21: mol_type = other RNA
cagctccccctcccaaagtgc

SEQ ID NO: 51302 - RNA, 21 nt, synthetic construct
  source 1..21: mol_type = other RNA
actttgagacgtttgaaaacc

SEQ ID NO: 51303 - RNA, 21 nt, synthetic construct
  source 1..21: mol_type = other RNA
ccatggtgcatgggaaggagg

SEQ ID NO: 51304 - RNA, 21 nt, synthetic construct
  source 1..21: mol_type = other RNA
gacgtcctcgcccacccggcg

SEQ ID NO: 51305 - RNA, 21 nt, synthetic construct
  source 1..21: mol_type = other RNA
gccagagctgtaactgcacac

SEQ ID NO: 51306 - RNA, 21 nt, synthetic construct
  source 1..21: mol_type = other RNA
ctccagggacaactcccatcc

SEQ ID NO: 51307 - RNA, 21 nt, synthetic construct
  source 1..21: mol_type = other RNA
taagctgcctgggagcctctc

SEQ ID NO: 51308 - RNA, 21 nt, synthetic construct
  source 1..21: mol_type = other RNA
atcaccccagtgctgaccagc

SEQ ID NO: 51309 - RNA, 21 nt, synthetic construct
  source 1..21: mol_type = other RNA
acagccgcactggcctcctgg

SEQ ID NO: 51310 - RNA, 21 nt, synthetic construct
  source 1..21: mol_type = other RNA
ggtcagcatcccaaagccccc

SEQ ID NO: 51311 - RNA, 21 nt, synthetic construct
  source 1..21: mol_type = other RNA
tcccccggccagcaccacagc

SEQ ID NO: 51312 - RNA, 21 nt, synthetic construct
  source 1..21: mol_type = other RNA
gctctgtggccaccccctctt

SEQ ID NO: 51313 - RNA, 21 nt, synthetic construct
  source 1..21: mol_type = other RNA
caccccagtgctgaccagcac

SEQ ID NO: 51314 - RNA, 21 nt, synthetic construct
  source 1..21: mol_type = other RNA
ttacagccgcactggcctcct

SEQ ID NO: 51315 - RNA, 21 nt, synthetic construct
  source 1..21: mol_type = other RNA
acagccacccacgctggcccc

SEQ ID NO: 51316 - RNA, 21 nt, synthetic construct
  source 1..21: mol_type = other RNA
ctgcggagccccccggcctgt

SEQ ID NO: 51317 - RNA, 21 nt, synthetic construct
  source 1..21: mol_type = other RNA
cagccgcactggcctcctggt

SEQ ID NO: 51318 - RNA, 21 nt, synthetic construct
  source 1..21: mol_type = other RNA
cgctgccccacctgcccgtgt

SEQ ID NO: 51319 - RNA, 21 nt, synthetic construct
  source 1..21: mol_type = other RNA
ggcccaggctgcctgtgccaa

SEQ ID NO: 51320 - RNA, 21 nt, synthetic construct
  source 1..21: mol_type = other RNA
ggagctgggccagcaggtgga

SEQ ID NO: 51321 - RNA, 21 nt, synthetic construct
  source 1..21: mol_type = other RNA
cccggccccaggcaccagccc

SEQ ID NO: 51322 - RNA, 21 nt, synthetic construct
  source 1..21: mol_type = other RNA
ccaccaccacccaggccctgt

SEQ ID NO: 51323 - RNA, 21 nt, synthetic construct
  source 1..21: mol_type = other RNA
tcagctccagagccactccct

SEQ ID NO: 51324 - RNA, 21 nt, synthetic construct
  source 1..21: mol_type = other RNA
aggaccacagccacagccaca

SEQ ID NO: 51325 - RNA, 21 nt, synthetic construct
  source 1..21: mol_type = other RNA
cggagggctgcttctgccctg

SEQ ID NO: 51326 - RNA, 21 nt, synthetic construct
  source 1..21: mol_type = other RNA
ggcaccagccctcagccctcc

SEQ ID NO: 51327 - RNA, 21 nt, synthetic construct
  source 1..21: mol_type = other RNA
cttcccaggcgcccttccctg

SEQ ID NO: 51328 - RNA, 21 nt, synthetic construct
  source 1..21: mol_type = other RNA
acgggcggtccctgcccccca

SEQ ID NO: 51329 - RNA, 21 nt, synthetic construct
  source 1..21: mol_type = other RNA
cgggcggtccctgccccccag

SEQ ID NO: 51330 - RNA, 21 nt, synthetic construct
  source 1..21: mol_type = other RNA
tcagagaggggtcagcatccc

SEQ ID NO: 51331 - RNA, 21 nt, synthetic construct
  source 1..21: mol_type = other RNA
gctcccccacacacccgtggc

SEQ ID NO: 51332 - RNA, 21 nt, synthetic construct
  source 1..21: mol_type = other RNA
ctcccccacacacccgtggct

SEQ ID NO: 51333 - RNA, 21 nt, synthetic construct
  source 1..21: mol_type = other RNA
agacccactggcttccccagc

SEQ ID NO: 51334 - RNA, 21 nt, synthetic construct
  source 1..21: mol_type = other RNA
ggggcagacaggctggtccag

SEQ ID NO: 51335 - RNA, 21 nt, synthetic construct
  source 1..21: mol_type = other RNA
tgaccaccaccgccaccacac

SEQ ID NO: 51336 - RNA, 21 nt, synthetic construct
  source 1..21: mol_type = other RNA
tgaccaccaccgccaccacac

SEQ ID NO: 51337 - RNA, 21 nt, synthetic construct
  source 1..21: mol_type = other RNA
tgaccaccaccgccaccacac

SEQ ID NO: 51338 - RNA, 21 nt, synthetic construct
  source 1..21: mol_type = other RNA
tgaccaccaccgccaccacac

SEQ ID NO: 51339 - RNA, 21 nt, synthetic construct
  source 1..21: mol_type = other RNA
gggcggtccctgccccccagc

SEQ ID NO: 51340 - RNA, 21 nt, synthetic construct
  source 1..21: mol_type = other RNA
gagtcacccccttccccaggg

SEQ ID NO: 51341 - RNA, 21 nt, synthetic construct
  source 1..21: mol_type = other RNA
gtcacccccttccccagggac

SEQ ID NO: 51342 - RNA, 21 nt, synthetic construct
  source 1..21: mol_type = other RNA
aggcaccagccctcagccctc

SEQ ID NO: 51343 - RNA, 21 nt, synthetic construct
  source 1..21: mol_type = other RNA
cgagtcacccccttccccagg

SEQ ID NO: 51344 - RNA, 21 nt, synthetic construct
  source 1..21: mol_type = other RNA
acccggcccggctccctccct

SEQ ID NO: 51345 - RNA, 21 nt, synthetic construct
  source 1..21: mol_type = other RNA
cttcacagccaccccctcctc

SEQ ID NO: 51346 - RNA, 21 nt, synthetic construct
  source 1..21: mol_type = other RNA
cttcacagccaccccctcctc

SEQ ID NO: 51347 - RNA, 21 nt, synthetic construct
  source 1..21: mol_type = other RNA
cttcacagccaccccctcctc

SEQ ID NO: 51348 - RNA, 21 nt, synthetic construct
  source 1..21: mol_type = other RNA
cttcacagccaccccctcctc

SEQ ID NO: 51349 - RNA, 21 nt, synthetic construct
  source 1..21: mol_type = other RNA
gagacccactggcttccccag

SEQ ID NO: 51350 - RNA, 21 nt, synthetic construct
  source 1..21: mol_type = other RNA
tgccgctgccgcccgctgccc

SEQ ID NO: 51351 - RNA, 21 nt, synthetic construct
  source 1..21: mol_type = other RNA
ttgcaaggacatggccaagac

SEQ ID NO: 51352 - RNA, 21 nt, synthetic construct
  source 1..21: mol_type = other RNA
ctgccagccccgcagccccgg

SEQ ID NO: 51353 - RNA, 21 nt, synthetic construct
  source 1..21: mol_type = other RNA
agccccgcagccccggtgtct

SEQ ID NO: 51354 - RNA, 21 nt, synthetic construct
  source 1..21: mol_type = other RNA
tccagctcaggccccgtgacg

SEQ ID NO: 51355 - RNA, 21 nt, synthetic construct
  source 1..21: mol_type = other RNA
accccagcagcaaccaccggt

SEQ ID NO: 51356 - RNA, 21 nt, synthetic construct
  source 1..21: mol_type = other RNA
accccagcagcaaccaccggt

SEQ ID NO: 51357 - RNA, 21 nt, synthetic construct
  source 1..21: mol_type = other RNA
ccccagcagcctgccaacctt

SEQ ID NO: 51358 - RNA, 21 nt, synthetic construct
  source 1..21: mol_type = other RNA
ccctttccagccctcacccta

SEQ ID NO: 51359 - RNA, 21 nt, synthetic construct
  source 1..21: mol_type = other RNA
cccactgccagccccgcagcc

SEQ ID NO: 51360 - RNA, 21 nt, synthetic construct
  source 1..21: mol_type = other RNA
gagacccagggccctgtggag

SEQ ID NO: 51361 - RNA, 21 nt, synthetic construct
  source 1..21: mol_type = other RNA
ctcccccggccagcaccacag

SEQ ID NO: 51362 - RNA, 21 nt, synthetic construct
  source 1..21: mol_type = other RNA
gctccaccaccaacccctcct

SEQ ID NO: 51363 - RNA, 21 nt, synthetic construct
  source 1..21: mol_type = other RNA
gctccaccaccaacccctcct

SEQ ID NO: 51364 - RNA, 21 nt, synthetic construct
  source 1..21: mol_type = other RNA
gctccaccaccaacccctcct

SEQ ID NO: 51365 - RNA, 21 nt, synthetic construct
  source 1..21: mol_type = other RNA
gctccaccaccaacccctcct

SEQ ID NO: 51366 - RNA, 21 nt, synthetic construct
  source 1..21: mol_type = other RNA
gctccaccaccaacccctcct

SEQ ID NO: 51367 - RNA, 21 nt, synthetic construct
  source 1..21: mol_type = other RNA
ctgcgagggctcctgccccgg

SEQ ID NO: 51368 - RNA, 21 nt, synthetic construct
  source 1..21: mol_type = other RNA
ggatccacggccaccctgtcc

SEQ ID NO: 51369 - RNA, 21 nt, synthetic construct
  source 1..21: mol_type = other RNA
ccagagcccacagctggaggg

SEQ ID NO: 51370 - RNA, 21 nt, synthetic construct
  source 1..21: mol_type = other RNA
aggatggctgctgggccccga

SEQ ID NO: 51371 - RNA, 21 nt, synthetic construct
  source 1..21: mol_type = other RNA
acctgtggcctgtgtggggac

SEQ ID NO: 51372 - RNA, 21 nt, synthetic construct
  source 1..21: mol_type = other RNA
gcgcgcagctctgcgaggacc

SEQ ID NO: 51373 - RNA, 21 nt, synthetic construct
  source 1..21: mol_type = other RNA
cacctgcacctgcaggaaccg

SEQ ID NO: 51374 - RNA, 21 nt, synthetic construct
  source 1..21: mol_type = other RNA
gcaccagccctcagccctccc

SEQ ID NO: 51375 - RNA, 21 nt, synthetic construct
  source 1..21: mol_type = other RNA
cccggccagcaccacagcagt

SEQ ID NO: 51376 - RNA, 21 nt, synthetic construct
  source 1..21: mol_type = other RNA
aacaccaccaccagccagggc

SEQ ID NO: 51377 - RNA, 21 nt, synthetic construct
  source 1..21: mol_type = other RNA
agactgcccacacctccacag

SEQ ID NO: 51378 - RNA, 21 nt, synthetic construct
  source 1..21: mol_type = other RNA
gactgcccacacctccacagt

SEQ ID NO: 51379 - RNA, 21 nt, synthetic construct
  source 1..21: mol_type = other RNA
ccccctcctccaccccaggaa

SEQ ID NO: 51380 - RNA, 21 nt, synthetic construct
  source 1..21: mol_type = other RNA
cctttccagccctcaccctag

SEQ ID NO: 51381 - RNA, 21 nt, synthetic construct
  source 1..21: mol_type = other RNA
ccacaccacggccacctccag

SEQ ID NO: 51382 - RNA, 21 nt, synthetic construct
  source 1..21: mol_type = other RNA
ccaggaccacagccacggcca

SEQ ID NO: 51383 - RNA, 21 nt, synthetic construct
  source 1..21: mol_type = other RNA
agccatcccctcctcctccct

SEQ ID NO: 51384 - RNA, 21 nt, synthetic construct
  source 1..21: mol_type = other RNA
gccatcccctcctcctccctg

SEQ ID NO: 51385 - RNA, 21 nt, synthetic construct
  source 1..21: mol_type = other RNA
ctcctccactccagagactgt

SEQ ID NO: 51386 - RNA, 21 nt, synthetic construct
  source 1..21: mol_type = other RNA
ccccctcctccaccccaggaa

SEQ ID NO: 51387 - RNA, 21 nt, synthetic construct
  source 1..21: mol_type = other RNA
gatccctgtcccccagcagtc

SEQ ID NO: 51388 - RNA, 21 nt, synthetic construct
  source 1..21: mol_type = other RNA
ccactggccccacggccaccc

SEQ ID NO: 51389 - RNA, 21 nt, synthetic construct
  source 1..21: mol_type = other RNA
ccccctcctccaccccaggaa

SEQ ID NO: 51390 - RNA, 21 nt, synthetic construct
  source 1..21: mol_type = other RNA
agccatcccctcctcctccct

SEQ ID NO: 51391 - RNA, 21 nt, synthetic construct
  source 1..21: mol_type = other RNA
gccatcccctcctcctccctg

SEQ ID NO: 51392 - RNA, 21 nt, synthetic construct
  source 1..21: mol_type = other RNA
agactgcccacacctccacag

SEQ ID NO: 51393 - RNA, 21 nt, synthetic construct
  source 1..21: mol_type = other RNA
gactgcccacacctccacagt

SEQ ID NO: 51394 - RNA, 21 nt, synthetic construct
  source 1..21: mol_type = other RNA
gatccctgtcccccagcagtc

SEQ ID NO: 51395 - RNA, 21 nt, synthetic construct
  source 1..21: mol_type = other RNA
ccacaccacggccacctccag

SEQ ID NO: 51396 - RNA, 21 nt, synthetic construct
  source 1..21: mol_type = other RNA
catcccctcctccacccttgg

SEQ ID NO: 51397 - RNA, 21 nt, synthetic construct
  source 1..21: mol_type = other RNA
ccactggccccacggccaccc

SEQ ID NO: 51398 - RNA, 21 nt, synthetic construct
  source 1..21: mol_type = other RNA
agccatcccctcctcctccct

SEQ ID NO: 51399 - RNA, 21 nt, synthetic construct
  source 1..21: mol_type = other RNA
gccatcccctcctcctccctg

SEQ ID NO: 51400 - RNA, 21 nt, synthetic construct
  source 1..21: mol_type = other RNA
ctcctccactccagagactgt

SEQ ID NO: 51401 - RNA, 21 nt, synthetic construct
  source 1..21: mol_type = other RNA
ccccctcctccaccccaggaa

SEQ ID NO: 51402 - RNA, 21 nt, synthetic construct
  source 1..21: mol_type = other RNA
gccgctgccgcccgctgcccc

SEQ ID NO: 51403 - RNA, 21 nt, synthetic construct
  source 1..21: mol_type = other RNA
ccccactgccagccccgcagc

SEQ ID NO: 51404 - RNA, 21 nt, synthetic construct
  source 1..21: mol_type = other RNA
ccactgccagccccgcagccc

SEQ ID NO: 51405 - RNA, 21 nt, synthetic construct
  source 1..21: mol_type = other RNA
cactgccagccccgcagcccc

SEQ ID NO: 51406 - RNA, 21 nt, synthetic construct
  source 1..21: mol_type = other RNA
cagagcccacagctggagggg

SEQ ID NO: 51407 - RNA, 21 nt, synthetic construct
  source 1..21: mol_type = other RNA
agagcccacagctggagggga

SEQ ID NO: 51408 - RNA, 21 nt, synthetic construct
  source 1..21: mol_type = other RNA
acctgcccccagagcctgcct

SEQ ID NO: 51409 - RNA, 21 nt, synthetic construct
  source 1..21: mol_type = other RNA
gagtgtggctcaccctgcacg

SEQ ID NO: 51410 - RNA, 21 nt, synthetic construct
  source 1..21: mol_type = other RNA
gccaccacacccacagtcacc

SEQ ID NO: 51411 - RNA, 21 nt, synthetic construct
  source 1..21: mol_type = other RNA
aacagccaacagagtcccccg

SEQ ID NO: 51412 - RNA, 21 nt, synthetic construct
  source 1..21: mol_type = other RNA
aggccactgctgtctgagaac

SEQ ID NO: 51413 - RNA, 21 nt, synthetic construct
  source 1..21: mol_type = other RNA
cagtccccaccctctcagaag

SEQ ID NO: 51414 - RNA, 21 nt, synthetic construct
  source 1..21: mol_type = other RNA
accatggccaccacacacggg

SEQ ID NO: 51415 - RNA, 21 nt, synthetic construct
  source 1..21: mol_type = other RNA
gcagggtaactcagggctgag

SEQ ID NO: 51416 - RNA, 21 nt, synthetic construct
  source 1..21: mol_type = other RNA
ctgctggacccaaagcctgtg

SEQ ID NO: 51417 - RNA, 21 nt, synthetic construct
  source 1..21: mol_type = other RNA
caccacacccacagtcaccag

SEQ ID NO: 51418 - RNA, 21 nt, synthetic construct
  source 1..21: mol_type = other RNA
gcagccaccagcagcacagtg

SEQ ID NO: 51419 - RNA, 21 nt, synthetic construct
  source 1..21: mol_type = other RNA
cctgtcccccagcagtcccca

SEQ ID NO: 51420 - RNA, 21 nt, synthetic construct
  source 1..21: mol_type = other RNA
gcagccaccagcagcacagtg

SEQ ID NO: 51421 - RNA, 21 nt, synthetic construct
  source 1..21: mol_type = other RNA
gcagccaccagcagcacagtg

SEQ ID NO: 51422 - RNA, 21 nt, synthetic construct
  source 1..21: mol_type = other RNA
cctgtcccccagcagtcccca

SEQ ID NO: 51423 - RNA, 21 nt, synthetic construct
  source 1..21: mol_type = other RNA
ccagagcctgcctgtgtgccc

SEQ ID NO: 51424 - RNA, 21 nt, synthetic construct
  source 1..21: mol_type = other RNA
gggcggggcccacatctccac

SEQ ID NO: 51425 - RNA, 21 nt, synthetic construct
  source 1..21: mol_type = other RNA
caccgccagtgtcctccgccc

SEQ ID NO: 51426 - RNA, 21 nt, synthetic construct
  source 1..21: mol_type = other RNA
agggctcctgccccggagcgt

SEQ ID NO: 51427 - RNA, 21 nt, synthetic construct
  source 1..21: mol_type = other RNA
gggcaccgcccagagcccggc

SEQ ID NO: 51428 - RNA, 21 nt, synthetic construct
  source 1..21: mol_type = other RNA
ggcggggcccacatctccacc

SEQ ID NO: 51429 - RNA, 21 nt, synthetic construct
  source 1..21: mol_type = other RNA
tccccctcctgcccggacgcc

SEQ ID NO: 51430 - RNA, 21 nt, synthetic construct
  source 1..21: mol_type = other RNA
ccctgggagagcctgtggccc

SEQ ID NO: 51431 - RNA, 21 nt, synthetic construct
  source 1..21: mol_type = other RNA
gtcccagcacagaccaccaca

SEQ ID NO: 51432 - RNA, 21 nt, synthetic construct
  source 1..21: mol_type = other RNA
ccctcctccacccttgggacc

SEQ ID NO: 51433 - RNA, 21 nt, synthetic construct
  source 1..21: mol_type = other RNA
gccaccacacccacagtcatc

SEQ ID NO: 51434 - RNA, 21 nt, synthetic construct
  source 1..21: mol_type = other RNA
gggctcctgccccggagcgtc

SEQ ID NO: 51435 - RNA, 21 nt, synthetic construct
  source 1..21: mol_type = other RNA
gccaccagcagcacagtgact

SEQ ID NO: 51436 - RNA, 21 nt, synthetic construct
  source 1..21: mol_type = other RNA
accccctcctccactccgggg

SEQ ID NO: 51437 - RNA, 21 nt, synthetic construct
  source 1..21: mol_type = other RNA
gccaccagcagcacagtgact

SEQ ID NO: 51438 - RNA, 21 nt, synthetic construct
  source 1..21: mol_type = other RNA
gccaccagcagcacagtgact

SEQ ID NO: 51439 - RNA, 21 nt, synthetic construct
  source 1..21: mol_type = other RNA
accccctcctccactccgggg

SEQ ID NO: 51440 - RNA, 21 nt, synthetic construct
  source 1..21: mol_type = other RNA
agaacagaccaccacacccat

SEQ ID NO: 51441 - RNA, 21 nt, synthetic construct
  source 1..21: mol_type = other RNA
agaacagaccaccacacccgt

SEQ ID NO: 51442 - RNA, 21 nt, synthetic construct
  source 1..21: mol_type = other RNA
agagcctgcctgtgtgcccgc

SEQ ID NO: 51443 - RNA, 21 nt, synthetic construct
  source 1..21: mol_type = other RNA
cagggtgtgcagcccccatgg

SEQ ID NO: 51444 - RNA, 21 nt, synthetic construct
  source 1..21: mol_type = other RNA
ctgtccacctggagccaggat

SEQ ID NO: 51445 - RNA, 21 nt, synthetic construct
  source 1..21: mol_type = other RNA
agctcctgcacctgctccggg

SEQ ID NO: 51446 - RNA, 21 nt, synthetic construct
  source 1..21: mol_type = other RNA
gcagacaggcctggggctgca

SEQ ID NO: 51447 - RNA, 21 nt, synthetic construct
  source 1..21: mol_type = other RNA
caccaccaccaccacccaggc

SEQ ID NO: 51448 - RNA, 21 nt, synthetic construct
  source 1..21: mol_type = other RNA
accccctcctccatcccgggg

SEQ ID NO: 51449 - RNA, 21 nt, synthetic construct
  source 1..21: mol_type = other RNA
ggccacctccaggaccacagc

SEQ ID NO: 51450 - RNA, 21 nt, synthetic construct
  source 1..21: mol_type = other RNA
ccacagccacggccacaccca

SEQ ID NO: 51451 - RNA, 21 nt, synthetic construct
  source 1..21: mol_type = other RNA
accccctcctccatcccgggg

SEQ ID NO: 51452 - RNA, 21 nt, synthetic construct
  source 1..21: mol_type = other RNA
gtccaccccctcctccactcc

SEQ ID NO: 51453 - RNA, 21 nt, synthetic construct
  source 1..21: mol_type = other RNA
accccctcctccatcccgggg

SEQ ID NO: 51454 - RNA, 21 nt, synthetic construct
  source 1..21: mol_type = other RNA
gtccaccccctcctccactcc

SEQ ID NO: 51455 - RNA, 21 nt, synthetic construct
  source 1..21: mol_type = other RNA
accccctcctccatcccgggg

SEQ ID NO: 51456 - RNA, 21 nt, synthetic construct
  source 1..21: mol_type = other RNA
cgctggggcagacaggctggt

SEQ ID NO: 51457 - RNA, 21 nt, synthetic construct
  source 1..21: mol_type = other RNA
accccggccaccagctctacg

SEQ ID NO: 51458 - RNA, 21 nt, synthetic construct
  source 1..21: mol_type = other RNA
accccggccaccagctctacg

SEQ ID NO: 51459 - RNA, 21 nt, synthetic construct
  source 1..21: mol_type = other RNA
accccggccaccagctctacg

SEQ ID NO: 51460 - RNA, 21 nt, synthetic construct
  source 1..21: mol_type = other RNA
accccggccaccagctctacg

SEQ ID NO: 51461 - RNA, 21 nt, synthetic construct
  source 1..21: mol_type = other RNA
ccctcagccctccctcagtgc

SEQ ID NO: 51462 - RNA, 21 nt, synthetic construct
  source 1..21: mol_type = other RNA
cacagaccaccacacccacgg

SEQ ID NO: 51463 - RNA, 21 nt, synthetic construct
  source 1..21: mol_type = other RNA
cacagaccaccacacccacgg

SEQ ID NO: 51464 - RNA, 21 nt, synthetic construct
  source 1..21: mol_type = other RNA
cacagaccaccacacccacgg

SEQ ID NO: 51465 - RNA, 21 nt, synthetic construct
  source 1..21: mol_type = other RNA
cacagaccaccacacccacgg

SEQ ID NO: 51466 - RNA, 21 nt, synthetic construct
  source 1..21: mol_type = other RNA
cacagaccaccacacccacgg

SEQ ID NO: 51467 - RNA, 21 nt, synthetic construct
  source 1..21: mol_type = other RNA
cggatgggagtgggggctgca

SEQ ID NO: 51468 - RNA, 21 nt, synthetic construct
  source 1..21: mol_type = other RNA
cgcctcctccacccaggcaac

SEQ ID NO: 51469 - RNA, 21 nt, synthetic construct
  source 1..21: mol_type = other RNA
cgcctcctccacccaggcaac

SEQ ID NO: 51470 - RNA, 21 nt, synthetic construct
  source 1..21: mol_type = other RNA
cgcctcctccacccaggcaac

SEQ ID NO: 51471 - RNA, 21 nt, synthetic construct
  source 1..21: mol_type = other RNA
tacagcctgccacctgcaact

SEQ ID NO: 51472 - RNA, 21 nt, synthetic construct
  source 1..21: mol_type = other RNA
gctggtccaggcaaggccagc

SEQ ID NO: 51473 - RNA, 21 nt, synthetic construct
  source 1..21: mol_type = other RNA
ccctgtgtgcacaacgaggcc

SEQ ID NO: 51474 - RNA, 21 nt, synthetic construct
  source 1..21: mol_type = other RNA
cacccacaaccagaggctcca

SEQ ID NO: 51475 - RNA, 21 nt, synthetic construct
  source 1..21: mol_type = other RNA
cacccacaaccagaggctcca

SEQ ID NO: 51476 - RNA, 21 nt, synthetic construct
  source 1..21: mol_type = other RNA
ctgcacggcctctgccactgc

SEQ ID NO: 51477 - RNA, 21 nt, synthetic construct
  source 1..21: mol_type = other RNA
ttccatgtccaccccctcctc

SEQ ID NO: 51478 - RNA, 21 nt, synthetic construct
  source 1..21: mol_type = other RNA
cctccttcacccttgggacca

SEQ ID NO: 51479 - RNA, 21 nt, synthetic construct
  source 1..21: mol_type = other RNA
ccctcctcctccctgggcacc

SEQ ID NO: 51480 - RNA, 21 nt, synthetic construct
  source 1..21: mol_type = other RNA
ccctcctcctccctgggcacc

SEQ ID NO: 51481 - RNA, 21 nt, synthetic construct
  source 1..21: mol_type = other RNA
ccctcctcctccctgggcacc

SEQ ID NO: 51482 - RNA, 21 nt, synthetic construct
  source 1..21: mol_type = other RNA
gcccacagctggaggggatgg

SEQ ID NO: 51483 - RNA, 21 nt, synthetic construct
  source 1..21: mol_type = other RNA
actgtccacacctccacagtg

SEQ ID NO: 51484 - RNA, 21 nt, synthetic construct
  source 1..21: mol_type = other RNA
actgtccacacctccacagtg

SEQ ID NO: 51485 - RNA, 21 nt, synthetic construct
  source 1..21: mol_type = other RNA
actgtccacacctccacagtg

SEQ ID NO: 51486 - RNA, 21 nt, synthetic construct
  source 1..21: mol_type = other RNA
ggccactgctgtctgagaacg

SEQ ID NO: 51487 - RNA, 21 nt, synthetic construct
  source 1..21: mol_type = other RNA
agtccccaccctctcagaagg

SEQ ID NO: 51488 - RNA, 21 nt, synthetic construct
  source 1..21: mol_type = other RNA
aggggctggtgctggaggcgt

SEQ ID NO: 51489 - RNA, 21 nt, synthetic construct
  source 1..21: mol_type = other RNA
tccccggccccaggcaccagc

SEQ ID NO: 51490 - RNA, 21 nt, synthetic construct
  source 1..21: mol_type = other RNA
gtccccaccctctcagaagga

SEQ ID NO: 51491 - RNA, 21 nt, synthetic construct
  source 1..21: mol_type = other RNA
tccccaccctctcagaaggac

SEQ ID NO: 51492 - RNA, 21 nt, synthetic construct
  source 1..21: mol_type = other RNA
gccaccggctccaccaccaac

SEQ ID NO: 51493 - RNA, 21 nt, synthetic construct
  source 1..21: mol_type = other RNA
gccaccggctccaccaccaac

SEQ ID NO: 51494 - RNA, 21 nt, synthetic construct
  source 1..21: mol_type = other RNA
gatcctcacagagcccagcac

SEQ ID NO: 51495 - RNA, 21 nt, synthetic construct
  source 1..21: mol_type = other RNA
agagccactccctcctccagt

SEQ ID NO: 51496 - RNA, 21 nt, synthetic construct
  source 1..21: mol_type = other RNA
agccatcccctcttcctccct

SEQ ID NO: 51497 - RNA, 21 nt, synthetic construct
  source 1..21: mol_type = other RNA
gccaccggctccaccaccaac

SEQ ID NO: 51498 - RNA, 21 nt, synthetic construct
  source 1..21: mol_type = other RNA
gccaccggctccaccaccaac

SEQ ID NO: 51499 - RNA, 21 nt, synthetic construct
  source 1..21: mol_type = other RNA
atcccctcctccacccttggg

SEQ ID NO: 51500 - RNA, 21 nt, synthetic construct
  source 1..21: mol_type = other RNA
gccaccggctccaccaccaac

SEQ ID NO: 51501 - RNA, 21 nt, synthetic construct
  source 1..21: mol_type = other RNA
ccgcccgctgcccccgcgccc

SEQ ID NO: 51502 - RNA, 21 nt, synthetic construct
  source 1..21: mol_type = other RNA
aagtcttccaggcccggctgc

SEQ ID NO: 51503 - RNA, 21 nt, synthetic construct
  source 1..21: mol_type = other RNA
gcccccagagcctgcctgtgt

SEQ ID NO: 51504 - RNA, 21 nt, synthetic construct
  source 1..21: mol_type = other RNA
tgcacacctacacccacgtgg

SEQ ID NO: 51505 - RNA, 21 nt, synthetic construct
  source 1..21: mol_type = other RNA
cagtgctgacaagcacagcca

SEQ ID NO: 51506 - RNA, 21 nt, synthetic construct
  source 1..21: mol_type = other RNA
cagtgctgacaagcacagcca

SEQ ID NO: 51507 - RNA, 21 nt, synthetic construct
  source 1..21: mol_type = other RNA
cagtgctgacaagcacagcca

SEQ ID NO: 51508 - RNA, 21 nt, synthetic construct
  source 1..21: mol_type = other RNA
ccctcctcaactcctgggaca

SEQ ID NO: 51509 - RNA, 21 nt, synthetic construct
  source 1..21: mol_type = other RNA
gcaaccttcccaggcgccctt

SEQ ID NO: 51510 - RNA, 21 nt, synthetic construct
  source 1..21: mol_type = other RNA
tcacagagccttccacggtga

SEQ ID NO: 51511 - RNA, 21 nt, synthetic construct
  source 1..21: mol_type = other RNA
tcacagagccttccacggtga

SEQ ID NO: 51512 - RNA, 21 nt, synthetic construct
  source 1..21: mol_type = other RNA
tgtgcagcccccatggtgtac

SEQ ID NO: 51513 - RNA, 21 nt, synthetic construct
  source 1..21: mol_type = other RNA
agctccagagccactccctcc

SEQ ID NO: 51514 - RNA, 21 nt, synthetic construct
  source 1..21: mol_type = other RNA
tccggccgctggggcagacag

SEQ ID NO: 51515 - RNA, 21 nt, synthetic construct
  source 1..21: mol_type = other RNA
aacccagaccacagcaaccga

SEQ ID NO: 51516 - RNA, 21 nt, synthetic construct
  source 1..21: mol_type = other RNA
gaagtgcccacccagccagcc

SEQ ID NO: 51517 - RNA, 21 nt, synthetic construct
  source 1..21: mol_type = other RNA
gtgctggaggcgtccaacggc

SEQ ID NO: 51518 - RNA, 21 nt, synthetic construct
  source 1..21: mol_type = other RNA
ggaactgggagcaggagggcg

SEQ ID NO: 51519 - RNA, 21 nt, synthetic construct
  source 1..21: mol_type = other RNA
tcccggcccaggaggccactg

SEQ ID NO: 51520 - RNA, 21 nt, synthetic construct
  source 1..21: mol_type = other RNA
tcacagagccttccacgggga

SEQ ID NO: 51521 - RNA, 21 nt, synthetic construct
  source 1..21: mol_type = other RNA
tcacagagccttccacgggga

SEQ ID NO: 51522 - RNA, 21 nt, synthetic construct
  source 1..21: mol_type = other RNA
ggggtgacttccactacaaga

SEQ ID NO: 51523 - RNA, 21 nt, synthetic construct
  source 1..21: mol_type = other RNA
cagctcctgcacctgctccgg

SEQ ID NO: 51524 - RNA, 21 nt, synthetic construct
  source 1..21: mol_type = other RNA
ctgctggtgcagctggtgcca

SEQ ID NO: 51525 - RNA, 21 nt, synthetic construct
  source 1..21: mol_type = other RNA
gaccaccaccgccaccacacc

SEQ ID NO: 51526 - RNA, 21 nt, synthetic construct
  source 1..21: mol_type = other RNA
ccgcctcctccacccaggcaa

SEQ ID NO: 51527 - RNA, 21 nt, synthetic construct
  source 1..21: mol_type = other RNA
gaccaccaccgccaccacacc

SEQ ID NO: 51528 - RNA, 21 nt, synthetic construct
  source 1..21: mol_type = other RNA
gaccaccaccgccaccacacc

SEQ ID NO: 51529 - RNA, 21 nt, synthetic construct
  source 1..21: mol_type = other RNA
ccgcctcctccacccaggcaa

SEQ ID NO: 51530 - RNA, 21 nt, synthetic construct
  source 1..21: mol_type = other RNA
gaccaccaccgccaccacacc

SEQ ID NO: 51531 - RNA, 21 nt, synthetic construct
  source 1..21: mol_type = other RNA
ccgcctcctccacccaggcaa

SEQ ID NO: 51532 - RNA, 21 nt, synthetic construct
  source 1..21: mol_type = other RNA
agagggccgggtggggaccca

SEQ ID NO: 51533 - RNA, 21 nt, synthetic construct
  source 1..21: mol_type = other RNA
cagggacgacctggatcctca

SEQ ID NO: 51534 - RNA, 21 nt, synthetic construct
  source 1..21: mol_type = other RNA
agcagaggcccaggccatgca

SEQ ID NO: 51535 - RNA, 21 nt, synthetic construct
  source 1..21: mol_type = other RNA
acttcccacaccccagcagca

SEQ ID NO: 51536 - RNA, 21 nt, synthetic construct
  source 1..21: mol_type = other RNA
acttcccacaccccagcagca

SEQ ID NO: 51537 - RNA, 21 nt, synthetic construct
  source 1..21: mol_type = other RNA
acttcccacaccccagcagca

SEQ ID NO: 51538 - RNA, 21 nt, synthetic construct
  source 1..21: mol_type = other RNA
cggctccctccctgcccgtcc

SEQ ID NO: 51539 - RNA, 21 nt, synthetic construct
  source 1..21: mol_type = other RNA
agcccccaggatgggtgcccc

SEQ ID NO: 51540 - RNA, 21 nt, synthetic construct
  source 1..21: mol_type = other RNA
cctgctggagctggatcccaa

SEQ ID NO: 51541 - RNA, 21 nt, synthetic construct
  source 1..21: mol_type = other RNA
ctggggctgcagctgctggtg

SEQ ID NO: 51542 - RNA, 21 nt, synthetic construct
  source 1..21: mol_type = other RNA
ggatgggagtgggggctgcat

SEQ ID NO: 51543 - RNA, 21 nt, synthetic construct
  source 1..21: mol_type = other RNA
ccatcccctcttcctccctgg

SEQ ID NO: 51544 - RNA, 21 nt, synthetic construct
  source 1..21: mol_type = other RNA
tcacagaccaccacacccacg

SEQ ID NO: 51545 - RNA, 21 nt, synthetic construct
  source 1..21: mol_type = other RNA
ggccaccatgtccacagccac

SEQ ID NO: 51546 - RNA, 21 nt, synthetic construct
  source 1..21: mol_type = other RNA
tgtccacagccacaccctcct

SEQ ID NO: 51547 - RNA, 21 nt, synthetic construct
  source 1..21: mol_type = other RNA
gtccacagccacaccctcctc

SEQ ID NO: 51548 - RNA, 21 nt, synthetic construct
  source 1..21: mol_type = other RNA
cgtgcccaggcccagcctggt

SEQ ID NO: 51549 - RNA, 21 nt, synthetic construct
  source 1..21: mol_type = other RNA
caccgcctcctccacccaggc

SEQ ID NO: 51550 - RNA, 21 nt, synthetic construct
  source 1..21: mol_type = other RNA
tcacagaccaccacacccacg

SEQ ID NO: 51551 - RNA, 21 nt, synthetic construct
  source 1..21: mol_type = other RNA
ggccaccatgtccacagccac

SEQ ID NO: 51552 - RNA, 21 nt, synthetic construct
  source 1..21: mol_type = other RNA
tgtccacagccacaccctcct

SEQ ID NO: 51553 - RNA, 21 nt, synthetic construct
  source 1..21: mol_type = other RNA
gtccacagccacaccctcctc

SEQ ID NO: 51554 - RNA, 21 nt, synthetic construct
  source 1..21: mol_type = other RNA
cttcccacaccccagcagcaa

SEQ ID NO: 51555 - RNA, 21 nt, synthetic construct
  source 1..21: mol_type = other RNA
cgtgcccaggcccagcctggt

SEQ ID NO: 51556 - RNA, 21 nt, synthetic construct
  source 1..21: mol_type = other RNA
ccatcccctcttcctccctgg

SEQ ID NO: 51557 - RNA, 21 nt, synthetic construct
  source 1..21: mol_type = other RNA
tcacagaccaccacacccacg

SEQ ID NO: 51558 - RNA, 21 nt, synthetic construct
  source 1..21: mol_type = other RNA
ggccaccatgtccacagccac

SEQ ID NO: 51559 - RNA, 21 nt, synthetic construct
  source 1..21: mol_type = other RNA
tgtccacagccacaccctcct

SEQ ID NO: 51560 - RNA, 21 nt, synthetic construct
  source 1..21: mol_type = other RNA
gtccacagccacaccctcctc

SEQ ID NO: 51561 - RNA, 21 nt, synthetic construct
  source 1..21: mol_type = other RNA
tccacagccacaccctcctct

SEQ ID NO: 51562 - RNA, 21 nt, synthetic construct
  source 1..21: mol_type = other RNA
cttcccacaccccagcagcaa

SEQ ID NO: 51563 - RNA, 21 nt, synthetic construct
  source 1..21: mol_type = other RNA
cgtgcccaggcccagcctggt

SEQ ID NO: 51564 - RNA, 21 nt, synthetic construct
  source 1..21: mol_type = other RNA
caccgcctcctccacccaggc

SEQ ID NO: 51565 - RNA, 21 nt, synthetic construct
  source 1..21: mol_type = other RNA
tcacagaccaccacacccacg

SEQ ID NO: 51566 - RNA, 21 nt, synthetic construct
  source 1..21: mol_type = other RNA
ggccaccatgtccacagccac

SEQ ID NO: 51567 - RNA, 21 nt, synthetic construct
  source 1..21: mol_type = other RNA
tgtccacagccacaccctcct

SEQ ID NO: 51568 - RNA, 21 nt, synthetic construct
  source 1..21: mol_type = other RNA
gtccacagccacaccctcctc

SEQ ID NO: 51569 - RNA, 21 nt, synthetic construct
  source 1..21: mol_type = other RNA
cccctcttccaccccaggaac

SEQ ID NO: 51570 - RNA, 21 nt, synthetic construct
  source 1..21: mol_type = other RNA
cttcccacaccccagcagcaa

SEQ ID NO: 51571 - RNA, 21 nt, synthetic construct
  source 1..21: mol_type = other RNA
cgtgcccaggcccagcctggt

SEQ ID NO: 51572 - RNA, 21 nt, synthetic construct
  source 1..21: mol_type = other RNA
caccgcctcctccacccaggc

SEQ ID NO: 51573 - RNA, 21 nt, synthetic construct
  source 1..21: mol_type = other RNA
tcacagaccaccacacccacg

SEQ ID NO: 51574 - RNA, 21 nt, synthetic construct
  source 1..21: mol_type = other RNA
ggccaccatgtccacagccac

SEQ ID NO: 51575 - RNA, 21 nt, synthetic construct
  source 1..21: mol_type = other RNA
tgtccacagccacaccctcct

SEQ ID NO: 51576 - RNA, 21 nt, synthetic construct
  source 1..21: mol_type = other RNA
gtccacagccacaccctcctc

SEQ ID NO: 51577 - RNA, 21 nt, synthetic construct
  source 1..21: mol_type = other RNA
gcacagaccaccacacccatg

SEQ ID NO: 51578 - RNA, 21 nt, synthetic construct
  source 1..21: mol_type = other RNA
ccactggcttccccagctccc

SEQ ID NO: 51579 - RNA, 21 nt, synthetic construct
  source 1..21: mol_type = other RNA
cctgctggacccaaagcctgt

SEQ ID NO: 51580 - RNA, 21 nt, synthetic construct
  source 1..21: mol_type = other RNA
tgtgctggggaccaccaccat

SEQ ID NO: 51581 - RNA, 21 nt, synthetic construct
  source 1..21: mol_type = other RNA
actgccagccccgcagccccg

SEQ ID NO: 51582 - RNA, 21 nt, synthetic construct
  source 1..21: mol_type = other RNA
ctcagcagaggcccaggccat

SEQ ID NO: 51583 - RNA, 21 nt, synthetic construct
  source 1..21: mol_type = other RNA
agccctcagccctccctcagt

SEQ ID NO: 51584 - RNA, 21 nt, synthetic construct
  source 1..21: mol_type = other RNA
cagcagaggcccaggccatgc

SEQ ID NO: 51585 - RNA, 21 nt, synthetic construct
  source 1..21: mol_type = other RNA
accgcctcctccacccaggca

SEQ ID NO: 51586 - RNA, 21 nt, synthetic construct
  source 1..21: mol_type = other RNA
accgcctcctccacccaggca

SEQ ID NO: 51587 - RNA, 21 nt, synthetic construct
  source 1..21: mol_type = other RNA
agtcacccccttccccaggga

SEQ ID NO: 51588 - RNA, 21 nt, synthetic construct
  source 1..21: mol_type = other RNA
accgcctcctccacccaggca

SEQ ID NO: 51589 - RNA, 21 nt, synthetic construct
  source 1..21: mol_type = other RNA
cgatccctgtcccccagcagt

SEQ ID NO: 51590 - RNA, 21 nt, synthetic construct
  source 1..21: mol_type = other RNA
acagccacagccacacccagc

SEQ ID NO: 51591 - RNA, 21 nt, synthetic construct
  source 1..21: mol_type = other RNA
cagccacagccacacccagca

SEQ ID NO: 51592 - RNA, 21 nt, synthetic construct
  source 1..21: mol_type = other RNA
cgatccctgtcccccagcagt

SEQ ID NO: 51593 - RNA, 21 nt, synthetic construct
  source 1..21: mol_type = other RNA
actacaagggcagggtctgcg

SEQ ID NO: 51594 - RNA, 21 nt, synthetic construct
  source 1..21: mol_type = other RNA
gtgtgagtggacagagtggtt

SEQ ID NO: 51595 - RNA, 21 nt, synthetic construct
  source 1..21: mol_type = other RNA
ctacaagggcagggtctgcgg

SEQ ID NO: 51596 - RNA, 21 nt, synthetic construct
  source 1..21: mol_type = other RNA
gtaccaccacctgccagcccc

SEQ ID NO: 51597 - RNA, 21 nt, synthetic construct
  source 1..21: mol_type = other RNA
ccgtctgtgagcagcccctgg

SEQ ID NO: 51598 - RNA, 21 nt, synthetic construct
  source 1..21: mol_type = other RNA
ccgtctgtgagcagcccctgg

SEQ ID NO: 51599 - RNA, 21 nt, synthetic construct
  source 1..21: mol_type = other RNA
ccgtctgtgagcagcccctgg

SEQ ID NO: 51600 - RNA, 21 nt, synthetic construct
  source 1..21: mol_type = other RNA
gtactacgaggcctgcgtgaa

SEQ ID NO: 51601 - RNA, 21 nt, synthetic construct
  source 1..21: mol_type = other RNA
tcaaggcccaggggctggtgc

SEQ ID NO: 51602 - RNA, 21 nt, synthetic construct
  source 1..21: mol_type = other RNA
ctggagggacggcgtctgcac

SEQ ID NO: 51603 - RNA, 21 nt, synthetic construct
  source 1..21: mol_type = other RNA
gtctgtgagcagcccctgggc

SEQ ID NO: 51604 - RNA, 21 nt, synthetic construct
  source 1..21: mol_type = other RNA
gtctgtgagcagcccctgggc

SEQ ID NO: 51605 - RNA, 21 nt, synthetic construct
  source 1..21: mol_type = other RNA
gtctgtgagcagcccctgggc

SEQ ID NO: 51606 - RNA, 21 nt, synthetic construct
  source 1..21: mol_type = other RNA
gtctgtgagcagcccctgggc

SEQ ID NO: 51607 - RNA, 21 nt, synthetic construct
  source 1..21: mol_type = other RNA
gacggctgcttctgcccccca

SEQ ID NO: 51608 - RNA, 21 nt, synthetic construct
  source 1..21: mol_type = other RNA
ccagaagcagtgcagcatcct

SEQ ID NO: 51609 - RNA, 21 nt, synthetic construct
  source 1..21: mol_type = other RNA
ggacgtgggctgtttcagcac

SEQ ID NO: 51610 - RNA, 21 nt, synthetic construct
  source 1..21: mol_type = other RNA
caagtacatgcagaactgccc

SEQ ID NO: 51611 - RNA, 21 nt, synthetic construct
  source 1..21: mol_type = other RNA
caggaaaaccggctgctgcta

SEQ ID NO: 51612 - RNA, 21 nt, synthetic construct
  source 1..21: mol_type = other RNA
tccacccgtcactgtcttccc

SEQ ID NO: 51613 - RNA, 21 nt, synthetic construct
  source 1..21: mol_type = other RNA
gggagcctcaggaaaaccggc

SEQ ID NO: 51614 - RNA, 21 nt, synthetic construct
  source 1..21: mol_type = other RNA
gcgggcctgtgtgtgtcctgg

SEQ ID NO: 51615 - RNA, 21 nt, synthetic construct
  source 1..21: mol_type = other RNA
gggcctgtgtgtgtcctggcg

SEQ ID NO: 51616 - RNA, 21 nt, synthetic construct
  source 1..21: mol_type = other RNA
cgtctgtgagcagcccctggg

SEQ ID NO: 51617 - RNA, 21 nt, synthetic construct
  source 1..21: mol_type = other RNA
cgtctgtgagcagcccctggg

SEQ ID NO: 51618 - RNA, 21 nt, synthetic construct
  source 1..21: mol_type = other RNA
cgtctgtgagcagcccctggg

SEQ ID NO: 51619 - RNA, 21 nt, synthetic construct
  source 1..21: mol_type = other RNA
gcggagcgaggactgcctgtg

SEQ ID NO: 51620 - RNA, 21 nt, synthetic construct
  source 1..21: mol_type = other RNA
ggacccctgcacggccaaccc

SEQ ID NO: 51621 - RNA, 21 nt, synthetic construct
  source 1..21: mol_type = other RNA
ccaaccccttccgcaagtcct

SEQ ID NO: 51622 - RNA, 21 nt, synthetic construct
  source 1..21: mol_type = other RNA
cggagcgaggactgcctgtgc

SEQ ID NO: 51623 - RNA, 21 nt, synthetic construct
  source 1..21: mol_type = other RNA
actgcaacacctgcacctgca

SEQ ID NO: 51624 - RNA, 21 nt, synthetic construct
  source 1..21: mol_type = other RNA
aaggccatcaagctcttcgtg

SEQ ID NO: 51625 - RNA, 21 nt, synthetic construct
  source 1..21: mol_type = other RNA
tgcacggccaaccccttccgc

SEQ ID NO: 51626 - RNA, 21 nt, synthetic construct
  source 1..21: mol_type = other RNA
ttccgcaagtcctgggcccag

SEQ ID NO: 51627 - RNA, 21 nt, synthetic construct
  source 1..21: mol_type = other RNA
tccgcaagtcctgggcccaga

SEQ ID NO: 51628 - RNA, 21 nt, synthetic construct
  source 1..21: mol_type = other RNA
cgggcctgtgtgtgtcctggc

SEQ ID NO: 51629 - RNA, 21 nt, synthetic construct
  source 1..21: mol_type = other RNA
cctcctcagtcctcaccaccc

SEQ ID NO: 51630 - RNA, 21 nt, synthetic construct
  source 1..21: mol_type = other RNA
ctcctcagtcctcaccaccct

SEQ ID NO: 51631 - RNA, 21 nt, synthetic construct
  source 1..21: mol_type = other RNA
accccgcccaccagggccaga

SEQ ID NO: 51632 - RNA, 21 nt, synthetic construct
  source 1..21: mol_type = other RNA
ggcaccacccacatcacagag

SEQ ID NO: 51633 - RNA, 21 nt, synthetic construct
  source 1..21: mol_type = other RNA
ggcaccacccacatcacagag

SEQ ID NO: 51634 - RNA, 21 nt, synthetic construct
  source 1..21: mol_type = other RNA
ggcaccacccacatcacagag

SEQ ID NO: 51635 - RNA, 21 nt, synthetic construct
  source 1..21: mol_type = other RNA
ggcaccacccacatcacagag

SEQ ID NO: 51636 - RNA, 21 nt, synthetic construct
  source 1..21: mol_type = other RNA
atcaatgactttgccacgcgt

SEQ ID NO: 51637 - RNA, 21 nt, synthetic construct
  source 1..21: mol_type = other RNA
gccagcacggagcctgctgtg

SEQ ID NO: 51638 - RNA, 21 nt, synthetic construct
  source 1..21: mol_type = other RNA
actgtcccaggggtggccaca

SEQ ID NO: 51639 - RNA, 21 nt, synthetic construct
  source 1..21: mol_type = other RNA
cagactgggtccagctcaggc

SEQ ID NO: 51640 - RNA, 21 nt, synthetic construct
  source 1..21: mol_type = other RNA
agactgggtccagctcaggcc

SEQ ID NO: 51641 - RNA, 21 nt, synthetic construct
  source 1..21: mol_type = other RNA
tgtgtcctcctcagtcctcac

SEQ ID NO: 51642 - RNA, 21 nt, synthetic construct
  source 1..21: mol_type = other RNA
gccgggcagtgctgtggggag

SEQ ID NO: 51643 - RNA, 21 nt, synthetic construct
  source 1..21: mol_type = other RNA
tctctgcagaaaagcacaggg

SEQ ID NO: 51644 - RNA, 21 nt, synthetic construct
  source 1..21: mol_type = other RNA
ctcccaggttgactccaccaa

SEQ ID NO: 51645 - RNA, 21 nt, synthetic construct
  source 1..21: mol_type = other RNA
tcagcaactgccagtcctgcg

SEQ ID NO: 51646 - RNA, 21 nt, synthetic construct
  source 1..21: mol_type = other RNA
cagctcccacttctctactcc

SEQ ID NO: 51647 - RNA, 21 nt, synthetic construct
  source 1..21: mol_type = other RNA
ggagaggacagtgccctgctg

SEQ ID NO: 51648 - RNA, 21 nt, synthetic construct
  source 1..21: mol_type = other RNA
acaagggcagggtctgcggcc

SEQ ID NO: 51649 - RNA, 21 nt, synthetic construct
  source 1..21: mol_type = other RNA
cacagccaccacacccacagc

SEQ ID NO: 51650 - RNA, 21 nt, synthetic construct
  source 1..21: mol_type = other RNA
cacagccaccacacccacagc

SEQ ID NO: 51651 - RNA, 21 nt, synthetic construct
  source 1..21: mol_type = other RNA
cacagccaccacacccacagc

SEQ ID NO: 51652 - RNA, 21 nt, synthetic construct
  source 1..21: mol_type = other RNA
cacagccaccacacccacagc

SEQ ID NO: 51653 - RNA, 21 nt, synthetic construct
  source 1..21: mol_type = other RNA
cacagccaccacacccacagc

SEQ ID NO: 51654 - RNA, 21 nt, synthetic construct
  source 1..21: mol_type = other RNA
catcaaggcccaggggctggt

SEQ ID NO: 51655 - RNA, 21 nt, synthetic construct
  source 1..21: mol_type = other RNA
tgcctgtgcgccgcgctgtcc

SEQ ID NO: 51656 - RNA, 21 nt, synthetic construct
  source 1..21: mol_type = other RNA
tgcacgcctgtgccgccaagg

SEQ ID NO: 51657 - RNA, 21 nt, synthetic construct
  source 1..21: mol_type = other RNA
cgactgcaacacctgcacctg

SEQ ID NO: 51658 - RNA, 21 nt, synthetic construct
  source 1..21: mol_type = other RNA
gactgcaacacctgcacctgc

SEQ ID NO: 51659 - RNA, 21 nt, synthetic construct
  source 1..21: mol_type = other RNA
cctcctctgccctagggacca

SEQ ID NO: 51660 - RNA, 21 nt, synthetic construct
  source 1..21: mol_type = other RNA
cctcctctgccctagggacca

SEQ ID NO: 51661 - RNA, 21 nt, synthetic construct
  source 1..21: mol_type = other RNA
cctcctctgccctagggacca

SEQ ID NO: 51662 - RNA, 21 nt, synthetic construct
  source 1..21: mol_type = other RNA
cctcctctgccctagggacca

SEQ ID NO: 51663 - RNA, 21 nt, synthetic construct
  source 1..21: mol_type = other RNA
acctgcctctctggggacacc

SEQ ID NO: 51664 - RNA, 21 nt, synthetic construct
  source 1..21: mol_type = other RNA
atgtgcacgcctgtgccgcca

SEQ ID NO: 51665 - RNA, 21 nt, synthetic construct
  source 1..21: mol_type = other RNA
tggggatcttcctggtcatcg

SEQ ID NO: 51666 - RNA, 21 nt, synthetic construct
  source 1..21: mol_type = other RNA
tgggaacttcaaccagaacca

SEQ ID NO: 51667 - RNA, 21 nt, synthetic construct
  source 1..21: mol_type = other RNA
aggactgcctgtgcgccgcgc

SEQ ID NO: 51668 - RNA, 21 nt, synthetic construct
  source 1..21: mol_type = other RNA
ctctgcagaaaagcacagggt

SEQ ID NO: 51669 - RNA, 21 nt, synthetic construct
  source 1..21: mol_type = other RNA
caagggcagggtctgcggcct

SEQ ID NO: 51670 - RNA, 21 nt, synthetic construct
  source 1..21: mol_type = other RNA
aagggcagggtctgcggcctg

SEQ ID NO: 51671 - RNA, 21 nt, synthetic construct
  source 1..21: mol_type = other RNA
cgaggcctgcgtgaacgacgc

SEQ ID NO: 51672 - RNA, 21 nt, synthetic construct
  source 1..21: mol_type = other RNA
cagtgggcactgcctggtgga

SEQ ID NO: 51673 - RNA, 21 nt, synthetic construct
  source 1..21: mol_type = other RNA
ccagcacggagcctgctgtgc

SEQ ID NO: 51674 - RNA, 21 nt, synthetic construct
  source 1..21: mol_type = other RNA
gcacagccaccacacccacag

SEQ ID NO: 51675 - RNA, 21 nt, synthetic construct
  source 1..21: mol_type = other RNA
accctgctgcccagcagcccc

SEQ ID NO: 51676 - RNA, 21 nt, synthetic construct
  source 1..21: mol_type = other RNA
tgccccagcaccccggccacc

SEQ ID NO: 51677 - RNA, 21 nt, synthetic construct
  source 1..21: mol_type = other RNA
gcacagccaccacacccacag

SEQ ID NO: 51678 - RNA, 21 nt, synthetic construct
  source 1..21: mol_type = other RNA
accctgctgcccagcagcccc

SEQ ID NO: 51679 - RNA, 21 nt, synthetic construct
  source 1..21: mol_type = other RNA
tgccccagcaccccggccacc

SEQ ID NO: 51680 - RNA, 21 nt, synthetic construct
  source 1..21: mol_type = other RNA
ccaccacacccacagccacca

SEQ ID NO: 51681 - RNA, 21 nt, synthetic construct
  source 1..21: mol_type = other RNA
gcacagccaccacacccacag

SEQ ID NO: 51682 - RNA, 21 nt, synthetic construct
  source 1..21: mol_type = other RNA
accctgctgcccagcagcccc

SEQ ID NO: 51683 - RNA, 21 nt, synthetic construct
  source 1..21: mol_type = other RNA
tgccccagcaccccggccacc

SEQ ID NO: 51684 - RNA, 21 nt, synthetic construct
  source 1..21: mol_type = other RNA
gcacagccaccacacccacag

SEQ ID NO: 51685 - RNA, 21 nt, synthetic construct
  source 1..21: mol_type = other RNA
accctgctgcccagcagcccc

SEQ ID NO: 51686 - RNA, 21 nt, synthetic construct
  source 1..21: mol_type = other RNA
tgccccagcaccccggccacc

SEQ ID NO: 51687 - RNA, 21 nt, synthetic construct
  source 1..21: mol_type = other RNA
ccaccacacccacagccacca

SEQ ID NO: 51688 - RNA, 21 nt, synthetic construct
  source 1..21: mol_type = other RNA
gcacagccaccacacccacag

SEQ ID NO: 51689 - RNA, 21 nt, synthetic construct
  source 1..21: mol_type = other RNA
ttccaggcccggctgccctac

SEQ ID NO: 51690 - RNA, 21 nt, synthetic construct
  source 1..21: mol_type = other RNA
cagcaactgccagtcctgcgt

SEQ ID NO: 51691 - RNA, 21 nt, synthetic construct
  source 1..21: mol_type = other RNA
ccacagcctgcatcctgccca

SEQ ID NO: 51692 - RNA, 21 nt, synthetic construct
  source 1..21: mol_type = other RNA
gtgtccagctgcagggggagc

SEQ ID NO: 51693 - RNA, 21 nt, synthetic construct
  source 1..21: mol_type = other RNA
caagtcctgggcccagaagca

SEQ ID NO: 51694 - RNA, 21 nt, synthetic construct
  source 1..21: mol_type = other RNA
gatggccacttcatcaccttt

SEQ ID NO: 51695 - RNA, 21 nt, synthetic construct
  source 1..21: mol_type = other RNA
ggagcgaggactgcctgtgcg

SEQ ID NO: 51696 - RNA, 21 nt, synthetic construct
  source 1..21: mol_type = other RNA
accctggagaactgcacggtg

SEQ ID NO: 51697 - RNA, 21 nt, synthetic construct
  source 1..21: mol_type = other RNA
gagcggagcgaggactgcctg

SEQ ID NO: 51698 - RNA, 21 nt, synthetic construct
  source 1..21: mol_type = other RNA
agcggagcgaggactgcctgt

SEQ ID NO: 51699 - RNA, 21 nt, synthetic construct
  source 1..21: mol_type = other RNA
gcacggccaaccccttccgca

SEQ ID NO: 51700 - RNA, 21 nt, synthetic construct
  source 1..21: mol_type = other RNA
gccaaccccttccgcaagtcc

SEQ ID NO: 51701 - RNA, 21 nt, synthetic construct
  source 1..21: mol_type = other RNA
gagcgaggactgcctgtgcgc

SEQ ID NO: 51702 - RNA, 21 nt, synthetic construct
  source 1..21: mol_type = other RNA
agcgaggactgcctgtgcgcc

SEQ ID NO: 51703 - RNA, 21 nt, synthetic construct
  source 1..21: mol_type = other RNA
ctgcacggccaaccccttccg

SEQ ID NO: 51704 - RNA, 21 nt, synthetic construct
  source 1..21: mol_type = other RNA
atcaaggcccaggggctggtg

SEQ ID NO: 51705 - RNA, 21 nt, synthetic construct
  source 1..21: mol_type = other RNA
ccacacccacagctaccagct

SEQ ID NO: 51706 - RNA, 21 nt, synthetic construct
  source 1..21: mol_type = other RNA
ccacacccacagctaccagct

SEQ ID NO: 51707 - RNA, 21 nt, synthetic construct
  source 1..21: mol_type = other RNA
ccacacccacagctaccagct

SEQ ID NO: 51708 - RNA, 21 nt, synthetic construct
  source 1..21: mol_type = other RNA
gagaggacagtgccctgctgg

SEQ ID NO: 51709 - RNA, 21 nt, synthetic construct
  source 1..21: mol_type = other RNA
tgtttgacacctgcaactgtg

SEQ ID NO: 51710 - RNA, 21 nt, synthetic construct
  source 1..21: mol_type = other RNA
acacctgcaactgtgagcgga

SEQ ID NO: 51711 - RNA, 21 nt, synthetic construct
  source 1..21: mol_type = other RNA
gtgcgccgcgctgtcctccta

SEQ ID NO: 51712 - RNA, 21 nt, synthetic construct
  source 1..21: mol_type = other RNA
cccggtgtcagtggacagagt

SEQ ID NO: 51713 - RNA, 21 nt, synthetic construct
  source 1..21: mol_type = other RNA
cggtgtcagtggacagagtgg

SEQ ID NO: 51714 - RNA, 21 nt, synthetic construct
  source 1..21: mol_type = other RNA
gtggcactaccagccctgcgg

SEQ ID NO: 51715 - RNA, 21 nt, synthetic construct
  source 1..21: mol_type = other RNA
agtggcactaccagccctgcg

SEQ ID NO: 51716 - RNA, 21 nt, synthetic construct
  source 1..21: mol_type = other RNA
gacacctgcaactgtgagcgg

SEQ ID NO: 51717 - RNA, 21 nt, synthetic construct
  source 1..21: mol_type = other RNA
cacctgcaactgtgagcggag

SEQ ID NO: 51718 - RNA, 21 nt, synthetic construct
  source 1..21: mol_type = other RNA
gcaagtcctgggcccagaagc

SEQ ID NO: 51719 - RNA, 21 nt, synthetic construct
  source 1..21: mol_type = other RNA
agaagcagtgcagcatcctcc

SEQ ID NO: 51720 - RNA, 21 nt, synthetic construct
  source 1..21: mol_type = other RNA
cgcaagtcctgggcccagaag

SEQ ID NO: 51721 - RNA, 21 nt, synthetic construct
  source 1..21: mol_type = other RNA
aagtcctgggcccagaagcag

SEQ ID NO: 51722 - RNA, 21 nt, synthetic construct
  source 1..21: mol_type = other RNA
agtcctgggcccagaagcagt

SEQ ID NO: 51723 - RNA, 21 nt, synthetic construct
  source 1..21: mol_type = other RNA
ctgggcccagaagcagtgcag

SEQ ID NO: 51724 - RNA, 21 nt, synthetic construct
  source 1..21: mol_type = other RNA
gggcccagaagcagtgcagca

SEQ ID NO: 51725 - RNA, 21 nt, synthetic construct
  source 1..21: mol_type = other RNA
cccagaagcagtgcagcatcc

SEQ ID NO: 51726 - RNA, 21 nt, synthetic construct
  source 1..21: mol_type = other RNA
tgcgcccacgcggggggccag

SEQ ID NO: 51727 - RNA, 21 nt, synthetic construct
  source 1..21: mol_type = other RNA
agaacccactgtcccaggggt

SEQ ID NO: 51728 - RNA, 21 nt, synthetic construct
  source 1..21: mol_type = other RNA
tcaggaaaaccggctgctgct

SEQ ID NO: 51729 - RNA, 21 nt, synthetic construct
  source 1..21: mol_type = other RNA
tacgtgccctgtggcccctcc

SEQ ID NO: 51730 - RNA, 21 nt, synthetic construct
  source 1..21: mol_type = other RNA
ggccagcaggtggactgtgac

SEQ ID NO: 51731 - RNA, 21 nt, synthetic construct
  source 1..21: mol_type = other RNA
cgtggcccagtgtggctgcta

SEQ ID NO: 51732 - RNA, 21 nt, synthetic construct
  source 1..21: mol_type = other RNA
tggtgtgcaggaactgggagc

SEQ ID NO: 51733 - RNA, 21 nt, synthetic construct
  source 1..21: mol_type = other RNA
gggccaggtcgtggaatgcag

SEQ ID NO: 51734 - RNA, 21 nt, synthetic construct
  source 1..21: mol_type = other RNA
gggccaggtcgtggaatgcag

SEQ ID NO: 51735 - RNA, 21 nt, synthetic construct
  source 1..21: mol_type = other RNA
gggccaggtcgtggaatgcag

SEQ ID NO: 51736 - RNA, 21 nt, synthetic construct
  source 1..21: mol_type = other RNA
gggccaggtcgtggaatgcag

SEQ ID NO: 51737 - RNA, 21 nt, synthetic construct
  source 1..21: mol_type = other RNA
gggcagaaggtgcactgtgac

SEQ ID NO: 51738 - RNA, 21 nt, synthetic construct
  source 1..21: mol_type = other RNA
gaccccgcccaccagggccag

SEQ ID NO: 51739 - RNA, 21 nt, synthetic construct
  source 1..21: mol_type = other RNA
caggactacaagggcagggtc

SEQ ID NO: 51740 - RNA, 21 nt, synthetic construct
  source 1..21: mol_type = other RNA
ctccctgcttctgcagggcat

SEQ ID NO: 51741 - RNA, 21 nt, synthetic construct
  source 1..21: mol_type = other RNA
cctctctgcagaaaagcacag

SEQ ID NO: 51742 - RNA, 21 nt, synthetic construct
  source 1..21: mol_type = other RNA
ccgcctgccgctcccaggttg

SEQ ID NO: 51743 - RNA, 21 nt, synthetic construct
  source 1..21: mol_type = other RNA
gtgcaggaactgggagcagga

SEQ ID NO: 51744 - RNA, 21 nt, synthetic construct
  source 1..21: mol_type = other RNA
gccatgccctcctccactccg

SEQ ID NO: 51745 - RNA, 21 nt, synthetic construct
  source 1..21: mol_type = other RNA
gccatgccctcctccactccg

SEQ ID NO: 51746 - RNA, 21 nt, synthetic construct
  source 1..21: mol_type = other RNA
caacaccacctgcagctcctg

SEQ ID NO: 51747 - RNA, 21 nt, synthetic construct
  source 1..21: mol_type = other RNA
cggcaccacctgctccaaggc

SEQ ID NO: 51748 - RNA, 21 nt, synthetic construct
  source 1..21: mol_type = other RNA
gaaccccagtgggcactgcct

SEQ ID NO: 51749 - RNA, 21 nt, synthetic construct
  source 1..21: mol_type = other RNA
gcctggcctggaaggctgcta

SEQ ID NO: 51750 - RNA, 21 nt, synthetic construct
  source 1..21: mol_type = other RNA
gcctgcacctgcacctatgag

SEQ ID NO: 51751 - RNA, 21 nt, synthetic construct
  source 1..21: mol_type = other RNA
gggccagcaggtggactgtga

SEQ ID NO: 51752 - RNA, 21 nt, synthetic construct
  source 1..21: mol_type = other RNA
tgccagcacggagcctgctgt

SEQ ID NO: 51753 - RNA, 21 nt, synthetic construct
  source 1..21: mol_type = other RNA
ccacacctgcagccaccagca

SEQ ID NO: 51754 - RNA, 21 nt, synthetic construct
  source 1..21: mol_type = other RNA
ccagcaccccggccaccagct

SEQ ID NO: 51755 - RNA, 21 nt, synthetic construct
  source 1..21: mol_type = other RNA
ccacacctgcagccaccagca

SEQ ID NO: 51756 - RNA, 21 nt, synthetic construct
  source 1..21: mol_type = other RNA
ccagcaccccggccaccagct

SEQ ID NO: 51757 - RNA, 21 nt, synthetic construct
  source 1..21: mol_type = other RNA
gccacgccctcctccactcca

SEQ ID NO: 51758 - RNA, 21 nt, synthetic construct
  source 1..21: mol_type = other RNA
ccacacctgcagccaccagca

SEQ ID NO: 51759 - RNA, 21 nt, synthetic construct
  source 1..21: mol_type = other RNA
ccagcaccccggccaccagct

SEQ ID NO: 51760 - RNA, 21 nt, synthetic construct
  source 1..21: mol_type = other RNA
ccacacctgcagccaccagca

SEQ ID NO: 51761 - RNA, 21 nt, synthetic construct
  source 1..21: mol_type = other RNA
ccagcaccccggccaccagct

SEQ ID NO: 51762 - RNA, 21 nt, synthetic construct
  source 1..21: mol_type = other RNA
tctactccctgcttctgcagg

SEQ ID NO: 51763 - RNA, 21 nt, synthetic construct
  source 1..21: mol_type = other RNA
agcaccagtgcacctgctgcc

SEQ ID NO: 51764 - RNA, 21 nt, synthetic construct
  source 1..21: mol_type = other RNA
aaccccttccgcaagtcctgg

SEQ ID NO: 51765 - RNA, 21 nt, synthetic construct
  source 1..21: mol_type = other RNA
agccctccctcagtgccagca

SEQ ID NO: 51766 - RNA, 21 nt, synthetic construct
  source 1..21: mol_type = other RNA
ccggctgctgctactcctgtg

SEQ ID NO: 51767 - RNA, 21 nt, synthetic construct
  source 1..21: mol_type = other RNA
agtgcacctgctgccaggaga

SEQ ID NO: 51768 - RNA, 21 nt, synthetic construct
  source 1..21: mol_type = other RNA
gcgggtgtgcagcacctgggg

SEQ ID NO: 51769 - RNA, 21 nt, synthetic construct
  source 1..21: mol_type = other RNA
gtgccgctgccccacctgccc

SEQ ID NO: 51770 - RNA, 21 nt, synthetic construct
  source 1..21: mol_type = other RNA
cggccaaccccttccgcaagt

SEQ ID NO: 51771 - RNA, 21 nt, synthetic construct
  source 1..21: mol_type = other RNA
tggcactaccagccctgcggg

SEQ ID NO: 51772 - RNA, 21 nt, synthetic construct
  source 1..21: mol_type = other RNA
gggcagggtctgcggcctgtg

SEQ ID NO: 51773 - RNA, 21 nt, synthetic construct
  source 1..21: mol_type = other RNA
ccctgcacggccaaccccttc

SEQ ID NO: 51774 - RNA, 21 nt, synthetic construct
  source 1..21: mol_type = other RNA
gaagcagtgcagcatcctcca

SEQ ID NO: 51775 - RNA, 21 nt, synthetic construct
  source 1..21: mol_type = other RNA
gggcgggtgtgcagcacctgg

SEQ ID NO: 51776 - RNA, 21 nt, synthetic construct
  source 1..21: mol_type = other RNA
caccacctgctccaaggccat

SEQ ID NO: 51777 - RNA, 21 nt, synthetic construct
  source 1..21: mol_type = other RNA
cccctgcacggccaacccctt

SEQ ID NO: 51778 - RNA, 21 nt, synthetic construct
  source 1..21: mol_type = other RNA
ggcctgtgtgtgtcctggcgg

SEQ ID NO: 51779 - RNA, 21 nt, synthetic construct
  source 1..21: mol_type = other RNA
tggcctggaaggctgctaccc

SEQ ID NO: 51780 - RNA, 21 nt, synthetic construct
  source 1..21: mol_type = other RNA
tccccagcctgagccccctga

SEQ ID NO: 51781 - RNA, 21 nt, synthetic construct
  source 1..21: mol_type = other RNA
ggcgggtgtgcagcacctggg

SEQ ID NO: 51782 - RNA, 21 nt, synthetic construct
  source 1..21: mol_type = other RNA
ccactacaagaccttcgacgg

SEQ ID NO: 51783 - RNA, 21 nt, synthetic construct
  source 1..21: mol_type = other RNA
ggacagtgccctgctggagct

SEQ ID NO: 51784 - RNA, 21 nt, synthetic construct
  source 1..21: mol_type = other RNA
acggctgcttctgccccccag

SEQ ID NO: 51785 - RNA, 21 nt, synthetic construct
  source 1..21: mol_type = other RNA
cggctgcttctgccccccagg

SEQ ID NO: 51786 - RNA, 21 nt, synthetic construct
  source 1..21: mol_type = other RNA
ggctgcagctgctggtgcagc

SEQ ID NO: 51787 - RNA, 21 nt, synthetic construct
  source 1..21: mol_type = other RNA
gctgctggtgcagctggtgcc

SEQ ID NO: 51788 - RNA, 21 nt, synthetic construct
  source 1..21: mol_type = other RNA
tttgacacctgcaactgtgag

SEQ ID NO: 51789 - RNA, 21 nt, synthetic construct
  source 1..21: mol_type = other RNA
ttgacacctgcaactgtgagc

SEQ ID NO: 51790 - RNA, 21 nt, synthetic construct
  source 1..21: mol_type = other RNA
tgacacctgcaactgtgagcg

SEQ ID NO: 51791 - RNA, 21 nt, synthetic construct
  source 1..21: mol_type = other RNA
actgtgagcggagcgaggact

SEQ ID NO: 51792 - RNA, 21 nt, synthetic construct
  source 1..21: mol_type = other RNA
tgagcggagcgaggactgcct

SEQ ID NO: 51793 - RNA, 21 nt, synthetic construct
  source 1..21: mol_type = other RNA
ctgcaacacctgcacctgcag

SEQ ID NO: 51794 - RNA, 21 nt, synthetic construct
  source 1..21: mol_type = other RNA
ccaccggctctgcctgggcac

SEQ ID NO: 51795 - RNA, 21 nt, synthetic construct
  source 1..21: mol_type = other RNA
ccggcaccacctgctccaagg

SEQ ID NO: 51796 - RNA, 21 nt, synthetic construct
  source 1..21: mol_type = other RNA
ggcaccacctgctccaaggcc

SEQ ID NO: 51797 - RNA, 21 nt, synthetic construct
  source 1..21: mol_type = other RNA
gcaccacctgctccaaggcca

SEQ ID NO: 51798 - RNA, 21 nt, synthetic construct
  source 1..21: mol_type = other RNA
accacctgctccaaggccatc

SEQ ID NO: 51799 - RNA, 21 nt, synthetic construct
  source 1..21: mol_type = other RNA
ccacctgctccaaggccatca

SEQ ID NO: 51800 - RNA, 21 nt, synthetic construct
  source 1..21: mol_type = other RNA
cacctgctccaaggccatcaa

SEQ ID NO: 51801 - RNA, 21 nt, synthetic construct
  source 1..21: mol_type = other RNA
cctgctccaaggccatcaagc

SEQ ID NO: 51802 - RNA, 21 nt, synthetic construct
  source 1..21: mol_type = other RNA
agggcagggtctgcggcctgt

SEQ ID NO: 51803 - RNA, 21 nt, synthetic construct
  source 1..21: mol_type = other RNA
ggcagggtctgcggcctgtgc

SEQ ID NO: 51804 - RNA, 21 nt, synthetic construct
  source 1..21: mol_type = other RNA
ggtctgcggcctgtgcgggaa

SEQ ID NO: 51805 - RNA, 21 nt, synthetic construct
  source 1..21: mol_type = other RNA
aaggacccctgcacggccaac

SEQ ID NO: 51806 - RNA, 21 nt, synthetic construct
  source 1..21: mol_type = other RNA
cctgcacggccaaccccttcc

SEQ ID NO: 51807 - RNA, 21 nt, synthetic construct
  source 1..21: mol_type = other RNA
accccttccgcaagtcctggg

SEQ ID NO: 51808 - RNA, 21 nt, synthetic construct
  source 1..21: mol_type = other RNA
ccccttccgcaagtcctgggc

SEQ ID NO: 51809 - RNA, 21 nt, synthetic construct
  source 1..21: mol_type = other RNA
cccttccgcaagtcctgggcc

SEQ ID NO: 51810 - RNA, 21 nt, synthetic construct
  source 1..21: mol_type = other RNA
ccttccgcaagtcctgggccc

SEQ ID NO: 51811 - RNA, 21 nt, synthetic construct
  source 1..21: mol_type = other RNA
cctgggcccagaagcagtgca

SEQ ID NO: 51812 - RNA, 21 nt, synthetic construct
  source 1..21: mol_type = other RNA
aagcagtgcagcatcctccac

SEQ ID NO: 51813 - RNA, 21 nt, synthetic construct
  source 1..21: mol_type = other RNA
gcctgtgtgtgtcctggcgga

SEQ ID NO: 51814 - RNA, 21 nt, synthetic construct
  source 1..21: mol_type = other RNA
cctgtgtgtgtcctggcggac

SEQ ID NO: 51815 - RNA, 21 nt, synthetic construct
  source 1..21: mol_type = other RNA
ctgtgtgtgtcctggcggact

SEQ ID NO: 51816 - RNA, 21 nt, synthetic construct
  source 1..21: mol_type = other RNA
gcactgcctggtggacctgcc

SEQ ID NO: 51817 - RNA, 21 nt, synthetic construct
  source 1..21: mol_type = other RNA
cctggcctggaaggctgctac

SEQ ID NO: 51818 - RNA, 21 nt, synthetic construct
  source 1..21: mol_type = other RNA
ctggcctggaaggctgctacc

SEQ ID NO: 51819 - RNA, 21 nt, synthetic construct
  source 1..21: mol_type = other RNA
ggcctggaaggctgctacccg

SEQ ID NO: 51820 - RNA, 21 nt, synthetic construct
  source 1..21: mol_type = other RNA
tgcccacccagccagcccttc

SEQ ID NO: 51821 - RNA, 21 nt, synthetic construct
  source 1..21: mol_type = other RNA
ccccctcctccagcccaggga

SEQ ID NO: 51822 - RNA, 21 nt, synthetic construct
  source 1..21: mol_type = other RNA
ccccctcctccagcccaggga

SEQ ID NO: 51823 - RNA, 21 nt, synthetic construct
  source 1..21: mol_type = other RNA
ccccctcctccagcccaggga

SEQ ID NO: 51824 - RNA, 21 nt, synthetic construct
  source 1..21: mol_type = other RNA
ccccctcctccagcccaggga

SEQ ID NO: 51825 - RNA, 21 nt, synthetic construct
  source 1..21: mol_type = other RNA
ccccctcctccagcccaggga

SEQ ID NO: 51826 - RNA, 21 nt, synthetic construct
  source 1..21: mol_type = other RNA
ctcgccctcccctgcccctgg

SEQ ID NO: 51827 - RNA, 21 nt, synthetic construct
  source 1..21: mol_type = other RNA
agacctggaccctggagaact

SEQ ID NO: 51828 - RNA, 21 nt, synthetic construct
  source 1..21: mol_type = other RNA
cttccaggcccggctgcccta

SEQ ID NO: 51829 - RNA, 21 nt, synthetic construct
  source 1..21: mol_type = other RNA
cggctgctgctactcctgtga

SEQ ID NO: 51830 - RNA, 21 nt, synthetic construct
  source 1..21: mol_type = other RNA
gcagctgctggtgcagctggt

SEQ ID NO: 51831 - RNA, 21 nt, synthetic construct
  source 1..21: mol_type = other RNA
gtgcccacccagccagccctt

SEQ ID NO: 51832 - RNA, 21 nt, synthetic construct
  source 1..21: mol_type = other RNA
caggaactgggagcaggaggg

SEQ ID NO: 51833 - RNA, 21 nt, synthetic construct
  source 1..21: mol_type = other RNA
gcccacccagccagcccttct

SEQ ID NO: 51834 - RNA, 21 nt, synthetic construct
  source 1..21: mol_type = other RNA
ctctgctcaacccagcccagt

SEQ ID NO: 51835 - RNA, 21 nt, synthetic construct
  source 1..21: mol_type = other RNA
cacctggatcctcacagagcc

SEQ ID NO: 51836 - RNA, 21 nt, synthetic construct
  source 1..21: mol_type = other RNA
cacctggatcctcacagagcc

SEQ ID NO: 51837 - RNA, 21 nt, synthetic construct
  source 1..21: mol_type = other RNA
cacctggatcctcacagagcc

SEQ ID NO: 51838 - RNA, 21 nt, synthetic construct
  source 1..21: mol_type = other RNA
cacctggatcctcacagagcc

SEQ ID NO: 51839 - RNA, 21 nt, synthetic construct
  source 1..21: mol_type = other RNA
cacctggatcctcacagagcc

SEQ ID NO: 51840 - RNA, 21 nt, synthetic construct
  source 1..21: mol_type = other RNA
aacgtcacctgcgtgaacaag

SEQ ID NO: 51841 - RNA, 21 nt, synthetic construct
  source 1..21: mol_type = other RNA
cccagcccagttttgcaaata

SEQ ID NO: 51842 - RNA, 21 nt, synthetic construct
  source 1..21: mol_type = other RNA
tcaacccagcccagttttgca

SEQ ID NO: 51843 - RNA, 21 nt, synthetic construct
  source 1..21: mol_type = other RNA
cgtgaccaggccccgggccga

SEQ ID NO: 51844 - RNA, 21 nt, synthetic construct
  source 1..21: mol_type = other RNA
caccacacccacagccaccag

SEQ ID NO: 51845 - RNA, 21 nt, synthetic construct
  source 1..21: mol_type = other RNA
caccacacccacagccaccag

SEQ ID NO: 51846 - RNA, 21 nt, synthetic construct
  source 1..21: mol_type = other RNA
gtcggtgcagtgcaagcccct

SEQ ID NO: 51847 - RNA, 21 nt, synthetic construct
  source 1..21: mol_type = other RNA
ccttcagcgtgtccactgtgt

SEQ ID NO: 51848 - RNA, 21 nt, synthetic construct
  source 1..21: mol_type = other RNA
acacccacagccaccagttcc

SEQ ID NO: 51849 - RNA, 21 nt, synthetic construct
  source 1..21: mol_type = other RNA
acacccacagccaccagttcc

SEQ ID NO: 51850 - RNA, 21 nt, synthetic construct
  source 1..21: mol_type = other RNA
cacagccaccagttccaaagc

SEQ ID NO: 51851 - RNA, 21 nt, synthetic construct
  source 1..21: mol_type = other RNA
cacagccaccagttccaaagc

SEQ ID NO: 51852 - RNA, 21 nt, synthetic construct
  source 1..21: mol_type = other RNA
aagggtgaggggccagcagga

SEQ ID NO: 51853 - RNA, 21 nt, synthetic construct
  source 1..21: mol_type = other RNA
gccacaccctcctccactcca

SEQ ID NO: 51854 - RNA, 21 nt, synthetic construct
  source 1..21: mol_type = other RNA
gccacaccctcctccactcca

SEQ ID NO: 51855 - RNA, 21 nt, synthetic construct
  source 1..21: mol_type = other RNA
gccacaccctcctccactcca

SEQ ID NO: 51856 - RNA, 21 nt, synthetic construct
  source 1..21: mol_type = other RNA
gccacaccctcctccactcca

SEQ ID NO: 51857 - RNA, 21 nt, synthetic construct
  source 1..21: mol_type = other RNA
ctctgtccacctggagccagg

SEQ ID NO: 51858 - RNA, 21 nt, synthetic construct
  source 1..21: mol_type = other RNA
cacctgcccacccaccaaagt

SEQ ID NO: 51859 - RNA, 21 nt, synthetic construct
  source 1..21: mol_type = other RNA
cctggggccgagtgcctccgg

SEQ ID NO: 51860 - RNA, 21 nt, synthetic construct
  source 1..21: mol_type = other RNA
ctggggccgagtgcctccgga

SEQ ID NO: 51861 - RNA, 21 nt, synthetic construct
  source 1..21: mol_type = other RNA
gacggccaccaccaccaccac

SEQ ID NO: 51862 - RNA, 21 nt, synthetic construct
  source 1..21: mol_type = other RNA
acggccaccaccaccaccacc

SEQ ID NO: 51863 - RNA, 21 nt, synthetic construct
  source 1..21: mol_type = other RNA
cccacagcggagaactgccag

SEQ ID NO: 51864 - RNA, 21 nt, synthetic construct
  source 1..21: mol_type = other RNA
tccactacaagaccttcgacg

SEQ ID NO: 51865 - RNA, 21 nt, synthetic construct
  source 1..21: mol_type = other RNA
gaggccgacgtcacctgcagc

SEQ ID NO: 51866 - RNA, 21 nt, synthetic construct
  source 1..21: mol_type = other RNA
ttgtcatcaaggcccaggggc

SEQ ID NO: 51867 - RNA, 21 nt, synthetic construct
  source 1..21: mol_type = other RNA
ggccaccacaactggggccac

SEQ ID NO: 51868 - RNA, 21 nt, synthetic construct
  source 1..21: mol_type = other RNA
gcctgggagcctctctgcaga

SEQ ID NO: 51869 - RNA, 21 nt, synthetic construct
  source 1..21: mol_type = other RNA
acagcggagaactgccagagc

SEQ ID NO: 51870 - RNA, 21 nt, synthetic construct
  source 1..21: mol_type = other RNA
cgactgctgtcccaccttccg

SEQ ID NO: 51871 - RNA, 21 nt, synthetic construct
  source 1..21: mol_type = other RNA
cttaccaccacggccaccaca

SEQ ID NO: 51872 - RNA, 21 nt, synthetic construct
  source 1..21: mol_type = other RNA
cttaccaccacggccaccaca

SEQ ID NO: 51873 - RNA, 21 nt, synthetic construct
  source 1..21: mol_type = other RNA
cgactccagccctgtccagcc

SEQ ID NO: 51874 - RNA, 21 nt, synthetic construct
  source 1..21: mol_type = other RNA
gactccagccctgtccagccc

SEQ ID NO: 51875 - RNA, 21 nt, synthetic construct
  source 1..21: mol_type = other RNA
cgactccagccctgtccagcc

SEQ ID NO: 51876 - RNA, 21 nt, synthetic construct
  source 1..21: mol_type = other RNA
gactccagccctgtccagccc

SEQ ID NO: 51877 - RNA, 21 nt, synthetic construct
  source 1..21: mol_type = other RNA
cgactccagccctgtccagcc

SEQ ID NO: 51878 - RNA, 21 nt, synthetic construct
  source 1..21: mol_type = other RNA
gactccagccctgtccagccc

SEQ ID NO: 51879 - RNA, 21 nt, synthetic construct
  source 1..21: mol_type = other RNA
agcagtgcagcatcctccacg

SEQ ID NO: 51880 - RNA, 21 nt, synthetic construct
  source 1..21: mol_type = other RNA
ctccagccctgtccagccctc

SEQ ID NO: 51881 - RNA, 21 nt, synthetic construct
  source 1..21: mol_type = other RNA
ctccagccctgtccagccctc

SEQ ID NO: 51882 - RNA, 21 nt, synthetic construct
  source 1..21: mol_type = other RNA
ctccagccctgtccagccctc

SEQ ID NO: 51883 - RNA, 21 nt, synthetic construct
  source 1..21: mol_type = other RNA
actccagccctgtccagccct

SEQ ID NO: 51884 - RNA, 21 nt, synthetic construct
  source 1..21: mol_type = other RNA
actccagccctgtccagccct

SEQ ID NO: 51885 - RNA, 21 nt, synthetic construct
  source 1..21: mol_type = other RNA
actccagccctgtccagccct

SEQ ID NO: 51886 - RNA, 21 nt, synthetic construct
  source 1..21: mol_type = other RNA
tcgactccagccctgtccagc

SEQ ID NO: 51887 - RNA, 21 nt, synthetic construct
  source 1..21: mol_type = other RNA
ttacagccatcccctcttcct

SEQ ID NO: 51888 - RNA, 21 nt, synthetic construct
  source 1..21: mol_type = other RNA
tcgactccagccctgtccagc

SEQ ID NO: 51889 - RNA, 21 nt, synthetic construct
  source 1..21: mol_type = other RNA
tcgactccagccctgtccagc

SEQ ID NO: 51890 - RNA, 21 nt, synthetic construct
  source 1..21: mol_type = other RNA
acttccactacaagaccttcg

SEQ ID NO: 51891 - RNA, 21 nt, synthetic construct
  source 1..21: mol_type = other RNA
ccccacagcggagaactgcca

SEQ ID NO: 51892 - RNA, 21 nt, synthetic construct
  source 1..21: mol_type = other RNA
gctctgcccccggacctgccc

SEQ ID NO: 51893 - RNA, 21 nt, synthetic construct
  source 1..21: mol_type = other RNA
ggtactcccccatcactgacc

SEQ ID NO: 51894 - RNA, 21 nt, synthetic construct
  source 1..21: mol_type = other RNA
ggtactcccccatcactgacc

SEQ ID NO: 51895 - RNA, 21 nt, synthetic construct
  source 1..21: mol_type = other RNA
ggtactcccccatcactgacc

SEQ ID NO: 51896 - RNA, 21 nt, synthetic construct
  source 1..21: mol_type = other RNA
ggtactcccccatcactgacc

SEQ ID NO: 51897 - RNA, 21 nt, synthetic construct
  source 1..21: mol_type = other RNA
ggactacatcaaggtcagcat

SEQ ID NO: 51898 - RNA, 21 nt, synthetic construct
  source 1..21: mol_type = other RNA
gctaccagcgttacagccatc

SEQ ID NO: 51899 - RNA, 21 nt, synthetic construct
  source 1..21: mol_type = other RNA
accgaggtcaacatcaccttc

SEQ ID NO: 51900 - RNA, 21 nt, synthetic construct
  source 1..21: mol_type = other RNA
cttcgacggcgacgtcttccg

SEQ ID NO: 51901 - RNA, 21 nt, synthetic construct
  source 1..21: mol_type = other RNA
agttttgcaaataaaccctga

SEQ ID NO: 51902 - RNA, 21 nt, synthetic construct
  source 1..21: mol_type = other RNA
aacaatactacctgtccccag

SEQ ID NO: 51903 - RNA, 21 nt, synthetic construct
  source 1..21: mol_type = other RNA
tccacctggagccaggatgtg

SEQ ID NO: 51904 - RNA, 21 nt, synthetic construct
  source 1..21: mol_type = other RNA
gcagactgggtccagctcagg

SEQ ID NO: 51905 - RNA, 21 nt, synthetic construct
  source 1..21: mol_type = other RNA
gccctagggaccacccacaca

SEQ ID NO: 51906 - RNA, 21 nt, synthetic construct
  source 1..21: mol_type = other RNA
gccctagggaccacccacaca

SEQ ID NO: 51907 - RNA, 21 nt, synthetic construct
  source 1..21: mol_type = other RNA
gccctagggaccacccacaca

SEQ ID NO: 51908 - RNA, 21 nt, synthetic construct
  source 1..21: mol_type = other RNA
gccctagggaccacccacaca

SEQ ID NO: 51909 - RNA, 21 nt, synthetic construct
  source 1..21: mol_type = other RNA
acgccattcaccttcaccacc

SEQ ID NO: 51910 - RNA, 21 nt, synthetic construct
  source 1..21: mol_type = other RNA
aaagccactcccttctccagt

SEQ ID NO: 51911 - RNA, 21 nt, synthetic construct
  source 1..21: mol_type = other RNA
aaagccactcccttctccagt

SEQ ID NO: 51912 - RNA, 21 nt, synthetic construct
  source 1..21: mol_type = other RNA
caccgtgctggctgagctgcg

SEQ ID NO: 51913 - RNA, 21 nt, synthetic construct
  source 1..21: mol_type = other RNA
cgcccttccagcactgagaag

SEQ ID NO: 51914 - RNA, 21 nt, synthetic construct
  source 1..21: mol_type = other RNA
cgcccttccagcactgagaag

SEQ ID NO: 51915 - RNA, 21 nt, synthetic construct
  source 1..21: mol_type = other RNA
cgcccttccagcactgagaag

SEQ ID NO: 51916 - RNA, 21 nt, synthetic construct
  source 1..21: mol_type = other RNA
cgcccttccagcactgagaag

SEQ ID NO: 51917 - RNA, 21 nt, synthetic construct
  source 1..21: mol_type = other RNA
aaagtgctgaccagcccggcc

SEQ ID NO: 51918 - RNA, 21 nt, synthetic construct
  source 1..21: mol_type = other RNA
tgcccttccagcactgagaag

SEQ ID NO: 51919 - RNA, 21 nt, synthetic construct
  source 1..21: mol_type = other RNA
gagggcatctgccaccgcacc

SEQ ID NO: 51920 - RNA, 21 nt, synthetic construct
  source 1..21: mol_type = other RNA
agcctggagagaccatcaggg

SEQ ID NO: 51921 - RNA, 21 nt, synthetic construct
  source 1..21: mol_type = other RNA
ccgccttgaggtgccctgcca

SEQ ID NO: 51922 - RNA, 21 nt, synthetic construct
  source 1..21: mol_type = other RNA
tccacggccccaccttcgccg

SEQ ID NO: 51923 - RNA, 21 nt, synthetic construct
  source 1..21: mol_type = other RNA
acaagcccggccctcccggtc

SEQ ID NO: 51924 - RNA, 21 nt, synthetic construct
  source 1..21: mol_type = other RNA
gagggctgcttctgccctgag

SEQ ID NO: 51925 - RNA, 21 nt, synthetic construct
  source 1..21: mol_type = other RNA
ccgcaggcagagacccagggc

SEQ ID NO: 51926 - RNA, 21 nt, synthetic construct
  source 1..21: mol_type = other RNA
tcaccgtgctggctgagctgc

SEQ ID NO: 51927 - RNA, 21 nt, synthetic construct
  source 1..21: mol_type = other RNA
cgactggagggacggcgtctg

SEQ ID NO: 51928 - RNA, 21 nt, synthetic construct
  source 1..21: mol_type = other RNA
actggagggacggcgtctgca

SEQ ID NO: 51929 - RNA, 21 nt, synthetic construct
  source 1..21: mol_type = other RNA
ggtgtgcagcccccatggtgt

SEQ ID NO: 51930 - RNA, 21 nt, synthetic construct
  source 1..21: mol_type = other RNA
cactggagtttgggaacagct

SEQ ID NO: 51931 - RNA, 21 nt, synthetic construct
  source 1..21: mol_type = other RNA
ccagtccagggactgcaaccg

SEQ ID NO: 51932 - RNA, 21 nt, synthetic construct
  source 1..21: mol_type = other RNA
tccagcactgagaagcacagc

SEQ ID NO: 51933 - RNA, 21 nt, synthetic construct
  source 1..21: mol_type = other RNA
cttcctccctgggcaccacct

SEQ ID NO: 51934 - RNA, 21 nt, synthetic construct
  source 1..21: mol_type = other RNA
ggtgcgcacagcctggacttc

SEQ ID NO: 51935 - RNA, 21 nt, synthetic construct
  source 1..21: mol_type = other RNA
gacctggatcctcacagagct

SEQ ID NO: 51936 - RNA, 21 nt, synthetic construct
  source 1..21: mol_type = other RNA
acctggatcctcacagagctg

SEQ ID NO: 51937 - RNA, 21 nt, synthetic construct
  source 1..21: mol_type = other RNA
ccagtccagggactgcaaccg

SEQ ID NO: 51938 - RNA, 21 nt, synthetic construct
  source 1..21: mol_type = other RNA
tccagcactgagaagcacagc

SEQ ID NO: 51939 - RNA, 21 nt, synthetic construct
  source 1..21: mol_type = other RNA
ggtgcgcacagcctggacttc

SEQ ID NO: 51940 - RNA, 21 nt, synthetic construct
  source 1..21: mol_type = other RNA
gacctggatcctcacagagca

SEQ ID NO: 51941 - RNA, 21 nt, synthetic construct
  source 1..21: mol_type = other RNA
gacctggatcctcacagagct

SEQ ID NO: 51942 - RNA, 21 nt, synthetic construct
  source 1..21: mol_type = other RNA
acctggatcctcacagagctg

SEQ ID NO: 51943 - RNA, 21 nt, synthetic construct
  source 1..21: mol_type = other RNA
ccagtccagggactgcaaccg

SEQ ID NO: 51944 - RNA, 21 nt, synthetic construct
  source 1..21: mol_type = other RNA
tccagcactgagaagcacagc

SEQ ID NO: 51945 - RNA, 21 nt, synthetic construct
  source 1..21: mol_type = other RNA
ggtgcgcacagcctggacttc

SEQ ID NO: 51946 - RNA, 21 nt, synthetic construct
  source 1..21: mol_type = other RNA
ccagtccagggactgcaaccg

SEQ ID NO: 51947 - RNA, 21 nt, synthetic construct
  source 1..21: mol_type = other RNA
tccagcactgagaagcacagc

SEQ ID NO: 51948 - RNA, 21 nt, synthetic construct
  source 1..21: mol_type = other RNA
ggtgcgcacagcctggacttc

SEQ ID NO: 51949 - RNA, 21 nt, synthetic construct
  source 1..21: mol_type = other RNA
gacctggatcctcacagagct

SEQ ID NO: 51950 - RNA, 21 nt, synthetic construct
  source 1..21: mol_type = other RNA
acctggatcctcacagagctg

SEQ ID NO: 51951 - RNA, 21 nt, synthetic construct
  source 1..21: mol_type = other RNA
gacctggatcctcacagagct

SEQ ID NO: 51952 - RNA, 21 nt, synthetic construct
  source 1..21: mol_type = other RNA
acctggatcctcacagagctg

SEQ ID NO: 51953 - RNA, 21 nt, synthetic construct
  source 1..21: mol_type = other RNA
cacctggatcctcacagagct

SEQ ID NO: 51954 - RNA, 21 nt, synthetic construct
  source 1..21: mol_type = other RNA
acctggatcctcacagagctg

SEQ ID NO: 51955 - RNA, 21 nt, synthetic construct
  source 1..21: mol_type = other RNA
tccagcactgagaagcacagc

SEQ ID NO: 51956 - RNA, 21 nt, synthetic construct
  source 1..21: mol_type = other RNA
cctcatgagagagatccatgc

SEQ ID NO: 51957 - RNA, 21 nt, synthetic construct
  source 1..21: mol_type = other RNA
caaccgcccttccagcactga

SEQ ID NO: 51958 - RNA, 21 nt, synthetic construct
  source 1..21: mol_type = other RNA
caaccgcccttccagcactga

SEQ ID NO: 51959 - RNA, 21 nt, synthetic construct
  source 1..21: mol_type = other RNA
caaccgcccttccagcactga

SEQ ID NO: 51960 - RNA, 21 nt, synthetic construct
  source 1..21: mol_type = other RNA
caaccgcccttccagcactga

SEQ ID NO: 51961 - RNA, 21 nt, synthetic construct
  source 1..21: mol_type = other RNA
atttctacgcagtgtgcaatc

SEQ ID NO: 51962 - RNA, 21 nt, synthetic construct
  source 1..21: mol_type = other RNA
agctttacacccatcccctcc

SEQ ID NO: 51963 - RNA, 21 nt, synthetic construct
  source 1..21: mol_type = other RNA
agctttacacccatcccctcc

SEQ ID NO: 51964 - RNA, 21 nt, synthetic construct
  source 1..21: mol_type = other RNA
ctatgcccacagccactgcct

SEQ ID NO: 51965 - RNA, 21 nt, synthetic construct
  source 1..21: mol_type = other RNA
gcccgcccaggagtgcccctg

SEQ ID NO: 51966 - RNA, 21 nt, synthetic construct
  source 1..21: mol_type = other RNA
gcggtgccccgacgtcctcgc

SEQ ID NO: 51967 - RNA, 21 nt, synthetic construct
  source 1..21: mol_type = other RNA
ctgggcgtgagcgtcaccttc

SEQ ID NO: 51968 - RNA, 21 nt, synthetic construct
  source 1..21: mol_type = other RNA
ctggagagaccatcagggtcg

SEQ ID NO: 51969 - RNA, 21 nt, synthetic construct
  source 1..21: mol_type = other RNA
cagatcctcttcaacgcacac

SEQ ID NO: 51970 - RNA, 21 nt, synthetic construct
  source 1..21: mol_type = other RNA
actgggacgccctggaacaaa

SEQ ID NO: 51971 - RNA, 21 nt, synthetic construct
  source 1..21: mol_type = other RNA
ttgcggagtgccacgcactgg

SEQ ID NO: 51972 - RNA, 21 nt, synthetic construct
  source 1..21: mol_type = other RNA
acccacatgggggctgtgagt

SEQ ID NO: 51973 - RNA, 21 nt, synthetic construct
  source 1..21: mol_type = other RNA
gtgtgcaatcagcactgtgac

SEQ ID NO: 51974 - RNA, 21 nt, synthetic construct
  source 1..21: mol_type = other RNA
gcttccagtgtggatcagcac

SEQ ID NO: 51975 - RNA, 21 nt, synthetic construct
  source 1..21: mol_type = other RNA
ccgcacctcgaccctgctgcc

SEQ ID NO: 51976 - RNA, 21 nt, synthetic construct
  source 1..21: mol_type = other RNA
ctacgactgagtccactggat

SEQ ID NO: 51977 - RNA, 21 nt, synthetic construct
  source 1..21: mol_type = other RNA
ccgcacctcgaccctgctgcc

SEQ ID NO: 51978 - RNA, 21 nt, synthetic construct
  source 1..21: mol_type = other RNA
ccgcacctcgaccctgctgcc

SEQ ID NO: 51979 - RNA, 21 nt, synthetic construct
  source 1..21: mol_type = other RNA
ctacgactgagtccactggat

SEQ ID NO: 51980 - RNA, 21 nt, synthetic construct
  source 1..21: mol_type = other RNA
ccgcacctcgaccctgctgcc

SEQ ID NO: 51981 - RNA, 21 nt, synthetic construct
  source 1..21: mol_type = other RNA
gccctgtgacgcccagggtca

SEQ ID NO: 51982 - RNA, 21 nt, synthetic construct
  source 1..21: mol_type = other RNA
gccctcaccctagcagcagga

SEQ ID NO: 51983 - RNA, 21 nt, synthetic construct
  source 1..21: mol_type = other RNA
gccctcaccctagcagcagga

SEQ ID NO: 51984 - RNA, 21 nt, synthetic construct
  source 1..21: mol_type = other RNA
gtggtgaccacgggctgtgag

SEQ ID NO: 51985 - RNA, 21 nt, synthetic construct
  source 1..21: mol_type = other RNA
gccctcaccctagcagcagga

SEQ ID NO: 51986 - RNA, 21 nt, synthetic construct
  source 1..21: mol_type = other RNA
gtggtgaccacgggctgtgag

SEQ ID NO: 51987 - RNA, 21 nt, synthetic construct
  source 1..21: mol_type = other RNA
ggagacggtgcccttgcactg

SEQ ID NO: 51988 - RNA, 21 nt, synthetic construct
  source 1..21: mol_type = other RNA
gagacggtgcccttgcactgt

SEQ ID NO: 51989 - RNA, 21 nt, synthetic construct
  source 1..21: mol_type = other RNA
ctgcacggacgaggagggcat

SEQ ID NO: 51990 - RNA, 21 nt, synthetic construct
  source 1..21: mol_type = other RNA
atcttggcccaggactactgt

SEQ ID NO: 51991 - RNA, 21 nt, synthetic construct
  source 1..21: mol_type = other RNA
gatccacggccaccccgtcct

SEQ ID NO: 51992 - RNA, 21 nt, synthetic construct
  source 1..21: mol_type = other RNA
gatccacggccaccccgtcct

SEQ ID NO: 51993 - RNA, 21 nt, synthetic construct
  source 1..21: mol_type = other RNA
gatccacggccaccccgtcct

SEQ ID NO: 51994 - RNA, 21 nt, synthetic construct
  source 1..21: mol_type = other RNA
gatccacggccaccccgtcct

SEQ ID NO: 51995 - RNA, 21 nt, synthetic construct
  source 1..21: mol_type = other RNA
cctggagagaccatcagggtc

SEQ ID NO: 51996 - RNA, 21 nt, synthetic construct
  source 1..21: mol_type = other RNA
accccgggccacaccaggggc

SEQ ID NO: 51997 - RNA, 21 nt, synthetic construct
  source 1..21: mol_type = other RNA
aacagctcacactaccaaagt

SEQ ID NO: 51998 - RNA, 21 nt, synthetic construct
  source 1..21: mol_type = other RNA
aacagctcacactaccaaagt

SEQ ID NO: 51999 - RNA, 21 nt, synthetic construct
  source 1..21: mol_type = other RNA
aacagctcacactaccaaagt

SEQ ID NO: 52000 - RNA, 21 nt, synthetic construct
  source 1..21: mol_type = other RNA
aacagctcacactaccaaagt

SEQ ID NO: 52001 - RNA, 21 nt, synthetic construct
  source 1..21: mol_type = other RNA
aacagctcacactaccaaagt

SEQ ID NO: 52002 - RNA, 21 nt, synthetic construct
  source 1..21: mol_type = other RNA
ccaccacagccgctctgtgat

SEQ ID NO: 52003 - RNA, 21 nt, synthetic construct
  source 1..21: mol_type = other RNA
tcctcaccaccctgagaccca

SEQ ID NO: 52004 - RNA, 21 nt, synthetic construct
  source 1..21: mol_type = other RNA
cggggagcggtgggtcagcaa

SEQ ID NO: 52005 - RNA, 21 nt, synthetic construct
  source 1..21: mol_type = other RNA
gccggaggggccgtctgtgag

SEQ ID NO: 52006 - RNA, 21 nt, synthetic construct
  source 1..21: mol_type = other RNA
gccggaggggccgtctgtgag

SEQ ID NO: 52007 - RNA, 21 nt, synthetic construct
  source 1..21: mol_type = other RNA
gccggaggggccgtctgtgag

SEQ ID NO: 52008 - RNA, 21 nt, synthetic construct
  source 1..21: mol_type = other RNA
gcgctccgtgctcctgctgcc

SEQ ID NO: 52009 - RNA, 21 nt, synthetic construct
  source 1..21: mol_type = other RNA
gctctgcgaggaccactgtgt

SEQ ID NO: 52010 - RNA, 21 nt, synthetic construct
  source 1..21: mol_type = other RNA
cttcaacaccacctgcagctc

SEQ ID NO: 52011 - RNA, 21 nt, synthetic construct
  source 1..21: mol_type = other RNA
gtggtgaccatgggctgtgag

SEQ ID NO: 52012 - RNA, 21 nt, synthetic construct
  source 1..21: mol_type = other RNA
gtggtgaccatgggctgtgag

SEQ ID NO: 52013 - RNA, 21 nt, synthetic construct
  source 1..21: mol_type = other RNA
cagcatcccaaagccccctct

SEQ ID NO: 52014 - RNA, 21 nt, synthetic construct
  source 1..21: mol_type = other RNA
cttggcccaggactactgtgg

SEQ ID NO: 52015 - RNA, 21 nt, synthetic construct
  source 1..21: mol_type = other RNA
ccgtggtgggggacgcactgg

SEQ ID NO: 52016 - RNA, 21 nt, synthetic construct
  source 1..21: mol_type = other RNA
ggatccgggtcctctgctgca

SEQ ID NO: 52017 - RNA, 21 nt, synthetic construct
  source 1..21: mol_type = other RNA
tgcagtgacgaccactgcagg

SEQ ID NO: 52018 - RNA, 21 nt, synthetic construct
  source 1..21: mol_type = other RNA
gggaatctcagcctctacctg

SEQ ID NO: 52019 - RNA, 21 nt, synthetic construct
  source 1..21: mol_type = other RNA
ctgcccccgcgccctcagcat

SEQ ID NO: 52020 - RNA, 21 nt, synthetic construct
  source 1..21: mol_type = other RNA
tcgacggcgacgtcttccgct

SEQ ID NO: 52021 - RNA, 21 nt, synthetic construct
  source 1..21: mol_type = other RNA
ccgcctgggtcccccactcca

SEQ ID NO: 52022 - RNA, 21 nt, synthetic construct
  source 1..21: mol_type = other RNA
ctccacccaggcaactgctgg

SEQ ID NO: 52023 - RNA, 21 nt, synthetic construct
  source 1..21: mol_type = other RNA
agtctgtgagcagcccctggg

SEQ ID NO: 52024 - RNA, 21 nt, synthetic construct
  source 1..21: mol_type = other RNA
ctccacccaggcaactgctgg

SEQ ID NO: 52025 - RNA, 21 nt, synthetic construct
  source 1..21: mol_type = other RNA
ctccacccaggcaactgctgg

SEQ ID NO: 52026 - RNA, 21 nt, synthetic construct
  source 1..21: mol_type = other RNA
ccgatggccagccagtccagc

SEQ ID NO: 52027 - RNA, 21 nt, synthetic construct
  source 1..21: mol_type = other RNA
aatgggcgggtgtgcagcacc

SEQ ID NO: 52028 - RNA, 21 nt, synthetic construct
  source 1..21: mol_type = other RNA
ttcgacggcgacgtcttccgc

SEQ ID NO: 52029 - RNA, 21 nt, synthetic construct
  source 1..21: mol_type = other RNA
accttcgacggcgacgtcttc

SEQ ID NO: 52030 - RNA, 21 nt, synthetic construct
  source 1..21: mol_type = other RNA
ccttcgacggcgacgtcttcc

SEQ ID NO: 52031 - RNA, 21 nt, synthetic construct
  source 1..21: mol_type = other RNA
caccgtggggaccacccgcac

SEQ ID NO: 52032 - RNA, 21 nt, synthetic construct
  source 1..21: mol_type = other RNA
tgcatgtttgacacctgcaac

SEQ ID NO: 52033 - RNA, 21 nt, synthetic construct
  source 1..21: mol_type = other RNA
gcatgtttgacacctgcaact

SEQ ID NO: 52034 - RNA, 21 nt, synthetic construct
  source 1..21: mol_type = other RNA
tttccttcgtgcctgtggacg

SEQ ID NO: 52035 - RNA, 21 nt, synthetic construct
  source 1..21: mol_type = other RNA
gcctggagagaccatcagggt

SEQ ID NO: 52036 - RNA, 21 nt, synthetic construct
  source 1..21: mol_type = other RNA
tttgggaacagctggaagctc

SEQ ID NO: 52037 - RNA, 21 nt, synthetic construct
  source 1..21: mol_type = other RNA
acccaaggacccctgcacggc

SEQ ID NO: 52038 - RNA, 21 nt, synthetic construct
  source 1..21: mol_type = other RNA
cccaaggacccctgcacggcc

SEQ ID NO: 52039 - RNA, 21 nt, synthetic construct
  source 1..21: mol_type = other RNA
gtgaccatgggctgtgagccc

SEQ ID NO: 52040 - RNA, 21 nt, synthetic construct
  source 1..21: mol_type = other RNA
ctttgacacctactccaacat

SEQ ID NO: 52041 - RNA, 21 nt, synthetic construct
  source 1..21: mol_type = other RNA
tccacccaggcaactgctggc

SEQ ID NO: 52042 - RNA, 21 nt, synthetic construct
  source 1..21: mol_type = other RNA
gtgaccatgggctgtgagccc

SEQ ID NO: 52043 - RNA, 21 nt, synthetic construct
  source 1..21: mol_type = other RNA
ctttgacacctactccaacat

SEQ ID NO: 52044 - RNA, 21 nt, synthetic construct
  source 1..21: mol_type = other RNA
ctttgacacctactccaacat

SEQ ID NO: 52045 - RNA, 21 nt, synthetic construct
  source 1..21: mol_type = other RNA
tccacccaggcaactgctggc

SEQ ID NO: 52046 - RNA, 21 nt, synthetic construct
  source 1..21: mol_type = other RNA
ctttgacacctactccaacat

SEQ ID NO: 52047 - RNA, 21 nt, synthetic construct
  source 1..21: mol_type = other RNA
tccacccaggcaactgctggc

SEQ ID NO: 52048 - RNA, 21 nt, synthetic construct
  source 1..21: mol_type = other RNA
tcctcagtcctcaccaccctg

SEQ ID NO: 52049 - RNA, 21 nt, synthetic construct
  source 1..21: mol_type = other RNA
gcctgatcctgtttgaccaaa

SEQ ID NO: 52050 - RNA, 21 nt, synthetic construct
  source 1..21: mol_type = other RNA
ctttgctgagtgccacaacct

SEQ ID NO: 52051 - RNA, 21 nt, synthetic construct
  source 1..21: mol_type = other RNA
gatgtgtccagctgcaggggg

SEQ ID NO: 52052 - RNA, 21 nt, synthetic construct
  source 1..21: mol_type = other RNA
ctcctctgcggagccccccgg

SEQ ID NO: 52053 - RNA, 21 nt, synthetic construct
  source 1..21: mol_type = other RNA
ccacggccggagcgcccgcgc

SEQ ID NO: 52054 - RNA, 21 nt, synthetic construct
  source 1..21: mol_type = other RNA
tcccctccttcacccttggga

SEQ ID NO: 52055 - RNA, 21 nt, synthetic construct
  source 1..21: mol_type = other RNA
catcctgtggcaccagggctg

SEQ ID NO: 52056 - RNA, 21 nt, synthetic construct
  source 1..21: mol_type = other RNA
cccctccttcacccttgggac

SEQ ID NO: 52057 - RNA, 21 nt, synthetic construct
  source 1..21: mol_type = other RNA
ccagcccggccaccacaccca

SEQ ID NO: 52058 - RNA, 21 nt, synthetic construct
  source 1..21: mol_type = other RNA
gggaacagctcacacccccaa

SEQ ID NO: 52059 - RNA, 21 nt, synthetic construct
  source 1..21: mol_type = other RNA
accatcctgtggcaccagggc

SEQ ID NO: 52060 - RNA, 21 nt, synthetic construct
  source 1..21: mol_type = other RNA
ccacctggagccaggatgtgc

SEQ ID NO: 52061 - RNA, 21 nt, synthetic construct
  source 1..21: mol_type = other RNA
gcacccaaggacccctgcacg

SEQ ID NO: 52062 - RNA, 21 nt, synthetic construct
  source 1..21: mol_type = other RNA
gactggagggacggcgtctgc

SEQ ID NO: 52063 - RNA, 21 nt, synthetic construct
  source 1..21: mol_type = other RNA
acagctccccctcccaaagtg

SEQ ID NO: 52064 - RNA, 21 nt, synthetic construct
  source 1..21: mol_type = other RNA
caccaccaccacaactgtggc

SEQ ID NO: 52065 - RNA, 21 nt, synthetic construct
  source 1..21: mol_type = other RNA
caccaccaccacaactgtggc

SEQ ID NO: 52066 - RNA, 21 nt, synthetic construct
  source 1..21: mol_type = other RNA
acagctccccctcccaaagtg

SEQ ID NO: 52067 - RNA, 21 nt, synthetic construct
  source 1..21: mol_type = other RNA
caccaccaccacaactgtggc

SEQ ID NO: 52068 - RNA, 21 nt, synthetic construct
  source 1..21: mol_type = other RNA
ccacaccaggggcacctccag

SEQ ID NO: 52069 - RNA, 21 nt, synthetic construct
  source 1..21: mol_type = other RNA
caccaccaccacaactgtggc

SEQ ID NO: 52070 - RNA, 21 nt, synthetic construct
  source 1..21: mol_type = other RNA
acagctccccctcccaaagtg

SEQ ID NO: 52071 - RNA, 21 nt, synthetic construct
  source 1..21: mol_type = other RNA
caccaccaccacaactgtggc

SEQ ID NO: 52072 - RNA, 21 nt, synthetic construct
  source 1..21: mol_type = other RNA
tcctctgcggagccccccggc

SEQ ID NO: 52073 - RNA, 21 nt, synthetic construct
  source 1..21: mol_type = other RNA
acgcctgcaggctccacagaa

SEQ ID NO: 52074 - RNA, 21 nt, synthetic construct
  source 1..21: mol_type = other RNA
gtcctccgccccgctgtcctc

SEQ ID NO: 52075 - RNA, 21 nt, synthetic construct
  source 1..21: mol_type = other RNA
acctggagccaggatgtgcat

SEQ ID NO: 52076 - RNA, 21 nt, synthetic construct
  source 1..21: mol_type = other RNA
gcatcctgcccagatgtgtcc

SEQ ID NO: 52077 - RNA, 21 nt, synthetic construct
  source 1..21: mol_type = other RNA
tgtgcagcacctggggtgact

SEQ ID NO: 52078 - RNA, 21 nt, synthetic construct
  source 1..21: mol_type = other RNA
acaggcacagccagcaccgct

SEQ ID NO: 52079 - RNA, 21 nt, synthetic construct
  source 1..21: mol_type = other RNA
acagtgactccctcctctgcc

SEQ ID NO: 52080 - RNA, 21 nt, synthetic construct
  source 1..21: mol_type = other RNA
caaagccactcccttctccag

SEQ ID NO: 52081 - RNA, 21 nt, synthetic construct
  source 1..21: mol_type = other RNA
acagtgactccctcctctgcc

SEQ ID NO: 52082 - RNA, 21 nt, synthetic construct
  source 1..21: mol_type = other RNA
agagctgaccacagcagccac

SEQ ID NO: 52083 - RNA, 21 nt, synthetic construct
  source 1..21: mol_type = other RNA
acagtgactccctcctctgcc

SEQ ID NO: 52084 - RNA, 21 nt, synthetic construct
  source 1..21: mol_type = other RNA
caaagccactcccttctccag

SEQ ID NO: 52085 - RNA, 21 nt, synthetic construct
  source 1..21: mol_type = other RNA
acagtgactccctcctctgcc

SEQ ID NO: 52086 - RNA, 21 nt, synthetic construct
  source 1..21: mol_type = other RNA
agagctgaccacagcagccac

SEQ ID NO: 52087 - RNA, 21 nt, synthetic construct
  source 1..21: mol_type = other RNA
acccaggaggagggcgactgc

SEQ ID NO: 52088 - RNA, 21 nt, synthetic construct
  source 1..21: mol_type = other RNA
ctgcatcctgcccagatgtgt

SEQ ID NO: 52089 - RNA, 21 nt, synthetic construct
  source 1..21: mol_type = other RNA
tcctcacagagcagaccacag

SEQ ID NO: 52090 - RNA, 21 nt, synthetic construct
  source 1..21: mol_type = other RNA
tcctccgccccgctgtcctcg

SEQ ID NO: 52091 - RNA, 21 nt, synthetic construct
  source 1..21: mol_type = other RNA
cacctggagccaggatgtgca

SEQ ID NO: 52092 - RNA, 21 nt, synthetic construct
  source 1..21: mol_type = other RNA
gaaggcccaggctgcctgtgc

SEQ ID NO: 52093 - RNA, 21 nt, synthetic construct
  source 1..21: mol_type = other RNA
acacccatcccctcttcctcc

SEQ ID NO: 52094 - RNA, 21 nt, synthetic construct
  source 1..21: mol_type = other RNA
cccatcccctcctccaccctt

SEQ ID NO: 52095 - RNA, 21 nt, synthetic construct
  source 1..21: mol_type = other RNA
cccatcccctcctccaccctg

SEQ ID NO: 52096 - RNA, 21 nt, synthetic construct
  source 1..21: mol_type = other RNA
actgagctgaccacaacagcc

SEQ ID NO: 52097 - RNA, 21 nt, synthetic construct
  source 1..21: mol_type = other RNA
gggctgcttctgccctgagga

SEQ ID NO: 52098 - RNA, 21 nt, synthetic construct
  source 1..21: mol_type = other RNA
cctctgcggagccccccggcc

SEQ ID NO: 52099 - RNA, 21 nt, synthetic construct
  source 1..21: mol_type = other RNA
gtggagccgagctgggagaat

SEQ ID NO: 52100 - RNA, 21 nt, synthetic construct
  source 1..21: mol_type = other RNA
gccactccctcctccagtcca

SEQ ID NO: 52101 - RNA, 21 nt, synthetic construct
  source 1..21: mol_type = other RNA
gccactccctcctccagtcca

SEQ ID NO: 52102 - RNA, 21 nt, synthetic construct
  source 1..21: mol_type = other RNA
gccactccctcctccagtcca

SEQ ID NO: 52103 - RNA, 21 nt, synthetic construct
  source 1..21: mol_type = other RNA
cgacagcagaaaggatggctg

SEQ ID NO: 52104 - RNA, 21 nt, synthetic construct
  source 1..21: mol_type = other RNA
ctggcacctgctctgtgcagg

SEQ ID NO: 52105 - RNA, 21 nt, synthetic construct
  source 1..21: mol_type = other RNA
tgcagggcggggcccacatct

SEQ ID NO: 52106 - RNA, 21 nt, synthetic construct
  source 1..21: mol_type = other RNA
gtcggatgggagtgggggctg

SEQ ID NO: 52107 - RNA, 21 nt, synthetic construct
  source 1..21: mol_type = other RNA
ctggagtttgggaacagctgg

SEQ ID NO: 52108 - RNA, 21 nt, synthetic construct
  source 1..21: mol_type = other RNA
ggagtttgggaacagctggaa

SEQ ID NO: 52109 - RNA, 21 nt, synthetic construct
  source 1..21: mol_type = other RNA
agtttgggaacagctggaagc

SEQ ID NO: 52110 - RNA, 21 nt, synthetic construct
  source 1..21: mol_type = other RNA
ggaagctctccccctcctgcc

SEQ ID NO: 52111 - RNA, 21 nt, synthetic construct
  source 1..21: mol_type = other RNA
aagctctccccctcctgcccg

SEQ ID NO: 52112 - RNA, 21 nt, synthetic construct
  source 1..21: mol_type = other RNA
ccccaccttcgccgcctgccg

SEQ ID NO: 52113 - RNA, 21 nt, synthetic construct
  source 1..21: mol_type = other RNA
catcatcaggaaggctgtggc

SEQ ID NO: 52114 - RNA, 21 nt, synthetic construct
  source 1..21: mol_type = other RNA
cagtctgtgagcagcccctgg

SEQ ID NO: 52115 - RNA, 21 nt, synthetic construct
  source 1..21: mol_type = other RNA
acacccgtggccaccatgtcc

SEQ ID NO: 52116 - RNA, 21 nt, synthetic construct
  source 1..21: mol_type = other RNA
cccccaggatgggtgccccga

SEQ ID NO: 52117 - RNA, 21 nt, synthetic construct
  source 1..21: mol_type = other RNA
gtgcagcacctggggtgactt

SEQ ID NO: 52118 - RNA, 21 nt, synthetic construct
  source 1..21: mol_type = other RNA
gctggtgctggaggcgtccaa

SEQ ID NO: 52119 - RNA, 21 nt, synthetic construct
  source 1..21: mol_type = other RNA
ctggtgctggaggcgtccaac

SEQ ID NO: 52120 - RNA, 21 nt, synthetic construct
  source 1..21: mol_type = other RNA
gcagctcctgcacctgctccg

SEQ ID NO: 52121 - RNA, 21 nt, synthetic construct
  source 1..21: mol_type = other RNA
gccctggcacctgctctgtgc

SEQ ID NO: 52122 - RNA, 21 nt, synthetic construct
  source 1..21: mol_type = other RNA
tggcacctgctctgtgcaggg

SEQ ID NO: 52123 - RNA, 21 nt, synthetic construct
  source 1..21: mol_type = other RNA
ggggctgcagctgctggtgca

SEQ ID NO: 52124 - RNA, 21 nt, synthetic construct
  source 1..21: mol_type = other RNA
agctaagctgcctgggagcct

SEQ ID NO: 52125 - RNA, 21 nt, synthetic construct
  source 1..21: mol_type = other RNA
tgtcccccggggctggtgtcg

SEQ ID NO: 52126 - RNA, 21 nt, synthetic construct
  source 1..21: mol_type = other RNA
gcactggagtttgggaacagc

SEQ ID NO: 52127 - RNA, 21 nt, synthetic construct
  source 1..21: mol_type = other RNA
actggagtttgggaacagctg

SEQ ID NO: 52128 - RNA, 21 nt, synthetic construct
  source 1..21: mol_type = other RNA
tggagtttgggaacagctgga

SEQ ID NO: 52129 - RNA, 21 nt, synthetic construct
  source 1..21: mol_type = other RNA
gagtttgggaacagctggaag

SEQ ID NO: 52130 - RNA, 21 nt, synthetic construct
  source 1..21: mol_type = other RNA
gtttgggaacagctggaagct

SEQ ID NO: 52131 - RNA, 21 nt, synthetic construct
  source 1..21: mol_type = other RNA
acagctggaagctctccccct

SEQ ID NO: 52132 - RNA, 21 nt, synthetic construct
  source 1..21: mol_type = other RNA
cagctggaagctctccccctc

SEQ ID NO: 52133 - RNA, 21 nt, synthetic construct
  source 1..21: mol_type = other RNA
gctggaagctctccccctcct

SEQ ID NO: 52134 - RNA, 21 nt, synthetic construct
  source 1..21: mol_type = other RNA
gaagctctccccctcctgccc

SEQ ID NO: 52135 - RNA, 21 nt, synthetic construct
  source 1..21: mol_type = other RNA
cctccacggccccaccttcgc

SEQ ID NO: 52136 - RNA, 21 nt, synthetic construct
  source 1..21: mol_type = other RNA
ctccacggccccaccttcgcc

SEQ ID NO: 52137 - RNA, 21 nt, synthetic construct
  source 1..21: mol_type = other RNA
cggccccaccttcgccgcctg

SEQ ID NO: 52138 - RNA, 21 nt, synthetic construct
  source 1..21: mol_type = other RNA
ggccccaccttcgccgcctgc

SEQ ID NO: 52139 - RNA, 21 nt, synthetic construct
  source 1..21: mol_type = other RNA
cacatgggggctgtgagtggc

SEQ ID NO: 52140 - RNA, 21 nt, synthetic construct
  source 1..21: mol_type = other RNA
cgccattcaccttcaccaccg

SEQ ID NO: 52141 - RNA, 21 nt, synthetic construct
  source 1..21: mol_type = other RNA
attcaccttcaccaccgcctg

SEQ ID NO: 52142 - RNA, 21 nt, synthetic construct
  source 1..21: mol_type = other RNA
accgcccagagcccggcctgg

SEQ ID NO: 52143 - RNA, 21 nt, synthetic construct
  source 1..21: mol_type = other RNA
cggcctgggaggcggagactt

SEQ ID NO: 52144 - RNA, 21 nt, synthetic construct
  source 1..21: mol_type = other RNA
caccagccctcagccctccct

SEQ ID NO: 52145 - RNA, 21 nt, synthetic construct
  source 1..21: mol_type = other RNA
ccagccctcagccctccctca

SEQ ID NO: 52146 - RNA, 21 nt, synthetic construct
  source 1..21: mol_type = other RNA
cctggcacaggtggggcagaa

SEQ ID NO: 52147 - RNA, 21 nt, synthetic construct
  source 1..21: mol_type = other RNA
cacagagctggagacggccac

SEQ ID NO: 52148 - RNA, 21 nt, synthetic construct
  source 1..21: mol_type = other RNA
acagagctggagacggccacc

SEQ ID NO: 52149 - RNA, 21 nt, synthetic construct
  source 1..21: mol_type = other RNA
caccaccaccacccaggccct

SEQ ID NO: 52150 - RNA, 21 nt, synthetic construct
  source 1..21: mol_type = other RNA
gccagcaccacagcagtcccc

SEQ ID NO: 52151 - RNA, 21 nt, synthetic construct
  source 1..21: mol_type = other RNA
ccagcactgagaagcacagcc

SEQ ID NO: 52152 - RNA, 21 nt, synthetic construct
  source 1..21: mol_type = other RNA
cagcactgagaagcacagcca

SEQ ID NO: 52153 - RNA, 21 nt, synthetic construct
  source 1..21: mol_type = other RNA
cacccatcccctcttcctccc

SEQ ID NO: 52154 - RNA, 21 nt, synthetic construct
  source 1..21: mol_type = other RNA
atcccctcttcctccctgggc

SEQ ID NO: 52155 - RNA, 21 nt, synthetic construct
  source 1..21: mol_type = other RNA
cccctcttcctccctgggcac

SEQ ID NO: 52156 - RNA, 21 nt, synthetic construct
  source 1..21: mol_type = other RNA
accaccaccacaactgtggcc

SEQ ID NO: 52157 - RNA, 21 nt, synthetic construct
  source 1..21: mol_type = other RNA
gccccccagcagtccccacac

SEQ ID NO: 52158 - RNA, 21 nt, synthetic construct
  source 1..21: mol_type = other RNA
acaccacggccacctccagga

SEQ ID NO: 52159 - RNA, 21 nt, synthetic construct
  source 1..21: mol_type = other RNA
cggccaccgcctcctccaccc

SEQ ID NO: 52160 - RNA, 21 nt, synthetic construct
  source 1..21: mol_type = other RNA
ccagcactgagaagcacagcc

SEQ ID NO: 52161 - RNA, 21 nt, synthetic construct
  source 1..21: mol_type = other RNA
cagcactgagaagcacagcca

SEQ ID NO: 52162 - RNA, 21 nt, synthetic construct
  source 1..21: mol_type = other RNA
tcccctcctcctccctgggca

SEQ ID NO: 52163 - RNA, 21 nt, synthetic construct
  source 1..21: mol_type = other RNA
cctcctccctgggcaccacct

SEQ ID NO: 52164 - RNA, 21 nt, synthetic construct
  source 1..21: mol_type = other RNA
accaccaccacaactgtggcc

SEQ ID NO: 52165 - RNA, 21 nt, synthetic construct
  source 1..21: mol_type = other RNA
gtcccccagcagtccccacac

SEQ ID NO: 52166 - RNA, 21 nt, synthetic construct
  source 1..21: mol_type = other RNA
ggaccacggccacggccacac

SEQ ID NO: 52167 - RNA, 21 nt, synthetic construct
  source 1..21: mol_type = other RNA
acggccaccacacccacagcc

SEQ ID NO: 52168 - RNA, 21 nt, synthetic construct
  source 1..21: mol_type = other RNA
caaagccacttcctcctccag

SEQ ID NO: 52169 - RNA, 21 nt, synthetic construct
  source 1..21: mol_type = other RNA
tccacccctcctccactccgg

SEQ ID NO: 52170 - RNA, 21 nt, synthetic construct
  source 1..21: mol_type = other RNA
cagagctgaccacagcagcca

SEQ ID NO: 52171 - RNA, 21 nt, synthetic construct
  source 1..21: mol_type = other RNA
gagctgaccacagcagccact

SEQ ID NO: 52172 - RNA, 21 nt, synthetic construct
  source 1..21: mol_type = other RNA
agccactggccccacggccac

SEQ ID NO: 52173 - RNA, 21 nt, synthetic construct
  source 1..21: mol_type = other RNA
cggccaccgcctcctccaccc

SEQ ID NO: 52174 - RNA, 21 nt, synthetic construct
  source 1..21: mol_type = other RNA
ccagcactgagaagcacagcc

SEQ ID NO: 52175 - RNA, 21 nt, synthetic construct
  source 1..21: mol_type = other RNA
cagcactgagaagcacagcca

SEQ ID NO: 52176 - RNA, 21 nt, synthetic construct
  source 1..21: mol_type = other RNA
atcccctcttcctccctgggc

SEQ ID NO: 52177 - RNA, 21 nt, synthetic construct
  source 1..21: mol_type = other RNA
cccctcttcctccctgggcac

SEQ ID NO: 52178 - RNA, 21 nt, synthetic construct
  source 1..21: mol_type = other RNA
ttaccaccacgaccaccacaa

SEQ ID NO: 52179 - RNA, 21 nt, synthetic construct
  source 1..21: mol_type = other RNA
accaccaccacaactgtggcc

SEQ ID NO: 52180 - RNA, 21 nt, synthetic construct
  source 1..21: mol_type = other RNA
ggcggtccctgccccccagca

SEQ ID NO: 52181 - RNA, 21 nt, synthetic construct
  source 1..21: mol_type = other RNA
gcggtccctgccccccagcag

SEQ ID NO: 52182 - RNA, 21 nt, synthetic construct
  source 1..21: mol_type = other RNA
gccccccagcagtccccacac

SEQ ID NO: 52183 - RNA, 21 nt, synthetic construct
  source 1..21: mol_type = other RNA
tccaggaccacagccacagcc

SEQ ID NO: 52184 - RNA, 21 nt, synthetic construct
  source 1..21: mol_type = other RNA
cggccaccgcctcctccaccc

SEQ ID NO: 52185 - RNA, 21 nt, synthetic construct
  source 1..21: mol_type = other RNA
ccagcactgagaagcacagcc

SEQ ID NO: 52186 - RNA, 21 nt, synthetic construct
  source 1..21: mol_type = other RNA
cagcactgagaagcacagcca

SEQ ID NO: 52187 - RNA, 21 nt, synthetic construct
  source 1..21: mol_type = other RNA
tcccctcctcctccctgggca

SEQ ID NO: 52188 - RNA, 21 nt, synthetic construct
  source 1..21: mol_type = other RNA
cctcctccctgggcaccacct

SEQ ID NO: 52189 - RNA, 21 nt, synthetic construct
  source 1..21: mol_type = other RNA
caccccctcttccaccccagg

SEQ ID NO: 52190 - RNA, 21 nt, synthetic construct
  source 1..21: mol_type = other RNA
accaccaccacaactgtggcc

SEQ ID NO: 52191 - RNA, 21 nt, synthetic construct
  source 1..21: mol_type = other RNA
gtcccccagcagtccccacac

SEQ ID NO: 52192 - RNA, 21 nt, synthetic construct
  source 1..21: mol_type = other RNA
acaccacggccacctccagga

SEQ ID NO: 52193 - RNA, 21 nt, synthetic construct
  source 1..21: mol_type = other RNA
ggaccacggccacggccacac

SEQ ID NO: 52194 - RNA, 21 nt, synthetic construct
  source 1..21: mol_type = other RNA
gctgaccagcccggccaccac

SEQ ID NO: 52195 - RNA, 21 nt, synthetic construct
  source 1..21: mol_type = other RNA
ccggccaccacacccacagcc

SEQ ID NO: 52196 - RNA, 21 nt, synthetic construct
  source 1..21: mol_type = other RNA
caaagccacttcctcctccag

SEQ ID NO: 52197 - RNA, 21 nt, synthetic construct
  source 1..21: mol_type = other RNA
acccatcccctcctccaccct

SEQ ID NO: 52198 - RNA, 21 nt, synthetic construct
  source 1..21: mol_type = other RNA
tccacccctcctccactccgg

SEQ ID NO: 52199 - RNA, 21 nt, synthetic construct
  source 1..21: mol_type = other RNA
cagagctgaccacagcagcca

SEQ ID NO: 52200 - RNA, 21 nt, synthetic construct
  source 1..21: mol_type = other RNA
gagctgaccacagcagccact

SEQ ID NO: 52201 - RNA, 21 nt, synthetic construct
  source 1..21: mol_type = other RNA
agccactggccccacggccac

SEQ ID NO: 52202 - RNA, 21 nt, synthetic construct
  source 1..21: mol_type = other RNA
cggccaccgcctcctccaccc

SEQ ID NO: 52203 - RNA, 21 nt, synthetic construct
  source 1..21: mol_type = other RNA
actgcaactgcccttccagca

SEQ ID NO: 52204 - RNA, 21 nt, synthetic construct
  source 1..21: mol_type = other RNA
ccagcactgagaagcacagcc

SEQ ID NO: 52205 - RNA, 21 nt, synthetic construct
  source 1..21: mol_type = other RNA
cagcactgagaagcacagcca

SEQ ID NO: 52206 - RNA, 21 nt, synthetic construct
  source 1..21: mol_type = other RNA
tcccctcctcctccctgggca

SEQ ID NO: 52207 - RNA, 21 nt, synthetic construct
  source 1..21: mol_type = other RNA
cctcctccctgggcaccacct

SEQ ID NO: 52208 - RNA, 21 nt, synthetic construct
  source 1..21: mol_type = other RNA
accaccaccacaactgtggcc

SEQ ID NO: 52209 - RNA, 21 nt, synthetic construct
  source 1..21: mol_type = other RNA
cacccatcaccccagtgctga

SEQ ID NO: 52210 - RNA, 21 nt, synthetic construct
  source 1..21: mol_type = other RNA
caaagccacttcctcctccag

SEQ ID NO: 52211 - RNA, 21 nt, synthetic construct
  source 1..21: mol_type = other RNA
cacagccacaaaatccacagc

SEQ ID NO: 52212 - RNA, 21 nt, synthetic construct
  source 1..21: mol_type = other RNA
acagccacaaaatccacagct

SEQ ID NO: 52213 - RNA, 21 nt, synthetic construct
  source 1..21: mol_type = other RNA
acccatcccctcctccaccct

SEQ ID NO: 52214 - RNA, 21 nt, synthetic construct
  source 1..21: mol_type = other RNA
ccctgtggaccacgtggaccg

SEQ ID NO: 52215 - RNA, 21 nt, synthetic construct
  source 1..21: mol_type = other RNA
tgaccaccacagccaccatga

SEQ ID NO: 52216 - RNA, 21 nt, synthetic construct
  source 1..21: mol_type = other RNA
gaccaccacagccaccatgac

SEQ ID NO: 52217 - RNA, 21 nt, synthetic construct
  source 1..21: mol_type = other RNA
cccacagccactgcctccacg

SEQ ID NO: 52218 - RNA, 21 nt, synthetic construct
  source 1..21: mol_type = other RNA
ggtgcatgggaaggaggaggg

SEQ ID NO: 52219 - RNA, 21 nt, synthetic construct
  source 1..21: mol_type = other RNA
ggaggagggcctgatcctgtt

SEQ ID NO: 52220 - RNA, 21 nt, synthetic construct
  source 1..21: mol_type = other RNA
gccgccttgaggtgccctgcc

SEQ ID NO: 52221 - RNA, 21 nt, synthetic construct
  source 1..21: mol_type = other RNA
cccccagagcctgcctgtgtg

SEQ ID NO: 52222 - RNA, 21 nt, synthetic construct
  source 1..21: mol_type = other RNA
atcctgcccagatgtgtccag

SEQ ID NO: 52223 - RNA, 21 nt, synthetic construct
  source 1..21: mol_type = other RNA
ccatcctgtggcaccagggct

SEQ ID NO: 52224 - RNA, 21 nt, synthetic construct
  source 1..21: mol_type = other RNA
ccatggctcccccacacaccc

SEQ ID NO: 52225 - RNA, 21 nt, synthetic construct
  source 1..21: mol_type = other RNA
tccgtgctcctgctgcccacc

SEQ ID NO: 52226 - RNA, 21 nt, synthetic construct
  source 1..21: mol_type = other RNA
aggccagctgctgccaggaag

SEQ ID NO: 52227 - RNA, 21 nt, synthetic construct
  source 1..21: mol_type = other RNA
ggccagctgctgccaggaagc

SEQ ID NO: 52228 - RNA, 21 nt, synthetic construct
  source 1..21: mol_type = other RNA
gccgcaggcagagacccaggg

SEQ ID NO: 52229 - RNA, 21 nt, synthetic construct
  source 1..21: mol_type = other RNA
ggtggggcagaaggtgcactg

SEQ ID NO: 52230 - RNA, 21 nt, synthetic construct
  source 1..21: mol_type = other RNA
ggcttcacagtcaccccctcc

SEQ ID NO: 52231 - RNA, 21 nt, synthetic construct
  source 1..21: mol_type = other RNA
aacttcgacgacaatgccatc

SEQ ID NO: 52232 - RNA, 21 nt, synthetic construct
  source 1..21: mol_type = other RNA
tgctgcagggtaactcagggc

SEQ ID NO: 52233 - RNA, 21 nt, synthetic construct
  source 1..21: mol_type = other RNA
aacagccactacaactgcagc

SEQ ID NO: 52234 - RNA, 21 nt, synthetic construct
  source 1..21: mol_type = other RNA
cctgcatggtgactgcagcta

SEQ ID NO: 52235 - RNA, 21 nt, synthetic construct
  source 1..21: mol_type = other RNA
tgccctgtgacgcccagggtc

SEQ ID NO: 52236 - RNA, 21 nt, synthetic construct
  source 1..21: mol_type = other RNA
tgcaagcccctgccctgtgac

SEQ ID NO: 52237 - RNA, 21 nt, synthetic construct
  source 1..21: mol_type = other RNA
gaccacccgcacccctgcagt

SEQ ID NO: 52238 - RNA, 21 nt, synthetic construct
  source 1..21: mol_type = other RNA
ggctctgtggccaccccctcc

SEQ ID NO: 52239 - RNA, 21 nt, synthetic construct
  source 1..21: mol_type = other RNA
ggctctgtggccaccccctcc

SEQ ID NO: 52240 - RNA, 21 nt, synthetic construct
  source 1..21: mol_type = other RNA
cccgggccacaccagggccac

SEQ ID NO: 52241 - RNA, 21 nt, synthetic construct
  source 1..21: mol_type = other RNA
ggctctgtggccaccccctcc

SEQ ID NO: 52242 - RNA, 21 nt, synthetic construct
  source 1..21: mol_type = other RNA
ggctctgtggccaccccctct

SEQ ID NO: 52243 - RNA, 21 nt, synthetic construct
  source 1..21: mol_type = other RNA
ggctctgtggccaccccctcc

SEQ ID NO: 52244 - RNA, 21 nt, synthetic construct
  source 1..21: mol_type = other RNA
cctgtccatgcctgctgcagg

SEQ ID NO: 52245 - RNA, 21 nt, synthetic construct
  source 1..21: mol_type = other RNA
aagcctggagagaccatcagg

SEQ ID NO: 52246 - RNA, 21 nt, synthetic construct
  source 1..21: mol_type = other RNA
cactccagagactgcccacac

SEQ ID NO: 52247 - RNA, 21 nt, synthetic construct
  source 1..21: mol_type = other RNA
cactccagagactgcccacac

SEQ ID NO: 52248 - RNA, 21 nt, synthetic construct
  source 1..21: mol_type = other RNA
cacccaaggacccctgcacgg

SEQ ID NO: 52249 - RNA, 21 nt, synthetic construct
  source 1..21: mol_type = other RNA
ccccctcctgcccggacgccc

SEQ ID NO: 52250 - RNA, 21 nt, synthetic construct
  source 1..21: mol_type = other RNA
gcaagcccctgccctgtgacg

SEQ ID NO: 52251 - RNA, 21 nt, synthetic construct
  source 1..21: mol_type = other RNA
ctgcagccactggatccacgg

SEQ ID NO: 52252 - RNA, 21 nt, synthetic construct
  source 1..21: mol_type = other RNA
atgggcagcgggaggagctgc

SEQ ID NO: 52253 - RNA, 21 nt, synthetic construct
  source 1..21: mol_type = other RNA
agcacacccacccccacccca

SEQ ID NO: 52254 - RNA, 21 nt, synthetic construct
  source 1..21: mol_type = other RNA
aggcccaggggctggtgctgg

SEQ ID NO: 52255 - RNA, 21 nt, synthetic construct
  source 1..21: mol_type = other RNA
tgggcagcgggaggagctgcc

SEQ ID NO: 52256 - RNA, 21 nt, synthetic construct
  source 1..21: mol_type = other RNA
gccgctggaggagctgggcca

SEQ ID NO: 52257 - RNA, 21 nt, synthetic construct
  source 1..21: mol_type = other RNA
tagcacacccacccccacccc

SEQ ID NO: 52258 - RNA, 21 nt, synthetic construct
  source 1..21: mol_type = other RNA
acacccacccccaccccatgc

SEQ ID NO: 52259 - RNA, 21 nt, synthetic construct
  source 1..21: mol_type = other RNA
ggacgccctggcacccaagga

SEQ ID NO: 52260 - RNA, 21 nt, synthetic construct
  source 1..21: mol_type = other RNA
cacagtcatcagctccagagc

SEQ ID NO: 52261 - RNA, 21 nt, synthetic construct
  source 1..21: mol_type = other RNA
ggccacacccagcaagacccg

SEQ ID NO: 52262 - RNA, 21 nt, synthetic construct
  source 1..21: mol_type = other RNA
ggccacacccagcaagacccg

SEQ ID NO: 52263 - RNA, 21 nt, synthetic construct
  source 1..21: mol_type = other RNA
agccacacccagcaagacccg

SEQ ID NO: 52264 - RNA, 21 nt, synthetic construct
  source 1..21: mol_type = other RNA
ggccacacccagcaagacccg

SEQ ID NO: 52265 - RNA, 21 nt, synthetic construct
  source 1..21: mol_type = other RNA
acacctcctctactccagaga

SEQ ID NO: 52266 - RNA, 21 nt, synthetic construct
  source 1..21: mol_type = other RNA
ggtgaccccctcctccgtccc

SEQ ID NO: 52267 - RNA, 21 nt, synthetic construct
  source 1..21: mol_type = other RNA
ccacacccgcagccaccagct

SEQ ID NO: 52268 - RNA, 21 nt, synthetic construct
  source 1..21: mol_type = other RNA
ccacacccacagctaccagcg

SEQ ID NO: 52269 - RNA, 21 nt, synthetic construct
  source 1..21: mol_type = other RNA
ccacacccacagctaccagcg

SEQ ID NO: 52270 - RNA, 21 nt, synthetic construct
  source 1..21: mol_type = other RNA
aacagctccccctcccaaagt

SEQ ID NO: 52271 - RNA, 21 nt, synthetic construct
  source 1..21: mol_type = other RNA
aacagctccccctcccaaagt

SEQ ID NO: 52272 - RNA, 21 nt, synthetic construct
  source 1..21: mol_type = other RNA
aacagctccccctcccaaagt

SEQ ID NO: 52273 - RNA, 21 nt, synthetic construct
  source 1..21: mol_type = other RNA
atgtttgacacctgcaactgt

SEQ ID NO: 52274 - RNA, 21 nt, synthetic construct
  source 1..21: mol_type = other RNA
cagcatcctccacggccccac

SEQ ID NO: 52275 - RNA, 21 nt, synthetic construct
  source 1..21: mol_type = other RNA
cacagtcaccagctccaaagc

SEQ ID NO: 52276 - RNA, 21 nt, synthetic construct
  source 1..21: mol_type = other RNA
cacagtcaccagctccaaagc

SEQ ID NO: 52277 - RNA, 21 nt, synthetic construct
  source 1..21: mol_type = other RNA
cacagtcaccagctccaaagc

SEQ ID NO: 52278 - RNA, 21 nt, synthetic construct
  source 1..21: mol_type = other RNA
cacagtcaccagctccaaagc

SEQ ID NO: 52279 - RNA, 21 nt, synthetic construct
  source 1..21: mol_type = other RNA
gagcccacagctggaggggat

SEQ ID NO: 52280 - RNA, 21 nt, synthetic construct
  source 1..21: mol_type = other RNA
cccaccgccagtgtcctccgc

SEQ ID NO: 52281 - RNA, 21 nt, synthetic construct
  source 1..21: mol_type = other RNA
ctagtgggctccaggcctgtg

SEQ ID NO: 52282 - RNA, 21 nt, synthetic construct
  source 1..21: mol_type = other RNA
gctgcctacgcccaggcctgc

SEQ ID NO: 52283 - RNA, 21 nt, synthetic construct
  source 1..21: mol_type = other RNA
cacccatcccctcctccaccc

SEQ ID NO: 52284 - RNA, 21 nt, synthetic construct
  source 1..21: mol_type = other RNA
cacccatcccctcctccaccc

SEQ ID NO: 52285 - RNA, 21 nt, synthetic construct
  source 1..21: mol_type = other RNA
gagggctcctgccccggagcg

SEQ ID NO: 52286 - RNA, 21 nt, synthetic construct
  source 1..21: mol_type = other RNA
caccccgtcctccaccccagg

SEQ ID NO: 52287 - RNA, 21 nt, synthetic construct
  source 1..21: mol_type = other RNA
caccccgtcctccaccccagg

SEQ ID NO: 52288 - RNA, 21 nt, synthetic construct
  source 1..21: mol_type = other RNA
caccccgtcctccaccccagg

SEQ ID NO: 52289 - RNA, 21 nt, synthetic construct
  source 1..21: mol_type = other RNA
caccccgtcctccaccccagg

SEQ ID NO: 52290 - RNA, 21 nt, synthetic construct
  source 1..21: mol_type = other RNA
caccccgtcctccaccccagg

SEQ ID NO: 52291 - RNA, 21 nt, synthetic construct
  source 1..21: mol_type = other RNA
agggctgcttctgccctgagg

SEQ ID NO: 52292 - RNA, 21 nt, synthetic construct
  source 1..21: mol_type = other RNA
gactggcgaggtgcaaccggt

SEQ ID NO: 52293 - RNA, 21 nt, synthetic construct
  source 1..21: mol_type = other RNA
ggctccacggtgaccccctcc

SEQ ID NO: 52294 - RNA, 21 nt, synthetic construct
  source 1..21: mol_type = other RNA
ggttccacggtgaccccctcc

SEQ ID NO: 52295 - RNA, 21 nt, synthetic construct
  source 1..21: mol_type = other RNA
ggctccacggtgaccccctcc

SEQ ID NO: 52296 - RNA, 21 nt, synthetic construct
  source 1..21: mol_type = other RNA
ggctccacggtgaccccctcc

SEQ ID NO: 52297 - RNA, 21 nt, synthetic construct
  source 1..21: mol_type = other RNA
ggctccacggtgaccccctcc

SEQ ID NO: 52298 - RNA, 21 nt, synthetic construct
  source 1..21: mol_type = other RNA
gatatcgtcctcactgtcacc

SEQ ID NO: 52299 - RNA, 21 nt, synthetic construct
  source 1..21: mol_type = other RNA
gagtgccgggcggcgcagctt

SEQ ID NO: 52300 - RNA, 21 nt, synthetic construct
  source 1..21: mol_type = other RNA
agctgggagaatgcagggcac

SEQ ID NO: 52301 - RNA, 21 nt, synthetic construct
  source 1..21: mol_type = other RNA
gtcagcatccggctggtgctg

SEQ ID NO: 52302 - RNA, 21 nt, synthetic construct
  source 1..21: mol_type = other RNA
gacctgcatggtgactgcagc

SEQ ID NO: 52303 - RNA, 21 nt, synthetic construct
  source 1..21: mol_type = other RNA
ccttctcgcgctgccactcca

SEQ ID NO: 52304 - RNA, 21 nt, synthetic construct
  source 1..21: mol_type = other RNA
atcagggccgctggagggcac

SEQ ID NO: 52305 - RNA, 21 nt, synthetic construct
  source 1..21: mol_type = other RNA
gtggggcagaaggtgcactgt

SEQ ID NO: 52306 - RNA, 21 nt, synthetic construct
  source 1..21: mol_type = other RNA
gacggggagcttgggcacatg

SEQ ID NO: 52307 - RNA, 21 nt, synthetic construct
  source 1..21: mol_type = other RNA
cgcccgacaggcacagccagc

SEQ ID NO: 52308 - RNA, 21 nt, synthetic construct
  source 1..21: mol_type = other RNA
cctgagaacagctccccctcc

SEQ ID NO: 52309 - RNA, 21 nt, synthetic construct
  source 1..21: mol_type = other RNA
accacggccaccacaaccggg

SEQ ID NO: 52310 - RNA, 21 nt, synthetic construct
  source 1..21: mol_type = other RNA
ctcccaaagtgctgaccagca

SEQ ID NO: 52311 - RNA, 21 nt, synthetic construct
  source 1..21: mol_type = other RNA
ccctcaaagtgctgaccagca

SEQ ID NO: 52312 - RNA, 21 nt, synthetic construct
  source 1..21: mol_type = other RNA
ctcccaaagtgctgaccagcc

SEQ ID NO: 52313 - RNA, 21 nt, synthetic construct
  source 1..21: mol_type = other RNA
gccacggccaccacaaccggg

SEQ ID NO: 52314 - RNA, 21 nt, synthetic construct
  source 1..21: mol_type = other RNA
cttcaatggccaagtcttcca

SEQ ID NO: 52315 - RNA, 21 nt, synthetic construct
  source 1..21: mol_type = other RNA
agcagaaaggatggctgctgg

SEQ ID NO: 52316 - RNA, 21 nt, synthetic construct
  source 1..21: mol_type = other RNA
ggggatggcggagggctgctt

SEQ ID NO: 52317 - RNA, 21 nt, synthetic construct
  source 1..21: mol_type = other RNA
gggcagacaggctggtccagg

SEQ ID NO: 52318 - RNA, 21 nt, synthetic construct
  source 1..21: mol_type = other RNA
aggtcagagaggggtcagcat

SEQ ID NO: 52319 - RNA, 21 nt, synthetic construct
  source 1..21: mol_type = other RNA
ccggctggtgctgacattcct

SEQ ID NO: 52320 - RNA, 21 nt, synthetic construct
  source 1..21: mol_type = other RNA
cagggcggggcccacatctcc

SEQ ID NO: 52321 - RNA, 21 nt, synthetic construct
  source 1..21: mol_type = other RNA
gcccacatctccacctatgat

SEQ ID NO: 52322 - RNA, 21 nt, synthetic construct
  source 1..21: mol_type = other RNA
atggtgtacctggactgcagc

SEQ ID NO: 52323 - RNA, 21 nt, synthetic construct
  source 1..21: mol_type = other RNA
agcgttacagccatcccctct

SEQ ID NO: 52324 - RNA, 21 nt, synthetic construct
  source 1..21: mol_type = other RNA
cattgaccgcttccagggcgc

SEQ ID NO: 52325 - RNA, 21 nt, synthetic construct
  source 1..21: mol_type = other RNA
agccaccatgacaagggccac

SEQ ID NO: 52326 - RNA, 21 nt, synthetic construct
  source 1..21: mol_type = other RNA
cctccgccccgctgtcctcgc

SEQ ID NO: 52327 - RNA, 21 nt, synthetic construct
  source 1..21: mol_type = other RNA
tacctggacaaccactactgc

SEQ ID NO: 52328 - RNA, 21 nt, synthetic construct
  source 1..21: mol_type = other RNA
cagcagaaaggatggctgctg

SEQ ID NO: 52329 - RNA, 21 nt, synthetic construct
  source 1..21: mol_type = other RNA
ccaccttggccttgcccctcc

SEQ ID NO: 52330 - RNA, 21 nt, synthetic construct
  source 1..21: mol_type = other RNA
gtccatgcctgctgcagggta

SEQ ID NO: 52331 - RNA, 21 nt, synthetic construct
  source 1..21: mol_type = other RNA
ccaaatccacagctaccagct

SEQ ID NO: 52332 - RNA, 21 nt, synthetic construct
  source 1..21: mol_type = other RNA
agcagccactacaactgcagc

SEQ ID NO: 52333 - RNA, 21 nt, synthetic construct
  source 1..21: mol_type = other RNA
ccaaatccacagctaccagcg

SEQ ID NO: 52334 - RNA, 21 nt, synthetic construct
  source 1..21: mol_type = other RNA
agcagccactacaactgcagc

SEQ ID NO: 52335 - RNA, 21 nt, synthetic construct
  source 1..21: mol_type = other RNA
caaaatccacagctaccagct

SEQ ID NO: 52336 - RNA, 21 nt, synthetic construct
  source 1..21: mol_type = other RNA
gctgtggggagtgcgtccaga

SEQ ID NO: 52337 - RNA, 21 nt, synthetic construct
  source 1..21: mol_type = other RNA
gaggggtcagcatcccaaagc

SEQ ID NO: 52338 - RNA, 21 nt, synthetic construct
  source 1..21: mol_type = other RNA
ctccctgcccgtccccgtccc

SEQ ID NO: 52339 - RNA, 21 nt, synthetic construct
  source 1..21: mol_type = other RNA
ggtgccgcaggcagagaccca

SEQ ID NO: 52340 - RNA, 21 nt, synthetic construct
  source 1..21: mol_type = other RNA
gagtgcgagtgcatctgcagc

SEQ ID NO: 52341 - RNA, 21 nt, synthetic construct
  source 1..21: mol_type = other RNA
tgtcccaccttccgctgcaga

SEQ ID NO: 52342 - RNA, 21 nt, synthetic construct
  source 1..21: mol_type = other RNA
ctggcacaccccccactgcca

SEQ ID NO: 52343 - RNA, 21 nt, synthetic construct
  source 1..21: mol_type = other RNA
gaactgggagcaggagggcgt

SEQ ID NO: 52344 - RNA, 21 nt, synthetic construct
  source 1..21: mol_type = other RNA
agccagcaccgcttccaaaga

SEQ ID NO: 52345 - RNA, 21 nt, synthetic construct
  source 1..21: mol_type = other RNA
caccacacccacaaccagagg

SEQ ID NO: 52346 - RNA, 21 nt, synthetic construct
  source 1..21: mol_type = other RNA
caccacacccacaaccagagg

SEQ ID NO: 52347 - RNA, 21 nt, synthetic construct
  source 1..21: mol_type = other RNA
caccctcctctactccagaga

SEQ ID NO: 52348 - RNA, 21 nt, synthetic construct
  source 1..21: mol_type = other RNA
caccacacccacaaccagagg

SEQ ID NO: 52349 - RNA, 21 nt, synthetic construct
  source 1..21: mol_type = other RNA
gaccacccacaccgccagagt

SEQ ID NO: 52350 - RNA, 21 nt, synthetic construct
  source 1..21: mol_type = other RNA
ggacccctttcgggagggcgc

SEQ ID NO: 52351 - RNA, 21 nt, synthetic construct
  source 1..21: mol_type = other RNA
gcccccggacctgccccctca

SEQ ID NO: 52352 - RNA, 21 nt, synthetic construct
  source 1..21: mol_type = other RNA
aacccacatgggggctgtgag

SEQ ID NO: 52353 - RNA, 21 nt, synthetic construct
  source 1..21: mol_type = other RNA
aacaatggcaacctccagagc

SEQ ID NO: 52354 - RNA, 21 nt, synthetic construct
  source 1..21: mol_type = other RNA
tgactaacaccaccaccagcc

SEQ ID NO: 52355 - RNA, 21 nt, synthetic construct
  source 1..21: mol_type = other RNA
ctaacaccaccaccagccagg

SEQ ID NO: 52356 - RNA, 21 nt, synthetic construct
  source 1..21: mol_type = other RNA
caccaccaccagccagggcac

SEQ ID NO: 52357 - RNA, 21 nt, synthetic construct
  source 1..21: mol_type = other RNA
caccgccaccacacctgcagc

SEQ ID NO: 52358 - RNA, 21 nt, synthetic construct
  source 1..21: mol_type = other RNA
cactcccttctccagtccagg

SEQ ID NO: 52359 - RNA, 21 nt, synthetic construct
  source 1..21: mol_type = other RNA
caccgccaccacacctgcagc

SEQ ID NO: 52360 - RNA, 21 nt, synthetic construct
  source 1..21: mol_type = other RNA
agttccatgtccaccccctcc

SEQ ID NO: 52361 - RNA, 21 nt, synthetic construct
  source 1..21: mol_type = other RNA
caccgccaccacacctgcagc

SEQ ID NO: 52362 - RNA, 21 nt, synthetic construct
  source 1..21: mol_type = other RNA
cactcccttctccagtccagg

SEQ ID NO: 52363 - RNA, 21 nt, synthetic construct
  source 1..21: mol_type = other RNA
caccgccaccacacctgcagc

SEQ ID NO: 52364 - RNA, 21 nt, synthetic construct
  source 1..21: mol_type = other RNA
ggctccaccaccaacccctcc

SEQ ID NO: 52365 - RNA, 21 nt, synthetic construct
  source 1..21: mol_type = other RNA
ggctccaccaccaacccctcc

SEQ ID NO: 52366 - RNA, 21 nt, synthetic construct
  source 1..21: mol_type = other RNA
ggctccaccaccaacccctcc

SEQ ID NO: 52367 - RNA, 21 nt, synthetic construct
  source 1..21: mol_type = other RNA
ggctccaccaccaacccctcc

SEQ ID NO: 52368 - RNA, 21 nt, synthetic construct
  source 1..21: mol_type = other RNA
ggctccaccaccaacccctcc

SEQ ID NO: 52369 - RNA, 21 nt, synthetic construct
  source 1..21: mol_type = other RNA
gcaggaaccggaggtgggagt

SEQ ID NO: 52370 - RNA, 21 nt, synthetic construct
  source 1..21: mol_type = other RNA
ccagatgtgtccagctgcagg

SEQ ID NO: 52371 - RNA, 21 nt, synthetic construct
  source 1..21: mol_type = other RNA
ctgtggagccgagctgggaga

SEQ ID NO: 52372 - RNA, 21 nt, synthetic construct
  source 1..21: mol_type = other RNA
cgcactggtggacagcactgc

SEQ ID NO: 52373 - RNA, 21 nt, synthetic construct
  source 1..21: mol_type = other RNA
ggcttcacagccaccccctcc

SEQ ID NO: 52374 - RNA, 21 nt, synthetic construct
  source 1..21: mol_type = other RNA
ggcttcacagccaccccctcc

SEQ ID NO: 52375 - RNA, 21 nt, synthetic construct
  source 1..21: mol_type = other RNA
gaccaccacaaccagggccac

SEQ ID NO: 52376 - RNA, 21 nt, synthetic construct
  source 1..21: mol_type = other RNA
ggcttcacagccaccccctcc

SEQ ID NO: 52377 - RNA, 21 nt, synthetic construct
  source 1..21: mol_type = other RNA
tggtgaccacgggctgtgagc

SEQ ID NO: 52378 - RNA, 21 nt, synthetic construct
  source 1..21: mol_type = other RNA
ctgtggccaccccctcttcca

SEQ ID NO: 52379 - RNA, 21 nt, synthetic construct
  source 1..21: mol_type = other RNA
tggtgaccacgggctgtgagc

SEQ ID NO: 52380 - RNA, 21 nt, synthetic construct
  source 1..21: mol_type = other RNA
ggcttcacagccaccccctcc

SEQ ID NO: 52381 - RNA, 21 nt, synthetic construct
  source 1..21: mol_type = other RNA
ctacaactgcagccactggat

SEQ ID NO: 52382 - RNA, 21 nt, synthetic construct
  source 1..21: mol_type = other RNA
tgcatcagcgaccactgcagg

SEQ ID NO: 52383 - RNA, 21 nt, synthetic construct
  source 1..21: mol_type = other RNA
aaggcccaggggctggtgctg

SEQ ID NO: 52384 - RNA, 21 nt, synthetic construct
  source 1..21: mol_type = other RNA
tctgccaccgcaccctgctgg

SEQ ID NO: 52385 - RNA, 21 nt, synthetic construct
  source 1..21: mol_type = other RNA
cacctgctctgtgcagggcgg

SEQ ID NO: 52386 - RNA, 21 nt, synthetic construct
  source 1..21: mol_type = other RNA
gcccaggctgcctgtgccaat

SEQ ID NO: 52387 - RNA, 21 nt, synthetic construct
  source 1..21: mol_type = other RNA
acctgccccgcgggcaccttc

SEQ ID NO: 52388 - RNA, 21 nt, synthetic construct
  source 1..21: mol_type = other RNA
gaagctaagctgcctgggagc

SEQ ID NO: 52389 - RNA, 21 nt, synthetic construct
  source 1..21: mol_type = other RNA
tgcaacacctgcacctgcagg

SEQ ID NO: 52390 - RNA, 21 nt, synthetic construct
  source 1..21: mol_type = other RNA
ctacagctttgaaggcagctg

SEQ ID NO: 52391 - RNA, 21 nt, synthetic construct
  source 1..21: mol_type = other RNA
tcttggcccaggactactgtg

SEQ ID NO: 52392 - RNA, 21 nt, synthetic construct
  source 1..21: mol_type = other RNA
ccccggccccaggcaccagcc

SEQ ID NO: 52393 - RNA, 21 nt, synthetic construct
  source 1..21: mol_type = other RNA
atccgggtcctctgctgcagt

SEQ ID NO: 52394 - RNA, 21 nt, synthetic construct
  source 1..21: mol_type = other RNA
accacccaggccctgttctca

SEQ ID NO: 52395 - RNA, 21 nt, synthetic construct
  source 1..21: mol_type = other RNA
ttccagcactgagaagcacag

SEQ ID NO: 52396 - RNA, 21 nt, synthetic construct
  source 1..21: mol_type = other RNA
ttccagcactgagaagcacag

SEQ ID NO: 52397 - RNA, 21 nt, synthetic construct
  source 1..21: mol_type = other RNA
ctgcagccaccagcagcacag

SEQ ID NO: 52398 - RNA, 21 nt, synthetic construct
  source 1..21: mol_type = other RNA
tcggccacctcaggcaccttg

SEQ ID NO: 52399 - RNA, 21 nt, synthetic construct
  source 1..21: mol_type = other RNA
cccgggaacagctccccctcc

SEQ ID NO: 52400 - RNA, 21 nt, synthetic construct
  source 1..21: mol_type = other RNA
cttcctcctccagtccaagga

SEQ ID NO: 52401 - RNA, 21 nt, synthetic construct
  source 1..21: mol_type = other RNA
tccaccccctcctccactccg

SEQ ID NO: 52402 - RNA, 21 nt, synthetic construct
  source 1..21: mol_type = other RNA
atcagctccagagccactccc

SEQ ID NO: 52403 - RNA, 21 nt, synthetic construct
  source 1..21: mol_type = other RNA
ttccagcactgagaagcacag

SEQ ID NO: 52404 - RNA, 21 nt, synthetic construct
  source 1..21: mol_type = other RNA
ctgcagccaccagcagcacag

SEQ ID NO: 52405 - RNA, 21 nt, synthetic construct
  source 1..21: mol_type = other RNA
ttccagcactgagaagcacag

SEQ ID NO: 52406 - RNA, 21 nt, synthetic construct
  source 1..21: mol_type = other RNA
ggccaccacaaccagggccac

SEQ ID NO: 52407 - RNA, 21 nt, synthetic construct
  source 1..21: mol_type = other RNA
ctgcagccaccagcagcacag

SEQ ID NO: 52408 - RNA, 21 nt, synthetic construct
  source 1..21: mol_type = other RNA
tcggccacctcaggcaccttg

SEQ ID NO: 52409 - RNA, 21 nt, synthetic construct
  source 1..21: mol_type = other RNA
cccgggaacagctccccctcc

SEQ ID NO: 52410 - RNA, 21 nt, synthetic construct
  source 1..21: mol_type = other RNA
cttcctcctccagtccaagga

SEQ ID NO: 52411 - RNA, 21 nt, synthetic construct
  source 1..21: mol_type = other RNA
tccaccccctcctccactccg

SEQ ID NO: 52412 - RNA, 21 nt, synthetic construct
  source 1..21: mol_type = other RNA
gtccagggactgcaactgccc

SEQ ID NO: 52413 - RNA, 21 nt, synthetic construct
  source 1..21: mol_type = other RNA
ttccagcactgagaagcacag

SEQ ID NO: 52414 - RNA, 21 nt, synthetic construct
  source 1..21: mol_type = other RNA
tcaccccagtgctgaccagca

SEQ ID NO: 52415 - RNA, 21 nt, synthetic construct
  source 1..21: mol_type = other RNA
cgcagccaccagctccaaagc

SEQ ID NO: 52416 - RNA, 21 nt, synthetic construct
  source 1..21: mol_type = other RNA
cttcctcctccagtccaagga

SEQ ID NO: 52417 - RNA, 21 nt, synthetic construct
  source 1..21: mol_type = other RNA
aacagctcacacccccaaagt

SEQ ID NO: 52418 - RNA, 21 nt, synthetic construct
  source 1..21: mol_type = other RNA
cagccactgcctccacggttc

SEQ ID NO: 52419 - RNA, 21 nt, synthetic construct
  source 1..21: mol_type = other RNA
gcatttggacagtttttctcg

SEQ ID NO: 52420 - RNA, 21 nt, synthetic construct
  source 1..21: mol_type = other RNA
gcacggcctctgccactgccg

SEQ ID NO: 52421 - RNA, 21 nt, synthetic construct
  source 1..21: mol_type = other RNA
acaaccacctgcccccagagc

SEQ ID NO: 52422 - RNA, 21 nt, synthetic construct
  source 1..21: mol_type = other RNA
ctgcacccaggaggagggcga

SEQ ID NO: 52423 - RNA, 21 nt, synthetic construct
  source 1..21: mol_type = other RNA
caggaggagggcgactgctgt

SEQ ID NO: 52424 - RNA, 21 nt, synthetic construct
  source 1..21: mol_type = other RNA
cctgtccccagggctttgagt

SEQ ID NO: 52425 - RNA, 21 nt, synthetic construct
  source 1..21: mol_type = other RNA
tccaggcaaggccagctgctg

SEQ ID NO: 52426 - RNA, 21 nt, synthetic construct
  source 1..21: mol_type = other RNA
ccaggcaaggccagctgctgc

SEQ ID NO: 52427 - RNA, 21 nt, synthetic construct
  source 1..21: mol_type = other RNA
caggcaaggccagctgctgcc

SEQ ID NO: 52428 - RNA, 21 nt, synthetic construct
  source 1..21: mol_type = other RNA
tgggcgggtgtgcagcacctg

SEQ ID NO: 52429 - RNA, 21 nt, synthetic construct
  source 1..21: mol_type = other RNA
cccccggacctgccccctcaa

SEQ ID NO: 52430 - RNA, 21 nt, synthetic construct
  source 1..21: mol_type = other RNA
tacaagcctggagagaccatc

SEQ ID NO: 52431 - RNA, 21 nt, synthetic construct
  source 1..21: mol_type = other RNA
aacagctggaagctctccccc

SEQ ID NO: 52432 - RNA, 21 nt, synthetic construct
  source 1..21: mol_type = other RNA
aagcccggccctcccggtctc

SEQ ID NO: 52433 - RNA, 21 nt, synthetic construct
  source 1..21: mol_type = other RNA
acatgccgctggaggagctgg

SEQ ID NO: 52434 - RNA, 21 nt, synthetic construct
  source 1..21: mol_type = other RNA
catgccgctggaggagctggg

SEQ ID NO: 52435 - RNA, 21 nt, synthetic construct
  source 1..21: mol_type = other RNA
atccacccctcctccactccg

SEQ ID NO: 52436 - RNA, 21 nt, synthetic construct
  source 1..21: mol_type = other RNA
atccacccctcctccactccg

SEQ ID NO: 52437 - RNA, 21 nt, synthetic construct
  source 1..21: mol_type = other RNA
gtccccagggctttgagtaca

SEQ ID NO: 52438 - RNA, 21 nt, synthetic construct
  source 1..21: mol_type = other RNA
caaggacccctgcacggccaa

SEQ ID NO: 52439 - RNA, 21 nt, synthetic construct
  source 1..21: mol_type = other RNA
cctccccggccccaggcacca

SEQ ID NO: 52440 - RNA, 21 nt, synthetic construct
  source 1..21: mol_type = other RNA
gcgatccctgtcccccagcag

SEQ ID NO: 52441 - RNA, 21 nt, synthetic construct
  source 1..21: mol_type = other RNA
tcccgtcctccaccccgggaa

SEQ ID NO: 52442 - RNA, 21 nt, synthetic construct
  source 1..21: mol_type = other RNA
gcgatccctgtcccccagcag

SEQ ID NO: 52443 - RNA, 21 nt, synthetic construct
  source 1..21: mol_type = other RNA
ccccgtcctccaccccgggaa

SEQ ID NO: 52444 - RNA, 21 nt, synthetic construct
  source 1..21: mol_type = other RNA
catgtttgacacctgcaactg

SEQ ID NO: 52445 - RNA, 21 nt, synthetic construct
  source 1..21: mol_type = other RNA
ggaacagctggaagctctccc

SEQ ID NO: 52446 - RNA, 21 nt, synthetic construct
  source 1..21: mol_type = other RNA
cagccaccggctccaccacca

SEQ ID NO: 52447 - RNA, 21 nt, synthetic construct
  source 1..21: mol_type = other RNA
gaacagctggaagctctcccc

SEQ ID NO: 52448 - RNA, 21 nt, synthetic construct
  source 1..21: mol_type = other RNA
catcctccacggccccacctt

SEQ ID NO: 52449 - RNA, 21 nt, synthetic construct
  source 1..21: mol_type = other RNA
ccactccagagactgcccaca

SEQ ID NO: 52450 - RNA, 21 nt, synthetic construct
  source 1..21: mol_type = other RNA
cggccaccggctccaccacca

SEQ ID NO: 52451 - RNA, 21 nt, synthetic construct
  source 1..21: mol_type = other RNA
tggtgaccatgggctgtgagc

SEQ ID NO: 52452 - RNA, 21 nt, synthetic construct
  source 1..21: mol_type = other RNA
cagccatcccctcctcctccc

SEQ ID NO: 52453 - RNA, 21 nt, synthetic construct
  source 1..21: mol_type = other RNA
cggccaccggctccaccacca

SEQ ID NO: 52454 - RNA, 21 nt, synthetic construct
  source 1..21: mol_type = other RNA
tggtgaccatgggctgtgagc

SEQ ID NO: 52455 - RNA, 21 nt, synthetic construct
  source 1..21: mol_type = other RNA
cagccatcccctcctcctccc

SEQ ID NO: 52456 - RNA, 21 nt, synthetic construct
  source 1..21: mol_type = other RNA
ccactccagagactgcccaca

SEQ ID NO: 52457 - RNA, 21 nt, synthetic construct
  source 1..21: mol_type = other RNA
cggccaccggctccaccacca

SEQ ID NO: 52458 - RNA, 21 nt, synthetic construct
  source 1..21: mol_type = other RNA
cagccatcccctcctcctccc

SEQ ID NO: 52459 - RNA, 21 nt, synthetic construct
  source 1..21: mol_type = other RNA
cggccaccggctccaccacca

SEQ ID NO: 52460 - RNA, 21 nt, synthetic construct
  source 1..21: mol_type = other RNA
tctttgctgagtgccacaacc

SEQ ID NO: 52461 - RNA, 21 nt, synthetic construct
  source 1..21: mol_type = other RNA
tcctgcccagatgtgtccagc

SEQ ID NO: 52462 - RNA, 21 nt, synthetic construct
  source 1..21: mol_type = other RNA
acccgtggcttcccggcccag

SEQ ID NO: 52463 - RNA, 21 nt, synthetic construct
  source 1..21: mol_type = other RNA
atgggcgggtgtgcagcacct

SEQ ID NO: 52464 - RNA, 21 nt, synthetic construct
  source 1..21: mol_type = other RNA
cgggtgtgcagcacctggggt

SEQ ID NO: 52465 - RNA, 21 nt, synthetic construct
  source 1..21: mol_type = other RNA
gtgacttccactacaagacct

SEQ ID NO: 52466 - RNA, 21 nt, synthetic construct
  source 1..21: mol_type = other RNA
cactacaagaccttcgacggc

SEQ ID NO: 52467 - RNA, 21 nt, synthetic construct
  source 1..21: mol_type = other RNA
ggcccaggggctggtgctgga

SEQ ID NO: 52468 - RNA, 21 nt, synthetic construct
  source 1..21: mol_type = other RNA
actggcctcctggtggagcag

SEQ ID NO: 52469 - RNA, 21 nt, synthetic construct
  source 1..21: mol_type = other RNA
ctggcctcctggtggagcaga

SEQ ID NO: 52470 - RNA, 21 nt, synthetic construct
  source 1..21: mol_type = other RNA
agtgccctgctggagctggat

SEQ ID NO: 52471 - RNA, 21 nt, synthetic construct
  source 1..21: mol_type = other RNA
tcctgcacctgctccgggggg

SEQ ID NO: 52472 - RNA, 21 nt, synthetic construct
  source 1..21: mol_type = other RNA
cctgcacctgctccggggggc

SEQ ID NO: 52473 - RNA, 21 nt, synthetic construct
  source 1..21: mol_type = other RNA
ggcctggggctgcagctgctg

SEQ ID NO: 52474 - RNA, 21 nt, synthetic construct
  source 1..21: mol_type = other RNA
gcctggggctgcagctgctgg

SEQ ID NO: 52475 - RNA, 21 nt, synthetic construct
  source 1..21: mol_type = other RNA
agcggggtggtggaggccacg

SEQ ID NO: 52476 - RNA, 21 nt, synthetic construct
  source 1..21: mol_type = other RNA
gctgcctgtgccaatgccagg

SEQ ID NO: 52477 - RNA, 21 nt, synthetic construct
  source 1..21: mol_type = other RNA
cgaactgcatgtttgacacct

SEQ ID NO: 52478 - RNA, 21 nt, synthetic construct
  source 1..21: mol_type = other RNA
cctgccccgcgggcaccttcc

SEQ ID NO: 52479 - RNA, 21 nt, synthetic construct
  source 1..21: mol_type = other RNA
gcagcaacagctcggcgggca

SEQ ID NO: 52480 - RNA, 21 nt, synthetic construct
  source 1..21: mol_type = other RNA
caagcctggagagaccatcag

SEQ ID NO: 52481 - RNA, 21 nt, synthetic construct
  source 1..21: mol_type = other RNA
ttgggaacagctggaagctct

SEQ ID NO: 52482 - RNA, 21 nt, synthetic construct
  source 1..21: mol_type = other RNA
tgggaacagctggaagctctc

SEQ ID NO: 52483 - RNA, 21 nt, synthetic construct
  source 1..21: mol_type = other RNA
gggaacagctggaagctctcc

SEQ ID NO: 52484 - RNA, 21 nt, synthetic construct
  source 1..21: mol_type = other RNA
agctggaagctctccccctcc

SEQ ID NO: 52485 - RNA, 21 nt, synthetic construct
  source 1..21: mol_type = other RNA
cccctcctgcccggacgccct

SEQ ID NO: 52486 - RNA, 21 nt, synthetic construct
  source 1..21: mol_type = other RNA
ccaaggacccctgcacggcca

SEQ ID NO: 52487 - RNA, 21 nt, synthetic construct
  source 1..21: mol_type = other RNA
gtgcagcatcctccacggccc

SEQ ID NO: 52488 - RNA, 21 nt, synthetic construct
  source 1..21: mol_type = other RNA
gcagcatcctccacggcccca

SEQ ID NO: 52489 - RNA, 21 nt, synthetic construct
  source 1..21: mol_type = other RNA
gcatcctccacggccccacct

SEQ ID NO: 52490 - RNA, 21 nt, synthetic construct
  source 1..21: mol_type = other RNA
atcctccacggccccaccttc

SEQ ID NO: 52491 - RNA, 21 nt, synthetic construct
  source 1..21: mol_type = other RNA
acctgccccttgttctgtgac

SEQ ID NO: 52492 - RNA, 21 nt, synthetic construct
  source 1..21: mol_type = other RNA
caagcccggccctcccggtct

SEQ ID NO: 52493 - RNA, 21 nt, synthetic construct
  source 1..21: mol_type = other RNA
ccgctggaggagctgggccag

SEQ ID NO: 52494 - RNA, 21 nt, synthetic construct
  source 1..21: mol_type = other RNA
ctggaggagctgggccagcag

SEQ ID NO: 52495 - RNA, 21 nt, synthetic construct
  source 1..21: mol_type = other RNA
ggaggagctgggccagcaggt

SEQ ID NO: 52496 - RNA, 21 nt, synthetic construct
  source 1..21: mol_type = other RNA
ccctccccggccccaggcacc

SEQ ID NO: 52497 - RNA, 21 nt, synthetic construct
  source 1..21: mol_type = other RNA
ccggccccaggcaccagccct

SEQ ID NO: 52498 - RNA, 21 nt, synthetic construct
  source 1..21: mol_type = other RNA
cggccccaggcaccagccctc

SEQ ID NO: 52499 - RNA, 21 nt, synthetic construct
  source 1..21: mol_type = other RNA
ccagggctcccccggccagca

SEQ ID NO: 52500 - RNA, 21 nt, synthetic construct
  source 1..21: mol_type = other RNA
ggcgcccctcacagccaccca

SEQ ID NO: 52501 - RNA, 21 nt, synthetic construct
  source 1..21: mol_type = other RNA
cacggccaccccgacctccac

SEQ ID NO: 52502 - RNA, 21 nt, synthetic construct
  source 1..21: mol_type = other RNA
ccacacccacagtcaccagct

SEQ ID NO: 52503 - RNA, 21 nt, synthetic construct
  source 1..21: mol_type = other RNA
tggccaccccctcctccaccc

SEQ ID NO: 52504 - RNA, 21 nt, synthetic construct
  source 1..21: mol_type = other RNA
ggccaccccctcctccacccc

SEQ ID NO: 52505 - RNA, 21 nt, synthetic construct
  source 1..21: mol_type = other RNA
gccaccccctcctccacccca

SEQ ID NO: 52506 - RNA, 21 nt, synthetic construct
  source 1..21: mol_type = other RNA
ctgaccaccaccaccacaact

SEQ ID NO: 52507 - RNA, 21 nt, synthetic construct
  source 1..21: mol_type = other RNA
tgaccaccaccaccacaactg

SEQ ID NO: 52508 - RNA, 21 nt, synthetic construct
  source 1..21: mol_type = other RNA
ccaccaccaccacaactgtgg

SEQ ID NO: 52509 - RNA, 21 nt, synthetic construct
  source 1..21: mol_type = other RNA
ctgaccaccaccgccaccaca

SEQ ID NO: 52510 - RNA, 21 nt, synthetic construct
  source 1..21: mol_type = other RNA
cgacacccacagtcaccagct

SEQ ID NO: 52511 - RNA, 21 nt, synthetic construct
  source 1..21: mol_type = other RNA
catcccctcctcctccctggg

SEQ ID NO: 52512 - RNA, 21 nt, synthetic construct
  source 1..21: mol_type = other RNA
tggccaccccctcctccaccc

SEQ ID NO: 52513 - RNA, 21 nt, synthetic construct
  source 1..21: mol_type = other RNA
ggccaccccctcctccacccc

SEQ ID NO: 52514 - RNA, 21 nt, synthetic construct
  source 1..21: mol_type = other RNA
gccaccccctcctccacccca

SEQ ID NO: 52515 - RNA, 21 nt, synthetic construct
  source 1..21: mol_type = other RNA
ctgaccaccaccaccacaact

SEQ ID NO: 52516 - RNA, 21 nt, synthetic construct
  source 1..21: mol_type = other RNA
tgaccaccaccaccacaactg

SEQ ID NO: 52517 - RNA, 21 nt, synthetic construct
  source 1..21: mol_type = other RNA
ccaccaccaccacaactgtgg

SEQ ID NO: 52518 - RNA, 21 nt, synthetic construct
  source 1..21: mol_type = other RNA
ctgaccaccaccgccaccaca

SEQ ID NO: 52519 - RNA, 21 nt, synthetic construct
  source 1..21: mol_type = other RNA
tcccacaccccagcagcaacc

SEQ ID NO: 52520 - RNA, 21 nt, synthetic construct
  source 1..21: mol_type = other RNA
cccgtcctccaccccgggaac

SEQ ID NO: 52521 - RNA, 21 nt, synthetic construct
  source 1..21: mol_type = other RNA
atgtccaccccctcctccact

SEQ ID NO: 52522 - RNA, 21 nt, synthetic construct
  source 1..21: mol_type = other RNA
tggccaccccctcctccaccc

SEQ ID NO: 52523 - RNA, 21 nt, synthetic construct
  source 1..21: mol_type = other RNA
ggccaccccctcctccacccc

SEQ ID NO: 52524 - RNA, 21 nt, synthetic construct
  source 1..21: mol_type = other RNA
gccaccccctcctccacccca

SEQ ID NO: 52525 - RNA, 21 nt, synthetic construct
  source 1..21: mol_type = other RNA
ctgaccaccaccaccacaact

SEQ ID NO: 52526 - RNA, 21 nt, synthetic construct
  source 1..21: mol_type = other RNA
tgaccaccaccaccacaactg

SEQ ID NO: 52527 - RNA, 21 nt, synthetic construct
  source 1..21: mol_type = other RNA
ccaccaccaccacaactgtgg

SEQ ID NO: 52528 - RNA, 21 nt, synthetic construct
  source 1..21: mol_type = other RNA
ctgaccaccaccgccaccaca

SEQ ID NO: 52529 - RNA, 21 nt, synthetic construct
  source 1..21: mol_type = other RNA
tcccacaccccagcagcaacc

SEQ ID NO: 52530 - RNA, 21 nt, synthetic construct
  source 1..21: mol_type = other RNA
ggaccacagccacagccacac

SEQ ID NO: 52531 - RNA, 21 nt, synthetic construct
  source 1..21: mol_type = other RNA
gaccacagccacagccacacc

SEQ ID NO: 52532 - RNA, 21 nt, synthetic construct
  source 1..21: mol_type = other RNA
cgacacccacagtcaccagct

SEQ ID NO: 52533 - RNA, 21 nt, synthetic construct
  source 1..21: mol_type = other RNA
catcccctcctcctccctggg

SEQ ID NO: 52534 - RNA, 21 nt, synthetic construct
  source 1..21: mol_type = other RNA
ctgaccaccaccaccacaact

SEQ ID NO: 52535 - RNA, 21 nt, synthetic construct
  source 1..21: mol_type = other RNA
tgaccaccaccaccacaactg

SEQ ID NO: 52536 - RNA, 21 nt, synthetic construct
  source 1..21: mol_type = other RNA
ccaccaccaccacaactgtgg

SEQ ID NO: 52537 - RNA, 21 nt, synthetic construct
  source 1..21: mol_type = other RNA
ctgaccaccaccgccaccaca

SEQ ID NO: 52538 - RNA, 21 nt, synthetic construct
  source 1..21: mol_type = other RNA
tcccacaccccagcagcaacc

SEQ ID NO: 52539 - RNA, 21 nt, synthetic construct
  source 1..21: mol_type = other RNA
cccgtcctccaccccgggaac

SEQ ID NO: 52540 - RNA, 21 nt, synthetic construct
  source 1..21: mol_type = other RNA
acccgtggccaccatgtccac

SEQ ID NO: 52541 - RNA, 21 nt, synthetic construct
  source 1..21: mol_type = other RNA
acgtccaccccctcctccact

SEQ ID NO: 52542 - RNA, 21 nt, synthetic construct
  source 1..21: mol_type = other RNA
cgacacccacagtcaccagct

SEQ ID NO: 52543 - RNA, 21 nt, synthetic construct
  source 1..21: mol_type = other RNA
catcccctcctcctccctggg

SEQ ID NO: 52544 - RNA, 21 nt, synthetic construct
  source 1..21: mol_type = other RNA
tggccaccccctcctccaccc

SEQ ID NO: 52545 - RNA, 21 nt, synthetic construct
  source 1..21: mol_type = other RNA
ggccaccccctcctccacccc

SEQ ID NO: 52546 - RNA, 21 nt, synthetic construct
  source 1..21: mol_type = other RNA
gccaccccctcctccacccca

SEQ ID NO: 52547 - RNA, 21 nt, synthetic construct
  source 1..21: mol_type = other RNA
ctgaccaccaccaccacaact

SEQ ID NO: 52548 - RNA, 21 nt, synthetic construct
  source 1..21: mol_type = other RNA
tgaccaccaccaccacaactg

SEQ ID NO: 52549 - RNA, 21 nt, synthetic construct
  source 1..21: mol_type = other RNA
ccaccaccaccacaactgtgg

SEQ ID NO: 52550 - RNA, 21 nt, synthetic construct
  source 1..21: mol_type = other RNA
ctgaccaccacagccaccatg

SEQ ID NO: 52551 - RNA, 21 nt, synthetic construct
  source 1..21: mol_type = other RNA
cctctgccactgccgctgccg

SEQ ID NO: 52552 - RNA, 21 nt, synthetic construct
  source 1..21: mol_type = other RNA
ctctgccactgccgctgccgc

SEQ ID NO: 52553 - RNA, 21 nt, synthetic construct
  source 1..21: mol_type = other RNA
cgcccgctgcccccgcgccct

SEQ ID NO: 52554 - RNA, 21 nt, synthetic construct
  source 1..21: mol_type = other RNA
gcggagggctgcttctgccct

SEQ ID NO: 52555 - RNA, 21 nt, synthetic construct
  source 1..21: mol_type = other RNA
tgccctgaggaccagatcctc

SEQ ID NO: 52556 - RNA, 21 nt, synthetic construct
  source 1..21: mol_type = other RNA
tccgctgcagacctcagctgt

SEQ ID NO: 52557 - RNA, 21 nt, synthetic construct
  source 1..21: mol_type = other RNA
tgtccccagggctttgagtac

SEQ ID NO: 52558 - RNA, 21 nt, synthetic construct
  source 1..21: mol_type = other RNA
tccccagggctttgagtacaa

SEQ ID NO: 52559 - RNA, 21 nt, synthetic construct
  source 1..21: mol_type = other RNA
gccagccagtccagctgaatg

SEQ ID NO: 52560 - RNA, 21 nt, synthetic construct
  source 1..21: mol_type = other RNA
cccgtggcttcccggcccagg

SEQ ID NO: 52561 - RNA, 21 nt, synthetic construct
  source 1..21: mol_type = other RNA
ttgcccctccctgatgtcact

SEQ ID NO: 52562 - RNA, 21 nt, synthetic construct
  source 1..21: mol_type = other RNA
cggccagcaccacagcagtcc

SEQ ID NO: 52563 - RNA, 21 nt, synthetic construct
  source 1..21: mol_type = other RNA
caccccctcctccactccggg

SEQ ID NO: 52564 - RNA, 21 nt, synthetic construct
  source 1..21: mol_type = other RNA
caccccctcctccactccggg

SEQ ID NO: 52565 - RNA, 21 nt, synthetic construct
  source 1..21: mol_type = other RNA
ctgcccgtccccgtcccccca

SEQ ID NO: 52566 - RNA, 21 nt, synthetic construct
  source 1..21: mol_type = other RNA
ctggaagctctccccctcctg

SEQ ID NO: 52567 - RNA, 21 nt, synthetic construct
  source 1..21: mol_type = other RNA
catcccctcttcctccctggg

SEQ ID NO: 52568 - RNA, 21 nt, synthetic construct
  source 1..21: mol_type = other RNA
cagccatcccctcttcctccc

SEQ ID NO: 52569 - RNA, 21 nt, synthetic construct
  source 1..21: mol_type = other RNA
catcccctcttcctccctggg

SEQ ID NO: 52570 - RNA, 21 nt, synthetic construct
  source 1..21: mol_type = other RNA
tggaagctctccccctcctgc

SEQ ID NO: 52571 - RNA, 21 nt, synthetic construct
  source 1..21: mol_type = other RNA
gacaggcctggggctgcagct

SEQ ID NO: 52572 - RNA, 21 nt, synthetic construct
  source 1..21: mol_type = other RNA
ctggctcctggagaggtggtg

SEQ ID NO: 52573 - RNA, 21 nt, synthetic construct
  source 1..21: mol_type = other RNA
tcctccacggccccaccttcg

SEQ ID NO: 52574 - RNA, 21 nt, synthetic construct
  source 1..21: mol_type = other RNA
caccccctcctccaccccagg

SEQ ID NO: 52575 - RNA, 21 nt, synthetic construct
  source 1..21: mol_type = other RNA
caccccctcctccaccccagg

SEQ ID NO: 52576 - RNA, 21 nt, synthetic construct
  source 1..21: mol_type = other RNA
caccccctcctccaccccagg

SEQ ID NO: 52577 - RNA, 21 nt, synthetic construct
  source 1..21: mol_type = other RNA
caccccctcctccaccccagg

SEQ ID NO: 52578 - RNA, 21 nt, synthetic construct
  source 1..21: mol_type = other RNA
gcacacccacccccaccccat

SEQ ID NO: 52579 - RNA, 21 nt, synthetic construct
  source 1..21: mol_type = other RNA
ggcccaggaggccactgctgt

SEQ ID NO: 52580 - RNA, 21 nt, synthetic construct
  source 1..21: mol_type = other RNA
accgccacggccaccacaact

SEQ ID NO: 52581 - RNA, 21 nt, synthetic construct
  source 1..21: mol_type = other RNA
accgccacggccaccacaacc

SEQ ID NO: 52582 - RNA, 21 nt, synthetic construct
  source 1..21: mol_type = other RNA
atcctcacagagcccagcact

SEQ ID NO: 52583 - RNA, 21 nt, synthetic construct
  source 1..21: mol_type = other RNA
accggctccaccaccaacccc

SEQ ID NO: 52584 - RNA, 21 nt, synthetic construct
  source 1..21: mol_type = other RNA
accggctccaccaccaacccc

SEQ ID NO: 52585 - RNA, 21 nt, synthetic construct
  source 1..21: mol_type = other RNA
accggctccaccaccaacccc

SEQ ID NO: 52586 - RNA, 21 nt, synthetic construct
  source 1..21: mol_type = other RNA
accggctccaccaccaacccc

SEQ ID NO: 52587 - RNA, 21 nt, synthetic construct
  source 1..21: mol_type = other RNA
accggctccaccaccaacccc

SEQ ID NO: 52588 - RNA, 21 nt, synthetic construct
  source 1..21: mol_type = other RNA
gcggtgggtcagcaactgcca

SEQ ID NO: 52589 - RNA, 21 nt, synthetic construct
  source 1..21: mol_type = other RNA
agacaggcctggggctgcagc

SEQ ID NO: 52590 - RNA, 21 nt, synthetic construct
  source 1..21: mol_type = other RNA
cccagagcccggcctgggagg

SEQ ID NO: 52591 - RNA, 21 nt, synthetic construct
  source 1..21: mol_type = other RNA
cctggggctgcagctgctggt

SEQ ID NO: 52592 - RNA, 21 nt, synthetic construct
  source 1..21: mol_type = other RNA
ccatcccctcctcctccctgg

SEQ ID NO: 52593 - RNA, 21 nt, synthetic construct
  source 1..21: mol_type = other RNA
ccatcccctcctcctccctgg

SEQ ID NO: 52594 - RNA, 21 nt, synthetic construct
  source 1..21: mol_type = other RNA
ccatcccctcctcctccctgg

SEQ ID NO: 52595 - RNA, 21 nt, synthetic construct
  source 1..21: mol_type = other RNA
ccaaagagcatagagtgccgg

SEQ ID NO: 52596 - RNA, 21 nt, synthetic construct
  source 1..21: mol_type = other RNA
agagcatagagtgccgggcgg

SEQ ID NO: 52597 - RNA, 21 nt, synthetic construct
  source 1..21: mol_type = other RNA
gaatactcacgccagtgcgcc

SEQ ID NO: 52598 - RNA, 21 nt, synthetic construct
  source 1..21: mol_type = other RNA
agaactaccccgaggtaagca

SEQ ID NO: 52599 - RNA, 21 nt, synthetic construct
  source 1..21: mol_type = other RNA
gagaactaccccgaggtaagc

SEQ ID NO: 52600 - RNA, 21 nt, synthetic construct
  source 1..21: mol_type = other RNA
ccagatcctcttcaacgcaca

SEQ ID NO: 52601 - RNA, 21 nt, synthetic construct
  source 1..21: mol_type = other RNA
cctggatcctcacaaagccga

SEQ ID NO: 52602 - RNA, 21 nt, synthetic construct
  source 1..21: mol_type = other RNA
gtcaagtccgcatcaacacga

SEQ ID NO: 52603 - RNA, 21 nt, synthetic construct
  source 1..21: mol_type = other RNA
gcccctgcgtgggacccgatg

SEQ ID NO: 52604 - RNA, 21 nt, synthetic construct
  source 1..21: mol_type = other RNA
caaccgtcccggcttcgtaac

SEQ ID NO: 52605 - RNA, 21 nt, synthetic construct
  source 1..21: mol_type = other RNA
caaagtgtacaagccatgcgg

SEQ ID NO: 52606 - RNA, 21 nt, synthetic construct
  source 1..21: mol_type = other RNA
ataagaccgaccgagccggct

SEQ ID NO: 52607 - RNA, 21 nt, synthetic construct
  source 1..21: mol_type = other RNA
actctggggacgacccggatc

SEQ ID NO: 52608 - RNA, 21 nt, synthetic construct
  source 1..21: mol_type = other RNA
cgagaactgcctgaaagcggt

SEQ ID NO: 52609 - RNA, 21 nt, synthetic construct
  source 1..21: mol_type = other RNA
ggcggagaactaccccgaggt

SEQ ID NO: 52610 - RNA, 21 nt, synthetic construct
  source 1..21: mol_type = other RNA
cctacggggatggccacttca

SEQ ID NO: 52611 - RNA, 21 nt, synthetic construct
  source 1..21: mol_type = other RNA
ccgggcggagaactaccccga

SEQ ID NO: 52612 - RNA, 21 nt, synthetic construct
  source 1..21: mol_type = other RNA
agagtgccgggcggagaacta

SEQ ID NO: 52613 - RNA, 21 nt, synthetic construct
  source 1..21: mol_type = other RNA
aaagagcatagagtgccgggc

SEQ ID NO: 52614 - RNA, 21 nt, synthetic construct
  source 1..21: mol_type = other RNA
gtgccgggcggagaactaccc

SEQ ID NO: 52615 - RNA, 21 nt, synthetic construct
  source 1..21: mol_type = other RNA
tgccgggcggagaactacccc

SEQ ID NO: 52616 - RNA, 21 nt, synthetic construct
  source 1..21: mol_type = other RNA
caaagagcatagagtgccggg

SEQ ID NO: 52617 - RNA, 21 nt, synthetic construct
  source 1..21: mol_type = other RNA
gccgggcggagaactaccccg

SEQ ID NO: 52618 - RNA, 21 nt, synthetic construct
  source 1..21: mol_type = other RNA
agcatagagtgccgggcggag

SEQ ID NO: 52619 - RNA, 21 nt, synthetic construct
  source 1..21: mol_type = other RNA
cgggcggagaactaccccgag

SEQ ID NO: 52620 - RNA, 21 nt, synthetic construct
  source 1..21: mol_type = other RNA
tcaacatgtgcttcaactaca

SEQ ID NO: 52621 - RNA, 21 nt, synthetic construct
  source 1..21: mol_type = other RNA
ccagtggcatccagtgcgctc

SEQ ID NO: 52622 - RNA, 21 nt, synthetic construct
  source 1..21: mol_type = other RNA
aggcggggacatggaaacttt

SEQ ID NO: 52623 - RNA, 21 nt, synthetic construct
  source 1..21: mol_type = other RNA
gcaccaaagagcatagagtgc

SEQ ID NO: 52624 - RNA, 21 nt, synthetic construct
  source 1..21: mol_type = other RNA
aagagcatagagtgccgggcg

SEQ ID NO: 52625 - RNA, 21 nt, synthetic construct
  source 1..21: mol_type = other RNA
gagcatagagtgccgggcgga

SEQ ID NO: 52626 - RNA, 21 nt, synthetic construct
  source 1..21: mol_type = other RNA
gagtgccgggcggagaactac

SEQ ID NO: 52627 - RNA, 21 nt, synthetic construct
  source 1..21: mol_type = other RNA
agtgccgggcggagaactacc

SEQ ID NO: 52628 - RNA, 21 nt, synthetic construct
  source 1..21: mol_type = other RNA
accagacaggcaggttcaaca

SEQ ID NO: 52629 - RNA, 21 nt, synthetic construct
  source 1..21: mol_type = other RNA
aggcaggttcaacatgtgctt

SEQ ID NO: 52630 - RNA, 21 nt, synthetic construct
  source 1..21: mol_type = other RNA
caacatgtgcttcaactacaa

SEQ ID NO: 52631 - RNA, 21 nt, synthetic construct
  source 1..21: mol_type = other RNA
tgctgtgacgactacagccac

SEQ ID NO: 52632 - RNA, 21 nt, synthetic construct
  source 1..21: mol_type = other RNA
ctgtgacgactacagccactg

SEQ ID NO: 52633 - RNA, 21 nt, synthetic construct
  source 1..21: mol_type = other RNA
gacgactacagccactgcccc

SEQ ID NO: 52634 - RNA, 21 nt, synthetic construct
  source 1..21: mol_type = other RNA
tgggcaccaaagagcatagag

SEQ ID NO: 52635 - RNA, 21 nt, synthetic construct
  source 1..21: mol_type = other RNA
ggcaagatgtgctgggcacca

SEQ ID NO: 52636 - RNA, 21 nt, synthetic construct
  source 1..21: mol_type = other RNA
gggcaccaaagagcatagagt

SEQ ID NO: 52637 - RNA, 21 nt, synthetic construct
  source 1..21: mol_type = other RNA
cctgccagccccggtgtcagt

SEQ ID NO: 52638 - RNA, 21 nt, synthetic construct
  source 1..21: mol_type = other RNA
gaccagacaggcaggttcaac

SEQ ID NO: 52639 - RNA, 21 nt, synthetic construct
  source 1..21: mol_type = other RNA
tgctgggggcaagatgtgctg

SEQ ID NO: 52640 - RNA, 21 nt, synthetic construct
  source 1..21: mol_type = other RNA
gggcaagatgtgctgggcacc

SEQ ID NO: 52641 - RNA, 21 nt, synthetic construct
  source 1..21: mol_type = other RNA
gctgctgggggcaagatgtgc

SEQ ID NO: 52642 - RNA, 21 nt, synthetic construct
  source 1..21: mol_type = other RNA
ctgctgggggcaagatgtgct

SEQ ID NO: 52643 - RNA, 21 nt, synthetic construct
  source 1..21: mol_type = other RNA
gctgtgacgactacagccact

SEQ ID NO: 52644 - RNA, 21 nt, synthetic construct
  source 1..21: mol_type = other RNA
tgtgacgactacagccactgc

SEQ ID NO: 52645 - RNA, 21 nt, synthetic construct
  source 1..21: mol_type = other RNA
ctgtttcagcacacactgcgt

SEQ ID NO: 52646 - RNA, 21 nt, synthetic construct
  source 1..21: mol_type = other RNA
ggcccagtgtggctgctacga

SEQ ID NO: 52647 - RNA, 21 nt, synthetic construct
  source 1..21: mol_type = other RNA
caggcggggacatggaaactt

SEQ ID NO: 52648 - RNA, 21 nt, synthetic construct
  source 1..21: mol_type = other RNA
cagacaggcaggttcaacatg

SEQ ID NO: 52649 - RNA, 21 nt, synthetic construct
  source 1..21: mol_type = other RNA
gacaggcaggttcaacatgtg

SEQ ID NO: 52650 - RNA, 21 nt, synthetic construct
  source 1..21: mol_type = other RNA
caggcaggttcaacatgtgct

SEQ ID NO: 52651 - RNA, 21 nt, synthetic construct
  source 1..21: mol_type = other RNA
aggttcaacatgtgcttcaac

SEQ ID NO: 52652 - RNA, 21 nt, synthetic construct
  source 1..21: mol_type = other RNA
gttcaacatgtgcttcaacta

SEQ ID NO: 52653 - RNA, 21 nt, synthetic construct
  source 1..21: mol_type = other RNA
accaaagagcatagagtgccg

SEQ ID NO: 52654 - RNA, 21 nt, synthetic construct
  source 1..21: mol_type = other RNA
gaaaacatcagggctgctggg

SEQ ID NO: 52655 - RNA, 21 nt, synthetic construct
  source 1..21: mol_type = other RNA
ctgccagccccggtgtcagtg

SEQ ID NO: 52656 - RNA, 21 nt, synthetic construct
  source 1..21: mol_type = other RNA
tgtgctgggcaccaaagagca

SEQ ID NO: 52657 - RNA, 21 nt, synthetic construct
  source 1..21: mol_type = other RNA
acaggcaggttcaacatgtgc

SEQ ID NO: 52658 - RNA, 21 nt, synthetic construct
  source 1..21: mol_type = other RNA
ggttcaacatgtgcttcaact

SEQ ID NO: 52659 - RNA, 21 nt, synthetic construct
  source 1..21: mol_type = other RNA
gagctgccttacagccgcact

SEQ ID NO: 52660 - RNA, 21 nt, synthetic construct
  source 1..21: mol_type = other RNA
actgcagctacgttctgtcca

SEQ ID NO: 52661 - RNA, 21 nt, synthetic construct
  source 1..21: mol_type = other RNA
ggaggggacgttgagtcctac

SEQ ID NO: 52662 - RNA, 21 nt, synthetic construct
  source 1..21: mol_type = other RNA
tgagaactacgcccggcactg

SEQ ID NO: 52663 - RNA, 21 nt, synthetic construct
  source 1..21: mol_type = other RNA
caccctgttcacaccctcgag

SEQ ID NO: 52664 - RNA, 21 nt, synthetic construct
  source 1..21: mol_type = other RNA
gtttcagcaagaacggcgtgc

SEQ ID NO: 52665 - RNA, 21 nt, synthetic construct
  source 1..21: mol_type = other RNA
atccagtgcgctcacagcctt

SEQ ID NO: 52666 - RNA, 21 nt, synthetic construct
  source 1..21: mol_type = other RNA
tttgttccacccgtcactgtc

SEQ ID NO: 52667 - RNA, 21 nt, synthetic construct
  source 1..21: mol_type = other RNA
gcagtgcccctgcacccacgg

SEQ ID NO: 52668 - RNA, 21 nt, synthetic construct
  source 1..21: mol_type = other RNA
gcccctgtcggcagccaacat

SEQ ID NO: 52669 - RNA, 21 nt, synthetic construct
  source 1..21: mol_type = other RNA
ggaggggccgtctgtgagcag

SEQ ID NO: 52670 - RNA, 21 nt, synthetic construct
  source 1..21: mol_type = other RNA
ggaggggccgtctgtgagcag

SEQ ID NO: 52671 - RNA, 21 nt, synthetic construct
  source 1..21: mol_type = other RNA
ggaggggccgtctgtgagcag

SEQ ID NO: 52672 - RNA, 21 nt, synthetic construct
  source 1..21: mol_type = other RNA
gaacctgcagaagttggatgg

SEQ ID NO: 52673 - RNA, 21 nt, synthetic construct
  source 1..21: mol_type = other RNA
gcagtgcccggacccgctgcc

SEQ ID NO: 52674 - RNA, 21 nt, synthetic construct
  source 1..21: mol_type = other RNA
gatgtgctacaactacaggat

SEQ ID NO: 52675 - RNA, 21 nt, synthetic construct
  source 1..21: mol_type = other RNA
gaggagctgccttacagccgc

SEQ ID NO: 52676 - RNA, 21 nt, synthetic construct
  source 1..21: mol_type = other RNA
ggagaactgccagagctgtaa

SEQ ID NO: 52677 - RNA, 21 nt, synthetic construct
  source 1..21: mol_type = other RNA
ttctgccccccaggcacggtg

SEQ ID NO: 52678 - RNA, 21 nt, synthetic construct
  source 1..21: mol_type = other RNA
ttcaacatgtgcttcaactac

SEQ ID NO: 52679 - RNA, 21 nt, synthetic construct
  source 1..21: mol_type = other RNA
cgagaacatcccctgtgggac

SEQ ID NO: 52680 - RNA, 21 nt, synthetic construct
  source 1..21: mol_type = other RNA
gtggcccagtgtggctgctac

SEQ ID NO: 52681 - RNA, 21 nt, synthetic construct
  source 1..21: mol_type = other RNA
gctggaccccgcccaccaggg

SEQ ID NO: 52682 - RNA, 21 nt, synthetic construct
  source 1..21: mol_type = other RNA
ccctgctggggccggcctttg

SEQ ID NO: 52683 - RNA, 21 nt, synthetic construct
  source 1..21: mol_type = other RNA
gccttcaacgagttctatgcc

SEQ ID NO: 52684 - RNA, 21 nt, synthetic construct
  source 1..21: mol_type = other RNA
gtttcagcacacactgcgtgt

SEQ ID NO: 52685 - RNA, 21 nt, synthetic construct
  source 1..21: mol_type = other RNA
ccagtgcgcccacgcgggggg

SEQ ID NO: 52686 - RNA, 21 nt, synthetic construct
  source 1..21: mol_type = other RNA
tctgcagggcatttggacagt

SEQ ID NO: 52687 - RNA, 21 nt, synthetic construct
  source 1..21: mol_type = other RNA
tgtcagtggacagagtggttt

SEQ ID NO: 52688 - RNA, 21 nt, synthetic construct
  source 1..21: mol_type = other RNA
tgggtcccccactccacgaca

SEQ ID NO: 52689 - RNA, 21 nt, synthetic construct
  source 1..21: mol_type = other RNA
ccccgaggtaagcatcgacca

SEQ ID NO: 52690 - RNA, 21 nt, synthetic construct
  source 1..21: mol_type = other RNA
actaccccgaggtaagcatcg

SEQ ID NO: 52691 - RNA, 21 nt, synthetic construct
  source 1..21: mol_type = other RNA
ctaccccgaggtaagcatcga

SEQ ID NO: 52692 - RNA, 21 nt, synthetic construct
  source 1..21: mol_type = other RNA
accccgaggtaagcatcgacc

SEQ ID NO: 52693 - RNA, 21 nt, synthetic construct
  source 1..21: mol_type = other RNA
acaaccagagggacgactgtc

SEQ ID NO: 52694 - RNA, 21 nt, synthetic construct
  source 1..21: mol_type = other RNA
aactaccccgaggtaagcatc

SEQ ID NO: 52695 - RNA, 21 nt, synthetic construct
  source 1..21: mol_type = other RNA
gcggagaactaccccgaggta

SEQ ID NO: 52696 - RNA, 21 nt, synthetic construct
  source 1..21: mol_type = other RNA
cggagaactaccccgaggtaa

SEQ ID NO: 52697 - RNA, 21 nt, synthetic construct
  source 1..21: mol_type = other RNA
gaactaccccgaggtaagcat

SEQ ID NO: 52698 - RNA, 21 nt, synthetic construct
  source 1..21: mol_type = other RNA
acctgcagcctggagacgggg

SEQ ID NO: 52699 - RNA, 21 nt, synthetic construct
  source 1..21: mol_type = other RNA
cccgaggtaagcatcgaccag

SEQ ID NO: 52700 - RNA, 21 nt, synthetic construct
  source 1..21: mol_type = other RNA
gggacgacctggatcctcaca

SEQ ID NO: 52701 - RNA, 21 nt, synthetic construct
  source 1..21: mol_type = other RNA
gggacgacctggatcctcaca

SEQ ID NO: 52702 - RNA, 21 nt, synthetic construct
  source 1..21: mol_type = other RNA
gggacgacctggatcctcaca

SEQ ID NO: 52703 - RNA, 21 nt, synthetic construct
  source 1..21: mol_type = other RNA
gggacgacctggatcctcaca

SEQ ID NO: 52704 - RNA, 21 nt, synthetic construct
  source 1..21: mol_type = other RNA
gggacgacctggatcctcaca

SEQ ID NO: 52705 - RNA, 21 nt, synthetic construct
  source 1..21: mol_type = other RNA
gggacgacctggatcctcaca

SEQ ID NO: 52706 - RNA, 21 nt, synthetic construct
  source 1..21: mol_type = other RNA
gggacgacctggatcctcaca

SEQ ID NO: 52707 - RNA, 21 nt, synthetic construct
  source 1..21: mol_type = other RNA
tgctcaacccagcccagtttt

SEQ ID NO: 52708 - RNA, 21 nt, synthetic construct
  source 1..21: mol_type = other RNA
taccccgaggtaagcatcgac

SEQ ID NO: 52709 - RNA, 21 nt, synthetic construct
  source 1..21: mol_type = other RNA
ccacagccaccagttccaaag

SEQ ID NO: 52710 - RNA, 21 nt, synthetic construct
  source 1..21: mol_type = other RNA
ccacagccaccagttccaaag

SEQ ID NO: 52711 - RNA, 21 nt, synthetic construct
  source 1..21: mol_type = other RNA
gtcactgggacgccctggaac

SEQ ID NO: 52712 - RNA, 21 nt, synthetic construct
  source 1..21: mol_type = other RNA
ggagaactaccccgaggtaag

SEQ ID NO: 52713 - RNA, 21 nt, synthetic construct
  source 1..21: mol_type = other RNA
caaagtgtcggacccgagcca

SEQ ID NO: 52714 - RNA, 21 nt, synthetic construct
  source 1..21: mol_type = other RNA
ggggacgacctggatcctcac

SEQ ID NO: 52715 - RNA, 21 nt, synthetic construct
  source 1..21: mol_type = other RNA
ggggacgacctggatcctcac

SEQ ID NO: 52716 - RNA, 21 nt, synthetic construct
  source 1..21: mol_type = other RNA
ggggacgacctggatcctcac

SEQ ID NO: 52717 - RNA, 21 nt, synthetic construct
  source 1..21: mol_type = other RNA
ggggacgacctggatcctcac

SEQ ID NO: 52718 - RNA, 21 nt, synthetic construct
  source 1..21: mol_type = other RNA
ggggacgacctggatcctcac

SEQ ID NO: 52719 - RNA, 21 nt, synthetic construct
  source 1..21: mol_type = other RNA
ggggacgacctggatcctcac

SEQ ID NO: 52720 - RNA, 21 nt, synthetic construct
  source 1..21: mol_type = other RNA
gatgtgcttcaactatgaaat

SEQ ID NO: 52721 - RNA, 21 nt, synthetic construct
  source 1..21: mol_type = other RNA
gatgtgcttcaactatgaaat

SEQ ID NO: 52722 - RNA, 21 nt, synthetic construct
  source 1..21: mol_type = other RNA
gatgtgcttcaactatgaaat

SEQ ID NO: 52723 - RNA, 21 nt, synthetic construct
  source 1..21: mol_type = other RNA
gatgtgcttcaactatgaaat

SEQ ID NO: 52724 - RNA, 21 nt, synthetic construct
  source 1..21: mol_type = other RNA
ccctcctccactctggggacg

SEQ ID NO: 52725 - RNA, 21 nt, synthetic construct
  source 1..21: mol_type = other RNA
cctcctccactctggggacga

SEQ ID NO: 52726 - RNA, 21 nt, synthetic construct
  source 1..21: mol_type = other RNA
cacccgtgttgtcatcaaggc

SEQ ID NO: 52727 - RNA, 21 nt, synthetic construct
  source 1..21: mol_type = other RNA
caaagtgctgactaccacaac

SEQ ID NO: 52728 - RNA, 21 nt, synthetic construct
  source 1..21: mol_type = other RNA
ccacagtgcttaccaccacgg

SEQ ID NO: 52729 - RNA, 21 nt, synthetic construct
  source 1..21: mol_type = other RNA
ccacagtgcttaccaccacgg

SEQ ID NO: 52730 - RNA, 21 nt, synthetic construct
  source 1..21: mol_type = other RNA
agccactacgactgcatccac

SEQ ID NO: 52731 - RNA, 21 nt, synthetic construct
  source 1..21: mol_type = other RNA
ggctgacctgcaagaacgaag

SEQ ID NO: 52732 - RNA, 21 nt, synthetic construct
  source 1..21: mol_type = other RNA
ccactacgactgcgtccactg

SEQ ID NO: 52733 - RNA, 21 nt, synthetic construct
  source 1..21: mol_type = other RNA
ccactacgactgcgtccactg

SEQ ID NO: 52734 - RNA, 21 nt, synthetic construct
  source 1..21: mol_type = other RNA
catcgaccaggtcgggcaggt

SEQ ID NO: 52735 - RNA, 21 nt, synthetic construct
  source 1..21: mol_type = other RNA
taagcatcgaccaggtcgggc

SEQ ID NO: 52736 - RNA, 21 nt, synthetic construct
  source 1..21: mol_type = other RNA
gaacgaagaccagacaggcag

SEQ ID NO: 52737 - RNA, 21 nt, synthetic construct
  source 1..21: mol_type = other RNA
ctacaacgtgcgtgtgctttg

SEQ ID NO: 52738 - RNA, 21 nt, synthetic construct
  source 1..21: mol_type = other RNA
gctgacctgcaagaacgaaga

SEQ ID NO: 52739 - RNA, 21 nt, synthetic construct
  source 1..21: mol_type = other RNA
actacaacgtgcgtgtgcttt

SEQ ID NO: 52740 - RNA, 21 nt, synthetic construct
  source 1..21: mol_type = other RNA
gtgctttgctgtgacgactac

SEQ ID NO: 52741 - RNA, 21 nt, synthetic construct
  source 1..21: mol_type = other RNA
acaacagccactacgactgag

SEQ ID NO: 52742 - RNA, 21 nt, synthetic construct
  source 1..21: mol_type = other RNA
acaacagccactacgactgag

SEQ ID NO: 52743 - RNA, 21 nt, synthetic construct
  source 1..21: mol_type = other RNA
caactacaacgtgcgtgtgct

SEQ ID NO: 52744 - RNA, 21 nt, synthetic construct
  source 1..21: mol_type = other RNA
aactacaacgtgcgtgtgctt

SEQ ID NO: 52745 - RNA, 21 nt, synthetic construct
  source 1..21: mol_type = other RNA
cctcaactccggggacgacct

SEQ ID NO: 52746 - RNA, 21 nt, synthetic construct
  source 1..21: mol_type = other RNA
cctcaactccggggacgacct

SEQ ID NO: 52747 - RNA, 21 nt, synthetic construct
  source 1..21: mol_type = other RNA
aggtaagcatcgaccaggtcg

SEQ ID NO: 52748 - RNA, 21 nt, synthetic construct
  source 1..21: mol_type = other RNA
gcactcgactccagccctgtc

SEQ ID NO: 52749 - RNA, 21 nt, synthetic construct
  source 1..21: mol_type = other RNA
gcactcgactccagccctgtc

SEQ ID NO: 52750 - RNA, 21 nt, synthetic construct
  source 1..21: mol_type = other RNA
gcactcgactccagccctgtc

SEQ ID NO: 52751 - RNA, 21 nt, synthetic construct
  source 1..21: mol_type = other RNA
agccactacgactgcgtccac

SEQ ID NO: 52752 - RNA, 21 nt, synthetic construct
  source 1..21: mol_type = other RNA
agccactacgactgcgtccac

SEQ ID NO: 52753 - RNA, 21 nt, synthetic construct
  source 1..21: mol_type = other RNA
cacaaagccgaccacaacagc

SEQ ID NO: 52754 - RNA, 21 nt, synthetic construct
  source 1..21: mol_type = other RNA
tacgactgcgtccactggatc

SEQ ID NO: 52755 - RNA, 21 nt, synthetic construct
  source 1..21: mol_type = other RNA
tacgactgcgtccactggatc

SEQ ID NO: 52756 - RNA, 21 nt, synthetic construct
  source 1..21: mol_type = other RNA
ggatcctcacaaagccgacca

SEQ ID NO: 52757 - RNA, 21 nt, synthetic construct
  source 1..21: mol_type = other RNA
aagaacgaagaccagacaggc

SEQ ID NO: 52758 - RNA, 21 nt, synthetic construct
  source 1..21: mol_type = other RNA
tcaactccggggacgacctgg

SEQ ID NO: 52759 - RNA, 21 nt, synthetic construct
  source 1..21: mol_type = other RNA
tcaactccggggacgacctgg

SEQ ID NO: 52760 - RNA, 21 nt, synthetic construct
  source 1..21: mol_type = other RNA
gaggtaagcatcgaccaggtc

SEQ ID NO: 52761 - RNA, 21 nt, synthetic construct
  source 1..21: mol_type = other RNA
cacaacagccactacgactgc

SEQ ID NO: 52762 - RNA, 21 nt, synthetic construct
  source 1..21: mol_type = other RNA
cacaacagccactacgactga

SEQ ID NO: 52763 - RNA, 21 nt, synthetic construct
  source 1..21: mol_type = other RNA
caacagccactacgactgagt

SEQ ID NO: 52764 - RNA, 21 nt, synthetic construct
  source 1..21: mol_type = other RNA
cacaacagccactacgactga

SEQ ID NO: 52765 - RNA, 21 nt, synthetic construct
  source 1..21: mol_type = other RNA
caacagccactacgactgagt

SEQ ID NO: 52766 - RNA, 21 nt, synthetic construct
  source 1..21: mol_type = other RNA
cacaacagccactacgactgc

SEQ ID NO: 52767 - RNA, 21 nt, synthetic construct
  source 1..21: mol_type = other RNA
cacaacagccactacgactgc

SEQ ID NO: 52768 - RNA, 21 nt, synthetic construct
  source 1..21: mol_type = other RNA
gccactacgactgcgtccact

SEQ ID NO: 52769 - RNA, 21 nt, synthetic construct
  source 1..21: mol_type = other RNA
gccactacgactgcgtccact

SEQ ID NO: 52770 - RNA, 21 nt, synthetic construct
  source 1..21: mol_type = other RNA
gtaagcatcgaccaggtcggg

SEQ ID NO: 52771 - RNA, 21 nt, synthetic construct
  source 1..21: mol_type = other RNA
ttcaactacaacgtgcgtgtg

SEQ ID NO: 52772 - RNA, 21 nt, synthetic construct
  source 1..21: mol_type = other RNA
tcaactacaacgtgcgtgtgc

SEQ ID NO: 52773 - RNA, 21 nt, synthetic construct
  source 1..21: mol_type = other RNA
ttgctgtgacgactacagcca

SEQ ID NO: 52774 - RNA, 21 nt, synthetic construct
  source 1..21: mol_type = other RNA
ctcctcaactccggggacgac

SEQ ID NO: 52775 - RNA, 21 nt, synthetic construct
  source 1..21: mol_type = other RNA
ctcaactccggggacgacctg

SEQ ID NO: 52776 - RNA, 21 nt, synthetic construct
  source 1..21: mol_type = other RNA
aacagccactacgactgcgtc

SEQ ID NO: 52777 - RNA, 21 nt, synthetic construct
  source 1..21: mol_type = other RNA
actacgactgcgtccactgga

SEQ ID NO: 52778 - RNA, 21 nt, synthetic construct
  source 1..21: mol_type = other RNA
ctcctcaactccggggacgac

SEQ ID NO: 52779 - RNA, 21 nt, synthetic construct
  source 1..21: mol_type = other RNA
ctcaactccggggacgacctg

SEQ ID NO: 52780 - RNA, 21 nt, synthetic construct
  source 1..21: mol_type = other RNA
aacagccactacgactgcatc

SEQ ID NO: 52781 - RNA, 21 nt, synthetic construct
  source 1..21: mol_type = other RNA
acagccactacgactgcatcc

SEQ ID NO: 52782 - RNA, 21 nt, synthetic construct
  source 1..21: mol_type = other RNA
aacagccactacgactgcgtc

SEQ ID NO: 52783 - RNA, 21 nt, synthetic construct
  source 1..21: mol_type = other RNA
actacgactgcgtccactgga

SEQ ID NO: 52784 - RNA, 21 nt, synthetic construct
  source 1..21: mol_type = other RNA
ctccaagaggggacctttaag

SEQ ID NO: 52785 - RNA, 21 nt, synthetic construct
  source 1..21: mol_type = other RNA
ttcccaacctcaggggttgca

SEQ ID NO: 52786 - RNA, 21 nt, synthetic construct
  source 1..21: mol_type = other RNA
aagcatcgaccaggtcgggca

SEQ ID NO: 52787 - RNA, 21 nt, synthetic construct
  source 1..21: mol_type = other RNA
agcatcgaccaggtcgggcag

SEQ ID NO: 52788 - RNA, 21 nt, synthetic construct
  source 1..21: mol_type = other RNA
gagacggggctgacctgcaag

SEQ ID NO: 52789 - RNA, 21 nt, synthetic construct
  source 1..21: mol_type = other RNA
gacggggctgacctgcaagaa

SEQ ID NO: 52790 - RNA, 21 nt, synthetic construct
  source 1..21: mol_type = other RNA
ggggctgacctgcaagaacga

SEQ ID NO: 52791 - RNA, 21 nt, synthetic construct
  source 1..21: mol_type = other RNA
gggctgacctgcaagaacgaa

SEQ ID NO: 52792 - RNA, 21 nt, synthetic construct
  source 1..21: mol_type = other RNA
caagaacgaagaccagacagg

SEQ ID NO: 52793 - RNA, 21 nt, synthetic construct
  source 1..21: mol_type = other RNA
aacatgtgcttcaactacaac

SEQ ID NO: 52794 - RNA, 21 nt, synthetic construct
  source 1..21: mol_type = other RNA
gcttcaactacaacgtgcgtg

SEQ ID NO: 52795 - RNA, 21 nt, synthetic construct
  source 1..21: mol_type = other RNA
tgtgctttgctgtgacgacta

SEQ ID NO: 52796 - RNA, 21 nt, synthetic construct
  source 1..21: mol_type = other RNA
tcctcaactccggggacgacc

SEQ ID NO: 52797 - RNA, 21 nt, synthetic construct
  source 1..21: mol_type = other RNA
cgacctggatcctcacaaagc

SEQ ID NO: 52798 - RNA, 21 nt, synthetic construct
  source 1..21: mol_type = other RNA
tggatcctcacaaagccgacc

SEQ ID NO: 52799 - RNA, 21 nt, synthetic construct
  source 1..21: mol_type = other RNA
ctcacaaagccgaccacaaca

SEQ ID NO: 52800 - RNA, 21 nt, synthetic construct
  source 1..21: mol_type = other RNA
tcacaaagccgaccacaacag

SEQ ID NO: 52801 - RNA, 21 nt, synthetic construct
  source 1..21: mol_type = other RNA
caacagccactacgactgcgt

SEQ ID NO: 52802 - RNA, 21 nt, synthetic construct
  source 1..21: mol_type = other RNA
acagccactacgactgcgtcc

SEQ ID NO: 52803 - RNA, 21 nt, synthetic construct
  source 1..21: mol_type = other RNA
cagccactacgactgcgtcca

SEQ ID NO: 52804 - RNA, 21 nt, synthetic construct
  source 1..21: mol_type = other RNA
gactgcgtccactggatccac

SEQ ID NO: 52805 - RNA, 21 nt, synthetic construct
  source 1..21: mol_type = other RNA
tcctcaactccggggacgacc

SEQ ID NO: 52806 - RNA, 21 nt, synthetic construct
  source 1..21: mol_type = other RNA
cgacctggatcctcacaaagc

SEQ ID NO: 52807 - RNA, 21 nt, synthetic construct
  source 1..21: mol_type = other RNA
caacagccactacgactgcat

SEQ ID NO: 52808 - RNA, 21 nt, synthetic construct
  source 1..21: mol_type = other RNA
cagccactacgactgcatcca

SEQ ID NO: 52809 - RNA, 21 nt, synthetic construct
  source 1..21: mol_type = other RNA
gccactacgactgcatccact

SEQ ID NO: 52810 - RNA, 21 nt, synthetic construct
  source 1..21: mol_type = other RNA
caacagccactacgactgcgt

SEQ ID NO: 52811 - RNA, 21 nt, synthetic construct
  source 1..21: mol_type = other RNA
acagccactacgactgcgtcc

SEQ ID NO: 52812 - RNA, 21 nt, synthetic construct
  source 1..21: mol_type = other RNA
cagccactacgactgcgtcca

SEQ ID NO: 52813 - RNA, 21 nt, synthetic construct
  source 1..21: mol_type = other RNA
gactgcgtccactggatccac

SEQ ID NO: 52814 - RNA, 21 nt, synthetic construct
  source 1..21: mol_type = other RNA
gtcatctacaataagaccgac

SEQ ID NO: 52815 - RNA, 21 nt, synthetic construct
  source 1..21: mol_type = other RNA
agaccagacaggcaggttcaa

SEQ ID NO: 52816 - RNA, 21 nt, synthetic construct
  source 1..21: mol_type = other RNA
acaaagccgaccacaacagcc

SEQ ID NO: 52817 - RNA, 21 nt, synthetic construct
  source 1..21: mol_type = other RNA
tgcttcaactacaacgtgcgt

SEQ ID NO: 52818 - RNA, 21 nt, synthetic construct
  source 1..21: mol_type = other RNA
cgaccacaacagccactacga

SEQ ID NO: 52819 - RNA, 21 nt, synthetic construct
  source 1..21: mol_type = other RNA
tgaccacaacagccactacga

SEQ ID NO: 52820 - RNA, 21 nt, synthetic construct
  source 1..21: mol_type = other RNA
tgaccacaacagccactacga

SEQ ID NO: 52821 - RNA, 21 nt, synthetic construct
  source 1..21: mol_type = other RNA
tgaccacaacagccactacga

SEQ ID NO: 52822 - RNA, 21 nt, synthetic construct
  source 1..21: mol_type = other RNA
tgaccacaacagccactacga

SEQ ID NO: 52823 - RNA, 21 nt, synthetic construct
  source 1..21: mol_type = other RNA
ggagacggggctgacctgcaa

SEQ ID NO: 52824 - RNA, 21 nt, synthetic construct
  source 1..21: mol_type = other RNA
agacggggctgacctgcaaga

SEQ ID NO: 52825 - RNA, 21 nt, synthetic construct
  source 1..21: mol_type = other RNA
tgacctgcaagaacgaagacc

SEQ ID NO: 52826 - RNA, 21 nt, synthetic construct
  source 1..21: mol_type = other RNA
gcaagaacgaagaccagacag

SEQ ID NO: 52827 - RNA, 21 nt, synthetic construct
  source 1..21: mol_type = other RNA
ccacgccctcctcaactccgg

SEQ ID NO: 52828 - RNA, 21 nt, synthetic construct
  source 1..21: mol_type = other RNA
caaagccgaccacaacagcca

SEQ ID NO: 52829 - RNA, 21 nt, synthetic construct
  source 1..21: mol_type = other RNA
aaagccgaccacaacagccac

SEQ ID NO: 52830 - RNA, 21 nt, synthetic construct
  source 1..21: mol_type = other RNA
ccacgccctcctcaactccgg

SEQ ID NO: 52831 - RNA, 21 nt, synthetic construct
  source 1..21: mol_type = other RNA
ctggatcctcacaaagccgac

SEQ ID NO: 52832 - RNA, 21 nt, synthetic construct
  source 1..21: mol_type = other RNA
cttcccaacctcaggggttgc

SEQ ID NO: 52833 - RNA, 21 nt, synthetic construct
  source 1..21: mol_type = other RNA
tgcaggcggggacatggaaac

SEQ ID NO: 52834 - RNA, 21 nt, synthetic construct
  source 1..21: mol_type = other RNA
cgtgtgctttgctgtgacgac

SEQ ID NO: 52835 - RNA, 21 nt, synthetic construct
  source 1..21: mol_type = other RNA
gccctcctcaactccggggac

SEQ ID NO: 52836 - RNA, 21 nt, synthetic construct
  source 1..21: mol_type = other RNA
gccctcctcaactccggggac

SEQ ID NO: 52837 - RNA, 21 nt, synthetic construct
  source 1..21: mol_type = other RNA
agaacgaagaccagacaggca

SEQ ID NO: 52838 - RNA, 21 nt, synthetic construct
  source 1..21: mol_type = other RNA
gaccacaacagccactacgac

SEQ ID NO: 52839 - RNA, 21 nt, synthetic construct
  source 1..21: mol_type = other RNA
gaccacaacagccactacgac

SEQ ID NO: 52840 - RNA, 21 nt, synthetic construct
  source 1..21: mol_type = other RNA
gaccacaacagccactacgac

SEQ ID NO: 52841 - RNA, 21 nt, synthetic construct
  source 1..21: mol_type = other RNA
gaccacaacagccactacgac

SEQ ID NO: 52842 - RNA, 21 nt, synthetic construct
  source 1..21: mol_type = other RNA
gaccacaacagccactacgac

SEQ ID NO: 52843 - RNA, 21 nt, synthetic construct
  source 1..21: mol_type = other RNA
tacaacgtgcgtgtgctttgc

SEQ ID NO: 52844 - RNA, 21 nt, synthetic construct
  source 1..21: mol_type = other RNA
cgactgcatccactggatcca

SEQ ID NO: 52845 - RNA, 21 nt, synthetic construct
  source 1..21: mol_type = other RNA
gaccacaacagccactacaac

SEQ ID NO: 52846 - RNA, 21 nt, synthetic construct
  source 1..21: mol_type = other RNA
cactacgactgcgtccactgg

SEQ ID NO: 52847 - RNA, 21 nt, synthetic construct
  source 1..21: mol_type = other RNA
cactacgactgcgtccactgg

SEQ ID NO: 52848 - RNA, 21 nt, synthetic construct
  source 1..21: mol_type = other RNA
gtccccgtccccccacccgtg

SEQ ID NO: 52849 - RNA, 21 nt, synthetic construct
  source 1..21: mol_type = other RNA
cgcctgcgcccaggacctgtg

SEQ ID NO: 52850 - RNA, 21 nt, synthetic construct
  source 1..21: mol_type = other RNA
gccgacagcagcttcaccgtg

SEQ ID NO: 52851 - RNA, 21 nt, synthetic construct
  source 1..21: mol_type = other RNA
acaccacccacgggaccttcc

SEQ ID NO: 52852 - RNA, 21 nt, synthetic construct
  source 1..21: mol_type = other RNA
ctcacctcgcagactgggtcc

SEQ ID NO: 52853 - RNA, 21 nt, synthetic construct
  source 1..21: mol_type = other RNA
tcccaacctcaggggttgcag

SEQ ID NO: 52854 - RNA, 21 nt, synthetic construct
  source 1..21: mol_type = other RNA
gcatcgaccaggtcgggcagg

SEQ ID NO: 52855 - RNA, 21 nt, synthetic construct
  source 1..21: mol_type = other RNA
tcgaccaggtcgggcaggtgc

SEQ ID NO: 52856 - RNA, 21 nt, synthetic construct
  source 1..21: mol_type = other RNA
cgaccaggtcgggcaggtgct

SEQ ID NO: 52857 - RNA, 21 nt, synthetic construct
  source 1..21: mol_type = other RNA
accaggtcgggcaggtgctga

SEQ ID NO: 52858 - RNA, 21 nt, synthetic construct
  source 1..21: mol_type = other RNA
caggtcgggcaggtgctgacc

SEQ ID NO: 52859 - RNA, 21 nt, synthetic construct
  source 1..21: mol_type = other RNA
acgaagaccagacaggcaggt

SEQ ID NO: 52860 - RNA, 21 nt, synthetic construct
  source 1..21: mol_type = other RNA
accagctccacggccacgccc

SEQ ID NO: 52861 - RNA, 21 nt, synthetic construct
  source 1..21: mol_type = other RNA
actccggggacgacctggatc

SEQ ID NO: 52862 - RNA, 21 nt, synthetic construct
  source 1..21: mol_type = other RNA
ctccggggacgacctggatcc

SEQ ID NO: 52863 - RNA, 21 nt, synthetic construct
  source 1..21: mol_type = other RNA
agccgaccacaacagccacta

SEQ ID NO: 52864 - RNA, 21 nt, synthetic construct
  source 1..21: mol_type = other RNA
acagagccttccacggtgact

SEQ ID NO: 52865 - RNA, 21 nt, synthetic construct
  source 1..21: mol_type = other RNA
actccggggacgacctggatc

SEQ ID NO: 52866 - RNA, 21 nt, synthetic construct
  source 1..21: mol_type = other RNA
ctccggggacgacctggatcc

SEQ ID NO: 52867 - RNA, 21 nt, synthetic construct
  source 1..21: mol_type = other RNA
agctgaccacaacagccacta

SEQ ID NO: 52868 - RNA, 21 nt, synthetic construct
  source 1..21: mol_type = other RNA
accacggccaccacacacggg

SEQ ID NO: 52869 - RNA, 21 nt, synthetic construct
  source 1..21: mol_type = other RNA
accagcacggccaccacaccc

SEQ ID NO: 52870 - RNA, 21 nt, synthetic construct
  source 1..21: mol_type = other RNA
actccggggacgacctggatc

SEQ ID NO: 52871 - RNA, 21 nt, synthetic construct
  source 1..21: mol_type = other RNA
ctccggggacgacctggatcc

SEQ ID NO: 52872 - RNA, 21 nt, synthetic construct
  source 1..21: mol_type = other RNA
accagcacggccaccacaccc

SEQ ID NO: 52873 - RNA, 21 nt, synthetic construct
  source 1..21: mol_type = other RNA
accacggccaccacacacggg

SEQ ID NO: 52874 - RNA, 21 nt, synthetic construct
  source 1..21: mol_type = other RNA
acagagccttccacggtgact

SEQ ID NO: 52875 - RNA, 21 nt, synthetic construct
  source 1..21: mol_type = other RNA
actccggggacgacctggatc

SEQ ID NO: 52876 - RNA, 21 nt, synthetic construct
  source 1..21: mol_type = other RNA
ctccggggacgacctggatcc

SEQ ID NO: 52877 - RNA, 21 nt, synthetic construct
  source 1..21: mol_type = other RNA
agctgaccacaacagccacta

SEQ ID NO: 52878 - RNA, 21 nt, synthetic construct
  source 1..21: mol_type = other RNA
accacggccaccacacacggg

SEQ ID NO: 52879 - RNA, 21 nt, synthetic construct
  source 1..21: mol_type = other RNA
actccggggacgacctggatc

SEQ ID NO: 52880 - RNA, 21 nt, synthetic construct
  source 1..21: mol_type = other RNA
ctccggggacgacctggatcc

SEQ ID NO: 52881 - RNA, 21 nt, synthetic construct
  source 1..21: mol_type = other RNA
agctgaccacaacagccacta

SEQ ID NO: 52882 - RNA, 21 nt, synthetic construct
  source 1..21: mol_type = other RNA
acgactgcatccactggatcc

SEQ ID NO: 52883 - RNA, 21 nt, synthetic construct
  source 1..21: mol_type = other RNA
actccggggacgacctggatc

SEQ ID NO: 52884 - RNA, 21 nt, synthetic construct
  source 1..21: mol_type = other RNA
ctccggggacgacctggatcc

SEQ ID NO: 52885 - RNA, 21 nt, synthetic construct
  source 1..21: mol_type = other RNA
agctgaccacaacagccacta

SEQ ID NO: 52886 - RNA, 21 nt, synthetic construct
  source 1..21: mol_type = other RNA
accagcacggccaccacaccc

SEQ ID NO: 52887 - RNA, 21 nt, synthetic construct
  source 1..21: mol_type = other RNA
agctgaccacaacagccacta

SEQ ID NO: 52888 - RNA, 21 nt, synthetic construct
  source 1..21: mol_type = other RNA
acccaaagcctgtggccaacg

SEQ ID NO: 52889 - RNA, 21 nt, synthetic construct
  source 1..21: mol_type = other RNA
cgctgcccccgcgccctcagc

SEQ ID NO: 52890 - RNA, 21 nt, synthetic construct
  source 1..21: mol_type = other RNA
acggccacgccctcctcaact

SEQ ID NO: 52891 - RNA, 21 nt, synthetic construct
  source 1..21: mol_type = other RNA
acggccacgccctcctcaact

SEQ ID NO: 52892 - RNA, 21 nt, synthetic construct
  source 1..21: mol_type = other RNA
acgacctggatcctcacaaag

SEQ ID NO: 52893 - RNA, 21 nt, synthetic construct
  source 1..21: mol_type = other RNA
tcacagagctgaccacaacag

SEQ ID NO: 52894 - RNA, 21 nt, synthetic construct
  source 1..21: mol_type = other RNA
acgacctggatcctcacaaag

SEQ ID NO: 52895 - RNA, 21 nt, synthetic construct
  source 1..21: mol_type = other RNA
tcacagagctgaccacaacag

SEQ ID NO: 52896 - RNA, 21 nt, synthetic construct
  source 1..21: mol_type = other RNA
tacgactgcatccactggatc

SEQ ID NO: 52897 - RNA, 21 nt, synthetic construct
  source 1..21: mol_type = other RNA
tcacagagctgaccacaacag

SEQ ID NO: 52898 - RNA, 21 nt, synthetic construct
  source 1..21: mol_type = other RNA
tcacctcgcagactgggtcca

SEQ ID NO: 52899 - RNA, 21 nt, synthetic construct
  source 1..21: mol_type = other RNA
acctccttcaacaccacctgc

SEQ ID NO: 52900 - RNA, 21 nt, synthetic construct
  source 1..21: mol_type = other RNA
ggtccagctcaggccccgtga

SEQ ID NO: 52901 - RNA, 21 nt, synthetic construct
  source 1..21: mol_type = other RNA
accaccacccaggccctgttc

SEQ ID NO: 52902 - RNA, 21 nt, synthetic construct
  source 1..21: mol_type = other RNA
tcaggggttgcaggcggggac

SEQ ID NO: 52903 - RNA, 21 nt, synthetic construct
  source 1..21: mol_type = other RNA
ttgcaggcggggacatggaaa

SEQ ID NO: 52904 - RNA, 21 nt, synthetic construct
  source 1..21: mol_type = other RNA
ccctcctcaactccggggacg

SEQ ID NO: 52905 - RNA, 21 nt, synthetic construct
  source 1..21: mol_type = other RNA
accacggccacgacacccaca

SEQ ID NO: 52906 - RNA, 21 nt, synthetic construct
  source 1..21: mol_type = other RNA
ccacggccacgacacccacag

SEQ ID NO: 52907 - RNA, 21 nt, synthetic construct
  source 1..21: mol_type = other RNA
ccctgtccagccctcacccta

SEQ ID NO: 52908 - RNA, 21 nt, synthetic construct
  source 1..21: mol_type = other RNA
ctcctctactccagagactgt

SEQ ID NO: 52909 - RNA, 21 nt, synthetic construct
  source 1..21: mol_type = other RNA
ccctgtccagccctcacccta

SEQ ID NO: 52910 - RNA, 21 nt, synthetic construct
  source 1..21: mol_type = other RNA
ccctcctcaactccggggacg

SEQ ID NO: 52911 - RNA, 21 nt, synthetic construct
  source 1..21: mol_type = other RNA
accacggccacgacacccaca

SEQ ID NO: 52912 - RNA, 21 nt, synthetic construct
  source 1..21: mol_type = other RNA
ccacggccacgacacccacag

SEQ ID NO: 52913 - RNA, 21 nt, synthetic construct
  source 1..21: mol_type = other RNA
ccctgtccagccctcacccta

SEQ ID NO: 52914 - RNA, 21 nt, synthetic construct
  source 1..21: mol_type = other RNA
accacggccacgacacccaca

SEQ ID NO: 52915 - RNA, 21 nt, synthetic construct
  source 1..21: mol_type = other RNA
ccacggccacgacacccacag

SEQ ID NO: 52916 - RNA, 21 nt, synthetic construct
  source 1..21: mol_type = other RNA
ctcctctactccagagaccac

SEQ ID NO: 52917 - RNA, 21 nt, synthetic construct
  source 1..21: mol_type = other RNA
actgcaggggacgtgccacaa

SEQ ID NO: 52918 - RNA, 21 nt, synthetic construct
  source 1..21: mol_type = other RNA
ccagtgccgaacaccacggcc

SEQ ID NO: 52919 - RNA, 21 nt, synthetic construct
  source 1..21: mol_type = other RNA
ccagtgccgaacaccacggcc

SEQ ID NO: 52920 - RNA, 21 nt, synthetic construct
  source 1..21: mol_type = other RNA
ccagtgccgaacaccacggcc

SEQ ID NO: 52921 - RNA, 21 nt, synthetic construct
  source 1..21: mol_type = other RNA
acagtgcttaccgccacggcc

SEQ ID NO: 52922 - RNA, 21 nt, synthetic construct
  source 1..21: mol_type = other RNA
acagtgcttaccgccacggcc

SEQ ID NO: 52923 - RNA, 21 nt, synthetic construct
  source 1..21: mol_type = other RNA
cagcagcctaaggacatagag

SEQ ID NO: 52924 - RNA, 21 nt, synthetic construct
  source 1..21: mol_type = other RNA
acagtgcttaccaccacgacc

SEQ ID NO: 52925 - RNA, 21 nt, synthetic construct
  source 1..21: mol_type = other RNA
tgagaacgttctgcctccatc

SEQ ID NO: 52926 - RNA, 21 nt, synthetic construct
  source 1..21: mol_type = other RNA
ctgcccttgccggccggcaac

SEQ ID NO: 52927 - RNA, 21 nt, synthetic construct
  source 1..21: mol_type = other RNA
cccttggtacagccaccacgg

SEQ ID NO: 52928 - RNA, 21 nt, synthetic construct
  source 1..21: mol_type = other RNA
cacggccacgccctcctcaac

SEQ ID NO: 52929 - RNA, 21 nt, synthetic construct
  source 1..21: mol_type = other RNA
tacggccacgccctcctcaac

SEQ ID NO: 52930 - RNA, 21 nt, synthetic construct
  source 1..21: mol_type = other RNA
catgacaagggccaccaattc

SEQ ID NO: 52931 - RNA, 21 nt, synthetic construct
  source 1..21: mol_type = other RNA
atcacagagccttccacggtg

SEQ ID NO: 52932 - RNA, 21 nt, synthetic construct
  source 1..21: mol_type = other RNA
atcacagagccttccacggtg

SEQ ID NO: 52933 - RNA, 21 nt, synthetic construct
  source 1..21: mol_type = other RNA
cctgcagcgtttccttcgtgc

SEQ ID NO: 52934 - RNA, 21 nt, synthetic construct
  source 1..21: mol_type = other RNA
cagcagccactacgaccgcaa

SEQ ID NO: 52935 - RNA, 21 nt, synthetic construct
  source 1..21: mol_type = other RNA
gggacggcactcacgcctcca

SEQ ID NO: 52936 - RNA, 21 nt, synthetic construct
  source 1..21: mol_type = other RNA
gggacggcactcacgcctcca

SEQ ID NO: 52937 - RNA, 21 nt, synthetic construct
  source 1..21: mol_type = other RNA
gggacggcactcacgcctcca

SEQ ID NO: 52938 - RNA, 21 nt, synthetic construct
  source 1..21: mol_type = other RNA
acagtgctgaccacgaaggcc

SEQ ID NO: 52939 - RNA, 21 nt, synthetic construct
  source 1..21: mol_type = other RNA
acagtgctgaccacgaaggcc

SEQ ID NO: 52940 - RNA, 21 nt, synthetic construct
  source 1..21: mol_type = other RNA
gtgtgctttgctgtgacgact

SEQ ID NO: 52941 - RNA, 21 nt, synthetic construct
  source 1..21: mol_type = other RNA
agaggggacctttaaggcggt

SEQ ID NO: 52942 - RNA, 21 nt, synthetic construct
  source 1..21: mol_type = other RNA
agccggctgccatttctacgc

SEQ ID NO: 52943 - RNA, 21 nt, synthetic construct
  source 1..21: mol_type = other RNA
ccctgctacgctcacggcacc

SEQ ID NO: 52944 - RNA, 21 nt, synthetic construct
  source 1..21: mol_type = other RNA
gctcacactaccaaagtgcca

SEQ ID NO: 52945 - RNA, 21 nt, synthetic construct
  source 1..21: mol_type = other RNA
gctcacactaccaaagtgccg

SEQ ID NO: 52946 - RNA, 21 nt, synthetic construct
  source 1..21: mol_type = other RNA
gctcacactaccaaagtgccg

SEQ ID NO: 52947 - RNA, 21 nt, synthetic construct
  source 1..21: mol_type = other RNA
gctcacactaccaaagtgccg

SEQ ID NO: 52948 - RNA, 21 nt, synthetic construct
  source 1..21: mol_type = other RNA
ccagcaggacccctttcggga

SEQ ID NO: 52949 - RNA, 21 nt, synthetic construct
  source 1..21: mol_type = other RNA
gtgctgaccacgaaggccacc

SEQ ID NO: 52950 - RNA, 21 nt, synthetic construct
  source 1..21: mol_type = other RNA
gtgctgaccacgaaggccacc

SEQ ID NO: 52951 - RNA, 21 nt, synthetic construct
  source 1..21: mol_type = other RNA
tggagagaccatcagggtcga

SEQ ID NO: 52952 - RNA, 21 nt, synthetic construct
  source 1..21: mol_type = other RNA
actgcaggggccgccttgagg

SEQ ID NO: 52953 - RNA, 21 nt, synthetic construct
  source 1..21: mol_type = other RNA
catgtgcttcaactacaacgt

SEQ ID NO: 52954 - RNA, 21 nt, synthetic construct
  source 1..21: mol_type = other RNA
ccacctcgggcatcttgggca

SEQ ID NO: 52955 - RNA, 21 nt, synthetic construct
  source 1..21: mol_type = other RNA
ccacctcgggcatcttgggca

SEQ ID NO: 52956 - RNA, 21 nt, synthetic construct
  source 1..21: mol_type = other RNA
gggacggcacgcacgcttcca

SEQ ID NO: 52957 - RNA, 21 nt, synthetic construct
  source 1..21: mol_type = other RNA
gggacggaaccactgccgcca

SEQ ID NO: 52958 - RNA, 21 nt, synthetic construct
  source 1..21: mol_type = other RNA
ccgtgtcgtcctgctggaccc

SEQ ID NO: 52959 - RNA, 21 nt, synthetic construct
  source 1..21: mol_type = other RNA
cctggacccgcctatcacaga

SEQ ID NO: 52960 - RNA, 21 nt, synthetic construct
  source 1..21: mol_type = other RNA
cctctggcggggactttgaca

SEQ ID NO: 52961 - RNA, 21 nt, synthetic construct
  source 1..21: mol_type = other RNA
cctggacccgcctatcacaga

SEQ ID NO: 52962 - RNA, 21 nt, synthetic construct
  source 1..21: mol_type = other RNA
cctctggcggggactttgaca

SEQ ID NO: 52963 - RNA, 21 nt, synthetic construct
  source 1..21: mol_type = other RNA
cctggacccgcctatcacaga

SEQ ID NO: 52964 - RNA, 21 nt, synthetic construct
  source 1..21: mol_type = other RNA
cctctggcggggactttgaca

SEQ ID NO: 52965 - RNA, 21 nt, synthetic construct
  source 1..21: mol_type = other RNA
cctggacccgcctatcacaga

SEQ ID NO: 52966 - RNA, 21 nt, synthetic construct
  source 1..21: mol_type = other RNA
cctctggcggggactttgaca

SEQ ID NO: 52967 - RNA, 21 nt, synthetic construct
  source 1..21: mol_type = other RNA
cctggacccgcctatcacaga

SEQ ID NO: 52968 - RNA, 21 nt, synthetic construct
  source 1..21: mol_type = other RNA
ggtgcaaccggtggcctgtgc

SEQ ID NO: 52969 - RNA, 21 nt, synthetic construct
  source 1..21: mol_type = other RNA
gggagtgcgtccagaccgcct

SEQ ID NO: 52970 - RNA, 21 nt, synthetic construct
  source 1..21: mol_type = other RNA
cagcaccgcttccaaagagcc

SEQ ID NO: 52971 - RNA, 21 nt, synthetic construct
  source 1..21: mol_type = other RNA
ggtgacaaccgtgtcgtcctg

SEQ ID NO: 52972 - RNA, 21 nt, synthetic construct
  source 1..21: mol_type = other RNA
aagctgcgacaggcaaggcgg

SEQ ID NO: 52973 - RNA, 21 nt, synthetic construct
  source 1..21: mol_type = other RNA
tggctcaccctgcacggacac

SEQ ID NO: 52974 - RNA, 21 nt, synthetic construct
  source 1..21: mol_type = other RNA
gatgacatcacgcactctggc

SEQ ID NO: 52975 - RNA, 21 nt, synthetic construct
  source 1..21: mol_type = other RNA
acctgctccggggggctatgg

SEQ ID NO: 52976 - RNA, 21 nt, synthetic construct
  source 1..21: mol_type = other RNA
tgagaaactctacgacctgca

SEQ ID NO: 52977 - RNA, 21 nt, synthetic construct
  source 1..21: mol_type = other RNA
gagctgcggaagtgcggcctg

SEQ ID NO: 52978 - RNA, 21 nt, synthetic construct
  source 1..21: mol_type = other RNA
caatgccaggaacagctttga

SEQ ID NO: 52979 - RNA, 21 nt, synthetic construct
  source 1..21: mol_type = other RNA
aggagtgcccctgctacgctc

SEQ ID NO: 52980 - RNA, 21 nt, synthetic construct
  source 1..21: mol_type = other RNA
tggagaggtggtgcacgacga

SEQ ID NO: 52981 - RNA, 21 nt, synthetic construct
  source 1..21: mol_type = other RNA
gggagtgggggctgcattgcc

SEQ ID NO: 52982 - RNA, 21 nt, synthetic construct
  source 1..21: mol_type = other RNA
agcagcagaaccaccgagtca

SEQ ID NO: 52983 - RNA, 21 nt, synthetic construct
  source 1..21: mol_type = other RNA
atcacagagccttccacgggg

SEQ ID NO: 52984 - RNA, 21 nt, synthetic construct
  source 1..21: mol_type = other RNA
ccagcagcaaccaccggtacc

SEQ ID NO: 52985 - RNA, 21 nt, synthetic construct
  source 1..21: mol_type = other RNA
cccttgggaccaccgggaccc

SEQ ID NO: 52986 - RNA, 21 nt, synthetic construct
  source 1..21: mol_type = other RNA
caaagtgccgactaccacaac

SEQ ID NO: 52987 - RNA, 21 nt, synthetic construct
  source 1..21: mol_type = other RNA
caaagtgccgactaccacaac

SEQ ID NO: 52988 - RNA, 21 nt, synthetic construct
  source 1..21: mol_type = other RNA
atcacagagccttccacgggg

SEQ ID NO: 52989 - RNA, 21 nt, synthetic construct
  source 1..21: mol_type = other RNA
ccagcagcaaccaccggtacc

SEQ ID NO: 52990 - RNA, 21 nt, synthetic construct
  source 1..21: mol_type = other RNA
cccttgggaccaccgggaccc

SEQ ID NO: 52991 - RNA, 21 nt, synthetic construct
  source 1..21: mol_type = other RNA
caaagtgccgactaccacaac

SEQ ID NO: 52992 - RNA, 21 nt, synthetic construct
  source 1..21: mol_type = other RNA
accggttccacggccaccgcc

SEQ ID NO: 52993 - RNA, 21 nt, synthetic construct
  source 1..21: mol_type = other RNA
gctggacccaaagcctgtggc

SEQ ID NO: 52994 - RNA, 21 nt, synthetic construct
  source 1..21: mol_type = other RNA
ccctgctgccccgagacggtg

SEQ ID NO: 52995 - RNA, 21 nt, synthetic construct
  source 1..21: mol_type = other RNA
aatggcaccttctacggggtt

SEQ ID NO: 52996 - RNA, 21 nt, synthetic construct
  source 1..21: mol_type = other RNA
gatgcctgcaacaatactacc

SEQ ID NO: 52997 - RNA, 21 nt, synthetic construct
  source 1..21: mol_type = other RNA
atcaacacgaccatcctgtgg

SEQ ID NO: 52998 - RNA, 21 nt, synthetic construct
  source 1..21: mol_type = other RNA
gatgtgcattgtctgatcatg

SEQ ID NO: 52999 - RNA, 21 nt, synthetic construct
  source 1..21: mol_type = other RNA
catgcctgctgcagggtaact

SEQ ID NO: 53000 - RNA, 21 nt, synthetic construct
  source 1..21: mol_type = other RNA
agaggggtcagcatcccaaag

SEQ ID NO: 53001 - RNA, 21 nt, synthetic construct
  source 1..21: mol_type = other RNA
acgaggagggcatctgccacc

SEQ ID NO: 53002 - RNA, 21 nt, synthetic construct
  source 1..21: mol_type = other RNA
agctggtgccactcatgcagg

SEQ ID NO: 53003 - RNA, 21 nt, synthetic construct
  source 1..21: mol_type = other RNA
atgtgcgccaacagccaacag

SEQ ID NO: 53004 - RNA, 21 nt, synthetic construct
  source 1..21: mol_type = other RNA
cctggacttcggccacctcgg

SEQ ID NO: 53005 - RNA, 21 nt, synthetic construct
  source 1..21: mol_type = other RNA
cctcaaagtgctgaccagcac

SEQ ID NO: 53006 - RNA, 21 nt, synthetic construct
  source 1..21: mol_type = other RNA
cctggacttcggccacctcgg

SEQ ID NO: 53007 - RNA, 21 nt, synthetic construct
  source 1..21: mol_type = other RNA
gatgtgcgccaacagccaaca

SEQ ID NO: 53008 - RNA, 21 nt, synthetic construct
  source 1..21: mol_type = other RNA
tagcagcaggaccaccgagtc

SEQ ID NO: 53009 - RNA, 21 nt, synthetic construct
  source 1..21: mol_type = other RNA
tagcagcaggaccaccgagtc

SEQ ID NO: 53010 - RNA, 21 nt, synthetic construct
  source 1..21: mol_type = other RNA
tagcagcaggaccaccgagtc

SEQ ID NO: 53011 - RNA, 21 nt, synthetic construct
  source 1..21: mol_type = other RNA
agcatccactacaagtccatg

SEQ ID NO: 53012 - RNA, 21 nt, synthetic construct
  source 1..21: mol_type = other RNA
accttcaatggccaagtcttc

SEQ ID NO: 53013 - RNA, 21 nt, synthetic construct
  source 1..21: mol_type = other RNA
cggacggcggcgtgttcctca

SEQ ID NO: 53014 - RNA, 21 nt, synthetic construct
  source 1..21: mol_type = other RNA
accttcaccaccgcctgggtc

SEQ ID NO: 53015 - RNA, 21 nt, synthetic construct
  source 1..21: mol_type = other RNA
agctggtacaatgggcaccgc

SEQ ID NO: 53016 - RNA, 21 nt, synthetic construct
  source 1..21: mol_type = other RNA
cctggactttggcctggtctg

SEQ ID NO: 53017 - RNA, 21 nt, synthetic construct
  source 1..21: mol_type = other RNA
cctggactttggcctggtctg

SEQ ID NO: 53018 - RNA, 21 nt, synthetic construct
  source 1..21: mol_type = other RNA
acagcagccactacaactgca

SEQ ID NO: 53019 - RNA, 21 nt, synthetic construct
  source 1..21: mol_type = other RNA
ccacagtgcttaccaccacga

SEQ ID NO: 53020 - RNA, 21 nt, synthetic construct
  source 1..21: mol_type = other RNA
cctggactttggcctggtctg

SEQ ID NO: 53021 - RNA, 21 nt, synthetic construct
  source 1..21: mol_type = other RNA
cctggactttggcctggtctg

SEQ ID NO: 53022 - RNA, 21 nt, synthetic construct
  source 1..21: mol_type = other RNA
acagcagccactacaactgca

SEQ ID NO: 53023 - RNA, 21 nt, synthetic construct
  source 1..21: mol_type = other RNA
ggaggggatggcggagggctg

SEQ ID NO: 53024 - RNA, 21 nt, synthetic construct
  source 1..21: mol_type = other RNA
ctgccctgtgacgcccagggt

SEQ ID NO: 53025 - RNA, 21 nt, synthetic construct
  source 1..21: mol_type = other RNA
tccctgatgtcactgggacgc

SEQ ID NO: 53026 - RNA, 21 nt, synthetic construct
  source 1..21: mol_type = other RNA
gccaacagccaacagagtccc

SEQ ID NO: 53027 - RNA, 21 nt, synthetic construct
  source 1..21: mol_type = other RNA
caacagccaacagagtccccc

SEQ ID NO: 53028 - RNA, 21 nt, synthetic construct
  source 1..21: mol_type = other RNA
cgaggtaagcatcgaccaggt

SEQ ID NO: 53029 - RNA, 21 nt, synthetic construct
  source 1..21: mol_type = other RNA
atgtgcttcaactacaacgtg

SEQ ID NO: 53030 - RNA, 21 nt, synthetic construct
  source 1..21: mol_type = other RNA
acgccctcctcaactccgggg

SEQ ID NO: 53031 - RNA, 21 nt, synthetic construct
  source 1..21: mol_type = other RNA
cctggtcagagtggctggact

SEQ ID NO: 53032 - RNA, 21 nt, synthetic construct
  source 1..21: mol_type = other RNA
ctcacagagctgaccacaaca

SEQ ID NO: 53033 - RNA, 21 nt, synthetic construct
  source 1..21: mol_type = other RNA
cctggtcagagtggctggact

SEQ ID NO: 53034 - RNA, 21 nt, synthetic construct
  source 1..21: mol_type = other RNA
agggacgacctggatcctcac

SEQ ID NO: 53035 - RNA, 21 nt, synthetic construct
  source 1..21: mol_type = other RNA
acctccacagtgctgaccacg

SEQ ID NO: 53036 - RNA, 21 nt, synthetic construct
  source 1..21: mol_type = other RNA
cctggtcagagtggctggact

SEQ ID NO: 53037 - RNA, 21 nt, synthetic construct
  source 1..21: mol_type = other RNA
acgccctcctcaactccgggg

SEQ ID NO: 53038 - RNA, 21 nt, synthetic construct
  source 1..21: mol_type = other RNA
cctggtcagagtggctggact

SEQ ID NO: 53039 - RNA, 21 nt, synthetic construct
  source 1..21: mol_type = other RNA
ctcacagagctgaccacaaca

SEQ ID NO: 53040 - RNA, 21 nt, synthetic construct
  source 1..21: mol_type = other RNA
acctccacagtgctgaccacg

SEQ ID NO: 53041 - RNA, 21 nt, synthetic construct
  source 1..21: mol_type = other RNA
ctcacagagctgaccacaaca

SEQ ID NO: 53042 - RNA, 21 nt, synthetic construct
  source 1..21: mol_type = other RNA
acctccacagtgctgaccacc

SEQ ID NO: 53043 - RNA, 21 nt, synthetic construct
  source 1..21: mol_type = other RNA
cagctcgtccaccgtggggac

SEQ ID NO: 53044 - RNA, 21 nt, synthetic construct
  source 1..21: mol_type = other RNA
tgcagcatgtggggcggctcc

SEQ ID NO: 53045 - RNA, 21 nt, synthetic construct
  source 1..21: mol_type = other RNA
tgaggtgccctgccagagcct

SEQ ID NO: 53046 - RNA, 21 nt, synthetic construct
  source 1..21: mol_type = other RNA
accaggggcacctccaggacc

SEQ ID NO: 53047 - RNA, 21 nt, synthetic construct
  source 1..21: mol_type = other RNA
caaagtgctgaccagcacggc

SEQ ID NO: 53048 - RNA, 21 nt, synthetic construct
  source 1..21: mol_type = other RNA
caaagtgctgaccagcacggc

SEQ ID NO: 53049 - RNA, 21 nt, synthetic construct
  source 1..21: mol_type = other RNA
gggacggcacgcacgcctcca

SEQ ID NO: 53050 - RNA, 21 nt, synthetic construct
  source 1..21: mol_type = other RNA
ggctggtccccgacagcagaa

SEQ ID NO: 53051 - RNA, 21 nt, synthetic construct
  source 1..21: mol_type = other RNA
aggagaggcgggtccacgagg

SEQ ID NO: 53052 - RNA, 21 nt, synthetic construct
  source 1..21: mol_type = other RNA
accaccacggccaccacaccc

SEQ ID NO: 53053 - RNA, 21 nt, synthetic construct
  source 1..21: mol_type = other RNA
cgggcatcttgggcaccaccc

SEQ ID NO: 53054 - RNA, 21 nt, synthetic construct
  source 1..21: mol_type = other RNA
cgggcatcttgggcaccaccc

SEQ ID NO: 53055 - RNA, 21 nt, synthetic construct
  source 1..21: mol_type = other RNA
ggtgcaaccttcccaggcgcc

SEQ ID NO: 53056 - RNA, 21 nt, synthetic construct
  source 1..21: mol_type = other RNA
gcagcagaaccaccgagtcac

SEQ ID NO: 53057 - RNA, 21 nt, synthetic construct
  source 1..21: mol_type = other RNA
ggaccctcccagaacagacca

SEQ ID NO: 53058 - RNA, 21 nt, synthetic construct
  source 1..21: mol_type = other RNA
ggaccctcccagaacagacca

SEQ ID NO: 53059 - RNA, 21 nt, synthetic construct
  source 1..21: mol_type = other RNA
ctcacagagcagaccacagca

SEQ ID NO: 53060 - RNA, 21 nt, synthetic construct
  source 1..21: mol_type = other RNA
gcacttatgccagcagcctaa

SEQ ID NO: 53061 - RNA, 21 nt, synthetic construct
  source 1..21: mol_type = other RNA
gctctggcggccatgctcgtg

SEQ ID NO: 53062 - RNA, 21 nt, synthetic construct
  source 1..21: mol_type = other RNA
gcctgctgtgcctaccccaac

SEQ ID NO: 53063 - RNA, 21 nt, synthetic construct
  source 1..21: mol_type = other RNA
caacagtgccttctcgcgctg

SEQ ID NO: 53064 - RNA, 21 nt, synthetic construct
  source 1..21: mol_type = other RNA
ctgcattgccgaggaggactg

SEQ ID NO: 53065 - RNA, 21 nt, synthetic construct
  source 1..21: mol_type = other RNA
gctgcagtgacgaccactgca

SEQ ID NO: 53066 - RNA, 21 nt, synthetic construct
  source 1..21: mol_type = other RNA
gcgccctcagcatccactaca

SEQ ID NO: 53067 - RNA, 21 nt, synthetic construct
  source 1..21: mol_type = other RNA
gcagcaggaccaccgagtcac

SEQ ID NO: 53068 - RNA, 21 nt, synthetic construct
  source 1..21: mol_type = other RNA
gcagcaggaccaccgagtcac

SEQ ID NO: 53069 - RNA, 21 nt, synthetic construct
  source 1..21: mol_type = other RNA
gcagcaggaccaccgagtcac

SEQ ID NO: 53070 - RNA, 21 nt, synthetic construct
  source 1..21: mol_type = other RNA
agcagcaggaccaccgagtca

SEQ ID NO: 53071 - RNA, 21 nt, synthetic construct
  source 1..21: mol_type = other RNA
agcagcaggaccaccgagtca

SEQ ID NO: 53072 - RNA, 21 nt, synthetic construct
  source 1..21: mol_type = other RNA
agcagcaggaccaccgagtca

SEQ ID NO: 53073 - RNA, 21 nt, synthetic construct
  source 1..21: mol_type = other RNA
ccagcagcctgccaaccttca

SEQ ID NO: 53074 - RNA, 21 nt, synthetic construct
  source 1..21: mol_type = other RNA
cctcccaaagtgctgaccagc

SEQ ID NO: 53075 - RNA, 21 nt, synthetic construct
  source 1..21: mol_type = other RNA
cctcccaaagtgctgaccagc

SEQ ID NO: 53076 - RNA, 21 nt, synthetic construct
  source 1..21: mol_type = other RNA
acctgctgccaggagaggcgg

SEQ ID NO: 53077 - RNA, 21 nt, synthetic construct
  source 1..21: mol_type = other RNA
ccaggctgcctgtgccaatgc

SEQ ID NO: 53078 - RNA, 21 nt, synthetic construct
  source 1..21: mol_type = other RNA
ctgacctgcaagaacgaagac

SEQ ID NO: 53079 - RNA, 21 nt, synthetic construct
  source 1..21: mol_type = other RNA
ctgccctgggcgtgagcgtca

SEQ ID NO: 53080 - RNA, 21 nt, synthetic construct
  source 1..21: mol_type = other RNA
gaaggtgcactgtgacgtcca

SEQ ID NO: 53081 - RNA, 21 nt, synthetic construct
  source 1..21: mol_type = other RNA
gtgctgactaccacaaccacg

SEQ ID NO: 53082 - RNA, 21 nt, synthetic construct
  source 1..21: mol_type = other RNA
gtgggctgtttcagcacacac

SEQ ID NO: 53083 - RNA, 21 nt, synthetic construct
  source 1..21: mol_type = other RNA
gtgccagcacggagcctgctg

SEQ ID NO: 53084 - RNA, 21 nt, synthetic construct
  source 1..21: mol_type = other RNA
ggctgctgggggcaagatgtg

SEQ ID NO: 53085 - RNA, 21 nt, synthetic construct
  source 1..21: mol_type = other RNA
caccaaagagcatagagtgcc

SEQ ID NO: 53086 - RNA, 21 nt, synthetic construct
  source 1..21: mol_type = other RNA
gggcggagaactaccccgagg

SEQ ID NO: 53087 - RNA, 21 nt, synthetic construct
  source 1..21: mol_type = other RNA
aacagctttgaggacccctgc

SEQ ID NO: 53088 - RNA, 21 nt, synthetic construct
  source 1..21: mol_type = other RNA
tgctgggcaccaaagagcata

SEQ ID NO: 53089 - RNA, 21 nt, synthetic construct
  source 1..21: mol_type = other RNA
atagagtgccgggcggagaac

SEQ ID NO: 53090 - RNA, 21 nt, synthetic construct
  source 1..21: mol_type = other RNA
catagagtgccgggcggagaa

SEQ ID NO: 53091 - RNA, 21 nt, synthetic construct
  source 1..21: mol_type = other RNA
ctgggcaccaaagagcataga

SEQ ID NO: 53092 - RNA, 21 nt, synthetic construct
  source 1..21: mol_type = other RNA
aaaacatcagggctgctgggg

SEQ ID NO: 53093 - RNA, 21 nt, synthetic construct
  source 1..21: mol_type = other RNA
agctttgaggacccctgctcc

SEQ ID NO: 53094 - RNA, 21 nt, synthetic construct
  source 1..21: mol_type = other RNA
gcacccctggggccgagtgcc

SEQ ID NO: 53095 - RNA, 21 nt, synthetic construct
  source 1..21: mol_type = other RNA
agcctaaggacatagagtgcc

SEQ ID NO: 53096 - RNA, 21 nt, synthetic construct
  source 1..21: mol_type = other RNA
gcctaaggacatagagtgcca

SEQ ID NO: 53097 - RNA, 21 nt, synthetic construct
  source 1..21: mol_type = other RNA
ggcaccaaagagcatagagtg

SEQ ID NO: 53098 - RNA, 21 nt, synthetic construct
  source 1..21: mol_type = other RNA
gcatagagtgccgggcggaga

SEQ ID NO: 53099 - RNA, 21 nt, synthetic construct
  source 1..21: mol_type = other RNA
ccagacaggcaggttcaacat

SEQ ID NO: 53100 - RNA, 21 nt, synthetic construct
  source 1..21: mol_type = other RNA
tagagtgccgggcggagaact

SEQ ID NO: 53101 - RNA, 21 nt, synthetic construct
  source 1..21: mol_type = other RNA
tgcaggtgtttgtcaggctgg

SEQ ID NO: 53102 - RNA, 21 nt, synthetic construct
  source 1..21: mol_type = other RNA
cagctttgaggacccctgctc

SEQ ID NO: 53103 - RNA, 21 nt, synthetic construct
  source 1..21: mol_type = other RNA
aaaacctgaggcagagagggt

SEQ ID NO: 53104 - RNA, 21 nt, synthetic construct
  source 1..21: mol_type = other RNA
tgacgtggacttcccaacctc

SEQ ID NO: 53105 - RNA, 21 nt, synthetic construct
  source 1..21: mol_type = other RNA
gacgtggacttcccaacctca

SEQ ID NO: 53106 - RNA, 21 nt, synthetic construct
  source 1..21: mol_type = other RNA
ttttgaaaacatcagggctgc

SEQ ID NO: 53107 - RNA, 21 nt, synthetic construct
  source 1..21: mol_type = other RNA
tttgaaaacatcagggctgct

SEQ ID NO: 53108 - RNA, 21 nt, synthetic construct
  source 1..21: mol_type = other RNA
gcaagatgtgctgggcaccaa

SEQ ID NO: 53109 - RNA, 21 nt, synthetic construct
  source 1..21: mol_type = other RNA
gaaaacctgaggcagagaggg

SEQ ID NO: 53110 - RNA, 21 nt, synthetic construct
  source 1..21: mol_type = other RNA
gcaggcggggacatggaaact

SEQ ID NO: 53111 - RNA, 21 nt, synthetic construct
  source 1..21: mol_type = other RNA
gctgggggcaagatgtgctgg

SEQ ID NO: 53112 - RNA, 21 nt, synthetic construct
  source 1..21: mol_type = other RNA
gggctgctgggggcaagatgt

SEQ ID NO: 53113 - RNA, 21 nt, synthetic construct
  source 1..21: mol_type = other RNA
ttgacgtggacttcccaacct

SEQ ID NO: 53114 - RNA, 21 nt, synthetic construct
  source 1..21: mol_type = other RNA
gctgggcaccaaagagcatag

SEQ ID NO: 53115 - RNA, 21 nt, synthetic construct
  source 1..21: mol_type = other RNA
caggttcaacatgtgcttcaa

SEQ ID NO: 53116 - RNA, 21 nt, synthetic construct
  source 1..21: mol_type = other RNA
gggggcaagatgtgctgggca

SEQ ID NO: 53117 - RNA, 21 nt, synthetic construct
  source 1..21: mol_type = other RNA
cgcccaccagggccagatgtg

SEQ ID NO: 53118 - RNA, 21 nt, synthetic construct
  source 1..21: mol_type = other RNA
acagctttgaggacccctgct

SEQ ID NO: 53119 - RNA, 21 nt, synthetic construct
  source 1..21: mol_type = other RNA
ctggagacggccaccaccacc

SEQ ID NO: 53120 - RNA, 21 nt, synthetic construct
  source 1..21: mol_type = other RNA
cgtggacttcccaacctcagg

SEQ ID NO: 53121 - RNA, 21 nt, synthetic construct
  source 1..21: mol_type = other RNA
aaacatcagggctgctggggg

SEQ ID NO: 53122 - RNA, 21 nt, synthetic construct
  source 1..21: mol_type = other RNA
caagatgtgctgggcaccaaa

SEQ ID NO: 53123 - RNA, 21 nt, synthetic construct
  source 1..21: mol_type = other RNA
agacaggcaggttcaacatgt

SEQ ID NO: 53124 - RNA, 21 nt, synthetic construct
  source 1..21: mol_type = other RNA
ggcaggttcaacatgtgcttc

SEQ ID NO: 53125 - RNA, 21 nt, synthetic construct
  source 1..21: mol_type = other RNA
caccgtgctggctcctggaga

SEQ ID NO: 53126 - RNA, 21 nt, synthetic construct
  source 1..21: mol_type = other RNA
ggcggggacatggaaactttt

SEQ ID NO: 53127 - RNA, 21 nt, synthetic construct
  source 1..21: mol_type = other RNA
ggcccagcctggtgtccccct

SEQ ID NO: 53128 - RNA, 21 nt, synthetic construct
  source 1..21: mol_type = other RNA
ggcccagcctggtgtccccct

SEQ ID NO: 53129 - RNA, 21 nt, synthetic construct
  source 1..21: mol_type = other RNA
ggcccagcctggtgtccccct

SEQ ID NO: 53130 - RNA, 21 nt, synthetic construct
  source 1..21: mol_type = other RNA
ggcccagcctggtgtccccct

SEQ ID NO: 53131 - RNA, 21 nt, synthetic construct
  source 1..21: mol_type = other RNA
tgaaaacctgaggcagagagg

SEQ ID NO: 53132 - RNA, 21 nt, synthetic construct
  source 1..21: mol_type = other RNA
catggaaacttttgaaaacat

SEQ ID NO: 53133 - RNA, 21 nt, synthetic construct
  source 1..21: mol_type = other RNA
cttttgaaaacatcagggctg

SEQ ID NO: 53134 - RNA, 21 nt, synthetic construct
  source 1..21: mol_type = other RNA
agggctgctgggggcaagatg

SEQ ID NO: 53135 - RNA, 21 nt, synthetic construct
  source 1..21: mol_type = other RNA
caccacagcagtccccaccct

SEQ ID NO: 53136 - RNA, 21 nt, synthetic construct
  source 1..21: mol_type = other RNA
tgggggcaagatgtgctgggc

SEQ ID NO: 53137 - RNA, 21 nt, synthetic construct
  source 1..21: mol_type = other RNA
ttccccagctcccacttctct

SEQ ID NO: 53138 - RNA, 21 nt, synthetic construct
  source 1..21: mol_type = other RNA
gcggggacatggaaacttttg

SEQ ID NO: 53139 - RNA, 21 nt, synthetic construct
  source 1..21: mol_type = other RNA
acgtggacttcccaacctcag

SEQ ID NO: 53140 - RNA, 21 nt, synthetic construct
  source 1..21: mol_type = other RNA
ctggaccccgcccaccagggc

SEQ ID NO: 53141 - RNA, 21 nt, synthetic construct
  source 1..21: mol_type = other RNA
gtggacttcccaacctcaggg

SEQ ID NO: 53142 - RNA, 21 nt, synthetic construct
  source 1..21: mol_type = other RNA
gcaccgtgctggctcctggag

SEQ ID NO: 53143 - RNA, 21 nt, synthetic construct
  source 1..21: mol_type = other RNA
ctccacggccacgccctcctc

SEQ ID NO: 53144 - RNA, 21 nt, synthetic construct
  source 1..21: mol_type = other RNA
cacccctggggccgagtgcct

SEQ ID NO: 53145 - RNA, 21 nt, synthetic construct
  source 1..21: mol_type = other RNA
gaggcctgcacctgcacctat

SEQ ID NO: 53146 - RNA, 21 nt, synthetic construct
  source 1..21: mol_type = other RNA
ccacagaacccactgtcccag

SEQ ID NO: 53147 - RNA, 21 nt, synthetic construct
  source 1..21: mol_type = other RNA
cccctgcccctggctgtgaca

SEQ ID NO: 53148 - RNA, 21 nt, synthetic construct
  source 1..21: mol_type = other RNA
aggcctgcacctgcacctatg

SEQ ID NO: 53149 - RNA, 21 nt, synthetic construct
  source 1..21: mol_type = other RNA
ggacatggaaacttttgaaaa

SEQ ID NO: 53150 - RNA, 21 nt, synthetic construct
  source 1..21: mol_type = other RNA
gtgctgggcaccaaagagcat

SEQ ID NO: 53151 - RNA, 21 nt, synthetic construct
  source 1..21: mol_type = other RNA
cttccccagcctgagccccct

SEQ ID NO: 53152 - RNA, 21 nt, synthetic construct
  source 1..21: mol_type = other RNA
tttgggaacctgcagaagttg

SEQ ID NO: 53153 - RNA, 21 nt, synthetic construct
  source 1..21: mol_type = other RNA
atgcaggtgtttgtcaggctg

SEQ ID NO: 53154 - RNA, 21 nt, synthetic construct
  source 1..21: mol_type = other RNA
ggtggacctgcctggcctgga

SEQ ID NO: 53155 - RNA, 21 nt, synthetic construct
  source 1..21: mol_type = other RNA
taccaccacctgccagccccg

SEQ ID NO: 53156 - RNA, 21 nt, synthetic construct
  source 1..21: mol_type = other RNA
ccaccacctgccagccccggt

SEQ ID NO: 53157 - RNA, 21 nt, synthetic construct
  source 1..21: mol_type = other RNA
gctggagacggccaccaccac

SEQ ID NO: 53158 - RNA, 21 nt, synthetic construct
  source 1..21: mol_type = other RNA
gcaccacagcagtccccaccc

SEQ ID NO: 53159 - RNA, 21 nt, synthetic construct
  source 1..21: mol_type = other RNA
cggggacatggaaacttttga

SEQ ID NO: 53160 - RNA, 21 nt, synthetic construct
  source 1..21: mol_type = other RNA
ggggacatggaaacttttgaa

SEQ ID NO: 53161 - RNA, 21 nt, synthetic construct
  source 1..21: mol_type = other RNA
gacatggaaacttttgaaaac

SEQ ID NO: 53162 - RNA, 21 nt, synthetic construct
  source 1..21: mol_type = other RNA
acatggaaacttttgaaaaca

SEQ ID NO: 53163 - RNA, 21 nt, synthetic construct
  source 1..21: mol_type = other RNA
gaaacttttgaaaacatcagg

SEQ ID NO: 53164 - RNA, 21 nt, synthetic construct
  source 1..21: mol_type = other RNA
acttttgaaaacatcagggct

SEQ ID NO: 53165 - RNA, 21 nt, synthetic construct
  source 1..21: mol_type = other RNA
aacatcagggctgctgggggc

SEQ ID NO: 53166 - RNA, 21 nt, synthetic construct
  source 1..21: mol_type = other RNA
tcagggctgctgggggcaaga

SEQ ID NO: 53167 - RNA, 21 nt, synthetic construct
  source 1..21: mol_type = other RNA
ctgggggcaagatgtgctggg

SEQ ID NO: 53168 - RNA, 21 nt, synthetic construct
  source 1..21: mol_type = other RNA
ggggcaagatgtgctgggcac

SEQ ID NO: 53169 - RNA, 21 nt, synthetic construct
  source 1..21: mol_type = other RNA
aagatgtgctgggcaccaaag

SEQ ID NO: 53170 - RNA, 21 nt, synthetic construct
  source 1..21: mol_type = other RNA
gcaggttcaacatgtgcttca

SEQ ID NO: 53171 - RNA, 21 nt, synthetic construct
  source 1..21: mol_type = other RNA
gtgacgactacagccactgcc

SEQ ID NO: 53172 - RNA, 21 nt, synthetic construct
  source 1..21: mol_type = other RNA
gctccacggccacgccctcct

SEQ ID NO: 53173 - RNA, 21 nt, synthetic construct
  source 1..21: mol_type = other RNA
accccctcctccagcccaggg

SEQ ID NO: 53174 - RNA, 21 nt, synthetic construct
  source 1..21: mol_type = other RNA
tgctgcccagcagccccacat

SEQ ID NO: 53175 - RNA, 21 nt, synthetic construct
  source 1..21: mol_type = other RNA
aggcccagcctggtgtccccc

SEQ ID NO: 53176 - RNA, 21 nt, synthetic construct
  source 1..21: mol_type = other RNA
gcccagcctggtgtccccctg

SEQ ID NO: 53177 - RNA, 21 nt, synthetic construct
  source 1..21: mol_type = other RNA
accccctcctccagcccaggg

SEQ ID NO: 53178 - RNA, 21 nt, synthetic construct
  source 1..21: mol_type = other RNA
tgctgcccagcagccccacat

SEQ ID NO: 53179 - RNA, 21 nt, synthetic construct
  source 1..21: mol_type = other RNA
aggcccagcctggtgtccccc

SEQ ID NO: 53180 - RNA, 21 nt, synthetic construct
  source 1..21: mol_type = other RNA
gcccagcctggtgtccccctg

SEQ ID NO: 53181 - RNA, 21 nt, synthetic construct
  source 1..21: mol_type = other RNA
gccctcctccactccagggac

SEQ ID NO: 53182 - RNA, 21 nt, synthetic construct
  source 1..21: mol_type = other RNA
accccctcctccagcccaggg

SEQ ID NO: 53183 - RNA, 21 nt, synthetic construct
  source 1..21: mol_type = other RNA
tgctgcccagcagccccacat

SEQ ID NO: 53184 - RNA, 21 nt, synthetic construct
  source 1..21: mol_type = other RNA
aggcccagcctggtgtccccc

SEQ ID NO: 53185 - RNA, 21 nt, synthetic construct
  source 1..21: mol_type = other RNA
gcccagcctggtgtccccctg

SEQ ID NO: 53186 - RNA, 21 nt, synthetic construct
  source 1..21: mol_type = other RNA
accccctcctccagcccaggg

SEQ ID NO: 53187 - RNA, 21 nt, synthetic construct
  source 1..21: mol_type = other RNA
tgctgcccagcagccccacat

SEQ ID NO: 53188 - RNA, 21 nt, synthetic construct
  source 1..21: mol_type = other RNA
aggcccagcctggtgtccccc

SEQ ID NO: 53189 - RNA, 21 nt, synthetic construct
  source 1..21: mol_type = other RNA
gcccagcctggtgtccccctg

SEQ ID NO: 53190 - RNA, 21 nt, synthetic construct
  source 1..21: mol_type = other RNA
accccctcctccagcccaggg

SEQ ID NO: 53191 - RNA, 21 nt, synthetic construct
  source 1..21: mol_type = other RNA
agtgctccccagcagcctgcc

SEQ ID NO: 53192 - RNA, 21 nt, synthetic construct
  source 1..21: mol_type = other RNA
aaacttttgaaaacatcaggg

SEQ ID NO: 53193 - RNA, 21 nt, synthetic construct
  source 1..21: mol_type = other RNA
atgtgctacaactacaggatc

SEQ ID NO: 53194 - RNA, 21 nt, synthetic construct
  source 1..21: mol_type = other RNA
cctgcaggctccacagaaccc

SEQ ID NO: 53195 - RNA, 21 nt, synthetic construct
  source 1..21: mol_type = other RNA
ccagcagccccacatcggccc

SEQ ID NO: 53196 - RNA, 21 nt, synthetic construct
  source 1..21: mol_type = other RNA
ccagcagccccacatcggccc

SEQ ID NO: 53197 - RNA, 21 nt, synthetic construct
  source 1..21: mol_type = other RNA
ccagcagccccacatcggccc

SEQ ID NO: 53198 - RNA, 21 nt, synthetic construct
  source 1..21: mol_type = other RNA
ccagcagccccacatcggccc

SEQ ID NO: 53199 - RNA, 21 nt, synthetic construct
  source 1..21: mol_type = other RNA
gctggactacagctaccccat

SEQ ID NO: 53200 - RNA, 21 nt, synthetic construct
  source 1..21: mol_type = other RNA
gctggactacagctaccccat

SEQ ID NO: 53201 - RNA, 21 nt, synthetic construct
  source 1..21: mol_type = other RNA
gctggactacagctaccccat

SEQ ID NO: 53202 - RNA, 21 nt, synthetic construct
  source 1..21: mol_type = other RNA
gctggactacagctaccccat

SEQ ID NO: 53203 - RNA, 21 nt, synthetic construct
  source 1..21: mol_type = other RNA
caaagtgctgaccaccacggc

SEQ ID NO: 53204 - RNA, 21 nt, synthetic construct
  source 1..21: mol_type = other RNA
ggagaactgcacggtggccag

SEQ ID NO: 53205 - RNA, 21 nt, synthetic construct
  source 1..21: mol_type = other RNA
tggagagctacgagctgatcc

SEQ ID NO: 53206 - RNA, 21 nt, synthetic construct
  source 1..21: mol_type = other RNA
cgctacatggggatcttcctg

SEQ ID NO: 53207 - RNA, 21 nt, synthetic construct
  source 1..21: mol_type = other RNA
cacccgtcactgtcttcccca

SEQ ID NO: 53208 - RNA, 21 nt, synthetic construct
  source 1..21: mol_type = other RNA
aagcacctgcccatcaaagtg

SEQ ID NO: 53209 - RNA, 21 nt, synthetic construct
  source 1..21: mol_type = other RNA
tggacggcggggacacggcca

SEQ ID NO: 53210 - RNA, 21 nt, synthetic construct
  source 1..21: mol_type = other RNA
ggcatccagtgcgctcacagc

SEQ ID NO: 53211 - RNA, 21 nt, synthetic construct
  source 1..21: mol_type = other RNA
tggctgcctgcccctcgggca

SEQ ID NO: 53212 - RNA, 21 nt, synthetic construct
  source 1..21: mol_type = other RNA
gatgtgctgggcaccaaagag

SEQ ID NO: 53213 - RNA, 21 nt, synthetic construct
  source 1..21: mol_type = other RNA
tcagtgccagcacggagcctg

SEQ ID NO: 53214 - RNA, 21 nt, synthetic construct
  source 1..21: mol_type = other RNA
gcgtgtccggctgtgtctgtc

SEQ ID NO: 53215 - RNA, 21 nt, synthetic construct
  source 1..21: mol_type = other RNA
gcagtgccaggacctgccgtg

SEQ ID NO: 53216 - RNA, 21 nt, synthetic construct
  source 1..21: mol_type = other RNA
gctcccaggttgactccacca

SEQ ID NO: 53217 - RNA, 21 nt, synthetic construct
  source 1..21: mol_type = other RNA
gctcacagccttgaggcctgc

SEQ ID NO: 53218 - RNA, 21 nt, synthetic construct
  source 1..21: mol_type = other RNA
ccgcccaccagggccagatgt

SEQ ID NO: 53219 - RNA, 21 nt, synthetic construct
  source 1..21: mol_type = other RNA
ggctgcctgcccctcgggcag

SEQ ID NO: 53220 - RNA, 21 nt, synthetic construct
  source 1..21: mol_type = other RNA
ctggctgcctgcccctcgggc

SEQ ID NO: 53221 - RNA, 21 nt, synthetic construct
  source 1..21: mol_type = other RNA
cgggcacccctggggccgagt

SEQ ID NO: 53222 - RNA, 21 nt, synthetic construct
  source 1..21: mol_type = other RNA
gctcccacttctctactccct

SEQ ID NO: 53223 - RNA, 21 nt, synthetic construct
  source 1..21: mol_type = other RNA
acgaggagacggtgcccttgc

SEQ ID NO: 53224 - RNA, 21 nt, synthetic construct
  source 1..21: mol_type = other RNA
ctgccctacagcctcttccac

SEQ ID NO: 53225 - RNA, 21 nt, synthetic construct
  source 1..21: mol_type = other RNA
ccagtgcgctcacagccttga

SEQ ID NO: 53226 - RNA, 21 nt, synthetic construct
  source 1..21: mol_type = other RNA
caccctgctggggccggcctt

SEQ ID NO: 53227 - RNA, 21 nt, synthetic construct
  source 1..21: mol_type = other RNA
tcccctgtgggaccaccggca

SEQ ID NO: 53228 - RNA, 21 nt, synthetic construct
  source 1..21: mol_type = other RNA
aaacctgccggaaccccagtg

SEQ ID NO: 53229 - RNA, 21 nt, synthetic construct
  source 1..21: mol_type = other RNA
gcccctggctgtgacaatgcc

SEQ ID NO: 53230 - RNA, 21 nt, synthetic construct
  source 1..21: mol_type = other RNA
cctgcagaagttggatgggcc

SEQ ID NO: 53231 - RNA, 21 nt, synthetic construct
  source 1..21: mol_type = other RNA
actccatctacacgcagctgc

SEQ ID NO: 53232 - RNA, 21 nt, synthetic construct
  source 1..21: mol_type = other RNA
gctggacgtgggctgtttcag

SEQ ID NO: 53233 - RNA, 21 nt, synthetic construct
  source 1..21: mol_type = other RNA
atgtgctgggcaccaaagagc

SEQ ID NO: 53234 - RNA, 21 nt, synthetic construct
  source 1..21: mol_type = other RNA
acctccaggaccacggccacg

SEQ ID NO: 53235 - RNA, 21 nt, synthetic construct
  source 1..21: mol_type = other RNA
acctccaggaccacggccacg

SEQ ID NO: 53236 - RNA, 21 nt, synthetic construct
  source 1..21: mol_type = other RNA
ctgaccccacagcctgcatcc

SEQ ID NO: 53237 - RNA, 21 nt, synthetic construct
  source 1..21: mol_type = other RNA
cagcagccccacatcggcccc

SEQ ID NO: 53238 - RNA, 21 nt, synthetic construct
  source 1..21: mol_type = other RNA
ccccctgcgggagttgggcca

SEQ ID NO: 53239 - RNA, 21 nt, synthetic construct
  source 1..21: mol_type = other RNA
cagcagccccacatcggcccc

SEQ ID NO: 53240 - RNA, 21 nt, synthetic construct
  source 1..21: mol_type = other RNA
ccccctgcgggagttgggcca

SEQ ID NO: 53241 - RNA, 21 nt, synthetic construct
  source 1..21: mol_type = other RNA
cagcagccccacatcggcccc

SEQ ID NO: 53242 - RNA, 21 nt, synthetic construct
  source 1..21: mol_type = other RNA
ccccctgcgggagttgggcca

SEQ ID NO: 53243 - RNA, 21 nt, synthetic construct
  source 1..21: mol_type = other RNA
cagcagccccacatcggcccc

SEQ ID NO: 53244 - RNA, 21 nt, synthetic construct
  source 1..21: mol_type = other RNA
acccctggggccgagtgcctc

SEQ ID NO: 53245 - RNA, 21 nt, synthetic construct
  source 1..21: mol_type = other RNA
gtgctgacaagcacagccacc

SEQ ID NO: 53246 - RNA, 21 nt, synthetic construct
  source 1..21: mol_type = other RNA
gtgctgacaagcacagccacc

SEQ ID NO: 53247 - RNA, 21 nt, synthetic construct
  source 1..21: mol_type = other RNA
caccctgcctaaaaacctgcc

SEQ ID NO: 53248 - RNA, 21 nt, synthetic construct
  source 1..21: mol_type = other RNA
ctcacagccttgaggcctgca

SEQ ID NO: 53249 - RNA, 21 nt, synthetic construct
  source 1..21: mol_type = other RNA
atgccctcctccactccgggg

SEQ ID NO: 53250 - RNA, 21 nt, synthetic construct
  source 1..21: mol_type = other RNA
atgccctcctccactccgggg

SEQ ID NO: 53251 - RNA, 21 nt, synthetic construct
  source 1..21: mol_type = other RNA
tatggcaacaccctcctctag

SEQ ID NO: 53252 - RNA, 21 nt, synthetic construct
  source 1..21: mol_type = other RNA
tatggcaacaccctcctctag

SEQ ID NO: 53253 - RNA, 21 nt, synthetic construct
  source 1..21: mol_type = other RNA
tatggcaacaccctcctctag

SEQ ID NO: 53254 - RNA, 21 nt, synthetic construct
  source 1..21: mol_type = other RNA
tatggcaacaccctcctctag

SEQ ID NO: 53255 - RNA, 21 nt, synthetic construct
  source 1..21: mol_type = other RNA
tatggcaacaccctcctctag

SEQ ID NO: 53256 - RNA, 21 nt, synthetic construct
  source 1..21: mol_type = other RNA
ccagcaggtggactgtgaccg

SEQ ID NO: 53257 - RNA, 21 nt, synthetic construct
  source 1..21: mol_type = other RNA
ctccagtttgggaacctgcag

SEQ ID NO: 53258 - RNA, 21 nt, synthetic construct
  source 1..21: mol_type = other RNA
tctggctgcctgcccctcggg

SEQ ID NO: 53259 - RNA, 21 nt, synthetic construct
  source 1..21: mol_type = other RNA
tctctggggacacccaggacc

SEQ ID NO: 53260 - RNA, 21 nt, synthetic construct
  source 1..21: mol_type = other RNA
tgaccaccacggccaccacac

SEQ ID NO: 53261 - RNA, 21 nt, synthetic construct
  source 1..21: mol_type = other RNA
cctggacggcggggacacggc

SEQ ID NO: 53262 - RNA, 21 nt, synthetic construct
  source 1..21: mol_type = other RNA
gggacggcgtctgcaccaagt

SEQ ID NO: 53263 - RNA, 21 nt, synthetic construct
  source 1..21: mol_type = other RNA
gggcagtgcccctgcacccac

SEQ ID NO: 53264 - RNA, 21 nt, synthetic construct
  source 1..21: mol_type = other RNA
cagctgcccctgtcggcagcc

SEQ ID NO: 53265 - RNA, 21 nt, synthetic construct
  source 1..21: mol_type = other RNA
gggagtgcagccaccggctct

SEQ ID NO: 53266 - RNA, 21 nt, synthetic construct
  source 1..21: mol_type = other RNA
ccgtgtcctgggaccggaaga

SEQ ID NO: 53267 - RNA, 21 nt, synthetic construct
  source 1..21: mol_type = other RNA
gtgctgaccaccacggccacc

SEQ ID NO: 53268 - RNA, 21 nt, synthetic construct
  source 1..21: mol_type = other RNA
gagcagcggtttcagcaagaa

SEQ ID NO: 53269 - RNA, 21 nt, synthetic construct
  source 1..21: mol_type = other RNA
gaacggagaggacagtgccct

SEQ ID NO: 53270 - RNA, 21 nt, synthetic construct
  source 1..21: mol_type = other RNA
cagcaccccggccaccagctc

SEQ ID NO: 53271 - RNA, 21 nt, synthetic construct
  source 1..21: mol_type = other RNA
cagcaccccggccaccagctc

SEQ ID NO: 53272 - RNA, 21 nt, synthetic construct
  source 1..21: mol_type = other RNA
cagcaccccggccaccagctc

SEQ ID NO: 53273 - RNA, 21 nt, synthetic construct
  source 1..21: mol_type = other RNA
cagcaccccggccaccagctc

SEQ ID NO: 53274 - RNA, 21 nt, synthetic construct
  source 1..21: mol_type = other RNA
cagctgcagggggagcctcag

SEQ ID NO: 53275 - RNA, 21 nt, synthetic construct
  source 1..21: mol_type = other RNA
acagcagtccccaccctctca

SEQ ID NO: 53276 - RNA, 21 nt, synthetic construct
  source 1..21: mol_type = other RNA
cctggaccctggagaactgca

SEQ ID NO: 53277 - RNA, 21 nt, synthetic construct
  source 1..21: mol_type = other RNA
cggagaggacagtgccctgct

SEQ ID NO: 53278 - RNA, 21 nt, synthetic construct
  source 1..21: mol_type = other RNA
acctgctccaacccccagcgc

SEQ ID NO: 53279 - RNA, 21 nt, synthetic construct
  source 1..21: mol_type = other RNA
tggacggctgcttctgccccc

SEQ ID NO: 53280 - RNA, 21 nt, synthetic construct
  source 1..21: mol_type = other RNA
tggcagtgccaggacctgccg

SEQ ID NO: 53281 - RNA, 21 nt, synthetic construct
  source 1..21: mol_type = other RNA
cagctgctggtgcagctggtg

SEQ ID NO: 53282 - RNA, 21 nt, synthetic construct
  source 1..21: mol_type = other RNA
gagtgcagccaccggctctgc

SEQ ID NO: 53283 - RNA, 21 nt, synthetic construct
  source 1..21: mol_type = other RNA
aaacctgaggcagagagggta

SEQ ID NO: 53284 - RNA, 21 nt, synthetic construct
  source 1..21: mol_type = other RNA
tggagacggccaccaccacca

SEQ ID NO: 53285 - RNA, 21 nt, synthetic construct
  source 1..21: mol_type = other RNA
cagcaccacagcagtccccac

SEQ ID NO: 53286 - RNA, 21 nt, synthetic construct
  source 1..21: mol_type = other RNA
acgccctcctccactccaggg

SEQ ID NO: 53287 - RNA, 21 nt, synthetic construct
  source 1..21: mol_type = other RNA
gcagtgctccccagcagcctg

SEQ ID NO: 53288 - RNA, 21 nt, synthetic construct
  source 1..21: mol_type = other RNA
ggaccctggagaactgcacgg

SEQ ID NO: 53289 - RNA, 21 nt, synthetic construct
  source 1..21: mol_type = other RNA
gtgccctgccagagcctggag

SEQ ID NO: 53290 - RNA, 21 nt, synthetic construct
  source 1..21: mol_type = other RNA
ttgctgaccccacagcctgca

SEQ ID NO: 53291 - RNA, 21 nt, synthetic construct
  source 1..21: mol_type = other RNA
ccagtgcacctgctgccagga

SEQ ID NO: 53292 - RNA, 21 nt, synthetic construct
  source 1..21: mol_type = other RNA
cctgcagctcctgcacctgct

SEQ ID NO: 53293 - RNA, 21 nt, synthetic construct
  source 1..21: mol_type = other RNA
tgcagctgctggtgcagctgg

SEQ ID NO: 53294 - RNA, 21 nt, synthetic construct
  source 1..21: mol_type = other RNA
cccgcccaccagggccagatg

SEQ ID NO: 53295 - RNA, 21 nt, synthetic construct
  source 1..21: mol_type = other RNA
aaccggaggtgggagtgcagc

SEQ ID NO: 53296 - RNA, 21 nt, synthetic construct
  source 1..21: mol_type = other RNA
aatgaggaccagatgaagtgc

SEQ ID NO: 53297 - RNA, 21 nt, synthetic construct
  source 1..21: mol_type = other RNA
tgaggcctgcacctgcaccta

SEQ ID NO: 53298 - RNA, 21 nt, synthetic construct
  source 1..21: mol_type = other RNA
cccaggtaccaccacctgcca

SEQ ID NO: 53299 - RNA, 21 nt, synthetic construct
  source 1..21: mol_type = other RNA
gaccaccacggccaccacacc

SEQ ID NO: 53300 - RNA, 21 nt, synthetic construct
  source 1..21: mol_type = other RNA
accacggccacctccaggacc

SEQ ID NO: 53301 - RNA, 21 nt, synthetic construct
  source 1..21: mol_type = other RNA
accacggccacctccaggacc

SEQ ID NO: 53302 - RNA, 21 nt, synthetic construct
  source 1..21: mol_type = other RNA
actgtgtcctcctcagtcctc

SEQ ID NO: 53303 - RNA, 21 nt, synthetic construct
  source 1..21: mol_type = other RNA
tttgctgaccccacagcctgc

SEQ ID NO: 53304 - RNA, 21 nt, synthetic construct
  source 1..21: mol_type = other RNA
gctgcagggggagcctcagga

SEQ ID NO: 53305 - RNA, 21 nt, synthetic construct
  source 1..21: mol_type = other RNA
ctgcagggggagcctcaggaa

SEQ ID NO: 53306 - RNA, 21 nt, synthetic construct
  source 1..21: mol_type = other RNA
ctgcagctcctgcacctgctc

SEQ ID NO: 53307 - RNA, 21 nt, synthetic construct
  source 1..21: mol_type = other RNA
agggtctgcggcctgtgcggg

SEQ ID NO: 53308 - RNA, 21 nt, synthetic construct
  source 1..21: mol_type = other RNA
gatgtgcggcctgtgtgggaa

SEQ ID NO: 53309 - RNA, 21 nt, synthetic construct
  source 1..21: mol_type = other RNA
ccagtgcggcacctgcaccaa

SEQ ID NO: 53310 - RNA, 21 nt, synthetic construct
  source 1..21: mol_type = other RNA
ctgtgcgggaacttcgacgac

SEQ ID NO: 53311 - RNA, 21 nt, synthetic construct
  source 1..21: mol_type = other RNA
acagtgccctgctggagctgg

SEQ ID NO: 53312 - RNA, 21 nt, synthetic construct
  source 1..21: mol_type = other RNA
gacgacctggatcctcacaga

SEQ ID NO: 53313 - RNA, 21 nt, synthetic construct
  source 1..21: mol_type = other RNA
gacgacctggatcctcacaga

SEQ ID NO: 53314 - RNA, 21 nt, synthetic construct
  source 1..21: mol_type = other RNA
gacgacctggatcctcacaga

SEQ ID NO: 53315 - RNA, 21 nt, synthetic construct
  source 1..21: mol_type = other RNA
gacgacctggatcctcacaga

SEQ ID NO: 53316 - RNA, 21 nt, synthetic construct
  source 1..21: mol_type = other RNA
gacgacctggatcctcacaga

SEQ ID NO: 53317 - RNA, 21 nt, synthetic construct
  source 1..21: mol_type = other RNA
ggacgacctggatcctcacag

SEQ ID NO: 53318 - RNA, 21 nt, synthetic construct
  source 1..21: mol_type = other RNA
ggacgacctggatcctcacag

SEQ ID NO: 53319 - RNA, 21 nt, synthetic construct
  source 1..21: mol_type = other RNA
ggacgacctggatcctcacag

SEQ ID NO: 53320 - RNA, 21 nt, synthetic construct
  source 1..21: mol_type = other RNA
ggacgacctggatcctcacag

SEQ ID NO: 53321 - RNA, 21 nt, synthetic construct
  source 1..21: mol_type = other RNA
ggacgacctggatcctcacag

SEQ ID NO: 53322 - RNA, 21 nt, synthetic construct
  source 1..21: mol_type = other RNA
caggtgctgacctgcagcctg

SEQ ID NO: 53323 - RNA, 21 nt, synthetic construct
  source 1..21: mol_type = other RNA
acgacctggatcctcacagag

SEQ ID NO: 53324 - RNA, 21 nt, synthetic construct
  source 1..21: mol_type = other RNA
acgacctggatcctcacagag

SEQ ID NO: 53325 - RNA, 21 nt, synthetic construct
  source 1..21: mol_type = other RNA
acgacctggatcctcacagag

SEQ ID NO: 53326 - RNA, 21 nt, synthetic construct
  source 1..21: mol_type = other RNA
acgacctggatcctcacagag

SEQ ID NO: 53327 - RNA, 21 nt, synthetic construct
  source 1..21: mol_type = other RNA
acgacctggatcctcacagag

SEQ ID NO: 53328 - RNA, 21 nt, synthetic construct
  source 1..21: mol_type = other RNA
cctggatcctcacagagccga

SEQ ID NO: 53329 - RNA, 21 nt, synthetic construct
  source 1..21: mol_type = other RNA
cctggatcctcacagagccga

SEQ ID NO: 53330 - RNA, 21 nt, synthetic construct
  source 1..21: mol_type = other RNA
cctggatcctcacagagccga

SEQ ID NO: 53331 - RNA, 21 nt, synthetic construct
  source 1..21: mol_type = other RNA
cctggatcctcacagagccga

SEQ ID NO: 53332 - RNA, 21 nt, synthetic construct
  source 1..21: mol_type = other RNA
cagcccagttttgcaaataaa

SEQ ID NO: 53333 - RNA, 21 nt, synthetic construct
  source 1..21: mol_type = other RNA
tgacctgcagcctggagacgg

SEQ ID NO: 53334 - RNA, 21 nt, synthetic construct
  source 1..21: mol_type = other RNA
catcccaaagccccctctgct

SEQ ID NO: 53335 - RNA, 21 nt, synthetic construct
  source 1..21: mol_type = other RNA
tgcagcctggagacggggctg

SEQ ID NO: 53336 - RNA, 21 nt, synthetic construct
  source 1..21: mol_type = other RNA
cctggatcctcacagagccca

SEQ ID NO: 53337 - RNA, 21 nt, synthetic construct
  source 1..21: mol_type = other RNA
aggcagagacccagggccctg

SEQ ID NO: 53338 - RNA, 21 nt, synthetic construct
  source 1..21: mol_type = other RNA
ggcaggtgctgacctgcagcc

SEQ ID NO: 53339 - RNA, 21 nt, synthetic construct
  source 1..21: mol_type = other RNA
ggtgctgacctgcagcctgga

SEQ ID NO: 53340 - RNA, 21 nt, synthetic construct
  source 1..21: mol_type = other RNA
tgctgacctgcagcctggaga

SEQ ID NO: 53341 - RNA, 21 nt, synthetic construct
  source 1..21: mol_type = other RNA
gacctgcagcctggagacggg

SEQ ID NO: 53342 - RNA, 21 nt, synthetic construct
  source 1..21: mol_type = other RNA
gcagcctggagacggggctga

SEQ ID NO: 53343 - RNA, 21 nt, synthetic construct
  source 1..21: mol_type = other RNA
gatcctcacagagctgaccac

SEQ ID NO: 53344 - RNA, 21 nt, synthetic construct
  source 1..21: mol_type = other RNA
gatcctcacagagctgaccac

SEQ ID NO: 53345 - RNA, 21 nt, synthetic construct
  source 1..21: mol_type = other RNA
gatcctcacagagctgaccac

SEQ ID NO: 53346 - RNA, 21 nt, synthetic construct
  source 1..21: mol_type = other RNA
gatcctcacagagctgaccac

SEQ ID NO: 53347 - RNA, 21 nt, synthetic construct
  source 1..21: mol_type = other RNA
gatcctcacagagctgaccac

SEQ ID NO: 53348 - RNA, 21 nt, synthetic construct
  source 1..21: mol_type = other RNA
tccacggccacaccctcctcc

SEQ ID NO: 53349 - RNA, 21 nt, synthetic construct
  source 1..21: mol_type = other RNA
tcacctgcccacccaccaaag

SEQ ID NO: 53350 - RNA, 21 nt, synthetic construct
  source 1..21: mol_type = other RNA
gctcaacccagcccagttttg

SEQ ID NO: 53351 - RNA, 21 nt, synthetic construct
  source 1..21: mol_type = other RNA
agcccagttttgcaaataaac

SEQ ID NO: 53352 - RNA, 21 nt, synthetic construct
  source 1..21: mol_type = other RNA
gcaggtgctgacctgcagcct

SEQ ID NO: 53353 - RNA, 21 nt, synthetic construct
  source 1..21: mol_type = other RNA
gctgacctgcagcctggagac

SEQ ID NO: 53354 - RNA, 21 nt, synthetic construct
  source 1..21: mol_type = other RNA
cctccatccccatgctctgtc

SEQ ID NO: 53355 - RNA, 21 nt, synthetic construct
  source 1..21: mol_type = other RNA
cgctggtgttggctctggcgg

SEQ ID NO: 53356 - RNA, 21 nt, synthetic construct
  source 1..21: mol_type = other RNA
gcgtgtccactgtgtcctcct

SEQ ID NO: 53357 - RNA, 21 nt, synthetic construct
  source 1..21: mol_type = other RNA
cctgcagcctggagacggggc

SEQ ID NO: 53358 - RNA, 21 nt, synthetic construct
  source 1..21: mol_type = other RNA
gagctgccacacgctggacgt

SEQ ID NO: 53359 - RNA, 21 nt, synthetic construct
  source 1..21: mol_type = other RNA
gggagagcctgtggcccacct

SEQ ID NO: 53360 - RNA, 21 nt, synthetic construct
  source 1..21: mol_type = other RNA
ctgctcaacccagcccagttt

SEQ ID NO: 53361 - RNA, 21 nt, synthetic construct
  source 1..21: mol_type = other RNA
tcgggcaggtgctgacctgca

SEQ ID NO: 53362 - RNA, 21 nt, synthetic construct
  source 1..21: mol_type = other RNA
gcagtgcaagcccctgccctg

SEQ ID NO: 53363 - RNA, 21 nt, synthetic construct
  source 1..21: mol_type = other RNA
gggtgaggggccagcaggacc

SEQ ID NO: 53364 - RNA, 21 nt, synthetic construct
  source 1..21: mol_type = other RNA
atgtgcttcaactatgaaatc

SEQ ID NO: 53365 - RNA, 21 nt, synthetic construct
  source 1..21: mol_type = other RNA
atgtgcttcaactatgaaatc

SEQ ID NO: 53366 - RNA, 21 nt, synthetic construct
  source 1..21: mol_type = other RNA
atgtgcttcaactatgaaatc
